United States Patent Application Publication US 2011/0214205 A1 - sequence listing, part 9

SEQ ID NO: 29184 - DNA, 612 bp, Setaria italica
  Peptide Sequence Number=SeqID_95158
tagactaggaagaaggtaaccaagagtagacaataggggccaggctgccgaaggacaagatattggccagcgacgataggccgtggatcatcccgaacttgcggttcatcgccgctagggctgggctcctcttcgccgtctccgcgttcttggagtatccaacctcggagccaatgccgaggtccttctccatcttgtgcctcttcatcatcatctcaacagtcataggcgtgaagaccagaaggtttgacaggttacagccaagggctgaaagaaggaatccaagctggtagctctcgatggttgacgctgtcttccagggatgcaggtatgcaaatgctgccacagatatcgctgaacacgctgatattaacatgaagtacgcagggaacattttcccctgaagactcccaaattggtgcctcggcaagtacttgaacatgacgatgccgccgatgaaggtgacccagagcccggcgccccacgcggtggcaaaggcgaggaggtggaccagcctcgctgccgcagcggttcctccgccgtcgctggagccactgaggcgcagcgcgtcgggcgcgaagaggaccccagcggccaggaacgcaccgccgt

SEQ ID NO: 29185 - DNA, 931 bp, Setaria italica
  Peptide Sequence Number=SeqID_95159
aaacagcatatgctggtcatgcaaaggttcttgcttctactgttgacctcaaaaaattccctgatggtattgtatgtgttggtggcgatggaattgtaaatgaggttttgaatggtttacttggtagagatgattttgaagtggcaattcgacttcccattgggataatacctgctggttctgataattcgttggtgtggactgttcttggcatcaaggatcctgtttctgctgcaattgctttagctaagggcagtttcacaccaatagatgtgtttgctgtaaaatggatccaagcaggtgttactcattttggtttgacagcttcctactatggttttgtagctgatgttctgcaactatctgaaaacttccgcctgcagcttggtcccttccgatatgttgctgctggccttctgaagttcctttcattacctcaatacagatttgaggttggaatatctgcctttatcacctgggacaaatcctgagctgaaatcaccgactgaaaaaagtcatgagcaactttctgacgatggcaaggttacgggaggtatacaacttgatggtaggattggagatagctgggttaccaggaaaggggagtttcttggcatttttgtctgcaatcacttttgcaagcctgcacgggggttactttctccaattattgcaccgaaagctcagcatgatgacggcagtctggacttgattcttgtccgtggaagtggcagactcaaactattttgcttcttcgtcgcctatcagctttgctggcatctcctactcccttatgtggaatatgtcaaggtgaaacaagtaaagattaggccggttggcaatactcacaatggttgtggtgtcgatggggagcttcttcgcggagagggcaaaaccgaatggcagtgctcgctgcttccagcacaaggcc

SEQ ID NO: 29186 - DNA, 263 bp, Setaria italica
  Peptide Sequence Number=SeqID_95160
tggatcataagttgtggaaacttgtcctcttgcttggggaatcttatttggcacttggagaggcatacaagaatgatggtcagcttcagcgcacccttaaagttgttgaattagcttgtttggtttatgggtctatgcctggacatcttgatggtgatgagttcatctcatccatgtccaacagttcattgggtcgggaagatgcttgtctaaaaaccaaacttgtactggatgaggcaggctattgcaaaagcaccaaatgc

SEQ ID NO: 29187 - DNA, 450 bp, Setaria italica
  misc_feature (433)..(433): n is a, c, g, or t
  Peptide Sequence Number=SeqID_95161
gggaggagaggatcatcgtcttcacgaccaattacaaggagcggcttgacccggcgctgctgcggccatgccacatatccggagattgagaagctgatgaaggaggtgatggtgacacctgcagaggtcgctgaggttctgatgaggaatgatgatgctgatgtcgcgctccatgatctcatcgatctcctcccgcacatcgtcgccacggccaaggccatgaaagaccagcaccggaacctcaagatgcacatgatcgagtacgacgcctggacagccgtcgacctccgccacccgtccaccttcgacacgctcgccatggacaagaagctgctctacggaccacctgggactggcaagtcaagcctgatcgcagcgatggcgaattacctcaagtttgacatctatgatcttgagctgaccgaggttaaancaactcggacctcggag

SEQ ID NO: 29188 - DNA, 290 bp, Setaria italica
  Peptide Sequence Number=SeqID_95162
aaggccaagatccaggacaaggagggcgatccctccggaccagcagaggctcatctttgctggcaagcagcttgaggatggccgcaccctagctgattataacatccagaaggagagcactctccacctcgtgctccgcctgaggggtgggatgcagattttcgtgaagaccttgactggcaagaccatcactctggaggttgagagttctgacaccattgacaatgttaaggccaagatccaggacaaggagggcatccccccagaccagcagcgtctgatctttgctg

SEQ ID NO: 29189 - DNA, 612 bp, Setaria italica
  Peptide Sequence Number=SeqID_95163
tcttccgccttgaggggtggagagtgctctccttctggatgttataatcagctagggtgcggccatcctcaagctgcttgccagcaaagatgagcctctgctggtccggagggattgcactctccacctcgtgctccgcctgaggggtgggatgcagattttcgtgaagaccttgactggcaagaccatcactctggaggttgagagttctgacaccattgacaatgttaaggccaagatccaggacaaggagggcatccccccagaccagcagcgtctgatctttgctggcaagcagctggaggatggccgcacccttgccgattacaatatccagaaggagtctactctccacctggtgcttcgtctccgcggtgggcactaaactgggcactaaactattcggtcatcggagctgctgttcctgggttgtctggtctctgccatgaagggtgtcgtctttgaagtatctgtggtgtttgtgtagttgtctctggttgtgtctgtgtttacctgaaacagttgttgcggtggagcagtatggtataaccatgaataagtgatgtttgaacttaaatctgtgcttccgtttggtttacaatttaaaaaaaa

SEQ ID NO: 29190 - DNA, 270 bp, Setaria italica
  Peptide Sequence Number=SeqID_95164
tgtgtcgtccgttggcagtctcttttagttttttgtatgcaaaatgatccatgttaccattgcattgtacaatgttatggagagagagagatctagtctatatagaaaccaaataaaaaaaatggagatccaagctctgatcatccaaatgcaccgccccccaccaacccaatgcaagaagaactcaactcactcccaatggagatctcaatcaaatcaacaaaagaaaagaaggacgagagaggatgctaataactaattagctatcac

SEQ ID NO: 29191 - DNA, 501 bp, Setaria italica
  Peptide Sequence Number=SeqID_95165
ggcgttctgggccgtgccgggcgagggcatccggtccgtggggcaggcggcgggggcggcgctcggcttcgcgcagatgcagtgcttcctgctcacgctgcgccagctcaagcacgccgccttcgcctactacgccgtctggatctggtcctgacccggaccggacccgggaccccccacgggcggcgacggcgatgcccgatgtgcgcgtgcatgccgcgctggtccgttgacacgccgcatctcgatcgcggaataatgggcggctcgccggtttgggaactttaaggaggctggtcctggccgatcatatatggcatcgtatccggaggctagctgcagccgccgtgctcttgctcgccgttgacagggacggacgacggcgacccgagcgtagtggcgccacgctactgcgctcgtattcttcgcactcgtcccggcggcttccaggtgatcgatgaagcaacgccacgcgcattcgttctcgcccgtgagcgagag

SEQ ID NO: 29192 - DNA, 767 bp, Setaria italica
  Peptide Sequence Number=SeqID_95166
acgacagtagggtgacgaagaccgccgacggcgcggtgcgacaggacggcgagctgcggcgcccacccgcgcaccacgaggccgcgccccgccgtgcgcgcctccagggcgtccagccactcccgcacctccggcgccgccgcctcgcgctccttcaccacccagaggaacgacctgccggagtcctcgaggccatggccgatctcgaacagctgcttgggtagcttccgcgcgacgctgccgaagctgacgtacacgacggagccgggagcctgctcgtccagccacgccatgatcgcctgcttgccatcgacggccgtcttgccgcgcgacgttgtggagtcctcgtcccggttgcagaggctcagcgggccgagcgcccacaccggctttcccagcgccgcctcgtagccctcgagaaactgggcctcgaggtccgagaacgtgttcaggaccgcgccgtcggccgtgcgcatggcctccatggcctcacggcgcagcaactcggtcccggggtagcaaaacagaccaggtggtgtggccttcgtgaccgtgacgggcaccggcatccccggcacgagatgccgctcgtcgtcgccggcggcggcgatcagctcgagcagcccgtgatcgacggccatgatttcgcagagcgcgaagaagcacgacggcccgtggaagaacagccgcgggatgccgaggctgctggccacaccggccgtccacgggctacaccagtcggagatgatgcagctcgggcgcggccg

SEQ ID NO: 29193 - DNA, 728 bp, Setaria italica
  Peptide Sequence Number=SeqID_95167
ctcaatttcaatagggctggcttgcggttcatggagccgagctcataattacatcataaaaatgatttttttcagattaagacatcatcaaaatgatactaagaactctacaagcttcccaaatcttaacgctatgaacattcctggaagtcctgcggttttaactttttattggagaaggtaacataaagaattcaatcaagtgaaaacaacagattgtgacaacccaatgtcaccaatctgctacctacccagcagcatatctgccattatcttggatactgaccttgatcttggaggagggttgacgtcgacttaagaagtgagactccaccatatcatcatgcaaaacgttggagattggcacgccacaaattatgcccagctagcacaagctgggaaaaaaaagaaccgaaaaatagtgtacggtaacctgtcagcaacggttcagtagggataaatgtgtacctttcttccgagtcaaggtgccagagaggagagggcaaaggctacatgccaaagaccaggcccgggtagctctcagccacaatccatggggacttttctcctatatctatcaggtttttctttgataggttgataatcgaatctgctataactcgggcgcttgacttcatatagcctcctgatgtcagcatgaggaggggaatactctgatcctttgcaatctaaaacctttcatctcgaatagccacaccctctggact

SEQ ID NO: 29194 - DNA, 1199 bp, Setaria italica
  Peptide Sequence Number=SeqID_95168
taattaaaggaaacttagattcactgctggatccatctaagcagtagactgcacatagaagactgacagctgactcgcagatgattagtctaatagcatgagctttcacatgtaaatgaagaaatgtcattgggtcaatcttccaaataaacagggttgatgacagttaaggtacataatatgaacattgcacgattgacaatgggtccctcaataagtcaatgcatgaaagcattcacatcaaacaattaccaagggtcaggttgatatgtgcaagtaccgaatcagcataacattttattatacactaggcacatccatcaagcatacatagttatcaccattatcaatttctatacagcgggtacctatatctatcaggtttttctttgataggttgataatcgaatctgctataactcgggcgcttgacttcatatagcctcctgatgtcatagtctggaggggaatactctgatcctttgcaaatctaaaaaccttttcatctcgaatagccacaccctctggactaacctttagcctgcctaaaggatcaccatctagaatatcagttccagcattatacacaatcaactggggcagaaatctactttcagctacaggttacattgagagccttatcaagattctccaaataatcttctgtttttgtcccactatctaactcgaccttttgatcaatgtatttcttagccacatgatcaaaaggatatattccagaattgtacatgtccaaagtgtaaacccttccatcaccgccaaagtctttttcatgaccatttccttggtgagcatctagatcaatgatcattactcttgaaatatttaaacagacgaaagcaaaattggatgcacagggaaatatcagcatatgcacaaaatccaccccttcctctgctgaacagtgatggcctccaccaatgttgatagcccatcccctttctagtgcaagtttggctgataaaacagagccacccacctgcttccgaaatgggtaaagaagtttttgctgaacaagcaagttagggagcagcgccactgctggaacctctacaatgcgggcaacctcctcgctgctcttaaggctgttcaagtatgactctgagtgcaccagaagcagatcatcctccgaggcttccagcggctcgacgatccggtcgctctggaggagccccgcg

SEQ ID NO: 29195 - DNA, 509 bp, Setaria italica
  Peptide Sequence Number=SeqID_95169
ttgacgactgaccctcgtcgccattctgatgatcgatttggggagttgtctccacgaattgcaaccatgcatatcactaggatatccttgggttagttgaccattcccaggaaacggctgctgttgcaaggttgaaaccgaggcggcctgatcaaactgattcaaattgttgtgaaggttctgcgagataccaagcccaaagttgtgaccaagtacataatgtccctgcattaattgatctggaatgaactggttggaagtattccttggttctgtctgtatgtttcctgatgtgatattcagctctccacttggtccaccctctgtttcatcaggttgcccttttctcgctttctttcgtttattggtttccaaatcatttctacggcgagcgacttcacacttcttctttccagtagaacctagagcttcatggctactattaagtaggtagtcattctgggccatgtgagttaattggtctgtaaaggaatgtccagatgacttat

SEQ ID NO: 29196 - DNA, 689 bp, Setaria italica
  Peptide Sequence Number=SeqID_95170
agtccttcaccatcataggtttatttactcggtggcggtaccaggacgcctccatccagaagaccagaatatctgacaggctgcaacgcgcccgctgtggcggaccaaacgatgggcacccaccgcatcaggcgtacgtgtttgcgacgtcggcgaggtgccccgcgagctcggccggcgcggagaacatggccatgtggtcggcgccggcgatcgccctgacctcggccacggggcagccggcgatcatcgcccgctggtagggctcgagcatggcctggtcctggtcgcacaccacgtacaccttgcgcaccgcgccataccgcgcctcgctgaacggcggctggccccgcaggtcggccacgtagtgggagctcacccgggccaggctctgcgacagcgtgtagtcctccggcgggctgagctggtagagcttctcccgcaggaactcaggccctaggaacaccgagggcgggtcgtgctccgcgtccgtcacgctgtccatccagtccgtcagggtaagcttctcgatgacatgcgagcgcgggttggtgcagtcgggcaggaacgcggtgacgaacacggcggccgcgaccttgtccgggaacgcctcggcggcgagcgcgacgctcatgccgccgaagctgtggccgaccaggacggcccgctcgccgtcggggagcgcctgg

SEQ ID NO: 29197 - DNA, 255 bp, Setaria italica
  Peptide Sequence Number=SeqID_95171
ccgatgcgctgcagcggcgtcggcgtgtgccccgtgagccgccgccagagcgggaggagcgcgcggtcgaggaggatgagggaggcgacgatggagacgaggatgacgacggtcatggagcccgccggcacggtgaagccgccgagggcgcggtccatggcgagcgcctgcaggacggtgaagttgatctgcgtgccgaacgcgacgctgaggacgatggacgagctccacagcggcaggatgccggacccacgg

SEQ ID NO: 29198 - DNA, 354 bp, Setaria italica
  misc_feature (1)..(34): n is a, c, g, or t
  Peptide Sequence Number=SeqID_95172
nnnnnnnnnnnnnnnnnnnnnnnnnnnnnnnnnnattttttcctttttgttttatttttatttagttttgaagagatatgcatcattatggtaagtcggctgatccagaactggtggtgatggagtaatgaacttggggcaagcatacgagaatagttcatcataggcagcatatgcttcatcatcatacctctgcatctttgtcatcttgtcattatacttttctttcagctggctgctaacattttcatctataagcttgttctgttggcaatttgcctgtcgttgtgcccacagaacaagctttcagctggctgctaacatttttcattctataaactactcacactgtag

SEQ ID NO: 29199 - DNA, 1991 bp, Setaria italica
  Peptide Sequence Number=SeqID_95173
ttttttttttttttttttagtttccaagctaggagaagattttctttatagcttctcaataacaaagtaatcgacagcgagaccattcttgcatgttgatatgcccatccaggcaaatagcagacccatataagtatcccaattcaactaattgagcctgaacgagttgcaaagtagaattcagcaaaaaagaaaattacaaaatgatcgggtctcaactaagtcacatggagtacaaaaggcacaaacataactcgctaataccagccaccataaatgcctcttcctatattagcaaaaaggaagcagcgacattttcctccatgatcactaccaggctcagtcaagctgtactttctccaattcacccatcatttcctcaaacttcaaaatttgtctcaaaaagtaatcaccatgactctttgtaggtttggactccacaacatgaataatatcctcaacaatgtagaaatcaaagtctgcactggatactatctttccatcactgtcaactgcatgcattttgtgcttgtatgtcatcaggattgactttagtgttgcctcatccacttccatgtattgggcaagtttgccaatggttattgttgaatatagtttcagataactccggatcccggaaagcaactgctgctgctttacttcatagaggaataacttcaactgaagacgatatgcatcctgattatagtttgtaagcggctgatccagaactggtggtgatggagtaatgaacttggggcaagcatacgagaatagttcatcataggcagcatatgcttcatcatcatacctctgcatctttgtcatcttgtcattatacttttctttcagctggctgctaacattttcatctataagcttgttctgtgggcacaacgacaggcaaattgccaacaatgcatacatctgctcatttttcttcagtatctgatcatactgaggggacttctggtggtactgcttgtacttgaggatatatagcagaattttgttgaattcacgtgtcgcatcaacatacctgcgcatcataaggtttgcgaagccatagtgatagatggtggagatgtggctcccaatgacaatggtgtagaccccttgctggttgaggtcaatgggtgcgaggcacttgagcccagtgtggtaatccccaaggaggcagtgtatcctgagcagcccaatcatgctgtagtagccgagcaccttgagcacattgctcccaccctcgtagtcgtagccgtcggtggcggtgaactgctccaggccctccttctccctctcaaggatctgcgtgatcatggacttctcgaccagcgcctggaggtagttgaggacgccatacacattccaagccttgtcgaactgcttgagctgctgcagctcgtcctcggtcttgttcttgagcttggcgcggtactggcagaagctctggaactggtatacgaactcgtcgaccatgtcccagagccactggttgggcagctgcatgttgaccacgccgtgcaggacgacgctgaagaggtcgcagtagttggtccacgactcggcgcggtgggccgccgtgagcggtgagaggcgcgcgtgtgcgtggcggtaccagagctccctgtagaggaggaggaagacgtggtcgccgtcgcagtagggcgcgacggcctccgcggagggccagggcgcgtcgcggaagaggcggtcggagaggcgctggaagccgccctcgtacatctggtggatctcgtagacgttcttgtcgcggatgtggcggtagaggtgcacgacgaaggtcttgacggagtccgggacgtagttggggtcgtaggcgtccggcgcgtgctgcggcggcgccggcgccaggccgtcctcccggtcgtagggggccgccatggtgtgggaggggaggacgggaggaggggttagggttcggggggggggcgcggcggcggcggcgcggggggaggggagggatggagtaa

SEQ ID NO: 29200 - DNA, 487 bp, Setaria italica
  Peptide Sequence Number=SeqID_95174
tggcgacggggaaggagccgtcggacgactacttcaaggaggtggacgaggtggggatcgtcaggtggctccgccgcgtggtgcagtcggggaaccacgccgaggccatcgacgcggccatcgccggcgctgggtacgacgagcagatcgtgctcgtgctacgcatcgccgtcttctgcacccaagacgaccccaaggagcggccaagcgccaaggacgttcggtgcatgctgtcgcagatcaacaactagtcgtcgaattgcttgagaaactacgcaataattcagtgtgcttgtggaaaatatggccatattgtggaatcttgctagtgctgggtcaagtcgtcgcgtcaactgtcacaggtggggccggcagactaggactgggcatttaaagcatgttggatcaggacagaaaaaatacgaaagagaagtcagcgcacgcgctggactaggaccggccgggcgggtaagtaaaaaaaaaaaaa

SEQ ID NO: 29201 - DNA, 1224 bp, Setaria italica
  misc_feature (1)..(97): n is a, c, g, or t
  Peptide Sequence Number=SeqID_95175
nnnnnnnnnnnnnnnnnnnnnnnnnnnnnnnnnnnnnnnnnnnnnnnnnnnnnnnnnnnnnnnnnnnnnnnnnnnnnnnnnnnnnnnnnnnnnnnnntttttggaggagaagtgatcatattccttatttcattgactagaacaacaaacaacttcagttcgcatccatatcattatcatagggatgccgttttattcgtacacacgcatacacggtagtatatactccgatccgcagctgtagaccagcgatatatacgatcaggcccatcccttgacgacgccgctccagcgtgtcttcttgtcggcgaacctgtcccagaccatgaccccgccatagttgttcgccttctgcaccttgggcagcaggtcgtagtacaggtacttgaggtaaacggcgacggtgccctgcgccccctccggcacgccgctctccgccggcgcgaggcccaggtacacctgcgtcctcggaaacgccgccgtccacttctcccactgccctaccacgccgtacgtcccgcccttccccagcgagcatgtgtcgttgccgtagaacctgacgtggatgcgctcgaacagccccgtccggagcgccgcccccaggcggcggtcggggaacccgcaccgcggcgtcgccgtcaggcgcacacccttccggccgcggtagaaccggttgtacccgtcaaggcgcctggccagctcgtcgtagtggtcgggggcgccctggtcgatgtagaagtcgatgccgtcgacggcggcgtcgccgaacgggcgatacacgccgttccggcgcccgccgaggtgcgcgttccagaggttgtcggcgacggctgcggcggaggcggaggacgggagggagtagccgttcccgggcccgccgatggagaggaggacgaggatgttcctggactggcagtgcttgatgtcggcaccgacgccggcgagagggtggccggagaggtcgccccagtagcggccgtgcccgaagacgctgtagaaggagatgacgacggtggagtagagccccgtgtcgcaggcctcgcgcagcgtgccctcgccggcgttctggccccagaacacggtcagctggcccgtctgcttcgccgtggcggcgccggcgagacaggagacaagcacgaaggcgatcacgagcgggtggagagcgagagggcgtcggaacgccatggcggaggtttgcagtgagatggttctggaatgtttgtt

SEQ ID NO: 29202 - DNA, 697 bp, Setaria italica
  Peptide Sequence Number=SeqID_95176
tacgagattataatggtgactgtcgaaacttggttctgcagagcgctttctcaaagctgtgcttgatataccatttgccttcaaaagagttgatgccatgctataccgagccaatttcgagactgaaataaaattaacttaaaggaaaatcttttgaaacgctagaggcagcctgcgaagatcttagaggcagtaggttgttcctgaaactcctcgaagcagtgctgagaactgggaaccggatgaatgttggcacaaaccggggtgaggccaaagccttcaagcttgacactctcctaaaacttgctgacgtcaagggcactgatggtaaaacaacgctattgcattttgtcgtccaagaaatcattcgatcagaagatgcaaaatcagaaaaagaaagtgccattgttattcatagctctaaagatgagcagttacgaaggcaaggcctgaaacttgtgtccgggctcagcagcgagctggaaatgtcaagaaagcagctatgatggacttcgatgtgttgcacggttatgtgaataagctagaaacaggccttgaaaagatcaagtcagttttgcagctcgaggggcaatgcacccaagggcagaaattctttacgacaatgcaaagttttctgaaggaagctgagaaggagatcgagcaagtgagaggcgaggagaagagggctttggtgaga

SEQ ID NO: 29203 - DNA, 625 bp, Setaria italica
  Peptide Sequence Number=SeqID_95177
aacgcggccgcttttcctcctgcgaggggtttcatcatcgtcggtagagcttctttgccttctgtaggcactatcactggccctgtccttggatcttctcctaggaggtgaatcttccatgtcagtattgctgctcttccacctgggtggtggtggaacctgataacgtgtcatataccgcccttcaggtggtggtgggatcccaagcttcttcagtttgtcataagactcataaggaataggttgcctattttagacaaaacgatatgtcaaaaaagttctaactctgcagcacattgtcataaactataatgaactgtgtctgtgtaggcaaaaatactggatataagacatgggcatcttgtgatcatacaagggagcacgaaatggcctctctcggcctccaaaccgaagctgtccagattctttccttcctccaagcccccctcctagtctccttggtatccacccaggcatgagctgttgcctgtagtaatctgataggcacgacgcatctctctgtcagtttcatactcaacaaatgcataaccacgagaagcaccagtaactgcaaacaaagtagtctgctcaaagtgaggtaccaaaatcagagagtaattgttgt

SEQ ID NO: 29204 - DNA, 818 bp, Setaria italica
  Peptide Sequence Number=SeqID_95178
ggcctgcggtctctgtgctcagagtgtctgctctcgtatgcatcctccgtgtgatgccggtggtgatgcatataccgatctgggctgcgacccgattcggttgaagttctctctcttttgcagctaccatcctcatctgatggagatacttcacccggttctcggcttcgtctccgcttacgatgaccatcgtcatgtccggtgggcttcctctgactgctgtagctgctgtcctccctagcaacagatgaccttgcactccttcggctttgtgattcttctcgcacgttgtggccgcttttcctcctgcgaggggtttcatcatcgtcggtagagcttctttgccttctgtaggcactatcactggccctgtccttggatcttctcctaggaggtgaatcttccatgtcagtattgctgctcttccacctgggtggtggtggaacctgataacgtgtcatataccgcccttcaggtggtggtgggatcccaagcttcttcagtttgtcataagactcataaggaataggttgcaagggagcacgaaatggcctctctcggcctccaaaccgaagctgtccagattctttccttcctccaagcccccctcctagtctccttggtatccacccaggcatgagctgttgcctgtagtaatctacaatcacttcactgccgtcaataatggaatggtgtgcatcctgataggcacgacgcatctctctgtcagtttcatactcaacaaatgcataaccacgagaagcaccagtaacaatgtcacgcaccagccgcatgctcttcaccttcccatacctgct

SEQ ID NO: 29205 - DNA, 1410 bp, Setaria italica
  Peptide Sequence Number=SeqID_95179
tttttttttttttttgttttttgagcttgaagattaataggaatgtcatgctctcactcacttgtgaaatcttctgaatagaaaccatcatatcagcaacggtaaaatgaacaggaaagttcatgttctggagcacaatgttgggtagaaacagttccgtgttgtgttcttccgcgcctctttggtaaccatgacagtatacctttactccacaaggcacaagcgcattggctgtgtgttcttcaaccagtcccaagctggcttcctctgcttcaagatcttcaccgactattcgtactcacaacaactggggtttttgtttttagtgtacagaaaattgcatgcactgatacatgtacgtttcggtgtcaaaattcacatgccagaacgctctgaacattggcacattgccttattcaagcatacaaaagcatccacattttttttgtaaaaaaaaagaaagtgttcgacagttactccgacttgtcctcggagtttatctgctgcgctagcaacagcagacccagagctgtgaataaggataggccggtagaagtgtagccaagaacaagcagcgccaccttgagcgacttggccagctgcaatgcactgtcgtttgcgtactgcttcgtactgtccggaatgccttgcacgccttgtgctagttgccatgagataaatccgaaaactgctcctgctgcagcaccgatattggccttttcagctgtcagttcgaactcaagttctccaaacttcagctttcttttttctttcatagcctgaacatcagattgaactactgggcgtgtcgacagtagcttaccattcttgatcattgtttcagcaatcttcttgaactctccctggccgtactgccccattgactgaaacctccgtccagttgacaccagccgcttgccaaatgctgatttggcgctgcgcgtcaggtaaggctccatcgatggcagctgcttggcaaggctatttgatgttgatgtatcagccaactcccatgattttgccaggttcaggagcagatcaccgacttcttgaccacactcatcaagaactggcccattggagagatcaaacgcagcatcattgaggtcgagacgaaggtcccgggggagctgagagaggaacttcggtggaagaaccaagcaatccgcgagttcttggaggagcggcaggacaggcggctcctcgtcggggttgccgccgccgccagaagtggaggcgacgggcttgggggagtcggaagacaccgcgaggacaggatgtgggggccgacgtcgccggatacggaactgggagggtccggtggcgccggcgccggcgggaaggagcgcggcgaggagtgggcggcggaggacggccgtggccattcgaaaacagcgatgtgtttttttc

SEQ ID NO: 29206 - DNA, 430 bp, Setaria italica
  Peptide Sequence Number=SeqID_95180
ctctgagacacgatcttcattggaaaagataatctctgagcaactaccgcaacagaaccactcccctctggcaattcctttagttcttctgtcatcacaaattgaacacgtactgtgtcaacattgcctcgagtcaaagcaacctcaagatcctcctaccccatcatatccatgtaagagcaattccagtctgactccgagttccaaggaagctttgctaaagaatatatcatcaagcaagaagggtggtagtgctggcaaagtaacaaacaaggataatggactacacaaattggtctttaatgttttgcttgatggcacagaagtagcttactatgttgatgggcaggttgtgttaggccaagggctatctcttgattttcttcaattcaccttgtattttctttggtttataatttgcattgcatga

SEQ ID NO: 29207 - DNA, 352 bp, Setaria italica
  Peptide Sequence Number=SeqID_95181
tgaagatgtcaaagaaaagttgcctgcctcacaaagcaccctggaaacattagagagctgctcaacaccggcctgcttgagggaatgccagttatgtacatcattcctcatagcaagaaggctgtgctaaaaggagtgattactggttgcaatatacgctgcttttgtccgtcctgtaatggctccaaggttggtgctccctagtctataaaccattgaaggacacaaactgcttacattatgccattctcccttttgttttacaggctgtttcggcttattactttgaacaacatgctggaagcaaccaaaaaaacaccctgctgactacatttacttagggaatggcaat

SEQ ID NO: 29208 - DNA, 523 bp, Setaria italica
  Peptide Sequence Number=SeqID_95182
ttaacatgtttgttatttgttgtgtgcattgttgactgtgggctctactgtggtgtcagcagcacttttgcgtgtcatgggaggtgatgtggccgagctgccactggttgctacaagtcgggatgttcaagggctgggctacttccaggccttgttctcatgtatagagagggtgctaatctcgctgaagatcaagcactttgtgcttccagctgcccatgaagctgaaggaatctggatgaacaaatttggcttctctcggatccctccagaggaggggacatcatacctgtacaaggctgttcctctgccatcatcacaggaaacggagagttcggcgttggagtaactaagctagcaggatttgtgtgtctttgaggtcgagatgtacataagatgatgaagcatggcaagacggtatacaatcaatacaagaggaagaaatgagaaggatactagacaggcaagctgggtcgtcagcgtcggatctgaaattgatttttagcaatttagcatgctgtga

SEQ ID NO: 29209 - DNA, 554 bp, Setaria italica
  Peptide Sequence Number=SeqID_95183
ttgtcttgtctagtattctacctaattcctaatttccaattgctgcccaagaggtcatcgcgcaaaagatgctggatactccccagccatcgcacgctgaggctgagcctgaggctgcaagagaggactcagtgattgcaacgccgaatgtgcccatggagaattgtgttgccctggatgatgcagcatcaactctgctggaatctgccgttgctgatggtaacgaccattgtgataactcgaactcaaatggagcaagtctacagctgcaggccgtggacaatgcatcagtccccaatgctctgctagtcgaggacactgccacacctgtggccgctgccgggctcaagcctgcaaggcgcttcacacggtcgctgctcaagaataaaccagacaaagaagagtccacagctactgaaggtcacgctataccagatggcagcaaggatgcctcatttgatttggctttgctgatggagaagcctcagagaaggttcacaaggtcgctgctcaagacaaaggttgagagcagtttagttgaatctgatgatgcg

SEQ ID NO: 29210 - DNA, 1694 bp, Setaria italica
  Peptide Sequence Number=SeqID_95184
ttgtcgtttggtacttgtccttgtaagtcccccttctagtaattggttatttgttgtattaatttgtctaggtaattctttgttacaaatatacgatggcagcaaggatgcctcagatttggcgctgatggagaagcctcagagaaggttcacaaggtcgctgctcaagacaaaggttgagagcagtttagttgaatctgatgatgcgcttgacagcgcatctgactcccctccatcagtgaagaagatggagatgaagatgtcaaagaaagttgcctgcctcacaaagcaccctggaaacattagagagctgctcaacaccggcctgcttgagggaatgccagttatgtacatcattcctcatagcaagaaggctgtgctaaaaggagtgattactggttgcaatatacgctgcttttgtccgtcctgtaatggctccaaggctgtttcggcttattactttgaacaacatgctggaagcaccaaaaaacaccctgctgactacatttacttagggaatggcaatagtttgcgtgatgtgctgcgtgcatctgaaagatctcccttggaggctctggaaaaaacaattcgttcctccattggtccagtggctaaggggagccgcattaattgcctgaattgcaacgaggatgttcttctgtcatcacaaattgaacacgtactgtgtcaacattgcctcgagtcaaagcaacctcaagatcctcctaccccatcatatccatgtaagagcaattccagtctgactccgagttccaaggaagctttgctaaagaatatatcatcaagcaagaagggtggtagtgctggcaaagtaacaaacaaggataatggactacacaaattggtctttaatgttttgcttgatggcacagaagtagcttactatgttgatgggcagagaaaggttgatgggtatatcaaggatcaaagaatctactgtaatcactgcaacagagtggttagcccgtcagcattcgaagctcatgcgggtgaggggtcaaggcgcaagccgtatgataacatcttcacatcaaatggagtatccttgcatgaactggcaatgaaaatatcaaaggatatggaacagtcggaacgcgaaacagatgatctgtgcagagaatgcggtcacgggggagatattttcccatgcaaaatctgtccaaggtcatttcatccagcttgcgttggactgcctgaagccccctcagaatggtattgtgataattgcaggaatcttgtacaaaaagaaaaggctttggctgagaacaaaaatgctaaagctgctgggaggcaagctggagttgattccattgagcagatactgaagagagctatacgaattgtcccgctctctgatgatcttggaggctgtgctctatgcaaaaaggaagacttcaacaatgctgtatttgatgaccgcactgtgatactctgtgaccaatgtgagaaagagtatcatgtaggatgtttgcagagtcaatggcaggtagaactaaaggaattgccagagggggagtggttctgttgcggtagttgctctgagacacgatcttcattggaaaagataatctctgatggagctcaacttttggcggagccagatattgaaatcataaggaagaaacatgagacaagagatttatgcatggacactagtacagatctcaaatggc

SEQ ID NO: 29211 - DNA, 1289 bp, Setaria italica
  Peptide Sequence Number=SeqID_95185
tttgggatgtgggagtacttgactgacatgcttctgttaaatttactgttatacttgactgacatgcttctgtttttgtgctgcttcagtgctgtcatcacttacagccttgtgatactctgtgaccaatgtgagaaagagtatcatgtaggatgtttgcagagtcaatggcaggtagaactaaaggaattgccagagggggagtggttctgttgcggtagttgctctgagacacgatcttcattggaaaagataatctctgatggagctcaacttttggcggagccagatattgaaatcataaggaagaaacatgagacaagagatttatgcatggacactagtacagatctcaaatggcaattactctgtggtaaaagagctactgaagatggaagaatattgctctcagctgcggtgccgatttttcatcaatcctttgatccaatcattgaagttcacaccaaaagagatctcattcctgagatggttcatgggaggggaccaaaggaaggaatggccggccaagattacagtggaatgtattgtgcattgttgactgtgggctctactgtggtgtcagcagcacttttgcgtgtcatgggaggtgatgtggccgagctgccactggttgctacaagtcgggatgttcaagggctgggctacttccaggccttgttctcatgtatagagagggtgctaatctcgctgaagatcaagcactttgtgcttccagctgcccatgaagctgaaggaatctggatgaacaaatttggcttctctcggatccctccagaggagctggaagctcatcttaacggggtgcacctgactatattccaggggacatcatacctgtacaaggctgttcctctgccatcatcacaggaaacggagagttcggcgttggagtaactaagctagcaggatttgtgtgtctttgaggtcgagatgtacataagatgatgaagcatggcaagacggtatacaatcaatacaagaggaagaaatgagaaggatactagacaggcaagctgggtcgtcagcgtcggatctgaaattgatttttagcaatttagcatgctggtggggggggtctgacgttgccttttttttttgtttctcttccttggagtcgcaagtggtggcacacctgtttttgatgtagatgcagccccatcctcgagacgaatttgccaattttgatctgtctggctgacaggtggggcgtacttgtaatcggtgttgtcggttataaatttgaaatatccaaacccacctttgtattt

SEQ ID NO: 29212 - DNA, 234 bp, Setaria italica
  Peptide Sequence Number=SeqID_95186
tcaatagttcctcacaagagcagttcttaaagttgacaaccaacatggaagatggtcagccacaagagaataaaggtgatgccaatgaacagtcagatgatactccagagggtagtcagcaagataaatctgagcttccgcaagggagtcagaaacaggcaaatggtcaggaagccagcaaagaagacttggatggcacgggacaggaggagaaccatcaaggcgaggtcagca

SEQ ID NO: 29213 - DNA, 271 bp, Setaria italica
  Peptide Sequence Number=SeqID_95187
atagatgcaaggctaattttcaatggaaccacaaattcaaaattctcgcttgtagtaactacttgtctgaaaggggggaaaagtaattataccaagatcacccagccatgctcttaacagtttttcagtctttctttcaaaaaagagaagaaaaggaaacactggtgtataatgctacacttattcaaaaaggttaatattctcatccagtttctatctataagtgagcttgtagttttcaacaattttgtctacaggagagggctcctgg

SEQ ID NO: 29214 - DNA, 269 bp, Setaria italica
  Peptide Sequence Number=SeqID_95188
cttctccctcctccctctccccgtctgtcccgcgtcaagctcccctctcacctcacccggatctcgcgcgcgacgcaggcgagccccgcctcttcccagaagcttctacaaggcactccccgcgccacccccgctcccgcgcggatgagcggcggctcgggccccctcccctactcgatgcgcgatgtgggcgccggcggcgcctacaacaacgccaagttccgccaccggtctcgcctcaagatgcttgtacagtccctggctactaa

SEQ ID NO: 29215 - DNA, 888 bp, Setaria italica
  Peptide Sequence Number=SeqID_95189
ttagcttttgttatggatctgcaagagctatgtatctagtcaaaacgaataataatttgggataggagtagttttattaacccaagatgagaatatgtacgaggatgcaattatttcactttattactatctcccatggcagtagatgaccttgggatcagtgatctatacagattgacggctgtgtgagttcatattattaacccctccaagaaaccatttgctatcgagttggtggcgatgcatggtcatggatcatcagttgaagatgtcctaacagtttcttggggtcgtacttgttcttcatgtccacgaaccacttccacttgtcgctgccgaagtgccggatccagtcgtcgcggttcgtgtagcgcgccaggtagctcttgtactggatcccggtgctgtcgcagaatttcacgatcctctggttctgcgtctgcagccgcgccaggtcgttcgccaccgacgagaagagcagcgacacaacgtagaacacgtcctccgccggcgtcgccgccgacatgccgtcgtaccacttggctttgttcacggggtagacgatgagcggcccgacgatgtcggcgccttggaggatgcccttgaagacgccgcggtcgaagtcggcgatgcgcgaccccggcacgaacatgttgagccatggatgggggactcgccatagcccgaccttgttcagcgccacctcctcgctgtgcacccggtccaggaactccacgtacgtcacgtcgcgctcgaacgagaaccccggctcgaacctgagcccgtccagcacagacttgagcacctgatccaccgaggcggcagcggtagcgttgtcgtagttgcctcgaatgctagtaacaacggtaggtagaacgttacgtacta

SEQ ID NO: 29216 - DNA, 588 bp, Setaria italica
  Peptide Sequence Number=SeqID_95190
tttttttttttttttttctttgcgtattcaactgaccatgcgtgactggaaaaatcaaggtagacaagggacaaatatcacctgactgatatctgacaagctggcactaacaagaaaatccccaagtgtacatgttattgtactaggaacaaaaaaaggggggagaaatgagtctagctattgaaacaggcaagctgaatggccagctccgacaaagttattgacacagctgagatttttgaaatcacactatcaggaacaccggaacagcttgtctgatagctcgctcggctcacatcttcaggtccgtcgtccatgttccctgaacactggggcgtttcgtgacgtgtctggttcgcagcttcaccactttcctgcccagagagttccttagcctggtggcttgcagtagtatatcctcaggtggtaagtttcttacacagaccactcgctcgttatggtttttgtaaattcctttcaagttaggatgttgaccgcggacaagctcagtcaccacttctaagtgtggattcttttccttaaaggctggaagatgtgcctccatgaaggccctaatccccctgctgc

SEQ ID NO: 29217 - DNA, 220 bp, Setaria italica
  Peptide Sequence Number=SeqID_95191
gcgacgccggcgcggtgtcgcctggcgtgcggccgctggtggaagcggcggcagagcagagcaccctgctgctctgcacatcccccgcgggcgcgaacgcctgcggcaccggcacgggcggcagcagagcgtggtggccttccaggtccatgatcaggcccgcgccggccacgtcacccacccgcgcgcgcttcctaggcccgatgtcgctgttgttgtt

SEQ ID NO: 29218 - DNA, 259 bp, Setaria italica
  Peptide Sequence Number=SeqID_95192
tgtacaaggcggctggcgtgttcgctcctttcacggagtcgatccaggtgacagaattcactatccgggacgcgtacatgctgaaggtcttcgaggacaaccagacgcggctgccggggtggtgcaacgcggcggcggacaggctccccttctgccagatcctgggggagtacaagatggacctgccggagtacaacaccatcgagccctacgccaacatgaacgagaactgcccgtccgcgccgcccacctacagccg

SEQ ID NO: 29219 - DNA, 251 bp, Setaria italica
  Peptide Sequence Number=SeqID_95193
actactaccatttgatcacagttcatccagattgcaattggatactttatgttactggtttggagagcatgctcatggcatatgacatggattacgatgaagtgcatgttatccaaaatcttcggtcacgctctgagatgtcatgtattccgtatgttcctttctatgcaaaatcattgacagaaggataacgaaaattcaccaagtgtctttctcaatggccttctgcattctttccaccattcagtttg

SEQ ID NO: 29220 - DNA, 208 bp, Setaria italica
  Peptide Sequence Number=SeqID_95194
acttagccagcaaagcactagcctgctccaacccttgctgatcttgagctacgaccacgtcactggcccgatcagatccttcgttagctcactgcagctgatcgtcgaatcgagctgaatccatggcgaccggcaggcaaggaaccaagacacagcagccagctgagcaggaattcgaaccccaagtacgagtggcaggaggagcgcc

SEQ ID NO: 29221 - DNA, 515 bp, Setaria italica
  Peptide Sequence Number=SeqID_95195
aactagctatgccatattatcagttaatcaataattccccttcttagtgtatgttatatggacttctcgatcgtgaaaacaattgccaattttgtgggagaagagtgaaagggtatttttttttgaaacagttaatcacaaacaaggccccttattttgcttgctgtaaaagatgcaaagagcacaaggccatgttgataactgttatctacattttgagtgactatttactctcttgtagtatgtcaaggggtttctggtagcaatatggaaagtttttaatgttcgtctgtcggctttgcagaaatgcaacagttcgacctttcactatggatacacgtcacatctggttaataattttgcctatcatgtgatttgttcatcttattagctgagggcaaacaattaattctgaactctgaatggtctggtgttcatgtatctgctgttttggtgaaaccgtctgagtctggacatatgtactgtttctgaattgaaccttggcttcattaaaa

SEQ ID NO: 29222 - DNA, 442 bp, Setaria italica
  Peptide Sequence Number=SeqID_95196
acaacgcaggaggtgaaggtgctatcaagctggctgctggacaaggtcttaggccgtgctgacctgccacagcaggatccggaaaataagggtgaagctgcaggaagcgaactgttcatggatatgttgaaggcggtgaaagatccaatggccaagttcataggccatgctgagaatttgaaaaccagttataatatgatcggtgtgttgtcaaatatgatggaggacctgattgaagtgttcaaggcgctgaaagagccaattgagaggttcttgggcctcgctgaccagccaccgcaggattcatcatcctccaaggacggctcgccgcatcaacgacctgctgcaactgcaaatgaggacctgcttgagatggtcaagaccgctaaagagccgatggagtagccaggcggaggcaagatacgtggcagcgcaagtcaag

SEQ ID NO: 29223 - DNA, 1228 bp, Setaria italica
  Peptide Sequence Number=SeqID_95197
cgaccgtcgcacctgtgtgagaccacagacacagaggatcacctcgggctccggcctccacaccgctgccggctagcagtcggcttcgtccccttcctcccctttcttaaaccttccgtacccactcgtcggggcttcgctcgtctccagagatttcgcctgaagagaagaaacccacgagggatccgcagatgaagataattccggtaccttgcctggaggacaactatgcctacctaatcgtggacgagagcaccaagaaggcggcggccgttgacccggtggagccggagaaggttctcaaggctgccagcgaggtcggcgcctacgtcgactgcgtcctcaccacccaccaccactgggatcatgctggtggcaatgagaagatgagactgcaggtgccagggataaaggtctatggaggatccctggacaatgtgaaaggctgcactgatcaggtggagaatggaacaaagttgtcacttgggaatgacattgagatactatgcctacacactccttgtcacacaaaaggtcatattagctactatgctactagtaaagagggggaagatccagtggtcttcactggagacactttgttcattgctggttgtgggaggttttttgagggtactgcagagcaaatgtatcagtcccttattgttacattgggctcgctgccaaagtcaactcaggtttactgtgggcatgagtacactgtgaagagcctaaaattcatgctgacactcgagccggagaatgagaagatgaaacagaaactggaatgggctgaaaagcagcgtgaagcaaatcagcctacagtcccttcaactataggagatgagtttgagatcaataccttcatgcgcgttgatctaccagaaatacaggccaagttcggtgccaagtctccggttgaagcgctgagagaggtcaggaagatcaaggataactggaaaggttgatacccatgcggccatgcggttgccaccactctgttggacggccagcctctcaaagtgagctaatgcagaaacctttgccctgtaggtgggaatgagatttactgccgtgcaatgctttgacaggtatggcgtggggatggagaagacttgtaataagctccgtgttaataaaaacaataatcatgtttcccttgtaactcgtggactgtttgccaagagtaatgcatgaactatgttacactttgacccgcccaaaaaaa

SEQ ID NO: 29224 - DNA, 479 bp, Setaria italica
  Peptide Sequence Number=SeqID_95198
agtgtgagtagtctgatgggagaataaatatccatgttcttatggctcttgctgcgtttgcttctatatttatgggaaatgcattggagggtggcctgcttcttgcaatgtttaacttggctcatatcgctgaagagtattttacaagtaagtcaatgtttgatgtgagggaactgaaggaaaatcaccctgaatttgccctgttgttagaaacaagtggtgaagaatctgtacagttttcaaatttaagttataccagagttcctgtgcatgatcttgaagtgggttctcatatcttggtcagagctggtgaggctgtgcctgttgatggagaagtctaccaaggttcatcaactgtcacaattgaacacctaactggtgaaacaaaacctcttgaaaggacagtgggagatgccataccaggcggtgccaggaacttggaaggaatgatgattgtaaaggtgaccaaatcatgggag

SEQ ID NO: 29225 - DNA, 2015 bp, Setaria italica
  misc_feature (191)..(191): n is a, c, g, or t
  Peptide Sequence Number=SeqID_95199
gcaatgtttaacttggctcatatcgctgaagagtattttacaagtaagtcaatttttgatgtgagggaactgaaggaaaatcaccctgaatttgccctgttgttagaaacaagtggtgaagaatctgtacagttttcaaatttaagttataccagagttcctgtgcatgatcttgaagtgggttctcatancttggtcagagctggtgagctcttgtattctttaggctgtgcctgttgatggagaagtctaccaaggttcatcttctgtcacaattgaacacctaactggtgaaacaaaacctcttgaaaggacagtgggagatgccataccaggcggtgccaggaacttggaaggaaggatgattgtaaaggtgaccaaatcatgggtggattcaacactcaacagaattgtccaattgactgaagagggccagctaaacaagccaaagttgcaaagatggctcgatgaatttggagagtactatagcagagttgtggtggccctttctttggctgttgcactgttgggtccgttactctttaagtggccctttttggtaactcagtttgtaggggttcaatttaccgtggattaggacttatggagcttgcatctccctgtgcattggctgtagctccattggcatatgcaactgcaatcagctctcttgctagtaagggaattttgttgaaaggtggtcatgtcttagatgctctttcagcttgtcagtctattgcttttgacaagacaggcacgttaacaacggggaagcttacatgcaaagcaatcgagcctatccatggacatttgggtgtgacaaatggtcatagcgatccttcctgctgcactccaaactgtgaaagtgaagctctagctgttgctgcagccatggagaaaggaacgacccatcctattggaagggctgttttagatcactctgttggaaaggagcttccagctgttgctgtagaaagttttgaatgcttacctggtaggggagttgctgctactttgagtggtgtaaaggcaagaaacagcgaaaatgagctgtccgaggcatctattggttctgtggactatatttcttcactatacagatctaatggtgaatcggagcagataaaacaagcagtaaaaggttctgcatacgggcctgaatttgtccaagctgctctatctgttgataaaaaggtaacccttttccactttgaggatgaaccccgttctggtgtttgtgaagttatacataccttaagagaaaaggctaaacttcgcatcatgatgctcactggagaccatgaatcaagtgcccagagggttgctaaagctgtttgtattgacgaagtccatttctctttaaagccagaggacaaattggataaagtaaaagcagtttcaagggagcgaggtggaggtttaataatggtcggtgatggtataaatgatgcaccagctcttgcagctgcaacagtcggaatggttctagcccaacgtgccagtgcaacagcagtggctgtggcagatgttctgttgttgcaggataatatttgtggggtgcctttctgcattgctaaggcccgccaaacaacttcactggtcaaacaaagtgtggccctggccttaacttgtattgtttttgctgcgcttccttctgtcttgggatttcttcctctttggttgacggtacttcttcatgaaggaggaacccttctagtgtgcctcaactcaatacgagccctgaacactccgacatggtccttggtagacgacatccggcagctctttgatggactaaggaattatttctcatccaagttcaacaactcttcatcaaactatgtcgcgaacactgttcccttgtagataccatgtacagcaacggttcttttcttaccttctgtgtggtactgtttgaatttagatgaggggttctaacctaatttttgtaggctgtactcttatcaccaccatgtaaagaaagaaaatttggcttaatgttgaggtaaaaagtc

SEQ ID NO: 29226 - DNA, 1406 bp, Setaria italica
  Peptide Sequence Number=SeqID_95200
ttctttttgtgcatagcaagcaaagtgatcgatcatgaactgattggcaattgaatcttcaaatacacttccacaattttaatgaccgacaagcatatctctactgcagcagctgagtcagaaccaagtaggctggtgggcgcacaagatttaggtctaaattctccacgtagcttgccacttatgccttcgagaagtcaacatcaactttcttatacaagaatgcatctgaaaaaagcaggatcacatgctcacagaaagcaagctgctagtttgttatactccataatctgttccggcattcattactaaccaaataataatactaatttgaccacaagcatgtagcttgaacgttaagagtgatacggagaaccaaatagcatgtcaatatcaatatgtgtccccatagaaaattggaaagattactggaatcagttgaggtaatggcctctgcaacaatcaacttgtacttttcgggaacaagatttaccctcatccagttaacactcctttacaagcagcccactcatactggaatgtccagagccataatcttcagcaaggcttgggacaatgtccttatatggagtcacaaacttttccacgaaagtcttctcacccattgctgctgtatagtaatttaactcaagattccgcaaacgctttgccctgagaacattgagcagacgatggcggggcaataaccgtcgctcaaggctatacatgatcagtgccggcctttgtgcaatgtactgtaactcaaggccaacatccctcatccagaaatctacaactctccgaatcctgtcctcacttgcacccaagacaagtggcgctttcctcacaatcttcgacacatggtgttgtgaaaacccaagcgtctttaagacccctattttcttagcaacatcctgtttgctcatgaaagcgactaaacaaagtgcatggcggaacattggtgagttccgcttaatgcctaactcctccactcgcttagcagcttcacggagacaatcgggcttcatagtgagcagtcggctggagtacacattcgcaccagcaatttcacaagcacttaccccacactgctggagaaagtcgaggttgggcttggccacattctcgaagtcgacactgaagataccggcattgttcctgaggcctccgagcaacttatcgaaggagccaaagaccggaagccagaaattaaccgtccggctgagggagcacctgcggaaggaataaatggcgaccgggatgaagcgcgcgatctcagagcgcgacagaccgaggtcgctgagctccgcgacgcggggagcgagggtcctctccactctggcgcagaggaaccgcgggtcgccggcaacgagtctcgcgacgtcggcgcgggggattgccgagga

SEQ ID NO: 29227 - DNA, 257 bp, Setaria italica
  Peptide Sequence Number=SeqID_95201
ctccatgatggtgtttttcccctctgcactagctagtttggaccagctctgttttgttttctaatctgcttggtgttgcttggcagggaaattggagggagctgtttgagcacctgaccaacgtgatcctgctgaacctcagcatccatgtatggtacaaagagaccaatggctttcggcgttttggtcgggcgtggcccaatttcaatctccgccactcacgctgccccgccgtgctatcggcgcctctccctcac

SEQ ID NO: 29228 - DNA, 316 bp, Setaria italica
  Peptide Sequence Number=SeqID_95202
acccggcgtcggcgtcgaactcctccttggccttgacggcgggggcgagccacctcggcggcggggacagaggccgccggcgggtgcggcgtgtgctgcgcgaccggccagggtccgttgtgctggttcgcctgcgcttgctggaagtgcttgtggtcggagagcttccagatgacgaggatgatgaggtgcacggtgacgaagaggtagggcgggacgagccagaagcgcgcgacggcccacgcgcgcgggagcacggcgccggccacggacacgagctgcgggacggcgaggcgcgccaaggacgcggccgcgg

SEQ ID NO: 29229 - DNA, 530 bp, Setaria italica
  Peptide Sequence Number=SeqID_95203
cattacctcttcgcgtcagggaatgtggattccatggtgcttggagctgctgtagccgagcttgatggtggggaggtcgtcaggctcatgaggtacctcaacaagtggattggaaagtacttgaagttcccagatgcacaggcgtgccccgaggctatggggatgcttggactggagcagtgtgacagcgtgccatcgtttggagcagttgccagggcactgggagtgctgctggataatcatttctcccatcttgtgttgaacgctgatgtgcgtgaggaattgagggctgctgaggtgacggtgagggagctagctgttgaagcggagtcatctgggccaatcctggacttgcttcgtaggttgcagcaggataagtgagcaatttaaacttccgttcttgaatctatttccttgtagtctgaagcagatgtgtggaaattttgactgttatacttcaataatacggcaacatactcatcactgcaatgatgagtatgttgccgtattattgaagtataacagtacat

SEQ ID NO: 29230 - DNA, 384 bp, Setaria italica
  Peptide Sequence Number=SeqID_95204
accacttcccgctccaactgggcgctcatcaaggtgctcaagctgttgcacggctggctcctctagagtcccgcctggcagctcgaattgtcgacccagtctgccagctcctgacccgctctgcagccatgtcactgacctttgagtgcatccgtacagtgctcactgcgctgccagcacacgacgctgctgttcgccttgccattggaaaagcgaaggagttccttgctgctgctgatgatcccaacctccggtaccttgggcttctggcgcttgggatgcttggccctgcatatgcaacggcagtgaatgattgccgggatgttattgcacagtcactgggtgatgctgactcgaacattcgccgggaggcattgcacctca

SEQ ID NO: 29231 - DNA, 236 bp, Setaria italica
  Peptide Sequence Number=SeqID_95205
ttccgctcggtccgcactcgatccgccgttgatgatgttggtcgtcagcccgaaccccgccgtccggttcttcgccaggtcgtcgccgctgggccggtagcgccccaccatcacgtcgtggcacgacggcttgggcgcccgcggcgtcatccagaaccacagcgccgtcttgaacgccacctccgggtcgcccgccaccacctccggctcccgcagcccgtcgaagcccaccgcct

SEQ ID NO: 29232 - DNA, 323 bp, Setaria italica
  Peptide Sequence Number=SeqID_95206
ggcacagcggcggttgctggatccaacaccacccaccaccaagcaacgcgacacgcggtaatctagtactactactttaacccgcccgcccgcccacccaccaccaccgcgccaagagtgctgcccccgcgctcactcacctcgtgcgcgccttcttcccctgccgccccgcgtgctaccccgcaggtatcttgcgctgcagaggcattccgaggacacgcacacaccgactgctgctggaaggaggagcagagagcagggatgggggacgcggcgccgccgccggcgggcggcaaggcccagaagagctacttcgacgtgcg

SEQ ID NO: 29233 - DNA, 154 bp, Setaria italica
  Peptide Sequence Number=SeqID_95207
tgcacatggtggatgccttggcgattacaggcgatgaaggacgtagtagcttgcgataagctgcggggagtgagcaaacacactttgatccgcagatttccgaagtcgggaaacccggccctttgggtcattgcatactgaatacataggtatg

SEQ ID NO: 29234 - DNA, 243 bp, Setaria italica
  Peptide Sequence Number=SeqID_95208
gtcactgctagctccagaaattcttacagcaacagttgttgtaacagtatttattgattaagaaactctagtatattctttttagtttagaccactttatagtatagtatctttatatataaactctaaatcctatatgcgtctccgagctgcaggtgtgaggaatcaatgttgagcgtatggccggcatccagaaattcccagtgtcactcctcatgcatgctcgagccaccaaatatctag

SEQ ID NO: 29235 - DNA, 241 bp, Setaria italica
  Peptide Sequence Number=SeqID_95209
gttcttactaacagtactgggtgaactagtaattcgatatccttagatatcatatattcatgtatatgctcacttgatttgatcgattcggatcagaacatattagaagcagatcgacgcttgttgcagattagctaatgaatagaatactggctagtacaccatggtgcaaccaagtgaaaattgatgagatcactcttcttgctgcccacgggtcgctacaaaatgtttaaaacccaag

SEQ ID NO: 29236 - DNA, 377 bp, Setaria italica
  Peptide Sequence Number=SeqID_95210
ggggcccagtaataggacaccttcacgttgtatgacgggaaggcgtagctccagaaattgtgcttctgctggccgacgtcccggtacaggaggcggtagcggaacgatgcggtgaggaggcagatgagggactgcgcctggttccgcgccatggagtcgccgatgaaggcgacgtgcttgccgtgcaccgccgagaggaacgccccggcgtcgaacgccggcagcgggcaccccccggccggctgccaccgccagtcgaggtagcgcgtgtcgggccgcccgttgcggatgcagtcgtggctctccttggcgttgcactccgtggcattgtaccgccgcgcgtggcccggcgcccacaccccagtttcccacagaaa

SEQ ID NO: 29237 - DNA, 529 bp, Setaria italica
  misc_feature (199)..(199): n is a, c, g, or t
  Peptide Sequence Number=SeqID_95211
ccacagtaatcgaacattaggattcttgttgtaatgaatgtcttcccaagtgtctcatattcaaaaagatccaaggcatatgacttctcattggttaatttaaccatagcatccacttgatcaacacacttctcaattgaaattcttcctcacgccttttcttttcttcaagagtttccaaagttttgctggtttggcnctttttatactccacatatccctcaagagcagattcaatatgactttgcttacgcttttttccaccttctccctgccttgaatcttgatttgatgaggcaaattgagcttcattgttttcgttacgtgcacttgaggtctcttggacatcaaaactggaggcaaagggatttgtaccatagagactgagatcataatgaaggctttatttagaattacttctttcaacaggagctggaggtgggagagcaggagcttgaggagggagatcaggagtaggtgtaggagtaggagcagaaggtgcaggtgcaaacgattaaagtttaggttt

SEQ ID NO: 29238 - DNA, 1279 bp, Setaria italica
  Peptide Sequence Number=SeqID_95212
ccaatccttgttattcctatatgacagcacaaaagctcacacaaacttttcaagctaacacacaaagactcgggtttagactgttcacaaaaactattcattgtttgctaaatgtttagactgttagttgacatgttttcttcagataatagaatccatttcagaagatctagaaataacgcagtagcaatgggaaactataacaggttgactagatattgaaaaatattgtggtacccagtcaacaaggggcatagttcatttatctaagacatggacttaagcagccttgcttcctgaagctgcgtagaagaaccctggaagatttttctccatcttctctatagcgtccaatactgaaccgtaatcacggccatacaaaggaaaagcatttctccagtatatatgcttcacaaaagttggttgcccttctacacccaagagctttttaaggtcagaagtcacaagttgtttcaaaatagacgttggagctccagcaagatctctattgtggcttcccccaacaaatgttgtatacagatattggtcatcaggagctcgatctgggaacatcattgaggagaacagagtcccaagggttttcagaccatgtttttgctgttccttgtagggtatcaagactccaaatccttccagaggttttttgacatcttccttcttaaaagctgtcaccataagagatagcgggagataattcaccttaggaagaaagtctagcacaaagggagctccaccttttctgaacttcatcctctggacattagacaatggagctgtcattataacagcatcgaaggtttggtttttagcaagatccttgctaccagcatccttcgaatcaacagaaatcgaccacccaccggtcgaagggagcccgtcaaaggtacatgccaatgacaatacttctgtaccaagcttcacattatcatctccaacttcattgtgaagtgcatttattagtgactgcatgccgccatgaaatgaaaatgacgcacgtctattccttcttttccctgataaatcacttcctgtctttactgggtcacctttagctgttagcttagacaagatggcaccaacaatgatagaatggtactttctttccaaattccacaatgctggaaatgcatgacgaatagataatgactcgggatctcctgcacttgttccagctacaaatggatcaataagatagtcaacaacttctcttccaaagtggcgttcaaagaagctcccgacactctcacttaaatgctca

SEQ ID NO: 29239 - DNA, 433 bp, Setaria italica
  misc_feature (419)..(433): n is a, c, g, or t
  Peptide Sequence Number=SeqID_95213
tggtctacgtcttgcgccgggccgcacgccacgcgcgcgcgctcctcgttcgccggcgccggtccgaggaggaggaggagctcgacgcgcgggtggtggcgctggtgaggatgctcgtcggcaagggaaaggccgggatggtgcccgaggtcctggccgagttcgccgccatctgcgaccacctgctgccgcggccgccgccggcgcaaccacgccacgcctactagttagtccactcgtgtctgcacctactctactggctactgctgtagtatctcgtcgactcaacatttgtacaatatgaacagcacgcgtgttcttcagagttcacgctacggttttgtataattgatattgattattgtatggaaattcttgcttcctagaacaatatattgtagcatttactaattaaaaannnnnnnnnnnnnnn

SEQ ID NO: 29240 - DNA, 377 bp, Setaria italica
  Peptide Sequence Number=SeqID_95214
gtaaagctctagctaaacacatagacagccaagtagcaagcatcatcagattcagggatcaatggcgccccgtgctgcctcctcgtcggtactcctcctcatcctcgccgccttggccgccggcgcgagcgcggccaccttcaccatcaccaacaggtgcggctacacggtgtggccggcgggcatcccgggtgggcggcggcacgcagctcaatccaggcgagacgtggaccgtggacgtgcccgccggcaccagcggcaggttctggggccgcaccggttgctccttcaacggcgggagcggccactgcgacagcgccgactgcgccggcgcgctctcctgcaccgtctccggccagacgccggcgacgctggcc

SEQ ID NO: 29241 - DNA, 335 bp, Setaria italica
  Peptide Sequence Number=SeqID_95215
cggagatccagccccccatatgcttcctgcgagggtgaaacagatggaaaccgagttaagatggcacgacatcaaatttatgttgggtaattgctcagctctagtcttgctctcccttttgtatttgcttttgctgaaagtcaatggagcaggtgagctccctggccactgcctgccgtatatggcagcagtgccatgagtagatgggttgtatgccctgtcatgtatagtactagtagtagatagagtagttggtagttccactaattgtattatgtactctatgttgacttttggtgctatatagtatgaggagcagctgcagctccaaatca

SEQ ID NO: 29242 - DNA, 449 bp, Setaria italica
  Peptide Sequence Number=SeqID_95216
atcaacttattcatgctgctttaaacttgcgccagctggtcaattgcatggctgaacttctacttgagggtgagaaggatgaaaccaagcttcggaacagaaggaacgttctgatcctagctctcgctagacatgatgagtccctcatgctgttccatgatttttgagaacacaggaacaggtgctgatgccatttccatacttttctttcattttatggtgtccgatacaatgcgatatttaccataggaagttgggagctgtgttcggcctttcatataccatacaaatgaattgtgatttgggtactcgtgtcatgtcagtgtgtttcttctctcagacagccggtacattaatttctgttgcatttaccacatctgtttaatgcacagcgtggtaatgtcaattcatttgagttagcaaaattgtttgtgttggggttttgatga

SEQ ID NO: 29243 - DNA, 1519 bp, Setaria italica
  Peptide Sequence Number=SeqID_95217
taaggaaacgtacttagacccaaaaccggaacctttttgatccacttttagatgaacagcctacatccacaaggaagcgagctcctaaaactgttgaggcggttctttcacttgagcagaaaattatccgtactgcagctctatctgatgctgaaagattttctgagatcccatactccatggaagggtcatcaaatgcaagtgatgatcatcatcatgctgttgctggtggcaagcggaaacatgaagccctagaagtagatgaagaggaatcaataattgcagaaaatgaagtactttggcgggcaaattttgagaagttcatattttgtttaaagaagaagttctgtgcagagcgaaagaaaacaaagctgaagcttagcacgcttgctatatgggaagcatttttggaggccaatataacggacaacgacaacaagactgtgacatcaccaatagatggaattttggagagagtaggacaaaaggaaggaggctcatcaatgacattggatcagataataagtgtattgaatgatctagagtgtatttctaccactagggacccagaacaatatgcattcgatttaaacaagttggtcgagacatgtagaaatgatgaggtagagtctcttgtgaaaaagaaacatggtcaagcagcctatacaatctttaggttattgctgaaacaaggctgtgcagttgagaccgatgaaattactgacaggactattctagacaagcagattgttcatgaaactttatacaaactttggaaggatgaatacatagattcagagagagtcccttctgcgacatcaggaacaggaaacacacagttttttgtttggagagtgaaaaatacatatcgggaacactacacagatcaactttatcatgctgctttaaacttgcgccagctggtcaattgcatggctgaacttctacttgagggtgagaaggatgaaaccaagcttcggaacagaaggaacgttctgatcctagctctcgctagacatgatgagtccctcatgctgttccatgatttttgagaacacaggaacaggtgctggtatgtcatactaacatgccctactatgtaaacttagatgactgaatatcttagcttaccccttttgcagatgccatttccatacttttctttcattttatggtgtccgatacaatgcgatatttaccataggaagttgggagctgtgttcggcctttcatataccatacaaatgaattgtgatttgggtactcgtgtcatgtcagtgtgtttcttctctcagacagccggtacattaatttctgttgcatttaccacatctgtttaatgcacagcgtggtaatgtcaattcatttgagttagcaaaattgtttgtgttggggttttgatgaagatgaatggatgattcatggttgtgcaactcagtgcattcagttgttcgacgagtcctcgctgtcatagcgtccagtttgaaagtggaaatggaaatccaaactgtttaggttt

SEQ ID NO: 29244 - DNA, 252 bp, Setaria italica
  Peptide Sequence Number=SeqID_95218
ggagacggtaatggcgtcctcgccgcgggtctgcgtcaccggaggcggtggcttcgtcgcctcctggctcgtcaagctcctcctctcacgcggctacgccgtccacgccaccgtccgcgacccagatgatcccaagaatgccttcctgatgcgactcgacggggctgacgagaacctgcgcctgttcagagccgacgtcctcgacatcgactcgctggctgctgcgttcgccgggtgcgagggggtcttcca

SEQ ID NO: 29245 - DNA, 2053 bp, Setaria italica
  misc_feature (2045)..(2045): n is a, c, g, or t
  Peptide Sequence Number=SeqID_95219
caaaccgcgagcgcaagcgcagacgcaacccccattctcttctccgcgattcgcctccccagatctcggagccgcttgcggcgtatgagcagctagctagctagggggatccgaggcgtgctgggcggagtgcgaggtcggccggcggcggggggaccgggggacgggacggcggggagccaggatggggctgatctccgggatggtgatggggatgattgtcggcgtcgccatcatggccggctggagccgcgtcatgctccggcgcagcaggaagcgcatcgccaaggctgcggatatcaaggtgctcgggtctctcggcagggacgacctcaagaagctgtgcggcgacaacttccccgagtggatatccttcccgcagttcgagcaggtgaaatggctgaacaagcatctaagcaaactttggccttttattgcagaagctgcaacagcagtggttaaggagtccgttgagccattgctagatgattaccggcctccaggaataaaatctctgaagttcagcaaattttctcttggaaccgtgtcaccaaaaatagaaggtattcgtattcaaaatcttcagccaggacaaatcataatggatatagatttccggtggggtggtaatccaagcataatcctagctgttgatgctgcagttgcatcactacctattcagctcaaggatcttcaggtctacactgtcatacgtgttgtatttcaactgtcagaagacattccttgcatatctgctgttgttgtggctctccttgctgatccagagccaaaaattcagtacaccctgaaggccattggaggaagcctaaccgcagttcctggactttctgacatgattgatgatacagtcaactcaattgtttctgatatgcttcagtggccacacaggctagttgttccacttggtgttaatgttgatacaagcgatctggagcttaaacctcagggaagactttctgttactgtggtaaaagcaacttctttgaaaaacaaggagttgattggtaaatcagatccttacgtgagactgtatgtgcgaccgatgtttaaggtcaaaacacaaaccagagatgatgacctgaatccagtatggaatgaaacatttgagcttattgtcgaagacaaagaaacccaatctgtcatttttgaggtttatgatgaagacaaacttcaacaagacaagagactgggtgtggctaaactagcagtgaatgatcttgaacctgaggtcgcccgtgaaatctctctgaagctgctgcattcagtagatccacttaaaaatagggataccaaggacagaggcacattgtatgttaaggtcatgtatcattcgtttacaaaggaagagcagctggaagccctagaggcagaaaaacaagccatagaggagaggaagcgacttaaggaggctgggataattggtagcacaatggatgcagttggtggcgctgcatcactagttggttccggtgttggacttgtgggcactggcattgttggtggtgttagcctcgttggttcaggacttggtgctggcgctgggcttgttggctctggtattggtgcagtcggcagtggccttggcaaagccgggaaattcatgggcaggactgtggcggggcctttcagcatgtcccgcaagaacgccagcagctctactgctccccagcccgaacaaccttccgcatagtctgaatgtctgatgtacagtgaaaggcaattctcatttgtgacagggttaccgttctactttctgtaaggctgctgctatctaggattacagagtttttcgtttgcatttaagcgtaccgccctccacggcattggttatatgaaatatctgctggtttattttgtaaatcgcgctggaacttttatagtgaaggatactgtaaattagattgagcttcgacatttacgtaacagtgcagtcgtattgaagttcaaggtgacgtgccactctgatattagtctatttatgttaattgttactatgctgttaaaaaatttggtcaaaaaaaaanaaaaaaac

SEQ ID NO: 29246 - DNA, 315 bp, Setaria italica
  Peptide Sequence Number=SeqID_95220
cgtccaccgtcctgtcgttcccgggcgctcccccgttcaaggtctctgagctgccccaggagctcgccgacgacggcgaggggtgccaggccacgctccgcgtggccgcccggatggtcgacgcccgcgggatcctcgtcaactctttcgagtcgctggagccgcgcgcggtgcgcgcgctcagggacgggctgtgcgtgccggaccgccccacaccgccggtctactgcgtcgggccgctcgtctcgcccggcggcggcgacaaggagcaccagtgcctccggtggctggacgcgcagccggaccgcagcgtcg

SEQ ID NO: 29247 - DNA, 268 bp, Setaria italica
  Peptide Sequence Number=SeqID_95221
gcgtggagaagacgcgcgcggcgtagcgggcagagaggccgtgggatgcgaaaaggcggagggagtcgtggaggagcagcagcggcgctgagcggagcgtggggttggcggcgaggagcgggaacgcgtccaggtggagctcggacgagaggaagtggagcttgcggcggaactccacgccgcggctgccgccgccggtggccccctctccccatgtgggcgggtggcaacgggggaggggataggggaggaactgaatggacaaagt

SEQ ID NO: 29248 - DNA, 402 bp, Setaria italica
  Peptide Sequence Number=SeqID_95222
tctgatgttgatgcagtagaatatggtggagatggaacaattgtgtctgacatgttttcattattgtcgctgtgtggatcaattttgaataaggaatccaagcagaacaacaatcagaaatgcaagctatccaaccctcatgccctggtagtgcactgctgccttgcattagcaacaatagctgcatgtctgaagtcagagggggagtcgtcagcatcggttatcctaacaagttcccagaaaaacagcggtcccggctctcagttcttgcacacctctcatcagttgatgatacagtcaagagttgcctgcagccacactgtgcatctgcaatgctcgcactctcgtcacttgtttcacttgaaaatggaggtcataccagatcttctctttgtgagaccg

SEQ ID NO: 29249 - DNA, 207 bp, Setaria italica
  Peptide Sequence Number=SeqID_95223
agtcggctagctcgttgtcactctgcaaaagggagttctcctctgcgttctcgatccgacctaccaacttctcatattcattcttcatgaaagtccattcacggaagaactctttatcggccatgcggtcctctggtgggccagaggagaagtaggcgaagggagccctgacacctagccgtgcctcctgcagaacggcacccattg

SEQ ID NO: 29250 - DNA, 495 bp, Setaria italica
  Peptide Sequence Number=SeqID_95224
tactactttaaagtagtcttctcttgctgagcaaagagaacaagagggaggaaaataatgagttcatcctggacagaatatcagaacaagctgttcgaggatgcgctggcaatatatgacgaggacacaccagaccgctggcagaatattgcacgggcagttggctgtggaaagtcagctgaggaagtgaagaggcactacatcaagctggagaaggacttgcagcacatggaatctacaaaaggccgtcaaggatccaaccacagcagctctggtggtagcagcagcaatggcaattcttggggcaagaacaatgatgacaagaggatgaggtacctcaaaccgcagtgaatgtggtcttggaagagcttatccctagatcgtgaagcggcaatctgtcccgcgaaaaaaagagatcgacgctttccaaaagatgttacctatgctatgtcgtggcttccatccaagtttatgtgtgtacaatatcacctttga

SEQ ID NO: 29251 - DNA, 976 bp, Setaria italica
  Peptide Sequence Number=SeqID_95225
gtggcaagagctgcaggctgagatggaccaactacctcaggccagacatcaagagagggaagttcacccaagaagaagaacaaaccatcctccggctccactccgtccttggcaacaagtggtcagccattgcaaagcacctgcctgggcggaccgacaacgagatcaagaatttctggaacactcacctgaagaagaagctgatccagatgggcttcgacccgatgacgcacaggccaaggaccgacttctttgctgcgctgcctcaactcattgcgctggccaacctccgccagcttgtggagcagcgtccatgggacgaccacgccgcaaggctgcaggttgaggcagtccaggctgcaaagctccagtgcctgcagaacctgatccagtctgcagcatccattgccactaatcccagttccagcagcatcaacaccatccccgacctggagcaaattggcctcctgagtcctccgcagatgtcttccttgtcttcgttgccttctccgagtttcctggagagtatcagtggccaagacatagtagctggacaactgcctgacatacaaattcctaactctttctctgagcagcccaccagcaacgatgccaaccagaactcggacttcactccaaagagtagcgttgagggggagaatgaaacccctaaaacgctgctgctgtcagaaaactcccttccaccgctcaccgacttccccatttccaacttcggcgatgcttgcagcgcctcaagctgtgatggtagcagcattcaattcccgagttggcctgagttgtttgatgaacagttcttgagcgagtttgtatgaattctggtctggtgtgtgtgtctgtgttactctatggtttgctttttcagttttagttttcttcctttcctaccgctatttttgtgccgtattctggtgtgagtctcagtttgagtgcaaatgcatgctcctatgcatataaa

SEQ ID NO: 29252 - DNA, 248 bp, Setaria italica
  Peptide Sequence Number=SeqID_95226
aatgttgatatcgccaaggtcgcccccaacgtaccacctctacacccctgctgaggttgaagccgtcattgcaaggctgtgaaacgcttccagattctttgtcttattcccatcatcgatcagtaatagacagtctttgtacgaagcatggacatgttgatgcgggccaatctgcctagtgtgttgccatggctgtcatcatcagactatcagcgactgccccagtggagttgacaagagtagttatt

SEQ ID NO: 29253 - DNA, 600 bp, Setaria italica
  misc_feature (1)..(37): n is a, c, g, or t
  Peptide Sequence Number=SeqID_95227
nnnnnnnnnnnnnnnnnnnnnnnnnnnnnnnnnnnnntttttttttttttaagtatccaattcacaccgatatacgagtaatttttagtcaacagttatattgcttccaatatccgactgcgtacaagttcatagtagatgcaacatgcaccatcacatgagaaatccttaatgttcatgagcaaaccaaattcacatcatcatgtcacaacctgcctctcctggtgtagaagaaacaacataccaccgacactctaagttactaagaaacagtagtgtttatggagcatggcgtgttcaagtggttgtgtcagtcttctccaatgtgttgtagttgagcaacttttcaatgaggtcaacatgggtcatgagcattcgcctgcagcagtagcggaccaattccaaagcatccagagcatccccctccgtgtagtcggcctggaggaggtccaggtattggtcccacttgttcccaatcaccttgccgcaggtgaagcagcgcaccgggatgatcatcttcgccgccgccgccgccggagccggaggaggtggggaagggtttggttgggtttcggcgtggagaaggccggctgaacgaac

SEQ ID NO: 29254 - DNA, 1244 bp, Setaria italica
  Peptide Sequence Number=SeqID_95228
taaagaagctcaggaagccatcaaaagcgagcgagaggggagagagagaggcgagaggagaagagggaggcgccgacgcggagttcccgttcgatccagcacccgccgccgctgccgccgccgccgccttcgccttcacgacaggatgtttctcacgaggacggagtacgaccgcggggtgaacaccttctcgccggaggggcggctgttccaggtcgagtacgccatcgaggcaatcaagttgggatcgactgcgatcgggttgaagacaaaggatggtgttgtcctcgctgttgagaaacgtgtcacctcgccactgctggaacccagcagtgtggagaaaataatggaaattgatgagcacataggctgtgccatgagtggacttattgctgatgctagaacgctagtcgagcatgctcgtgttgagacccagaatcataggttctcatatggggagccaatgaccgtagaatcttctacacaagctatctgtgacttggctctgcgctttggtgaaggtgacgaagagtcaatgtcacgaccatttggagtgtctcttctaattgctggacatgatgagaatggaccgagcttgtactacacggacccgtctgggaccttttggcaatgcaacgcaaaggcaattggatcaggctctgaaggagctgatagctccttgcaggagcagtacaacaaggatctgaccctccaggaggcggagaccatagccctttctatcctgaagcaggttatggaagagaaggtgaccccaaacaatgttgatatcgccaaggtcgcccccaagtaccacctctacacccctgctgaggttgaagccgtcattgcaaggctgtgaaacgcttccagattcttgctattcccatcatcgatcagtaatagacagtctttgtacgaagcatggacatgttgatgcgggccaatctgcctagtgtgttgccatggctgtcatcatcatactcttgtcaactccactggggcagtcgctgatagtctgattcactgcagccctgtcacactgtttgtttcaagtagcgttgagaacttctgtactgccagaaagaaagtacgtttgtttttacgaattcggctttttttggacaattagctgatgctcttatcctggtgccatacttgctgaaatgtgaccagtggaaaggtccagcttttcacgtcccgttatttttggcctgtgttttgtaaaattaattcagtattcgtct

SEQ ID NO: 29255 - DNA, 703 bp, Setaria italica
  Peptide Sequence Number=SeqID_95229
atgagagatcttattgttttttttttctaaaacacagtaaagacactcacgcgtttaatatggaaatcagtttggataactagttcggaggaatcactgcatgattattttcaagggtcaaattccgatgtttgaaaagaagccaaaaattataggctccctccacaatcaagtttacatggactgcgacttcttttttcttgggatggtacgccagtcagccagcggctacagcaatgcgggtctgaaagcgcgcctcgcccttctcgatggcagccttgagctcccgctgcgtcggtgccctcgacggcgacatgaccaggtcttgccacactgatgacgagccgccggtcggttggccgtcggcgtacagctcgtggacgcagtcggcctcctcgttcaagctgctcactctctctaagcagccgatctcttcaggatccaccagcaaattgctcccgccatccttccatcctatcaacttagcagaacccaaggtgttggtgctgtagagccttgcattgtcaacaaggctgcagtagcttctgaaagcggtagcaaatcgcttgtgagactgcagctgtgacttcaccctcactgctctaccggtgattacagctctcctgattcccctgacaactgctagataggcatcgcagaccacacccacgacgctcgatccggtaaggcttccttcctgttc

SEQ ID NO: 29256 - DNA, 415 bp, Setaria italica
  Peptide Sequence Number=SeqID_95230
taaaacctaaaaaccatctaccagaacaaattcgcatcaagagtccagttaaaaaaaagattgagcaagcatgagcagctacaaaagaacatcttacactgtgctgtttgaatgtggaagaagggatcaatcaattaaagatgagaaccataaggctcaggcacaagcattcgaatatgaacaaaacatgcctatctccactagctggtagcataggaccattaaaacaagagcagccatggaggcagaactacttgcctttgctaaagcaatagagttagaaggcttcagcaaacaaagagctgtactgcaaacattctgcagtgttaagctatcgaagatagacaaactcacaaacacaaatgataaaatcagtataaatgcaagagcatgttgttttcataccaggcattca

SEQ ID NO: 29257 - DNA, 365 bp, Setaria italica
  Peptide Sequence Number=SeqID_95231
tggggtttccccctttccgcttccgttagcttccgatggatcgtcgagacagatcttacatgctatcggtcgatctttgtgcgagtgatctattccatctaggtgtcacccgtggggcttgatttggtccatttctttggcaatttgttcacaggactaagcgctttgagcgatagatatgtgttatgttagttcccaggttggagcttgttgtttgtcctgcgatgaatgatcacgagctcatgctgttaagggaaggatttagtatcacatattcagttcgtgtgctggcacaacgctgttattgctttgggcctttggggactgtgcacatgtgtagactacatacatggaaaggtagttta

SEQ ID NO: 29258 - DNA, 283 bp, Setaria italica
  Peptide Sequence Number=SeqID_95232
cccgtcgagcgagagctccggtgtgagacgcgacgatgacgtggtcgttgtggttgtcgacgtcggcgagcccggcctgcggctgctgctgctgctgatgcgagcccttcgccgccgccgccgccgatgcggaccccgccttccgctgccgcgacgccggccgcgtcgccattgccggcagggtgcgagatctagcagcacgaggcacccgccattggatccggtcgctttacgcgggtttcttctaggggttttcccccctttccggttgggtcggctcact

SEQ ID NO: 29259 - DNA, 351 bp, Setaria italica
  Peptide Sequence Number=SeqID_95233
cgcgtccccgcccccctcgcccgggtcctcctccgccgccgccttcgacttcctcgtcaagcgcctcccgggcaccccctccgcgcggctctgcgatctccgccccggcgacctcgtccacgtcggcgccagcgtcgtcggccgcgggtttgaggttaacaggatagctgacgcccgtgatgtcctcgtcttcgccaccggatccggaatcagtcctattcggtcacttattgagtcagattttgttcaagaccataaaactggcgtaagcctcttttatggggttagaaatcttcaaaggatggcatatcaggagaggttcgatgattgggaggccaaaggatttaaaat

SEQ ID NO: 29260 - DNA, 262 bp, Setaria italica
  Peptide Sequence Number=SeqID_95234
cggcggccgtggcgcgggcgttcgagatgctcagcgccgaggtggaggccggcgggggcacccccgccgtgccggcgagcggtgtggccaccgcgacgccgtcgccgatggtggcgtggatcctgggccgcagccccgctggggtccggccgctgcgggtcaccgactcgccgttccccgccgtgccggaggacgggtgctgcaacgagcgcgtggacgccgacgccgacgacttcatccgcaagttctacgagcagctcag

SEQ ID NO: 29261 - DNA, 926 bp, Setaria italica
  misc_feature (3)..(3): n is a, c, g, or t
  Peptide Sequence Number=SeqID_95235
atnttgaaaattgggaaagagcaccaagagtcaaagaaatacttggccttttcagaaaaaattggtaaatcatattctctcttttggtttctgaggtctgttcaggaaattgttggttcgtcacataaaatatttgatgagtgtactgatgaggtgaatagtatgatgttctcgttgttagataagacatcagaattgttttctacactagctagtgtgaatttatcattttgcttgttggattacaagaaacaaattcaatcttccttgagtggcagccctatcggaatcgaggcttcagaacatgctgaacagacatttgatatactagaaaattcagccttggagtgtgtcaaaagtatggctgaactgttacagaagactacaagaggcatacctgttaccgtaaaggacagcaagtgtgttatcaaattagaaaactgccgtgacgctgtatgctggaaaagattgttttgcaccatgtcttgcatttgtggattcttgtggggacttaatccagcattagagagcacatccaaagatcatctggtagcaacttcagaggacaagaaaatgttgcttcagtattgttcaagatttgccagttatattgctaagtttgagacctttgtagatatttgccttcatctgttgtttgtggataacaagggttctggctctactgattcgatctctgtttgttttccacaagagctggattgtgagaatggttttctgaatattgatgcagtcatggatgaatggacaaagtgcaaaagtcgtggtcttgacctgtctaagctacgatgcatggaaaatgttcttttggaaaacctgttgaaaggtgaatgtccactcatagcactcactttgagggaggtctacagtatatctgctgctattgttaagctgcatgccaatctatc

SEQ ID NO: 29262 - DNA, 203 bp, Setaria italica
  Peptide Sequence Number=SeqID_95236
aaactatcaaagaagcagttactagatatgccattgattttaattctttatttcatcatcattacctatctaacataagtttggtgggttaacaatgcaggctggtgcacttgttcaagtttacactgatggcactgtcttggtaacacatggtggggttgagatgggacaggggttttgcataacgtaaggttcgaccctaa

SEQ ID NO: 29263 - DNA, 545 bp, Setaria italica
  Peptide Sequence Number=SeqID_95237
taagttaaggttaatttaccttaacttaagttactttcgtttcgtccgtagtttggtttctaagtcatgctacatggaacgggtggatctctctgcccatgggttttacgccaccccagacattgattttgattgggcaatcggtcaagggaactccgtaccattatttcacttatggagctgcatttgccgaagttgagattgacacactaactggggatttccacacaaggacagtcgatattgttatggatctcggcttttcaatcaatccagcaattgatatcggccagattgaaggagctttcatccaaggtttgggttgggtagctatggaagagctaaaatgtgggtgataataaccacaagtggattcgacctgggcacctcttcacctgtggacctggcgcttacaaataccttctgtaaatgacatacctctgaacttcaaggtttcactgctaaaggtaaatatattacttattttgcaaattattgcctgttggcgtttctctattttgcggtgttttttctatttccgggcg

SEQ ID NO: 29264 - DNA, 1472 bp, Setaria italica
  Peptide Sequence Number=SeqID_95238
gcatgctgctctggtgctgagtagaaaggctcatgctcgcatattgtctattgatgattcaattgccaaatcttcacctggctttgttgggctgtttctttcgaaagacattcccggtactaaccacactggaccaattatccatgatgaggaggtttttgcatcagatgtcgttacttgtgttggtcagatcatcggaattgttgttgctgatactcatgataatgcgaaaaatgctgccaacaaagtacatattgaatattccgagctaccagcaattttatcaatagaggatgctgtcaagagtggaagctttcatccaaataccaaactatgccttgggaaaggtgatgttgaacaatgtttcatgtctggggcgtgcgacagaattatatcaggagaagtgcaagttggaggtcaagagcatttttacatggaacctcaaggcactcttgtctggccagttgattcaggaaatgaaattcatatggtctcatctactcaagctccccagaagcatcagaagtatgttgctaatgttcttggtcttccactatcaaaagtagtctgcaagactaagcgtattggtggtggatttggtggaaaagaaaccagatcagcaacatttgctgcggcagtatctgtaccgtcatatcgtctaagaaggccagtaaagcttattttggacagagatgttgacatgatatcatctgggcagcggcacagtttcctagggagatacaaggtggggtttaccaacgacgggaaagtactggccctagacctggaactttataacaatggtggtaattcacttgatctgtcccgtgcagtcctggagcgtgctatgtttcattcagaaaatgtctatgacatacctaacatcagaatcagtgggcaagtatgcttgacaaactttccaagtaacactgctttccgaggttttggtggtccacaaggcatgctgattacagaaaattggattcatcacatagcttcagaactccagcgaagtcctgaggacataaaagagcttaatttccacgatgatggaactgtgctgcattatggccagttgctccagaattgtagaattaggtcagtgtgggatgaactaaaggcatcttgtaattttgtggaagctcgcaaagccgttagaagttttaatagtaataatcgatggaggaagcggggaattgccatggttcccacaaaatttggcatatccttcacttcgaaattcatgaatcaggctggtgcacttgttcaagtttacactgatggcactgtcttggtaacacatggtggggttgagatgggacagggtttgcatactaaggttgcccaagttgctgcttcgtcattcaatatccctctcagctctgtatttatctcagagacaagtactgataaggttccaaatgcatcacctacagcagcctctgccagttcagatttgtactactcacact

SEQ ID NO: 29265 - DNA, 1417 bp, Setaria italica
  misc_feature (1346)..(1417): n is a, c, g, or t
  Peptide Sequence Number=SeqID_95239
taacccaaaagtttaagaactagacttacgtacaattacaaataagattagaccaatggttcccacaaaatttggcatatccttcacttcgaaattcatgaatcaggctggtgcacttgttcaagtttacactgatggcactgtcttggtaacacatggtggggttgagatgggacagggtttgcatactaaggttgcccaagttgctgcttcgtcattcaatatccctctcagctctgtatttatctcagagacaagtactgataaggttccaaatgcatcacctacagcagcctctgccagttcagatttgtatggagctgcagttttggatgcctgtcagcaaatcaaggctcggatggaacccattgctagcaggggaacccacaactcctttgctgagttggctcagacatgctacatggaacgcgtggatctctctgctcatggattttatgccacacctgatattgggtttgactggacgaatggcaagggaaccccattcctttatttcacctatggggctgcttttgcagaagttgagattgacacactaactggggattttcacacaaggacagctgatattgttatggacctcggcttttcaatcaatccagcaattgatatcggccagattgaaggagctttcatccaaggtttgggttgggtagctatggaagagctaaaatggggtgataataaccacaagtggattcgacctgggcacctcttcacctgtggacctggcgcttacaaaataccttctgtaaatgacatacctctgaacttcaaggtttcactgctaaagggggcaccaaatccaaaggtcattcattcttccaaagccgtaggagagccgccgtttttcctgggctccgctgtcctgtttgcgataaaggacgcgatctttgctgcgagggctgatgagggccactcggaatggttcccgctggacaacccggcgacacctgaaagaataagaatggcgtgtgtcgattccatcacaaagaaatttgccgatgcagattaccggcccaagcttagtgtatagagcggctgctgcgccgatgcgggggcacacaaattccgggcagaagcctgcacttgtaaagtctcaagccatcgtgaaggactggtgtagtgtcataggatcgctgaacattaatcagtggctgcaaataagtaaaggtagaaaatctgtgtaatgtaactgttttgatttgcctcacatgtacaggacataaaagcagtacagtaaagtgattacctcaggtataaaaaaagatcatatgtgccgcttgaaaacatggcattgacctactaaaaaaaaaaaaaagaannnnnnnnnnnnnnnnnnnnnnnnnnnnnnnnnnnnnnnnnnnnnnnnnnnnnnnnnnnnnnnnnnnnnnnn

SEQ ID NO: 29266 - DNA, 410 bp, Setaria italica
  Peptide Sequence Number=SeqID_95240
ccctgttcttggacggacacatttatccaatccacccgagatttgctcgatcgctccgagcacacactggcaccgcccgggccgtcggatctcgcggcgcaggagtcatgtcgacagcggtggccgaggtgcggccggcctacgggttccccggatccgggaagaggagcgccggcgagcaggcggccgtgttggcggccgggaagaggaggaggtcgagagcaagctcaaggagggtgacgcgctcggctgcttggacgcgctcgaggactccttgcccatcaagaagggcctctccagcttctacgccggcaagtccaagtccttcaccagcctcgccgaggccacgtcgacggtggcggaggccaaggagctggccaagccggagaaccccttcaacaagcgccgcc

SEQ ID NO: 29267 - DNA, 558 bp, Setaria italica
  Peptide Sequence Number=SeqID_95241
gctacatttgctaatcttgtttgcgatgttgaaatggaagtctagttcgcgagaatggtgtgagaaattgcaatttatggatttccccttttgtaacataagaggaaacggaagctttgacccaattggctcagatagctcacagaattaactcgactttaattttggtgtgatcaggaagggcctctccagcttctacgccggcaagtccaagtccttcaccagcctcgccgaggccacgtcgacggtggcggaggccaaggagctggccaagccggagaaccccttcaacaagcgccgccgcatcctggccaactggtctcggcgagcctcctgcagctcgctcgccacggccacctacctccccccgctcctggcccccgaccacgccgtcgccgagggggacgagggcgaagaggacgactccgacgacgacgaggaggaatgcaaccagctgccgcaccgcggtctaagtaactattaccgggggttagtacgtaccggtactaaattttaagtaaccctaaattttaagtaaccttaaccgtaaaccgtaaa

SEQ ID NO: 29268 - DNA, 1214 bp, Setaria italica
  Peptide Sequence Number=SeqID_95242
ccttcgacttaattttggtgtgatcctatcctgcgtttcgcttcatctttcccctccctccccccatcacataccataccaaagttgttgagttcctgtccctgttcttggacggacacatttatccaatccacccgagatttgctcgatcgctccgagcacacactggcaccgcccgggccgtcggatctcgcggcgcaggagtcatgtcgacagcggtggccgaggtgcggccggcctacgggttccccggatccgggaagaggagcgccggcgagcaggcggccgtgttggcggccgggaagaggaggagcgacgggttcttcatagaggaggacgaggcggaggaggaggtgctcaccgagacctcgtcgctcggggcgccgtcgccgtcgggctcctcgatcggggagaactcctcgtcggaggccggcggggaggacggggaggaggaggaggtcgagagcaagctcaaggagggtgacgcgctcggctgcttggacgcgctcgaggactccttgcccatcaagaagggcctctccagcttctacgccggcaagtccaagtccttcaccagcctcgccgaggccacgtcgacggtggcggaggccaaggagctggccaagccggagaaccccttcaacaagcgccgccgcatcctggccaactggtctcggcgagcctcctgcagctcgctcgccacggccacctacctccccccgctcctggcccccgaccacgccgtcgccgagggggacgagggcgaagaggacgactccgacgacgacgaggaggaatgcaaccagctgccgcaccgcggcaagaacatccggggtgcgccggcattgccattgcctccgccgaggctcctcggtgttggcatgcagaggaggaatggccttgggagcttcagatcccctaggtccttctcactgtccgatctgcaaaatagcaggattgatggtagtgattagcagctgcaaatttgctccccactttggcccctcttttggccagtagagatgtagtagccacttactatataattccagtgtataagatccaagtttgttgtgttcatcctgcctttctttgacctcagaagttgtgtatgaactgacctaacctgaaccttgtatcattaactaatgatgatgatcgtggtggttagctgcctttgatccatttgaaattaaaaaaaaaaaaaaaaaaaa

SEQ ID NO: 29269 - DNA, 850 bp, Setaria italica
  Peptide Sequence Number=SeqID_95243
aataccttacttaatacaacaataagaaaagaagagcctgctaagtaaccaactggtgtgttgaataatatgtgcaattgtcctgttacacgcttacaccttggtatgttcaactgccctttcctggcttccttctaaaacacttgacaagcattgcccagcacatcctttgatatgacaccatctgagttcgatcacggagaggagggcaatcttgcaatatttccagatgaaatacagccagagacacaagaatgaaactaaatcagagcaggagcccattggctggttttcataatatagttgcttggatcctttttgagcctcaaaattttaagacaagtgcctagttagcaataatgactatttattttgaattgatataggatggtataatacagtatttacaccttacattggctttccctatcctatgaaagtctattggctggttggccttcagtaactatgctgcaactgagcagccagtttttctttattttatcactttctctgagcattggtcattacagaatatggcagaccccactttataaatggtactgttttactggaatgtgttcaatcaccactaattcagcgtagcaccccttttacacagttattctaatttatgttgaattcagacatcaaggatttatgcaatcctttacctttggactaattttgcaggttgacatcaaagttgccccggggtctcttgccaatgaagaatcagtaaacaagcaactgaacgacaaggaaagagttgcagcagccttggagaaccccaacctacgccagttggttgatgaatgcttatgctccaatgatccatactcacattaac

SEQ ID NO: 29270 - DNA, 605 bp, Setaria italica
  misc_feature (586)..(586): n is a, c, g, or t
  Peptide Sequence Number=SeqID_95244
ctttgtttcagtactaggttatcaaagtaccaggctatttttttgttagactatagcatctgtttgcatatttttctttgtttgtctgcacaagaatatactgctgaatattttcaaatcatatgacattctaccgtagtaggccacctttaccaggcgcaaaatcaatcagcagaataccatcatcgtataatgcaattgcaaatgtgacttttaaatatttaacatgtgattgtgtatgaaatggcagtaaacaagcaactgaacgacaaggaaagagttgcagcagccttggagaaccccaacctacgccagttggttgatgaatgcttatgctccaatgatccatactcacattaacttattccatcctgcttcgcaagtcacaacctgcctgctgtacagtaataatcgtgcatgctgtagtttgccctgtatgccgtatctggcaacataaaattaactgcccaagccatcctttttgccgtttaaaatgtatgcatcccagaatatgaccagagttcgtgtgtgcctgcgtatgtgacattagcactccaaagcaagggtagtatgctgtaaaaacttntctttgttgatttattgta

SEQ ID NO: 29271 - DNA, 316 bp, Setaria italica
  Peptide Sequence Number=SeqID_95245
cgccggcctcctcctacatgggcgacatcgacctgcccccctcctgacgacgaggaggacgaggccgagctcgccgccgccgccgccaagcccaagccgtcccgcgccgccaccgtcgacctcagctccggcgtcgcgccgacccagaaggacgcgaagaagaaggacaagcgcgaggccatggcggccgcggccgccgaggccgccaggcaggaggcgctccgcgacgaccgcgacgccttctcggtcgtcatcggcgcgcgcgtccccggatccgccacggccgatgacggcgccgtcgacgacaacgtcaagg

SEQ ID NO: 29272 - DNA, 318 bp, Setaria italica
  Peptide Sequence Number=SeqID_95246
atctcgagcggcgtcgcgagcccagctgtgtaaggctggaggactctgatggagtggtggagggagtggtagtcggagaagaggtgttctctgtgcagggccctgtgcagcaggtagaagaggggctcggtggcggcgacatggagcaggagcgccacggccgcgccccgcgcgtcccagagagggaggtgcctcagggaagggaaggcgtacagggccatggccgccagccagagctgcaggatcaggaagttgtcccagtgccattccttgtcgatctgctcgtagtcgacgccgtcgcggacgatgacgcggcgg

SEQ ID NO: 29273 - DNA, 1501 bp, Setaria italica
  Peptide Sequence Number=SeqID_95247
ggtaaatcttaggggcatttttgccgttaaagctggatgcattccagagaatgcattttgagatacaaggatctgcaagacaagctgatcttcaacattgctactataaggtagggagctaaatatttacattcaacaccgtactacggtgacgaatcacgagacacgctgcaaatcaacagtaagaaaaggcttactgctgtattttctgtacaggaaatttgggctgccagagcacctcctacaggggtaaatttcttttcttcttcttttaagcaaaagaaaataaatgaacagaggtagaacgattctggttgttgccacatccgacatcagcacagcttttccttttttgctggttgatcctacatgtgtgaacgtcggtgtctgaacctgggatccctgtaatgaccagccattctccttgaccccgcaaccctaggcatggccccagtaactatatattcatcatcaatttcatcaaatctgatttctcttatgtcaacagatctagatggcacttcaagggtaaggctttcttgactagatctattgctgctcctcgttccactctctctcctttcccttgttcttgcccttcttcggcctcctgaagatctgcggaaagccttgcaaaaaatacaggatgcccaccagttccttctaaccctgtggtaaacttcatactcatctccagcttcatcatccccatactcgatgacataatctcccaagactacaccattaggaacctgtgcatgtattgtgctcaaaacatctattatatcagaagactgctgcaaattctcccaatcaacccggcgagcaggatcaacctctgaagggcgtgaatttggatgtttttgttgggtgtgcttctgaagttcatggaagttaccagcatatgagcaggaactctcttcacagcatcttttcttctggttaagatgcaagcgagcctcatcaataacaaaccacccaatcacatcacctctgcacaatgggcaggctgggcggttatttgcattagacgaaatgatatgaatgctatcaaggggagccacagcaagagatgagactttcacactgactggtatcccatgagcaactttgaacctctcaagacagtttgaacgtgtctgatctgtgtcacatacgaatggtctacaacccttctcatatgaggtgcacctcagtaagactgcattgtgagggatatcaagacagatagggcaagtaacatcctccatccatctctgatcgaattttatgtccagatcaaaggagctgggctttaccaccttcttcatcaacaaattcccagaacccatgctgaacttcctaggtagatgtttggagctaccgagttctcatggcagccgctgcgtctgctggttggtggcggagagagctcgaggaacggacgccgcagagagtgactaggtgagtagaggtgagacgtcctcctcgccttgctccgcgacgccaggtctctatccct

SEQ ID NO: 29274 - DNA, 549 bp, Setaria italica
  misc_feature (540)..(540): n is a, c, g, or t
  Peptide Sequence Number=SeqID_95248
gatagcctctcagggctcactggatgcactaaatgagattcttaaagaacctgtaccaatgaaccgcttcagaccaaagtgagcatcccgcatgtttacttgtaattttgtttcctgaagagatttatttgttgggttatcctgttgcggttgatagctagttggttactaattgcttactcaccttcttagtaagctgattttttttgggcagtattttagtggatggatgccacccatactcagaggacctgtggaaaaccataaagataaacaacctaacatttgaaggtgtgaagttgtgcaaccgttgcaaggtgccaaacattaatcaagacaatggaatacatggcgctgaaccaactgaaactctactgacatttcggtccgacgaagtgctacgtccaagccacaaaatacacggcaggtgtactttggtcagaatttagtctgcaaggaatctctatcaggaaagggcaaaggaaaagaatacaatacaaaggttaggacgaataccaagtttaatagttacttaagaanaagaacaaa

SEQ ID NO: 29275 - DNA, 932 bp, Setaria italica
  Peptide Sequence Number=SeqID_95249
agtcgcagcagaagcaggagccgcagtcctaggcgaagagataggttgcgcagtgaacgtgcaccccgccgcagtcgcagtcgcagtcgcagcaggagccgcagcccataccgtcgcagagaacgacgtggcaacagggattttatgtgcaagaactgccggagacctggacactacgctaaggattgcccatctgcggctacatgcaataactgtaatcttccaggccacttcgcagcagaatgcacctcagcaactgtttgctggaactgcaaggaatctgggcacattgccactgagtgcaagaatgaggccctgtgccacacatgcaataaaacgggtcatttggcacgagattgccctacttcagggtctaacgttaagctatgcaacaattgttttaagccaggccacattgctgttgactgcaccaatgaacgggcctgcaacaactgccgtcaacctggacacatagctcgggagtgcaagaacgacccggtttgcaacctgtgcaatgtctctggtcatgtagcccgcagctgtccaaagacaactctggcttcagagatacagggaggcccgttccgtgatatcctctgccgcatctgtggccagccaggacacatcagccgcaactgcatggcaaccatcatctgcgacacatgcggtgggagggggcacatgtcatatgagtgcccgtcggccaggatattcaatcgcggtctccgccggttctgaaaaccattaacaaggatatgttatcaagggctccgctggtttcatggttgaatttcgtgttgtttcatttgttcctgacgaatactggatatagccctttgtgcgccaaacagcgatgtaccatttcatgtgaaaaattgccaggcccaagtcatgcactcatgctccatctgtgttttgtgttttttaaaaaa

SEQ ID NO: 29276 - DNA, 541 bp, Setaria italica
  Peptide Sequence Number=SeqID_95250
ggagaagaggccgggccaacaggcccgcacgccaagaaaccagccgagccggaggctgccgccggagatggggccgcagggggagggttccttctgtcggcgtcgatgccgccagcacggcagctcgagttcttcctccgcagcttcgagcgcgccgtcaagatgcgcctctcacccctcgagctcgattcctactcagaagggtgcatggtccagctcgatgagggaagcgcccaggatgtggatagctttggtgaacatgtgaagggggcattcggcgcgtcgtggaaggaggaactctgcgaggggcaggttgtggagggtgagatcggcgtgggcagcccagcgctcctggttatcagctcggctgctctgcgatccttagagcttctgaggggcttaaaaacgtttccaaagaatgccgcccagtaaagctctttgctaaacacttgaaagtggaggagcaggtggcgatgcttaatgctcgagtaaatattgcctgtggtacaccaagcaggatcaagaactaattgacatggaa

SEQ ID NO: 29277 - DNA, 941 bp, Setaria italica
  Peptide Sequence Number=SeqID_95251
cactagcagggcggctagctacagcggctattagtgtagctagagctagtgcgaagcttgctggtggtgcatgcaatggcggcctcgcttgggctgaaccctgaagctctcttcagttccttctcctcgtcgtactactcgcccttcatgtccgactacgcgccgagcttcccggcggccaataacgccgtcgacgacgcggcggccttctccgccgagcttgatgatctttgccggtttgagtactcgccggcggcgccagtcttcgccagcgccggcggcggggctggtggggacgatcgcaacgacaagtcgatgtggtgtgagggtggagatgagaagagaccgagaagcaatggaaggatcgggttcagaacgcgatcggaggtggagatcttggacgacggtttcaaatggaggaagtatgggaagaaggctgtcaagaacagcccccaatccaaggaactactaccggtgctcgtcggagggctgcggcgtgaagaagcgcgtcgagagggaccgcgacgacccccgctacgtcatcaccacctacgacggcgtccacaaccacgccagccccaccgccgccgctgccatccagtacggcggcggcggcttctacagcccgccgagcagcggctcgccgtcggccgcctcctactcgggctcctacctcttctgacttccgagtctttttcaaggacgtgccctgaccacgtgctgtatcaagaggacttgacccaatggtttaatttaccggcccagtaggatgagaaaaatgttcggagggatcatcaccggccggataggttccgacctgcctgtagatttttacagttgtgcagtagtagtaattagtaagctagaaatactttacttacctcaattggttacctagctcttctgatgatgcatcaatcatcactaggataaccgatgat

SEQ ID NO: 29278 - DNA, 416 bp, Setaria italica
  Peptide Sequence Number=SeqID_95252
gtcgcacaaaaagagaaaatacatggacttgaagcccccacttcaaaatcttgcttccacaattttagcttctatataaattgcagtaacataggcctgtcttttggcagcaaaaagcttcatgtttctccagaagattggtgtacattgccgtatgctgacgaattaacctttgagtgcagcagttccatggcgcctttccttcttgaaacgagattgatccggatcgaagccaccttcctctgcaccatagacagcccatgagggtgtcaaggccatgtaatcttggctcttgaaaggctttccggatgttaccagttcgtggaatcggtcataatctatccaggtatgccatttgccgttgatcttaaacttatccacctttgcaagcaggacgcagcatgaatgagcatgct

SEQ ID NO: 29279 - DNA, 793 bp, Setaria italica
  Peptide Sequence Number=SeqID_95253
ttttttttttttttttaggttttgaatcaatgagtttgtgtccaccgtcggcgaacaacggtattattacttggcaaaaacagtatgcaacagaataaactatagcccctggtgcggtgtgcattgatacagtgatacataaacatgtcaacatccagatctagctagcaaaaaagtatagattttttcccctattctgaaagcatttacatctctcatgatctgagcaaaacagacgatggtgaacaagttacttcctggggctctagtactcaaactgcaaaacgctccatttacattgctagcacaaagcaacagtttcacaaaacgtttatcatgtagccagcagatatgcagaaacaattccttgtattgtagcacatatgggtggcacgttttggtacaagatgtgcccagaggaactaatcttcagattttgtaggctcctttttcttcccataaataaggccagtatcctgtggatcaggaatgggtttccgcttctcaacataacgataaggatccgaggcagcagccaaagcagctcgctcctcctgctccttctggagctgccgcgcgggcttgacccagaggtagtaggcgaggcccccggcgacggtccaggaggcgaggttgctccacccgcggagcccgcccagcgcgttgcccacaaacgaccgcgcgttccccaccacccggccaaacccgctcgccggcgccatctccctccccctccccctccgctccgcaagagccgcgaccgacctgccccgacgcgtctccgacccccgac

SEQ ID NO: 29280 - DNA, 998 bp, Setaria italica
  Peptide Sequence Number=SeqID_95254
agtctctttttttaggtttttgtttttttggtttaataactggaagtctggaattaggtgcaacttcagaaaaacagaccagaactacattgtctctctcacttgtgtccacaactcttattagcataggaaactgcagaaagtaatagtacttgccatatgcgttctaatctattacccagcaaaatagcaacgatactactacgagttcagtaatactagtacccagacaaaacggataatccactctcatataggccatagcagcggatcaaaacttcccacgcatcggaccaccagattacctcttgcgatggatcaagatggtcgcgatgaaggcagtaataccagctccagcagccaccgcagcagccaacagctcggcaggcaccagccccgcatccttaggcgtcccagctgagggtgcagccgagtccatctcctcctcgcccttgcccctctcagaggcggtggcggaagccttcagggcctcgatctccttctcgagggcgaccttctcctggtgcgcggtctgcagctggtccccgagccccccacccctgcgcatctcctcctcgtggccggccttctcggcgtcgaggaggccctggaggcgctcgacctcggcgcggagcgtggcggcctcgctctcgttggtggcggcggcctgctcgaaggcggcggcctcgtcgcgggcctgggacacgagggcctcgaggcggcgggactcggaggacaggaagcggttctggtggctcacggactcgagcttctcctccaggtcgcgcttcgcagcgctgagggcctcgatctcgtccgcagcgtcgtggagcttgggcgtgcggtccccgccgttgcccgcgaactcgaagtcggcggcggcggcggtgggggaggcgaacgtctcctcgccgttctccatcggaaaccctcctctctctctctctcttctctcgcggcggcgcggtggatgcggtgcgacggtaggaaataggaaa

SEQ ID NO: 29281 - DNA, 678 bp, Setaria italica
  Peptide Sequence Number=SeqID_95255
agtctgtgattacctgccgtatggaacccttctggatgttataaattcccacttagtagtcggtcggtacatggatgaggtcctgtgcatgtattataccatcgagatgctgaagatgctggaaacactgcatagtgttggcataatccatggtgatttcaaacctgataacatgcttgtttgctacctaagtggagatataacagaagagaccttcagaagcgaaacaagggacgagcagaatcaggggctctgccttgttgactggggtcgtggcattgatctgaatcttttccgcgccggcacggagttccacggggactgtggaacgtcaggattccgctgcgtcgagatgcaggaggatagaaactggacgtatcaggtcgacacatacggcctctgcgccatcgtgcacatgatgctacacggggcagagatgagcgtccagaaggtgcccagggcaggcgggggctacgaataccagccgaggctgccgtttagaaggtactggaacgtggagctgtggaggaaactcttcaccatgctgctgaacgcgccctccaacggcagtgacgtgacggcgctccggggcctgcgcgcgtccttccgggagcacatgtgcagcgaccggcagctcgtcggcaagctgaaccagcagctggcgaagcagaggcctcc

SEQ ID NO: 29282 - DNA, 232 bp, Setaria italica
  Peptide Sequence Number=SeqID_95256
tgtgtatccaaacgggatctatatgatgatgccacagaagcacaacattaggcatcagccattaggttgatgcctaattaggtacagtacagtaggtcaattatattgaagctaagctaagaatgatgcatgccatgcaacaaagcaaccatgtgctccctcagttccaaattgcaggtgtgcatagatatttgtaatgcatctaaatatagtgtgtgtctatataaccttg

SEQ ID NO: 29283 - DNA, 237 bp, Setaria italica
  Peptide Sequence Number=SeqID_95257
atgtccttgctaaagttgaagtgttgatgtttactgatcctaacttgtaaacgcaagagcttcgtgctcttgatttggacggactattttgtactaattgtatggttatgaaatttatctgtgttctttgttttggtgcttcgacttggtgcaaaatttcagttcttggtgctggaataattcagcagctgcgctgctttggatgtttcagtttgataatcattttgagaagccgga

SEQ ID NO: 29284 - DNA, 987 bp, Setaria italica
  Peptide Sequence Number=SeqID_95258
tcttctgatatcctcataatggaaaaggacaggaagattagacagatggaagttgaaatagaggaactcaggaaacagagagataatgcacagtcagagctcgaagaactgcggaagaagaagggtgatcaccagccagggtggaatccttttgactcaccacaaaaagcccgaaagtgcctcacattttcgggatcattagagccaagtaacaaaattaagatgaggagctcgattaggcaatcatctactgctccattcgtgttaaaacatgaaatccgcaagctggagcagctgcagcaacagcttgaggttgaagcaaaccgcgccattgaagtacttcacaaagaagttcaatgccacaagcatggcaaccaggatgctgcagaaactaattgctaaacttcaggcagaaatcagggagatgcaagctgttaggtctgagaacggagacgtggagatgattacagatgaagcaaatggatctgatttgaaagatgagatctctagacttcatatgcaagacaatgatattgccaaactcgaggcaaagttagaaaatgtgcaacgttctattgacagattggtgatgtcacttccaaatgttgccatgccatgtaatgagactaccccaaagtccaacagatcaaagaagaagaagagaatgcttcttccactgggtgtgagcaacaacataaacagagcaaatcttctaagagcaccttgctctccccactcttctagtaggccttcagaatcagaagttgagaacagggccccagaaggtgacactgtgtctgttgaaggatcagaaaaggctactcccaccaagagtgaagatggagatatatcatcacgtgatgaaacaccactctataggcgatccagctcagtgaatatgaaaaagatgcagcggatgtttcaaaatgcggcagaggaaaacgtgaggagcatcagagcttatgtgacttgtaatttgtaaggtaa

SEQ ID NO: 29285 - DNA, 666 bp, Setaria italica
  Peptide Sequence Number=SeqID_95259
cccgattgtttcgatttttggaatgggatatttacggaatccccatgaataggatcaaaccttattccatgctatttccataagattcctctttcttattcttaagcaagcccccgagagggcttagttgatcatgatttctgttttctctttcttttcctttttatttgtttcgaaaaagatatcgtccgattctccttctattgattcttttccgatcgagatgtatggatccatgtgtctacatacctagattctgttcatggattaacgaaaatgcgcaagagctctatttgcctctgccattctatgagtcgcttcctttttgcgtatggcacccccactccctttggcagcatcttacttaatttcggtaactttaattttgttaaagtccttatatttcgacccggacgcttttgggatgcttctaataaccaacgaatggcaagtgctcttccttgtttagatcctatttcaatcggaactttccgcgtcgatccttttttattacgtcttgtttttactcctatattgggagttactctacgtattgcttgacgtaaaaccaatagtggatttgtttctgtcttttgttgaatcaaattctctatcgagccgtgaaaaaagaattcaacaaaagacagaaaatttgataagccaatg

SEQ ID NO: 29286 - DNA, 454 bp, Setaria italica
  Peptide Sequence Number=SeqID_95260
cggttcttttttctgcagtacctcgacgtgacatgagcgtgaaagaggttcaagaatccgtttcttttataagggctaaaaacgaatcacttatttttttggctttttgaccccatatttagaacgcccttgttgacgattctttactgcgacagcatctagggttcctcgaataatgcgatatctcacaccgggtaaatccttaacccttcctcctcttactaatactacagaatgttcttgtaaattatggccaataccaggtatataagcagtgatttcaaatccagaggttaatcgtactctggcaactttacgtaaggcagagttgggttttttggggttgatagtggaaaagtcgacagataagtcatccttactgtccctctacagaaccgtacatgagattttcacctcatacggctcctcgttcaattatttcgaagggatccta

SEQ ID NO: 29287 - DNA, 1400 bp, Setaria italica
  Peptide Sequence Number=SeqID_95261
gttttactcctatattgggagttactctacgtattgcttgacgtaaaccaatagtggattgtttctgtcttttgttgaatctttttcacggctcgatagagaatttgataagccaatgatttttttccgtctttcataatacggttaaccaccatgttaactaatcgattacgaaaattggatcggattttgcggttcttttttctgcagtacctcgacgtgacatgagcgtgaaagaggttcaagaatccgttttctttttataagggctaaaaacgaatcacttattttttggctttttgaccccatattgtagggtggatctcgaaagataggaaagatctccctccaagccgtacatacgactttcatcgaatacggctttccacagaattctatagggatctatgagatcgagtatggaattctgtttactcactttaaattgagtatccgtttccctccttttcccgctaggatcggaaatcctgtattttccatatccatacgatcgagtccttaggtttccgaaatagtgtaatggaaaaagaagtgcttcgaatcattgctatttgactcggacctgttctgaaaaagtcgaggtatttcgaattgtttgttgacacggacaaagtaagggaaaacctctgaaagaatttccatattaaccttggacatataagagttccgaatcgaatctctttagaaagaagatcttttgtctcatggtagcctgctccagtccccttacgaaactttcgttattgggttagccatacacttcacatgtttctagcgattcacatggcatcatcaaatgatacaagtcttggataagaatctacaacgcactagaacgcccttgttgacgattctttactgcgacagcatctagggttcctcgaataatgcgatatctcacaccgggtaaatccttaacccttcctcctcttactaatactacagaatgttcttgtaaattatggccaataagatgcattctccaaggtggatgacaaatttgtaagttaactcgtcatcatttcctctgtatgaatcgatattattccatttttccaatttcttcctgaaaacttcccaagaaaaatcctgaatgggatccaaaattgacgggttaatgtaagattatccatgcatttaggcactcttcaaataggaacccattttctgctttgatgagtcatccgagatcctttcgatgacctatgttgtcttgaagggatatctatatgatccgattgattgtggtagcaatagaacggggaaagcatacagaaaaagacagttctcttcaattttgattatctatatattagtttgtttctatttctagatatcattaaaaaattatgtcccaattgcatataggacatatatct

SEQ ID NO: 29288 - DNA, 1295 bp, Setaria italica
  Peptide Sequence Number=SeqID_95262
ctttttcacggctcgatagagaatttgataagccaatgattttttccgtctttcataatacggttaaccaccatgttaactaatcgattacgaaaaattggatcggattttgcggttcttttttctgcagtacctcgacgtgacatgagcgtgaaagaggttcaagaatccgttttctttttataagggctaaaaacgaatcacttatttttttggctttttgaccccatatttagaacgcccttgttgacgattctttactgcgacagcatctagggttcctcgaataatgcgatatctcacaccgggtaaatccttaacccttcctcctcttactaatactacagaatgttcttgtaaattatggccaataccaggtatataagcagtgatttcaaatccagaggttaatcgtactctggcaactttacgtaaggcagagttgggttttttggggttgatagtatacaccctagcacatgttcctcgacgctgaggacatcccttaagcgcggccgattttctagcatttcgtattggctgtcttgcatttctaataagttgtttaaccgttggcatgtcgtatgtatatagaaaaaatggattggtttagatcgatcttaacctgatgattcatcatcatgaagtatttctattttctataaaatagcataaaatccgaatttaggtttgaaataaatttacaagaaatccagccactaccaatccttaaacatttctggaaaccacactggatcagtatcgcagtgctcgtcaatcatttcatcccctacaatatcgacaagtccataagctttggcttcgtctgctgacataaaaacatccctttccatgtcttcggatacaacccaaaaaggcttgcctgttcttagtgcataaacccttgtgatcatttcgcgaactttgtgtaactcttccacttctagtaaaaattctggtgtccttgcccgataataagcactagcaggttggtgaagcataatcctagcgtgagggaatgctatacgcttggtgggttctcctccaagcagaatgaaggaggccatggaggcggctattccgaggcatattgtatatatatcaggtgtcaccgtttgcatcgtatcaaaaatcgccattcctgagattagccacccgccaggggagtttataaacaaaaaatatcgctaattccatcttctatactgagatataccatcagacccgtaatatgattcgtgatctcgcaacgaatctcttgacctaaaaaaagtgtcctttctcgatacataaca

SEQ ID NO: 29289 - DNA, 1781 bp, Setaria italica
  Peptide Sequence Number=SeqID_95263
cttcctttttgcgtatggcacccccacctccctttggcagcatctactaattcggaacttaatttgaaagccatatttcgacccggacgcttttgggatgcttctaataaccaacgaatggcaagtgctcttccttgtttagatcctatttcaatcggaactttccgcgtcgatccttttttattacgtcttgtttttactcctatattgggagttactctacgtattgcttgacgtaaaaccaatagtggatttgtttctgtcttttgttgaatctttttcacggctcgatagagaatttgataagccaatgatttttttccgtctttcataatacggttaaccaccatgttaactaatcgattacgaaaaattggatcggattttgcggttcttttttctgcagtacctcgacgtgacatgagcgtgaaagaggttcaagaatccgttttctttttataagggctaaaaacgaatcacttatttttttggctttttgaccccatattatacacttcacatcgattcacatggcatcatcaaatgatacaagtcttggataagaatctacaacgcactagaacgcccttgttgacgattctttactgcgacagcatctagggttcctcgaataatgcgatatctcacaccgggtaaatccttaacccttcctcctcttactaatactacagaatgttcttgtaaattatggccaataccaggtatataagcagtgatttcaaatccagaggttaatcgtactctggcaactttacgtaaggcagagttgggttttttggggttgatagtggaaaagtcgacagataagtcatccttactgtccctctacagaaccgtacatgagattttcacctcatacggctcctcgttcaattatttcgaagggatccttttcctcgttcgagagtctccgcccttcttccactccgtcccgaagactaactaagaccaattgagtcacgttttcatgttctaattgaacactttccatttatgattaaaggagaagattgttcttttaccaaacatatgcggatcaaatcacgtcttataataagaagaaatctttctcggtatcaatccccttgcccctcattctttgagaatcagaaggatccttttcgagtttccatttcttcatttttcgagtttccatttcttcattttgaatctgggctcttctatcttcgacttctttttttggctttattctttatttatttcatttcgatttttccctcttcctctatccctatcctctaggtacagcgtttgcatcaatagagaactttttcctctgtatgaatcgatattattccattccaatttcttcccgaaacttcccaagaaaaatcccgaattggatccaaaattgacgggttaatgtgagcttatccatgcggttaggcactcttcaaataggaatccattttctaactggctttcgtgctttggtgagtcgtccgagatcctttcgatgacctatgttgtcttgaagggatatctatatgatccgatcgattgcataagacccgcagtagcaatagaacggggaaagtatacagaaaagacagttcttttcaatttcgattatctatatattagttcgtttctatcgtttctatttctagatatctatttctatatatggggtcaaaaagaccaaaaaaataagtgattcgtttttagcccttataaaaagaaaacggattcttgaaccttcttttttctgcagtacctcgacgtgacatgagcgtgaa

SEQ ID NO: 29290 - DNA, 473 bp, Setaria italica
  Peptide Sequence Number=SeqID_95264
ccttcctgtttaattgcctgttcagtgcagtgagaagctgcgaatttaatttattattagaggggttagctgactaataactagagaagagggcgccgttcctctggaactggtaagaatcgaaggggtcctcgtaggccggcgacggtggcagcaagaggtcgtgccaccgcgcgtcgtccaccatgtcgtcctctagccccgtcgtctggaacacgaactccggcaagcccatgtccatgaacgcgaacggcgactccacgtcgcgggtcaagcaggacgacgaccccgaggtggagtaggacgtcgtcggtgtcgagaccgcggcggcggcggtgggggcgcaagtcaacgctggtaatggcggcggcggctggtcgcccagtggcaccatgatctcgtctgggtgcatcatcggcacctcgtctgtgcagaagccgggggacttgcggaggatcagctcgtcgtcgccg

SEQ ID NO: 29291 - DNA, 366 bp, Setaria italica
  Peptide Sequence Number=SeqID_95265
ttacaccatgtggctagctgctggtgggtctcgccggcgccggcgatagagctcggtgggagacgagcgggcgagtgagagatgagatcgatccctagctagctctggcgggggtggggagggggagccatggcgatggctttataggcggtggccgggggtgttgggaggcagcacattccgagatataccgatgccgtctcctaggcttggctcgctgccaacctctcacgaggccgccacttgggctggcaatggtggtggtgccgatggtggccgccgcatcggattggattccaccagggaggagaagggaattgacgagggagatgtcgaagctgtggagtggaggtaaatcgaggaggg

SEQ ID NO: 29292 - DNA, 474 bp, Setaria italica
  Peptide Sequence Number=SeqID_95266
aattatcatagaatctacacactcactggtatccgatggcgatgaattccgcttgacaaaagagcaggaaaagtgggttgtcgatattatgctctcagtgacactggtgaagcttctcctggttatatattgccgaacattcaccaatgaaatagtgaaggcctgtgcacaggatcacttttttgatgtcatcaccaatgttattgggcttgtggctgcacttcttgctaattatgttcaaggctggattgacccagttggagctatcattctcgcgatctacacaatcaggatgtggtcgatcacggtgctggacaatgtccactctctggtcggccagtcggcaccaccagcatttctccagaagctcacctacctatgctggaaccaccacaaggccgtgaggcacattgacacggtgcgggcgtacacatttggttcccactacttcgtggaggtggatatcgtccttcc

SEQ ID NO: 29293 - DNA, 376 bp, Setaria italica
  Peptide Sequence Number=SeqID_95267
ctgcaacgtgccggccgtcaccaccaccgtcggccacatctccttcccgagccaggagcccaacgcctgcttctacagcctcaactccctctactaccgccccggcaagccgggccccgcccagtgcggcggcggcggcggcggcgtgtcccccgccgcgccgctgaacacgtccctgttctactgcccaccgtggccgtggccgcccatcccgttctgcacgccgcggccgtggttcccgcccataccgttcttcacgccgccgccgccggcgttcccgttcccgctgccgccgataccgttcctcaccccgccatcgcctccgccaccggcgttccctttccctctgccgccatggccatggacgccgccatcg

SEQ ID NO: 29294 - DNA, 185 bp, Setaria italica
  Peptide Sequence Number=SeqID_95268
ccggttcctctgcctcttccggttcaagctgtggtggatgacgcagcggatgggcacctccggccgggacgtcccgctcgagacccagttcatgctcgtcgaggtgccccccgcctccggcgacggcgtcaagcgcggcctccagagcctgtcggagggcggcgcgccgccgcggttcctcatca

SEQ ID NO: 29295 - DNA, 1043 bp, Setaria italica
  Peptide Sequence Number=SeqID_95269
ttacaaagactagtaggtagtggatgacgcagcgcatgggcacctccggccgcgacgtcccgctggagacgcagttcatgctcctggagagccgcccgggcaccggcggcggcggcggcgacgacgaggaaagcggcgagacggtgtacctggtgatgctgccgctgctggagggccagttccgcgccgcgctgcagggcaacgagcgcgacgagctcgagatcaccctcgagagcggcgacaaggcggtgcagacggcgcaggggacgtacatggtgtacgtgcacgccgggaccaaccccttcgacaccatcactcaggctgtcaaggtggtggagaggcacctgcagacgttccaccacagggaaaagaaaaagctgccgtcgttcgtggactggttcggctggtgcacttgggacgccttctacaccgacgtcacagccgagggcgtcaagcagggactccagagcttggcggaaggcggcacgccaccgcggttcctgatcatcgacgacgggtggcagcagatcggcagcgagaacaaggaggagtccaacgccgtcgtccaggaaggcgcgcagttcgccagcaggctgacggggatcaaggagaacgccaagttccagaagaataagaacgacggcaccaagaacacctccgaggagcagagccagacccctgggctgaagctgctggtggaggaggcgaagcgcgagcatggcgtcaagtacgtgtacgtgtggcacgccatggcgggttactggggcggcgtgaagccggcggcggaggggatggagcactacgagagcgcgctggcgtaccccgtccagtcgccgggggtcatgggcaaccagccggacatcgtcatggactcgctctctgttctgggcctggggctcgtgcacccgcgcaaggtgctcagcttctacgacgagctccacgcgtacctggcctcctgcggcgtggacggcgtcaagggtaacgtgcagacatcatcgagaccctgggcgccggccatggcggccgggtgtcgctgacgcggg

SEQ ID NO: 29296 - DNA, 2812 bp, Setaria italica
  Peptide Sequence Number=SeqID_95270
cttggacgaggagaggagcaccacctgtatcgtttattggtgtgtactagttaattaccgtcactaacctaattaccctcctcacgctgtttctgttctaccgttcctactcctatacctccccttcgcttcatctgcaacctcagacaagagggtgttctgtttctgaagttatcttgggttgatcgagagcaggggaagggaagatgacggtgactccgctgatcacggtgagcgacggccggctggcggtgcgcggccggacggtgctgaccggcgtgccggacaacgtgtcggcggcgcacgcggccggggcggggctcgtcgagggggcattcgtcggcgcccacgccggcgaggccaagagccaccacgtcttcaccctcggcacgctccggggatgccggttcctctgcctcttccggttcaagctgtggtggatgacgcagcggatgggcacctccggccgggacgtcccgctcgagacccagttcatgctcgtcgaggtgcccccggcctccggcgacggcgacgacgacgccgccggcggtgacggcagcgaaccggtgtacctggtggtgctgccgctgctggaggggcagttccgggcggcgctgcaggggaacgaccgcgacgagctgcagttctgcatcgagagcggcgacaaggcggtgcggacggaccagggcgcgcacgcggtgtacctccacgccggcgacgaccccttcgacaccgtcgccgccgccgtgaaggccgtggagaagcacctgaacacgttccaccaccgggagaagaagaagctgccgtcgttcctcgactggttcggctggtgcacctgggacgccttctacaccgacgtcaccgccgacggcgtcaagcgcggcctccagagcctgtcggagggcggcgcgccgccgcggttcctcatcatcgacgacggctggcagcagatcgcctccgaggacaagcccgaccccggcgtcaccgtccaggagggcgcgcagttcgcgagcaggctgacggggatcaaggagaacaccaagttccaggccaaatccaacgacgactccggcgacggcgagccggcggcggcgtcgggcgggctgaagcagctggtccgggaggccaaggaagccaacggcgtgaagcaggtgtacgtgtggcacgccatggcggggtactggggcggcgtggcgccgtcgccggggacggggatggagcgctacgagccgtcgctggcgtaccccgtccagtccccgggcgtcacggcgaaccagccggacatcgtcatggactccctctccgtcctcgggctcggcctcgtccacccccgccgcgtccgcgacttctacggcgagctccactcctacctggcctcctgcggcgtggacggcgtgaaggtggacgtgcagaacatcatcgagacggtcggcgcgggccacggcggccgcgtcgccatcacccgtgcctaccaccgcgcgctcgaggcctccgtgtcccggagcttccccgacaacggctgcatctcctgcatgtgccacaacaccgacatgctctacagctcccgccagaccgccgtcgtgcgcgcctccgacgacttctaccctcgcgacccggcctcccacaccgtccacgtcgcctccgtcgcctacaactccgtcttcctcggcgagttcatgcagcccgactgggacatgttccatagcttgcacccggcggcggagtaccacggcgcggcgcgggcgatcggcggctgcccgatctacgtcagcgacaagccgggcaaccacaacttcgagctgctcaagaagctcgtgctccccgacggctccgtgctccgcgcccagctccccggccgccccacccgcgactgcctcttcgccgacccggcgcgcgacggcaccagcctgctcaagatctggaacgtgaacaagtgcacgggtgtggtgggcgtgttcaactgccagggcgccggttggtgccgcgtcaccaagaagacccgggtccacgacgccgcgccgggtacgctcacggggaccgtccgcgccgacgacgtggacgcgatcgccgacctcgccggcacgggctggggcggcgaggccgtcgtgtacgcctaccggtcgggggagctcatcaggctgcccaagggcgccacgctgccggtgactctcaaggtcctcgagttcgagctgttccacgtctcccccgtcagggcggtggcggcgacgggcgtctcgttcgcgcccatcgggctactcgacatgttcaactccggcggggcggtggaggagtgcgaagcccccgccgcggacgaagccacggccgccgccgtgcggctcagggtccgcggctgcggccggttcggcgcctactgctcgcggaggccggcgcggtgcacgctggacgcggcggaggtggagttcacctacgacgatgacacggggctcgtcacgctcgacatccccgtggcggagcaggagctttacagatggactctggagatcctggtctaggaggctattcttcccttccctgtcgatgaaccgttactacacgtgtggttggtgtgtgcttgcattgtgtgcgacatggagaggcgtgtcgtgtgcatgaaatggaggcatccgccattgatgcgccctctccctagaagaataagctagagccctctgtagtgttgcatatgcaataaacgagcactcatgtatgcaatgcgacgaacatgactcgagttccatgatacattttacacgatcgagcaaactgaaaacagaaccagatcgaacaatacaaaggtatctagcattattac

SEQ ID NO: 29297 - DNA, 718 bp, Setaria italica
  Peptide Sequence Number=SeqID_95271
aacgtaaggtaagaagacgaccggacaaccaagacgactacatgcagaactactacgtgaacccggtgctgggcgccgcctacacctccgaccagttcgccgacgcgctcatgcagcccttcaccgccttcgtcgaggaattgaactttagtacgtccaccaagtggcgtcgcagggggccagtggtggatacgatatgaggtcacaggttgcagcgagtatgtaacgtaattgtctagtcgagcgctatgtaatggcctcagtaactcccctaggaggctaggacccctctgctgggtgaacatggtcgcctgccgtccactgtgtctctgcgtacggagtcgttggctcgttgctgcgacatcaatgccaagcctttggagacctattgggcccagtccactgcagctctagtgtgttaactgtcgtcacatgtcgcgtccctactagttgcatgctatgcttggagattgggttcgagatttcgttcgtgctccggtgcatgtgaccgagtgtacgttgcgagctgtggagaagtagagacggtgggtacagtggctcgccgttgtggaaagttgcatgcgtgttcgatgtttctttgcgacatcaaactggcgccggcccaaccaccactagcacggaaagtgctggctgctgcccgatgaataacgcgccttccgttttacctaattagtacctaaaaccccgtactaaacta

SEQ ID NO: 29298 - DNA, 1447 bp, Setaria italica
  Peptide Sequence Number=SeqID_95272
gacacgtccacactccacaccaccccaccgcactccactgccaactccagttctccagctcgtaaccgagtgggaaaaccggccggcgtggacgcgcgctgagagcgagcgagcaaggacgaccgatggaggcgagctccgtgcccacggcggcggcggtggtgctgctgctcttggcggtggcggcggcgacagtgaggggccaggcgctggtgcccggcgtgatgatcttcggcgactcggtggtggacgccggcaacaacaaccggctggccacgctggtgcgcgccgacttcccgccctacggccgcgacttcccggcgacgcacgcgccgaccgggcggttctgcaacggcaagctcgccatggactacaccgttgagagcctggggctgagctcgtacccgccggcgtacctgagccaggaggcacagagcaacaacaagagcctcctgaacggcgccaacttcgcctccggcgccgccgggtacctcgacgccaccgccgccctctacggcgcgatctcgctgagccgccaggcggagtacttccgggagtaccagtcgcgggtggcggcgtcggcgggggagcagcgggccaagtcgctgacgtcggggtccatctacgtggtgagcgccggcaccagcgactacatgcagaactactacgtgaacccggtgctgggcgccgcctacacctccgaccagttcgccgacgcgctcatgcagcccttcaccgccttcgtcgagggcctgtacagcctgggcgcccgccggatcggcgtgacgtcgctgccgccgatggggtgcctcccgggagccgtcaccctgttcggcggcgggagcacaggctgcgtggagcgcctcaacaacgactccctgaccttcaaccggaagttggactcggccgcggacgccgtgaagcggcaacgcccggacctcaagctcatcgtcttcgacatctaccagccgctcctcgacctcgtcaacaaccccaccagcgccgggttcttcgagtcgcggcgggcgtgctgcgggacgggcaccatcgagacgtcggtgctgtgccaccagggcgccccggggacgtgcaccaacgccacgggctacgtcttctgggacggcttccaccccacggacgccgccaaccgggtgctcgccgacgcgctgctcctgcagggcctgcagctcatcgcgtgagcgacgcacgcagccccgccgcgcctccgggaaacacactccaattccccttcctgccgccgtacccgatccatgtaccttgcttttctgtcgttctgcgctgctactgctagcttgtgctttgtttgtttgcttgctgcctgtccatgatctcctgtagttgtgttctgctttaggaacagttggactggtgtgtaagagtgccgctcggtataatttctatcttcgccgtcctaaaaaagaaaaaa

SEQ ID NO: 29299 - DNA, 206 bp, Setaria italica
  Peptide Sequence Number=SeqID_95273
gagtttattgttgctgagtgcttattgacactcgacaaaagtctttgctgagtgcccgatgattgacactcggcaaacagttctttgccttgtgctctttgccgagtatttttaggcctttgctgagtgcgagggggcacttggcaaagctactgttccccatagtgtatcccatgtttactgtcaatagccttgtatgcttgcag

SEQ ID NO: 29300 - DNA, 183 bp, Setaria italica
  Peptide Sequence Number=SeqID_95274
agaaaatcgagaagcatttgattagaccaggatggaaatggaaacaacaaaacaaaatttgagggaattgggtgcattaacgcaggatgattatccatcatttcatgtgaggagcggctgctaaattccacgaaaccgttagccgctttctgcagggggagatcatgccggagacaggcttac

SEQ ID NO: 29301 - DNA, 296 bp, Setaria italica
  Peptide Sequence Number=SeqID_95275
gtgacgtgcgagccggcgcagaagctgacgacggccaagcggcggcgcgccgccgaggtccacaacctctcggagcggagaagaagggacaggatcaacgagaagatgaaggccctgcaggagctcatacctcactgcaacaaaactgataaagcgtcgatgctggacgaggcgatcgagtacctcaagtcgctgcagctccagctgcagatgatgtggatgggcggcgggatggcggccgcggcggcggcgccggtgatgttcccggcgggagtgcaccagtacatgcagcggag

SEQ ID NO: 29302 - DNA, 344 bp, Setaria italica
  Peptide Sequence Number=SeqID_95276
gtggggattcgggtgcgggggagatcgatttgggggaattttggggaggaaatgatgcgatgacgagacggggggagggaggaagccgaggaggtggtggtgtttggttttgtttggtcctcagccggttttctaatttctgttattcatggaaggtatgatatcattgcacaattgtgtcatgcaaaacgtctagcagaaaggcttcttcctgctgctagaatggtagaacttcatggtgcacatctagtgagtcacgaaagaccagacgaggtaaagcgtgaactttggtgaaacagcaacatgtgccactgagatgttaagaacattgatacgatgattgt

SEQ ID NO: 29303 - DNA, 700 bp, Setaria italica
  Peptide Sequence Number=SeqID_95277
agtagaaagggtatatcatcaacagggatgcaatctaattgtggttttgaagggcaagttaatgcatgctggacccacaaaatgactacgaaagaactagatacaatacgctcagccggttttctaatttctgttattcatggaaggttagtttggccaacagcagatattctatgcagagggtacatgcccatttcggttgacttacatcatataactgcaggtgaacaatgcacttatggatctaataaaggctaccaaatctgcgatgaaacctgaagagtggtcagcccagcctgagaatgtatcagaaaccggggcacttgtttccggaagacccattaccgtcacgatgcgaacagatgaaggggtgatagtcatggggtttgagcacatgaggaacatagtaaaggtaatgaagccagtaagggtggcggcaattgagtcataaggaacaaggacatgtaaattattctcaagaccttgtgggagtcgagatggtattttcacttctccccagtacttcggagatgatgattttagagtagcatctcccaacaactgtgaaatttttctgagggaacgcctgctcttagctgaataatacgacacaaaaacatagaaggaaaaccgttgttggcgcctggacagaagtgtcgtagggcacggttgatgtaatacctgtgaagagagtttctgt

SEQ ID NO: 29304 - DNA, 642 bp, Setaria italica
  Peptide Sequence Number=SeqID_95278
catgaatgggctaaggatggggcggagggcgctcacttccatgattatcagaagtcagataaggatctgcaagacaaacgcgtcaagaagaaagtggcgaaggtactctcagccttggattgttggtcaaatgtggtatatgatcgtgtgatgtttccagctgcggaggttgagaagttcttcgaagaagagaaagggctggagctggaaccagagattctcccagacatcagttggggtctctctcactcaggttcttttactgatgatgagcttgaccagtacccatctctggacaacaatccggttacgtttgagctgagagacgagccggagatcccgcagctgggagtatactgaagagctgcccactgagacggaaactctgcttctcttggttctgttgcggctccgcctgctctggagcagtccgtgtagtgtctggaatgctagtagacctgattatcttcctcagctatgtttctggtggatgagtgatgtaggattcgcagttcagtagacctgttgcagcggaagcgacagcgcttccccgtttctgtttgttgtgcttgccgaaagcctgaaacacacctcctagtccttgtgattggtaaaatctggatgtattcaagaaaaaaaaaa

SEQ ID NO: 29305 - DNA, 563 bp, Setaria italica
  Peptide Sequence Number=SeqID_95279
ttagcaggacatccaggcaagcagcaatttgtccatctttgtcaataacaggaatatgcaaaatttgccatcatgcattatatgtagtgcatcgagaattgttgtatctaaggtggcacaatctgggttggcagtcatcaccttttctactagggtcaactcaggggaaatattttgtgcaacaacacgcataagtacatcttttgaggtaaagattccctgcaatgtgtttcctgtagcgacgaccaccgaattaactcgaaactctcgcattttctgtgctgctacacacacaggatctgtaggcgaaacaattgctacttttgtgttctctgtgatgatggttgacaaagaaggtttgaacatcctctctcgtagagtttcaatgagagcagaaggagctgaaaagttgcctcctaattgacgttcaactccttcaacagcagctgctattgcacttccttgttctgcagccttttcaagtcttgctattgcgtcataaaggcattttgcaatgtccaacatagcaataacctcaccattttctactacaggaaggtgtc

SEQ ID NO: 29306 - DNA, 244 bp, Setaria italica
  Peptide Sequence Number=SeqID_95280
cctggattctacagtcatgctggtctgctggaggttatggaaagagaggaacggccgagcctttgcaactgacgttgctagaacaccgcaacagctcatgccgctcattgtcgaagaagcatcgctttgggctcaaagtggtgcccgaaacatggaagcttttggttggaagcctcctaatcattagctagcattgcaaattctatgtcttaaattctgctagtagacgccccccttttaacaa

SEQ ID NO: 29307 - DNA, 331 bp, Setaria italica
  Peptide Sequence Number=SeqID_95281
aaaaaaaaatacaaaatgacatccaagactgttgctaaggaatcaatttaaaatttaaatggttgcaaaaattccagttccccccacaagatactggcctaagttgatgtattagaatcattgtcacaagcacctctaaaaaattatcatgaatatgtataaaacacaaaaattttcgatttatgaagaataatatatacttctacttttaaaaggttattagtccacaaataaaaacacagattttcttcctgggtacttacgacaaaagaagttccttgtcatcttggtgagcaccccagagagggagtcatagctgcaatgagccctc

SEQ ID NO: 29308 - DNA, 2062 bp, Setaria italica
  misc_feature (2051)..(2051): n is a, c, g, or t
  Peptide Sequence Number=SeqID_95282
gccgctcgagtccgtcatcgacgtcagcgatatcgacgccgtgctgcagcgggccgcggaggccgaccagctcgccgaggccgacgtccgtctcctccgactccgacctcgtcatcgacctggatgcgacgggggagaccgacgaggagaggcggcggctgcggaaagagcaggaggccctgcacgctagcagcctcagcgtcccgcggcgtccgccatggcataatcagatgaccgtagaggagcttgatgcaaacgagaggcgggcgttccttgtgtggcgcaggaatcttgcgagattggaagagaatgacaaacttgtgctgacaccctttgagaagaatattgacatctggagacagctctggagagtgcttgaacgcagtgatttgctggttatggtggttgatgctcgagatcccttgttctaccgctgccctgatcttgaggcatacgcaaaggaaattgatgaacacaagagaacaatgcttcttgttaacaaggctgatctgctgccgttaaatatcaggaagagatgggctgagtattttaaggcacatgatattctctatgttttctggtcagctaaagccgctactgccacactagaaggcaaaaagttaagtggatactctgaagaagaatctgcttcacttgatttggataccaaggtatatggcagggatgaactcttgatgaggttgcaagctgaagcagaatctattgtagcacaaaggaagacctcaactgctgaagtggatcatgatgtcagttcttcagattctgtttcgtcagtggctaagcatgtagttgttgggtttgttggttatccaaatgttggaaagagttccaccataaatgctttggttggtgagaagaggactggtgttactcacacacctggcaagactaaacatttccagacactgataatctctgaagagctcactctgtgtgattgccctggtctggtcttcccttctttctcaagctcaaggcatgagatggtggcatgtggtgtcttgccgattgataggatgacaaagcatcgggaagctattcaggtggtagcggatcgtgtcccaagaaatattcttgagcagatttacaaaatcaccttgccaaagccgaagccgtacgaatcgcagtctcggccaccaactgcagctgagctgttgcgggcctactgttcatccagggggcatgtcagccatgctgggctgcctgatgagaccagggctgctcgacagatactgaaggattacattgatggcaaaatcccgcactttgaactccctcctggtgtaacagacatcgaaacagaatgtgaagtaatcgccatatcagaaggtccaactacatcagcagcaaatgaatcagatgctgatgatttggatgaagaggatgaggacacagctgatccagcagaaccggacatgagagacgtcctggatgaccttgaatcttttgacctggcaaatgaaggatctaaaaccgccacaaagaagaaagagacgtcccacaagcaccacaagaagccccagcggaagaaggatcggtcctggagggtcggcaatgatggcggcgatggaacagcagtcgtaagggtgttccagaagcctgctgttaatttgccagctgtcaatgcaagcggcagggtctagtgcctcaacttactgctttgcacaaccacgcgacacatgggcagggcattgagtctctttactgcacgccgacgactgaggcttcttcagtggaagggacaagagtaatactgcggtggttttgcatgacagcttgtaaaaccttacacaaacctgatagtcgtttccagaactttgtgttacgccttgcagccttccatatgctgtgagttgtagcgcgatagatacatacggtggtggtgtgtatcgtttgttttccatgtctctcatagcagcaggtataactacatattgtgattgatggttgatgcttgctatggtcggactgtgttccaaacctttccttgatgtattgatctacattcttaatacaaatgccaaaaaagntagcatagaac

SEQ ID NO: 29309 - DNA, 283 bp, Setaria italica
  Peptide Sequence Number=SeqID_95283
aggcaagtaacctgtgatattcttccatttctgaatttttgatcttatacacctgaaaatcttgttccagaatcaagctattcttttcttccttcacatatctgctttgcaaacggtgatgatattactggatatcgtatatgataaagtctgtctttcataaaattcctgctttgatctctacttgtcctgatacactcattactgacataactgtgtgccagttgtagcatttgtgcgtcagatgcattcttcactacctgtattcagttacaattttcta

SEQ ID NO: 29310 - DNA, 263 bp, Setaria italica
  Peptide Sequence Number=SeqID_95284
gccaagcatcttcacaaggctcttctcggcgagttcgtcgctagctgcatccattttcttgttggatcagtcggccatggagatgatcgacgcggagctgcgtcttggcccgcccggcggcgacgtcacggtcgtgcagccgacggcgaggaagccggcggcggggaaacggtcgtcgtcggcggtgaagagcgaggcctccgggacgggtggccatgacgacgacgccgcaccggcctccaaggtgcaggtggtggggtggg

SEQ ID NO: 29311 - DNA, 341 bp, Setaria italica
  Peptide Sequence Number=SeqID_95285
gtgtccagcctaaccgccgtgctcccgcatctcacgggctggcaaaaccgccgccaccagctccagccgtgtgcctccggtccagaacctccgcacggacgcacgaacaagccggcggaaggtgagggagccgagccgcacattcgatcccatgaaccactgatcaacaagcagccagttcggcgcggggattagactaaccacgaaaccggcggctgaaccggggagcggcgaggagacgaaccgtatggaggccagaggcgcggcggagcggacggggcccctccgtaggatccgcggcgcaaaggccgccatggcgacgaccccttgatcggccgccg

SEQ ID NO: 29312 - DNA, 229 bp, Setaria italica
  Peptide Sequence Number=SeqID_95286
agatgaattcaggccggaaagatttgatggtagcagcatcgacttcaagggcacccactttgagtacaccccgtttggggcaggcaggaggatatgccctggcatcacactcggactcgccaacacggagctcttgctcgctagtcttctttatcattttgattgggagctgcctgatggtgtgaagatggaagaacttgacatggcaggaggtcgtttggtaataacg

SEQ ID NO: 29313 - DNA, 492 bp, Setaria italica
  Peptide Sequence Number=SeqID_95287
gatcctggatggctcctgtcccgggcatggcgtgcccgcggcactgtggagctgtgcgaggcagtcggcgccgtggaggtcgacggagacagggacgctgaaagcaccagagctttggagctcgccgacagccttgctcgtgtactcaccattgccgtccttgcacttgatcgccaccttaaggcctgagattaaggtgccaaaaaagacataaaaatacgaccaggattaagcatgattgcaaaactttgccaattctatatctgtctacccttgaaagccgcctcagccttcatgttcttcctcgtacagtcggcacatttggccaggccgatgacaacagacgccacctcgccagaggcagcattagcgacggctatcgccatcagcacggcgcaaacgccgagaagtctttgtggtgtcgatcccatgctgcttgcagaacaagtcgagcttgccaccttgctacctgttacgtctgaagtggttgag

SEQ ID NO: 29314 - DNA, 862 bp, Setaria italica
  misc_feature (295)..(295): n is a, c, g, or t
  Peptide Sequence Number=SeqID_95288
taagaacaaagaactaacaaaggggaacaaaaacaaataaaacggaattacaaatagcttaggaccggaagggtaggtaagaatcggagtcggtgacacagacggtgttgtgttagaggacggcgctcctcctgctggctgcggcttgggcactagcttaggttgtggtggcacagtcttcttgtggaagtgttcgaacaagttgtggatgcccggagttggggagccggccgagggtgccggtgagctgctgttcgtcgatggcttgggccctggctgggggttcggcggcacnggcttcttgtggaagtggtcgaagaaacgccttatgatcgggtcgatcgggccgcagaaaccgacctatgcgccggttaaggacagacaacttagacacaaattcccggcggggatggctacaaagctgccatttgccagcggcgtgatcctggatggctcctgtcccgggcatggcgtgcccgcggcactgtggagctgtgcgaggcagtcggcgccgtggaggtcgacggagacagggacgctgaaagcaccagagctttggagctcgccgacagccttgctcgtgtactcaccattgccgtccttgcacttgatcgccaccttaaggcccttgaaagccgcctcagccttcatgttcttcctcgtacagtcggcacatttggccaggccgatgacaacagacgccacctcgccagaggcagcattagcgacggctatcgccatcagcacggcgcaaacgccgagaagtctttgtggtgtcgatcccatgctgcttgcagaactaggttcgcagtctttcttgctaccttgttctttacctttgtttttacgttttctttgttta

SEQ ID NO: 29315 - DNA, 1219 bp, Setaria italica
  Peptide Sequence Number=SeqID_95289
caataactagctaaacatcatcaacgataaaagcgtcggctgtacattcttgtgaggatgatcgaattcaatagcttgcaatggaactgtcaactaagcttaaagccataaacatacatgaacattttaatagttaatcaaactgtaaagcacacttcttgcattggtatagattccactcattacagaaaacattacatatgccatgtctcccaattcttaataaattaagacaccttttgtagatgaaattaaaaaagaatccatgcatatgactccagtctcacacttgtttcttggtaaaaagaaaggtctcacaagtcacacttgtaatataaccattattctgctgcaaataatgagtagtgcagcaacgtcacgcaagattaccatatgcatgcagctcaggggcaaacataacggattcaatgcttggccggagggtggtagatcggagtcggtgacacagacggtgttgtgttagaggacggcgctcctcctgctggctgcggcttgggcactagcttaggttgtggtggcacagtcttcttgtggaagtgttcgaacaagttgtggatgcccggagttggggagccggccgagggtgccggtgagctgctgttcgtcgatggcttgggccctggctggggcttcggcggcacaggcttcttgtggaagtggtcgaagaaacgccttatgatcgggtcgatcgggccgcagattgtcacggatgcgcacaccgctgacggttgttgcacttgcatattcccggcggggatggctacaaagctgccatttgccagcggcgtgatcctggatggctcctgtcccgggcatggcgtgcccgcggcactgtggagctgtgcgaggcagtcggcgccgtggaggtcgacggagacagggacgctgaaagcaccagagctttggagctcgccgacagccttgctcgtgtactcaccattgccgtccttgcacttgatcgccaccttaaggcccttgaaagccgcctcagccttcatgttcttcctcgtacagtcggcacatttggccaggccgatgacaacagacgccacctcgccagaggcagcattagcgacggctatcgccatcagcacggcgcaaacgccgagaagtctttgtggtgtcgatcccatgctgcttgcagaacaagtcgagcttgccaccttgctacctgttacgtctgaagtggttgttggtt

SEQ ID NO: 29316 - DNA, 339 bp, Setaria italica
  Peptide Sequence Number=SeqID_95290
aagtaactaccaaacaattacaagtctgatttctctgtccttggtttcttccagctggacagcctgtgcaatggtgtctgagatttgagtcacaatgcccacagctgcactggtcttcaccagcttctgggccttggcttcagcacactgtaccttccactgctgcctatcgtccaacatagccttctctcgttgctcatagaagtcaaaatcctcaaggatggttgtctcggctccatggttcttgaagatggctagcatctggacaccttgctccagtttcacctgcaagttagtccagctgtttgtcactacaaaaggaacccatcaacacaagga

SEQ ID NO: 29317 - DNA, 174 bp, Setaria italica
  Peptide Sequence Number=SeqID_95291
ggaagcacgtctaccagctcaacaccacgaccgccggcttctactccttcaccttcttcgagaagatgttcggactgtcggtcgacaacaccttcatggtggaacaggcttggcaggccccggactactacaagcccggtgacatgttctgttggagttacgccggtttcggtg

SEQ ID NO: 29318 - DNA, 410 bp, Setaria italica
  Peptide Sequence Number=SeqID_95292
atttctgcgttgatcttgttcgtggcggtagtagtagatcccttctactagctgcggcgtgctctgtttacttgttcttgttgctcctagttctaacccatggacgcaggatccaactccatctcgtcgcagaagtgcggcagccgacgcgcggcgccgccgcggccggcgctccaggaggcagggtccaggccgtacatgccgccgctcagcacggggcccccgaacccgtcggccaagtgctacggcgacgggttcatcccggagcggtcggcgatggacatggactttgcgcattacctgctgacggaaccgaggaagggcaaggagaacccggcagcggcggtgtccccggccaaggaggcgtaccgcaagctgctggccgagaagctgctcaacaaccgcaccag

SEQ ID NO: 29319 - DNA, 753 bp, Setaria italica
  Peptide Sequence Number=SeqID_95293
atgcgactatgcgtctataccgataccaatgaccacgaaacagttcaatagatttaccacgtaaccttccaagtgacaactataccaataccatgggccgataacactacctcacatgtcaaaacacaaaaatttacatctcatagctacagcttacaaatacaacaatacacccaatagacaatagtcactcgacatatagggccaatctaatctctcatcatggaatgagctgaggccacatccatattgcaacgaaatgctggatcttcgctgtcgaagaccgccaatacatggatgatgcgatgcagacacgaatggcatctgccatctgacttgcttagcccaatccaaggcgatgctcaggcttctcaagtctccagctcaactctgttgggcaacggatcaatggaactggcaaggtgatgccttgactgcaacattcggtgctcttttgtaggcttcagggatcggttagccgtggctttctttgtcagacgtttgccagcttctacaccactgccaggcaaggacagtcttttatgaccttgacaatccaaatccccaatcctctcctttggattaccagtgggagtcctctcctttggattactagtggaacgcacaccaagtcctgaaggacgagatgaagcttcatcagaaccttctctggttaacaccttcagcctagatttagctgatacagaaccactggaacggtttgtcgaggagccaccaccctctgagttcgac

SEQ ID NO: 29320 - DNA, 960 bp, Setaria italica
  Peptide Sequence Number=SeqID_95294
tttagtttttttagttttttacctttttaaggtttactttaaaggtttaacttaagttctttttaattgtaccttgacaatccaaatcccaatcctctcctttggattaccagtgggagtcctctcctttggattactagtggaacgcacaccaagtcctgaaggacgagatgaagcttcatcagaaccttctctggttaacaccttcagcctagatttagctgatacagaaccactggaacggtttgtcgaggagccaccaccctctgagttcgagggaagaccttccggttcagtgtgtttgattgaagagttgaatccgactttttaacaggtttctgtatggggtcttggttgcatttctgtcaggttgcctgaattcattaaccatgacacttccatctgctgtgtaagcgccaaggaaccgactctcccaaggacgaacagccatccatctctctagccaattccagccccagttgttcttgtcaggttcaaatgttgtagcttgtcttgcacttgcttgccactgatgagtaagagcataagccatggctcgctcacgtttagctgcagcttcctgccttttcaaaagttttgcttggatatcttccacagaacccatactatcacaccagccatcctcaatttctctaacatgtgcctcgtttgtttgctcaggtgaactattttgctgatcagtctggttttccaaagccatgcgaacacgccttgctctaacacgggcttgaaccctgaccaaagcttgcatacaacggagcgttgtagcagcctgctttctcacgatatgacctcttacaagggcttgaagcctaaccagcccttttaaagctcgacgggctctcctagccaggaaagctctaaatgctgtctgaataactgtagcagcccagatctcattgagtccatcttcagtttgaggaagtggaacatgaggtg

SEQ ID NO: 29321 - DNA, 499 bp, Setaria italica
  Peptide Sequence Number=SeqID_95295
gggagaacgggtggccatactgaacctagtcaaggaactatgcaagagtggaggcaactcaacctgagataatattgtcggttctggtaaagtgaaaatatgcagacggatcaacatcagtgataattgactgatcaccaggtgtatgcaatatgcgaataagctccaagctgataatccagctggtggcaaatgagacggagccagcatctgacgtggcaacaaaatcatggccgtccttttggcctttgccagagaagcccgtctaggacacggaactacggaagcgctagcaggctagagaacttgaacaacttgtcgtttagaacgaactagggacaaaaggatagttaatctttgcttcttacggagtagttttcaagaagcaacgtcccaaatcatgaaatttgcatgcatagacaaccagaatctaccatccggagctctggttcacaggctcagagctcgctctcgtctagcgtctctctgtaaaatctca

SEQ ID NO: 29322 - DNA, 2457 bp, Setaria italica
  Peptide Sequence Number=SeqID_95296
tcatcacaagtagggcaagagaccggcgtgcaggtgcaggtgcagctacatctaatccggacggcttccaggcttctgatccagtgacatttctctgttccttcatcaatcgtacaggccaacaagtgtgtcgttacatccaaggtagatcccacacgagaacaccaaaattttgttacaaaagaatggaggggggacctgccaggaagagccacggcgcaatttacaggcagggtaaactgtatctacactccgaggaaggaggaggttctcttcacaagtgggaggagcctgtgggtcatgctgcgcgtgcagtcaggacgaaatccagggaaggcacagctgcacaacgcatgtttcgaatctcagccaagggctgctgccatgacagtaacacaccccttgcagcaatccccatggtggctcaccgtttgtttttttcacatctatcaattgctgtttacacagtttactcgacctgctcgccgatgaggtcaaggcctactaacaagaaggagatgccctgaaacaggaggaagtagaagtgtataccctgcttcgacagcaagctccgggccgcggcggttagcaggagcatcgagagcgcgagctccttcttgtatatccggttgtgcttcttcttcgcgtcctttttcgaagcgagttgctcctttgcaaccgtgtcgaggtttggcgccgagccagtcttttggtgtttcagctccttgggcgccagggagatgagatcgccctctgatgagcggcctgatttcttggtcacaacccactcgtaggcgcttccaagctggaacaggcccgagatcatggcgttgaactttgtcaccgacatggtgttctcgaagagtaggtatgggatgatgaaagggaatgacttcggagaagggaggatgttgagcaaggacatcagggcaggaatgtagcacacgacccagtcaggaagctcagcttcaggcacaaacattgtcatcgggaggatgatgcagaagagcgtgaaggagtagaaaggtaatatgagctttcgcagcaagaaaaacaggaagatcaaattggctttcttccaaaacgcaatcttgcatttgatgatgtccggtaaacagagcctgaatagctgcattggaccggaatgccaccgatgctgctgcttcctgtaagcctcataagactcaggcaattcgcactggcactcaacatcattcaggaatataaacttccagccatggaggtgtgccctgaccgcaatgtccatatcctccactgttgtccgctccatccatccacccgagtcctccaacaccttaatcctccaaaccccagcagtgccattgaacccaaagaagtttaagaacaccccatttacctgctgttccacctcaaagtggaagcagagattaatatattgcaatcgagtcaacaggttctcatccctattcacaaaggaccatcttgcttggactagcccaagttcatcattatccttgaaatgtggcacggtgcgcttcaggaagtcaggatttggttggaagtctgcatcaaagatagcaacaaactcgtaatccttcacatagctgcagctcatggctgacttgaggtttccagccttgtaaccatccctcaacactcggtgccggtacacaatccgggcaccttgctgttgccactttgccacctcctctctgatcagagtctgtgttagcgggtcgtcagaatcatccaacacctgaaccaagaagttggatttcggccagtcaaggttgcacacggccgcaattgattgttgatacacctccttctcgttgcacattggtatctggacaagtaccatggggtagtacccaccatcagggtcctccgcatcgggcaatgcaggggacttgggcttgggcttgatgcgcttgaggcggatgtagaagcagccaaggcactggatgaggcggtcggcgctctggatgaggaagagcacgacgcaggcgtcggtgaggaactgtatccccggcgcaacgtaggccgcgcggaagcgcaaccaagaggcgtacagcgactcgaggccgatgacggggagggcgagggcggagtcggcgaggtcccagccgttgatgtaggcggcgacctcgacggcgaggagcagcagggagacgacgaggaaggccttgatgaaggcgtagaatctggagcgcacgacgggactctcaccggtggcggccaccactccggcctcggcgtcggtcctccccgcggccacccttcgcctggcggcgccgcccagcgcgacggcggcggaggcgagcgaggcgaggcacccggcggcacggtgcgccttgagcagcagcacccacctgatctgagtttacttacgtaaagtaagttaaggtttaatttagggttaattttagtttaattttagttttaaaagggttttaaatttttagttttaactta

SEQ ID NO: 29323 - DNA, 630 bp, Setaria italica
  Peptide Sequence Number=SeqID_95297
ggtttagcatagtactcaagttcaagcttcggagttactcccatagaactctggtccacgtgcacacaaacaccattctttccactctgaaaagcttccgaaaattacagcgcaaattccttttttttccttcaaagaaaggttgccgtgtaaaagagaactgcagccgccaccttgaccataagaaactccagcagttcacgcttcaaacagaatgtctttgtcatgccaagcccatccttcacttttgtaaagttgtatccttcctcctgccttcttgagtaagcattgttttccctacagatgaaatgtttggttcggctaatggattgatgacaaatccaccctgaagcccatacttctgcctctcccatttgtaagaagttctgccctcctctgagctgtttgctgggtcagaggcagaaaacctggaggaagacctactgccaccatgccttctccagaattttgggcttagaatgcagcacgtcttcacatcaggctccctgtttgacacccttcctgaagagaaggccaaatcacgagagatctcatccaaagccatctccagcccatgcacccttgtctccaaagaattcatgccattttcggacttccccataaacttct

SEQ ID NO: 29324 - DNA, 2088 bp, Setaria italica
  misc_feature (1)..(25): n is a, c, g, or t
  Peptide Sequence Number=SeqID_95298
nnnnnnnnnnnnnnnnnnnnnnnnntttttaggaatagttaaggactgctccttactggcagcaccatcaagcattagaggttggagtgtgatatgaggacagattcacagccagcacacactggaaaacatagtaatgaagctcgtcaacatagaaccaccttatccgacctatttacaagacgcgtggttccgcaggatgatggtacattgtgattactttccatcataaagctaactatttctcgggtaccaagatgggacaaaacacagcagtggttgttctcgtgccaaactgagcgtactccagggcgccgttgcttcagtctcaagcaaggctgtgtgatcaagaatcctcaccgatgatccacctcaagaaatgagtccagctttatggtttagcatagtactcaagttcaagcttcggagttactcccatagaactctggtccacgtgcacacaaacaccattctttccactctgaaaagcttccgaaaattacagcgcaaattccttttttttccttcaaagaaaggttgccgtgtaaaagagaactgcagccgccaccttgaccataagaaactccagcagttcacgcttcaaacagaatgtctttgtcatgccaagcccatccttcacttttgtaaacaatgcttactcaagaaggcaggaggaaggattgttttccctacagatgaaatgtttggttcggctaatggattgatgacaaatccaccctgaagcccatacttctgcctctcccatttgtaagaagttctgccctcctctgagctgtttgctgggtcagaggcagaaaacctggaggaagacctactgccaccatgccttctccagaattttgggcttagaatgcagcacgtcttcacatcaggctccctgtttgacacccttcctgaagagaaggccaaatcacgagagatctcatccaaagccatctccagcccatgcacccttgtctccaaagaattcatgccattttcggacttccccataaacttctggagtagatctagtaaactgctttgctgattttcaatctgaagcagctgagtccttatttctgacaagctctcatctttgtgaactgcaaacttttccgatccaccttcaacttctgaaatctcttccaaattaccaccaccctcgtatggaacaactcgtgaccctgctttaagtccagccagcttggccgacctatcctcgctgccttggaagagtgtcctccttgcctccaatctgtctctcacattgcctcctttgagaagcttctcctccgtcaccattttgattggggtagcatccggagcaacagaaatctcaactttgtagtcacaattctttgcttggcgcactttgtggtatgaaggcggcgacagcttcttgttcctgatggatgaaggattatttgttttgatgatgctgggtgacacatcaggcggacatgatctgctcacaggcaatctgctcctccttgttgctgatggaacagagtttgagcccagtgaagcagctggatatcgcccgtcacttacactccctgtaagagatgatcttcgttgtgactgcgacgctggtggcgcagccgaggagcactcgtcctcttcagcatccgggatctccttccacgcctcgatcatccggttcatcgactctcgcacaatcttgaccttgtcaaactttctggcctcgaagaaggtaacgcaagaggatttgtaggacgtgagaagatccgtgtgttctaaggccaatgcggcaagcgcctccgccgcggccttcctcgcggcccagtcgtcactaccgattgcatcacggaggcacgggatggaggtcgtgacctcggcatcgccgcccatggccgcggaggcgccgatgagggtgatgagcgcgggcttggccttgaaggcattgctgcggagcaacttgaggaggcgcggttggagcttctggagataggaaacgaggtcggcggtgagggcggacgcctcgacggccgagacccaagtagaaagacaagactaggaataatacgacccgtacaacttaacaactaccctaggttagttaga

SEQ ID NO: 29325 - DNA, 358 bp, Setaria italica
  Peptide Sequence Number=SeqID_95299
catcggcaaggtgtggacgacttgcatttgcattattgcatgcacgtaagtggaagctgacttctttgaacaataggaatgaaaacgggagaaaaataattgccgtcacagctgttgaaatcagtagcgtgccaacgcctatcaaaatctatccgatgaacatcacacaatcggtacgtgcgtgcggagttatgttggcggcccaaaaaaataagacagaacaaagctgaagggatcgatatgataaatccacatctcagaataggcttttttttacatgatgatgacgtgcgaaaagggtagctgatgaacatgacaagcgtataatcccggtcgccgcggtgtgtgtaaatcgtgg

SEQ ID NO: 29326 - DNA, 220 bp, Setaria italica
  misc_feature (12)..(12): n is a, c, g, or t
  Peptide Sequence Number=SeqID_95300
tcagctttgganaggattggatagcacagactggagtcttctcagcaatttcatcagctatatcagatgagcatgtcatgcccaagtcagcatatgaattctctgcatgcaaatctgaagaggaatggccctgaacaaggggacaaaaaggatcctgaacaagaggacaaaaaggctacaggtttatgttattcagattgggatgtaagcttttcctttt

SEQ ID NO: 29327 - DNA, 373 bp, Setaria italica
  misc_feature (315)..(315): n is a, c, g, or t
  Peptide Sequence Number=SeqID_95301
gttatagggttgggcacaaagcatatctgtttttggttttgttatattcactggcctagtgctaagaagcttcaatgagtttgatatctcttttagtcgatcgctcagctttggagaggattggatagcacagactggagtcttctcagcaatttcatcagctatatcagatgagcatgtcatgcccaagtcagcatatgaattctctgcatgcaaatctgaagaggaatggccctgaacaaggggacaaaaaggatccttttcttgaatgtcaactaatgcaagttctttcacactgcaaggcacactacggtntacgtcagatgacacaacatctacaactttctgttcatcacatggctcaaccggcgat

SEQ ID NO: 29328 - DNA, 604 bp, Setaria italica
  Peptide Sequence Number=SeqID_95302
gttatgccctagcctaggatcactagagcacatctagtcgggttcgagagagagacatgagagactaggagttcctagaccgtgcctagtgtgagagagggggaattggggtaccttcacccctaggggtgggagcagcggagctgctggccatcgcgggttcggttggtgtagttctgcgcaaggcagcgatgcgcagtgtagtccggtcaccggtgaagtggcagtggcgcttcccgccgctgctgcgcaacctagatcggtaggtgtgttggtgggggcggctggctgcggcgaacctcgtgagccgagccgggtccccccaccctgtttatatagcgcagcgcgacaggggcccactacccattgatagggtaagcgcccccgatcagggcgcagatcaagatcctgattggcctttgggccaatcgggaaagagatcaatctaacatcgccgtcgttgggagcacgaaggagacgttgttcacggacgccgcgaaccgggtgtcgttgggtgggggccctgggcacgtcccgttcacggcgcacgggtgcgtgcccagcccgacggtgaagagaaccgccggtccaccgtcccgcggcc

SEQ ID NO: 29329 - DNA, 192 bp, Setaria italica
  Peptide Sequence Number=SeqID_95303
cgaacccgcgagactgctggagggtctgggcgaaggcttggtacttgcggatgtcggcgtcgctcacgctccggcgcgcatacttcatcgactcctcgaagtgaacagccctgatctcagcaatttcatccacctcgtcttcctccatggcctcggggtcgtccttcctacgcctctccatctcaatatcct

SEQ ID NO: 29330 - DNA, 222 bp, Setaria italica
  Peptide Sequence Number=SeqID_95304
gtccttcctacgcctctccatctcaatatccttctcgatgttctccctgatggcatacttgcacgcacgctggcagatctcagtgatatctgcgccgctgaatccctgggtgtatttggcaagggcgttcaagtcaacatccttagccacaggagacttcctgaggcaggctttgaagatctggagcctggattgctcatcaggcagaggaatgtagataag

SEQ ID NO: 29331 - DNA, 266 bp, Setaria italica
  Peptide Sequence Number=SeqID_95305
gtcgtccttcctacgcctctccatctcaatatccttctcgatgttctccctgatggcatacttgcacgcacgctggcagatctcagtgatatctgcgccgctgaatccctggggtgtatttggcaagggcgttcaagtcaacatccttagccacaggagacttcctgaggcaggctttgaagatctggagcctggattgctcatcaggcagaggaatgtagataagctgatccagacgccctggcctcagcaaagcagggtcaatg

SEQ ID NO: 29332 - DNA, 282 bp, Setaria italica
  Peptide Sequence Number=SeqID_95306
tacttgcacgcacgctggcagatctcagtgatatctgcgccgctgaatccctgggtgtatttggcaagggcgttcaagtcaacatccttagccacaggagacttcctgaggcaggctttgaagatctggagcctggattgctcatcaggcagaggaatgtagataagctgatccagacgccctggcctcagcaaagcagggtcaatgatgtctggtctgttggtggcaccgataatgaaaacagtcttcttggcgttcatgccatccatctcagtcagcagc

SEQ ID NO: 29333 - DNA, 216 bp, Setaria italica
  Peptide Sequence Number=SeqID_95307
ttaggtatctagcaaaatacattacttaaaagtaagtacatcctctcccgtgccttgcatacgatgagtttagcataccatataagcatatatataagttatgtcacagcataactgctagttaactgtatagatcatcatcgtcagctgcagctgcaggggctgcgaaggggtcggccgccgctgccgtcggttggtcggggaaccggaactcgc

SEQ ID NO: 29334 - DNA, 369 bp, Setaria italica
  Peptide Sequence Number=SeqID_95308
taatactgcgccgctgaatccctgggtgtatttggcaagggcgttcaagtcaacatccttagccacaggagacttcctgaggcaggctttgaagatctggagcctggattgctcatcaggcagaggaatgtagataagctgatccagacgccctggcctcagcaaagcagggtcaatgatgtctggtctgttggtggcaccgataatgaaaacagtcttcttggcgttcatgccatccatctcagtcagcagctggttcaacactctatcagcagcacctccagcatcaccaacactgcttcctctctgagtagcaatggagtcaagctcgtcgaagaagaggacacaaggagcagactgcctagcctt

SEQ ID NO: 29335 - DNA, 807 bp, Setaria italica
  Peptide Sequence Number=SeqID_95309
tggcagatctcagtgatatctgcgccgctgaatccctgggtgtatttggcaagggcgttcaagtcaacatccttagccacaggagacttcctgaggcaggctttgaagatctggagcctggattgctcatcaggcagaggaatgtagataagctgatccagacgccctggcctcagcaaagcagggtcaatgatgtctggtctgttggtggcaccgataatgaaaacagtcttcttggcgttcatgccatccatctcagtcagcagctggttcaacactctatcagcagcacctccagcatcactgcttcctctctgagtagcaatgatcctctcccgtgccttgaacaaataaacgacataagaagttgacggcctagcatataagcatatatataagttatgtcacagcataactgctagttaactgtatagatcatcatcgtcagctgcagctgcaggggctgcgaagggtcggccgccgctgccgtcggttggtcggggaaccggaactcgctgccgaacccgcgagactgctggagggtctgggcgaaggcttggtacttgcggatgtcggcgtcgctcacgctccggcgcgcatacttcatcgactcctcgaagtgaacagccctgatctcagcaatttcatccacctcgtcttcctccatggcctcggggtcgtccttcctacgcctctccatctcaatatccttctcgatgttctccctgatggcatacttgcacgcacgctggcagatctcagtgatatctgcgccgctgaatccctgggtgtatttggcaagggtcg

SEQ ID NO: 29336 - DNA, 1982 bp, Setaria italica
  Peptide Sequence Number=SeqID_95310
taactactaccaaacacacgcaaatatctgtcgccgtctcgcctctctcggcagcagcaccaaccgcctcgtcgaattcgaccgccatggcgagccagggcgagccgtcgtcctccgatccgaaggggaagaaggatttctcgacggcgatcctcgagaggaagaagtcgccgaaccggctggtggtcgacgaggccaccaatgatgacaactccgtcgtcgcgttgcacccggacaccatggagcgcctccagctcttccgcggtgacactgtcctgctcaagggtaagaagagaaaggacactatctgcattgtgcttgcagatgacacgtgtgaggagccaaagatccggatgaacaaggttgtcaggaagaacttgagggtacgacttggtgatgtgatttctgtccatcaatgcccagatgtcaaatacgggaagcgtgttcacatacttccaattgatgacacggttgaaggcattaccggcaacttatttgatgccttcctgaaaccatacttccttgaagcctatcgtcccgtgaggaaatcggaccttttccttgtgaggggtggtatgagaagtgtagaattcaaagttatagagactgacccaacagagtattgtatcgttgcaccggatacagagttattctgtgaaggtgagcctattaagagggaggatgaggaaagactcgatgaggtcggctatgatgatgttggtggagttaggaagcaaatggcccaaatcagagagctggttgaactcccactgcgccacccccagcttttcaagtctattggcgtgaagccaccaaagggcatattgctgtttggaccacctggctctggcaagactcttattgctagagctgtagctaatgagacaggtgctttcttctttctgatcaatggaccggaaatcatgtcaaagcttgcaggagaaagtgagagcaatctcagaaaggcatttgaagaagctgagaagaatgcaccttccatcatttttattgatgagatagattccatagcacctaagagggagaagacccatggagaagttgagaggcgtattgtttcacagcttttgactctcatggatggcctcaagtctcgtgcacatgttattgttatgggtgccacaaaccgtccaaacagtatcgatgctgctcttagaaggtttggtaggtttgaccgtgagattgatattggtgttccggatgaagttgggcgccttgaggttctccggattcataccaaaaacatgaagctgtctgaagatgttgacttggagcacattgcaaaggatacccatggttatgttggtgctgatcttgctgccctttgtactgaggctgctcttcagtgcattcgtgagaagatggatattatagatcttgatgatgagaccatagatgctgagatactcaactctatgtctgtctcaaatgatcatttcaagactgcacttgggacgagcaacccgtctgccctgcgtgaaacagtagttgaagttccaaatgtctcttgggatgatattggtggcctggagaatgtcaagagggagcttcaagagactgttcaatatccagtggagcatccagagaaattcgagaagtttggcatgtctccctcaaagggtgttctgttttacggccctcctggctgtggaaagactttgttggccaaggcgattgctaatgagtgccaggctaacttcatcagtgtgaagggacctgagctgcttaccatgtggtttggtgagagtgaggccaatgtccgagagatctttgacaaggctaggcagtctgctccttgtgtcctcttcttcgacgagcttgactccattgctactcagagaggaagcagtgttggtgatgctggaggtgctgctgatagagtgttgaaccagctgctgactgagatggatggcatgaacgccaagaagactgttttcattatcggtgccaccaacagaccagac

SEQ ID NO: 29337 - DNA, 225 bp, Setaria italica
  Peptide Sequence Number=SeqID_95311
cagcgccttgcgcccctgccatgttcatggacaaagaaagcccctgcgccgcctgcgcgccctcggcggccgccactactctcggttgcggcagcggcggagctggttgactccgcagccagttcttgatcatggacagcccgatgctgccgccgttggcactggcagcgccagcgccgccattgacggtggccgctgcactgagcatgctggcaccgccgtcag

SEQ ID NO: 29338 - DNA, 259 bp, Setaria italica
  Peptide Sequence Number=SeqID_95312
taccctttcccttgtaacatagttggacctgaagcccgagaactgaaagatgaattgttggatctaaatccatcatcaccgcggccagcactaacataactagcatgggaactagcagaatcctgccttcccacataaagtcctccattagagttgtctctaggagagaagtttgttctatctgcagtactatctccagaattagaactccggtgggaccctgatgctgagaaacttgtttccctgtttccaggttcat

SEQ ID NO: 29339 - DNA, 425 bp, Setaria italica
  Peptide Sequence Number=SeqID_95313
ttgagaatagatcaaccactgaaatgagcagtggggtgagtaatgatatcaagagggatattccattatcaataacatatggttctgcagcaaaatctgaacccttccatggtccaaatgttgaacatcagtttccacaatctttcaccaatggaaacttcagtcctcaatcatttgcatccaatcattcaagtttaggtgacaacagaatcaaggaagagcctgctgtgaagtttggtggttttcaaagatgcactgcgaatggaaatgggatgtcttcatctacaataccaacagatgatgtctttgtatgtggaggttcgcgttcacataggatcttccctccaccaatgccacccaggacttctgttaatgatgcaaaagatgatgatgacataagaaaaaaggcttttcggtttagatga

SEQ ID NO: 29340 - DNA, 629 bp, Setaria italica
  misc_feature (609)..(629): n is a, c, g, or t
  Peptide Sequence Number=SeqID_95314
ccagcgcagtataaccaaccagccgcgccggcaaaattcctcctcgacggagaacgcgaactaaccagccaccgatcgcccgcgcaggacttggagagcaagcaaggcaagcgcgcggccatggactccttctcgtcgccctcgctgtcgtcgtcaggttccagccccaacccggaggccgtcatggaacagatcaaggcgcagctcgcccaggcttacgcgcaggagtttctcgagaccgtggggaacaagtgctttgaaaagtgcgtgaccaagccaggatcaagcttgagtggaagcgagagcagctgcatatcacgttgtgttgaccgctacattgaggccaccggtattgtcagccgggccttgttcagctcccaacgctaggaacacatgaaaggaagaatttcaaatatcgctcatgagaatgatgtacccttgagatttttgacttgtcagaatacatgacatttgatgcttggttgtacaagcagtgttagtcctctaaagactccaggttcttcttgtaagcctttctgctttagtagaagaaacaagaggctctatcaagtggcgcagatgtttaattacgctcaaaaaaaaaaaaannnnnnnnnnnnnnnnnnnnn

SEQ ID NO: 29341 - DNA, 491 bp, Setaria italica
  Peptide Sequence Number=SeqID_95315
acttctccggttgtactcgctcaacacgactgactactggggtaatggtaaaaagctaggcctcgctatctgtctgtctgtctgtctgtacaggtgttattctgtcaactaaccattgccatttcagcaagatgatgggacaccaacgcgccgttctcctgcagcaatgagcttctcaacacgagcaacaatatgcttcccataggtgtatcttttcagtgcattcaagtgtaccttgatacgggaaagaatcaattcacggttctggtcatcacagatttctagaaccttctgcaccacatagtttccaaactggtctttcatcattgcctggtcacatgacaagtgctgtgagaatgcatgaaattcaaccctgcagcagcagaccatggtactgctgcagaatttaagttacccagaacaaagaaaataaaaaattgtcttctgctacttatatgttatcacaattcagcatctaaatcgtatcaaga

SEQ ID NO: 29342 - DNA, 739 bp, Setaria italica
  Peptide Sequence Number=SeqID_95316
cacatctcatgatagatccatcaagctccaaagccatttgtgtttgttgttccacttcaacaacttccaaagccttctgaatcacccgacagccatacatttgaagactcagctgtaacacataacccttgagtaggcttgccagttgcttcgtttgtgtttcagttccgtattcaaagaacttctgtataacataatttccgaaaacatcagtcatcaaagtacgtgcctggggaaggatctctggaaaaatcaggttcttctcttcaatagaagcggtttcaagtttctgctgtataaagcgactcccatactgatccgaactgaattcgaccacatggcctacaatatctagcagctcaaaagatctggttttgttggttttgaactcctccagcagggaggacccataaccattatccatcagaccattttccgaattccatgatcccatggatcctccagcagtgttcctcaccacagatggaattcgagttagtcgctctccttgcctgacatggccttgaggagatgagatatacggactagatggaggacttgttatataagtccttcccatgccaaatgcaggatcattgccataaatatttggattaagagcaccagacttggccaggtatggcattccatactgtagcttttgctgggcaaataatgacccaaggtaagctttttggtatccaggactatccaggtgtccagtactagtaaaacctct

SEQ ID NO: 29343 - DNA, 286 bp, Setaria italica
  Peptide Sequence Number=SeqID_95317
aggaggtttttcgtacagaaacggcggtgacatactcaagagcatgggcattaacatcttcacggagggtcagctgaagaaaatcacaaacggctacaaaaaatctattggagaaggtgcctttggcaaggtctatatagggatgacagatgactcccaacaggtcgctgttaagtgctccactgcgaaaggcgatgttcttccacaggaggagttcgttaacgagatcaccttccagttccgcatcagccatgacaaaccttgtccgtcctttggttggggtgct

SEQ ID NO: 29344 - DNA, 270 bp, Setaria italica
  Peptide Sequence Number=SeqID_95318
ccgccgccgtcaaggaggtccgcatggccgttgcctccccgcgcaaagttgcagcggacgggaggaaggagaggggcgaggacttcgcggagcgcgacgacttcagcttcgggaacaggggcggcgcggagagggacgcggaggccggcgacgagaaggcggcggtggccgggcaggggaatgccggcgtaggggcgcccgcggcgatgccgccgacgagcgtcatgacccggctcatcctgatcatggtgtggcgcaagctcatccgca

SEQ ID NO: 29345 - DNA, 588 bp, Setaria italica
  Peptide Sequence Number=SeqID_95319
aggaggccacacgatcggccgggggcggtgcacgctgttcagcaaccggctgtccaacttctcggcgacgagctccgtggacccgacactggactcgtccctggcgtccagcctgcaagccctctgccggggcggggacggcaaccagacggcggcgctggacgccggctccgcggacgcgttcgacaaccactacttccagaacctgctcagccagaagggcctcctgtcctccgaccagggcctcttctccggcgccggcgccaacgccaccaaggcgctcgtgcagctctacggcgccaacagcgagcgcttcctctgcgacttcggccgctccatggtcaagatgggcaacatcctccccctcaccggctccgccggccagatccgcaagaactgccgcgccgtcaactgagcgcgagacacccatcgatcgctgcgcgtgcgtgtctgccatgcacggcctcaaaagtgagctctcgtgcgtcggctagctaggcgtgtggtcgttgccccttgaaagagtatttcgtttgccttaagctagggttcgtcgatcgacaataatagtatgatgagacagacagc

SEQ ID NO: 29346 - DNA, 249 bp, Setaria italica
  Peptide Sequence Number=SeqID_95320
ccggcttcgattcgatgatgccgcacgccatctccagcaagatgttagcggaagccaaagttttgaggcctggcatgtccaatgaagtccgatttgaacaaaccgtgcagcaagtagaatgcagaggctgatcaagcgagtttatctttttgagattatgaagtaatcaaaccacaacaatgcaatgacttttgtcacttgcattgttacaaatgacgaatcttgtgccccttgcttattcgcccaaac

SEQ ID NO: 29347 - DNA, 1607 bp, Setaria italica
  Peptide Sequence Number=SeqID_95321
tttttaacctgctaaatttttttaacatatattgtgcatcgttacccaaaagcaaatcccttgatacaaattccgaactatgtcactgcgatgaggcctggcatgtccaatgaagtccgatttgaacaaaccgtgcagcaagtagaatgcagaggctgatcaagcgagtttatctttttgagattatgaagtaatcaaaccacaacaatgcaatgacttttgtcacttgcattgttacaaatgacgaatcttgtgccccttgcttattcgcccaaacacagattccttccaacgcttccccacaacaatgcgcaacgatgttcagctccgttactgcaatgagattctctcacggccccaaaactttggcttccgctaacatcttgctggagatggcgtgcggcatcatcgaatcgaagccggtaccagcctagcaggaacatacttgttgtactctgttctttccagacctccatgtcgtcaattgcagttgcaggttcaccaggccggcacattgcggtactattccccactgcaagatgccaagatcctattgtcccagcactacatttcctaacttgcaacgcgtatccttggtcgcaattagtgaacaaatatgataactgataacagtactgagaatatgttcgggtagaaccatgtcagatttttgataaattgtgacacattaacgtacatatacgtgcaggcctgatgtactcgcagggtcagcttggctgattgcgctgtcgatagatggaagcatttgatttcttcatcccaattcatcagagtatctcaagtgtgggatggttgggatgcatttcaattgcacgcctcagcgcacgctcagcttcctccacctccccctctccggcacctccacggcggagcaaaaaggtgacatcttggagcaccggcaggttccccaagccgaactcgaaaccgccggcgatttctctggtctccagcacagggatcgccaggtgaagtcttgccagcttcaccatagctccttgctgaaacgccacgggccctatgtatccccgaagcacgcaatgtaccaggcatgggaaggaataaccatcatggaagactagcctccgaaggattccgtggttctgattgcccacctccacatcgagatagacgagagcccgcaaactcccaaggatctccagatccttctgccgtagcttcctcacttcgatggacaggaaagagagctcctgaagacgcaatggattcaaccaagctgacagagtagatgaacagcatcctgttatttccaatctacggagatgtggaggggcgacccaggcatccaacttgcattcaccaacaactgagatggataatgtgtggagtttttgcagcttgtgtagacactccaccagggatttctcgaaccttttgaagttccatccagtgtggcagtcaatacccagcactctcagctctgtttgatttcccaggccctccgtaagatcagtggagtcttggatgcataatgttgacagctcttcaagtgatgtgaagctcccaatcccgcatggcgctcttgccagctatctatgcgtaggcacatcagatgcttgagctcaacg

SEQ ID NO: 29348 - DNA, 443 bp, Setaria italica
  Peptide Sequence Number=SeqID_95322
aatgcataaaacaagaacaatcgcataccaacatgcaagacacatgggatgatgaggaaataaagagagcaacagacattgctctaaaagttcttcgagctgttggtagaacaaggtgggtggcgatgcgaaccctaaaggctgctatatcccatccaattggttcacctcagctggtggattactgcctcaagacccttgctgcaagaacagttgatggattgacagttgcagtgagatgcaacgatgagacaaacacactagagtacaggtgggtgattaagatactggcattgttttattgtttcaacatgaaaattctaaactatttgcaggcttacagatgaaactgtcttgctgcccaatgtatccatgccaacccgagaccatcttcgccgtgacataaagttttttgcattgtacgtttcttccttcctacccta

SEQ ID NO: 29349 - DNA, 452 bp, Setaria italica
  Peptide Sequence Number=SeqID_95323
caattgattttgaagcataaacatcgttgttcttggtctgtgtgggcatcctcccagattctcttcttgtgctattggactgcccattgatagagtttcctttgaacttttcagatgaatgagcaggcccatttgaaggcacgtcaaaaggctggaacagaggcctgtcataactgtaaacctggctcgccgacgtggaggtcacgaggctgccccccgcggcgcgggtggaggcggcggaggagctgaaacggttggacggcacggtgaactgctcgtagagcgccatcttgttcctgggcggcgcccgcggtccgccgcccttgccggcgtcgctgacgtggaggcgcgggaacagcgggcccatcaccttcccctgctcctccctgcctcctcctcctgccgcacctcccctcgtcatcctctgcgcgccgtatcaatcaggaaggcag

SEQ ID NO: 29350 - DNA, 289 bp, Setaria italica
  misc_feature (271)..(271): n is a, c, g, or t
  Peptide Sequence Number=SeqID_95324
cttggatggcttgatttgctctcaatgctagacacccagtaaagaagctggctcaattcaactttgtccccaaccacatggaatccatcaatgctgaactccccttttgtgatagttcccgtcttgtcgaatgccgcaaccctgatcccacctagtgtctcaagaatgtcccctcccttgatgagaacccccatcctcgccgccctcaggagcgcgcagaacgtagcgaccggcgtcgacaggaccaacgcgcacgggcacgcgctcaccngcaggactaaggccagcc

SEQ ID NO: 29351 - DNA, 488 bp, Setaria italica
  Peptide Sequence Number=SeqID_95325
tagatgcttaaattcaatcagatgatcaatgaaggggtgactcctaatatcattgtttttacctccctagtttatggactgtgcaccgttgacaaatggcgaaaggttgaggaattattttctgaaaatgctgaatcaaggtatccatcccaatgcctggttcttcaacacaataatgtgtaacctatgcagagaaggacgggtcatggaaactcagagtctcattgatttgatggtacgcctgggtgtgagacctgatgttatctcatataatacattaatagatggctactgcttagttggtaggatggaggaagctatgaagctacttgatgttatggtctcggctggtttgaaacctgatgttgttgcctataatactttgcttcacggctactgtaaagctggcaggatagacgatgcagttagacttttacaaagtaaatgttgagcaatgcggttacacagatatcatcacttatactact

SEQ ID NO: 29352 - DNA, 231 bp, Setaria italica
  Peptide Sequence Number=SeqID_95326
ggactccattcagagtgttgttcacctcaattactgcaatgacgctgaatgagatttgcaaaccacgctgcttctttgacttgaccaactcatcttcactccaaagccggacagtcccgtctaagcagcaagtcatgagaatctctctcctgacctcagaccgatcactgaaacacaacgaacagggtcgccactggatcatgcaaacaggctgcgggtgcacaagctcgg

SEQ ID NO: 29353 - DNA, 737 bp, Setaria italica
  Peptide Sequence Number=SeqID_95327
gaggttgaccggcgcggagatgagtggcttcctcggcctgggcacgcccatgggcgccatggtcacgtcgagccttgtggtggcgccgtcgtagtcgacccagaactgcatgggctggcggctgatgaggctgaggttgttgaacacccccgtggcgtcgtcgtagtagccggcgctgttgttctgcagcgacctcatgctgttgacgttgacgccgacgtggttgctgttcatgtcctggaactccgggttgagcatggtgtcgagctcgacgaagagcacgcggttgtcgtccttgccgttgtcggtgacgttgaggacgccgaggtactggccggcgttgaaggtggagagcctggtgctgggcgccaccacgaacgccatgccgttgtcgctcagcacggtgaagttggacacgatggcgaagacgaacgccgccgagaaggaccggacggctccgccggggccgtcgcgcaggcggaccggcgccgggtggaacgcgtggccggccatctggctggtgccgttgctgagcaccaggagcccgttcggcgccaccacggacatgccgtcgagcgcgaggttcgcgccgccgaagccgttgtaggtgaactcctcggcggccagcacggtcgcatggtcggagcaggccgcggcgaggaggaggaggagggagagtgggaggacgagcaagcggagacgccccatcgcgtaccggctcgtcacggcagctgcaa

SEQ ID NO: 29354 - DNA, 2114 bp, Setaria italica
  Peptide Sequence Number=SeqID_95328
ctgaaaattatgtcatgtacattgcgccaaaactgcatgtccagaattatgtcagaccctgcattgatctgatcctgcaagactgattgatacagagtaacagatcggtcaagctctttcccttttaagctaaataccaattttggttgtaaggcgtgatcgctcacaattgttgtgcttttatctgcttgaccagaagatgaagttccttcctttgggcatggttctacagctggattttgatttccgcaagtcatcaggccctctgatggaggagatgattgtggtgtggaatctcgttcctgagagtcatcactagcatatttgctttccaaagcagtgccactaggtggtgattcaaccttctgactgttcatatctgtactaactttgggccataaaaaattcctcaatagtatgcaaggatgataatatttccacattcacaatactatcatagcttgacaagttagtttcatcttcatctttcttgaatcgtactcggatacatggaataattgttgagtgcctcgtagggatatcagaaatattgctccttggcttgaaattgtggctcattatcactggaaagttgtcaagagaagtaagagcattctgtagcttccttactaacagtgtcaatagcatatcactccaattttggcccattcttgagaatgacatccgagcaaatgattgaaatcttttcaccacagcccaaaaaatggtcagagctgcaactcatattttcctccgcctggaggtacttgccattcgagaggtaatttgataaagatttgactaatccgctctcaaggaattcaaaggttgtcattgtttctcccccatgaagctccatcatcacctcacttaaaatggtagataagtattcttcattttgaagattatcttgttctgatgacttgtctgcggtctcgtttaaaactgcgcagcaagttttgagtttctgcaaaatctcagttacccctatctcagaactcactacttccttagtaaagtaggttgacttccacatgccttgcaaaagtaaaaagactgtcattcccaattctacaagcccttgtttcagcagcttcagatctgtgggcatcaaatgcatagcagaaacatttagatttatttcttatgacaggttgagtccctgattgttgcatgtcatcaagcagacgagtggattttgagcaatcctcttgtgtaagaagagcctcaactgcataaactacaccttccttgataaaggatcccaggtaagcatcaggaagcttttgcataagaatctcgattatctttagtgatgaggtcaggacatgatgatcctttctagacaataaaccagccaagaagcttgatatgttcgtttctttgagcaactcttgaagcgtttctggtttactgaagtaacaaatgttgttcactattgaagcacagccatagcaaatgtacgaattggcaccagagttcaccgccttgatcaagacaggaagaatatccctagagaactgacacaggaaccttggtttcatccgtaataattttttctttcgcaagtatgatctgggtgtcttcaacgtctcttgcagcagaaggaatcaactggtttgctagtttcagagcttcatatacctgattgttttgtttttccaaaggtaagtatggcatgccatgagataggtctgaagtgaccaaaatcccctttattgtgctcccaacattcagctcaaagagagacttcactgccacaagtgacgaacaggctagcttggcaagaagcccaatcaggttgctgcaagtcgatgggctaagggccgtgagtccaccagtgtggatcaaaggtaggaccttctctatgatgccctggtgacagagctggtcaagaagatcaactgaactgctaaaagagtccacgatgcttatcaagcaagctgcaaccttctccactaccatcttgtcctcggattgcagaagattacacagtgttgggactgaatccacaacaaaatgggagcaatctgcagggacctttttgcaggcatttgcgacagctgacactgcaaccctctgaatacttgcagtgaagagtcaatgtatgtcag

SEQ ID NO: 29355 - DNA, 489 bp, Setaria italica
  Peptide Sequence Number=SeqID_95329
tcgttgtgttcgttcgttcgttttttttgttttttttgttttttttttgtttttttttttgtttttttttttttttttttaaagtttaaattaaagagtagcattctattgtatagatagaatcgggttgtacatttataaacagaatatatctttgcttaaaaaaaagggatactcacagcaatgcagacgtcacaactgacgaattcctttattgaaatttatataaaaaaaggggcactgtgctagtaggtggccagcagaacatctacctacgcagccactggaacaggatggtcctccaagaagccaacgagtagctcattcaccttgtcagggaactgctcctgcacaaagtggcttccttcagggatgtagacgatcttcaggtcgggcgcaaacatccccatgatgccgtctttcaaaacggacgcgaagccagggagcttgtagacgtaatctttctcccccattgtactaactaaacta

SEQ ID NO: 29356 - DNA, 674 bp, Setaria italica
  Peptide Sequence Number=SeqID_95330
tctaggtctaggaaggttagaagatttttttccccctgtacgaagagataggctcagcggtcaagggcgaggccatggacatggagcagcagatcgagcacagccacctccccatccgaggcctcaacctccacgtcgcccaggccggcaaaggtgacaagggggcggtggtgttcctgcacggcttcccggagatatggtactcgtggcgccaccagatgctggccgtggccgccgccgggtaccgcgccgtcgcgccggactggcgcggttacgggctctccgaccagccaccggaggaggaggaggtgtcgtacgacgacctgctgggtgatctcctcggcatcctcgacgccctttctatccccaaggcattcctggtggggaaggatttcggagccgtgccagcctacgatttcgctctgcgtcaccctgaccgcatctgtggcgtgatgtgtttgggcatccctttcactcctttcgcttcctccttcgccgccatgccggaaggattctacatgtcgcgttggctggagcctggaagagcggaggctgacttcggcagatatgatgtgaagagagttgtgcgcaccatctacgttctgttctacccggaaccgcaacccgacggacgtaggacgtagacctagggacaatacccttacaaaccccga

SEQ ID NO: 29357 - DNA, 837 bp, Setaria italica
  misc_feature (792)..(792): n is a, c, g, or t
  Peptide Sequence Number=SeqID_95331
acgccatgcccgaaggcttctacatccggcgctggcgcgtgcgttcctgtgcctctaaccgcatcggcctctgcctctcatctgctctcgtcttaatcgaattgaagctgctcctctgcaattggtgttgacttgagtccatacgtcttttttgtctctgccaggagcctggcagggcggaggctgacttcggccggtacgccgtgaggcgcgtggtgcgcaccatctacgtgctcttctccggcgccgagatcccgacggcgaaggaggggcaggagatcatggacctggccgacctgtccacgcccctgccgaagtggttcaccgaggaggacctcgacgcctacgccaagctctacgagaagtccggcttccgctaccctctgcagatgccatacagggctatacacaagataccgaaccggctggacgccaagttccaggtgccggtgttcatggtgatgggggagaaggactactgcttcaagttcccggggttcgagaccgcgctgcgtggcggcatcatggagaccttcgcgccggacctgaagatcacctacattccggaggggaaccacttcgtgcaggagcagctcccggagcaggtcaacgagctcctcctcggcttcttcaaggaccaccccgtcgtcgccgcgtgagatgccactgagaccgtgagaacaacattttcagcagttgcttcactatcgccgttggtcatgtagctctgaatttttctcgggtaataataaaaatgcacacgtttctagaacttgaacctacttatgaatnttgcggatatttcaagacactaattttgctatgcatctatctact

SEQ ID NO: 29358 - DNA, 1101 bp, Setaria italica
  Peptide Sequence Number=SeqID_95332
gtaagctgaacggagcatctcggtctcgggccggcctcgaggagcagcagtgcaagcagcaatggcgcaggagatcgagcacagccatctccccatccgcgggctcaacctccacgtcgcccaagtaggcaaaggtgagctggggacggtggtgttcctgcacggcttcccggagatatggtactcgtggcgccaccagatgctggccgtggccgccgccgggtaccgcgccatcgcgccggactgccgcgggtacggcctctccgaccagccgccggagaacgaggaggcctcctgggacgacctcgtcgccgacgtgctcgccatcctcgacgccttctccatccccaaggcgttcttggtgggcaaggatttcggcgccatgccggcatacgagttcgcgctgcggcacccggaccgcacccgcggcgtggcgtgcctgggcatcccgttcacccccgtggcttcctccttcgacgccatgcccgaaggcttctacatcccgcgttggctggagcctggaagagcggaggctgacttcggcagatatgatgtgaagagagttgtgcgcaccatctacgttctgttctctagcagtgagatccccatagccaaagaagatcaggagatcactgatctcgcagacttgtcgacgccccttccagagtggttcagcgagaaagatctcgctgtctatgcgtccctctatgagaagtctggtttccggtatccactgaagatgccgtacaggtcactccataagaggcacacgattgaagacccgaaattccaagtcccggtgtttgttgtcatgggggagaaagattacgtctacaagctccctggcttcgcgtccgttttgaaagacggcatcatggggatgtttgcgcccgacctgaagatcgtctacatccctgaaggaagccactttgtgcaggagcagttccctgacaaggtgaatgagctactcgttggcttcttggaggaccatcctgttccagtggctgcgtaggtagatgttctgctggccacctactagcacagtgcccctttttttatataaatttcaataaaggaattcgtcagttgtgacgtctgcat

SEQ ID NO: 29359 - DNA, 312 bp, Setaria italica
  Peptide Sequence Number=SeqID_95333
cacggcggcgccccgccgtctccggccgccgccgcctccccgtccccttcctcgtcgtcgtcgtacgggagcacgaggaggtcgtccacgacgaagtggtccccgcagccggcggcgcccttcctctcgcggggacccgcgccgccgccgccgtagtacccgtactcggccgctgccgccgcctccatgagctgcactacgcgtcgcaccaacaacgcccgcgcgcgtccacctgcgttactcggcccggttttgttggcttgctccgtcggttttggacgtgtgggcgaggagagggagagacggaaacag

SEQ ID NO: 29360 - DNA, 599 bp, Setaria italica
  Peptide Sequence Number=SeqID_95334
aaagatctattcctgcaaccacatcgttgcggtggttcaccagattcctgtggggagccgccggatctgcaccccgtcggcgtgttcccggcgtcctgtcacggcagcgccacattggttggggcccattcgtcgtcgaccatgttgagaaactcgaaaaccagattttctccgcgctagcttcatccaaagacccgttcccaaccgaatgagcaaaatgaccactccctcagtttgttgaagtgatgcatcgtatggaaactaacatcggagaggaacgcaacgacagtgtgagaggaccgagaaagttcacacaccatgaagcctgaagaacacttccagcatattttcccccgttcctcgatgcgtaagttccagattacgcactcttgttatgatcgaacacctctagcaaattctacagtgaaccgatcgactgcaacctacctgtggagcttcaccatggtcacaccttcaggctttagctagagtgccctgatcccatcgactctaagcggagaagttttttggcggtcagcattcaggaacttgagcgagatgacgacggcatcaccaaatagagctggcgtctaaatttt

SEQ ID NO: 29361 - DNA, 487 bp, Setaria italica
  Peptide Sequence Number=SeqID_95335
gaaagattcagcagcatggaagcgaacgggacgcaagaaccaccgcctcgccgtagcctcggcgtggatcatgaatccctgcagcagccgcagagcgatcccaagaggaagggtggatggatcaccttccctttccttggagtggcgatgatggggcttggtgtggcgacgagcggcgcgttgaacaacctggtggtgtacctgatcaaggagtacaacgtgccgagcgtcgacgcggcccagatctccaacatcgtcgccggctgcctcagcttggccccggtcgccggcgccatcgtcgccgacgccttcttcggctgctacccagtcgtcgccgtctccatggccttctccaccctatccttggtcgtgttcaccctgacggcgagcctgcgcggcctccgtccggcgccgtgccagccgggcgacggcgcggggccttgccagccggcgtcggccgggcagatggcggcgctgtacgccggcg

SEQ ID NO: 29362 - DNA, 201 bp, Setaria italica
  Peptide Sequence Number=SeqID_95336
aaagaaccagagaacccagcagtagccctagaccaccattcccggctttgttacgatcacttgatcgccaatggctgcaaagctcgttgtcctcgttgccctcagcctgctcctcttcgccggcgacgcgcacggctgcataccctactgtggaccagctgattccactccgcccgagccggcaccatcgacctacgcacc

SEQ ID NO: 29363 - DNA, 472 bp, Setaria italica
  Peptide Sequence Number=SeqID_95337
cttttcaagttgttcgatgcactgctttagggtcatttgctgttcttgaaggttcgaaatcaatgttgatgctggctgattaccattggtgctagcatcgtctatatctttatttattctctccaaaacaccaacagtgctcttacatttgtttaaagctgtgtcttcatcaaaatgttgatcgagcactgattggtatgcagtcacaatcttttcaggcatcccaccaacagtaagtttttttactattataccagaatcctttcgtgcagctttggaatttgaagagggattagaggtaggatttgaactattcccgttgttatccaatacaggagggttgtcaccaagaatatcatctttcagactttcaatacgggtcccaaaaaccttacgttcatcccaaattcctattaatcttgccaccactttctttccatcttctcccccattttcatagactaagtaacta

SEQ ID NO: 29364 - DNA, 793 bp, Setaria italica
  Peptide Sequence Number=SeqID_95338
ggcccacttagtcccgggaaacctgccggcagcgacaatggaggcggaggtggaattgagccagccatcatcccaaaaggtcctcccactccgaccattcctccagtattttgagcaaattgttgcagaagcggtggcaatatagatggcagtggcggcggcggtggtgggaatggacctggcgtttgtggttgcgtgcctccaagagaagtaggcactcctccaacctgctgttgcacctgtggcgcttgcccaaaaaagggaggagcacccatatcactggcctgtgttgttttctcaatcctaggcctcttttcaatctggaagccaggtggtcctccagagaattctcctgaaggcgatccaccatttatggaagcagcttgctcagcagcaagagatgagataagggatgaaacgcaggtgctgacaaagatgcaagcttatctgccatagctgctgccgtcctcttggactcgtcacccactgcactgactgtaggggggagtgaggttttgctggattcagtggctgtggccttggaggtgtcgaccttactccagaaccctgcatcatagcagctgtttgctctggtggagtaatcatgagaggactagaactagattgtgtgccacttgtggcaagggcactacccagttgttgtctaagttgaatggcacgttcagcctctgctcgagcaacctgttttgataattagaaaaaagtttagcaaggtatcactttaataatgtcataaaatgtataaagcctgattacagtttgtctagtaact

SEQ ID NO: 29365 - DNA, 1792 bp, Setaria italica
  Peptide Sequence Number=SeqID_95339
gggcaactcttaagcatcaatgccaacgtcggtttcttttgcctcaaaagatcaatgcaaagggggaaaaacgaagtctaactacttcatatgaccatgaggagtcaaacaactcctcgaaccaaaaggaacttagttctacatcacaaaccgcatgcctattctacagatctttctaatccgtgaccattggtcctgcttcgcttgtaggacgagtcacatataagctcgatactcagggattattgtttaatgtacaaagttagcacaaggtgctgcctttatagcctgatgaatgccatgctgccgttgaatcactgtcgttgggcagatggagattgctgcacctgcaccggcggaaagaaccccatgcttgatgtttgaaagaatccggctgatgttggtgattgctgtggtggctgcggagactgctgctgctggggctggttctgagctggtggaggtggaggtggaggaggtggcccacttagtcccgggaaacctgccggcagcgacaatggaggcggaggtggaattgagccagccatcatcccaaaaggtcctcccactccgaccattcctccagtattttgagcaaattgttgcagaagcggtggcaatatagatggcagtggcggcggcggtggtgggaatggacctggcgttggtggttgcgtgcctccaagagaagtaggcactgctccaatctgttgttgcatctgtggcgcttgcccagaaaagggaagaatgcctcttttcaatctggaagccaggtggtcctccagagaattctcctgaaggcgatccaccattatggaagcggcttgctcagcagcaagagatgagataagggaatgaaacgcaggtgctgacaaagatgcaagcttatctgccatagctgctgccgtcctcttggactcgtcacccactgcactgactgtaggggggagtgaggttgctggattcagtggctgtggccttggaggtgtcgaccttactccagaaccctgcatcatagcagctgtttgctctggtggagtaatcatgagaggactagaactagattgtgtgccacttgtggcaagggcactacccagttgttgtctaagttgaatggcacgttcagcctctgctcgagcaacttgcaactgaccccgaagaaccactgactttgactcctgttcgctgagagcttcttttaattgattgatcagggatatcctcgccgcatctacactttcaagttgttcgatgcactgctttagggtcatttgctgttcttgaaggttcgaaatcaatgttgatgctggctgattaccattggtgctagcatcgtctatatctttatttattctctccaaaacaccaacagtgctcttacatttgtttaaagctgtgtcttcatcaaaatgttgatcgagcactgattggtatgcagtcacaatcttttcaggcatcccaccaacagtaagttttttactattataccagaatcctttcgtgcagctttggaatttgaagagggattagaggtaggatttgaactattcccgttgttatccaatacaggagggttgtcaccaagaatatcatctttcagactttcaatacgggtcccaaaaaccttacgttcatcccaaattcctatctgtagttcccaaaaaataacaagatagacttatttattttggacttgcaataaaagataagaatggttaaatttaccatcaataattccataattaatctagtcaaactatgaataggaacttttcttacattattgatgaag

SEQ ID NO: 29366 - DNA, 500 bp, Setaria italica
  Peptide Sequence Number=SeqID_95340
acatagtcgacaccatcgacaggctcaccaatgagaatagacttcctcatttgttgctatatggaccacctggcactggtaaaacatcgacgatacttgcggttgcgaggaagctatatgggtctcagtatagcaacatgattctggagctcaatgcatcagatgaacgtggtattgatgttgtaaggctgcagatccaggattttgctggcgcacgcagcctctcttttggagcaaggccttctgttaagttggtcctcctggatgaagcagacgcaatgactaaagatgcacaatttgcattgcgaagagtcattgaaaaatatacaagaagcacacggtttgcgctcatatgcaatcatgtcaacaaaattatccctgcactacaatccaggtgcactaggtttagatttgctccacttgatggcagtcatgttcgagagcgccttcaacatataataaaatccgaggggctcagtgtaggattgtagggttggctt

SEQ ID NO: 29367 - DNA, 891 bp, Setaria italica
  Peptide Sequence Number=SeqID_95341
ttaattttagttacttaagttactaactactactattggtctattccctaactaaattctactagtaatccaaggtgcactaggtttagatttgctccacttgatggcagtcatgttcgagagcgccttcaacatataataaaatccgaggggctcagtgtagatgagggtggcttgacagccctagtgcggttgagcaatggtgatatgaggaaggctttgaatatattgcagtcaacacacatggcatcccaacaaatcacagaagaagctgtctatctttgcacaggaaaccccatgccaaaagatattgaggagatagcattttggctactaaatgaaccattttcaaccagcttcaaacatatatctgacatgaagatgagaaaagggctggccttggttgatatcatacgggaggttactatgtttgtgttcaaaatacagatgccatccgatgttcgtgtaaagctgatcaatgacctggctgatattgagtacaggctaagctttgcgtgcaatgacaaactgcagctgggcgcactgatctcaactttcaccagtgctcgcacagctatggttgctgcctcttaactaattgcagttatgtgatggatgtttttgttgcccttgctgccaactggaatctggagatgaagggcagctacctttgtgggtcaccgtcttgtcctgtagttagcaagctgaaaagcttggtgagggctgtcttagatctgtatgctgctggatgcaatgtgttaacttactgggaacttgggagtctcccatgactgaatgctgtagggcgttgttaagctatgatgcatcatgcatgtaagattttatccagtctagtaatgaagcaattataaccgaactttttctttgatg

SEQ ID NO: 29368 - DNA, 278 bp, Setaria italica
  Peptide Sequence Number=SeqID_95342
tcgcggcgctcctcgagtactccggcgtcgtaccctccgtccccgccccgcaggcgccgcaccacccgtccgccgcgccctcttcgccgtcgtcggcgtccgaggtcgacggcctcctctccgccgcggcagccggggacggggaggtctcgatccggatccagggcggcccgggcgactcggaggccgcgggcggggcggccgcggggacctcgtccgaggactcgatcgaggcgacagcaggctcggaggttgaccaggcatccgccgccgggagg

SEQ ID NO: 29369 - DNA, 1035 bp, Setaria italica
  Peptide Sequence Number=SeqID_95343
ccgtcgcaaacccttcgtcgccaccaccgccctcccgccgcggttcccctccacgcgccagcgccgcatcccttctccggaaccctacgtcccggctacctgctcccaccgctgaatcctcgggcgccctgttgtggtctctgccgcatccacctgccttcgccgtcgggcgtcgcggagtgccctcgccgcagccgggggcgcggcctgttgcgggggccgaggccgcctccttcgcggtgcgtcgtcacggaggaacaaaatcggcagtgcgtatgggcttcatgcacttcttttggaagttctgctttatttcatagtggattgtagaccagaacctgccaatttgccaaagcaatgctgatggaccctcctgttatgcaagtggactgccagttgcaaaatgatgtggaaaaaacatcatcctatgataggaaactgaccacctcacacggtgattatgggtggacaggctctgatgtccacccaacaaatgatgcaataatctgtaacccagttgaggtagttgaggttaacaatgcttctcaaatgggcatagatgatgtatcagattcttcttccaaaagatctcctattaatttgggcgatttgcctcaggggacagaacaaataaagaagaatggcgacgtttcttactccaatgatgtaaagcttcagttgaatgtaagtaccgaaaataataatggcttgcaaagtgatgatggcaactttaataaacaaagtttctgtaaggaggataggcatcatcctcaggaaatcatacatcatcctcccaccacaatctcgttaccaagttcatgcaaactcaatggagatgccatgccttctcaagaagagaaaatagcagaagaccatgtcaaagtggatggaaatgttgatgcactaagtaaagaagtcggagctgacttgataggatgtcatgcagggcagaaagaattgcagtgcccgctacaagatctatcagaaatagcctgcagtattgatttagcacgtaataaatcttctccacaggaa

SEQ ID NO: 29370 - DNA, 250 bp, Setaria italica
  Peptide Sequence Number=SeqID_95344
tagaatcaccagcgcctttattacaaggaatagcagacaagcacgctaatgtagacaaaacttcatgtcctggatggccgagacgctggtgccaaagcgagggtgtggcggtagcaagggaggaggacgtcggcagccgtagcgggtacaggggaccggaactatcacatcggatgatctctctccgagagggcagatccttcacagaacagccaagagggtcaaactccacagagcaattattatcaag

SEQ ID NO: 29371 - DNA, 423 bp, Setaria italica
  Peptide Sequence Number=SeqID_95345
aggtcaaacatatttgagaacagaaagttcacctacagggagctgaaactcatcactgctaacttcagagaagaaatagggagaggagggtttggtgctgtcttcctaggatatttggagaaccaaagtccagttgccgtcaagatacgttcaaaaacatcctctcaaggggataaagagtttttagcagaggctcagcatttgactagagttcatcataaaaacttagtttccttgattggatattgcaaggacaggaaacatatggcccttgtctatgaatacatgcaaggagggaacctagaggaacgtctaaggggagaggcatctgctgctacactcctcacttggcatcaacgtctcaagattgctctcgactccgcccaaggattggagtacctacataaatcatgccagccgcca

SEQ ID NO: 29372 - DNA, 620 bp, Setaria italica
  misc_feature (42)..(42): n is a, c, g, or t
  Peptide Sequence Number=SeqID_95346
ctctctatgtggtttactgttggggaacctgcacctgtcaanccttgcatcttttcgcagacatagacataatgggagtcaggatcctctggaacaaatccatcagggagcctacccctctccgtcagtggaacaggatccagtacttgcctccttatctttccagtgaacccaggtcttggtagaatgtaaagtacaattttccaattgcatgctggttgattcaaatgaggaactcgcactgatggatcaccatatgttatcaaaataatgacacctcctggtctaagaagcttcagaggagcagcaagacactaaaaaacctgtccacttccgaaaccatctgagctgcactgagaggagcatccacaccacactatgaaaggagcaagacctcaatgttgaagaagtccagaaataagcaaaaggacacagtgacttatgttaacatacttaccatcaatgagtccagggtacctttatcaattgcacaatcaaacgattcatcaggaaacatactcatatctctgacatccatgcgcaggtattgcagctgcggaatgttgaaatatttcttcctcatcatctcaatattaatctccgtttcttacttaaccgtt

SEQ ID NO: 29373 - DNA, 1246 bp, Setaria italica
  misc_feature (1)..(25): n is a, c, g, or t
  Peptide Sequence Number=SeqID_95347
nnnnnnnnnnnnnnnnnnnnnnnnnttttttttttttttttttttgtcagaaacaatgattttacttcaacagaaacaaatagagtattcctagaaaaaggccaattcctttctccaataacaaattttctccctcgaaactaccaaacgattctgctgtgcttttcaagacgatacaaaaatgagagagaagaaaacagtggttgcacatacatcactgacttcctgattctcccaagatcggttacaggcatgcaatggcacgctttctatatttggatggccataacaatggtggcaacatcgcgtcatctgatcatgtataaatcacactaatccacaaatcttgtggcatgaatcagcctacagtttattcttccccttggctctctatgtggtttactgttggggaacctgcacctgtcaatccttgcatcttttcgcagacatagacataatgggagtcaggatcctctggaacaaatccatcagggagcctacccctctccgtcagtggaacaggatccagtacttgcctccttatctttccagtgaacccaggtcttggtagaatgtaaagtacaattttccaattgcatgctggttgattcaaatgaggaactcgcactgatggatcaccatatgttatcaaaataaagacacctcctggtctaagaagcctgtccacttccgaaaccatctgagctgcactgagaggagcatccacaccacacatcaatgagtccagggtacctttatcaattgcacaatcaaacgattcatcaggaaacatactcatatctctgacatccatgcgcaggtattgcagctgcggaatgttgaaatatttcttcctcatcatctcaatcacaaccgaagaaatgtcaatgttcacgatctccaaataaccatcactgaccatgtcctctgacataagtgcggagccgcatccaatcatgagtagccgggacgccggcggcgcgaagcggcggacgaaggggcggagcgcgtcgtagcgctggtaccagtcgtacggcgcgccgccctcctcgacgtaccgcgcgtcccagtactccgcctccccgtagctcaacgacctcccggtgttgccgtcgctcccctcgccgtcgtcgggcggcggcggcggcgacgacatcgccgctaggactagctaggagcagagggtgagggagcggggttgcgagtggggcggattgggggaggagggagaaggagggagaggaag

SEQ ID NO: 29374 - DNA, 1067 bp, Setaria italica
  Peptide Sequence Number=SeqID_95348
tcgccgaaagggggtcaggcaaaccctcacccgcgacccctgggcgcgatggcggcgccggaatcggaatgcggcgggggcgacgccggctacctcgacctccgcgacgtgcgcgtcgaggtggaccctgggacggcccgaggcggcgggggaggaggcttcgcggtctgcttctggctctacctgtccagctccgcgaggccgtcctcggtgatcctccaccaggtcaccacgggagatggcaataagttgccatttcttgctttaggcgaaggcaatagactgcttcttttccattgatgacgcttcacagagaagcccctgctcctgctagttcctatccatggactgacacaaccagtctatcatctacaaatgaatgccctcttgagaaatggttccacattgggtgtgaggttactgaaaatgttatgcgtcttcacatcaatggtaacctaattgctgaggctcatctttgttccttatctgacgagcagcaccatcaggatcatgcaaacaaaattagcttatttggaaacgatagcaagctcgaaggttatatctataatattgaggtgtcatctgtactaggaactataaaagaacaacatgcaaagaacccaccatttaagttatctattgactactcaagctctgatggaatcgaagagggtgatgatggcatttggaacattgtgggtgggaaggcatcttgcaggagaaacttcatattggaagtagtactaatcaatgctcttggtgaacctgtgaaggataaagaggttgttgcttcgcttgtctatgctgacaatggaacagctgttgaaaaatcaagggatgattcagagcctcccttgcttattacttctgaaggacttgaatacccagctataagcaggcctctaccaattattcgtggatgcgcaatatttaaactcaaaatatcacagctctcctccaaatgcgacaataagctcttccgtattcaattctctacactgcacatgcggagatatccttttctggtggcatattccaaaacaattcgctgtatatctcgaacccga

SEQ ID NO: 29375 - DNA, 516 bp, Setaria italica
  Peptide Sequence Number=SeqID_95349
acggaatagacaagtaacgggtacctgactctgtcgccgatcatactcagcatcaccagtggggagctcaaaccggcacacggggcaagtgttcctgatggctagccacggccggatgcactccgcgtggaagtagtgcttgcaggggagctttaggacactgagccccgccgcgatgacatccttgcacacggcgcagccgtgcgaggcctcctcttcgctgagcacaacctcctgtaagccctccactgctgcgcgggacgccggcagctgacgcacggcttccccaacgtgcgctgcggctgcgagcacctcgagaaggttcatgtcggcgtcgccgggatcggtgtcctcggcgcccgcacccaacaccatccaggagggccgcacgacctgggcaaagacccgtggcggctcgaggtcgaacccgctcagcatgagccctccctcctggcccatatcgtcgtcgctggtgacctcctcgttcggttgttcctaccagcgtctggaagcccc

SEQ ID NO: 29376 - DNA, 410 bp, Setaria italica
  Peptide Sequence Number=SeqID_95350
gtatgcagccacaacgatgtatgcaaatggtagaaaccaagggctagtcatctgagttgagttgattgcagatgcaaatttgtttcaaagttagcgcaagttaaagtgcatataattatataaataagcaacggaatatactttaacgtacctcagggaaaagggacatgccattgaggaaacaaagtgaagggatggtgacgtagtataaggtggggaagctgttcagagcccaaaacccgcagacagaataacccatttgaaggcctagcttgatcttcctgtgacctaatagaaaggggctgtattttgagagggagatctggaggaacccttctgtccatctcttgtgctgaaccagaatctgtcctagtgaggtgggggccatccctaagaagccctttcttgcg

SEQ ID NO: 29377 - DNA, 558 bp, Setaria italica
  Peptide Sequence Number=SeqID_95351
tgagcaactcatctcaaataaatttaattctaagccctcagtgatcattgctggtgatttcaattcgaccccaggtgacaaggtatacaattaccttgtatcagccaacttagaatctacagatgaagctccgatcaagttacgcagcctttatgctgtgaatggaggggagccagagttcacaaactacactcctggttttactggaacattggactacatattcttgtcggatggtagtttcaataaaacctactagcctactttgtttgccgcgaggggattctacggatgtgcaaggaggcctgcccaactttcagcatcctagtgaccatttaccaattggtgctgattttcttgtagttaacagctagtacaaaggctgcttgaatattgcgcagtctaggctcgtaggcttcatagttaaaatgtaatatctcaaggtgcatttccttgtttcttttcttgtggaagtaatagcaattaataataccaattatttatttttgttattgatattttaatgcgtgctatacataacaactcctttactactac

SEQ ID NO: 29378 - DNA, 769 bp, Setaria italica
  Peptide Sequence Number=SeqID_95352
gccatcagcgtgcctcaagtggaaatctcgatccaaagctgttctaacagagctcaagagtttcgatgctgacctcatgtgcatacaggagttggatgagtatgataccttctacaagaaaaatatggaagcttctggatattcaagtatttacattcagcgatctggagacaaacgggatggttgtggtatattctataaaccaaaaagtgcggaactggtgcagaaagaagcaatacattacaatgacttagtggaaaaatacgttcatagtgatcatgtaaatagtgccctgccaaataattcttcaccagaagaagacacgaatgcaaagcaagataatagcaagcgtggagatccaaatgatccacgcgtaagattgaagcgtgactgtgttggtttactcgcagctttcaagcttagtgatccttatgatcacattttaatcgtggcaaatacacatatttattgggacccagaatggattgatgtgaagttggctcaggcaaaatatcttctttcgagagtctctcaatttgagcaactcatctcaaataaatttaattctaagccctcagtgatcattgctggtgatttcaattcgaccccaggtgacaaggtatacaattaccttgtatcagccaacttagaatctacagatgaagctccgatcaagttacgcagcctttatgctgtgaattggaggggtagtcctagtagtttctacttaaactttacttactttcctttggttttttactttggttaa

SEQ ID NO: 29379 - DNA, 655 bp, Setaria italica
  Peptide Sequence Number=SeqID_95353
ccttacaacatacctaattttcaagctttcaagcaaatcctcaacatacacaaaaaaattgaaagcagaatctcaacaacacaagtcagacaccagaaccagtaccatgctaggctgctaactcaagcaccactggagaccatataaaaaaggacacgactagctcaacagcagatgacaccacatcgccaccatatatcaattatttagtcagttccatccacatcctgatcgcgtagtttagctcactgaagtatggtctatgagagatctaatttttcgctttagccacattaatcgaacattaaaattcttggttgtaatgaatatcttcctgtgtgtatcagactcaaagacattcaaagcatataacttctacttgtcggttaattcgaccatagaaaccacttgatcaacacacttctcaactgaaaattctttctcactcctttttctttcttcaaaagcttgcaaagttttgttggtttggctctttttgtactccacatatccctcaagagcagagccaatgtgactttgcttacgctttctcccacttccgccttcttcctatcgaaactcattgcgttcactatgtgcactagaagtctcttggccatcgaaactcgaagcaaatggattcgtacccaagtga

SEQ ID NO: 29380 - DNA, 559 bp, Setaria italica
  Peptide Sequence Number=SeqID_95354
tttttttttttttttttaagtttgaaaaagtgttttcttccgttattgatcgatcgtcagcatggtgacagaggtactagaagggaaaacaattctatccactcgaaatgaccctttaatcagcaacagttagcttcactacaggcattctcacaattggagacacacagacaactatttactctcacgaaagggattggaaatcagaacccctgaataaaataaaaagaatgagaagatgcatcttgagagcaggaaacaatgaagattcctcttggctccataactgaattagggagttacttctaccagtcaccagcacctatcaatttccgtcattaggatctcttccgaaaattggatcaaactgctgggtgggtctaaaaagtttttagggggtggttagaggaaatgatgagtgggatacgcatgctcatatccattgtaatcgtaatatagcttttcaccacaagctatatcacggcaggcaccagcaagacatggctctccgcatcaatgtcataccgcacacatttgacattctgcttcttcttgccat

SEQ ID NO: 29381 - DNA, 461 bp, Setaria italica
  Peptide Sequence Number=SeqID_95355
tagttactaataaactctataactcaatattcaattctatcaaatttggaatcatctctgtattcattgcaaattattgttgctgcagggtacattccattaagctcatcagctgatagcaacaatcagacccattgttgtaagggaaaaattgatcatatagtcttttgatggataattttactttgaatgaatcagcaaaattgcgaacccattagtttttaatttatgattccaaattgcttacctttgaaatggttcagtccatgctgttgttgccaaaatataatttcagtttatcaaatgcaaataccaatgttactgatttttttcatgagcaaaattgagttcaagtgaagtgcgcaagtgatgggacagtcaacatcaatccaacctttgctacaagtgttagacatagttcatttcattttgatgtgttcaaaatgctagtgtgtgtccga

SEQ ID NO: 29382 - DNA, 417 bp, Setaria italica
  Peptide Sequence Number=SeqID_95356
taactttagtctaactttcagcattactgcagcttattgcttggggaacacttgcaatcattccagtcacaggcgacacatttccaacccaaatggcctgcattctcattgggaatcttggagcatctgtcacagaagttgtaagtgatgctgttgtcacggagttcagtagtaactcagaaggctggtgtactacagtcatatgcattcatagccctggctgcaggatctctactagggaacttgtctggtggttatgttctgctgaaaacacaggaaccaaagatcatgttcacggctttctcagttcttcttggtttccaactggcactgtccctcagtacaaaagagacattgccaagtactccacgaaacaccagaagtcgtcgtgtcagaagctcattggcagtcaatctt

SEQ ID NO: 29383 - DNA, 524 bp, Setaria italica
  Peptide Sequence Number=SeqID_95357
agatcaggcgcaccgcgcacctctctcccgccccccacccccgaactgcgtcggaagcggagatccgtccctaccactccacctcgacccggatcgacctcttctcttgctgtaaagaacattatttttgtggctgcaaagttctatagttctggaggagcaggatggagcttatcattatcatctcacttgtcattcttttagcactaggagctctctttgtgatcccaaggtcccaaaataaaggtaaatcaaagggacctgattcaggagctggagtggtaggctattcatctttcattgttaggctacagatacatgctacagtgcattttccctctcagatttgcactgtaatacttataatattttacaaagcttgaagaaatgctatttttgttgttacctgtctttctacgttcagacatctaagagctatacaaaggaagaaatctctaaacataacacaaggaaggattgttggataatcatcaaggacaaggtttatgatgtcactccttatg

SEQ ID NO: 29384 - DNA, 253 bp, Setaria italica
  Peptide Sequence Number=SeqID_95358
cgttgacctcccgtgcccttcctatctcgtggcctttctttcctgccgacgacgactcgccgacgccgagcggcgcagcccttcgccagatcttcatccagcccttctcgcccgcgacgagcatccaacaggcaatgctctgatgaagacagagatcgaggaggtaagcattggagggttctggagtgaggaagacaaagccctctgtgcttctgttctgggctcggatgcctacacgtatctgaacaaatgg

SEQ ID NO: 29385 - DNA, 542 bp, Setaria italica
  Peptide Sequence Number=SeqID_95359
aaagtaaaggggtaagaacgaaccaaagaagacggacggcgagcaggttgtggatagtcatcagatggtcgaggagcgattcagcgatgtaatccgccagcctcgcgaagataagcagcgccgactcctgaaggttgggcgcctcgggccccgacgcggcgcggaagaggaagggcagcagctcggcccaggcgttctcgggcagcagcgaggcagcgagctcggagatggcatcgcagaccttcttggcgatgggcttgggggggaatcggactggagcgcggagaggaggtgcgccttgagcgcggactggccggcgagggagagctgcggccagagcggcgccgggggcgaggcgttgttggcggacgcgtcggaggacggggtcggggagaggaccttgcggagcaggacccccgccatggcgcggaggtcggcggcggtggcgggcgacgcgagcgatgaggcgagccgcagcgcgaggggctccgggtgggaggcccggaggcggtggaaggcggcctcggcggcggagcggtcgg

SEQ ID NO: 29386 - DNA, 461 bp, Setaria italica
  Peptide Sequence Number=SeqID_95360
tacagaaaggaaggacggtacaaccgaaccgaccgacggacaacgttaccaacgtaccaaactagaccgacaacgaggccagcagccggctccggtccgtcacggcctgctcggtgcacctccagcagccgtcgggtaacgcgccgccgtgcgccgctcgagggctacatctggtcggcccgaagcgccacggcggcggcgctcggatattctccgccggcacattcgccgtccgtacgccggagctctgcggccagaagggcctcttcttcccgccgatcccgttcgtgccggagccgccgaacgtcggtggcgtgccgatcccgccgaacccagtcactccagcaccgccgtctctcgtgccaccccttctgcccacaccgtctccgccgtccgtcctgccaccgcttgtcccacagccaccgccgtcgtcgatagtaccaccactgttgccactagtt

SEQ ID NO: 29387 - DNA, 734 bp, Setaria italica
  Peptide Sequence Number=SeqID_95361
ctccggcccattccacgagaagatgagtaccagcacaactatgatgacttcttggctgctccttgctttggttctgctctcttgcttccactgctaccccgccgcccaccatggccggaagcacgcgcggccaccactgaccgccgccgtcgtgatcggctccgtcgtccactccggctcagagcccaccaaggccatctcaggcaccctggtcgcggtccgctgccacgacgggtacggccgcacggtcttccagaaggaggcggtcaccgaccgccgcggcacgttccacgtccaactgccgcacgaggccagcagccggctccggtccgtcacggcctgctcggtgcacctccagcagccgtcgggtaacgcgccgccgtgcgccgctcgagggctacatctggtcggcccgaagcgccacggcggcggcgctcggatattctccgccggcacattcgccgtccgtacgccggagctctgcggccagaagggcctcttcttcccgccgatcccgttcgtgccggagccgccgaacgtcggtggcgtgccgatcccgccgaacccagtcactccagcaccgccgtctctcgtgccaccccttctgcccacaccgtctccgccgtccgtcctgccaccgcttgtcccacagccaccgccgtcgtcgatagtaccaccactgttgccactagttcacccgccgccgccacccccactgactagtgcgcttccct

SEQ ID NO: 29388 - DNA, 503 bp, Setaria italica
  Peptide Sequence Number=SeqID_95362
ttaacttaactaaactttaagaaaattaagtttaacgttagttagacgaattacttacaacaaaggaggcagtacagactaattcaccttatcttttatttgcatgctgctagaccatatggtgtgtagttttgcagaatcaaagtgtctttggcagatcgtatgttttcttaaggaactttgtagctgcctcatcatttcgatagcataaaacacgtagtatcgtgttggcattatctgggctccaatgggcaggaaccggaggcatggggaacctggattttgttgtaaattcatgtgattcagaaattgtcttcttgaaccgttcaatgagggtttcggtatctgtccgtagaagtggtagaatgctcttcacttctgaggaagccttggcaactaaatcctctggcaggccctcactgtatgttaagtacaagcctctcagggctctgaaatcgtcctctattatctgatagtcctgacaacagaaagcacgtgtcggt

SEQ ID NO: 29389 - DNA, 742 bp, Setaria italica
  Peptide Sequence Number=SeqID_95363
gggttagagcaatcagcattccgaatatcacagctgtgctcaatatgtcaggatgaacgttgtactccttggcaaacacaaacggcacgattccttgtggtagagcagcctgaacaatggcaatgtgcagaagcactccacgcagaccgacagcaatggaggcggcagccatgactgctggacccacgaggaaccggacggccatggcgtatgcagcaagtttgttcccacaggcaatgatccgcggctgcaatgccatgaacaagcctaggctgaacattgccatcccaagccctgcgtctgacaggatcgagatcgaccgggcgatgatcgcaggcatttcaattccccacctgaaggagaccaaggaccagatgacaccaatgaggctggagtaggtgttggggttccggatcagcttcctccagaccatgatcaggatgagcctcgtcatcacgctcgccgggggcatcgcggccggcctcccctcgccgtcgtccttggggtagagctgggcggtggagttggacccgagcttggacagggtcggcccgcccttgtccgcgccgttcccgttcttggtcctgctgaaatcgtcacggccgtactcatcgtaggcctgggttcctttggcgaggacatcgccgtgctcggcgccgccgccgaagacgtgcacggcggcgcgctcggagaccggcgaggcgctggagctccagacgaacatgtgcaggtccttcctctt

SEQ ID NO: 29390 - DNA, 610 bp, Setaria italica
  Peptide Sequence Number=SeqID_95364
ggaaagaagaacaaacctacgcaactagatagagctacagatttgcacttgcaggattctgaagaaagctgggtttgtgcccaagaaggacatgggagtacccaaggaggacattactgcacactccattctctgggcatccctctggttcgagccagccacttgatggagccgcgcccacggacggtggtgctcctggaagcaacttcgacgcaaacgtcgtcatgatcctggctgttcttctctgcgcactgatctgcgcgctcgggctcaattcaatagtccggtgcgcgctgcggtgctcgagccggacagaatttgatcctgtgccgaacccagtgacacgtttggctcagagtgggctgaagaggaaggccctacgagccatgccgatcctggtctactcggctgggctgaagctcaatgctgccaacccgatgtgcgcgatctgcctctccgactttgaggctggagagcatgtcagggtcctctccaagtgcaaccatgggttccatgtcaggtgcatcgaccgatggctcttggcgcggtcgacgtgcccgacatgccggcagtcctgttggacgctccacagaaggcctctggctgctct

SEQ ID NO: 29391 - DNA, 1109 bp, Setaria italica
  Peptide Sequence Number=SeqID_95365
acgacctcgcctgcaagtccactctgcagaagcttcggcaagagtgggatcgtttggctttcaagccaagtgaggacatcgacgacttcgctctccacccctccagcctgatgcagcggctggagcggtatggcaacgacgagatcaacgaagagaaagccgtggcaaagttcatgcgcatcgtcctgaagaagtactcgcagctcgtgatctccatcaagttgctgcttgacatctcgatgttgtcgatcgaggagctgacggggcgattcaaggtgttctatgaccctgacgagacttcttctggtggggagatcatctttggcggtcagctgcacctcactgaggagaggtggctcgcccgctagaaggagcggaaggagggggagtcttcgacaggtggccacgagcgtggcaagcagcgccaggcggaaggaggcaccgacggcggggcgcaaggaggtgcctaggatggtgccgccagcgaggtcgaggccgctcaagaccaacacctgctacaactgtggcaagactggccactgggccagggagtgccgctagccaaggcgcggtcaggcccacgttgcgcaggctgtggaggaggaggaggagccaactctgttcctggctcacgggacgatcgagcttcttcccacggcaccggccgcgacggctctcctccgccttgacgagccatgcgcacatgtctccctcgacgacagcagcagcgatgacaagattgaccggtggttcctggatagtggtgcctcacaccacatgaccgggcccagggagtacttctccaacttggatgtcaacgtgcacggctccgtcaagttcagcgactcttcgatcatggagatcaagggtgtcggctccattgtcctcgtcgccaagactggcgagcaccggctcctcaccggtgtgtagtacattcccacgttgaggaactcgatcatcagcctcgggtaactagatgagaacgggttgcacgtggagatcgacaacggagtgctccgcatctaggatcgacgccaccgcctccttgccaaggtggatagggggaagaacaacctctacgtcctctacgcggaggtggcacagctcgg

SEQ ID NO: 29392 - DNA, 510 bp, Setaria italica
  misc_feature (488)..(510): n is a, c, g, or t
  Peptide Sequence Number=SeqID_95366
ccagggaccagcgccgccaccgctccgcaccaggcacgccgctcgtcgtgccggtgccggcgatcacgtcgtcgatctcgcgcagcaaggacggtagcaataagcccgcggccaccaccgctaccggcaagaaagagaaacgggcgaggttcgtgacggtgccggacgagatcattggcttctgacggtccatacagcccaagccccgctcacatgcacgttaatcggagaaaaagatcgatctgcaacagtgggggctcgctagttgttcatgtgatatttgccggccggaaacacgagaagcgctagctgcatgcgtgtgaatgccttcctgtctccctggcacttctctcttctagtctcttctgcatagtagcagcggtagcgttgttctggtgtgaaatgtgtgtgctgatgaactcacttgtatatgatggtacatatgtgttggactgctggttgatgcctagtgcgatcgaatcgaattnnnnnnnnnnnnnnnnnnnnnnn

SEQ ID NO: 29393 - DNA, 331 bp, Setaria italica
  Peptide Sequence Number=SeqID_95367
gcaccctcctccgcgggaggcgcccgccagccgttcggggacgcggaggtggacccggcgctgttcccgtcgctccgcgccgtcgggagcggcgtccccgcgcgcgctaacgcagccttcctcgccgccttccgcggcctgctcgacggatcgacgctccagtccgaggtatcaagagctgtggctgaagagaaacgtatagtattcacagggcattcatcaggaggttcgatagccacccttgctgctatatggtttcttgagaagtgcaccagacagggaagtgtaaatcaagcacaccccttctgtgtgacctttggggctcctctta

SEQ ID NO: 29394 - DNA, 885 bp, Setaria italica
  misc_feature (1)..(80): n is a, c, g, or t
  Peptide Sequence Number=SeqID_95368
nnnnnnnnnnnnnnnnnnnnnnnnnnnnnnnnnnnnnnnnnnnnnnnnnnnnnnnnnnnnnnnnnnnnnnnnnnnnnnnncttatcctgtgtgtgccttggcatttctcttttagttttttttttttaaaaattaactatatcgagcaaattttattcgaataatagtgacggagaaacaagctgcgtgctaataacaaaccatctcggccaagatctgacgcttcttcctacgcatcgcgcgtgcacacttcaccagagcacaaactgctcacaagacggcaagagacacgacgtgggacggaccacacaaagacacgcgtgcatgcagggaagcaaagcacggctagcgctagctatatacgtagcagtagaggattattctggatggtggcgtggccggccgagacgacgacggaccgagcaccaccggcgccggcgcgcgcgtctcgggcgttcagggagtggcggcacctgggcggaaggggttggggatctcgaagccggggttcggcacccaggtgtcgtcggcgccggggaggtactgcccgttggcggcggcggggatgctgtggtcgagcccgccgatgtccgggatgtagtggctgccgagctcgtagcgcccgatccccgggatcagcaccgtcccctcctgcaccgtgtcggggcgcttcacgtcctccgccgccgccgaggccgccaccgcctgctggcccgggacggggcgcgtcgcggagcccagctgcgcgaggcacgccgcggacacgagcagcgcgaggagcagagctgacgacgacctggccatgccgacgatcttcttctggttactactagctacctgatcacgactcactcactgaccaatcctggctcccgttgctttcga

SEQ ID NO: 29395 - DNA, 277 bp, Setaria italica
  Peptide Sequence Number=SeqID_95369
cgcgacgccgtcgtccttttcctcgcccgcgccgtcgaaccgcgcctccagccatcgaagcgcgccaggccaccacaccactcagttctcaccccacctcgtggtcaacctgctcctcctcctccattttctgctactgagctgccgtggagtggtgattccatcagattttagacttcttccactgacttagcatgggcacaagacttttgaagggcttaagcctgaagaggctcctaggacagtgcagctcagctgatctttacattaaatcacg

SEQ ID NO: 29396 - DNA, 418 bp, Setaria italica
  Peptide Sequence Number=SeqID_95370
gtcaaggcggaggccgacgccaacgacaagcgcagctggatgagctccgcgcagctctggagctgcggcgggggccacgacggcagcagcagcagcacccgccaccaacaatggcgccgccgccgccgcgaagccggcgcataaggtgtccgacgcattcatgccgctgagcggcctgccgacgctggcgagatcaccggacgacgcggcggagaagcccacggccgtgccggtccccgagctgaccctctcgtccccggcgatcgacgccgcctgcccggctgccccgagcgccaccagcagcgccgtcacggacggcggcggcgcggcgcagcgccagcaccagcagcagcagaggaaggcccggaggtgctggtcgccggagctccaccgccggttcgtcgcggccctccagcgg

SEQ ID NO: 29397 - DNA, 450 bp, Setaria italica
  Peptide Sequence Number=SeqID_95371
agaagcttaaaaataagggagaggttgaagattctggcattgatcctagcaatgttatgtaccttgggcacctgtcataccatgacctcatccttgccaccagtaattttagcgacgacaaccttttggggactggaagctttggaaaggtctataaaggtcaacttagcaccggtttcacggtggcggtaaaagttctggacatgcaacacgagcaggccattagaagctttgatgctgagtgcagcacacttcgcatggctcggcataggaacttgataaagatattgaatgtctgctccaacgtggagttcagggcattggtgcttcagtatatgcccagtggaagcttagagatgctcttacactctgaaagcatagagcacttagggttccttaagaggctggacatcatgctagatgtgtcaatggcaatggagtatctgcacc

SEQ ID NO: 29398 - DNA, 744 bp, Setaria italica
  Peptide Sequence Number=SeqID_95372
ttgaaatttctactccctgctgtcactgttgcttttggttctattgttctgtgcatttgcctaacagtaaggacactaaaaaagggacaggttcaaacattgaacattgatcagggtgatatcatgagccttagattagtgtcctatcacgaccttgttcatgccacggataactttagcagcaacaacctgttggggactgggagctttggaaaagtattcaagggccaactaagcactggtttggtggttgcaattaaagttctagacatgaggctggagcaagccattagaagcttcgatgcagagtgccgtgtgcttcgcatggctcggcaccgcaacctgataaggatactaagcacctgctccaacctagacttcagagcacttgtcctccagtatatgcccaatggcagcttagagaagctcttacactctgaaggtagaaggcacttggggttccttaagatgttagagatcatgctagatgtgtcgacggcaatggagtatttgcaccatgagcatcacgaggttgtcctgcactgtgacttgaagcctagcaatgttctatttgacagcgacatgacagcacatgtggctgactttggcatcgcaaagttgctactgggtcaggacagctccatgatcactgctagtatgcctggaactcttgggtacatggcaccagagtatggatcgtttgggaaggcatcacgcaagagcgatgtgttcagctttgggatc

SEQ ID NO: 29399 - DNA, 559 bp, Setaria italica
  Peptide Sequence Number=SeqID_95373
ggctgcacctggagctgcaccggctggactttgggtgcggcgggcggctcgccgggatcctgtctgcccattccccgctggacggggtggtggtgctgatccccagcttggggaaaggggctaaaagtttacttaagtaaagttctagacatgcagcaggagcaggccattagaagctttgatgctgagtgcagcacacttcgcatggctcggcataggaacttgataaagatattgaatgtctgctccaatgtggagttcaaggcattggtgcttcaatatatgccccgtggtagcttagagatgctcttgcaatctgacagcatagagcacttagggttcctcaagaggctggacatcatgctagatgtgtcaatggcaatggagtatctgcaccatgagcatcacgaggtagtcctgcactgtgacttgaagcctagcaacgtgctgtttgatgaagacatgacggcacatgtagcggactttggaatcgcaaagttgctattggcagtgatgactgctccatgatcactgcaagcatgcttggaactacttgggt

SEQ ID NO: 29400 - DNA, 281 bp, Setaria italica
  Peptide Sequence Number=SeqID_95374
gtgggtgggtgtatgtgtgggggcggcgcgggaggcggaggagtagttggaggactccttcctggcgagcttgaggatctcgaggcggtgcttggcgacggcgacgcccatggtggcgaggaactcgtggtcgaggtggcggacgtcgtcggcgaccagctcgttgcgcgcgaagaggagcgcgtagtcgagagccacgtccgggtgcagacccgccctgcacagccacgcgtaccagtccatggctcgccgtcggcgaggaaggtgacgtcggcaggagg

SEQ ID NO: 29401 - DNA, 345 bp, Setaria italica
  Peptide Sequence Number=SeqID_95375
tgtcctcctcctcggagtcctcgtccaccacgggtatcgacacggcctcctgcggcggcgagggctggcgctgctcctgcggcgaggggggcgccactgccactgccatcgccaccgccaccgccggcgccggcttctcgaggttggcgcggcagagcgggcaggtgacccgcgactgcagccaggggtcgatgcactccgggtggaaggcgtgggagcagtgcggcagcaggcggaggtcgtcgtcgtcctcgaacgccgtcaggcacacggcgcactcgagcacgcccttgccaatcttgtgcgccaccacctccctgtaggagacgatggggaacgtggcca

SEQ ID NO: 29402 - DNA, 414 bp, Setaria italica
  Peptide Sequence Number=SeqID_95376
cgacgccgcagccgccgcagttcttgtggtcggtgaaggtgttgacgcatttcccctcgcagcaggtctgcgtgtacttgcacgccttgttgcagttgccgcagtgctggaagctggactcggtgtcgacgcaggcgcccttgcagcacgtcgcgccggggctcccgggctggagggcagatggacggaggcttcttgctgcagtcgtagaaggacagcggcggcgggaagttggcgttggccaggaagcggcttctcctgaggggaggcggcgccgccacttgcaggggagcggccgcggcgagcgcgagggcgagcgccatgagaaagatggtggcttttctcatggcgggcggagggcggtgggcggccggcggcgaagctgctgcaatgcttataggatctctgtgtgcc

SEQ ID NO: 29403 - DNA, 338 bp, Setaria italica
  Peptide Sequence Number=SeqID_95377
ggaatcatctgaccgagcgggattagattccgactgtactatagctggtaaaggatacttatccaaacaggtgtaccaaccaattgcgagcccacagagtgctcgcaggccgtaaccctccgcaccagcatctcacagaacaggtcgtcgaagagcgatactactctccaacacacagatctactcagctgctaccgcaaagtttgggaatggtacagaagggcaggggaaggaaggggacgataccatccgtggaggcgcttgtggaggttgatgggtgtcgtccccttccttcccctgcccttctgtaccattcccaaactctccaacacacagat

SEQ ID NO: 29404 - DNA, 567 bp, Setaria italica
  Peptide Sequence Number=SeqID_95378
ggacggtttgagctcctcagatgatgagaatacagctacctctgcacctcctgcacaatccacaagcagtagttctactcctgcacaatctaatagcgctgtttctggtcgttccaatggtccctcgttgccatctcgtcctgctgggcttggttcgtcatcttccttgttgcagcctcctgctcgtcctgttcaacaggtccgcttcaatggatccgcctctttggctactgagtctgctgaggatgatggagatgggaatgatgaaattcatgagaagcttcagatgatccgggttaagtttttacgtcttgctcacaggttcgggcaaacgcctcataatatggttgtttcacaggttctgtaccgccttggactggcagaacaacttagaagaacgactgctaatgggtcatttagctttgaccgggcaagagagatggcagaacgtcttgaagctgctggaaatgagccccttgatttttcatgcaccatcttggttcttggtaaaactggggttggtaagagtgctaccattaattcgatttttgatgataccaggttgga

SEQ ID NO: 29405 - DNA, 281 bp, Setaria italica
  Peptide Sequence Number=SeqID_95379
cgccccaatcgaattatattacacagttacataaacacacactttcacctccacagtaagagcaaaagaatttgaggtgaggatgaatctaacggcatcctcaatcctgaaacgcatccattaatccttccataccacacttgctaatattccagcaaaggaggaaggaccaacaaaaagaaaacagagagaaaacagaaaagattacacataattagcaacacatcgcagttgccggagccctccctccccttgctgccttgcaagcaagagtttgtcca

SEQ ID NO: 29406 - DNA, 388 bp, Setaria italica
  Peptide Sequence Number=SeqID_95380
ttgcaaacacaatagtgaagggcatgagcctcatgcagtctttgtcaaaagaaagcttgaagtatttgaaagacactgtccttctatcagaaggtgtacaacgtttagtttcaagcgacatggatgatctgatgaggatcgctgcagctgacaagaggcaagagctgagagtattttcacgagaagtcataagatttgggaatcgttgcaaagatcctcagtggcacaacctagatcgttatttctccaattaggcttctcactgtttacatgccttaatcattgatatccagttaatgatctcactagctgttcttgtgtttgtttccaggctagagtcagaaattacaccccaaccagaattaaagaaatggcaaaagcagatatg

SEQ ID NO: 29407 - DNA, 2362 bp, Setaria italica
  Peptide Sequence Number=SeqID_95381
acggcgcccgtcgaggaggcggcagagcctgagctggtgagcgatcagtggtctcgtctctctgagaagggtttcgccgccgccgtccacgggcaacaaggctcgtcactcctcgaaggagccgccgcatttgatgcgtgccgagtcggggaagtctaaggccggaaaacccaggagaagcacctccagcaaggctggtccgagcaaggtttcagatataggcttagcactaggtagaaagagtacctctggacttgggaaagcagtggaggttctcgataatctgagtagcagcatgtcaagtttgagccctggcggggggttcgtgtcagcaccaacaacaaaggggaacaaaatctcaatccttgcatttgaggttgcaaacacaatagtgaagggcatgagcctcatgcagtctttgtcaaaagaaagcttgaagtatttgaaagacactgtccttctatcagaaggtgtacaacgtttagtttcaagcgacatggatgatctgatgaggatcgctgcagctgacaagaggcaagagctgagagtattttcacgagaagtcataagatttgggaatcgttgcaaagatcctcagtggcacaacctagatcgttatttctccaagctagagtcagaaattacaccccaaccagaattaaaagaaatggcaaaagcagatatgcagcgactgatgacccttgttcgatacactggtgatctctaccatgaattacatgccttggataggtttgagcaagattatcgccgtaaattggaggaagagaaaagatcagttacatttgaaagaggggacactgttcagattatcagacaagaactgaagagccagaggaagcatgtacatagtttgaagaaaaagtctctttggtctaagattcttgacgatgtcatggagaagcttgtagatattgtccacttcttacatgttgagattcaagatacttttgggcattgtgatggcgagtcaaatgaatcccaagagagccgtcaaacgttaggctctgctggcctctctcttcactatgctaatatcatttctcagattgacaacattgtttcccgaagctctgtcccccctcaaagtacaagagatgcactctatcaagctctgcctccaaatgtcaagtcagctcttcgaacaagattgctaacttcctcagaatctgaagaggttccaatcactcaaatcagatgttcaatggagaagacgttgcagtggattgtcccaattgctaatagtacggctagggcacaccatggattcggatgggttggtgagtgggcaaacacggggaacgatctgtcacgaaaacagcctggccagcccgacgtactgaagatcgagaccctctttcacgcagacaaggcgaagacagacgcatgcattctggacctggtggtgtggctgcaccatctcatcagctacagcaggccaaacaagggaggcaggtcaccgagccgatcccccgtccgttccccagcgcagtcgagccacgcggccccacgatcgcctgtctcagccgcagcgtccaggggggctgctggtctcacccgagaagaccgcgagatgctgctggacgtgtacacacggcgacgcaaccccgggaagagcaagagccaggagctgtcgacggcagcacgcggaggtggcaggtctgcgctgagcaggaacgacaggctgagcaagagcagcagcagccactgcccgtcgcgggagcaaggcggcagggtgttccccctgacgccgagcaggtcgcccgccgtgtcgccggttgttcacttcgacatcgaccggatcaaggcgctggacgtggacgcgatggacaaaaccgatgttcagaagcagccgtgagaatgtgagatgttcggacacctactctggtcactgtgagtttttttggttcaacgcagtgaaaataaactgagcatcgtggaggattcagagcaccgtggaagattcagaggttcaggtgttctcgcggcggcgcaggcagctcaaggtggtgtaatgtaagcatggcgatgggattggatgtccgtgtagtggaaggtgtgagtggcctgtcagtgtgaactgtggtggaagaggatggagaggttaggccaagtttaggtatattggaaaccgtgatctcgtgagtgatcgtgttgattagtagtaggagattgtagcatacataacgcctgcagaaattctgcaagcacatacataggcaggttattatcttctttttctttttcactattggccgtcaatctgttgtgtggtcagtttgtgtacatgaaccgtgccaatcgtgcagaattctcgtgtgtagtaaaaaaaaaaaaaaaaaaa

SEQ ID NO: 29408 - DNA, 771 bp, Setaria italica
  Peptide Sequence Number=SeqID_95382
aagaacaattaaacaaactaggacggtacttaataggaatacaaccaataccaagtgattctaagaagttttctgctcggccacctaatcactctggaaagatcaagctccaacttttcccgatagatgagaacattcaaaagatcatgcagcaagaaaaacacaacccttatctggaattgattttggctcctcgaaagaagatatcctcagttgtacagcatctgaacacaaagtggggtaattctcagtgtgcaaaaggcgagctcatgctcttccctaatggtactagagtggatatcatagctagcagtgcaaaatggacgcttaaggattcttgcacagctgctgatgtgcatgttgcagttggcagcccttcaacatttcgcttaaggtatggttggtttgggcccaatctgaagcaacaaagcagtggaccatctttggcatcagtgcagtctgcagacaagactattggtgtcaaggctccggatcttgttttcactgaagagaaacatatgactggtttgagtgaatttcctagtaactttgtgactccatccattgtggataacacaaatgcagtgcaacaggtggataatcaaagcaaagtggcaccactttcatggcttgactccatatccaatataagctttggtgcgctgttatctgaagctacaccttctcaagcagcaagcaattgccttcacaaaataacccaagtattcagatccctgctacatgtgattcatttgacgctgctattgcttc

SEQ ID NO: 29409 - DNA, 796 bp, Setaria italica
  Peptide Sequence Number=SeqID_95383
atcaaaggcattcagttgcataactctcaaaccaaatgctagtcattttaggtttattttataaatgttggttcatgacatggtcctgtaattgttacacaattagcaatcatttatacaaaataaaacacacctatagataatttgttattctacatttttttcctgttggtttttcttatgtttttgcaatgttcaatggtcagtaccatgatgtagtaccatttttgtgctattatatcaccacggatactcacagtaaacaatccatatgaaaaaccaagctatgttccgaattattctcattcactaaacaaagaagcacaacagcgaaactgagctataatggagtagtatactaaccctcaccaaatacacttaattattgtctctacatctctctcatctgaaccacctgggtgttctaattttattacaagatgatatacatccattgtgtgtctgctttagcattttcattgcgtataccaaattctttgttcttttataatgtgtggactgatttttgtttgggtaccattttgatctccttcaggttttgtccatgtatgaaaaaaaggccctgggcttataaaaagaagatgcatatgcatagatgtttctccatttcaataaaatttcttcttgtaaccctgagatccccaaatttgcgcatcatcttgaaacaagttttttcatttcataaatttgagctactaggttttcttatattattcaaataaccttttctacttgcggatattcattgaaatgtttctagctataagctgttacg

SEQ ID NO: 29410 - DNA, 505 bp, Setaria italica
  Peptide Sequence Number=SeqID_95384
catcaacaagatcgtagtgaagatggagaggacaatgacgacaatgaagaagaccctgaagaattgcaggaagtttgtggagtgtgtgagtttctgtactgaatgatttatttgttctatgacagggtccttgaatgttattgatggatgatcatagatggatgaaaagcttcctcgatgatcttgcagataagcaagattgcgtgacaaagcgccaactacagcgacgacacccacttgcttgaatatctgctgaagctgagaataaggatggtttgcccgagtagagacgtaataatccgtgaacttatagccaaagcgcttatcaaacttcttgagtattttccggatgccagttgcattcatatcaagaaacctaaggagcttcacaagatcatatccaacctccctgtaagcctctcgtagctggcaaatctgggatacatcagactgttccataagtgcggcacgctgttctcccaaattctcgatcctgctagcaaga

SEQ ID NO: 29411 - DNA, 248 bp, Setaria italica
  Peptide Sequence Number=SeqID_95385
taggaggcggagccggtcgtccttgcccacgaacaccgccggcagccgctgcagcagggaccggtacgccttggtcggccgcgccacctcgaacgcggaccggaagtccacgtccaccaggacacgctcccgcgcgccgcggtcggacgccgccgggaggagcacgtcgacgtacgcgtgctcgccggcggggtgggagggggacttgtcccagcgggagacgcagacggcggcgtcgtgccccgcgg

SEQ ID NO: 29412 - DNA, 393 bp, Setaria italica
  Peptide Sequence Number=SeqID_95386
agatcaaacctgctctggatcctatgtgaaattctttttccttcgcacttgctttttgtcttttaacaagagatatttcacttcagcgttcactggctggtccatggagaagatccaccacctctgctgcaaacatgctcacatggagatcagaggcgcggcttaatgcaaccacatgggagcaagacgcccccatttacttcctcctgggtcgttgccaccatgaatgttgttcttgctctacggatctcccgcccgtcggtgtccgtccatccacttgatgcttgtttggatgggtcacaaggcaacaagtcctgattcctgaaggacctgacaatggcggtgctgttgggagttcaccggattgataaaattgtattcttccatggatta

SEQ ID NO: 29413 - DNA, 504 bp, Setaria italica
  Peptide Sequence Number=SeqID_95387
atgcttccgcatcatcaactgtgcttcttgcatcaagaaaggatgtgcccacacagtttgggatccctatccctgcagtatgtgaatggttaaaacaacactggaatggtagcttagaagatgttagcaagccaatgatgactcctgcacggttgacaacctctggagaacgaagtgggcgttcttcctttggtcatattcgttatattaagaccacggagcgagagggtggtgatgtcttgtcatcatcacagataccaccaagaccaacatggcagcatggagcctgcagctcagcatctgccaagatttcacatggcgaaaaggactcaactgtctcacattctttccatgggcaacatgagctcatctcaaaaatgtgcaaacctaagaacgagcaagctgcttcacttatggatattagccttcctcctgggcattcaagatctattcgcctaccgcttcccttgaagcaaatgatgcctgatgagaacaaaatgaggc

SEQ ID NO: 29414 - DNA, 939 bp, Setaria italica
  misc_feature (856)..(856): n is a, c, g, or t
  misc_feature (928)..(928): n is a, c, g, or t
  misc_feature (936)..(936): n is a, c, g, or t
  Peptide Sequence Number=SeqID_95388
tctacatgagccttttggaggaaggcaaacatttcttcaatatgatgacatgcagttatggaattttaccgaataaaatgcattatgcttgcatggttgatctattcagtaggagaggcatgcttgagcaagctgaagagttagtgaagtcaatgccatttgaaccagattctgcaatttggacttctctcttgagcagctgtagattgaatggcaatggcaggttggcagaacatgcagcgagtcaactaatctcaatcaaccctaccactaaaatgccatacctgcatctcatcagtgtaaatagatcaactgaaagatggagtgtgatggacaatttgagaagtcaaattggaaatgcagcaacagacaaagaagttggctatagctggatttaacattccatcatgattcactgatgtgtactgtgtaacagcagcatgtcaataaggtaccagaatacaaggctgcctatgggctagggctgccaattattaagcacggcttttaacttctcatggtgcagccacaacccatggatcacttatgcagaaacttgtcaccacgggtcaaaattctagttgtaatgatagaagcaagtgaagccagtatatgcgtctttacaatttgtgatggatttcgcgggatgttgtttaattggactgtctattaagacaggaataaccaatgattttatctactaacaatgaaaattaacccaagaagtttagtattagatgtgacattcgcaataagaagaatgtcaatatgtcattcttgtgcaacttttttatactactacatgtaccagtttcatgttacatgaagcacttacaccaatccatcatgtgcaacngaatgcatatacttctgttttgtttgtgtttatttctttcatttccatttctgttcttgaccgttcctcctntcatttcngta

SEQ ID NO: 29415 - DNA, 342 bp, Setaria italica
  Peptide Sequence Number=SeqID_95389
ctgcttaatttttgaggttcaaagaagtgcaaggtcagaggctaggaaggaggaagctcgtaagcaggaacttgaggtaatgtctttcacttgatgccatttccctgcattgttttagagtttgaactcagagaaatgggatatgttagcagctctgtacctgcctcattcactactcaatcctgtgaggattattttgtcccttcagaacacaggaaaaacgtgagaccctatcgtgtagccagagaaatagaaagtttgatccttcagataaatctttgttaattgtagtatactttcagaaaattcacaattagtgggtattaacaattgtttttgttg

SEQ ID NO: 29416 - DNA, 973 bp, Setaria italica
  misc_feature (921)..(973): n is a, c, g, or t
  Peptide Sequence Number=SeqID_95390
gctgaaactagaaatggagaacgccctgagttggcaaccaaccgatcggatatttcccgtcccgttccgttcgagcgcaagcccaccaggcctggcccagcggaggtcgattcaaccccacacgaatcccccgctcggagtcgcggcggcggcggaggaagagccgtgaataatggcgctgccggtggcgaagctgggcaccctggcgctgcggaccctgtccaagcccatcgccagccgcctcaagaaccaggccgccgtccaccccaaattccgcaacttcatcgtcgccatcgcccagataaaccatcgtatcaccacaaagatacaaaggcgcatttatgggcatgcgacagatgtggagatcaggcctctagatgagcagaaagcagtacaagctgctacggatctcatcggagaagcctttatcttttcggtcgctgttgctgctttaatttttgaggttcaaagaagtgcaaggtcagaggctaggaaggaggaagctcgtaagcaggaaggcaaggaattgaaacaaagggaagatagtctagcaaaggaattggaggatcttaaattgaagctgaatgaaatcgagcggcttgctaaaggacgaggcctaacaggaatcttgaacttgaaaggggtccatggggcagaaggcggcaaggcagcgacacctgcatgatccaactttggttgctaagtggtgcgctgaaacacctggaaattgccgattggtttccctattgtttcttggctgctgtgttggcatggccattatattctttggatcagaatttgcagtggctgatccaacctgaaaataatagtttgtataagttgttgtgcgaactcttgctgtgagcaacctagaaatgacatgaagccgtgaccctcctctcctaaaaaaaaaaaaaaaannnnnnnnnnnnnnnnnnnnnnnnnnnnnnnnnnnnnnnnnnnnnnnnnnnnn

SEQ ID NO: 29417 - DNA, 379 bp, Setaria italica
  Peptide Sequence Number=SeqID_95391
atatgtgccgaaattccaacaatatttctgaaatttcatattttagttaccaaattattttcctcgcccgagcagactcacacatacttattacataaatttctatgggtaggcctcgattattgatcggacacctaaaacaggtatgatcttgtaatcgctaaatccagcttcaaagataatattcttccactcttgctcgtctcgctcggcaccattgacaaacatgatgaagagatcgaacaagacttgcgtctccacatgcttctggtctgacgatgaccctgctccaaccatgatgtccaatattattacctttcctcctctttctttagagggtatagccttcttgcagttctttaaaatcttgacacagtcg

SEQ ID NO: 29418 - DNA, 2141 bp, Setaria italica
  Peptide Sequence Number=SeqID_95392
aaaacccacagctccagcgccgcggcggaaagctccgcccccgaaaccacgagcgaaaccctcctcccccggcggcgatggccggcgtcggcggcagtggtgtaggaggcggcggagacacggagatgggcgggtggacggggctcctccactcctccaccaagctcctcgagcaggccgcgcccaccccgcacttccctccccttcagaggaacctggaccagctcgaggcgctctccaccaagctcaaggccaagaccatccgcgccgaggcgccgtctcagtcgctttccgccaccaggttgctagcgcgcgaggggatcaatgctgagcagctcgccagggatctcaagtcattcgaactcaagacaacctttgaggatgtttttccatctgaagcaacctctgttgaggagtacctgcagcagcttcatgaagtggccatagtttcatccatccaagaagctcaaaaggacaacttttggagttttaacaaacttacaattgaattgcaagttcttgaggatgactggcagaaagagaagagagacttcttgcagagtctaagccggctttctacattacccaaaagaaacactaatatctcaaccagtggattggctcgccctgctttgatgccaccatcaacttcgagtcctcatgcttcatcaggcctgccctctgcaggggtgatgcctatacctaacaagactattattgaaaataaatcttcagtttatgctggggttgtaagggacctcaatgaggctagaggacgcagtctaccttttaatcctgctacggctttcagggctgcttatgagtcattatctgttgatgctgttggcacaaaatcagtgacgatgcagaaaatgtggcatctaattcaggcattagttgggaagggtcgacccatcgaaatgtttcaagaaaaatgtcactagtgataggtgcaagacaccatctcgagtggggtcatgaaaagtacatacttgagacaatcaacagccatccagctcttgctgctcttggtggatctgtcggcaatcttcagaagattcgggcattcatgcgggtacggctgcgggatcaaggtgtgctagatttcgacgcaactgatctacgcagacagcctccagtggatacaacctggcagcagatttatttctgcttgagaaccggatattatgatgaagcaagacaagttgcgcaatcatctcgtgctgcccacaactttgccccactgcttgcagactggatttctactaatggtgccgtatcgcaagatactgctctggcagcttctgaggaatgtgataaaatgctcagaatgggtgatcgaccagggcgtcctggttatgacagaaagaagttgctgctgtatgccataatttgtggttgtcgacggcaaattgacagactgctaaaagatctgccaacgctttttaatactatagaggatttcttgtggtttaagttgtcagctctgcgggaacacaataatgcatcttcttctagtgttttgaatgaaggcttggtgccttatacactggatgatctgcaaagttacttgaacaaatttgagccgtcatattatacaaagagtggaaaagatcccttaatctatccctatgtcctgtttttaagcatccaattactcccagcaattctttatctgtctaaagaaattggagaggatggataccatgttgatgctgtgcatatttcaattgctttagctgatcatggtgttctccctgatggtgttggatcaggccagaagataggtgtcatggatgcttgtgcagaggctgctagcataatacggcagtatggctctatttacttgcgtagtggcaatattgatttagccttggagtattatgcacaagctgctgctgcaatgggtggaggagaggtatcatggattggtcaagggaatgctgatcagcagcgacaacgaagtttgatgttgaagcaactcctgacggagatattactaagggatggtggcatacaacttctgcttggtccaagtggaatgggggaagaaggggaactaaagaagtatatgatggattggagaagcaggcagcaatttttactgaagcagcccatcggtgtcaagaggcagggctcta

SEQ ID NO: 29419 - DNA, 384 bp, Setaria italica
  Peptide Sequence Number=SeqID_95393
tccatgtggaccgaaggtttaataatttagctgctgctgatgtagtggttcatcttgtcgtagtacctgtcccagatcatgagccctccatagttgggcaccttctgtgcgaactgcaggatgccgtagtagaggtccttctggaacaggtacgcgtccttgtccgcctctggcgacgccacgacgccgacgaacacccggctccccgggtacgccgccgcccacttgttccacgaatcgaactggccccactcgcacttcaggtcgccgccgtagagccggacgtggatgcggctgaacagacccgtcgccagcgccgccgtcaggtccgggtccgggtacgcgcaccgcaccgtcgccgtcagcgtcacgccgcggtagccg

SEQ ID NO: 29420 - DNA, 341 bp, Setaria italica
  Peptide Sequence Number=SeqID_95394
agtgttgctcttggcacatctctaattggcatgtatgcaaagtgtggcaacattaagaaagctatatgtatattcaaagaggtcccggagaaaaatgctctcgcttggacagcgatggtacgtggtctggcaaatcatggacatgcagatgaggctatagaacacttccggagaatgatagagcttggactacagccagatgagattacattcattggggttctatctgcatgttgtcatgctggtttggttgaagaaggtcgggaatttttctccctaatggactcaaaatatcacctcaagaggaaaatgaaacattattcatgcatggtagatttgtt

SEQ ID NO: 29421 - DNA, 641 bp, Setaria italica
  Peptide Sequence Number=SeqID_95395
atttacatccccaaaaccaagccgaacacaagctcgagatggtttccatttgtactaacataacaattggtacattttcgctgctacactcaacacatggcgtcaccagcgccaaaaattatgcctaaacactattggtgactgctattgttcctacaaaaatttacctcgttttgaggatttctacaaaatcctgtcaatatggtaacaacaatgccatgcaatggtgaaatactgaaccaaaacgaatcaagatgttagtttctccaacgtttgtaatagcctgacagagttctgcttgtttctgactaagagactgacttcatctagagattcttgcttggcaatatagctcccagctgctttgacgtatgggaattctggcccaaacagatgagcagcacaagctgccttggcagccaggagcttgcaatcacctgtcagggtttctgatgcataggcgttttgactgaaatgatggtgcatccaccatctgcatcgggccttccatgattctcttgtaaatcgctcaaaaaagaatgaagaaaatttactgaaaacgtccaatgcttgatctccttgggtattagtacaagctatgcaatcctcatagtcagcagttttgtcagagaaaagccgaa

SEQ ID NO: 29422 - DNA, 541 bp, Setaria italica
  Peptide Sequence Number=SeqID_95396
tcttccgctctctcgccacgcggcttgcgttgcgtatacaaccgcgagtccgcgacgaggacgaggcgggcgcgcgggcccggcgtcccccagctcggctcgagctgctcgagctcggtggttggtctgctcagggaactagctagcgagaagagaagatggcgggggccccgggcgatagggagctgccggagacgccgacgtgggcggtggccctcgtgtgcgccgtcatcgtgctcctctccgtcgccatggagcacggcctccacaagctcggacactggttccacacgcggcagaagaaggctatgcgggaggcgctcgagaagatcaaagcagagctgatgctgatggggttcatctccctgctcctcgccgtggggcaaacgcccatctccaagatatgcatccctaccaaggcaggcagcgtcatgctaccgtgcaaacccaaggacgacggcgaaagcggcggtgaccgccgccggaggctcctgtggtaccctggagaagaggtcaaccatcgtaggttcttggccggcgc

SEQ ID NO: 29423 - DNA, 381 bp, Setaria italica
  Peptide Sequence Number=SeqID_95397
tttttttttggtataaataattagatcgttatattagagccactttcctaatggaacatatcgtaatcttatgttggtataagtaatgatcctatctttcttttaaaaatagcataataaaactcaaaataattctttgagattttctgccacagataaagcccatcacaaccaccacactacaagcacagagtttcttattcgactcacatgacattacttcatttgtgtatccattttgtcggggaactaagcctcagcttgaggtgggacagcagcagtggagttggcatcagcggtatgcgatctcagttgctgtacaaattcgtcgatgtatctctcatgaagctccttattggctacaatctcttgcgccttgag

SEQ ID NO: 29424 - DNA, 340 bp, Setaria italica
  Peptide Sequence Number=SeqID_95398
gtaaaccacggatcttctggttcctaaagcgctagcatcatactccatccgtttcagcttgggtgagccagccgaggcctcggccagggatggcaagcatggacgtcatccgcgcgccggcggtggcgctgtgcagcggcagaagcgactccacgcagaagctcgactcgacgggcgacctgaggaggcggggaggagcagccaacgcgcgccgaagaggcggacgtgtcgcagccgacgaggtggaggacctcgccggggcagcgcggagaagggaggccgacgagcggagaagcgaccttgcggcggcggcggccatcgtggtggcggagcggagatg

SEQ ID NO: 29425 - DNA, 332 bp, Setaria italica
  Peptide Sequence Number=SeqID_95399
atctctctcttctctctcctcctttgctctccccgtcgctcgcgctgcccaagtcgtcgcccagtcgctgcccagctcagctccgacgcgagcagagccgcgcaacggcgcaagcaagcgcgcgtcctctccaccggacgcgtgacggtttgcttcggacctcttctttagctgcggctgctggtaggcgtttggtccctgcgccgtggctgcgcttccgatctgactggtggctccgggcccgtgcgggagggcgtcgcggcgatgcagaggcaggggcggcacctggagcggtccaactccaagcgggtgctcgaccatggcggcggagg

SEQ ID NO: 29426 - DNA, 568 bp, Setaria italica
  Peptide Sequence Number=SeqID_95400
atttgtgaaccttgacttatcattccacattagcaaaatgcaacactagcctgttgtttgagccagcaggttattaagtaggagtagtttatattagattagaagaggtactcccaagtagtttatactttataataggtgttgacaatgtgtatttcaggttggaaggttgggtggtcaatttgctaaaccaagatcgaacccaactgagactagagatggggtaacgcttcccctctatacctatagaggggatatcatcaatggggacacttttgatgagaaatcacgtgtaccagatcctgaaaggctgattaaggcctacaaccagtcagcaagcacactgaatcttctcagaggatttacccatggagggtttgcagatcttcagagagtcacccagtggaatctcgatttcttgaggcacagcaacacaaggagacaggtatctggagctttctcagagggttcaggatgccgttgggtttatggctgctgctggtctgactactcgacaccccatcatgaccacagctgagttatggacatcccatgagtgccttcactt

SEQ ID NO: 29427 - DNA, 287 bp, Setaria italica
  Peptide Sequence Number=SeqID_95401
tcgatccagccgacgaccgccgcggggaacatgttcgcgttccccgagaacgcgccgacgactcctgggggatccgaggccaacagcgcggggaacatgttcgcgttcttggctgcgccggagcggcccaacactcccacgggccccaccccagggtggggcttcgtgtttgcggcctcgcctgaggggccgctgacgccgacgtccaggggctccagcactagcggcctcaccttcttggcttcgccgaagcagccgttgacgcccacgggccccatcgccggcgg

SEQ ID NO: 29428 - DNA, 536 bp, Setaria italica
  Peptide Sequence Number=SeqID_95402
gactgggatgaatcaggtggacctgatctgagtctatcagagaggtatgcatatgatgcctcccagttaagggctctcaaattaggcttgaacaaaaagaggcctgttctaataatccaagggcctcccggcactggaaagacagtcctgctcactgagctcattgtgcgtgctgtcaagcagggtgagcgtgtacttgtgactgctccaagcaatgcggcagtcgataacatggttgaaagtttgtcaagtactggattgaacattgtacgagttggaaaccctgttcgactatcaccctctgttgcttcgaaatccttgggagagattgtgaatagcagacttcgacaattcaggaaggagcttgagagaaagagaacagacttaaggaaggacctgaggcagtgcatagaagatgattctttagctgccggcattcgccaactgctgaagcaactaggaagggatctggaaaacaaagaaaaggaaacaatcagagaagtgctatctggtgcacagattgtgctatcaactaa

SEQ ID NO: 29429 - DNA, 480 bp, Setaria italica
  Peptide Sequence Number=SeqID_95403
aaatgtgcctccatgggaacaaggattctcttgttaatccaaaaaagatctttgatggcatattcattgactcctcactgactgcttctgataaatcacgaggaataggggcataacctccaaacaggttccagaattcgccagcatcagagtcaccaacaagcttcccatcctctatcgctgcaatttcacatctgccagagtgtcggttttccttcaggtgtttaacaacatccaatgctttaccccttgtctgcacgctggaattacagccacagaaaataaagatctttgatgccgtgtccactataaacacccctttgtgatcgagagaggaccgtgaaaatggcacttctttgacacgagcaacatgctctccttcgcacctaaacattgttgtccggctggatttgtgcccagatcctaccatgtgcggaggggactgggagtgtaccggaataatgcacggtttgaagtatg

SEQ ID NO: 29430 - DNA, 250 bp, Setaria italica
  Peptide Sequence Number=SeqID_95404
ttttttttagcatcttcaaatccggacaaaactatcataacatcaccaccaccaccacatagatggaaaagttatggccacgcgatcgaaaccagcaaagaaacatggcaaaacatcgagtgccattttcaggttacagccagagtaccatcttatgctaacttcaactctacttcaaacaagaactgatcgcaagtttccaaacagacatgtgccaagctccaatgtgtaactgaagagggcttcttaa

SEQ ID NO: 29431 - DNA, 367 bp, Setaria italica
  Peptide Sequence Number=SeqID_95405
cctctcccgtggccaccacccaccagcccaccaggcaccatggcgtccgccgcgcgcgctctgggcgcgctcctccacagggcctcgtctctgtcctcctccgcctccgctctccggagagcctcgctcctccacgggacagggattgaacctattggcaacgctggcctgttccggaggcatgccgcgaggcggaggatttcgacgttccagccgctctgcatggggcgacgctcctgcaagatcgccggaaggaaggtgatgtactgatttgccctttgcatgttcttctgcacaatgttagtagttcagaatttgtgacggctcgctatgcatattttggttggcaagcctctgcctggaataa

SEQ ID NO: 29432 - DNA, 243 bp, Setaria italica
  Peptide Sequence Number=SeqID_95406
agggtaagctgttctcatcataatctgcatgaagatccaacaagggactaatcctttttgcgggtatttccaacctcggtaagctagatccactgaatgaatttgctgctcctgattcgtatggcaatctccctgacgaaacctgcccagatggagccgagccactggtacttgggtcattgacattgtctttatcctcgaaaaccaactgcctcacacgactgtccagctcatctctctggt

SEQ ID NO: 29433 - DNA, 1123 bp, Setaria italica
  Peptide Sequence Number=SeqID_95407
ttttttttttttttaaactaaactaacgaatcaggtagtgtattttattcagttggttcaaaggcacaggcaaacaaaacagctcatccagtcatttgaacacacatcttccagtataataatgtatcctaaattcacgtgttctgattgcaaagagttacaacacttccaactttcaaatatagctgccttttgcgcagcaagccggcaatccatttagacacaatcagacactccacaatcagcacaatgagctctcactgctttccagagggctcgtacccggttggatgtacatattgacaccgacataaaaatgaggtgctgcacacagaacttcttccgatttctgtttgatggacggctctatacatattgtgtcggggaggcattgtcccggcagccggatgtctaccacctggggcgctcaatctacaaggtgcgcccacatttgcagacttctgtagagacacaaacgtcaagaacaaaaactacgcacagcggaaagtggaaggccccctcaaggagtagaattcactgagatttcttgatgaacaggggggctctgtgtctcttggtgagaaggggtcactagcctttgaacagtcttcagagcacttgttaactgtgaaaatgaagggcgcagatttggatctttctgccagcattcgtatatgatccttgctaccagaggatcaacttccttgggaatatcaagccgtctatcctggaagccaactgcccccacgacttgcattggattcatcccactccatggcattctaagtgttgccagttcccacaagatgacaccgaaactgtaaacatcacacttttcatttgattgttcattccgcaaaacctcaggtgccatccactcaggtgttccagcagtggatttggatgacaaaaatgtactgtgcttcaaccgtgaaagtccaaagtcgcaaacctttacattccaattattgtcaaccagcaggtttggggatttcagatctcgatggactattgttggtacactagtgtgcaggcaattcatacctttggccacatcaagggccatcttgatcctccgtttttcatctattaagcaattaggacggtgaaggattctttatta

SEQ ID NO: 29434 - DNA, 1788 bp, Setaria italica
  misc_feature (3)..(3): n is a, c, g, or t
  Peptide Sequence Number=SeqID_95408
aanaacaaataagttaaagaaataacctaaccaagtactaagaattttaccttaagtgtttgttactgtgcaaccgtgaaagtccaaagtcgcaaacctttacattccaattattgtcaaccagcaggtttggggatttcagatctcgatggactattgttggtacactagtgtgcaggcaattcatacctttggccacatcaagggccatcttgatcctccgtttttcatctattaagcaattaggacggtgaaggatcttatacaagcttccccttggaagatattcagatacaattgataagttcggagggcgtgtaacagctcccataaagagaacaatatttggatggcgcagccgacgcataattcgtacttcactcctaaactcatccagagcatcaccatagaaatcttgatccaagaatttttttacagctacttctgttccattccagtcagcacggtagacctctccatacgaacctaagccaatcctttcaccaatcacaagatcttcccaaggaatttcacattcagacacatcatcaaagtcaagcctctgtgacctgacatccatgtttcttgatggcgttgacgtgtccatgaatctgtcaaggggagatttctttggatcagggagtaatttcttatggtcctgctttgaatcaaggttttccatatgttgttttgcttgattctgaactctattcattgggactcttccttctgcaggattatcccatggaagtctttcttgtggtagttgaaccaggccatgttgatcctccagtctagaatttgtagggactttgtccaaaccaccatggagaaccctttcaggaaccttcccagtctcagctgtagatgtaatcttcatggcagaggtaccaatcataatgttgtcataattatgaggctgtgccacatatgatgtatcgttacgcaatccagcattaagattactattccttgtggctggtcgtggcatctgggatgatgatggtgatgcagcattattgccaacatttctacgtgcgaatgaatcctcaacataattgtactgtttgttgttggaaacatcattgtaaggtgaccagttcttcataactaaccgctgctgtggtctaccaccactaggggctacattctctctgcgcttttgtagctcattgttcctattatctggccctttgaatgctactgaagttttcttggactcaatacccccaaaaggattaaggtcagcaaaaaggtttctggactctggattttcctgcaaatctggaagccgatttaaattccgtggatgttccccttgaagtacaactttctcctgggatgatgtaccagcagaagttgatggtccatctgattgctcatgagacaccagcgtccatgaactgtcaaaaacacttccagcaggaacagatgatgtgccactcgaagaggtttgagaagatgctgcgactgctgctgtctcatatccagatttactatctaatatccaatcatcactgctaaacaaaggcagttggccacctttaggttcgggtggcaatgcactaggatccagattagcatcaatggaactcgatggtccagctgtccgattcaggctgagttttctattagaatttaatgaatttcccttccaacttaagatatctgctggaataagagcaccaggagcagccatcagatcaaccaaaactccctttcattatccatcttaattatgtttatagcatcatcatcatcaccaccagtataattgctccctttgac

SEQ ID NO: 29435 - DNA, 268 bp, Setaria italica
  Peptide Sequence Number=SeqID_95409
cgcccatgcagcggttgccgccgtgcgcgcccctctggtacaggtacgcggccaggtagccgaagcagagcgagcccagggggatgttggcgaccaccacgttgtggttgacgccgaagttcttggtgccgaacagctcgttggtcgccgacgcggccaccgaggtgatggcgcccgtgcacgttccgaccacggccgtgctggcgtacagggacatgttcttcgggtgcagaaggaggaagaacgcgccggacatgggcgccatcag

SEQ ID NO: 29436 - DNA, 458 bp, Setaria italica
  misc_feature (381)..(381): n is a, c, g, or t
  Peptide Sequence Number=SeqID_95410
agtggaagagcgcggggtcctcgagcgccggcggcggcggcaccggttccgcgtactgctcgggcctggcgatccgctcggcggtgaggcggacggcgaggcagtggagcggcttggggatggactttgcggcgatgagggaggcgaaggcgcctcgcttcttggcgcgcgcgagcagctcgttctgcgcgaagatggcgtccttgaggcgctggatcttgagctgcgggtcgaatagcggcttggagtcggcgatggcggcgcgcgcggcgcggatcaggtccttggcctggaggtcgagctggcggaggacgaggcgttggcggcggcggcggggtcggagaaggggtccgagacggtggcggcgtcggcggcgagggngagggcgcggagcgtgtggtgaggttgcggtggagcgaggagaggaggcggaggtggcggcgcgcggtcgaggtgga

SEQ ID NO: 29437 - DNA, 254 bp, Setaria italica
  Peptide Sequence Number=SeqID_95411
cttggtggcagcgggcagcggcagcgccacggccactcccaggtcccggatcgatcgccatcgccgatggagccgtcgcggcggctcctgctgtcggactacgacggcgcgatcgagtcgccgatgccgtcgccgccgccctcgtcggcgacgccgttccgccccggggtggccgtcgtcgtgggcatcctcaccagcgtcttctccatcacgttcctcctcctgctctacgccaagcactgcaagcgcagccg

SEQ ID NO: 29438 - DNA, 506 bp, Setaria italica
  Peptide Sequence Number=SeqID_95412
ctccccagttgtctaccatcctcgtttccttcatccttcgtacaaacccagtatggtcaacgtggggaccagcttaaagttttaacaggttggtctttgttccatggcttcctctttacttgtgcatacatcaatccagcatcaaccttctggatctcttccatgagtctagaattcaaccacaaactacgaacccgtctaactgagatccccgaactacgcaaaccaggtacaagacccccctgagcctactccggaccggttttttatccccgctggtgcccacgccggtcggcagtccatccacgtcagcttaggttagataaaaaggaacagcagctcgttttccccgtcacgctgcccctctaaacctagcggctatccttttccgcacctttgcattgcaaacatcctacatttgttgcaaacaatctggcagctatcccttgactgaactatttacattgacaaacacgttttggataacacacactgaacctacctac

SEQ ID NO: 29439 - DNA, 300 bp, Setaria italica
  Peptide Sequence Number=SeqID_95413
tcatgttcgtgctcctcttcgccagcttcgagaccacggcgctggcgctcaccctcggcgtgaagctcctcaccgagaaccccaaggtcgtcgacgcgttgagggaggagcacgacgcgatcgccaggaacaggaaggacccggatgccccggtcacgtgggccgagtacagatcgatgaccttcacgaaccaggtcatcatggagatggtgaggctcgcaaacatcgtgccgggaattttccggaaggccctgcaagacgttgagatcaaaggctatacgattccggcgggatggggta

SEQ ID NO: 29440 - DNA, 121 bp, Setaria italica
  Peptide Sequence Number=SeqID_95414
ttaccggttaagttagaaatacctaggaatagaatttaggctgttactgtttgacaacaggattctggccaagctacaaaacttttgatattaaccttcctgctgagatggtcaaatgtgt

SEQ ID NO: 29441 - DNA, 470 bp, Setaria italica
  Peptide Sequence Number=SeqID_95415
acaatagtaacaaaatacctggcttgattggtggttgttggcaagtcaaaacaagcttccagacttgcgcaataccacggggtggcagctcctgcagtgtcgtggtgcctcaacaacttttgccatcttttcagcaactcttggtgtgggttttgccagcgagcagagctggtggttcgtgagttacaccgatcatttaagagcttttccagttattcagattctgtatttgcaaatgttcaagatgtgcacactgaagagaaaaacaaaaaatatgccatgaagggctttccagtgatttacatgatagactgcacatcaaatgaatgccaccatttactaaaatctgcaggcatggtaatacttatttttaatcatatattcccatctcttgaagtttgctccctcctgtaacagcacaaattctatggatataatcaattaggaactttctattgtttggttgtaca

SEQ ID NO: 29442 - DNA, 391 bp, Setaria italica
  Peptide Sequence Number=SeqID_95416
gaattatagatgttgccgataaatcacggcaatacccatctgacaaagaaatcaggctcgggcaatcattccagaccccagacagcacacgtgatgatcaagccaagtatctgtacacattagggttatctttgtccctctccaagtaatcccttgtgataagatcctcaatccgcttctttattgccttgaagtccggcttgaacatgcgaccaagctgctccacacattccattacaagttgttgatgacccaaaactttccggctcttcataatgcgcactatggatgcatcaattgcatacctgcgatccttgtcaacatcttcaactactttcttcttctcatttactgacaagatgcgaagaataaagatacctcttcctccagt

SEQ ID NO: 29443 - DNA, 645 bp, Setaria italica
  Peptide Sequence Number=SeqID_95417
aaacaaataacaaatagactaaagtttagatgttaacaggttcccaaggaataaatccaggtaagcttcctgtgctttgttccttgggaacctgtaacatcaatgctaagtttgatttgaagcctattgaactcattgttacgacatatcaggctgcattgctactgctattcaatggatctgacaggcttagttattctgagattgtaacacaactaaacctgtcagatgatgatgtagtgcgcttgctccattcgctctcttgtgcgaagtacaagattcttaacaaagaaccagcaaataggtccatcctccccccaacgatgttttcgagttcaattcaaaattcactgacagaatgagaagaattaagattcccctccgcctgttgatgagagaaaaaggttgttgaagatgttgacaaagacaggaggtatgcaattgacgcttcaattgtgcgcattatgaagagccgcaaagttatgggtcatcaacagcttgtcgcggaatgtgttgagcagctcagccgcatgttcaagcctgacttcaaagcgatcaagaagaggattgaggatctcatcacgagggactacttggagcgcgacaaggacaatgccaacaaccaccaatcaagccaggtatttg

SEQ ID NO: 29444 - DNA, 1847 bp, Setaria italica
  Peptide Sequence Number=SeqID_95418
gagaaacatgcacgctgaccaagaggaatcggtatcatcaaacgagcaagatgatgggtcttcagtactgggtaaagaattcagaaaaaatgaagatgccatttatgaagagaacgcattcaatctacatcaaggctcagaagaaagtgatacaagatgtccgcatcatgcaacatgtagatcttcccgcagtcctgtaagagataacacagacattactgagcaggtaactacaggtatatccgaggaccgttttgctggttctttctacttctctgatggtagttacaggctcctgaaaactttaactggtggatcaagaattccatccttggtaattattgatccagttcagcaaaaacattacgtctttcctgaggaaatcaagtatagctatgcgtctttacagaattatcttgacagttttatgaatggaagtcttccttcatattaccatgttacctcatcagctaaaagttcaaaggagcttccaagaccaccttttgttaatcatgatttccatgaggcaaattcgatccctcagttgacaacaaatagtttttgtccgttggtcttcggatccgcagactgcaattcaaaaagtgaattatcattttcaaacactgaaaatctttcattgggttggaacaaggatgtaatggttcttttcagcaactcttggtgtgggttttgccagcgagcagagctggtggttcgtgagttacaccgatcatttaagagcttttccagttattcagattctgtatttgcaaatgttcaagatgtgcacactgaagagaaaaacaaaaaatatgccatgaagggctttccagtgatttacatgatagactgcacatcaaatgaatgccaccatttactaaaatctgcaggcatggaagagctttatcctacactgttgcttttccctgcggaaaacaaaagtgcaatagcatacgaaggggaatgtcagtggctcatttaatcgaatttttggagtctcatgtgagcaattctcaccatctattggattataaaggatttatgtggaagaagagaatggctacaaagcaagatgcaccacaggcaattccatttcacatcagcgataaaggcagcggcgatgttggttctgacttaccaaatcattcaaatgttgttacaggatccatcctcactgccaccgagaagcttgggaccgcagttccatttgataacgctaaagtgctcattgtatcttctgattctcatggaggcttccatggcttgatcatcaacaaacgattaagctggggtgtcttcaagaatctggacagctcgatggattctatcaagcacgccccgcttttctacggcggccctgttgtggtgcagggttatcaccttgttagcttgtcaagagtagcctgggaggggtacatgcaagtcataccaggcgtctattatgggaacataattgccacaagccgggtagtcacacggatcaagtcaggcgagcaatctgttgatgacctgtggttcttcttaggctactcggggtggggatacaaccaactttttgatgaactatccgaaggagcatggcttgtcagcgggaagccgattgagcatttggactggccggagagctgaaaaggttatctgggcgacctctattgttgctccaacaaaaaatttcagtccgtcttgcacatacctccccacactgcaacatagcattgtacttcacctttttggattcagagacatcgcgccctgtgttttcagatcatgttcacactgtactacggtgtcacaaatttgttagacatagtacgtcgaatctttgataatgaaggctgcctgctatt

SEQ ID NO: 29445 - DNA, 2702 bp, Setaria italica
  Peptide Sequence Number=SeqID_95419
accagagagccccaaccccaaaagacgaaccagccaaccccccccccccgccggcggcgctaggctttgcggctccccgcggcggcggcagcggcagcggcgatggcggggcaggagcggaggacgatcgatctggaggagggatgggccttcatgcagaagggcatcaccaagctgaagaacatcctcgagggcaagcccgagccgcagttcagctccgaggactacatgatgctctacacgacgatatacaacatgtgcacgcagaagccgccgcacgactactcgcagcagctctacgacaagtaccgcgagtccttcgaggagtacatcacctccatggtactgccttctctaagggagaagcatgatgagtttatgttgagggagctagtgcagaggtggtcaaaccataaagtcatggttcggtggctctcacgtttctttcattaccttgatcggtacttcatctcaaggaggtcactcaccccacttaaagaagttgggcttacttgcttccgagagttgatttatcaagagattaaaggacaagtaaaagatgcagtgatagctctgatagacaaagagcgtgagggtgaacagattgacagggctttgttgaagaatgttttggacatatttgttgaaattgggttgggtcaaatggattgttacgagaatgactttgaagatttcttgcttaaggatactacggagtactactctgtcaaggctcaaagctggattcttgaggactcctgtccagattatatgatcaaggctgaggagtgtttgaagcgggagaaggagcgagttggtcactatttgcatattagcagtgaacagaaattattggagaaagtgcaaaatgaattgcttgctcaatatgcaactccgctgttggagaaggagcattctggatgttctgctttgcttcgtgatgacaaggttgaggatctttctaggatgtacaggctcttctccaaaatcacccgtggcctggagcctatttctaacatgttcaaaacgcatgttacaaatgagggtacagccttggtcaagcaagcagaagattctgctagtaacaagaagccagagaagaaggatacggttggcatgcaggaacaggtttttgtgtggaaaatcatcgagttgcatgataaatatgtggcttatgtgacggattgtttccagggccatacactcttccataaggcacttaaagaagcctttgaggtcttctgtaacaagggtgtctctggcagttcgagtgctgaattgctggctactttctgcgacaatattctgaagaaaggctgcagtgaaaagctcagtgatgaagccattgaagatgcccttgagaaggtggtgagattgctggcatacattagtgataaagatctttttgccgagttctataggaagaaacttgcaagaagattgcttttcgacaaaagtgctaatgatgaacatgagagaagcatcctgacaaagctcaaacaacagtgtgggggccagtttacttcaaaaatggagggcatggttacggaccttactgtcgctagagatcatcaaactaagtttgaagagtttgtagctggacatccggagttgaatcctggaatagatttggctgttactgttttgacaacaggattctggccaagctacaaaacttttgatattaaccttcctgctgagatggtcaaatgtgtggaggttttcaaggagttctaccaaacaagaacaaagcacaggaagcttacctggatttattccttgggaacctgtaacatcaatgctaagtttgatttgaagcctattgaactcattgttacgacatatcaggctgcattgctactgctattcaatggatctgacaggcttagttattctgagattgtaacacaactaaacctgtcagatgatgatgtagtgcgcttgctccattcgctctcttgtgcgaagtacaagattcttaacaaagaaccagcaaataggtccatctcccccaacgatgttttcgagttcaattcaaaattcactgacagaatgagaagaattaagattcccctcccgcctgttgatgagaagaaaaaggttgttgaagatgttgacaaagacaggaggtatgcaattgacgcttcaattgtgcgcattatgaagagccgcaaagttatgggtcatcaacagcttgtcgcggaatgtgttgagcagctcagccgcatgttcaagcctgacttcaaagcgatcaagaagaggattgaggatctcatcacgagggactacttggagcgcgacaaggacaatgcgaacatgtacaaatacctggcttgattggtggttgttggcaagtcaaaacaagcttccagacttgcgcaataccacggggtggcagctcctgcagtgtcgtggtgcctcaacaacttttgccatgatttgcagcaccttttggacatttccgtgcgtgcagcctatccacccagccacagcacgggctggccgcattttgtacattcgtcgcctaataggataatcgtgttgacatacactagatatatggtgattcgaggacaggataggcactccggtaccgtcaaccgtgccttttatgccatgcttatactacccttcgtcagataactgagatgatgcttgcaagtgttttgctctatgaaatggtggttacttagttcggtctt

SEQ ID NO: 29446 - DNA, 467 bp, Setaria italica
  Peptide Sequence Number=SeqID_95420
cacccgggtcgggaggaactcgtggctggcgaccttccgctggtgccgccacttcgcgccgtccacgttgaagatgccgtcgccgaggaggtcctcggccagttcgtgcagcgcgctccccttgccgtagttggccaagttagtcttgaggatgtactctatgttgccgggctcgacggtgtagatgtagttgctggtcggggtgagcatacggaaggtgcggtgcctccgggcgagctcggtctggtactccaccaagcggccgaagttgaacagctggtggagcacggtgccggccaccggcgggtacttccggttcttgccggcggcgcggcgccggcgcgcgaggtagagcgctaggaggaggacaagggtcagggcgagcagcgcgggttggctcggtggcgagtccatgcccggcggtgagcgctggcgtcccggtgcgaggctgctggaaggtgtcgacg

SEQ ID NO: 29447 - DNA, 424 bp, Setaria italica
  Peptide Sequence Number=SeqID_95421
actgcagcgacgccgcgccgaagaggtcgtcggggagggtgccgccgatgccgttcccgtcgagggagagctcggtgagcgaccggcattgcccgaaccccacgggaacgcaccggagagcctattcatggagagccgcaggacgcgcagcgccggcgactcgccgcacagggcgacagcatcgacggggcccacgaagctgttgcccgacacgtcgtactccgtcaggttagcggcgccggcgagcaccgggtggctgccgttgaacgcgtttcccgagacgttgaacacgcgcaccgccgggagctcgatctccaccccggcggcggcgcccagcccaccggcgagcgcgttggcgctgacgtcgagcacctcgaggctccggagcctgagcaacgccgctgggatcgcgccccggagcgcg

SEQ ID NO: 29448 - DNA, 428 bp, Setaria italica
  Peptide Sequence Number=SeqID_95422
gaagaacacaagttgtcttgtgaactccgtgacaagtgcaaacagcatggcctcattgtttcttggtgcccccagctcgaagtcttagaacataaagccacaggctgctttttcacacactgcggatggaactcaacactggaagcaattgttaatggtgtgccaatggtggcaataccacactgggcagaccagccaaccatatcaaaatacatggagagcgtatggggcttgggcgtccgggtgcgcaaggatgagaaaggcttgctgaggagagacgaggtggaaaggtgcatcaaagaggtcatggatggagataggaaggataagtacaaggcgaatgccactatgtggaagcagaaggccaagaaagctatgcagaaaggagggagctctgacaagaatattgctgaatttgccgacaaagt

SEQ ID NO: 29449 - DNA, 386 bp, Setaria italica
  Peptide Sequence Number=SeqID_95423
tagactgtggctgtaacaaggcccgatcttcaacaggctgcttgctttctagcttcgcttgttttctgatcaaagaataactactctcggtcactggtcaatcatcctctggagctgcagcattgttcctcgccagatgcgccactaaccactacttgacgaagcttactatcacactaccagttaaaggagaacaaatcttcaacgcctacttgttttcacctcctattctgccacgcgggtgcagttgtgactctgacgctcaagaaagcgcacaataccatcatggcggaggctgtggtaggagtgctgatcggcaagctcggtgcggccttggcgaatgaggcagcaacctatggtgcatcccttctgttcaaggaagcttt

SEQ ID NO: 29450 - DNA, 3149 bp, Setaria italica
  Peptide Sequence Number=SeqID_95424
tacaaagttagctctgaaaactgaactgtttgatgaaatttgaggtttggcagccacgcgggtgcagttgtgactctgacgctcaagaaagcgcacaataccatcatggcggaggctgtggtaggagtgctgatcggcaagctcggtgcggccttggcgaatgaggcagcaacctatggtgcatcccttctgttcaaggaagcttcttccctcaagggtctcttcagagagatccgtaaagcggagggggagctggagagcatgaaggcctacctgcgtgagtcagagaagctcagggatgccgatgagaccactggcatcttcgtcaacaagatccgggaactatcttttcggatcgaggatgtcgttgacgagttcatgtacaaacttgaggacaacaagcatggaggatgtgcagccaagacgaagaagaggatcaagcatgtcaaggtttggcgtcgcctagctctccagctccgtgatattaatgtcgagcttgaagatgctgcaaaaaggagggaccgttatgtcatcccgggaatggagagacatgctggaaacagtgaccatcatgctagatccaccaatcaagctttgtgttttgcaagggaagaggatctagtggggattgaaggtaatgcagccaagctcaaggggtggctagtggatgatttggatgaaaggaacaccaaaatcaccacagtttgggggatgggcggaataggtaaaactactttagttgctcatgtctacaagattgtgaaactggattttgacgctgctgcatgggtaactgtgtctaagagttaccaagtttacgacttgctgatgaaaattgctagagagttcggcatcccaattgctagcaatatggaaacgacaagagtagttgacgttatccgtaaccatctcgaaggtaaaaggtacatcttggttcttgatgatgtttgggaacaagatatgtggattaataatatcaggcctgtctttccgactaattgttccggtagatttgttctcacatcaagatcatctgaagttgcatcagtagcaacaagtaactgtgcaattaatctagagcctctaggtgcaaatcactcttggaagttattctgcaacgaagctttttggaacagtgatgacaaaaggtgcccatcagagttacttgatttggctgtaaagttcttgcaaaagtgcgaaggcttgcccattgccattgcatgcataggccgtctactgtcaatcaaaccccactctaaatgggaaactgtttacaaggagttagaatcgcactcaactaataatgcgatcaagagtgtggatacgattttgagagtcagcttggaggatcttccatctgaattgaagaattgcttcttgcattgtgcaatgtttccggaggactatgaaatcaagaggaggaggttaattaggcactggattacttctggattcatcaggaaaaaggggaacgaaacactagaacaagtggcagagggctacttgaatgatcttgtcaaccggagtctgctacaagttgtgtggaagaatgaggttggacgattgaaaagttgccgaatgcttgatgtcatccgccatcttgctattgacaaagcggaggaagaatgctttggtaaagtttacgagggcaatgggacattttcggtacacggaacgcggagactgtcaatacagagtatcaatattgtaccacagaatcaatctgatgcaacacatctccgtgcagtctatgcttttgagagttctattgatgttgatttgttggggactattcttgcatcttcaacattgttgtcaacattggatttgcaaggtactcaaatcaagatgctgcctaatgaggtgttcaacttgttcaatctgcgttttttgggtcttcgaaatactcgaattgagagtctaccagaggctgttggaagattgcaaaacttagaagtattggacacaatgaacacttgtctgctatctttaccaaagaatgtagcaaaactaagcaagcttaggtacttgtatgcatctgtagaaggagctttagaagatttttgtggaactaatatgcctcggggcataaggaatttgacaggactacatgctctgcaaagtgttaaagcaagcaaggagattctacgtgatgttgcagcattgacagaattaagaacatttgcagttaccgatgtgacaagtgagcactccataaacttgtgcagtgctatatcgaatatgtcccatcttgcccatctaactgtttgggcattgaacgaaaatgaagtattaccgatggaagcactccgtttaccagagactctttatagacttgaactgagagggcagctggagaagacacagattcctcagattttctcatcctggtcgaacctgaacaacctcactatattggagctgtggtcttccaaacttaacgaggactccttttctagcctcatgacgttacgcagtttatgcaagcttattctttatcgggcttatgatgggaagatatttcgcttccctgcacaatcatttccttgtctccagacattatacatatttggtgctccgcagctcaaccatatcgaaatagaagatggtgcactgggaatccttgttaagctagcgctttcagactgccgagagttaaagcacctccctcatggtattgaatacattacaacccttgaggaattatatttaggagacactgcagaggagctcatagagaagcttaggcaagaaagagaatcagatgaacacaatgaagagcatatgaagatcaaacacattagaaaggttgttgttatgttaactgagaaaaacatatgggaaaggattcgctgattgaagcatgaattgctgaatgcagctatttgccacggcaaaggattcaagacacaagggctgtgctggagaaccaagctactaggagaagcagcagcgaagtttctttgctgcaggcagcaggtggagtccggtgacaaggagattgtaatcaggacgaattctaaaaaaagtgttcgttggctcctagatatatctacttgtttgatttacgggcagtgcgcacggaaccaggaaactctgtgccatcgtctggctgcagttctttgcccatgtatgttcaggtttctgtt

SEQ ID NO: 29451 - DNA, 1193 bp, Setaria italica
  Peptide Sequence Number=SeqID_95425
ttttttttttttttttttaagcgaacaacctatatcttattccattcttggggagatacaaataaatgttggtacactttgggattccgcacaaaagaatcttagcaaaatttttgtatgtcagtcaaaaatcaggtcgccggtcgcgtagacgttgtagaagatggtggcgctgaagtagagcgcggccgtaagggtgaggaaggcctggaaggaccctagccactgcacgaagtagccggtcccgatggtgctaactatagcggccactgtcccaatgccgttcgtcagcccgtgcaaggatccagcatatttgggagcaatatcctgtatattgcaaaagtatccagcttggctgaaggaactcaagctcagggctattgtcatgagaaccgcagcaactgatggagtttgggcaaatcttaagcatagcaatgacactccgggccccataaaaccaatagactgcataattttccgaactagtcctatagagaaaccagatttgatcaggaaatctgcagaggctcctgcaacgtaaccggacatagccatgactgcccaaggtatggcgctgaaccatgctgcttgttttagatttacatttaacggcgttttgaagtacacaggcatccacgacaataagacaaagtagccccagttgttgaccacattggctatagtgacagccaagaactcaaatttcgagaacaattccctaagggatgggcctttactgcctttgactttagatccgcttcttccatctagaataaattgcagctcagatttgcttatggtacggctgtcaataggatcgctttctacattaaacatccatacagatagccacaagtaaccaagcgatgcgaagaaggcaaatgttccagtaaggcctatgtgtgacatgatgatcggtgttgctaggaagcttatgacgtttccaagatggaatccacccattgaaatgccgacagcggtggcacgctcttgtgttggaaaccactttggtaagaaggtgctcattgtcggaaatgcaacaccttcagctaggccaaagagtgcacgcacagcaagcaacatggtggtggagcgggaggcagcccaaggagtgaggattgtagccaaggaccatagtgcagcagcacctgccatcaccttcttcccgccatattgtctgccaaagctcctcc

SEQ ID NO: 29452 - DNA, 176 bp, Setaria italica
  Peptide Sequence Number=SeqID_95426
aggcctctgaggagcaatatcttaaagacattggagcatgtaccttactggtggagcttgatctaaggaggccttatccctctcgtggaaatgacttgaaaacatgggaggcattggcggcactaccattcctagatagagagctttccccagcattataccgctcgttcttcgta

SEQ ID NO: 29453 - DNA, 415 bp, Setaria italica
  Peptide Sequence Number=SeqID_95427
tccagttacaactacagcagccatttctgcagccggatattgagggattctaccaatccacgtgccctttgcccaatagatgggccagctgcatttgaaccttttggtgttaatctgttctgtcctttgtcattcaaatagcacaaaagtgtccatatcttgtcgaaataactccaccaataatcgcttaacttttctccattgacaaataatgtattactccatggaagacccaaaaaagaaagtgttatatttctcaacacgacttgacactgaataactcctgaatgaagcctgcaactgaatgactactggatctgaagcctgcaactgaataactcccggatctgaagtttgcaattgaattactcccagattcaaatcgtgccactgcagaacttgtctaccttatata

SEQ ID NO: 29454 - DNA, 1106 bp, Setaria italica
  Peptide Sequence Number=SeqID_95428
tccttattgctatttgcttcagtagaatcatctctgccaacgtactagttgcaagcatagactttccatatatcacagtttcaagaatcaagtgcgacacaacctggaaacgtgcaccatcatcaagttccccatactgggatcttacccttagtaaagaccaaattaaaaaatgcagtctgtttttgcactgatcatcttcagagatgagattggggagcaatgatataaattgctgaacacacttggatgcgttttctaagccagctttgcataaatacataatgataaggtggaagacaattcttggaaacctctcccctcttagcatcatagctttgtcagcaattttgttggtctttccacctaatgcactactgatgcctccagttacaactacagcagccatttctgcagccgggatattgagggattctaccaatccacgtgccctttgcccaatagatgggccagctgcatttgaaccttttggtgttaatctgttctgtcctttgtcattcaaatagcacaaaagtgtccatatcttgtcgaaataactccaccaatcatcgcttaacttttctccattgacaaataatgtattactccatggaagacttgtaactaggtcattgttctcaatattcataatttctacaactgccgagttaatgtcatcttccagggaatcattagatgataattgtgcagacatgtcgagcgaaggaaacaagagtttaattccaatttggtcaacaaacagttcatgactaaggttcaaaagatacaagatgttatcacggcatggctgagaattgaaaacattttcttcggaagatgtctcctcctagcaaccactgagatcttcaaaaatgtctcgtagcagacaggaatttggtaactgctcaattttcagtagaaggaaatttgtcgtgtcttccagttgatgccagccacctttaacagagaatatgcaataggagaggaccaacgaatacatgttcctcacaagaatcagctcattagtctccaaaccattatccttggctacagaattcgatttgtagttcctaaatacatcaagcttcgcagatgtctcaagccaa

SEQ ID NO: 29455 - DNA, 171 bp, Setaria italica
  Peptide Sequence Number=SeqID_95429
ccctaccagaattttgttcacattatctgaggcatgttgttcaatgtttctgatccaatttctgatgttattaaaggatgactcgtccgtgacgtcatagacaagtaaaatgcccatcgctccccttccccgtcaccgcgacgcctcggcctcccgctccaccgctcgccc

SEQ ID NO: 29456 - DNA, 1094 bp, Setaria italica
  misc_feature (1)..(60): n is a, c, g, or t
  Peptide Sequence Number=SeqID_95430
nnnnnnnnnnnnnnnnnnnnnnnnnnnnnnnnnnnnnnnnnnnnnnnnnnnnnnnnnnnngcaagggacatcaaaccagccacccagttgtatatatgcgctcatcgttatcaaggccagtttccaccaatatagcaagtaaatgttctgacttaacacccatttgtccaaatcccaacaattgcgatgacttaagaaacgcacatggagagttgcttgcaaagaataaaatgataaaaattacatgcgcagtaacaccaaatcttgctgtgccaactgttcaggagccacagcaagctgatttctgtgcatctgttgtctcagtttccccttcgggcttgatcttgatagttcgatcctcaggcttcgaatcggtctctgagagtctttgtttgatgtcccttgctattgaaaagaaaacctgctcgacattcaggtttgtctttgcactcgtttcaaagaactttatcccatattcatcagcaagagcttgcccctttgaagtgggtacagcccgtttgctttcatccatatcagctttattccctaccagaattttgttcacattatctgaggcatgttgttcaatgtttctgatccaatttctgatgttattaaaggatgactcgtccgtgacgtcatagacaagtaaaatgcccatcgctcccctgtaataggcagttgtaatagtgcggaaacgttcttgccccgcagtatcccagatctgcaacttaatccgtttgccatccaactcgacagtccttatcttgaagtcaataccaatagtagtgatgaagctcgtggtgaaggagccatctgaaaaccgtaaaaggagacaactttttccaacaccgctgtctccgatgagaagcagcttgatgaggtagtcgtagtcggctcgagccctcgccggcggcgctgccatcgcgctctacctcccagcaccaagcggggtggcgacgcgatctctaggcgtggtgtcgccgcacgagaagcggaggcgggcgggcgagcggtggagcgggaggccgaggcgtcgcggtgacggggaaggggagcaccaggtttgcctggacctggctcgctcgatcgga

SEQ ID NO: 29457 - DNA, 645 bp, Setaria italica
  misc_feature (51)..(51): n is a, c, g, or t
  Peptide Sequence Number=SeqID_95431
gcgggttgatgcgctgcggagctggggtgtggccgcagcccgcaggtgganaaaggggtggagcgcggcggcctacggcgaatccgagctggccgcgatgcctgcgccggagaagaagaaaataacgggcaagaagggagatgacggaggatggatggaaactgcgggatctttcaatggtattaaatgtaccgcatcaatttgctggtatatttctaaaactgagatcttgaggtgtcatatatccaagacgtccaagaaaaaaaccacaccgcgtcagtgacgactagcactctagtaagtaagactggaaagaccggatcgaggcaacggccagcgagcagtactaggaggtgcttacggtgaggatctctcgtgcggagacgtctcgcttgacgaggccgcgctcgtatacagagtgagcggtcgtctgcagcgtctgggggtggggaggggacctggagaggcggccggagaagccaagggcggcgacgacgaggaccaggacgacgactggggcgagaagggtgagacggaaacctgacgcggagggtggtgcccttgcatcggagggtggcggcgacgggtcgcggggtctccggcgatctcgcctccgcggcggcatttctccggcggtgggcagtg

SEQ ID NO: 29458 - DNA, 1781 bp, Setaria italica
  Peptide Sequence Number=SeqID_95432
tttttttttacctaaactaatagtaagacatattattttactgcgttaagtgtaaagaatccatatgtacaagagcatacgactgccctgttctcgccttacacatgctagaagctcgcatagagtctatacggtcctaaagaatggggcatcatgctggttaactgcttcctgttttgttcgagaaatacgttatatttttgacgaacagaaatacgttatatttttagttgtgcactgatgttcagctgcgaagaaaagtccatggcccttgtgcagtccctatcctccaaaatccagcaaacatccggaggctcatgtagatcaccaaagctacccaaattccagtaaaaccgctataacttgctagagtgagtatgcaaatgatactgacaataccaacaaggaccattgagtaggcagcatatccaaaatctgacgctccataattgataccatcaaaaacaaaagccaaagcgttgattggttgagtaagacagacaaacggtattcctatgtagatatgatgcagtacaccctgatcacgtgtaaataacccagatcctatacgcaaaccaataccaagaagtatgcttaggagaagtcccaaaaccaatgccagctgtaagacacgcgaagctgtggcagtagcctttggatagtccttacgagcaaatgcacttgcaagtatagcctgaccagcaaaagccaatccatccgcaaggagcgaacaagccaaccaggtctgcaagcagatctggaatgcagccattggagttgaacctagtcgtgcagccattgacgcagatagtgtcacacaacatgttgcggcaataactcgtgcaagcaacagaaaaccatttttaagaaaccgaccaaactgcaggtgtttcaagctgggtggcaacaaatcaatatgtagccttaatctccataagagtatggatgcaataaaatatctgcagaatgttccaccatacatgtgatacaacatgagcaatggccgcacccctgacaccgtattggaacacaaacataaatattgggtccaaaactatattgatagcatctccagccacagttgcatatagaggcgtcttcgtatccttaagtccacggaagactccttgcattgccaaagataaaagaacagcaggagcaccaagagatctgagaatcaagtactgtaatgcgggcttcatcatagcagaatccggtgttacacccatgtagcctaagataggttttgcagagagaacaaacagtagggtttcaagtaggccgagcaccccaccaagtagtagtgctgtagagactgatggaatgtttttcctcttttgctcaatattgacctcgcatgagtcagtttcaaaagatgatttgctggtagtggcactagcctcttcagaagaaatcagttcctccatttcactattagaaacagcgtgttcattttcttgatttattttgtctttgtctctgccattggacatagcatcctcctcagcaacaaatgatgttgtgacactaacaagggggaatattgcaattcttgaaacttgattaaacacagcaattgctacacctacagctccgagttcaaccggacctatgtggccaatgaaggcggtgtcgacgagggaggcgaccgggtcggccatgagcgcgagcgcgccgggcaccgcgatccccatgatctcctgcccgagctcgtcccagctgaacgcgagcctcgcgtcccggaagaacaccctgagcgggtggtggtggtgctcgtaatc

SEQ ID NO: 29459 - DNA, 377 bp, Setaria italica
  Peptide Sequence Number=SeqID_95433
ggttggggtggaaaagaaggtggccttggattaatagcatgttctttgccgattgtatcggatccagtttccactgaagttggctccactctccattttgagttctatcgtggtgctgataaatcagagaaatcccagtctgtagataaggggaacaggttggaagtaattcatttaccgaatgtcaatacctgcaaggagacagaccttgaaatattggacaagttggtcaaggattacagtgtgccgcaagctttaaggttccctcttcttacaagattgagatttgcaagggcatttgacactttgacatgtcgacgccaatatatctgtatccgcctatatgcctttattgttcttgtgcaagcaggccatga

SEQ ID NO: 29460 - DNA, 362 bp, Setaria italica
  Peptide Sequence Number=SeqID_95434
tttgcgaacagctgccaaagatagtcctaaatcttgttaaagtagtaaaatatttgaatccagtagaaacattcatgatatgtatatgtatgtctctaattacaatgaattttacagtcagcagcaattagaaaattcagatgttggtctgaacactgaaaaatgcctgtctcgcacacgcactaatacaacgcacaaaggcttctccaaactcatcttgtggttactccctccaataagtgagcaaactgagatcactgatatctcatgacttgctggagtggtgttttcaaacagtactagtaaacaactaaacatcaacagacaaaccatcatgtcaaccaggtcatcgtgccaattgg

SEQ ID NO: 29461 - DNA, 299 bp, Setaria italica
  Peptide Sequence Number=SeqID_95435
ggggaagacggtggtgctgtacccgggcctcggcgtcggccacctctcgccgatgctcgagctgtccaagggtctcctccgccacggcggcggcgctgtcgacgtcgccgtcgtgctcgttgagtcgccgttcaaggaccccagcttcgccgacacggtcgcgcgcgccagggcctcccacacgtccgtcgccttccacgtcctcccctcgcccccgccggcctccggtcccagctccggcgacgccgagcaccccgtggtcgggttgatccggttcctccgcgccacgaacgcgccgc

SEQ ID NO: 29462 - DNA, 145 bp, Setaria italica
  Peptide Sequence Number=SeqID_95436
ggccttcaagcaacacctttttacaattttggaagattatgtgttatgaaagccctctgcacgtgctgattgttaagaaagatcagcagccgacggtagacaacgtctccagtgtcccctcccacagtgtatgaatcatgttggt

SEQ ID NO: 29463 - DNA, 759 bp, Setaria italica
  misc_feature (596)..(596): n is a, c, g, or t
  Peptide Sequence Number=SeqID_95437
taagcttaaattgaaacactttgtgaggacaagaagttcatagatgcagcagagtttactttgtttagcttgcagaagcaccatgaactgggtgtggcagttcacagtttggttctggatggcctttccatggacggtaaagcttcagaggcattccggcttttctatgagctaattgagaatggaagcacttctgctgttgctgcacctcgcagcgtaatcttgcttcatcatgcactcgaggaagctggaaagatgaaagaagctgattttgtggtaaacagatgagtcgtgccactgccagaattaggcaaaggagctaaggatttactcaatgttgttccaagaaaccttgcaaactctttgcagcttcagtgcagtgtggtctggaagagagagaatgctgaaactcaatatcaagttggttacctgatcagctgactggcaaggaacggatggtcattcatcaagggttgtcagatgatgctacactttattaaaggatccacaaaatgatttgattttcctgaaatcgcccatagcatcagataattcagattacacgagcccatctgatggtcactcctaaagagacnctaaacccctgtatttcctgacaccgtattcctggttaaaggaagtgcaggtgagacaaatagggctgctgatgcttctccaagtacaaaaagaagaggatgtgtgaacaatactctgtcatgatatttactgagcagtgatccagcatctcccagtgtgtta

SEQ ID NO: 29464 - DNA, 669 bp, Setaria italica
  Peptide Sequence Number=SeqID_95438
tttttttttttttttgtttcccaaaaaagtgcgtttactcactataatttttttacttctgatgcctctcacccaatcaattttactcaggaagctttatcagggtacaacacattagaaacgttacctttttatattgaacacacttaaataacaatctaacacaaaacaaaaatcagcaagccgacagtgtggtccacagtgcatcacttgccgggcggctaatgaaaccctggtcagccatcaattcaacaagctcttcatgcttcttgagctgtccagccttcctcaaaagggtcaataccgtatcacgcaccttctttgagggtttaaaggacttctcctcgatcatttcctttagtgttgcgtgtgcacgtttccagttccctctcccacaaaatgcctcaatcagaattgcatatgtgtgcatgtttggctcgattccttccacatccatgttctttttcatccttagaaccatatccattgacttctcctgattgaacaatcttagaaggcaattatatgtcacgacatttggcttgcattgtaggtccctcatcttttcatacaacttccgcgcagcatcaatgttaccgagcacaagcaccagcttaaagtagggatcgacgtgtggcagtcaggaacacctacccttttgctgtctta

SEQ ID NO: 29465 - DNA, 458 bp, Setaria italica
  Peptide Sequence Number=SeqID_95439
cggcctccgcggtgtccatgagctccgcaatggcgtcgaggcctctgtccttgagctgggctctgacggcgcgcagcagaattccggcggcgtgtgcgacagagagcagtcgatgtacgtcatgacgtcgcccacagagagagcggcgaaggcggccgatacggactcgacgtcacacgacgcgagcacgctggggcagatctcgccgacgagcgcgttgtcgtcggcaacgacggccacggccgtgccgtccgagacggctctacgtaggagcgggatcgcgtcgagcccgtcgtcggcgacgtggacagcgtgcacgtcgcggcggacgaggccgagggaggcgactgtgagcacggcgaccggggagaagtgggagatggagccgaagaggtggcggacgatgtcctctcgcgtcagcacgcagcagtcggctgtcgccacggcatcggagggga

SEQ ID NO: 29466 - DNA, 380 bp, Setaria italica
  Peptide Sequence Number=SeqID_95440
agtcggtcagaaagaaaaaggagcaagcttttagcggaggagatcatgcaactcaacaaaaagggaattgtccttcaaaggagaatgttgaacttaaaaaggaggttagcattgctcatcagcacaaaatagagttacagaagctctctggggaaagcacatcatcaggtgatggtgaccaagaaagtggaagctctgataaagttcctagtagatcaactggacatgatgcatccgaacatattaaccttgctttaagcatagaaggacatccagatgaatgacacctgtgcacgaaatctacaaatacaaaatgtcataatttaataataaggagccattccaaaggacaaagcttggcccttcatcgatgctgtttg

SEQ ID NO: 29467 - DNA, 352 bp, Setaria italica
  Peptide Sequence Number=SeqID_95441
ttccagttcctttctgtagccttagctttagcctcccagaccttagcctctctgctagtgaagtccgtaggaacagcattaggatctggggcctcctcttcgtcatctgacttatcacgagacaggggcctcttctcatcatttactttaggcatcacactatttgtagctggtgcaactggaccattatatgctttcccataaacttcattgaaaagttcatcatctatttcaggactaggttcccttgccattggcaaaaatatatgcttgacctgccgccctgtcggatgctcgtcgccggcgaagcgcccgacgaagacctgccaagggcggccgccgcttcgccctg

SEQ ID NO: 29468 - DNA, 249 bp, Setaria italica
  Peptide Sequence Number=SeqID_95442
gctagcagggcgtacgtccattgatagcagttgtccatacgtggaggtggaggtctcacctcacctgtgtagagctagctagccacagccaccaagttaagaggcgagaggttggcgtataagcgggactgcagcaggaggaggatacctcatccaggtcgtttcaaggacaagctaggagagaagagagagttattgaagatgcaagactgggcgccggtgttcatctcgctggtgctcttcatcctg

SEQ ID NO: 29469 - DNA, 290 bp, Setaria italica
  Peptide Sequence Number=SeqID_95443
cccgttgagtactagttagcccctcgaggaggctactagtactcaacgggcacaagctaggagagaagagagagttattgaagatgcaagactgggcgccggtgttcatctcgctggtgctcttcatcctgctgtcgccggggctgctgttccagatccccggcaagtgccggatcatcgagttcggcaacttccacaccagcgcgctctccatcctcgtccacgcaatcctctacttcgccctcatcgccatcttcctcatcgccatcggcgtgcgcatgtacctgttg

SEQ ID NO: 29470 - DNA, 837 bp, Setaria italica
  Peptide Sequence Number=SeqID_95444
gtcctacgccataccatcccaaaccaaacagaaggagcaggagctagctgagagcacacacagtggaggctggggtagcctgtagccgtgaggaggtcatcgtcgtcgccgtcgccgcagctgctctgagatcatggcggactgggcgccggtgttcatcggactggtgctgttcatcctcctctcgccggggctgctgttccagatcccgggcaagggccggatcatcgagttcggcaacttccagaccagcggcctctccattctcatccacgccatcatctacttcaccctcatcgccatcctgctcctcgccgtcggcgtgcacgtgtacctcggctagtcttcagtcgaccgcagcggcggcggcctcctctctgaccggccagattattcattaggtacagtggtagaggcatgttcatctccgttgttggctagcatggtatactagtatgggggggttcaatgttctttgggcatttgtcaggttaagccgtcaaaggcttactactgttctgtcaaatgtatctcttctgtgaagtactgcatgttgatcatgatcttccatgtctcttgttagcatgagttgtgttagcagtgcctaactgagcttcgatttgcttgagatgctaactgaggatcgatttgccacctttttgtaatcagaacttcaatctttctgctctttctgttctcgtctgaaaattgtttcggtacctgttcctggccagctacttggtggccagtagttcagcaacgttttcattggtctgaatctataagatcagcccggagtatttaatttgagcccctttttgtggttgagtgagaaaa

SEQ ID NO: 29471 - DNA, 543 bp, Setaria italica
  misc_feature (528)..(543): n is a, c, g, or t
  Peptide Sequence Number=SeqID_95445
cccgttgagtactagtagcctcctcgagcaggaggaggatacctcatccaggtcgtttcaaggacaagctaggagagaagagagagttattgaagatgcaagactgggcgccggtgttcatctcgctggtgctcttcatcctgctgtcgccggggctgctgttccagatccccggcaagtgccggatcatcgagttcggcaacttccacaccagcgcgctctccatcctcgtccacgcaatcctctacttcgccctcatcgccatcttcctcatcgccatcggcgtgcgcatgtacctgggctcctagatttagctagccgcctgttgttcatagatcatccgatggctgcctgccgatgtctgtccatcagctagcagctcgttcgcattctctatcactagcccatctctaatcaagggttctttttcctatatacatgtattaaataacaatgtatgtagcatccgtgtttatttatttcttcttctaataatacacgagctcagctcttcgatacaaaaaaaannnnnnnnnnnnnnnn

SEQ ID NO: 29472 - DNA, 243 bp, Setaria italica
  Peptide Sequence Number=SeqID_95446
attgcactgttggctcttggctccaatgctgttcataagttgtggaaatggcaaaggagcgacagaaatcctaatggcaaggttcgatcagagaatttcactttcttcaatttaaatgcagtcttgtttgcttgttttctgaatttgttgttgtgtcctgtagtctactgcatctgttgcgcctcaaatgtggcaaccagcaaatgggattccgatgacaaacgacactaatgatggcaaccc

SEQ ID NO: 29473 - DNA, 288 bp, Setaria italica
  Peptide Sequence Number=SeqID_95447
gttttggcttttctagatacattgcttttgctacgcacctagaatatattatgtctagatacgtagcaaaagctatatactagaaaagccaaaacgaatagtaatttgggacggagggagtatatttttatcaagggatggtttaagtatttttatcgttccatgaattggaacattgtgccttgtcatacttccattgactttctattggtacttgaatatatgcagtggtccccaagagatgcgctcccagctccaatctcgagtgcaatatactcatgcgatggt

SEQ ID NO: 29474 - DNA, 4370 bp, Setaria italica
  Peptide Sequence Number=SeqID_95448
gagtgagagaagttttcggagagagaaagcaagagagagagggacagagagagataagaagggaaacgcggcggctggagctgaggtttggagacggaggcggcggcggcggcgcggccaaaccctagccggcggctgcgcggtcgaggcgggagctcctggaggctccgcctggcggccggattcgtgccgccggcgtcggcagctgcagatcggccgtcgcgccgacggaatcggcccgggatcccggcgggatgggcacggcgaggcccgtgcttcggttgtgagcttgcttggtccgtgggttctggctctgatctcgggagctaggctttgagctcgctgctggtgtttgctgtggttttgggggccgtttggactttggagcgggttttgtgggggatttgggaggggatctgccgactgccgggaaggccggaggtttaggcgggtttttgagagctggaggctccgggtgggatcgggggagccatgtcgtctctgagcagggagctggtgttcctcatcctgcagttcctcgatgaggagaagttcaaggagacggtgcacaagttggagcaggagtcgggcttctacttcaacatgaagcacttcgaggaccttgtgcagggcggcgagtgggacgaggtggagaagtacctcagcggcttcaccaaggtggaggacaaccgctactccatgaagatcttctttgagatccgcaagcagaagtacctcgaggcccttgataggcatgatagggccaaggccgtggagattctcgtgaaggatctcaaggtgttcgcctccttcaatgaggagctgttcaaggagataacacagctgctgaccttggagaattttaggcaaaatgagcaactatccaagtacggggacacaaagtcagctcggaatatcatgctcttggagctcaagaagctcatcgaggcgaacccactgttccgggacaagctgaatttcccaccatttaaagcttcgagacttcgcacattgataaatcaaagtctgaactggcaacaccagctctgcaagaaccccagaccaaaccctgacattaagaccctctttactgatcactcttgtgctgctcctaccaacggagcaagagctcctccgcctgccaatggaccccttgttggatccatccctaagtcagctggatttccaccaatgggtgctcatgctccattccaacctgtagtgtcgccatctccgaatgcaattgcaggttggatgacaaatgccaatccctctttgcctcatgctgctgttgcacaaggaccgcctggtcttgttcaggctccaaacacagcggcatttctaaagcatccaagaacccctacaagtgcacctggtattgattaccagtctgcagattcagaacatctcatgaaaagaatgcgtgtagggcaaccagatgaggtatctttctctggtgcaagtcatcctgccaatatgtacacacaagaagaccttcccaaacaagtggttcgtacccttaatcagggttctaatgttatgagcctggatttccatcctgttcaacaaaccattcttttagttggaacaaatgttggtgacattgcggtatgggaggttggttcacgcgaaaggatagctcacaagactttcaaagtttgggatattggttcctgcacattgcctttgcaggctgcactgatgaaagatgctgcaatatctgtcaatagatgtctgtggagccctgatggaactattctaggtgttgctttctcgaagcatattgttcagacatacacattcgtacctaatggagacttacggcagcaagcagagattgatgcacacattggtggggttaatgacatagccttctctcaccccaacaagaccctatctatcattacgtgtggtgatgacaaactcattaaggtgtgggatgctcaaacaggacaaaagcaatacacgtttgaaggccatgaagctccagtgtattctgtatgcccgcactacaaggagtccattcagtttatcttctccaccgccattgatggaaaaatcaaggcatggttatatgattgcttgggctcaagagttgactatgatgcccctggacattggtgtactactatggcttacagtgctgatgggacaaggctcttctcttgcggtaccagtaaagaaggtgattcccacttggttgagtggaatgaaactgaaggggctattaagaggacatacaatggcttcaggaaacgttcgctcggtgttgttcagtttgacacaaccaggaaccgcttcttggctgctggagatgaatttcttgttaaattctgggatatggataacactaacatactaacaacaacagattgtgatggtggactgcctgcaagccctcgtttgagattcaatagagaaggctcgttactcgctgttacaactagtgacaacgggattaaaatacttgccaacactgatgggcagaggttgcttaggatgctggaaagtagagcatttgagggttctagaggacctcctcaacaaataaatgccaagcctccaattgttgcccttggtcctgtttcaaatgtctccagtcctatagcagtgaatgccgagcggcctgatcggatcttgcctgcagtgtcaacaagtggcttggcacctatggatgcaagcagaactccagatgttaaaccaagaataacagatgaatctgagaagatgaaaacctggaagttggctgacattgttgataatgggcatcttcgagccctgcatttgtcagacacagacacgaacccaagcaaggttgtccgtttgttatatacaaataatgggattgcactgttggctcttggctccaatgctgttcataagttgtggaaatggcaaaggagcgacagaaatcctaatggcaagtctactgcatctgttgcgcctcaaatgtggcaaccagcaaatgggattccgatgacaaacgacactaatgatggcaacccagaagaagcaactgcctgcattgcattgtcgaaaaatgactcctatgttatgtctgcgtctggtggcaaggtgtccttgttcaacatgatgacattcaaggtcatgactactttcatggcgcctccacctgctgcaactttcctcgcattccacccacaagataataatatcatcgctattggaatggaggactctaccattcaaatctataacgtccgcattgatgatgtcaaaagtaagctcaagggtcatcagaaaaagattactgggctagccttttctcaatctatgaatgtgctagtatcatcaggtgctgatgctcagctatgtgtatggagcattgatggttgggagaaaaagaaatcaagatatatccaacccccagcgaaccggtctggtactttagttggtgatacaagggtgcagttccacaatgaccagacacatcttttggtagttcatgagagccaattggcaatctatgatggaaatcttgaatgtttgcgctcgtggtccccaagagatgcgctcccagctccaatctcgagtgcaatatactcatgcgatggtctcttggtctacgctacattctgcgatggtgctattggagtctttgaagcggactcccttagattacgttgcaggattggaccttctgcatacattccaccttcaatgttacctacttctggacgtgtttaccccttggtggttgctgctcatcccgtggagcctaaccagattgcactcggcatgagcgacggtaaagtccacgtggttgagccattagacgcggacccaaagtgggggacgggcaccgcctcaggacaacggagcgcacccagcaataacagccgcaccatcagctgctagcaaccaggcatctgatcagccgacaaggtgactcacccgcagcattgagattccttagcgcaaagaattgtaggacctgtaggagatagggagaacagacaaacagttagattatcagaggaggtcatatttatcaagtccacagcgtctccttgctcgtggcggcagcgcccaggtagtgattgatgatgacattgctaagttaggtctttttggttcttttccgcccctgaaaatcctgaccgcaacctggtgctgccgtcgcatccgcggagatggtctgttggcatcatcttcctcttttgtaaagcttttcctgctctgagccttagtggtgccttagattgttcattttctgccctgttgttgggggcaactatttgtagtgtacaaatatggtggtatgttggatggtgatattttgcgtggcctgtgatgacggattccaccaagttagagggtctatttgatttaagaaaaaaaaaaaaaaa

SEQ ID NO: 29475 - DNA, 1739 bp, Setaria italica
  Peptide Sequence Number=SeqID_95449
cctccagaaggctctgatgaaatggatgatggtaatagtgatgaatgttatctttgtggcatggatggtaatttgttatgctgtgatggctgtccagctgcctttcattcaaaatgtgtgggggtggtggaggatctattgcctgaaggtgattggtattgtcctgaatgtttaatacagaagaatgatggatctagaaatatggcaagtcctatgagaggagcagaggttctgggaattgatccacatggccgactatacttcggcacttgcggctatcttttggtgattgactcatatgaggggagccctccatgtcattactatggccaggtcgatcttcattcccttgttacagtgttgaacacatgtcatccgtcgtacggatcaattgttaatacaatatcttcgttttacggactgcaatcgagtcacccaatcttaacggtcggtatcagagtagcagggaatgtagtacatctgatgctgagacaaactgcagactttcatcacgactgaagcaacgtagtgaacatgaccagtttaaggtagaacaggacaactcctttgaacaattggaaatgtgatgctccggagtgacaaatcttgatcaattggatcaagatttgtcactccggagcatcacatttagatctgcacttatgtctcgaagtgaaaatgctgctgaaggtgattcaaatcaaatacctcaaaatggatcctctagtgctaagaatgatcactgcaattcccaggaagacgttcattcacatggtaatggtttatctgcagagaatcagaaagattcaccacctaagaaaaagcaaagttattggcatctccattcagatcttgctaggtacataaactattacagctttggtcaaatagcagcttcagctgctgaagagctaaaacacaagctgtctgaaaacaaggaagggaagaaacctgttcaggatgcactctctttccatctgagaacaatatgtaaaaaatatgctaacatttttgcactaactgatcaaaagctttctgtcgagctgcttaaagaaaagtgtggatggtgcaactcctgtcaaatcagtggtggcgttgactgcattttcagagtaactgatgttaaatgcatggaaggcaccaagccacatgctttgggtgtcgaagcagaaaaaaatatggaaagtcatatcatccttgctatgcataacattttgtcaattgaagaaaggttgaatggtctgctgactggtccttggcaaaatccacaatatcgcatatattggcgtaaggaggttctcaaggctgcagatgtatcatcacttaagcagcctcttctaatgttagagtccagtctgcgacgtgttgccatttctatggaatggcagaaaccggcagactctgttgaagtggttggttctgcagctcacatattggtccgttcatctaataaatctctaagtcatggaactgctagaaagccagggaggaaaccatcttctaatggtgaacttaaagttgactctcgtaatgttggtgtttattggtggaggggcggaaaattatctcgtcaagtgtttcattggaagaggttgcctcagtcactggtctacaaagctgctcggcaagcgggacgtaggaaaattccaacgatttgtacaccgatggttcacaatttgctcggaggttcaaatacattgcttggcgagctgctgtggaaatggcagaaaatgtggccc

SEQ ID NO: 29476 - DNA, 287 bp, Setaria italica
  Peptide Sequence Number=SeqID_95450
accatctcccttcgtctgttcttctgctatctcttgcaacaattcctgtaacactttccattttggtgcctcctccaaaacctcatccaatacgatgcccgcatcagcattaaccttctgagtgttgtgcttatctgcagtggagtcctcgttttcttgaagtagacgggatctctcagcaccttcaccgttacattgctccacacgtccgtgctcgacggcagcagtgccatctcctcagcgatccccatgtcctccggcagtctacgttgaacgtaaggtcctaa

SEQ ID NO: 29477 - DNA, 1899 bp, Setaria italica
  Peptide Sequence Number=SeqID_95451
gaatgctagattcaaattttgcacctcggtagaatcttacaataaaaaagaaaagtaaacttttaacttccttgatgggtttctgccttgtatacttcaatttctctaacaaaggttatatctggatggtaaacaatgataatagatggcttccatacatcaagtatgtgctggtcaccgtctagggcatgaaattgcacaggaggtagtggattgccatttgtcaagcctctgaaatcagatgaataattacaggcatcgccagcagtagaggatgacacggaagcatctgtggacaccttggaagcatcgatatcggcatgttcatcggttttgcctgattgaccttccacctccagagcagtaccttggtcattgtcatttccccccttacttttattttttctattgctggcttgtctcttttcagtggttttctttgattttccctttgctttttcctttaccaacctccttttactgcagctgacatttgaaccatccttgacatcagcttccttagttacatttcttaattcagaagcagctgcaagtaaggcattagtttcaagcttgctaatgctaacggggcctgcactctcactaggccccatttgaacttccccatcgaggacaccaaaccctttcggttgctcagtattttttcttgttctttttctgtaatccatgcagctcagctttcccaagcaaatacttctcccactcttctcgcataaccttatgggggccttttgatatgcattcttgcagctgaaagcatgtgcgctcatctttacatgttaccaaaactatgccactttcatcttcagcttgtgcattctcaccatctcccttcgtctgttcttctgctatctcttgcaacaattcctgtaacactttccattttggtgcctcctccaaaacctcatccaatacgatgcccgcatcagcattaaccttctgagtgttgtgcttatctgcagtggagtcctcgttttcatattcttttcccttatcggtactattgtgtgccactttcctcttctttgttggtgtgccctttttattctgtgctaacttttataccgtctgctctcacaacctggtaaacacgcctttttgcaagctcaaatatcttgtggcttgagtcagcaagtatccaaactgatcgaacaccttctgatactctcagcgtgtcaaggtacttcaagtatgtaactgcatcatacctgacgaggtaatcgagcagcttgcgtagcgtcctgaggtcagccacaagctgctttgtcttcttgccgagagtgtgccagatggggtcgagctgcctcctgacgatctcgtcgaatgacttgaaaaggcccttgtcaacggtgaggtcctcgacatccaccttgttggtgcgcctgagctccttgaggcaggcgtccatggcagcaaggacggcggcctggatgcccctcatggcaggggtcatggggacgcggacgtcgaccacgtcgggcggagcgcgctccaggtctgcggcggcgaggacgtggaagcggggccagaggtggagacgccggacgtagaggctcttcatggcacgctcggccttggagaagccggctaccatggcgtgggggcggtcagagaaggcgtagacggggagaagatggcgttggcggaggaggcgggcgatgaaggagtcggaggaggtatcggaggagcggtgggcggagaggaggaggagggcccggacgtgggaggggtggaggcgggaggtgaggaggtcggcggcgagagcgcgcggggagaggaagaggggcggcgccagaagcataaagggaggcgcgctgctgggcggggaggtcgggggcacgtcgaggacctgaagcctgtcttggaggcggcggagga

SEQ ID NO: 29478 - DNA, 823 bp, Setaria italica
  Peptide Sequence Number=SeqID_95452
attaaattcttgttctttttaagcttttggctacacaataataataatgtgatcatctgctttagattttggctacacaataataataatgtgatcatctgctttagcttttggatacacaatctatctgccccctgacctgatggaagaaatatgcctctcacctagacagaagaactagcatggctactcctcttcaccttgaagtagacgggatctctcagcaccttcaccgttacattgctccacacgtccgtgctcgacggcagcagtgccatctcctcagcgatccccatgtcctccggcagcacgtggccaaacacggtataggcgtccttccactcctcatggtttgccaagctgatcaggaactccggccctggcccaacccaggcaatggaccctcttttcacggctgggcatgcttctcttgctatgcccttgaagggcacaccatcaacttccagggtcccttgaagcaacgcatactgcgaaccaaatgcagcatttctttcatgattgccttttgcatcccagacattcccgcgtccttctgcgcgataaaatctgcacccagcacagttgcgcaagcccaagagctcgatgaagtagtccacggaacggggtgcgcaaccaggaagcaattgaatatgaagtgttccaatatttgtttcaagctccacaattccctctccttttccaaagactagaccagaagtccacatgacgtcctctccccttgcaacaacagcaggagccatcacgtccttttgtttcttcagccagcactccccaactgtccttgcatctgcgctcgtccccg

SEQ ID NO: 29479 - DNA, 1454 bp, Setaria italica
  Peptide Sequence Number=SeqID_95453
tttttgatcgcccgtccgtccttcaccatcaatataaaaaggagcatgtacatacagcttatggatttgtagtgttcaataactgatctaaaacacaatacacacagcatcggcagcaagataactaaaatcatcgaagaattgtccatcacaagctgcgtcttacagggaaatatgctacagcatagttgggcacttggcatcgagaaactccttgagcgtccttgctcctttctgactgcccattagccccgtcagctcttctactggaagcagggcaagctcggccaagctattgcatccatccatgattgctctatagttcgaatccgtcaccccaggaagccttcttaggaactcgatggctgacgtgttgtaattttcagccctcacatcgtcctccacaatcccatcctcagatggcacgccaactctaatggcctttttctcatcaggttcatcctggtttgttttaagtgatacaaatatttccacggtagcatgcaagctgcgtgaccagactatccgaagccgaggaaaatgcagcactagcaatgaaagcttcgatattatgtttgtcggagagacatcatccccaatctcacttgcagactgaaaggaaaaactcttatcttgcgaaaactctataagaagaactgggatcttgtagtaacgtgccatggtatcaacctgattgtacagacgaccagaagcaaagctttggaacaagtccgcgatactttttcgttcaacacagatcagaggagaaagaacatagtcaccaacttcaagggtaaccggcactatacgaatacctttctggtgtagtacattgggaagactgctcatgaactctctcatgtctacaataacctgcatctccttctctggtgtctttttaccacctgcctttcttgtaattgaattctggctcaaaagaggatctggctcatttgcaagagttggtccaatacaacggccatcctgatcaacaggtatcatcattagggacttctgtcttatcaaagattcaaatgcttcattttcccggcgaatgctagattcaaatttttgcacctcggtagaatcttcataaaaaagaaagtaaacttttaacttccttgatgggttttctgccttgtatacttcaatttctctaacaaaggttatatctggatggtaaacaatgataatagatggcttccatacatcaagtatgtgctggtcaccgtctagggcatgaaattgcacaggaggtagtggattgccatttgtcaagcctctgaaatcagatgaataattacaggcatcgccagcagtagaggatgacacggaagcatctgtggacaccttggaagcatcgatatcggcatgttcatcggttttgccacggttttagacctagaattagaaccttaccaacctaccaagaagacaagtaaccttaggtacaa

SEQ ID NO: 29480 - DNA, 580 bp, Setaria italica
  misc_feature (16)..(16): n is a, c, g, or t
  Peptide Sequence Number=SeqID_95454
tccggcttctcactcnggttgcacagctcccgcttgaggagcacggccaggggcacgccggacccgtctacgtcggcgtgcacctccatcgcaagccgcgccgccgaaatccctctccccccgatcctccaattcccccaaaggatcgggcggggagacggatctggggcgaggcaagaaaacgcgtggagaaaaggctcctagagcatacggcggggcctttgtaacggatcaaccaagagcttcggccaatccgacgaaagaattcctttttctttttgccccccgccgcaaccgaattccccgcccgagaaatcccccggacaaggacggcgaatctcgatgcccctactgccgctcgcctaacgcggcatggatcccaatctcagcggcgtccccaagaaaccgcaggagcattggccaaaccggaccgaatggattctgctctcaccggcaaccgcaaaacctggggtgagaaaccgctggctacttatcctggagggcggagtggggggccgcgaacgcgatcgagctggaggacgaggtggggggatcgggagcttgggggcggattcgagag

SEQ ID NO: 29481 - DNA, 796 bp, Setaria italica
  Peptide Sequence Number=SeqID_95455
aaaaacgacgaccgaccgaccgaccggcaaattgttccgccgcctcctcccccgccgccgccgcttctccacatcgtccgcctccaacgccaccccaaccctctactctagcggaaccaccccattctccctcctctcgtggggccgtggcgcgtccggccagctcggcggcgggaaggaggagcgccgcctctacccgtccccgttgcccacctccttctccccgactcagacccgcgacttgcgcccacccccggacgcctcccctctgctggggagacgtctggcgtggaggtggggatctcctgcgggctcttccactccgcgctcctcgtcgaaggaggcgcatgggtatggggcaaggggcgacggcggccgcctcggcctcggtgacgagtcatccgccttcgtccccgccacaaccccaacctccgggagctccgcctcctggcgctcggcggcatccactccgcggcgctgaccgcctccggtgacgtcttcacctggggttatggtggatttggagctctggggcactacgtgtaccatagggagctgttgccaaggcaagtgaaagggccttgggatgggaacataacgcacattgctacaagtggagcgcatactgcagcaatcaccgactcaggtgaactttacacttggggtcgtgatgaaggcgatggaaggttggggcttgggagtggaggtggcccaggtgaagctggctccctcagtgttccttccaaggtgaatgcattgcctgttccagttgctgctgtagcttggtggtggcttc

SEQ ID NO: 29482 - DNA, 1199 bp, Setaria italica
  Peptide Sequence Number=SeqID_95456
gactcagtgacgtatgttcccgggtccttcggcgtgcatcggcttcttcgttaactccggctccgtttacgagtccggggagaccaccggcgtgtcgtacatgctggagaagatggccttcaagggcaccaaccaccggaggcaccgcaacctcgtgcacgagctcgagcttgctggaggcaatgtcggtgcctcctattccagggagcagatggtctacagctatgacacgctcaagggctacatgccagaggctattgagatactcatcgactgcatgcgcaacccgctcttcctccaggaagaagtcgagcgccagttggtccttgctcgagaggaagtccaggacctgcacaagaatcctgagaagtttcttcatgaacagcttaaccttgttggattttcaggtgcacttgcaaatccgctaatacctcctgaggatgctctttcgagaatcaatgacaagattattcaaaagttttatcatgaaaactataccgctgatcgtgtggttctagcagcatctggtgttgatcatgaacaattgctaaactatgctgaatttttgttgcgtgattggcacaaggggtcacctgtggaaaaaccaaagtctacatacgtgggtggtgattccagatacagagcagattcagatatgacgcatgttgcattagcttttgaagtgccaggtggctggcttcaagaaagagatgctacaattatgaccatcatacagactttaatgggtggtggtggttcattctcctctggcggtcctgggaaagggatgcattcacggctctatctacgggtcctcaataaatatcatgctgtccaatctttttcagcatttagtaatgtatatgacaatactggcctctttggcatctacttgaccacgtcatcagattttgttgcaaaggctgttgatgttgcaataagtgaattgattgctgttgcaacacctggagaagtgacagaggttgaactgcaacgagcgaaaaactcaacaatttcatccgtattaatgaatctcgaatccagggtaattgttgcagaagatattggaaggcagctgttgacttatggttgcaggaagcctattgattacttccttcagtgtatggaagaaattactctagatgatatcacaacatttgccaggaagatgttatcttcgcaacccacaacggttagct

SEQ ID NO: 29483 - DNA, 371 bp, Setaria italica
  Peptide Sequence Number=SeqID_95457
agcggcggcgcgcacctgaggtggcggcgcgtccaccgctgccaccaccggtggctgctgctgctgctgttgtgttggcggaggaggcggcggcgttggcgttggcagagtcggctgaggcaggggagggtgggcggctaacagggccatgaggagctcgtcgccgtcctgcccgccgccagcaaagaggtccgggaagcgccacccggcatctgcctccggctccttggcaggctccggcgccggcgccggcgctggcttctccttctgcggctgcggcggcggaagcaggaacgccgcgaaggggttgtcaggttgccgcggcggggagaggcggcggcggcagcccaggcgcacgacggtgtccagat

SEQ ID NO: 29484 - DNA, 405 bp, Setaria italica
  Peptide Sequence Number=SeqID_95458
tggaggccggcgtacttgttgtcccaggagaactcgagcacggaccagccgactcccgccgaaggcctcggcgttctgggacacgtacctcaggtactcctcgtcgccggtcgcctcgtacagccacaccgccgaccagagcagctcgtcctggtagccagattcagaaggatagaacttcttggcgctctgcagggagtcatcatacctgcctctgaacgtgtcggcgaatgtgaagagctgcttggcgtgcagcaacaggaggtccgcgtacatggagtcgtacgggcggaaggccttggccgcggcggccagcgcagccgccgtctcgccggcgacctcggatcccgggtggttcctgtcgatcttgaacgccgtcctcggcgtcgacatgtcctccgcgcg

SEQ ID NO: 29485 - DNA, 496 bp, Setaria italica
  misc_feature (467)..(467): n is a, c, g, or t
  Peptide Sequence Number=SeqID_95459
caccaaagaggcattcagtagatgatacagtcatacatctacaacctattaaaaggcgctcgatatatcctacatccagaacctaccacacatttgtaagttacaatgaaattaacaagcgatcaattagatttatccttgatttatatgcgcagctaagtttctgatatttaagtccaagcagataacagaattatggtgataatgtaaggccccaaacctagtaacttgtatgatatagagcgtgacgagtgaaaaattgtcataggcaagtaaactcacactgtataatggttatctgcatttttaatattaaaggtgatatgcctttggtacctttattgagttacatgcatgacgaagtacttactttagcgtcaaatccctgtcatatgagtagtacagtccacaagtagtttctgcaattctcaggagagacatgaagtacgcctcatcccttttttccngtgaagtcaagtgctttatagcgtcattg

SEQ ID NO: 29486 - DNA, 653 bp, Setaria italica
  misc_feature (13)..(13): n is a, c, g, or t
  Peptide Sequence Number=SeqID_95460
cctcgaacctgtntaaatgaggatgtgagaccttcatactcaaccaactgttctgtttctcaaaatttgtcagtggcaccttcaagatttgcgccccttctccacattcttgttcctagacgtctgttgcatctccttgagaacaatgttatcctgacaggtctatccttcaaggtaaattgcgctgactgaaaacttccttgtatcaaagggatgatgaactcatcaagcttagcttcaataagctcctctaataaatttttgttccaaaccaaacgtggatcagcctgcttccatagtggtttatgtatcctccctgcagccaacttggatgccctctgcaaatttagcgtcaaatccctgtcatatgagtagtacagtccacaagtagtttctgcaattctcaggagagacatgaagtacgcctcatcccttttttcctgtgaagtcaagtgctttatagcgtcattgcagcataagaatttcattgagttcacatggtatacaggggagccttgataagagccagcatctttttgagaagtgatgacgagtacataacttccggcgagcaacctgatgatgccggccactccgtatatcctcgacaccttgcagtcgctccccacgcgggcttcctctggggagagagg

SEQ ID NO: 29487 - DNA, 677 bp, Setaria italica
  Peptide Sequence Number=SeqID_95461
agtctttattcacagatacataccaagaaccaatgaactgttcagtctaattcgggtttcaaatttggagtgcagttcttattcacagatacataccaagaaccaatgaactgttcagtctaattcggggtttcaaattagcttcagtttacaggactagaactggaagtctaatttgttgttagttaactgtttacaggaccggcaggctgacctgcctccttatttaacctactcttgcaaacaacattctaattcttttttatctttaatttctaacacaaaagggcgatgtaggggaaaaaagaaccaggaattagattagaccacacaaacggggcctcgagcaaaactgttttccattggctttcaccaaggctactactcccactgtcaagcccgcgcagataatggaggagatgaagtgctgtgcattccgtccaacttgactgagagtgaaagttgtcgcggtaatcccaccaactatgattgctgaagccacaggaagatacgaagcagattcaaatccaccagtctgaaaaggagaagtgctgccttggctgaccgtataataaccactaataagatctagagcatcctgtcgcactccatcatgaaaattattcaaataatatcgcgaaagggcgctcatgccatctttaattagtccaggtaat

SEQ ID NO: 29488 - DNA, 1181 bp, Setaria italica
  Peptide Sequence Number=SeqID_95462
gctgtgtgaagtttagttacgctccaaccactatgattgctgaagccacaggaagatacgaagcagattcaaatccaccagtctgaaaaggagaagtgctgccttggctgaccgtataataaccactaataagatctagagcatcctgtcgcactccatcatgaaaattattcaaataatatcgcgaaagggcgctcatgccatctttaattagtccaggtaatgtctgccttccatatctcactagatcccctttcaaagcataagaacccgcatactccaggcttagctcatcaccgtgctcaacccataattttttgaatatatcattattgttatcagagatagaaatgctttcagatgatgataatgcccccatccgctgcaattgtgaatccaacgattttcttgcaaggaaactctgtgttacatttgtacggtccaggcagtcaatgcagttggacctaactacaccactttgctccaacaaaatctcgccttttgagtccataagaaaatatccttgtttctgaatagcttcctcaatttgattgtagagagcttgcaaattatcaaagttccctccatgacagacatgatggaaatcaaaatgcacgtacctgacaccatgaattctgcccatttcagcagcaaatgcattgcttaaatctccttcatcacctcgtttatcagtcaagtcaacaacaactgtctcgccatatcgttgcgaaagatcatggaagtggcgttgaacaacctttggagtttcttcatgttcaataatgctgagacgtggtttgtagctcaaatccactatttgctcccagagaagtggaatagaacctcgaacctgtataaatgaggatgtgagaccttcatactcaaccaactgttctgtttctacaaaatttgcagtggcaccttcaagatttgcgccccttctccacattcttgttcctagacgtctgttgcatctccttgagaacaatgttatcctgacaggtctatccttcaaggtaaattgcgctgactgaaaacttccttgtatcaaagggatgatgaactcatcaagcttagcttcaataagctcctctaataaatttttgttccaaacaaaacgtggatcagtccttgtcacttaccaataagtaggtttaatagttatacctacaccttactaa

SEQ ID NO: 29489 - DNA, 2705 bp, Setaria italica
  misc_feature (1)..(43): n is a, c, g, or t
  Peptide Sequence Number=SeqID_95463
nnnnnnnnnnnnnnnnnnnnnnnnnnnnnnnnnnnnnnnnnnntttttttttttttttttgtttagcagcactactacctgatcatatcaataatcaatccataggggcggccaaccgagatgccagataagttttcatcagacagacaggcgatagcattgcacaaacattcgcaatgcctcccctcacaccatcatcagctacaacaaaccgtattacatcagtcgaaacaatcagtgtcgtgcgcgaaagcgaaactcagcagaagacgcctgctcgttcgccacatccaacgcctctctctatacgtcaagcagacaacagtcgtggctaatattagtgtgggtgaccatgaatttacagggtatgggaaggtagtaggcatgtcacaaggccagcgcgagctcggcccacgccagcgacgactccttgaggatggcggccgccgacaggtcgatcccgttctccagcacgccggtgatgatctgcatcgacggcctcttggaagggtcagggtcgatgcaccggctcaccacgctgcacaggactgcgaggtcctccgtcctcacgttgctcagctccgggtcgactagcttcccgatctcatcggcctgctggaggaacttggtagcccagtcgaccaaatagcctttatccttgcagtatggaagccgcccactgataatctccagtaaaatcactccgaaagcatacgtgttgccttggatatctgcatgtaaatcctccgcagaatccccgtgaccagggaaagaagctttgctattgaagtggcttggagccttctcatgttttgagaacatcattttccagcactcgaaatcaaccagctttggcgtaaaatcttctgtaacgtacacggaatttgaattcagctcagatatagcaaatgggggttgcagctcagtatgcaagtatcttagaccctgggcgatcccaatagctattttcattcgcctaagccaagataactgggctccttctccataatgtagatgctcaaataaggtcccatttgatgcatactcaaagactagcatccttgagaatggatcactctctctgcagtagcctagaaactttgctatgttctcatggttcaatcttgccagatcaataaccttgttttggtaaaagagttcatggtggctagtccaatgaccttcgaaggcgcataatgatatgactgaaacttcaggaccatccttcattgtccctttgtagactactgtctcaggagtcgagccaataatgttgctaaaatcttcacaagctacctcaagctcctggcgacttaattttggtaaacttttcagcatatcagaatcaatcaacactgttatctcatcgctccaactctttgatcgattccatgaggatattcttatagaaggcttcagcttgcagcttctggaagcagtaacgataccagttatcacaaagacaaccagaagaacgcctgttgcaatttctaaaacaaggagccaagttggttgctgcattttttcatgcttatgtacaggatgtttggctccatttatgccacctcgctggccagtagaaccacttatacaaatttgcaaagctcgttgttgggtagagtactcatcctggaagcagttcccttggaaacttgaccttggaagatatttcaagcagggtggaatttttccgacaagaaagttgtaagagaaatccccaacatataatcggggtgaagggcatagtccattgtgagctgtggatccgatatttgcagtaggagaaaaactgccagcattgcttcctggaattgatcccttcaatctattcctgtccaacctcagttcaacgagattctgtagttttcccagctccggtggtatattcccagtcaacccattggaatggaaatttattaagctcacgctgttcaagccgcctaactcagaagggataggtccagtgagccgattaacgctcaaatccagaaccctcaggttcctcaatgagcctatttgtttcgggattgtgccaaagagcaggttatgatccaaatacagctcttgtaagaaactaagccgtccaagatcaggtgcaatgaatcccttgagtgatgagtttgataacttcagtgagatgacggaaccctgcggcgctgagcagatcacgccgtgccagtcgcaggcgttgccgtccgcatcagtccagtctgatagcacggagtgagggtcctcgatgatggcgcgtttgaatgccatgagcgccgacacgtcgcggctcatggcagaggcggcggagcattgcaggaacacgacgccgcactgcaaggcgaggaggacctgcaggaggctcggcaccggcgtcggcgccgccgcagcccagcgcccgctcatgtccaagcctaagctggtggtgccaaatcgccaaccgcagcttgatcgcgacgagtgaatattccacgagaggggccgcaaaccggttcagttcacggagccatgggtggccgcgccgctgctcggccggtctgggcaccgccgctgccgctcagcacgggcacgtgggggtgaagggggagaaaaatgggagtggggaagtggagttggttggggagtgggagcagttggagtaaagagaggagggaggcgaggcgagcaagggaagcagcagacgccgccggggccaggcgcagcggcagaggatgtcg

SEQ ID NO: 29490 - DNA, 419 bp, Setaria italica
  Peptide Sequence Number=SeqID_95464
gctcgtcgacggcgacgcggaaccccgcaggatggcgcgcaccgcggagcagtccgtgaacgtgcgccgcaccccgcgcagcgacgtcgtgtagaggaccaccgcctgcggccgctgcgcgcgcggctcgtccgcgagctggctccgccgccacttggccgccgacgcccccgccggccggtgcccctggtggtggtggtacgtcagcgaccgcgccaactggaacggcttcttgccgcagctcccgccgccgactccggccgcgacgccgctgcagtcttccatctcacgcgacgacggcgcagcaccagctgcccgcgccgccgtaggagaaggtgaggtcaggttctttggctatggcggttacccggacgcgaggaaagggggaagaggaagacgaagaaagcgagttgtggaag

SEQ ID NO: 29491 - DNA, 396 bp, Setaria italica
  misc_feature (311)..(311): n is a, c, g, or t
  Peptide Sequence Number=SeqID_95465
agaggatgattaaccagcgaccaccgcttactgttttgcagtgtttaaatctgcaagtggcatagatggagtcccatgaatttggtatttaaacaagtgttgtaggctatacaacctccaatgataattaactgcaacaatatcaatcctactctaccaatcaataagggaggaataataattttttgacaatctctgcttccaaactaacctgcagtttcgtggatggaaggaggcaaagaaaaatcttggtacaagggtcatcatctgcagcatcttattcccaaggcttaaatcattggcatttaaanagtgaggaaagtcagagctgaaagtcatacagcaatggggtgagcaccagcctggcaccagctggggagttcctcgattgctgca

SEQ ID NO: 29492 - DNA, 712 bp, Setaria italica
  Peptide Sequence Number=SeqID_95466
aggaatcgggggaggactagtgtagcattgagcagagcagcaacgacaacagcattgcatacagcgacacgctgttggttgagaccaccattcgcgctgatcagtatgaaaccgttgttgatctcgtcaggctctgcttgacccaattctagtgtcagaactgaagacatggagttcttcatccgccaacattatgaaatcaggatgattcaccacaatgatttaatattcaggtagcaaaataaggaagctaatatgtctgatcttgctgactactaggaatttaagttacatcatacattcatcactgtaaatggggattaaaggccacctggattacatgtatagtgtttatgtatagtataactaattatgttgtttgatcctcgcaaaaaacagtcatgctgttcgaacaaagtactattaccttcatccgccaaactgtgcttagcagcacagggcgtccatttccgtgcttgtttgtagggctcttcccattgcgcgaaatcctctgattcagagccattcttggtgaccgctgaagttgccatctgcaggagtcttccatgcattatctggtctggtttctccctccttacaatgttctgcttgagctcctggagacccctgaagttcctggagatggcggcgttcctgaactgcacctggtgcagcgcggacatggcgagcgacgcggcgagcaggacgcacg

SEQ ID NO: 29493 - DNA, 2095 bp, Setaria italica
  misc_feature (1)..(52): n is a, c, g, or t
  Peptide Sequence Number=SeqID_95467
nnnnnnnnnnnnnnnnnnnnnnnnnnnnnnnnnnnnnnnnnnnnnnnnnnnntggtcattttcctggcacatcttacttttgtacaacccctctgtgtaaagatgtgttacatactataagaactcaaaattgtaccacctttccttccacctatgctgctgagctgctatcaaagttaagaaataagttatgcacaaactacaaaagaatcaatggaacacatgatcccaggtcgacgccgcaaactgggggcatcgtcagaagtcgacgctgccgtcgccggcggccctgcacatgcaccctggcgtcctcggctgccggtacacgctccggcccctcggccgcgggctcacccgcttgtactcctccaccatctgcctcaccctcctccggaacccgccccacgcgatgctcccttcctccgacagcacctgcgcgtagcgctttcggttcgggtgcagcgtcggcgcgcggcccctcccgtggtagatccggaacccggacaccagcgacgatagctggctgccggagtccgtcaccgcgaacacgtccgccgaggcgcacgcgatgaagtccagcgccgcaagccgtgaagagaaattcttgaacggagcgagctcgtcggtggtgaggatgtcctccttggtgacaagattcgggtacagccgcgtcaggggccgcagccgtggtgcgccgccgtatatctgcgacccggcgacgtagatgaacgtgcggccatcgtagccgagagcggagaggatgaggcccgattcctccggcgtcagcgggcacctccccaggctgcgctgctcctccggcgaaaccgtggcgttccgaaggcgcatggcgagcgtcgggaagtgggtctccctgtacgcctggagctccctcctctcctcctccccgccgccgaactcgcatagggagtaggccaccatgtcctcctcgaacctcatgtgcagggcgaggtacctgctcggcccgccggcggcgtggtcctcggcgaaggccgccgggtcgagctcgaccatattgttcccgaacagctgcttgtccatctcggtctgcatcgcgctcaccttgcgcagccgctggaccagcagggagcctgcttgctggagctcggggacgaacttgagagcgtggaagttgcatctgcacctcagcctctgaagatggacgggtactgagtcgaagcccagacggtttccgaatccgaggaaatgaacgacgccattttgctggagaattggaagcacagatctgacgaattcagatggttcagcctctttcgagatgtccatgtcagtgacctggctgccgattgcttcgagatctagtgactgaaggtgtggtggtaattctttcacaatgtgcacatcattcttcatgtagttcacgaagtagtcttcctgatagatgtcaccgaactgacttgtgtccttccacacactgctgtacaggaatcgggggaggactagtgtagcattgagcagagcagcaacgacaacagcattgcatacagcgacacgctgttggttgagaccaccattcgcgctgatcagtatgaaaccgttgttgatctcgtcaggctcttcatccgccaaactgtgcttagcagcacagggcgtccatttccgtgcttgtttgtagggctcttcccattgcgcgaaatcctctgattcagagccattctgcactggcgggaagggaaacttggtgaccgctgaagttgccatctgcaggagtcttccatgcattatctggtctggtttctccctccttacaatgttctgcttgagctcctggagacccctgaagttcctggagatggcggcgttcctgaactgcacctggtgcagcgcggacatggcgagcgacgcggcgagcaggacgcagcccatgaccccgacgacggccgcgaacaccctgaggtgccacgacgtgacgccgccgcccctcccgccgtgctgcttcccctgctgctgccgcgccgtgcagcgaagcctcccgatgttggtggcgccgacccggatccccacctccccgccccggcctccctgcaccgccaacgccgccgccgccgacgacgaa

SEQ ID NO: 29494 - DNA, 410 bp, Setaria italica
  Peptide Sequence Number=SeqID_95468
gccgcggtgcgcaggtacgacaccgcgttctgcattggtgagggtgaggcgaccaactgctccatggaggagagggcgtacatgcaggaggccatggcggccctgagggtggccaaggaggtgctcggactgcaagaggggtggaggaaggaggcaattagggagatgaatagaaccggtcggttctcgcgctcattggccaattccgccactgattggccatgcctgttgctggatgttctgtccggtgtggcagaggaggatttcttccagccgaagctggtgctaaacaatgtcgatgttctgaggaaggcaatttgcgaggacgagacgacggtgccggcagcgatgtaccatgatagctttattggaggtgatcgcgcttggtgccaatgaacagtgcttgccgg

SEQ ID NO: 29495 - DNA, 847 bp, Setaria italica
  Peptide Sequence Number=SeqID_95469
tcttctttgtttggtaggttagtattccgttaggtcttcctttgtaattaagaactcatatttaatcaatagatcttgaacaggaggaggaaccattgtattgtcagagagagtgaataggggctccgctggtgcaatagcagattgttgggcaactgcagtcgttgtaacttatggagtagctgatgggcacattgcattcactaggacacaatttgttactacttttcttcttaacagtcccttaagctttctagggataatgttagtgcaaggcagctttgtgttcctgattcaagtactctgatattgtctgctgaatgaggaaacctcatgattttacttcttccattgggtccaagtggggttgtggtccttcaacaaatttgcaccgatgatcatgtcaaaacacttgagtggtagtactctggcatcataagagaatgtatgcccctgaatgaacaactgcatgtttcgaatgaacttgtcagagttcattggactaccatcggcagtgatgaactggagttgttcacaagatttgctttgcagtgcaagagaggagaccagcttgtcactaacaaatgttcccacgcttcctgaatcgagcaaaataagaatttcttgcttgccaatgaagcctttaaatcaaatttttctttctcttttttgctttgcctgatcaggttgatcttctttcacagtcatgataacttcatcagtttggttagagctatcctcctcaccatccgagcagtcatccaactgaaacatttccataagctcttgaatcatatgaatgggaacctgatcagggcatttgtgatttcgcccagtccatttctct

SEQ ID NO: 29496 - DNA, 503 bp, Setaria italica
  Peptide Sequence Number=SeqID_95470
caaaactggtaggggatgtttattcttcactgtgagagcattgaggtgtctatagtcaatacagaatctccaagaaccatccttctttttcaccaaaagcataggtgaggcaaaaaggctactactatgagatattactccagatttcaacattgaactaatctgttgttcaatttcatttttctgttgaggggagtatctgtaaggtctaacatttactggctgagcacccggcagaaaaggtatagaatgatcacaatctcttgttggaggtagatccgtaggctccttgaataagaactcatatttaatcaatagatcttgaacaggaggaggaaccattgtattgtcagagagagtgaataggggctccgctggtgcaatagcagattgttgggcaactgcagtcgttgtaacttatggagtagctgatgggcacattgcattcactaggacacaatttgttactacttttcttcttaacagtcccttaagctttcgta

SEQ ID NO: 29497 - DNA, 191 bp, Setaria italica
  Peptide Sequence Number=SeqID_95471
ggcgtccgcggccgcaggcgtgaacgcgtgggccgggaccgtgcaggctctgctgccgcttgccggcgcgctcgccgcggactcgcggctcgggcggtaccgcgctgtcctggccgccgccgggctctatctactgagcttgggaatgctgacgatctcatccatgctgcaagcgctgcaaactcacgccg

SEQ ID NO: 29498 - DNA, 635 bp, Setaria italica
  misc_feature (93)..(93): n is a, c, g, or t
  Peptide Sequence Number=SeqID_95472
gcggcgtagcgctcggctgaccaccggtccttacccgtgccgagggtcaccatcgttggactccactgtgcgcttctttgccttcttcgaacnctttttctgctgccctgaaccttgcgattcgtcttgccctcatctctgtgcctgtccttgctgcttccttctgcctcccgcttcctcttacagtttctttcgctcctcgtaacttcctgcatggctggatgctgctgctcttctctgatgctgacctctgtgtcataaccattgactccagcctccttgggagcttcatctcgatgccggccaatgtacctgacacggcgcctcatgccccacccagcgccatcacacttcaaggtggtgagcaggcaggagtcggctaccagcgccaccttagccgccggtggagcaggtggtgcctgctgggacgtggcgaagtcgtagaggtggggcttgatgagccagaagctgtccttgtgcaccgtgccctcaagctcctcatcggctacccggtggcgcaagatgcgcgtggcatggttgttgctcatgatgaagcactcgtcgagctctggtccggttccggacgctgggtaggaggagaagaagctgcgcagcgcctggagggatgggaattt

SEQ ID NO: 29499 - DNA, 1936 bp, Setaria italica
  Peptide Sequence Number=SeqID_95473
aagttaaattaattattgttacttaaagggtattctaattcctaattgtcaagtactagctagccaccagaacacatgcttcgatgacacaaaaattaaccagggactgactaaacctcaaatggctacgaactatgcaaccaagaaccctcaagtgacttcctattcttcttgtttttctacctttttttgctttcttttcttttctttttcctgtatgcatgttatgtatgttgcgtgctgcctcttccttaagaaaaaatggtgcacgccgaggtcgagtaaaagccaaagactgactgcttgcggatgtggagggactagagaggtgatgaagtggaggtacgagcagctcagctagtaagagggagtagccagggccagttcggtggccaccatgctgatccggccggcgtctgcactgaaaagggccctcctcccctccggggggctggcgcgacaggccccggacgatgaggacgtgtccacatgaagtcgagtaaggccagagaaatgcagcagcttttgaggactaaacccggcagcagcagcagaagtgccgaacagcttttgcggctgcagtggtgacctcgggctggacagggacagctgcagctttgccgctgtggcagtggtgtaagtggatgatgccgagggcggcgtggaggagagggcgccaagcatcaggtgctcgtccaggcccgacactgctgacactgccgacaccgccacctcaactgctggggctcgcgatgatcgttggagccccagcccggcgctagtggtgcagctggtgctgcgagggatccctgggcctggcgtggccgtggccgggcagctgctgctggcctcccccgctgatggtcgtgccggacgccatgctgggccacaggaacgttccctgtggcttgcagacacggaagctgctcttccttgccaggctgtccgggacaccttggatgacggtgctgtcggcccgcggggtcatctggtcaccagaagcaaggtacacttctgtgaggggagcagattcttgattgccatcactgggagccaatcccagctgacgagatgttcctgtctttagcgccagcaccaactgatccttgaaagaaaggaaggagctggaaagataggtaacctgctcctctaacttatcattcttgtaagctacatgctcatatttatccttgaaggataacacctccttcttcagctcaccattcatctgaaccacattctcgcacatatccttcaaagagaacacctgcttctcaagcttttcattatccctcataacactctggtacttctccttcaatgaactgtaagctctttctgcatcaaagttctcatccttgtccaccagctgctccatttgcctttttacgccattgacctcctcggtgagctcctcaacctgcctcttgactagtaggtcgccggcaacgagggagacgtcgtcacctggcttccatcccggtggtggcacccagtatggatcagacacaccagcctgtcgccgcacctcagcaagctcggccggctccagccagtactccatcacaccatctgcattgtgccggcgacggaatcggtgagcactgccttctggcacccggccggccatgtgcttgagcaggtggtcaaggaggccggtgtcgccgatgtgcttacgggcttcctcccgcagcacctgccgcatcaccggcgcgccagaacgagcaccgttggagcgcatgatatcgagcaggctcttctctgctgcggcgtagcgctcggctgaccaccggtccttaccgtgccgagggtcaccatcgttggactccactgtgcgcttctttgccttcttcgaactctttttgctgctgccctgaaccttgcgaatttaaacgtaaaacttaaaaaagaaaaaaacccttaaaaaaacaaaaaa

SEQ ID NO: 29500 - DNA, 265 bp, Setaria italica
  Peptide Sequence Number=SeqID_95474
ctcaagtctcaactcatcaactctcagctcgtgttagagaagagcaaggaaatgacgtcgaagaggacggcaccatggcacaggctctcggaagccgaggccgccgtgaaccgcgccgtggcgtcgagccgcgtggggtggtacttcaagctggacgcccgcaagagctccttcaccaaggaggctccgcgccggcgccgccacgttcctcaccatggcctacatcatctccgtcaacgcggccatcctgaccgactccggcggg

SEQ ID NO: 29501 - DNA, 347 bp, Setaria italica
  Peptide Sequence Number=SeqID_95475
gattcaaagcacagaaccacagggttaagaaaatagatttgccagaaactcgaggtacagctttggcgtaacattcagatgccccaacaccaccaggtcatatcacatctaaaaacactacgtcagttccaaacatgccaatgttagttacaacttaacaccagcaaactagctggtcacagtttctcgtcttaagactacagaaccagctttctagggctcctgctgacaaagccagcatggggtctaccatgcctcacattcagctttccatatctgaatcaataactgacaggaggttcaaggcagacgaaccgatatggattcctctaaccacaccgcaatag

SEQ ID NO: 29502 - DNA, 1024 bp, Setaria italica
  Peptide Sequence Number=SeqID_95476
ccacccccagcctctgcaagctcactgctcacacaaagcgaaagcagcagcggcagtctagtgcctggagcagctgacgccggcaggatgaagcttcagaccacggcgaccctggctctcctcctcttcctcctcctggcgcctccttcgctcagtgtctccatggctgttggatcagaattctgcgacagcaattgcgcgaggaggtgctccaaggcgagccggcacgacgactgcctcaagtactgcgggatctgctgcgccgactgcaactgcgtgccgtccgggacggccggtcacaaggacgagtgcccctgctaccgcgacatgaccaccggcaccggcaaccgcaccaggcccaagtgcccatgactcctccctctctttcgccgtcaccggccggctggctggcgtaacgcgcgcattataggctaagcacgcatgcatgcacgcacaccatgagcatggatgcatatatgtttgtctggactctggagagatctgtgtcctgctagtactctgcttgcccttggcacctgaactggagcttctggattcacttgccactactgctatgatgtacatggggcaagaaatggagctgatgatgtggtattagtgactattagtgttttatactagccaggtgataataatgttgtgtctggcaataaagcctttgtttaggatagatgagatgctagagatcgtgtttattagttggagtaaagactacagagtcctctctgctacaatgtgctttttgggtgcgggttttgtgtgagcttcggctcagctacaaggcagggcggcatgactgaagcatgcgacgagcgtcggtggcgcaggcggcgtcggcctacccggccagtgcttcagttactcctcagtgctcactgagtgcgacgcgtcggcgatttgttctctcacagagtcacccagccccactgaaccgccgcaatgaagcctcgagttgatgaggtctttgccgagtctgctcacctactggtcacagtactaggtg

SEQ ID NO: 29503 - DNA, 317 bp, Setaria italica
  Peptide Sequence Number=SeqID_95477
cgccaccagcttcatcctccgccttcacctctcaggcttcaggaaagaagatttcagggtgcaagtcgacggcaccggccgcctcaccgtccgcggccagcgcgccgtcggcggcggcaagcaatccagcttcaaaaagatcttccagctgcccgaagcctccaacctcgacggcatcaccggccgcttcgacactggcgtcctgacgctcaccgtgcccaagaaggtcgtcgaggacgccaagcccaaggaggacgccaccaaggcggcgccgccgccgcaggagcaaggcgagcccaaggaacacgaggccaaag

SEQ ID NO: 29504 - DNA, 1829 bp, Setaria italica
  Peptide Sequence Number=SeqID_95478
tgtctactaattaccgtattcacttttgtttttacaaaaggaaatacaaatttttcaccattgtacaagaaataatcatgagttataagtgcgactccaaaactagctgatcaaattttgtcccatttagtatcatactgttgttatttataccaatataattaataagtttccatcacattctcatcagtgatgtctatttgtaagttggtgtgatagcaagtttttaaatgaatacatccatcatataatataggatggcaatttgactaccttattctatagaaaaacagtcaagcgggaatccctctaaatttccttaacgccagtgatggactttacaaaagtttgggatacttgaacaaatgtggacgggaaaatgaactgaaaataataagaaaaattagtaggcaataggtataggatattgcatattatcgaggatcagctcatcagcatccttgcagcgtatgagaaggcactatgccattcccagtaattgacaactcagttgaaacagaatcttctgaaacccccatactcttgaaagcatgattttgtatatctgcagaactattctggctgtttggctcataagaggaacccagtttttggttaacaggaattggagtgtcagtctgttctattgtttcatttggagaaacagaattgtttgcagagtcaacttcggttagctctactggaacacaatcgcccgcatgctcactttctgctttactagctgtttctgataaattggtcataggaggaacctcaaaaactcccatatgattggaagaagaatacgatccaccatctgagcttgcttgaactgcacaaatgttatgtgtctttggttcagcagatgagtctaatccttggtttactagcatactactgcccgtgtcttgtgtggatcccattgacgcaacagaatatccttgatttactatcctactactgcctgtgtcttgtacggatcccactgatgcaacagaattttctgtaaactcaattctggttggcaccaaaacatcagaatcttctgtaggtttcctttttgaaatttcagctttaggctcccttttcgaagtgtcagctattttggatggcaaaacttttggcttatttggatgttccttagcagcctcttcccattccccccatgtatctgaatcaacccgatcatcaagaataacctccttaaggactttcagatattctattttgataccgcaaaggccatgtagacccttacagagcagctgaagtgtgttgaggaatggcatagatccttcttgaattgttggaagtgttggatgtgttggatgttgcagcacaaaacaaagacatagcaagctggggaatgccttatcttttatggtgaacttctcaaggtcatcagcaatcagttttaaatatttcaagttactcagcagggtcaaagcttcaagaaggccctttgtacatttaacagatgtaaggcacaactccttgagaccacgaagtgaaataacaaactgaggcaatgcatccaattcgccgtgtaatttcagcgagctcaggtaacacggttcttttaaggaattgagggattcaataaaggatttgtcaaaatgaagcgatagagaacgatcaccaatatttgctacatttttatcatggatgaatttctgaatggccttctgaagatcagtccagttaccacttgcacctgccgatgacacacaccaaaccttcacctttctcaattttgtcatataatccataaaattaaaataaccttgtcttccgtcagtgattaatcctgctagtgtctgcaagacact

SEQ ID NO: 29505 - DNA, 1068 bp, Setaria italica
  Peptide Sequence Number=SeqID_95479
agtttttttttttttttttttttttgttgcaccaattccaacgacctatatatatgattagagttctcatcacaacataagagaacaggtttgacccttctccatctttgggatgctaatctgaaactgatagatggttacctgcttttttacaactctaaacactacccaacctctaaaacggcatacactatttttctccaaaaggagaaactactggcaccttccgctagggctactactagcttgacagatgatgatgagttgccgcgttccgcgtccagcttcgttcacatccccatgatgcgattcaggcccgtgtgaggggcgccgcctccactgtttgccatcgcgatgttatgcagcatctggtggagccatagcctggttgtgaggtctttctcaagaaagtcgttgaatgtcccgtccctcaacacggtggggaagtgagtgcgtagcgcatggcaggcacttggattgtcagtcagccttaggtagcagcggattatgtgcttcagcaaccttggggaaggctgttcaacaagtccttcaagcatctgagctaacacattggctaaagcaaagaaacgttcacgagtagcacatatgtacttaagtcctgcatcatcaagtataatcttttgaacaataaaagtagacaccgttttcgaaatctcactgcccaggtccatagtacgcagacacagaggaatgatttcagtactgagcagatacgcaatgacttcatgatcatcaacctttacaagagcaccgatcacacccaagctggtaagcctcaagtattcatattgtcttgttctgtaggtagtgttcaagaaaggataaaggtacactggaatctccgcagttatgaatggtatcctagtgtcagggtgtgacgcaacacactgaagaagtgccaatgcattgcactactcacacggagtcgccgacaataatgttgcaggtgaaaggcgatgggtaaaattgccacaaatttcctggagtagtgcagccatcgtgccaaaagatgccatagaagtggagcaatatcttgttgaaattttt

SEQ ID NO: 29506 - DNA, 1088 bp, Setaria italica
  Peptide Sequence Number=SeqID_95480
ataaaattagtatctttatttggggaagcaggaacccacatatactatatactatagttcaaatcccagacatggaggatttttctggaaccactaataccaattacaggaaaatggaactaactactgaattcatataatcaacttaacaataacaaattaaaggactggtaataaagctcaactcttgatgcagagcattaatgctgaccgtgtatgcttaatttgcttccttcttcctgatttcatctcgcctctgagcctgagtttccgaaggctattaacttcacttgcttaagcttttccaccacctctgccatggttggtctctcctccacatcttccttgagacatcggacagccaacgcgcctatcctgtcgaggcactcaatgtaacgttgagacgtctgagcatcctcaccagagaagatgtctctgtcatacatcttccatccgttgccctccttcttgcaagtctttacaaagttcatggggaggctgttgcacccgtcatacctggccttctttctggtgatgagctccaggagtaccacgccgaagctgtacacgtcgctcttctccgtgaaagaaccagtgttgatgtacaccgggtcaatgtagctcatgtcccctgacaccgcccatttggcatacctgctagcaatggacacgagcttggacgacccaaagtccgagaccttggggttgaggtcgtcgtcgagcaggatgtttccagacttcacgtccccgtggatgcggttgttgtgtccggcatcatgtgagtgcatgtaggtgagagcctctgcagagccaatggcaatgtcaagtcgcatctgcaaagaaagagagccttgcttgccggcaccgtggagcatgtcggagaggcttccgttggggatgaactcaaataccagcatggggatgctcgtctccaggcagcacccaacgaggcgcacaatgttggtgtggctgatggcgaattggaagatgatctcgtcgacgaattcacccccttgccggatttctctccttctactatgggtcgtttaaccggacgaactacgacttagttagtactatcacggtaa

SEQ ID NO: 29507 - DNA, 400 bp, Setaria italica
  Peptide Sequence Number=SeqID_95481
aggctcgtattttggtgtctcagcaaccagaactttgcttagaccctactcctaaactggatcgactttgtcaggatcctattcctcataagttgagccttggtatcggaaaaaagaggaggctgaggcaaaatcctgaagttatcgtcacatccagtaacatgtctcatggtaaaaaggtttgcattgataggttgcctgaaaatgccaaagcagatgagacgggcatcacaggtggtaatgcagctcaccaggttgtcgataacattaccatccaaaatatttcgggtggttctcagctacttagaccaaataactgttcacaagatgctaacagaatgctgttatcccaatctggtatacagcaaaatgtaagttattcagctgttggtaatgttgt

SEQ ID NO: 29508 - DNA, 581 bp, Setaria italica
  Peptide Sequence Number=SeqID_95482
atccttagcctgccggctgcgaatctgtctacacatgcgttgcatgatgcaggaaaaaggagatgcatggatcggattgcaatgtgcaagcgtactacctgacagggcgaccatgtcggtggtgctgagtcccttgttggagaaagcgttgaggaggccgttgaggttggaggtgggtccggggaggtcgctgttggccagggacgcgctcgccgtcgtcgcgtccctcctggcccaggggaaccgtccaggatgggcctcccagttgttcgacggcgtcgcgggcggcgacggcgaggatgtcggcgcaggagacggtctgcgggcacaggagctcgagcagcatcttggcgttgtcgatgacgtcgaatccccgcagcgaccccgcgttcggccccgcccccttctcgccggtgaagccccccgcgtcgtccagcagcaccgacgcgtcgcagccctgcacgaagcagtcgtggaagtggagccggaggagggaggcccccatgcggcggtcgagcagcaccgccgccgccacggcggaccggatgggtcgaggagggcggcgggggcacggaggcgtc

SEQ ID NO: 29509 - DNA, 1067 bp, Setaria italica
  Peptide Sequence Number=SeqID_95483
agttactatgtaattatgtatttgcaataattaataaataaacaatagtggtatacatatgatgtgcgtatacatactccattccaactctatccctggctctctgcagaatgtacacactcttccactccaccaccactcgcaatcagcaatgcgatcgcgatgtatccacacactcaattcaccctccggcagttgaccctgatctcgccgtccgtgccggtgagcgggccgatgctggccatcctgaccatcgccgccgcgaagtcgctcccccatcggccggcgtcggacgcgtaggccctgacgaggccgtccgtggcgccgccgccgaagagcgcctggtcggagtgcagcagcccgcgctgggagagcaggttcccgaagtagtcgttgtcgaaggcgtccggcgacgtcccgtccagcggctccagcgcgccgtcgctggaggagcccgcctgcgccgggcagctcgcccgcagcgacgccgcgaaggtggcgtcgatgtcggtgtcgttgtagatccgggcccggaagttccggcactgcgcccgcccgacggtgtgggcccctgacagggcgaccatgtcggtggtgctgagtcccttgttggagaaagcgttgaggaggccgttgaggttggaggtgggtccggggaggtcgctgttggccagggacgcgctcgccgtcgtcgcgtccctcctgcccaggggaaccgtccaggatgggcctcccagttgttcgacggcgtcgcgggcggcgacggcgaggatgtcggcgcaggagacggtctgcgggcacaggagctcgagcagcatcttggcgttgtcgatgacgtcgaatccccgcagcgaccccgcgttcggcccgcccccttctcgccggtgaagccccccgcgtcgtccagcagcaccgacgcgtcgcagccctgcacgaagcagtcgtggaagtggagccggaggagggaggcccccatgcagctgtcgtcggaggactactacgacgcctcgtgccccgccgccctcctcaccatccggtccgccgtggcggcggcggtgctgctcgac

SEQ ID NO: 29510 - DNA, 264 bp, Setaria italica
  Peptide Sequence Number=SeqID_95484
ccgccctccgaggccccaccatcaccagcagcagcgcctgccgccgccgccactgcccagctcgggattcgagccgttcacgccgccgcgctgctgcgttggtgacaaacagaccgcggaggaggggacgatggggagggggctggggtcgaagcggagggtggcggagggcgacgccacggtgcatgaggaggagtcggagtcctcggaggagtacgaggtggacgtggtgcgcgaccacatcgcttcctcccgcggcagccg

SEQ ID NO: 29511 - DNA, 822 bp, Setaria italica
  Peptide Sequence Number=SeqID_95485
cctcggcgctctcggtctcgacggcctcctcctcgcccccctccgcggccgcgacgcccacgggggccgcgggggcgggggcgggagcgggaggaggggaggactacatatcgtcggaggaggagttccagatgcagctggcgatggcgctctcggcgtcctccaacggcgattactgggggacctggacggggaccagatcaggaaggccaagctcatgagcctcgaccgcttctccgcccaccgggacgaaggccacaccgcggattcgctctcccggcgatactgggactataactttcttgattatcatgagaaagtcgttgatggtttctatgacatctttggctcctctatggaatcctctaggcaggggaagatgccatcactagctgatctccaaacaggcataggggacctgggctttgaagtcattgtaatcaaccgtgccattgatagtaccttgcaggagatggagcaagtggcacagtgcatcctgttggacttccctgttgccaatattgcactcttagtgcaaagaattgctgagcttgttacagataatatgggtggacctgtaaaagacgccaatgacatgctcacaaggtggttggagaagagtactgagctgagaacctcattacaaacaagtttgttgcctattggctgcatcaagatagggctatcacgtcaccgtgccctacttttcaagatccttgctgaccgcgttggcattccatgcaaacttgtacaaagggagcaattatactggtggtgatgatgatgatgctataaacataattaagatggataatgaaaggg

SEQ ID NO: 29512 - DNA, 191 bp, Setaria italica
  Peptide Sequence Number=SeqID_95486
aagtagtaataggggccaagtaaactatcaacaggaatgctgttgacagtataacagctacacatgctacaccacggcattgcctcatgggggtcaatggacggtgctttggtccattgttcagaatgggtcggctaacatgatgcacttcctcctctccactgacatgatgctcttgggaaccatttgaa

SEQ ID NO: 29513 - DNA, 399 bp, Setaria italica
  Peptide Sequence Number=SeqID_95487
cgtattcatgtacacttacatgccctggcgaaacgttcccgacgttacctcggtggtatgtaatggtatcagaggatgctgcgttaaacatctttacggcactaacaccatgcagcttcagtttgtccggcatactaacggaagcttccccaagtacagagaaatcagcgtaatttctagatccatgttccttggctggtctgttcatgctgaccatccaccgtgcagcgatgaattgcgtaacgataacaattatgcatgtgttagtaacaatagcagctgcgacgccgaaccaattgatgagaacatttactggtacaggtgccggtgtgagtcagaatatgctggcaacccatacatactggatggctgctcccatgtcgattcagcgtactacta

SEQ ID NO: 29514 - DNA, 386 bp, Setaria italica
  Peptide Sequence Number=SeqID_95488
atgggtgtccttgacgcgctgctggctggtctattatttcatgctgcctgcgtcggagctccgacagtcaatggcaccgtccttgccaaccacgataacagcaatagcagcactactattgtgccctctgctgcctctatggctagctgtccgaagagctgtggcggaaaaacctttgactacccattcggcattggtgttggctgcttcaggagccctgagttcgagctcatctgcaacacaggaggactctacctcagcgacaatgacacggaagttctcttagacatcaatgtctctcctcaacaaggtgccggtgtgagtcagaatatgctggcaacccatacatactggatggctgctcccatgtcgattcagcgtactac

SEQ ID NO: 29515 - DNA, 320 bp, Setaria italica
  Peptide Sequence Number=SeqID_95489
ccatctgttcactgccatctttgcctccactacacagcaacttcaacatcactgggcaattcaaaagcaagaaaagtagacgcacagaatgcttctttacaagcaatccattttctttctgcaatagcagatgcaatcttgttattacagaagtaaatccgaatctgtggcgttcctctttgggatctgttgttcttaaaatgagaatcattatggataatgcatcagttcgaattgtttcttctgagtacttgaccgcaacttgaagcattacagtgaagactgaactccagaaagtaaaaggaagagacatattatgc

SEQ ID NO: 29516 - DNA, 399 bp, Setaria italica
  Peptide Sequence Number=SeqID_95490
ttcctttcatacacctttgcactttagaattagaacatgttaatcacttgatacacgaattagtcccctaactatgcgagtcatcaacaccaaaacccacttagggggccaaatgcactttcatgtgggcacgaattctaacccgcgggtaagggtataggcatcaattcttgcccatgggcagagcgcgagcttggaatctcgcccacgggtacctatcgggttacccgcaataccaggaatccatttaattacaacttaccaaagtccaacatcctagatttggcccaagcccaaacaaaccctacgcacccaaactcatgtcccagttgcacagaccttatccacctcaccgcccactgtccctccctcagtttcctcccgcaggtggcagccacc

SEQ ID NO: 29517 - DNA, 236 bp, Setaria italica
  Peptide Sequence Number=SeqID_95491
agaaaaccacaattgtcataagactacgaccaatggtggtttctgaagggcaggacttacagagaggctcttcatcagtagatactccacatcttcaaccgagagcctggtccgttctgctatatcgctcaatgggatcgtgcggttttcagatgatcgactgaaaatgatttccatcaagcaaagtatgttgatcttttcaagaagtttcctctcattttgtaccaatgcaggct

SEQ ID NO: 29518 - DNA, 1200 bp, Setaria italica
  Peptide Sequence Number=SeqID_95492
cacaagaatctctactacttagctgctgaagcaacaaggttacaacaatcgtcactgaagaaactgcaatccaagaacagataaggtcttcacatcaggaaatgccacagcaatcctttgagcgggaggaacatcacgaagatagcaagtctggcgtctcggcttcaaccgaaagcaaggtcgtatgcaccttcccaacccaggtatccaaacggtcacgcagggagttcacttggtctatgcccaagaccctcggttgaacccatgaaacatggacggttccatcaacttgatcaattatgccttctataagacgagcagagaggctcttcatcagtagatactccacatcttcaaccgagagcctggtccgttctgctatatcgctcaatgggatcgtgcggttttcagatgatcgactgaaaatgatttccatcaagcaaagtatgttgatcttttcaagaagtttcctctcattttgtaccaatgcaggctgtgcgctcaaagcaccattgtgagttttgcagagttcttgatacagtgctatattaccagagttgaatgcttgcagcatatgaaaaatccactcagcctgagtccccaaaaggctatggatgattggatgggcaagcagctccccgaagttgtaaatgttttcacccagtaaagcagaaagtgagaggtcgaatgccaggttctgtttgaatggttctgaaagtgactccactgttgtatatgcaagataaagaagagcgctcttgtagaattcacagtaatcttgatgggccttgtgatactgagaagacacccagtaataggtaccatgtaccgaaggatcaacatcaaccatgctatccaaagttgttttaccctcttctagcagtttcttacaccccttttgattccccttctcaagaagaaacgttgcaatctgcatcttcacatacagaatgggctcttcaacccgtgcttcccgggtatcatgcagctttgaaattacaccttcaagatagtttataccagcatctttgtccagatactggcgtgaaactaccactgtgaagtgagcaaatttcagaagattgatcttggtctcaaaatctgagatgaaatgattatacagctgaatcagggcatctcccgcctggacgacggcgaggccgaggaactggtcgagcttgagggtgagctggtgccaca

SEQ ID NO: 29519 - DNA, 960 bp, Setaria italica
  misc_feature (901)..(960): n is a, c, g, or t
  Peptide Sequence Number=SeqID_95493
tgattcagcggcgccgagctagagagagaaagggggggcgctccccgtcaagtgtccggaacagcctccacgctctaaggatggcaactccggtgttcttgctgctcttgctggccatggcgttcagaggatcagacggggcgtggtgcgtgtgccggtcggacgccacggacacggcgctgcagaagacgctggactacgcgtgcgggcacggcgcggactgcgccgccgtgctcccgaccgggccgtgctacagccccacctcggtgcaagcgcactgctcctacgccgccaacagctacttccagcggaacagccaggccagcggcgccacctgcgacttcggcggcaccgccaacctcaccgacacagaccccagctctggaacctgcaaataccctgcgactccgagcgaagcggggacaagcggcaactctaccggcgccggcgccggcaccggcacgtcgccgccaggctccacaagtaacccggccacgacgcccagcatgggagggaccttcacgacaccggtcggcgcgtctggacccacacccagcttcgtcagcgctgccaccgccgccgcgttcgctggtcgccacgtcctcctcctcgccgtcgtctccgtcctggctttcttggtgcgctagtgacagacttgctggatcactaggcagccgagcagcgtcaggaagcgccatttcctcctctgtaatcctccggggcacacgagggcttcggctattgttcgttcttctgctctcatgtttaatttctcgctggtttaacttattctacttccgccccatgcggccatgcggtccgtggaaatggatcgagtttgattagtaccacttcacatgaagtctagattctgttacgtttacaaaaaaaaaaaaaaaannnnnnnnnnnnnnnnnnnnnnnnnnnnnnnnnnnnnnnnnnnnnnnnnnnnnnnnnnnn

SEQ ID NO: 29520 - DNA, 252 bp, Setaria italica
  Peptide Sequence Number=SeqID_95494
cgccaagcattcatgttcttcctcttgtcactgctgacctgtagatatgcagtggtgtcctctgcaggttcataagatgccaccgccatgctggcttgctgatgctgtgcctgcgcggcttcttcctcagcagtgtggccgacctggatgaccacctcgtcgggctcaggccgcggggggtgatccaatggtggaagcaggcagtggccacttatggctgctctgcagagcgggcagttggcgttgctctgg

SEQ ID NO: 29521 - DNA, 748 bp, Setaria italica
  misc_feature (7)..(7): n is a, c, g, or t
  Peptide Sequence Number=SeqID_95495
gtgcagnggaaatggaaagcactacagacagcaagacgtctgaaagcagcatgcagatggttaccctctgaaaaattcttagctgtgccaagctctttcttgctgtatcttctcctgcactcacaaattcacatcccagattgcaccaaattcgaattcaaccaagctggaagaagagcaccctgcagcaacccggcgctatcttcatcatagtgtgaaggaaacagcatcagaatcctccgacgacggctgcagcgcgctgatcttgatcacgtagttcctctggctcgacgcgctgctgccgcccgagccggagctcgcgcgcaggtcatccgagaaggcgtcgccgtcgctgaggccggagtccctgtcttcgtcctcgtaggcgtcgccgatgcggccgccgcacttgcggcagagcaggcgcgaccgcctcctgaagaggccccacgcgcggctggagcggaagtagggcatgcaggcgacctcgtcggcgagcgtgaagcggccctcgtcgacggcgacgaaggcgacgacgcccttcttgatctgcttgcggtacttggagccgatgcccgccgtgtcccgcgccgaggagctcaggttcagcgcgtagccgcagtacccgcagctgtaggtgacgtccttgacggaggagtagctgtcgagaggcctctccatggcgaggccgaggcgacgctgctgctcgcttcgctggagcatcatccgcttttcccttccttcccgt

SEQ ID NO: 29522 - DNA, 460 bp, Setaria italica
  Peptide Sequence Number=SeqID_95496
ctacatgagctactatatgtaccatgggggaacggaacttcgggaggttttcttcttcatatgtgacaacaaactactatgatggagctcctcttgatgagtatggtttaatatggcaaccaacatggggtcatctcagagaactgcatactgcagtaaaacagtcatcagaaccattactattcgggacatactccaattttctttaggtcaagaacaagaggcacatatttttgaaacagaatcgcaatgtgtggctttcctagtcaactttgatcagcatcagatatcagaggtcgtatttcgtaatatatcattgcaactggcccctaaatcaatcagcattctctcagattgtaagagagtagtttttgaaactgctaaggtaaatgctcagcatgggtcaagaacagctgaagaagtacaatctttcagtgacattaatacttggaaggcattc

SEQ ID NO: 29523 - DNA, 345 bp, Setaria italica
  Peptide Sequence Number=SeqID_95497
ctgtttggcgccggaagcaagacggcagcaattacactccaatgggccatgtcggagctcattaggagcccgaatgtgatgaagaaagtgcaagccgaactaagaaacattcttgatggaaagccaaaagtgaccgaggatgatttgagtgagatgaagtacttgaagcttgttatcaaggagacattaaggttgcatccacctgcaccacttcttatcccaagggagtccagggagtcgtgcaagatcctcgggtacgatgtgccaaaagggaccacggtgcttgtgaacgcgtgggcgatcggcagggatcctaaatattgggaagatgctgacgagtttaag

SEQ ID NO: 29524 - DNA, 250 bp, Setaria italica
  Peptide Sequence Number=SeqID_95498
cagcccgtagttgggcgggcagaagttggtggcggtgacggtgaccgtgacgccgggcttgcagaacaacgggttcgccctcttgcggtcgcaggcgatcttgtagcactgcccgcacgaagcaccatcgttgaacagagctgcactgagcgccgccgtgcgcgtgccgtagccctgcgagtagagattcccgtacccgcaagcgccgcccatggtgccggaggcgtcagcgccgccgtagaacgtggca

SEQ ID NO: 29525 - DNA, 248 bp, Setaria italica
  Peptide Sequence Number=SeqID_95499
tagcacttgtcgcacttccacttcttctcgccgtgcttccggcagaagtgcttcttgattccggtgaggtcgccgagggcgcgcgacgggttgtggtggacgcagctggtctccgggcacacgtacacgcgcttccgggggggctccttgccgctgcgctgccggagcttccatggcaggttgtggccccgccggtgcagctgcaggttctggtcgcgctggaagcccttgccgcagatctcgcacac

SEQ ID NO: 29526 - DNA, 906 bp, Setaria italica
  Peptide Sequence Number=SeqID_95500
attaatacaagttttaagatggtgcatatcgtttgtcaaacctagcaaatactgttgctaccaacctattaaaaatggagcgaggaacttttacatgacacaacaaaaaaccgcctttggttcaaagtacatgtcgtttaggacattggcattgtcttcaaggtgaaattttgaccaacaatttctataaaaatatgaccttcaaagaaaggtaattaaatgtttgaaaagtagtttccatgatgaatctagtaacatttatcttacattgtaaatatatgtaatatatatcgatagtcaaagttagttaagcaggaactctaaaacgtcatttattttgaatctgagggagtacataaaacctctttagctcatataggctttggttgactttggctcctttggtaacccctaattctgatgaagcccttgaagtttgctggttgtcctctagatggtttgtgcaatcttgtcattattatgctgctcaagcattcgtatcttgagcatatagagtgcataacgatcctctgatgtaaaacatacatcccaagtgaaacacaactaaatttgatcaagtaaatggactaaatttggcactatcacagtcttacagacgttaacaaatttcagaaaaatcacggtacccaaagttgatttgcaccatggttgtttaattgtctggacacttacactactcttcaccatgacctgtcatcccagtaagtagcccgaccacctagtctagactctgtagttctctacacgtaggacaaagtacattccttcgcttctggactccaagagagccactgcttcaccaccaacatatggaggttgggcaattatggttacggagcgaaactgttgttgtgtctaggtttttttcttaagtttatttctact

SEQ ID NO: 29527 - DNA, 332 bp, Setaria italica
  Peptide Sequence Number=SeqID_95501
gtggggagcgtagcggaggcgaggcactgcagatggggctagacggagcgtcgggcaggtggccagggcaccattggcggcggcgtcattggcggaggagggcggcggctctgcaggcgagctcggggccattgggcgggcaaaaccgagcgtgtagaggcgattttgccgcgcggagcgattggcaaggctgggcgtcgagacatcctgtcctggccggcgtttgggcgaaggcggcggtggctggtgcctggcaggtgcggcagggcgcgtcattgggtagtgaagatgcttggccggaggggaggatagggtcggcgttgggttgggca

SEQ ID NO: 29528 - DNA, 172 bp, Setaria italica
  Peptide Sequence Number=SeqID_95502
gccgagaaccagtacgggagcatcgcccccaccagcaggcccacgaacaccttggggttcagcacgttcacgtccgccacccccgcgcggctcacgaacgcgccgaacagcgccagcgataccagcgccgccgatccgatggcgaagcccttgccgatggccgccgtggtgt

SEQ ID NO: 29529 - DNA, 1077 bp, Setaria italica
  misc_feature (1)..(12): n is a, c, g, or t
  Peptide Sequence Number=SeqID_95503
nnnnnnnnnnnnttttttttgttttgaaagacagaacacgaacaagtctacaagtctggcagtctggaattactggaactaggcaccaatgccattcacttgttacacgcaaggttgcaagctaacacgacgagtcttttattattaccgatcgccgcaaggtcaagccagcggcgccatcgccgcccaagctagagctaggggcggcggcatgcatggtctcatctggccgagacagatcagaggcggtcgaagacgatgccgccgtgcgccgcgaagaagggcgcgaagacgagggactccacggccatgagcttgatcaggatgttgagggacgggccggaggtgtccttgagcgggtcccccgatggtgtccccgatcaccgccgccttgtgcgcctccgaccccttgggccccagcgacctcgcctcctccgacacgccggcctcgatgtacttcttggcgttgtcccacgcgccgccgctgttggaggcggagatggccacctggacgccggagacgagcgcgccggcgaggagccccgccagcgtctccacgccgaacagcgtcccgaccacgagcgggctgagcatgacgagcgcgcccggcgccatcatcttgcggagcgaggcatcggtggagatcctgacacaggtggcgtagtccggcgacgccatgccctcggcgagccccgggatggtgtcgaactggcgccgcacctcctccaccatccgcagcgcggcgctgcccacgctccgcatcgtcatcgccgagaaccagtaggggagcatggcaccggcgaggagccccacgaacacgcgcgggctcagcacgtccaccgcgtcgatcccggcgcggctcacgaacgcgccgaacagcgccagcgacaccagcgccgcggacccgatggcgaaccccttgccgatcgccgccgtcgtgttccccgcggcgtccagcgcgtcggtcctctgccggatcctgcggctcatgccggccatctcggcgatcccaccggcgttgtcgctgatggggccgtaggcgtcgatggccagcccggtggcgacagtgctcagcat

SEQ ID NO: 29530 - DNA, 337 bp, Setaria italica
  Peptide Sequence Number=SeqID_95504
aaaactagcattcacatgaacctgctcttttattcaatagtgggagccattggccttattggcctcatcctactactaatcatgcatagagcttgggacggcggtattgtgggatttgcaatggcatgctcaaatacctttggattggtgactggtgcttttcttcttggctttgggttgagcgaaatcccaagaaacatttggaaaaatgcagactggtctcaccgccaaaaagtactttctcatagagttgccaagatggctgtaaagcttgatagtgcccatcaagaatattcaaatgctaatgttgttgctcaagccacttcaaatcaaatgt

SEQ ID NO: 29531 - DNA, 390 bp, Setaria italica
  Peptide Sequence Number=SeqID_95505
gtctacgctagaggcggccaaggcggagatgggcgaggtgagggaggagaacgagcgcctcaagacgatgctgtcccgcatcgtcaaccagtaccagtcgctgcacatgcacttcctcgacgtcgtcaaggtgcacgagcaagaagctgccaaggctaagctcccggcggcgccggcgccggcgcccggagccgatggcgtcgacgaagaccccgacgatctcgtctccctgagcctcggcacgaggtccaacggcgcccgccgcaagggccacgagaggtcctcgtcctcgtccggcaccgccgagaccaccgccggcgaaggccagctctccctcgggctcggcatcgcgcggggcagcggggtgcccgccgacgacgacaaggcgag

SEQ ID NO: 29532 - DNA, 701 bp, Setaria italica
  Peptide Sequence Number=SeqID_95506
ttttccgttggtaattattgtactactaattcaggttgctggtttcagtataatacatctctgatgcagcctcaaaggacctgaagctcatgttcaattgcagtgaaatcgaacccactccaatcaagttctgcatccagattgaaagctgggtccttcattggaagaggcaggtggctaatgtcagccaggccaatatagtcatcatcgagaggcttgtgcactgcaccaataaaatcactgattgggaatgcatcttccagcctggtgaaatcatcaagtggaagttcatcagccaggctgacggagtcaccgacaggagtctcatctatccgtcctagcaagacatctactgaaatctccttaggtgtggagaagttcagtaagatttcatccacaggctctgggtctatttccatgaacactcccttctgcactcgtgctgtctgctcgcatggggcagatgaagatacacaggacactgaagagcttgacaaagctgcacgttctgatacagactcttgagctttttttggctaacacctctgcgtggatctgatttgcatatgcctgatatgctgctgctgcagcctcctcagagtcatatgagccaatccatttttcgggtttttctcacaggatcgcgaatctcagctcgcccaaccgccccagggtcgcttacgcacaccacgaacctgctt

SEQ ID NO: 29533 - DNA, 783 bp, Setaria italica
  Peptide Sequence Number=SeqID_95507
ggactgtagacatgcacagatgatgaatacaggatcagctctgaaattagaatatgtacatattgctgaaagtttgttgcatattagcacacgcaggcaagttactctacggactgtacagttcccgacaaaatttggaggtcaatctgtttctagattccatcaatatggacagagtcatccactgacagactgaaatctgaacccattccagcattaagagtttcagacaacttggagcaggtttctgcagaatgcagcaccatcaagagcaggttttcgcagattagaacaccacgagcaggtttcattgcaacctcacagtaactcgagttcatgttccattgaagcgaagtcgaacccactccaatcaagctctgcatccaggtcgaattctgggtccttgatgggaagaggcaggtggctaatgtcagccaggccaatatagtcatcatccagaggtttgtatgtagcggtaataaaatctccgactgtgaacatatcttctggcctggtgaaaccatcaggtgggaattcatcagccgggctgtcagagtcactggcttgatgctcatctttcgggtttagcatgacatcctctgaaatctcaagagctttgggggagaaattcagtaagctttcatccataggctcacggtgcatctccattaatggtcctactctgttctgagcttcttgtgccttctgctcgcatgatacagatgaagaaacgcaggaaaccaaggatgagttggaggctgcatgttctgacatgggcggctc

SEQ ID NO: 29534 - DNA, 505 bp, Setaria italica
  Peptide Sequence Number=SeqID_95508
tattgtgggagctctgccgaatgggtcggacggaaggaagggctccgggattggccagcctcaggagaacaacatgggggatctgtatccttggaccttcaccattgcaaacagcactgcagaacagctggccgagcttctggtgtcggaggaggtgccaagacataggcagggtgcgatgatggcagagaagagggatcgaggcgttgggaccgagcagcctggcccggtgctcgagcaaaaagtctcttttggaagagggaagggaaaagttgatgctgctgggagagctgaaaccaatgaacagggtcattccagggataaaaatctggttccagaaaaagaggagaacatgaatggctgcacagttaaaacagtgcttccattctctgcagaaaacccgtcatctagttacaatagtgcacaccatgaaaatgatcggaaagaagtgaagaagagcattaatgcagatggtgttgcaaaatcagtgaaaggacagcttgat

SEQ ID NO: 29535 - DNA, 449 bp, Setaria italica
  Peptide Sequence Number=SeqID_95509
tagccaagcacttgctctcgccgatgcacttttgagatgtgtagcttttacgagtgacgattgggaaattgcagattcaaccttgcaattttggtgcactttggcacattttattcttggtattgatgtgaagacagccaaaagaaatgcggcacaagagttgtttttgcctgtgttttcttcactgctagatgctcttttatttcgtgctcagattgacactgatgagcgtggcactgatggagcaacttgtatgcctgatggactagcacagttcagaatgaatttggaggagcttcttgtagatatttgtttgcttctaggtgcccctgcatatataaacaagctcttttctcatggatgggacttctcaagccaatcagttccttggaaggaggtagaagttaggatgtatgcacttagcatggttgctgatacaattttacaag

SEQ ID NO: 29536 - DNA, 526 bp, Setaria italica
  Peptide Sequence Number=SeqID_95510
gaaccaacagtccagtgggtgtgaggatgatgcccggagtaccctgacgtcaaacagatccgtgacagatgacctgacaaggacgtgcaggtcggaaactaactactcaaagggtgtcagtgagcagggtcgtttcgatagcatccaagagcctgacctacaaccgaattgcttctcacgaacgctcaagcttcaaaagaagctattgtcgtctggtgcagcacacacaatctgtttgaggatccagccacataacaaaatggatttcctacctaagaaagaatttgatacatacttctgtgcgtatgagccttacgagcagtgttcaagatcaacttcacgggctacttacagttcaagggatgatgacttgtggagcaagaattcacggtttggttcgaatctactctgctggagggccccaaaacaatccatgtaacagagtaaaggatgagcagactagacggaacacatcaagtgatcaattttgcccgaagctggagacatggacatctgaggtggctaa

SEQ ID NO: 29537 - DNA, 942 bp, Setaria italica
  Peptide Sequence Number=SeqID_95511
catgagggttgacgagaaagcgatgaaggcaaggtttgaggactggatgaaggagtatgacaaaacttcaaagagtgaggaagagaaggttaggaggtatgaaatatttaagaagaatgccatccatgctgacaaggttaatgcagcattcccaaatggtccccaccatgcacctaacaatcttggagactggacagaggcagagctctatagtctgcgcagccgtcagggtgactttccctgggagacctactttcgtagactgagcaaggcgtatgctgagggtagggtggacggcgttccaggaatcgtagatgcacatgatgaggaggtgcagtgcacagaggctgtgaagcagaggtttaaggaactaacagcaaggaaggctaaacaagacgcaagggaggctgaacaagcagcagcgaagtcccaacaagatgcaagggaggccaaacaagcagcaacgaagtcccaacaagacgcaagggaggctgaaccaacagcaacgaagtcctagtgagttcagacaatctctagctagggcgaagatgtaagttaaaacccccttggtccccaacccaacccaacccactcacccaaaaatacttccaatctccaaggttacatgtttgagcatgcttataaaacatccagaccagtcgattagcattggagttgcaggatgaggttcagttacataaagttgcttctattatcatcatcgatattcaactgcgacatgtgtctgctccacttatcttttatttccttttgagattgtactaatattcttgctgatatagtataaatatgtgcaactggatttttttagtttattttaattctagactgagataaactggattctaaaattgtatgtttctatctccaattgttggtgatggacgcagtcctatcgtcaggcaaagttgtcctaactaa

SEQ ID NO: 29538 - DNA, 533 bp, Setaria italica
  Peptide Sequence Number=SeqID_95512
ggtaaaaacctccctatatatcagctcaaaagtatcggcctatttttttagtagaatgggcacactagctagctgactaattaaactgcttgactacaataatcttttttcttttgattcttttttccccttgtattttctttttcgagggatcagcagttaaccagaatttcatattacatattcattgttggataatacttagatccttcacagtctctgttcaatggaagcgcctaccaacaagcaatgaaccgcctcctcctcgggcttatcactccatgacttccatagggtctcaatttcttttatttggtggctttgatggaaagaacacgtttggcgatctgtggtggcttgttcctgaagatgatcctattgcgaaacgaggtttagcccctaacattgattcaaatagcagacctagcactacgactggtgatgcccagcaacccaacttaaaggtacatgcttgcatgtgtgggagttcattgtgaaagtttcaggtgacagaaaagtctgcaattgctaaa

SEQ ID NO: 29539 - DNA, 1481 bp, Setaria italica
  Peptide Sequence Number=SeqID_95513
agacaccgacctatggcagtggtcggagatgactggctttggtgatttgccatcaccacgggagtttgctgctgcttcggccataggaaatagaaaaattgttatgtatggtggttgggatggaaaaaattggctttcagatgtatacatcatggacacaatgtcactggagtggacagaattagcagttaccggatccgtgccgcctccaagatgtgggcattctgcaaccatgattgagaagagactgcttatatttggaggcagaggtggagcagggctgataatgggtgatttatgggctttaaagggtgttactgaagaagacaatgagacaccaggttggacacaattgaagcttccagggcaatctccctcaccacgatgcggccattcagtaacatctggtggaccttatctcttgctatttggaggacatggaactggcggttggctaagtagatatgatgtgtactacaatgaatgcattattttagacagggtctctgttcaagcgtgatgcatccaatctgtgtgctagaaatgtggcatgcttgtacaccactggttgttaaggtgcagttatccaattagtctctgttcaatggaagcgcctaccaacaagcaatgaaccgcctcctcctcgggcttatcactccatgacttccatagggtctcaatttcttttatttggtggctttgatggaaagaacacgtttggcgatctgtggtggcttgttcctgaagatgatcctattgcgaaacgaggtttagctcctaacattgattcaaatagcagacctagcactacgactggtgatgcccagcaacccaacttaaaggagtcacaagctgtggtatctccaataatagaattggccaaacgactgggaattccgctttctgaggaagtttcaataagttctgttgatgaaatggatgataaagaacttgtggaattgtcctctaggcttgctggtcaatcgcttccagctagtgaccaggtggcatcaattcaggtacttcgtgatcattggaaaagttctccagcaagctcactacaactgcaggagctaggacctttgctgagggactatcagcgtctcatcctccggcgctattcgggaaatcaatcagcagcatttcatgaaatggaagctctccgtttcttccatttgaaaagtgcttcacagttgcgcatggatgacattcccatcttgttgcgcgagtatggaaggctgctttcaacatgagatgtcatcttacctttttgctttgttcgaactgaacatttgaaacttccgaagaaggcaatgtaaatcttgctgcatatgtgccatcttactcgacttttgggtagcatgatggctgaggtaccaattcttatatttttgtaaatctgtttgaataaaagaaagactgctatgtataataataatagactagctcagttgatgatgacgccagcagaactaacagtg

SEQ ID NO: 29540 - DNA, 366 bp, Setaria italica
  Peptide Sequence Number=SeqID_95514
attctacgtttcagatttacaaacaccagatgtaaaaggaatcacgaatcagaaaagagaagatctgcacatcttcactcggtattatttgcatcagtgatgttgaagtaaacatataagcaaagcagcactggcgttcagagaagcaagcacggaagccatgtactttgttagatggactggagtagcggacctgaatgccgatgggtcagcggacggtagcaaggcttggagccagatccaggcttcgagcaactcgccgccctgctctccctttcgctgcgccggtcggtggacggagcaacggagacggaagcagctgctgccgtcgagcctttccgcttcttcggtcgttctattcgtcgt

SEQ ID NO: 29541 - DNA, 1010 bp, Setaria italica
  Peptide Sequence Number=SeqID_95515
ctgccgccctccctgctcgccgccctggccttctccatccacgcggcggcgttgcgcctgtactcgccgctcctctcgccgcccatcacctcctcgacgcccctggccacttcgcccctccgcacgagcccgtcggccgcggccggccgcacccgcacgccggcgcgccacgcggactccacgtaccaggcgttcatgggctggtccgtccactgcggcacggccaccatcggcacgccggccaccagcgcctcgaccgtcgagttccacccgcagtgggtcaggaagcaccccacggcgcggtgcgccagtacctccagctgcgggcaccacgacaccaccatcccgccgtgccggccgcaggcgtccccgaagccggcggggagcttgtgggactccgacgagcggacggcccagaggaacggccggccggcgtcgaggaggccgctcgcgacctcccgcatctccagcgggtcgaggtcggacaggctgccgaaggaggcgtacaccacggagcgcggcgggtgcgcgtccagccaggcgacgcacggcgcggcggtcagctcgaagaggtggaggccgtacttggtgtcggacggtaggcggtcgtcgccgaggtaggacgccggcaccgttggcccgatcgtcttggcgcgccacgccgacgccatgtactccgcctcctcgggctccagctcgtagaacgagttgacgagcacgtcgtcggcttcctccaggccctggaactggcgcatcaccagctcgaagtaggccgggtacgggccgggcccgaccctgaggaaccacggcaggccctccggctcgagcgccggcagccctggcaggcggacagtcccatccccctccaccggcaccggcacgcccacccggcggcaccacacgtggccgtaggtcacgttgacggcgcacggctgcgtgaagaaggccgcggcggcggcgccgtggcgccgggccacgccgcgggcccacggcaaggaaacgcgtacgta

SEQ ID NO: 29542 - DNA, 659 bp, Setaria italica
  Peptide Sequence Number=SeqID_95516
gtgtcctgatgacaagtgccgtggtgatgttcctctcatctgttgaagagattgctaggggatgcagattttgaacgatgggaagattgatacttcagaagactctagactcaatggctgatgctgcttactgtccaagatgtgaaacaatttgcctggaagacgaggagaacaatgctcagtgctccaagtgcttcttcagcttctgcacccactgcagattacgctgtcacataggcgagggatgcgtgagcataactccagaagaaaagctcctctccttaagggaacgtgaaaaggtgcgtcgattaagcaaaggtgacattgagaagacaatttccttggcaaaagaaatactcagcatcaaggaagtgctctgtctttgtgttcaatgcccttactgtggcactggcatctcacgcgtgtcaggttgcaaccatatggtttgtgggaactgtgggcagccgttctgctatggctgtggggtggcaggctgcggtggctgtagcagtagcacggcgagaaatgacccggggaaggtgaagaagctcgatgttactcctttgttgacagcacagattgatgctgttgaagggacacggaaagaaccaacaataatgaggtccagaaaatatccatgcctgaagagacaagttgac

SEQ ID NO: 29543 - DNA, 281 bp, Setaria italica
  Peptide Sequence Number=SeqID_95517
gtaaaaactagtaatagtttggtttgatagtttttagtggtcagtggtgctgatttttcataatatgagttgtactgcagaagtttatactttctgtctgagcatctatcattgattcattgttgctatgctatgtttgttgggcacgccttgaatagtctctgcgcttaaatgctgtgaacctattgtatacttcgtttcgttgcaaataaagcgggggaggcctttccctaaaaaaaaatccattggtgctatgctcatgtgctttatattgctaatga

SEQ ID NO: 29544 - DNA, 345 bp, Setaria italica
  Peptide Sequence Number=SeqID_95518
cagaaattgatgaagctcttatctataagagaggagcgtccacaagcaaggctcgctgtgtgtgtgcttcttctgcccggctagctgtttgtagtgcttattgcagcaaaatatacagcttatatatggaacctgctgcggcatggggaccttgcgagtttcagctggcgaactggaccattgaagaacctgctgttgatgaagtttgggctcctgctgccagcctccctgtggagtatgcgtccatcgacatatttcctgatatctggagcctccagtcatatgtccctagtagctctagtggtggtcagcatcggcaggttgtgtacaactcctatgctgcag

SEQ ID NO: 29545 - DNA, 352 bp, Setaria italica
  Peptide Sequence Number=SeqID_95519
ggggcgaaggcctggcccatgagggagtggccgcggccgcggaacgcgacggtgtacggccaccccggggtggagtacgccgcgcccaggagcgcggcgagatcgcccggggacgccgggtagagcaccgccgccgggagcgccgacgtgatgttgccgaagtccatcgacgccggcacggtggcgttgctgtcggtacggagcttgccctccttcgcgagcttggcgagggaggccggccagggacgatcgccggacgttgcctgtgcatggcaggaggcgattagcgcggctagcagcaggtaaaccaccgccattagcgacgttcacagagcttaatccgcgagacaag

SEQ ID NO: 29546 - DNA, 450 bp, Setaria italica
  Peptide Sequence Number=SeqID_95520
ggtcctcgtagagcgagttggtggcgacgaacgacgcggggccccaggacgaggagtcggtggaggtggccgtggtgccgctgcgcccgcccgcggtggtggccgtgaacgccgtggtggtggaggtggaggaggcgttcggggacttgggcttgcccccgccgcggaacagggacgacgtcgaggaggagaggacggagaacagcttcgggcggcggcagttgcagccgatgtccaccaccggcggctgccgcagcgtgaagctgccgctcctgcccctcctggacgacctgctcgacatgctagccgttgccgtcgctggctggaagcctggaagtggagtctgcgtgtacgtgcccgcgcttggacacgcgcgcacacacaaagagagaagcgcgctgctggctagccgaggctacgacgagctctcgggtacagtgggcggtttgt

SEQ ID NO: 29547 - DNA, 510 bp, Setaria italica
  Peptide Sequence Number=SeqID_95521
cggtgatcatggcagctgcgctcgctggtggcagcgagtccaatgggaacttggaggcacggccagctgccccacccccgattggcagatcgctgttgaggatgctctcgacgtcgtagcggctcatgtcaaagttggtcacggcgttgagcccgcggaacttgatcgccgcgatgtcgtacgcctctgctgcctcctcctgagtgctgaaagtgcccaagtacaggtccttgtttccggccaccctgccgatccttgcctgccaccggccgtgctgatgatgccgtgtgactcctctgtagatggaggcacctcgcgagaagccgctgctcttcctgcggagcgacgcgatgaactcctgccgcgtcatcgacttcatctcctccaactccttctcgtagtttgacaccgggaagttcgtcgtcgttgtcggaccccagtacttgagtgcggcgaggtcataagctctcgccgccttctcctccttatcataacctcctacatttttcc

SEQ ID NO: 29548 - DNA, 397 bp, Setaria italica
  Peptide Sequence Number=SeqID_95522
tgacaccatcaatagagattatgcctacattcgaattttttgccgccaactgcatacatttgcttgaaatttcaccattctcaagtttcacaacttcatattcttcaagcagtatcagttgagactggtcaccttgtgtgctggtcgtagtttcttgtgtatctctagttatgtacacctctttgtcaatatcttctagtaattgaagaggagttgacggcaatgtcatcagtaagttggatgggtctccttcctcctttgccactacatgggcatcagcatggagacctaatccttctgcagtatttaccttatcatcttcttctaaattttcctttactgtctctttattgaactctactgttccatttactccattgacttctctttgtacctt

SEQ ID NO: 29549 - DNA, 426 bp, Setaria italica
  Peptide Sequence Number=SeqID_95523
gacgcagcgtgagacgagaggggactggggagagagctaagctagcactctccggcaagtctctcggctgggaaggaaagaccaggcagagggcgatcaaaaggaggccggccgggtagcagctagccagagacgcctagctgctgtagccaccgtgagcttcgggagctagcgcgtcaaggccttcagggtagaagagcttttacccgcgacgctagcaccagctagcgttcgtccgagggagagagagcaaggggaaataactagcaagcagcgaggcgggagcaagcaaggcaaggggagtgggagggaaatggtgggctcgggcgcggctgggggcggcggggatcacgcgcggagcaaagaggccgcggggatgatggcgctccacgaggccctccgcaacgtctgcctcagctcggactg

SEQ ID NO: 29550 - DNA, 1685 bp, Setaria italica
  misc_feature (1685)..(1685): n is a, c, g, or t
  Peptide Sequence Number=SeqID_95524
aggattgtagatagaattcgtgacaagggaggcattcattgatttctgggtgaatagcaacttgatgagtttggatagtgcaacccaagtgttcacaattctgaagcaacagaatcgcaattacctcatgaaggaggatttcaagccggttcttaaagaccttttggacaaccatcctggtctagagttcttaaagagtacacctgaatttcaagaaagatatgctgagactgtagtacataggatattctattgcttgaatcgaattggaggtggtcacctaacacttagggagctgaagcgtggaaatctactcagtgcgctcaggcatgctgatgatgaagaagatatcaataaagttttaaggtatttctcatatgagcatttctacgtgatatattgcaagttctgggagctggacacagaccatgatttcttgattgataaagaaaatcttattaagtatggaaaccatgcattgacatataggattgtagatagaattttctcagaggttcctaggaaatttacaagcaaggctgaaggaaaaatggggtatgaagattttgtccattttatactgtctgaagaggacaaatcaacagggccaagccaggaatattggtttaaatgtatagatctggatggcaatggcatactcacacacaacgaactgcagttcttttttgaggaacaactccatcgcatggaatgcatggctcaggaaccggttctatttgaggacatcttgtgtcagctcatcgacatgattggacctgagaatgagagctatttgacattgaaagacttccgaaggtgcaaattgtctgggcatttcttcaacattctctttaatctgaacaaatttatggcttttgaagctagggacccattcctcattcgccaaatgcgtgaagagccatcattaacagattgggatcgttttgcacgaagagaatatgtaagattggcgatggaagaagatggtgaagatgcttccaatgcaagtggagatgtttgggatgagtcacttgaatctcctttctagattgaatatgttgtggcattttggaagacatcagatcattcacatacaggcatacagctctaataatctcaaggtgaaaccatgaaggcagtcaaacatggacagttatctgatatcttatttctacagaagctataaatgaggcagctgcgcacttgctggcaccatccaagttttgacatagaagctgagacaaatagttccatctagcttgttgtggagtacatttggttcttggtgactgttgtttgtagcagcacccatgttggtctagtatctctgctatgcttcggttgattgattcatggcagcaacaagtgcacagcacctggtgattattatgagagcacatcaaaatctagtgacaaataaggagaagagcatgggtcaatcgccgtatgttagatcgtgaatagttggcaccacaatttttattatctagggtttttattaggtatctatcaaagattcaaagtattctttcgttgttaaataaggtcaccaagaagaccatttttacttgtgtactctgtatctttttgtttagtttgtagtcacatgaacaatgagctgtaatactatgatacagggattatcattatttttctaacgcacaaaaaaaaaaaaaactaaaaan

SEQ ID NO: 29551 - DNA, 644 bp, Setaria italica
  Peptide Sequence Number=SeqID_95525
gtcagccacggacctggattctagcctgtgataaccggtgtcacggttaccgtacataatgccaacccccatcttgaaatgcaacgcatggcgaaagattcaggcttccagcgcatttgatgccctttggcagtggcacgctccaaagtcatcacctcccaattcgaggaactgctgtgtttagttctgtataagccaggctcctgccacccagaagatgatttcgtcgcgcttggtagcaaggtgacaatcacacggaagaaacattttgatcaagggagcttggcattcatgatggttggcaggaaaaggtaaccatggtttccaggtgatcaaagggatacaattaggcagtagctgcattggttgtgcggtatgactgtatgagtgatatgtacaaccatcacttgccaccgaaagtaatactctcacaaaggaactcaagacactgctttgtatttgccaatctagggaatatatgtgatgatgatttggaactgaaggccaatcatggcaatatatgtgatggttaaaaatctgtgtcgcttcgtgtatccttgtatgttgagtggttcatcttctagcacagtagcacttgcgcaaactgcttctttaaggacatccttttttccttaatccccatg

SEQ ID NO: 29552 - DNA, 272 bp, Setaria italica
  Peptide Sequence Number=SeqID_95526
agaagttggtgacagaagatcctgttggaagagctgtatatgaaatgcttgcatctccttcaggagattatcaaaaaccagtgcacaaatgcctgaactctgatgaaagcatgatagacgcaataaggtatagctcccaaggagacaccgccccttattccgatacagatcagctcaccaaaattagaaccactcagttgcataaccggacagagtggcctgctcctacccagccatctgagtcaaatgaagcaggagctcgcattttgtgg

SEQ ID NO: 29553 - DNA, 396 bp, Setaria italica
  Peptide Sequence Number=SeqID_95527
gaagaaatccagaaactcctgtgaatgaaacagacgcccagtagtgcttgctggtgacattccaccctccttcatacattctcagatggcggagaacatcaggccgccgcgtccggtcctctgccagaaccagcggatacttcgcgagaggggccatagctgccggtcccgccgctgcggctggcatccctctcagcagcccctttgcccatggccccaagtttttcacctctaaaataagacagatattttcatgaattgcaaccctttacaaccagcatggttatatatttgccaagaactgaggtttaaagtgcccacttgcttacacgatacggaaggcagaaagtgatcgatactgcgcataaataaattacgaagatctagactaatttt

SEQ ID NO: 29554 - DNA, 1777 bp, Setaria italica
  Peptide Sequence Number=SeqID_95528
tttttttagactaacctactaaatacaacttaatcccatcgttcttacttcttacaatgatatatcatcatagcatcagcaattcaacatacaacataaggaagcctgcattccacctaactctccactgcaaaatggggctctttgccccgcagtgcttctgtctccttacttctcctaaatattcccggaaccctgctataccgatactattttacatagccatggaactgtactaaatcctggtttaccatgggcgtaagcgctctcacccacttactgtagaggagagctgtctactggtgtgatcctcgaccctgacgccaggtcggacacctcctccctttgggggcggtccgcaaagagcatccagacgaggtggagaacaaggcctgaggcgatgagcgccaggcccgtggagactaacccgaggtcgcgctccacaggagggcagtactgcgaggcgatggtgctgaaggtggcgcgcacaaacttgcagtcctggaagttgagcaggacaggagcatagtggtacagtgcgtagcttacatttgcagccaggacaagttgcccgtagatttcgggagtcagggttttgttgcctgagcacaagtcggtgtcttgggtcaagcacgtgtaattctgccatgctgttgttgcattttcgaacgtgacctccctgggcttgcacttacgatcattgaagtttgaatcatatggagaacacaagtaaggcatcaattgcccaggatgcttatgatgtggtcttcggtttgaaagagcagatatagccctattaactatcctcacaagcatcaccacgacttctttgctctggtacaaggtacggtttgttgtactttcatccacacatggaaggatgttgctgagagctgtctctgcttgagggtgctgtgcccattggtccattgcttcgcaggtatcctttgcagcactgtttagtatcaggaaaattcctagaagaataaacagagccgccaccattatacagcaaaaggtaacaaatatgtaaactgtatatcttggtccatatagctctagcacgtatccaaggaatgcaagaactggtaacagcacagctatgcaaatcaatataacagacatgatatggagaacttttcttatccttatgtagttttctgctgtcttctgagatatcgtatcagctgctttatttaagtccccctttaaattgtcaatttgaccttgaacatctggtggaagatacagtgctgcaactgtgattgtctttgcaaatgacaagtattctgtaacattccgtagcgactgaatggtgaaatcagattggtttacaacaaaatccacggtccgtgtagtttcttcatggaatttactctgtccatacagaaggacaatgcacccagctattaaagtaagcgcaaagaccacgagcaacacagggcgtactacatctgcatgagaaaccttttctttggccattcttgatcgaaaatagcatcgtccaactgcggccatcccaaaaaagatgaaccacaaggcagcaagaagaaatccagaaactcctgtgaatgaaacagacgcccagtagtgcttgctggtgacattccaccctccttcatacattctcagatggcggagaacatcaggccgccgcgtccggtcctctgccaggcggatgcgagccatagctgccggtactacaaagaaataaggaacggaaagaaaacaaataacaaaggtaaccgtaaccgtaacgttaaccggttaaccttaa

SEQ ID NO: 29555 - DNA, 359 bp, Setaria italica
  Peptide Sequence Number=SeqID_95529
ggtagctcaaaaaactcatgaaagatcttaacaaacattaatctttgccaagagatatggcaggtacattgcatacacacagacgggcatggcttattgttggaacaagctaggtgtaggcgcaagtatcacccgcattctggacatatatgctggcagtactcgacgcattcgcagttgcaaaggtcacatatacaattcgccgcaaccgtcatcgccatggcaagcatggccagcatcagcacgatggccacggccatcctcttgttcttgagcgccgccatcatcgtttcgaccctcccctgatgatctcacaactgcgtcgtcggatccaatgcaactgcgaccagctgatcgac

SEQ ID NO: 29556 - DNA, 939 bp, Setaria italica
  misc_feature (866)..(939): n is a, c, g, or t
  Peptide Sequence Number=SeqID_95530
ttccaaatcccatctcgacgttctcgagttctcgtcgtctcttccatcgccgctcgccaaatcgacggataccccctacccccaccagccgcagccgccccccggatttcgagaccggcggccgcctaacctctcaccgcccccttcgcctcctcgcagccaccgccggaatccttcaagaaggttacctcgggctctcgcgcccagcctcatccgaagttcgatgtccttttgtgcccgatggatccgcaccccctgaccggccccgccgcgtccgacgccgacgactgggataatgatgactttgtgatcccaagcttcagtgttgaagaatccaatctcggtgactgggaagctgcacgggcttctgatcctcagccacctccaaaggccactaaggacacagaaaacatctatcttggaccacacggtgcaccaccatcccgagctaagaagccagaggacacttcagctacaactgggttccgtgacaagaacaaagccagggaagctgatcagaaggtgtctggagctggccggaacaacaaaggagacttccatcgccacaatggtggcaaccatgccaaggaccccttcaagagaggtgcttgaccttgtgtccttcacggctcgttccgagtgataccttctgccctgccagcagcttgactgagtgagaaagcctggcgatttatcagtgtactcctgggaattgtttgcccataaactaggagctgcaggaattcctgatcctctggatatgtacgaccagcacgctgctccggaacattgcgtttgctttgatggataagcctcgctgagacaggtggttgaggcgttgctttgcaggtttgaaaaccaaaaannnnnnnnnnnnnnnnnnnnnnnnnnnnnnnnnnnnnnnnnnnnnnnnnnnnnnnnnnnnnnnnnnnnnnnnnn

SEQ ID NO: 29557 - DNA, 810 bp, Setaria italica
  Peptide Sequence Number=SeqID_95531
ttggtattacgctcctagataacatgaacatgcttttactctctttttttaagacctgaatgattctcttattataggtttgtcttgactgtatctgactgtctcacactattttgtggtacaagatatggttggcgaacagctgctgtaattcgagaactcgaggatgaaatagaaatacagaacagtgagaactaccggttccaacaggcaaaattgagtataatacatgatctacttgggaaagtccatgcaaccgtggttagcactgagaaaggacaagtttacagagcattgcttgatgagttgaatgcagaaaggcgacaatgtcaatctgggatgcgagatctgttcaatagctcttttggcgctactttccttacagacactggaagggaatcatcatttgcctatcacattcatcaatatgcagatatttacacgagcaagcttgagaacttcttatcatatgcccctgaatcttggcttcatccacctcatgacataaagatcatgccacacaatgcgaaggtcccagcaagcctgttcagtacctcctagttcattctatccttttccgttggagaaccaagcggcagtacccactatggtttctgtgtgagactatgcgaccggaccttgaactgctgccttcgcttggtttatgaataaagcaccggatgatgcatcaatccagcagaccaagcagcaatttagcagtcattggcctggcaccctggcttgccatggaaatggcagccatgtgagtaggcgactgttttgcctgtatgaggaagcttctatctgccg

SEQ ID NO: 29558 - DNA, 249 bp, Setaria italica
  Peptide Sequence Number=SeqID_95532
agcagattgcaggaaatggccgccacggaaaacgcttaacctggaggcagaggcttcgaatttcactggactcagctcaagggttggagtatcttcacaaggggtgcaacccacctctcattcatagggacgtgaaggcaactaacattctattgaatgcgaaactggaggccaagattgctgacttcggcttgtccaaggttttcaatcatgacgatgaaactcggatatccatgaacactctcgttg

SEQ ID NO: 29559 - DNA, 435 bp, Setaria italica
  Peptide Sequence Number=SeqID_95533
acttcttgattatccggttggcgaacgccctgacgtggtccccagtccgggagtccaggagcagcttctggtccgtgtccagtacacccctcccgtgcatcaggttcttgtagtactggttgtcgaacgccgtcggcgtctcgccgtcgagctccacgtactcgccgtcgccgccggcgccgcacttgcgccgcaggaagtcgccgtaccggcggtccaggagcgccggcttgtccttgcgcttgcacaggccgggcttcaccgcgccgcacgtggcacgcccgatcgtgtgggcgccggagaggacgacgaggtcgaagatggtgaggcctttggactcgaagaacctgacgaggtcggtgacgctcttgccgcccatgggcgacgtggaggtcggcctcggcggcgatcgagttcttgccgtccctgcgcccg

SEQ ID NO: 29560 - DNA, 263 bp, Setaria italica
  Peptide Sequence Number=SeqID_95534
gaccaaccaaaagcctctccccctgccttctccgctgacgagaccccatggccggctccaccgcggtgctggccgccatcctgctcgtcgacctcgccgccttcggcctcgccatcggcgccgtgcagagccacccctcggcaaggctggagacggacgagcggaaggagtggacatactgcgtgtaccgcccggacgcggccacggcgctgggcggcgtcgcgctcgcgctgctgctcgtgggccaggcggtggccgttgtt

SEQ ID NO: 29561 - DNA, 516 bp, Setaria italica
  Peptide Sequence Number=SeqID_95535
gggcggtgtatgagagcatcatggacggatcaagattcaagaacagtagcagatggattcagtttcttgggttctttctgacttgattaattaccctcatgtataggttggcaaggatgatggttcaattctttactactagctctttctacccattaatttgtaaatgaattctagatagtaggaatttgaatcagcagagccgtagccccagaaaacttgaggtggcagatactggaggatggaacaatcaaacttttcagaaattctttgcaacaaaataccatagcagtaatatttaaaagttgatttgcaaaggtcatgttcaatttgctgcaagaattggtgctcctgctttctttcattttcctcctcccaagccagcttttgtttgttggagaattgaatggcagtggcagcccttttgatccccccaaaggacaaaaggcagggggatagggaaggatagaaagagaccgccatcaccgccatggaaaggagaaccaaagcgtgtgg

SEQ ID NO: 29562 - DNA, 860 bp, Setaria italica
  Peptide Sequence Number=SeqID_95536
cacggcctggcctagtaaacttccctctccaaccttttccctggctgcatccaattccttcttttcattgtcaccgccatcaaatacgcaacaagagaaggcaaccatatcctcttcaaagcggagatgcactgctacgtacttcccattgttttcggcacttttttctctcattcgagaaactaaagtgttagatagagctgtgattgatttagaaaattttaaggcttcaaaatttgctagacatctcagacgttgaacagccggaggggcatcaaacgacagccgatttgcaaaaggcgatatccttatgagcctttcttcaatcaacttagggagaacagcatcttcatagaactggataggagaccaagcctttatcttgaaattaaatgcattactcaaattgtgaccaaaccgctccattatgaactcaggcaccttgttaaccacccggacatcattttttttaaaatgtttggataaaagtgatcttcatcataaatatcaccaaacttgctgtgtaaaaaacatagatgtaagtagctaacttgtgctgtagtaagcaaaaaaaaaagtgccattaattagatattttaatcattttaactgttaacaggttttaatgcactgaaattatgaccatttcggggagaaaaaagatacaggacgtgacaataaagtacatagacctgtctgatgataaactcaagactaaccaaaggtcttgatgcaatgaagaatacatagagttaataaaaggacacataaaaatttgagcgagtgtgagagacctaggatccatccagatgctgtgatagtggaagtttgggattacaagagttgcattcagaaaaccg

SEQ ID NO: 29563 - DNA, 267 bp, Setaria italica
  misc_feature (256)..(256): n is a, c, g, or t
  Peptide Sequence Number=SeqID_95537
tcactgtgcggaaggcggttgaggatctcaatcacaacattacgtagcttgtgctcagcattctctgtggcctgtggcttggtatagttggtaagaatggctgaaaaggctctgaagtagcagcgaagaaagttgaggtagtccggagtgtgcgtcatctccaggctgtcacgaacttccatggcaagctgcagccggacttgcacgagggaggtcgggctcgaggagccgcttcgagtgctgctcatgtggccgntgttgatgggc

SEQ ID NO: 29564 - DNA, 514 bp, Setaria italica
  Peptide Sequence Number=SeqID_95538
gctgcggacccggccgccccgcctcccaaggaggccgagaggcgggccgacgcgccctccaagacgtcggtatcgaccgcggcagcgcccacctccaaggcgacggcggcggccgatgcggccgtggccccgccgccggtggatgacgtggggaatctcgagaggttcctcagcttcaccacgccgtccgtgcccgtgcagtacctgcccaagaccagcatgaggggatggaggattggtgatgttccaaattcaccaccatatttctgccttggtgatctctgggaagctttcaaggagtggagcttttacggtgctggtgtaccccttgtgttaaatggcagcgactctgtgattcagtattatgtgccatacctttctgctatacagctgtatgcagacccttcaaagctttcagcgaggaccaggcatccttgggaggaaagtgatggggaatctatggatactagcagcgaaggtagcagtgaaactgatgtcgaccggttaagaggtt

SEQ ID NO: 29565 - DNA, 1120 bp, Setaria italica
  Peptide Sequence Number=SeqID_95539
ttaggtctacataaggacatcaaataagcatgcacaaaaaaaatacataatgacttgccaaaattccttcttcaatatggcccctcctttttgcttctgcgattttcatagttcataacattttttagttaattttctcgcttacttaatgcagaccttcaaagctttcagcgaggaccaggcatccttgggaggaaagtgatggggaatctatggatactagcagcgaaggtagcagtgaaactgatgtcgaccggttaagaggttctctggaagcaacatgtcgattggagggtggtttccaaagggatgatggtgaaatgcactcgccgtccactcgtccaatatttgagtatctcgaaacggatccaccatttggtagagagcctttaacagacaaggtgtcaattcttgcaagtaaatttcctgatttgaagacattcagaagttgtgatctgctgccaaccagctggatatctgttgcatggtaccccatatacagaatacctactggaccaacactcaaggatctagatgcatgtttcttgacatttcattacctgtcgactccttccaaggatactgatcgtgctgcaccagcatgccctagttttggtgggcttaaccactgtgtgaatgcagctggtaagctaacattgccagtctttgggctggcatcatacaaactgcggagctctatctggtcatcgaataggcctgaggagcagcatcgtgcagcctctctgatgcaggcagcagatgagtggcttcgccaacgccaagtgtaccatccagacttccggttctttctcacccactacaacaattctttgagatgacaagagatgccttgcctcacgctgtaaattgtttttggtatttcctgttgttggctgagccgggctacctgtaacactatgttgttgatcgtgtaacgtagcgcttacatctctgaactctttttttttgatatggttcagtagttcaatgccagacagctaatttgtaatgtctccaataattctttggtgtaggtaaacttttacgtggagaaaaacataatggagacttgtaaaacagaaactgatggttatgaaatttaaatttatagaattgataa

SEQ ID NO: 29566 - DNA, 402 bp, Setaria italica
  Peptide Sequence Number=SeqID_95540
ctcccaacctgagtaggagtcaggacaggtactctaacagaaagtgcccaccgtagttcccgtagacccagtgtgagtagtccagtcagacataccagaagcccaacattttgttgtccagtcaattgacttctttgaccatagccttcttaatgcatccttttcaagtggcccaacttgtgtgccatctttatcaatgtacatccactcttttgaaggttccataaatgcggttgctgcaatgaggttagattgcaaaggaatagctgtccgctcagatgtttcatgcgcaaccgtgagcaaatcaacagccaaaacacagcctccaaccaaaacacatgcttcaacgtttgaaaggtcattcatcaaggcctttaaaagtagtagcagacgatgcctcaa

SEQ ID NO: 29567 - DNA, 119 bp, Setaria italica
  Peptide Sequence Number=SeqID_95541
ttttttttttaggaacgggtaggtagaaacaaaagaaccatatcatcagttacaattgtcttgcaagcaaaagaataacacattaacaactagcacactcctctaccactatgtacaat

SEQ ID NO: 29568 - DNA, 262 bp, Setaria italica
  Peptide Sequence Number=SeqID_95542
ctttagccttttcgatatcagcttgttctagatatgaatttatgtaatgcttaatgagtctggagcgggttagatggacaaggaacctcaactgaagagatcacttaggccaccagagtgctggccgtggttgactccaaattcaggctcattcttgttggagagcaggatccaccgcctggcccgctactacaagcgcaccaagagcctcccacccacctggaaagtatgagtccaaaccacggccaccagagtgctggcc

SEQ ID NO: 29569 - DNA, 882 bp, Setaria italica
  Peptide Sequence Number=SeqID_95543
cgaaacaattcggatataattggggatctggggtgtggggaatgggaagacagacaaaacattgttaactgctgtcaagcgtagaacagtctggtagaattcggctttctgtgttagttttgctgtccaatagatttgtcatctgccactaagactatcgtttgacatagaattgtgatcaccataaaatgcactatcacaatgttatcaatctggacatgcttaaggcgcgcaaaaagattgactgggcatacttaaggaccaatttagataacatcatctccttgctcttgtttaactgaatattcttagggatcaatttgttgtagtattaagctagggattgggccattttagtttagtaatttgaaaccaaatctaaagggagtcctgctgtatgagtagatccttgatattattttcttggtggtgtgactttgtgtgtcattttgtatccaagaggtggtcatcaccatgtatttatgttcattattagtacaagagttctgttatttcaataattttgaaattgagcttcttaacaattagtacaagacaaatgtcatgggaaccttgaatatgttgggtctggcaaagcgaattggtgcaaggttcttgttgactagcacaagtgaagtttatggtgatccacttgagcatccacagaaggagacttactgggggcatgttaatcctataggtgttaggagctgttatgatgagggaaagagaacagcagagactttaaccatggactatcaccgtggtggtggtgttgaggtgcgtattgctcgctattttcaatacatatggtcctcgtatgtgcctcgatgatggtcgtgtggtcagctaattttgtgcacaggcactacgtagacaacc

SEQ ID NO: 29570 - DNA, 934 bp, Setaria italica
  Peptide Sequence Number=SeqID_95544
agcgacacccaaaccggcagcggcagcgagcggcaacagccaccaccaccacttgagcagttgagcttcccccttggcttccactccactgaagcgggcggaaaaggcgggagcgggcaggccagagggaggaggaggggaaaaaaggccatggcgagcaacggcgacgggaagcacccgcctgccgtcgcctgactcaaacaccgcaacgccgcgatggggcgtatgcacagccgcgggaagggtatctcatcgtcggcgctgccgtacaagaggaccccgccgacctggctcaaacccgccacctccgatgtggaggagatgatcacgaaggcggcgaagaagggtcagatgccgtcgcagatcggcgtcttgctccgtgaccagcacggtattccccttgtcaagagcgtcaccggcagcaagatcctccgcatcctcaaggcccatgggctggctccggaaatcccagaggacctgtacttcctcatcaagaaggcggtggcgattaggaagcatctggagaggaacaggaaggacaaggactccaaattcaggcttatccttgttgagagcaggatccaccgcctcgctcgctactacaagcgcaccaagaagctcccgcccacctggaagtatgagtccaccaccgcaagcactctggtggcctaagtgaggagctcagcatcagagatgcccttagctacttgaagctggccctgttcttgggatcatttttatgtaccgctttataagtttagagccaactagaaatcgtgaattttctgtggaggatcgtgtaagccctttttggttctgcggatatgcctgttgttaacttttgctactctgcatccagattttgtcagctacatgatctacattacatgatttgcccataattgtttgtggtcgaaccaaaaaaaaaaaaaaa

SEQ ID NO: 29571 - DNA, 1494 bp, Setaria italica
  Peptide Sequence Number=SeqID_95545
ccttttcgtcgtcctcggcgcgctcatcgcctccaccttcttcctcctccgtccctacctctctctctccccatcctcccacctccccgacgcccgcccgctcttctccttcgccgcccgctccggcgtccccgccgggtaccgcccgccgccgcgccgggtcgtcgtcaccggcggggccgggttcgtcggcagccacctcgtggaccggctcctggagcagggcgacagcgtgatcgttgtcgacaatttcttcacgggcaggaaggagaacgtcgcgcaccacctccggaacccgaggttcgagctgctccgccacgatgtcgtcgagccaattctcctcgaggtcgaccggatctaccacctcgcgtgccccgcgtcgcctgtgcactacaagtacaacccgatcaagacgatcaagacaaatgtcatgggaaccttgaatatgttgggtctggcaaagcgaattggtgcaaggttcttgttgactagcacaagtgaagtttatggtgatccacttgagcatccacagaaggagacttactgggggcatgttaatcctataggtgttaggagctgttatgatgagggaaagagaacagcagagactttaaccatggactatcaccgtggtggtggtgttgaggtgcgtattgctcgcattttcaatacatatggtcctcgtatgtgcctcgatgatggtcgtgtggtcagcaattttgttgcacaggcactacgtagacaaccaatgacagtttatggtaatggaaaacaaactcgaagtttccaatatgtttctgatctggttgctggactgatggctcttatggagagtgatcatattggtccatttaacttgggaaaccccggagagtttaccatgttggagttagcacaggttgtgaaggaaacaattgatccaatggcaaccattgagttcaaacccaatacggctgatgatccccatatgagaaagccagatatcaccaaggccaagcaactgcttcattgggagccaaaggtctctctcaaggaaggccttcccttaatggtgacagatttccgtcaaaggatctcggatgagtaaccgaagcaatgttgtggtattggtgacccatttgattctgaatgatgctgcaaatatggtgagaagcacttcatcaactgaagccacgcagtacaatgtactgtatacatgatagattctgtagaatctcgtagtccccacttgaaatatggggattctgtctacgggaatagtgccttttcctgtgaaatagctgcaaagttcatgtgaaattcatattaattttatttgtaccttggcgagacagaacagaagtagtcaattaattttgtgcatgtgtggaagaattccagatgtggtcggtgagaggtaggatataatactgtatttcatgagcctttgtaacacgacattatggatgcttgattatgtgaaaaatgtaattgaacgtgttttgccagctaaaa

SEQ ID NO: 29572 - DNA, 1268 bp, Setaria italica
  Peptide Sequence Number=SeqID_95546
agtgcacacccgcaaccttggactgatgatccgtggccttgctgctcatgactcaggcaagcaccttgttctacgccgccgtgctgctgccagccagctcagcctgtactgcactgccattggaggcattggggcagccctcatggccgcattcatgtaccacatgctgcggcgcactgatcagctcactggcctttgggttgtctccatcttcagtggccttatctggttcatcggcatctgccacggtctcttcacaaacaggcccagcagctcatcacctgccacggcatttgagcccaacttcttcaccaagcttggctacagcatgacccttctgctgcagcaagcccccgctccgccgtcgccggagacaaactcccagccgccgccatggggcggtatgcacagccgcgggaagggtatctcgtcgtcggcgctgccgtacaagaggactgccccgacctggctcaagacccccgcctccgatgtggacgagatgatcaccaaggctgcgaagaagggtcagatgccgtcgcagatcggcgtcctgctccgtgaccagcacggtatcccgctcgtccatagcgtcactggtagcaagatcctccgtatccttaaggcccatgggctggcaccggagatcccggaggacctgtacttcctgattaagaaggcggtggctattaggaagcatctggagaggaacaggaaggacaaggactccaaattcaggctcattcttgttgagagcaggatccaccgcctggcccgctactacaagcgcaccaagaagctcccacccacctggaagtatgagtcaaccacggccagcactctggtggcctaagtgatctcttcagatggtgtggtctttagccttttcgatatcagcttgttctagatatgaatttatgtaatgcttaatgagtctggagcgggttagatggacaaggaacctcaacttttctatgtttacttggagaatcccataaaccatttttggttttgcaattgtctgttaaccgtaatgttttgtcgctgaaaattcgtgtttacggcatcaggtagcgttgttgcttgtcagtgttgtgatgctggttttgctatccatggcactacctttggttgcagtatcctatgaaaaaggccgcttatcatgtgcttgcctttgaaatatttgtcgtgtgaaacatgttaacgatcccgatatggtgatgtagttagatgccttgttataacatataagatgctgccatttcctgtcg

SEQ ID NO: 29573 - DNA, 2234 bp, Setaria italica
  misc_feature (2151)..(2151): n is a, c, g, or t
  Peptide Sequence Number=SeqID_95547
ctcctcttcactcctcccagctagctgcagcggcttaaagagaggggagccaagggggaggagcaatgtcggagcagcaaccgttgccgcagcctcggagcagcatgcgggaggcgctggagaaggaggacaaggagaaggccgccgcggcggcggccaaggacaaggcggccgtccccaagaacggcggcggcggcggcggcggcaacggcgggggcaagaacgggggcggcaacggcgggaacaacggcggagggcctccccagtccggggaggagacggcccgggagattcaggtcgtgagggaggcgtaccggcgcgagacggcggcgccggcgtacgtcatccccgaggagccgccggccatggtggagtcggtgggctggtacctctacggcttctgctcctacttcatcacccacctgctgctgccggtcctcttcccggccatcatcacccaggtcgccttcccctcctccgacttcacgccggaccccaagtacaccgtcaagggcgccatctgctccgtccatgagatgtccatgtaccaaaggcttactaggcactccatcgccattgatggatcgcgtttgtcaccattgggctggagtggtctgtcatgggcaattggcatcctcatcgtggcgccgatcctcactcaaactgctcaccaccttgaccgtggccagtatcagtcgctcatcctcattgctgccacgtcctttgggtcattcttctgcctgctcactggtttcttcaagacagtctgggtgttcctcttctacatcctcttcattgcaggatcgatcattgttgctgaggcagtgcacacccgcaaccttggactgatgatccgtggccttgctgctcatgactcaggcaagcaccttgttctacgccgccgtgctgctgccagccagctcagcctgtactgcactgccattggaggcattggggcagccctcatggccgcattcatgtaccacatgctgcggcgcactgatcagctcactggcctttgggttgtctccatcttcagtggccttatctggttcatcggcatctgccacggtctcttcacaaacaggcccagcagctcatcacctgccacggcatttgagcccaacttcttcaccaagcttggctacagcatgacccttctgcgctacccacaggccattggcagcttggttgcagtgttcctgtcatctttcgccacaatgtgcatctttaccagttggcacactctatgctattggtggtgtttgcatcaagccggtgcttgtgctcgtgctgtggatcctttacttcctgttccccttgatctcgcttccacttctccacccaatccagatcatcatccgtgccgatgctgtgcgcatgcagctgcttgggttcataatctgcctatttgtgtctggtgccgggttctacttcaagagccacaggtggagagctgcccacatcattgttatcgcccttgtccagagcaccgccaacggtatattgtactcatttggccgcattctgctccttgatgcctcaccgccggggaaggagggtgcatttgctgtctggtatgcatttgtccgctgcactggtgctatgattggctatgctgctgcatcagctggccctgggcgtgccggaggatcattcgctgcagcattccttgggagcttcctgggcatcatagtactgatcttcggcaatgtcagcaacatcggggcgctgaaggctgcagggcacctcaagggaatggacgatgagaagaggatgggtggtcttggcatggagaaaggcgagggcatgggcagtgctgttgcggattccggcgaaggcagggggagggtatgatgacgattcaagatggtgtatttctgggaggaaaagattgcattgctgtggaggttgtgtttgtgagaaggatttgttctcttctttcttgtttcttggtcatgtttcagtgacactgttaatcccagtgcgttgcccctttgatgcatgatgatggatgacatagtggtagaggagtgtgctagttgttaatgtgttattcttttgcttgcaagacaattgtaactgatgatatggttctttgttcaccacccgtccaagaaatacaccatcttgaatcgtcatcactacccncccctgccttcgccggaatccgcaacagcactgcccatgccctcgccttctccatgccaagaccacccatcctcttctcatcg

SEQ ID NO: 29574 - DNA, 464 bp, Setaria italica
  Peptide Sequence Number=SeqID_95548
ggtcggccatataggaagattgaaggtaatgaggtcgaagctaagaggtttgccctgatatggaatgagattattcagacatttagagaagaggacatcgttagtgacaaggaagttgagctacttgagctgccaccggtggtgtggagaattcgtgtggtacggtggccgtgcttcctgctaaataatgagctgcttcttgctctcagtcaggcaaaagagctggtagctgatgacagggcacactggacaaggatatgtaacaatgagtacaggcgatgtgctgtaattgaagcttatgacagtatacgtcacttactgctggagatcattgaggagagaactgttgagcacgttattgtcagtcagttgttccttgcatttgatgatgcaatgaaggatgggaattttttctgaacaatataagctagaactgttacctgaaatccattcatatctaatca

SEQ ID NO: 29575 - DNA, 306 bp, Setaria italica
  Peptide Sequence Number=SeqID_95549
tcccgctgctccttgatccacgcgcccaccgttttccccctccccgcggcgcgaagaagcttgacgtccaggttggccctgggagagacgggcgggctcatcgcgctgccggcttcacctgcctgcgccaccgccatggcggcgtctgctccctgctggcggtgatcattactatcaagcagcgttgatggcctcttctccgtcgtagcaacaacagcaggagaatcggaggcggccttgccgcagctgagcaccttgagggccttggagatctccgctgctgacaggctccaggaccttgctaag

SEQ ID NO: 29576 - DNA, 243 bp, Setaria italica
  Peptide Sequence Number=SeqID_95550
ggccattggaattcttttgcaatgagagattttgaagggactctcttgcagcattatgttccttctctagaatgtcaacgagctcattcagtaaaaaattcaaaaactcgtgagcatcctgatgcatataactgcggaaaatttcattctgtttcttcaatcgttgtataaaacgcttaggagcaatgactccagttttcttcttctgattactgatctgagagaacagatcagccaggcagg

SEQ ID NO: 29577 - DNA, 964 bp, Setaria italica
  Peptide Sequence Number=SeqID_95551
tgaagctaaacggcctcacattctgcttattctagtttttactttgcactgcgtatcctatatcatcaggcgaaggaagcgtcggaaggaaaggaaaagtatataactaatcacatggtatcagaagcacatcaacttttttctgcaaggctttcatagaagagaatgtagccattatcagtgttgccactgaactcttgtggtgagccaaagaatgcctgtaccatggactcgtcagtcatctcaacattctcatcatcgaagaataaccaatgattgtggctcttaaccaagctgatatagtggccatgatttggcccacttccaacatgaactaccacagcaaaaagggagtattccaagtctgagttgtcaacagtgttgagaagtttaagctccagcgggaaaaccactcgatatgatagcttcttgtagcgctgaagttgctcaatatacttgaaacgcttgagatgaattaccaggatgtttggtggtttctttatcttcattcttttctgagcttcctgtaaactgcaacatttgtcacagaagaacttatcctcggcattcaaagtctctgtcgagctgaagttcttaagacagctcgtgattgaactattctgttcaatgtccaggctcaggtcaaaaaatgtttcatctctatcagtcacagtttcacatctcagacatcttgtttcattagtcaatattccctggaagcatttatggacccatgtagcagctgattctttgtgacagccattgggtaggccattaatagggccattggaattcttttgcaatgagagattttgaagggactctcttgcagcattatgttccttctctagaatgtcaacgagctcattcagtaaaaattcaaaaactcgtgagcatcctgtaaattacagcagtgttgagttcattctatacaaaaagatcgttagtataaaacgcttaggag

SEQ ID NO: 29578 - DNA, 287 bp, Setaria italica
  Peptide Sequence Number=SeqID_95552
tcgaagtccgtcttgtcgtgcttgagcatgttgtccttggcgctgatgtgcgcgccgggctccatgtggttggtggagaagctcgtctggttggggaagttggggtacaggctcacgtacccgcgcaggtacatcatgtcgatgaggaacttcttccacgacgcctgccagccgttggtgcgcgacctcgggatctgcacggggttcttcttggcgtcctccgtgaagcgcgccgccatgtaggcgtagaactcgcgccagtgcttggggaagaagacggcgcccca

SEQ ID NO: 29579 - DNA, 363 bp, Setaria italica
  Peptide Sequence Number=SeqID_95553
tgaccgggttgtacacgccctccaagaacaggctcgacacgttcgcataaggctccccggacagcgagagctccgcggacacgttgagaagagaggatgctgcagtcggctgcgacgacgacgtcgacgaggactctggctgcgacgacgacgacgaggatgctttgccccctcctcgcccacctggcatgtcagaaaacggaatgctctctgccgccagctgcgaggtacggccgacgagtgatccgagagagagcacctccagctgaaagaacggccgctcgaaccgttcgcgcgggaacgggtcgggcacggcggcgacgtggagcgtgaggtcgtcggcgaggttggacaggctcatcg

SEQ ID NO: 29580 - DNA, 317 bp, Setaria italica
  Peptide Sequence Number=SeqID_95554
tacataatctaactgagttaaactggtgagatctggcactgccccgtttagtaggttgttcgctaagctcagttccatcaggttacttaggttgccaatactatcgggaactggaccgctgaactggttatgatctagtcggattatttgaagtgatgtgacttgtccaagggatgttgggattggtccagtaaagttgttattgtcaaatatcctggaattgattacagaaagtgggtgacttactgaggtgaaattaaagaacagaaagtagctattgcaaacgcagaacacagcttacgcatgtataaggttca

SEQ ID NO: 29581 - DNA, 535 bp, Setaria italica
  Peptide Sequence Number=SeqID_95555
cttctcttcccccgcacgagattctgttccacgccgccagaatcagtcgtgccgcatcgtcggcgacctcgccgccggttacgcagcggaactcggggacccttggactggagcatttttctcgtggagaggcgtcttgttcatcctcctcctcctgtcggccttgtgctgccactggactggcgtggagtggagatccatccacccgcacttgccacgatctcttccttctcgtttggctgcggatttgcgtgctgtggtgcggccccgcagcccaatccatggttgggttcgatttggttcggcttcgtcttcgtcttcagcgctcgagatcagtctagtcgaggcgcgtgcgcggtttggttgccggaagactttttggagttcaagtgaacccccatgccccaggtgaggtccggccccgatggcgccggtggggactacatcaagtggatgtgcggcgccggcggacgcgcgggcggcgccatggccaacctccagcgcggcgtcggctccctcgtccgggacatcggcg

SEQ ID NO: 29582 - DNA, 1856 bp, Setaria italica
  Peptide Sequence Number=SeqID_95556
cactggggatagaggtggacgagttgtattgtttgaaaggacagatgtcaaagatcacgcttgtagaaaagatgctgagaaagctgattattctatcagcaggcaccctgaatttcgctacaaaactgagtttcaaagccatgaaccagagtttgattaccttaagagcttggaaatagaagagaagatcaaccaaataaagtggtgccaagcagcaaatggcgcattgtttctgctgtccacaaatgacaaaacaataaagttttggaaggtccaagaaaagaagataaaaaaggtatctgagatgaatttggaccgttcaactgctccttcaaatggtagtcctggtggtgtgggctctctgagcccatctctctcaaatggaaatgctttaaaacctggtccatttgctttgcttcgcatgcctgtggtagttacaagccaagaaacaagtcttgctgcaagttgccgaagagtatatgctcatgcacatgactaccatataaactccatatcaaataacagtgacggcgaaacatttatatcagctgatgatttgcggataaatctttggaatttggaaatcagcaatcagagtttcaatattattgatgttaagcctacaaacatggaggatctcactgaggtgataacatctgctgaattccaccctactcattgcaatacattagcttatagtagctcaaagggctccattcgacttgttgatctgcggcagtcagcactttgtgacactcattcgcaaatctttgagcagcatgaggccccaggttcaagatcatttttcactgagattatagcctcaatttcagacataaagttttccaaggatgggaggcatattctgagtcgtgactacatgactctgaagctttgggatgttaagatgaattctggtccagttgcaacattccaggttcatgagtatctaaggcctaagttatgtgatttgtatgaaaatgactcaattttcgacaaatttgaatgttgtcaaagtggtgatggattacaagtagcaactggttcctacagcaacattttccgtgtgtttggtgttggtactggtagcaatgaggcatcaacacttgaagcaactcgaaaccctacaaggaggcagctccagaatcccacaagggctgccagatccctaagtactctgacaagggctgttagacgaggtggagaaagcaccggaatagatgccaatggaaattcctatgacctgagcacaaagttgctccatttggcttggcacccatctgaaaatctaattgcatgtgctgcagccaacagcttgtacatgtactatgcataaacaagcgaggtgaacagagcgacagttttttggtggttgctcccggcgagaaagatgcgtttagtccctggtggattgaagcagggaggagttggaggtggtgtattttgtgccagtcagatgcagttcttttcagtgccatatagagctgtccagagtccaagaggaagtgactcgatcattcccgggaagcagctttgattctgattaatttttttgtggggaaaggcttgtctttcccccataggttcatttagatttaaagataaattctagttcagcaacatttgggcatctgtagtagacggtgataaggggatggtcaacctttatgttcatgttggagcatgggtctgtaacttcagggtgggggttgaggctttcgatttttaatacttaacaagtttagaatagaagtaatactaaaggacctaaagttaatagtagaatttagtaatagaaaaatagaactacaaattttacgaacaaaatttagaaatagttagtacaaaagtaggaa

SEQ ID NO: 29583 - DNA, 302 bp, Setaria italica
  Peptide Sequence Number=SeqID_95557
actttacaagaataagaacgaagttccaatttgtaaggctgcacgggcacatctctacccagggtatgaattaaaaaatgaagatctgtaacatgatggccattggcaaaaagtgggcaactcaacgtgctgaaagaagacttcatggaatcaacattgaatgcttttcttaggttataattaagcttttctataaccccagatatccggatagctttttcaccagttatgtcctctgaccagttcactgaagctggctggctaatattttcagaatattccgaaatctcaggtctaattga

SEQ ID NO: 29584 - DNA, 2281 bp, Setaria italica
  Peptide Sequence Number=SeqID_95558
ttttttttttccagaaatatatcttgtctctgcaagcacaagccattgtagtacattatcacatctgtcttagatagcaatttgcgtcaaaagtgaaaccatcatttcagtttttgaatcccaatagacgaaatgagaacgacaattgtttagctttgaaatacagaagcttatattggtaatacaaggggaacaaaaataaatgacgaaagggtaaaaacaaaaactacatgaatgttggaaactgcctcgatcaacgttttgcacttgtcacaatatttaacagcacggctgctgttgctgcttcggctgctcaccttgccaagcccatactatgtcctttagtgctggccgcatctcttggttcaaaaccttctggtactctagagtatcaccgtttgccttttttatctccacaaggtgaaagttcgggctaacctcaaatatttcagcatcaatgcccatcacccctttccttccaggcttggaaccttccatcttcaacaaaccaccatccttctttgtgagcttcaaccgcaaactctttgcaacatcctcaatctttgatatgatcgtcgagcttgtgttggtggacgtgaatttagactctctctttttgtcagattcttcaaacatacccgacaggtccaaaccagttgatagagatattatatcaaatgcattcatgttgatgggcttctttgcttcttgttgcttgctctccgtatttgcgatggtactcacagaatcaaaatctgcattcatgtccaaaggaggggcatcctttgtttgtaagttatacctgagtagttttgcatttagtcccttcctaaaccatggattctccatgattttttccattgagatcctcgtactggggttaggatcaagaattctttgcaaaagccttcggacatcggtagagaaccaacttggacatttgaactctgctttcccaatcttcttatacatatccatcaagtttttatcatggaacgggagatacccagcaagtagcacaaagaggatgaccccacaagaccagatgtcagcctttgcaccgtcataaccttttctattgataacttctggtgcgacataagcaggtgtgccacaggttgtgtgcaacaggccgtcttgtcttttgcattcagcaagtgcacttagaccgaaatctgacaccttgagattgctattctcatcaagcagaaggttctccggcttcaaatctcgatgatagacacccctgctatggcaaaagtccacagcgcagatcagttgttggaagtacttgcgagcagcatcctccttgagacgtcctcgctgaactttattgaacagctctccgcctctcacatgctccaacacaaagtatatcttggttttggtagccataacctcatatagctgcacaatgttgggatgtctcacaagcttcatgacagagatttccctcttgatctgatcgatgaggccaaccttcataaccttctctttgtcgatcaccttgatcgcgacactttcagaggtctttgtgttacgggcacggtagactttggcaaaggttccttgtccaagcatttttcccatctcatacttctgcatcaaaacatttcctttctgttccgccatcacaccgaatgtatactgctagtacacaaaaggccggactgatccaagacttgaaaccaacggactcacgagaagcctgcaaattgtttttgaagacttcaaccgtctcctccgaggtggtgctctaagaagatggttgagctgccacgtcgaaccccattgtgcagaagcacaaggagcaagagctgcgtgtgttcttgggccccaatgtcatcaagaggcggcaaagaagaggtacgggtggctaccctgccaagtccctcacaaggtgactctttaacatgcaagcacatctttctgcattccctaaggtgtttccttgttattgagagaccagttcgttcagatccggacggccgaggacgaagggaaggcagccgccgcgtgcgactagttagctggtgcagcgctgcacgaaggaggaggtcggtcgcgggactggagcagcagctagcgaaggagatcggggacgacggtgaatggtggacggcgaggggagggaggggagggaggtggatgcgttcacccggacgaaacaaatctggtgtggacaagtaagacaacaaaagaaggaatagaaccccaacaaagaaccaagaataagtaacaagaacctttaagaacaaaccgtaacaaataaaacctttaa

SEQ ID NO: 29585 - DNA, 258 bp, Setaria italica
  Peptide Sequence Number=SeqID_95559
ggtgagggtgaggctgaggcagaggcaacacaggagtgaaggtggtgtaggttaacatgttggagagtcagatttcatgaaatcctgaacatgtctggacgctccaagtgaatgcaacgctccaagtgaatgcaatgttacgtactggtgcctagtggtgagtgaaggataagaagaaaagatgtcctatgcggcagtactttgccaccaagagtcccaaaattttcgtttcgctatcatgcctgtcgaaacaaattt

SEQ ID NO: 29586 - DNA, 378 bp, Setaria italica
  Peptide Sequence Number=SeqID_95560
caacagctcgctcctctctcctccgacgcttcgtgctcgtcccaactctggtgggtggtggtagacggccggcgacgaggccatcctttgtcgtcttcagtgagcaaggtgaatccagccatggtgcaggtgcagtcagttgccaaggagtttctggtggcccctgcactgcagcagcaatgaagatcgtgagaggccaatccagccaagctgcggttgcggttgctagtttagtttccacatttttggggtttagtttagctgaacccccatgtccgacgtcgaggctgcctccttgttagaggagttggcgagggaggcgacaattgatgatgtggctgttctcgtgaatgggaatggcgaagagcaacatggcaa

SEQ ID NO: 29587 - DNA, 1265 bp, Setaria italica
  Peptide Sequence Number=SeqID_95561
cccgtccgtggtcaacagctcgctcctctctcctcctccgacgcttcgtgctcgtcccaactccggtgggtgctggtagacggccggcgacgaggctatccttcgtcttcttcagcgagcaaggtgaatccagccgtggtgcgggcactgtcagttgccaaggagtttccattggcccctggactggagcagcaatgaagatactgaaagaaaatgcagggtcccttacaaacttcgaagttcttgactttttgcgatcaagaggagccaaaattgaccccatgggatgcttgggggctgttgctgcatcagagtgtaaggtgtatgagtacctcttaaaaacccctgcttgcaaccagacaagggaatcaatctatgaatttgtgaagagaagtgagggtttcaggcttgctgatgcggataagctaaatgtcatcaactggagaccatcctcagctgctgatgcatatgcgatgatagaagaatgtgggaggcgatttaacagggacgagcgaggagaaacatgcaacgaagataaacgggtccaggagtttttggatatagtgaaggaggtattaccaccaccccctccgaaggcagagggtgagggtgagggtgagggtgagggtgcagaggcagaggcagaggcagaggcagaggcagaggctgagggtgagggtgaggctgaggcagaggcaacacaggagtgaaggtggtgtaggttaacatgttggagagtcagatttcatgaaatcctggtgctaaattctgcgtttagcacttatgcatatacatgtttttcactaatatcacaggcagctgctagtaattaacgttaaccttgacttgtcggttttccacatgcttggtgtttagtttagctgaacccccatgtccgacgtcgaggctgcctccttgttagaggagttggcgagggaggcgacaattgatgatgtggctgttctcgtgaatgggaatggcgaagagcaacatggcaatgaagcagtgctgaaaagtgctgaggcgctccagaatttgggagggatttcggccaaggaggtgcctcagcacgagggcaaggaggtgatactcgtggatgataacgacagcgggcaggaggatggtgggaaggctaaggtggatgagaacgcgccacgtttcgggctgagattcaaaacttatgatgatgcgctcaagtactataagcaatatgccgaggattctgggtttgcggcgatcattctgaagtcatcgtatctaaagtc

SEQ ID NO: 29588 - DNA, 2476 bp, Setaria italica
  misc_feature (2389)..(2389): n is a, c, g, or t
  Peptide Sequence Number=SeqID_95562
ctttcggatcaaattaatgaactaaatgcatcatatgtaaaatcgtgtgaggaataccaaagcaagaaagacagccatttggcatatataacagagaggcgtcaagaagtaaaatctattctgacagaagcacctgtggatccggagaatgattcatatttttggatctcaacagactggcttcgccaatgggcagataacactgctcctccctcttctattgacaatggtccaattcaatgcgagcatggaaaggttccagcatctaaaagtcacatcaatgaagcgactatcatctgtagcttggcagaaactattttcaaaatatggagggggaccgacattgagcaatgatgactattgcatggagtgtcttaaagatggggcaaaaaatgcagtatctgctgatgtctaccgtgaacgaaaagcgtcattaaaaaatattgcagaagcagcacttgctggtagctgtccagatggtccttcttactttatctcaaagacatggttgactcattggctgcggaggaaaaatactgatatcacatctgatgctgatagtggaccaacaagtgctttaagatgttgccatggggatcttctgccagagcacgctccaggggcaaagcggatatctgtaccagagagcctctggttatttctctatcaaaccatcaatgagaagaaggctgatgatattatgacttttccatcagattgtcagccatgcgaaatctgcaatcaggaattgtctgatgttgcttctgtagagggtaatcttagagcagtgaaactcaagcaacgacagaatcatgaaaagttaatatctgggaaaagctttgcacttcatcctggtcaaaaatattatttggttccttcatcttggttgtcagaatggagagcttatgttacagcaaccgggaaaaatatttcttcattactagaacctcaaagtctggaagctattgtcaattcacttatatgtgaaaagcattcaagattgctgcaaaggcctttggatcttgtttgtaagcgcggaagcattactcagaaaatatcaaatggtgatggtttaacaatgatcccagagtacaattggaagttattctctgaagagtggagtgccacacctgaaaaaggtatatctgctgaaattgcttttagcaagagctctcaagagaaactgcccgggtcatctgaagcaatgccaattatggatggtgacctagaccaatctcttgatgatgctaatgatgatttgggggccagagagccttatgtcagaactgatcctgaggtttgtgaagattgtattggagaaagagagagctgtgcattggtggagaagctcaattaccagaatgaagacatccacgtctatttagtacgtggaaaagaagcaccaaagtctatcaaagaagcatctaaagctgttgccgtatcagatcgtcggacttcgaagcgttcccgaagaactagctctggaacttcaatcagtttgaaagtctccggttctacatccgtctatcaattgaaactcatgatatgggaatctttagggatcgtgaaggagaaccagaagcttcacaaaggctctgttgagattgaagatgactttgctactcttgctgacaagagtatttttcccggggatgttctttgggtcagagactctgaaatctatgagaaccgtgacatagcagatgagatttcagatcagaaggctgatatgctacaggctgaggaaggctttcgaggaactctgttgacatcaagtgtttcagctcagctttgtcaggatatagcatttagtgaatgagttcccacatcagatgtatagctgcatatcttctgattaaaatgatcaagcttgctgggagaaatcgtgattgcttcgcagactgtcgcacagaattatggcggtcctagcagccgccctggcggaaatttgtcaggctgattttagtgaggaaaacagaagaggctcctcctgaagctgtcggtcttccccgttgtaattatatgactagtaggaagttggctatttccggccgtcgtgctggctgcacccgtagtatttttcctctcctttcgctggagggctatgagtgaattgccctacctggtggcctgctacgcagaggtttgttgagaggctggggccttgaacggatgctgaggtagcagtcgtcggcttgtcacgtttgctagatgagatcgtagtgcctggggtggcctttatacctcgtaaaaagcatgtgttccttttgcatcctgtctttttttggctggttcatgcgtggctcaggccggcatcaatctgttgcctcctgcgccttggctttggccccaatcctggaacgactatttgtcgccagtgagacaaacngctatctatcgcccatgcatgggtgacagactgacagttgctggtaggtgggtccaagtgtgtgttgttttccttttcgcatcagtc

SEQ ID NO: 29589 - DNA, 1993 bp, Setaria italica
  Peptide Sequence Number=SeqID_95563
ccccttctccgtcccgtccgtggtcaacagctcgctcctctctcctcctccgacgcttcgtgctcgtcccaactccggtgggtgctggtagacggccggcgacgaggctatcctttgtcttcttcagcgagcaaggtgaatccagccatggtgcaggcactgtcagttgccaaggagtttcttctggcccctgcactgcagcagcaatgaagatgctacacctcccaagcacagcctctggtgaatctctggtggcagcctccggtctcccttgttgctgtgacaatgagtaggcacaacactcgcaacaagaacaagaggcaacggtccgatgaatccagtagcccgtccgcggctgtgttcaagaagatacattcagatggcaatatctcaaagagcgatatccggcagctttacatggtgtggaaaccactctgccaaggctgccatgggaacaccaaggactcccccaattgtttctgtgggttgatccccaccgccaatggggtccggaaaactggcctctggcagaaaatgcaggagattgttcgtggcctaggtcctaatccatccagggacctccgagattccaccgagacgcctgctggattgactaatctcggcgcgacctgttatgcaaatagcatacttcagtgcctctacatgaacagctcattccgctcaggcattttctctttggagctggacatcttgaggaagcatcctgttctggatcagctggctcagttgtttgcgcagctgcactctagcaaaatggctttcattgattcagcgccttttattaaggcgttggaattagacaatggtgtccagcaggacagccatgaattcctcaccttgtttctgtctctgctcgagcaatctttaagtcactccaaggttcctggagctagaacaatcgtgcaaaatctgttttgcggcagtgtatcacatgtaacaaggtgttcatcatgtggaaaggattctgcagcatcttcaaaaatggaggacttttatgagctggagctgaatattaagggtttaaataatttggaagaaagtctgaatgactactttaatgaggaagcactggatggggagaaccaatacttttgtgaatcatgccagaaaagggtagatgccactcgctgcataaaactccaatcacttcctccggttgtcaatttccagctgaagcgttatgtattccttccgaagacaactacaaagaaaaagatttcttcaacattcagtttcccaggacagcttgatttgggaaagcggttgtcaaacccctcatctagttgtacttatgaactggctgctattttaattcacaagggtactggtgctaatagtgggcactatgttgcacatataaaagatgaaagcaatgggcagtggtgggagtttgatgatgagaccgtatccaaacttggtttgcatccttttggtgagaagccaggaaaggcatcaaataaagatgatcagaaatcccaaggtatgtccgcagcaggttctatcataaataacaatagtaataatggtcaccaggaggcagcgcccacttctaccacagcagagatgttttcatctacggatgcttatatgctgatgtacaaatgtaccagtagggatgtcaatgccactgaaagcaataaaaatgtggaaattaatgagtcacttccgcgccatctttcggatcaaattaatgaactaaatgcatcatatgtaaaatcgtgtgaggaataccaaagcaagaaagacagccatttggcatatataacagagaggcgtcaagaagtaaaatctattctgacagaagcacctgtggatccggagaatgattcatatttttggatctcaacagactggcttcgccaatgggcagataacactgctcctccctcgtaagtttattcttgcacctgatttgttgccaatggttgccaaaatttgacaaactcatgcccccaaaagaaaatgcacgggt

SEQ ID NO: 29590 - DNA, 325 bp, Setaria italica
  Peptide Sequence Number=SeqID_95564
ccttcgcctcggggacggtgcggttgcacaagggcgagagggcgacgaggaaggtggagctggtggagttgaacgagaggaccgggtacggcgcggccgcggtgcttccctggaggagcgacgtggaggtggtctggttgaaggccaggatgatggggcagtctccggagaagccgaaggggtaggggacggtcacgccgccgcgctgacggttgcaccctccgcctccggcgccgccgacgccggcggcggttgcggagaaggttgcatgggggatcaaggagaggagaaggaagacgaggggcatgtaggcagccagttcact

SEQ ID NO: 29591 - DNA, 807 bp, Setaria italica
  Peptide Sequence Number=SeqID_95565
attatctataagaatttgtggatcgatgcagaacgtgcaaattgtgcgttgaagtatcaactgaaacaaacttgtatggaaattgatctagagtctagcagggctcatattggtggtggttcaagaatcccttctttccatgtatgtgatacgggtgcacacccatgtagttccaacggatctgccataactagccccctgatgctcgaggactgtcctggaggaagaaatagtcataacctcctttatgccgaccacattcagtcaggagagagcagtgttctatcaagttcaaaaggtcacatacctgtgcccaagaatactgaggatgaatatttcctgtcaggcttggaagaaactggcgtccacctccatgcgcattctggtctacaaatggcatcaaatagggctcacagaggattggacgcaagcacttctgatggaatgcgatcactctcacatatcactggaagagacggcatttcgtgtggcagttgtgggtttggatcttcagattgggagcatgtgctgaaggaagaaatcggctcaacctgaaaagatatggcagccagatgcatatatagctactgtacatgagtgaccatggacgctgaggaagtgaggaattcagggcctctgggtgtatattttgcttgacaaggctgatgaatgggcaccgcttcgcaaaacggtgctgctccagcctgcagaaaattaggaacaacatttataaaccataacttggatgagtatgctaattgtctatgccactaggtgctaatgctatgttggcacgtgattaatatt

SEQ ID NO: 29592 - DNA, 575 bp, Setaria italica
  Peptide Sequence Number=SeqID_95566
taagaacaaagtaagaaaggaaccttaacccaaccaatactagtactaggccaattccggatgaacacgccagcataccagaacaccaatgcccatgacatacaagcaattccataggtgcagccaatgccaagccccttcgccatcccggccttgtacccaagcttcagtgtgttctgaatcgcctccgagtacgaattcagagccttggtctcccccacataagagtagaccgtcctcacctgggcgatagcctgctcggctatgattccggcattggcgtacgagtcccggctcttggaggtgaggccggtgagcgtgtatgcgtacagcccgccggcgaaggcgatgcccgggatgacggcgatgctgagtagcgccaaccgccaggccgagacgaacccgacgaccagcccggccaggaacgtcgcgaggtagtggatgaagttgccgaccttctcgccaatggcgtcctggacgaggagcgtgtccgtggagacgctgaagacgacgtcgccggtgcgcgcgtcggtgtcgaagaagcccacgtcctgccgcagcacggcctccaggta

SEQ ID NO: 29593 - DNA, 509 bp, Setaria italica
  misc_feature (1)..(22): n is a, c, g, or t
  Peptide Sequence Number=SeqID_95567
nnnnnnnnnnnnnnnnnnnnnngtcggattgctgagatagacggggagttggattggattgatcaggtgggtggtggtggtggtacattagttccagcacctacgctggagactcactcaaccggactgattgacggactcaagccgggcctctcttgctaatctttgcttactcctaattggactgaactgaacagattagcctctgctgcgacagtacaactacagcaaagcttccctcttttcctctctacctttgcttgccttgcttgtttccttcacggcaacgccccgccccgcccccggctggtggtctcctgctcccgcccgtgctgctcgtgcgacgcgtccgtcaggcagctcgacgacaccaccggcgacgacgcgcgacgctgcctctgccgcgcgtccgcgcgcgcgaagaagtcgatgaacgcccggccgccgccctcctcggcctcgccgtcgctcccctcgtcggccgggctcgcgggcgccgcggcggccgc

SEQ ID NO: 29594 - DNA, 419 bp, Setaria italica
  Peptide Sequence Number=SeqID_95568
gtagatgcttctccatgatctcagcgcaactagtgatagatcaaacactagagcccatcagaatcatctagtttcacaagacaatgcaaaataattggggcaaatgccagtcgcacagtcaaaagatacctcttagcgaaccggcgctcctgcagcgacagctggctgaggaggtcgtcagacctggagatatgcattgtgtacttcttgatctatagccagcaagtaatcagactggcaacaattcggtaattacaattaaaattggtcagttttagcgaacagattgggatttgatgcgaccgaccttctgcaggcggaggcggaggtaggagcgcaagaggaagagcgtgcggtcgaggtccatctggtagagcgagaccaccagatcgtcgacgccgctgtcggcgaaatcgtcc

SEQ ID NO: 29595 - DNA, 571 bp, Setaria italica
  Peptide Sequence Number=SeqID_95569
tattcttctactagtctaccgtacttgtttcgtagtattgtctttcttcctattgtattcttctagtagtctaacttctttagtcgtaaccggtctacttccttgtctagtcgtactagtccggtcttgaggaggtcgtcagacctggagatatgcatcgtgtacttctcgatctatagccagcaagtaatcaaacttctgcagacggaggcggaggtaggagcgcaggaggaagagcgtgcggtcgaggtccatctggtagagcgagaccaccagatcgtcgacaccgctgtcggcgaaatcatccagcgtctcctcgaggagctggatctgctcgcggacgcgggagacgagtggggagtcgaagcggaggatctccggcgcagccttctcgttgcgccaggctcgcttgagcagctccacgtccgtggtcgtcgcctcggccgcggacgccgctgcggactcgtcgtcgtcccaggaagacatcttcctctcttgtccctctcgctactggctcgggtggggagcgagccgactactcggtggcggtagggggcaccgccgttggccg

SEQ ID NO: 29596 - DNA, 714 bp, Setaria italica
  Peptide Sequence Number=SeqID_95570
ggcattactatgcaacatgatcagaaaccaaaacttgtttgatgacgatgaccaggactacatgatcctgattttattaacaaacggagagaaaacccacgaaaatagataaactaagtttggtaccatcacaatcatgtacaaattacaaaatacaaaccaatgtgagtcttacatatggagcctaagccacatgctgcacttagacggtatttaccaattcaggttatctttgtggcgatacagagcaaatcattcctgcccttgattccatccgttccaagaattcagaagaatcttggaccaaaagcttcataatatcttgtatggcttagctgttatgctttcagagctcgctcttttacaggtactgatttgtgattgacatcagataaggtcgattcggccaccctcgacaaggcccttgatggacttgtaccgaagaatgtacaagtcgtcggcaactaagtccacaacctcctctccaatgtcatctagctggaaggctcctacgtcgctcttagtcttgcagaagacaaaggtgccaagctgaggctctggcaccatgtcatcctcagtactcgataaggactgtctggtaaccgagtcatagccatacggcagcttcgacagcaccgactgttcgagatgcttctccatgatctcagcgcaactcttagcgaaccggcgctcctgcagcgacagctggctgag

SEQ ID NO: 29597 - DNA, 1200 bp, Setaria italica
  Peptide Sequence Number=SeqID_95571
gtccctatgcattagtttacagattcaagcattagttacgcatcaatggatgaggtcattaggataataagaatactgtcagaacagcaaatttcaacctgataaggacaaggcagtctaaaattcagaatcaaataaaattgtcatgcttcatggcaacctggtgggaacatattgataatttggggatggaagtcccaagatgcggtaggtaatcagaaccatcacatgagggcaagaggcattcttatacccgagctgctattaacttgaaagctaaattttgttatgtaggaacgctacttttgagtacaactaatgaccagatttcccaaagatactttgtaccaactatcaggccgcccaactcaaaaaaaatggtgaaacttatattaccaactattcacatccagcagcctatgcaaaatatgtaatgactgaagctgcaaacgacagaagcagtacggcaacaggacaaggaactccaaaatttggcagatcaagtgaagggtatatacccatgtcatcctcagtactcgataaggactgtctggtaaccgagtcatagccatacggcagcttcgacagcaccgactgttcgagatgcttctccatgatctcagagcaactcttagcgaaccggcactcctgcagcgacagccggctgaggaggtcgtcagacctggagatatgcatcgtgtacttctcgatctatagccagcaagtaatcaaacttctgcagacggaggcggaggtaggagcgcaggaggaagagcgtgcggtcgaggtccatctggtagagcgagaccaccagatcgtcgacaccgctgtcggcgaaatcatccagcgtctcctcgaggagctggatctgctcgcggacgcgggagacgagtggggagtcgaagcggaggatctctggcaccgccttctcgttgcgccaggctcgcttgagcagctccacgtccgtggtcgccgcctcggccgcggacgccaccgcggatttgtcagggtgtccctcgttcacggactccgaggtgaagaggaaggtgtcaactgcggccatcttttctgatctgcggcggcggcgcggggtggtcgggcggatccgatcagatccggcggagggggagacgggaggaggcggggtggatgaggatgaaatggtaataagttgggggttctcgtctcagatatccgaca

SEQ ID NO: 29598 - DNA, 1151 bp, Setaria italica
  Peptide Sequence Number=SeqID_95572
tttttttttttttgaactgatgacgatgaccaggactacatgatcctgattttattaacaaggtagagaaaacccacgaaaatagataaactaagtttggtaccatcacaatcatgtacaaattacaaaatacaatccaatgtgagtcttacatatggagcctaagccacatgctgcacttagacggtatttaccaattcaggttatctttgtggcgatacagagcaaatatcattcctcccttgattccatccgttccaagaattcagaagaatcttggaccaaaagctcttttacaggtactgatttgtgattgacatcagataagatcgatttggccaccctcgaccaggcccttgatggacttgtaccgaagaacatacaagtcgttggcaaccaagtccacaacctcctctccaatgtcatctagctggaaggctccaacgtcgctcttagtcttgcagaagacaaaggtgtcaagctgaggctctggcaccatgtcatcctcagtgctcgataaggactgtctggtaaccgagtcatagccatacggcagcttcgacagcaccgactgttcgagatgcttctccatgatctcagagcaactcttagcgaaccggcgctcctgcagcgacagctggctgaggaggtcgtcagacctggagatatgcattgtgtacttcttgatcttctgcagacggaggcggaggtaggagcgcaggaggaagagcgtgcggtcgaggtccatctggtagagcgagaccaccagatcgtcgacgccgctgtcggcgaaatcgtccagcgtctcctcgaggagctggatctgctcgcggacgcgggagacgagtggggagtcgaagcggaggatctccggcgcagccttctcgttgcgccaggctcgcttgagcagctccacgtccgtggtcgtcgcctcggccgcggacgccgctgcggactcgtcgtcgtcccaggaagacatcttcctctcttgtccctctcgctacgtcgtccatcttcctctcttgtccctctcgcactggctccgaggtgaagaggaaggtgtcaactgcggccatcttttctgatctgcggcggcggcgcggggtggtcgggcggatccgatcagatccggcggagggggagacgggagg

SEQ ID NO: 29599 - DNA, 1128 bp, Setaria italica
  Peptide Sequence Number=SeqID_95573
ctaattcgaatacatagcactggcgaggaaaatgcaagacgtcaaactgactaccgaattaccaccataattactgctaagtcctaactatacaaagcatttctgacaaaattgttatcttctcttgcacaactgttctcagagtttctgaaacatcacatcagtaccataaaggcgatacatcatgtagtcaaaactgattggaaaacccctgggattcaacagcagtaacacctcatctgagctgacagtttttacatcaatgatcataggtacaattggatgagctcatcgctcacaacagatggtgtaagaacaccaagatcagtcaggagaagcgtgaggtattgtggaggagtgtagtctcttgccgatgtctcaacttccacgccagtgggtactgggactccaaaatctattggccggtgagctggagtcatgtccttttggtccaagggatatagacgagcaaacttgtaactttccgcagccacataaacaggtttgttcatactatgagccacaagagctatctgataagtgcccatcatgttgattattcctccactctcaacaaccccatcagcaccaacaaataccatgtcaacttcatccatggaataagcaacagctgaatcaattagcaccttgacagggatgcctaatgctgcaagtgcatttgacattcttaaaccagttctgtctggcctgccctctgtgcatagtacccggaagagcttgcggtttgatgcagctagctttagaacttccagcactactctggagtacccatgtacaagcatagtgcatccatcataaatgaaatcctggctgagcattgcaattgtcttgcgagcctttaaagatatctctccaaatttctctccacgctcaattaggcgtgattttgctgcatcaaacttctcatgctccagatgtgaggttcttgttacaaaccgcatgaacaaatcacatgcagcagacagagaaatggaagtagcatcccaggacttgagcttgtcggaggccttcttgagctcgatctcgagctccatcatggtggtggccctgctagagcggatgacggcggccagcgccatgatggcggccaccgcctccgcggcctcg

SEQ ID NO: 29600 - DNA, 488 bp, Setaria italica
  Peptide Sequence Number=SeqID_95574
gctacacggcacttaaggctcacatgatgcctacattttactctgctccagagatgttcactattataataataagttagctttgtctaacaatgcacgagttgaaacctgatgataaaggctgccaactaaatctgtttaaataagccattgatcctgcattaacggaactatgttttttcaaacttcacaaataccacattgattaatataacacctgactagcctcattttagctgacacccacatgggagatgaaagtatgtaacggacgtgaagagtagaagattctaagagaggctacacattcatcaaaatggctggattattaagtatcaacaagaaagaaatcggtatgcgtatgtaacttactgcaggtcactacataaaaaattgcgttaatatttaattggtgatgccagcatcgatgataagtcaatggacacctctattgatttactaactcttgaccactacgtttcacttcc

SEQ ID NO: 29601 - DNA, 940 bp, Setaria italica
  Peptide Sequence Number=SeqID_95575
ttttttttaaaatcgcaaaccaccatcaatatccatttgcgagacaaatagaataactagggggaggacgaactttacagaccaacttcagcacaagtgggatttggcacggaatcgagcaaatcatcatttttgcctagatagtttgaagtaactcaagagcagccgtatatagccgatagcacataatagattgcatgcaaaaaaattgcctcgggatacaagaagctatttccaaaaatctccacagatgagagcagcagcaggatcatggcaggtgaactacatgaaagcacctcgccctcctctcctggttgcgggtctctcatagcttgtgttgatcttctcaaccaactcgttcattgtgcttgaacagttagtgaacatagcaaggtaagtcatgaggagagtgtcgttgtattccattaagaagtcatcttggaatttctgtgactccatagccggtagccttcttacgaggcttgagacttgtctaagcagcgaattatccactggaatctcacctttttgcatggcaacaagatactgatggataacacggaccctgctattgagcatcttgatggcactgtgtattcctgtaagatgagcagccaactgagttgctgctgagccgccatcagatggtttgagatgggcaacatggtctacagatatcctctcagcttccacagtctcaattgtataatttgatctgacaaagatgagctgaggacttccatcgatgacatgcaactcactctcatagatagtcacggggaggtccttctgggagaggttgattgcaggatttaatagaagataaacagggctttcgttaatgtccatcaaggctttgtggatttgcatgtccgtgtcctgcacatcacttccagtggagtaccatcccagcacgtagaagtcggggaacaccttctta

SEQ ID NO: 29602 - DNA, 278 bp, Setaria italica
  Peptide Sequence Number=SeqID_95576
taaaactacctaaacaaaacaataaaacgatagatgtaagagatttgggagctcagacagccaagggtttggtcgtcaaatactaccgaggtaatatcagaaactctagtccacgaaaattgctcatcaccgctccaacctcaaatcaaccgttgcggccacaaaaaatgggggaaaaatctaacccacgatacgcttgaaccgaagaagaggcatattgcggatctgacgcaaagcggtagctgcgacgaggcggcggcggcggcggcggcgcgtgc

SEQ ID NO: 29603 - DNA, 434 bp, Setaria italica
  Peptide Sequence Number=SeqID_95577
gtgcaaggcagctgctactgctagcattgcatcctctgctctcatctctgaactagctagcaacaacaatggcggcgagcaatggcgcccccctggtggtgttcgacttcgacaagaccatcgtcgactgcgacagcgacaactgggtcgtcgactccctcggcgccacccgccgcttcgacgacctcctccgccacctcccatggaaccacgccatcgacgcgatgatgggggagctgcacgcggagggcaggacggcggaggacgtcgcggcctgcctccgggcggcgccgctgtccccgcacgtcgcggcggccatcgagtccgcgcacgcgcgcgggtgcgagctccgggtcctcagcgacgccaacgccttcttcatcgagaccgtcctcgcgcaccacggcctcgccgggtacttctccggcaccgac

SEQ ID NO: 29604 - DNA, 304 bp, Setaria italica
  Peptide Sequence Number=SeqID_95578
agataatagtttcccgtaataaatgtcattatgatgattatttatatattttcatctcatgcaacccgtcctcatactagcaaccaaacaggttctcagaagagcctggctcgtgcgaacaggcaaccaaacacaatgctcctgcatgtattaggcctggctccggggagcctggctggctggtgcgagccaggctagactcctccatccaggcaaccaaacaggcccatagtatcagggccagaggtcttaagttcgaatcttggcgggcgcaattaaataaaataattgcagcccacgtagg

SEQ ID NO: 29605 - DNA, 275 bp, Setaria italica
  Peptide Sequence Number=SeqID_95579
ggggggtttaggggttttcatccaccttgcagctgaggagcggcgggtagctgacgattgccgcagcgacgtcggcttcggcgaggccgatgccggcgaggaaggcgcgcacggcgtctggcttgacgggggagctgaggcgggatacgtacttggaggccttctgggcttgcgctggcgtgaggccgcagctggcgacaaggtagtcgttggcgaggaatccggtgggcggtgtggcggcggcggcggcggcgttggtggacagggagagacgg

SEQ ID NO: 29606 - DNA, 723 bp, Setaria italica
  Peptide Sequence Number=SeqID_95580
tttttttttttttttcttttccacataaaggacttctccataaagtactatagcagagttcttatcaacgggatctgagtatctaatgcatcatagagatgtcaagttgtcgactaacccaaaacaatgcgtccactcatcatcaagaaaaagcgataggatttctgttacatatcctcactaatcaatgaccatgactaaaagctcataacttgtgagctgaataagcaaccttcaagagtaaattgttagcaataggccaaattgctcaccacctgacctcactgccgtggcctcctccggagtatgtaaacatcggattcctcgtaggcgtaatccgggtcgaggtgctcccgtgccaccttctcgatcaccgggaaggcggacgggacggagtcccagaacgcctggtgcgcctcgggcgaccggatctggtagccgagcaacaccacgccgcgctcggcgtcggcgagcgcgtccatggccgcgatgaggtgcggcacggactcctgcacgtagaccacgtctgcggcgacgacgaggtcgaagcggcgcggggtggctagcgtggcgagatgcgcggggcagttccagtggagttgggcgaggcggggcgcgcgggggaggtggaggcgattgcgccgcaggttgcggcggagagcggggaggacgggggcgatgtcggtgaggacgaggtcggtgaggccgaggcgggagaggccg

SEQ ID NO: 29607 - DNA, 263 bp, Setaria italica
  Peptide Sequence Number=SeqID_95581
ttgtcacattgcaattaacaaatgctaacttcgataaggtagttgagctggcaaagcagctctaggtttttctttgctgttgaatctggttttgcctggctcatgtttgggaattagggctgtttgcaagtcctgttacatgatttttagtcaatacatattggtggttcttaatcactcccttttatcttgtcggtgaatttagctttaggacagagcttattacagttccagtaatagataaccactatctaggtgcttta

SEQ ID NO: 29608 - DNA, 281 bp, Setaria italica
  Peptide Sequence Number=SeqID_95582
actacaagatgcccccaaacgtagaagcccctgtcagtgcctagttgcagcctgtaagatgcttcttgtgtttcttcccttatagcaaaactttagatggttgttgccggatgaacacaggtccacttttggtatacacaagggttccctgtttgtcaatgatgacttaactctctgcagacttgcagtggttgatgtcttattttttttcctggaacttttcccataatgtactgatacagaagaactgtgttgatcgtagcatctagtttgtattctaa

SEQ ID NO: 29609 - DNA, 235 bp, Setaria italica
  Peptide Sequence Number=SeqID_95583
agggtatcgccgggatctccttcgacgccgcgacaacgacgatgagcctgccgatcatcacgctggacgccaacacggaggtggtgctgcggaacctggtggcgtacgaggccgtcgccgtgcgcgggccactggtgctggcgcggtacacggagctgatgaacgggatcatcgacacggccagggacgtgaagatcctccggcagggcggcgtggtggtgaaccagctgaagag

SEQ ID NO: 29610 - DNA, 811 bp, Setaria italica
  Peptide Sequence Number=SeqID_95584
cgccaaccaccaggacgacgggtacgacatcgaggagcagccggtggacggcggcgacgccgaggacgaggagcagaaaccagccgccggctgggaatacatcaagcagctgctcgtcaccatcgggggcatggcgtcgggtggccggatacgctacgtgacgaagccgatcgcgttcgtcgtcaaggcgccgtggaagatgctcaccgtcgtgccggggttctcggcgatgaagcagcccgtggaggccttcttcatgtccggcgccgacgggagcaccaccaacccccgtgacccgagcacctccgccgccgggtacctgacccggccgccgctgatcgaggagatcatgatcccctcggtgtccgagctggtcaacgtcggcatcaagttcctcccgaccgccggcgacctgtcgaccgtctccttcgacgccaagacggcgaccttcagcctccccgtggtgaccctggactctaacacggaggtggtgctccggaacctggtggcctacgaggcggcggcggcgtccggcccgctggtgctggcccggtacacggagctgatgaacgggatcatcgacaccggcgaggacgtggcgctgctgcggcggggcggcgtggtgctgaaccggatgaagagcgacggcgaggtcgccaagctgtggacgggatgacgcggtcggtgcggctcaccaaggtggcgtccatggacagggcggtcgaggaggtgaaccgctactacaactcgaggtggcgcgtgaagcgaagcggttcatgcgcaagtacgtgttcagctcgtggcagttgct

SEQ ID NO: 29611 - DNA, 498 bp, Setaria italica
  Peptide Sequence Number=SeqID_95585
tgtccgtagtaaggtcggtcggtaggtccggtcggtcgtactaaggtccccgtctagtattcgtacgttctacttctagtttcggtcttactttctaaggttgtcttcggtctaaggggtaagtcttgccgtccaagcccatcgtcgtcaaggccaagctcatctccaaggtcgccgagaagaagatcaaggccgccggcggagccgtcgtgctcaccgcctaggtttcagtccttgtctgcctcttggttttgagatctatatctgaactagtagtgctttcctgtctcagctatttgtgttaagaagacttgctagcttttaaattgctgtggctcctgcctggtgggacagtgcttatgaggattttgcaattagtgatgtcagttcatatcaaatatcccagatatatcaatgctatcttttgctaccagttatcgcaatttcatgtgtaatcgattcgtgatgcataacctgtgatctatgatatagtgttaa

SEQ ID NO: 29612 - DNA, 811 bp, Setaria italica
  misc_feature (792)..(811): n is a, c, g, or t
  Peptide Sequence Number=SeqID_95586
tccttcccctccaaccccatcacccggcggcggcggcgagcggcgagcggcggagatgacgacgagcctgaagaagaaccgcaagaagcgcggtcacgtgtctgcggggcacggccgcatcggcaagcaccgaaagcaccctggaggtcgcggtaacgccggtggcatgcaccaccaccggatcctcttcgacaagtaccacccgggctacttcggcaaggtcggcatgcgctacttccacaagctccgcaacaagttctactgcccgtcggtcaacgtcgagcggctctggtcgatggtgcccgctgacaaggccgcggaggccggcggcgacaaggccccgctggtggacgtgacgcagttcggctacttcaaggtgctcggcaaggggatgttgccgcccaagcccatcgtcgtcaaggccaagctcatctccaaggtcgcggagaagaagatcaaggcagccggcggcgccgtcgtgctcaccgcataggtctttttacatcttgtttcatctttttgtctgcgctaagagaacttctaaatttgttgtggatcctgcgttgtgagacagcgtcacatgagttatgaaaccccggttttgtgcacttataacggatgcaagttcattctgcctcttggttttgagatctatatctgaactagtagtgctttcctgtctcagctatttgtgttaagaagacttgctagcttttaaattgctgtggctcctgcctggtgggacagtgcttatgaggattttgcaattagtgatgtcagttcatatcaatnnnnnnnnnnnnnnnnnnnn

SEQ ID NO: 29613 - DNA, 918 bp, Setaria italica
  misc_feature (874)..(918): n is a, c, g, or t
  Peptide Sequence Number=SeqID_95587
ccccaatcccgatggcgcgccgcctcctcgccgccctcctcgcggtgtcgctcctgctgccgctcgcccgcccggactcctcaatcctcctcctccactccctcccccgcctccactactccccccgtcccaggcgctgcccaggtaagtcggcggcgagcggcggcggcgatgacgacccgcttcaagaagaaccgcaagaagcgcggtcacgtgtccgccgggcacggccgcatcggcaagcaccggaagcacccgggaggtcgcggtaacgccggtggcatgcaccaccaccgcatcctcttcgacaagtaccatcccggttacttcggcaaggtcggtatgcgctacttccacaagctccgcaacaagttctactgcccggcggtcaacgtcgagcgcctctggtcgatggtgcccgccgagaaggcggcggaggccggcggcgacaaggccccgcagatcgacgtcactcagttcggctacttcaaggtgctcggcaaggggaagctgccgtccaagcccatcgtcgtcaaggccaagctcatctccaaggtcgccgagaagaagatcaaggccgccggcggagccgtcgtgctcaccgcctaggtttcagtccttgtctgcctcttggttttgagatctatatctgaactagtagtgctttcctgtctcagctatttgtgttaagaagacttgctagcttttaaattgctgtggctcctgcctggtgggacagtgcttatgaggattttgcaattagtgatgtcagttcatatcaaatatcccagatatatcaatgctatcttttgctaccagttatcgcaatttcatgtgtaatcgattcgtgatgcataacctgtgatctatatannnnnnnnnnnnnnnnnnnnnnnnnnnnnnnnnnnnnnnnnnnnn

SEQ ID NO: 29614 - DNA, 278 bp, Setaria italica
  Peptide Sequence Number=SeqID_95588
ccaatctgaaattctccacccaaccctagccgccgaggcatccccgcctcccgaccgccgccatggccgaatccggcgactcgtccccgcactccgccgcggccacggacgacacgcaccacgagggctcggacgcctccgcggcggcggcggcgccgccgctcccgccggcgaaggtgcggctgatggtgagctacggggggcgcatccagccgcggccccacgacaaccagctcgcgtacgtcaacggcgagaccaagatcctgtcgctcgagagg

SEQ ID NO: 29615 - DNA, 513 bp, Setaria italica
  Peptide Sequence Number=SeqID_95589
ttaacatcccccctctctcttctcgctcctccgattccccactcgcgatggccgcgcctcgccccccgccgctgggggtccctgggggcgggaccggcggcgccgccgctcccgccggcgaaggtgcggctgatggtgagctacggggggcgcatccagccgcggccccacgacaaccagctcgcgtacgtcaacggcgagaccaagatcctgtcgctcgagaggccactccgcttcgccgacttcgccgcgcgcctcgccgcgctcgccgggaacatgggggacatctgcatcaagtaccagctgccgggggaggacctcgacgcgctcgtctccgtcaccaacgacgaggatctggagcacctcgtcctcgagtacgaccgcctccacctgctccgccccgcgccaggctccggcggcggctccaaccgtggatccacgctccggctcagggtcttcctcttccccgtccagtcgcccccgccgccgtcgccgccggccggcctcctcgag

SEQ ID NO: 29616 - DNA, 407 bp, Setaria italica
  misc_feature (400)..(400): n is a, c, g, or t
  Peptide Sequence Number=SeqID_95590
gtcaaaaagagtgccaataaaaaggtatattctccagctactaaagatataataagaaataaggacgaaatagatgaaaagaagtcacataaaaagaatcctataggagataaagaaaagtgttcaaggctaggtctagttttgaataaattgaaggacagagtcagctctattttatttggaaatggttaataaattgaaggacagagtcatttggcaatggtgcccttctgcttgtactgtgtaagagttcggcttgtacagtgtaagagagtgactgataccccaaagggtgtcaggaacgttggaagagatttttattttgatattaagtgcattgtagttcttcttatcttatcttattggggttgggggactaataggtgccagcaaccccctntatcctc

SEQ ID NO: 29617 - DNA, 189 bp, Setaria italica
  Peptide Sequence Number=SeqID_95591
agttagcacatgggtgagcctgctttctacgcttattgatgccattttccactagggattcctagtaaggaaatgcatgattatgttattgggatagcaactgggtccttctgttacaggccatggtaagcgttcccactttccaactgtcagcatggtcatatgtccagaaatttgggataggtaacc

SEQ ID NO: 29618 - DNA, 462 bp, Setaria italica
  Peptide Sequence Number=SeqID_95592
gaggataccagaatgctgaaaattctgagcaaacaacgtgctcagcgaaattggagcaaggtgcggaagtttgtcatgtacacatggggtcctagcaacttggatccaactgatagaagcggcaagtggcctgaagcttcagtgatggattccctgcacggttccttccacaaaagaagaaagcctattagaagaggaacctccagtggaagcaaacccaagaagcctgctgatatggcaattgaaatcgaaagagttggagagatgcagcagccaagcagttctagacagccgtgatggatgaaggttctggatggaatggttcattgtaatgcaatgctttaagtcatacacagctgtttcagcatggatagatcctatccctttgcataaacctgaatgaaactttttgtgctgctggagcatcagtgatcatgagcgatggttccatcacgaccatcg

SEQ ID NO: 29619 - DNA, 312 bp, Setaria italica
  Peptide Sequence Number=SeqID_95593
atccattgaaaacagcaaactggagaatggatctcaggatgcagcaaaagaggtgcatcatggagttgaaaatggtgatgggcatgttacccgcaagagaccaaggagagcagcagcatgttctgatttcaaagagaaatccatacgcttgtctgagaaaacatctgttgtcaaggtcaagaagaatcggatggaggaggaagaaatagatgctgtcaatctgacaaaacttggaccggaaaatccaccaccttgccgaaagttgattgatttcatcttgcatgatgcagaagggaacccacaaccctttag

SEQ ID NO: 29620 - DNA, 2489 bp, Setaria italica
  Peptide Sequence Number=SeqID_95594
gatggcaccaccgccctccacctgcgccgcctctggtggctcacggacggcggttgaggccgtcaagctgctgctcggggcgggggcagacgctgacgccacggacgactctgggcgccgtccggctgatgtgatctctgtgctgccgaagatgtttgacgccaagttcgccctccaagatcttcttggatgcccgaagtctgagcatggcatgctccgggtggtgacaaggtccaccaactggatttcatcacccgtttcatcccccaccgcggaggatgcacgctcaccatctgctgctgtgatgatgacgacaaagtttgctgacctgcctagggttgcgacatcggagaagaaggaatatccagtggatccatcccttccagatatcaagaacagcatctatgcctcagatgagttccgcatgtactcgttcaagatccgcccttgctcgcgggcatactcgcatgactggaccgagtgcccctttgtccacccaggagagaatgctcggcgccgggacccccgcaaataccactacagttgtgtgccatgcccagacttcaggaagggtgtgtgccggcgcggcgacatgtgtgagtatgctcatggagtatttgagtgctggctccatccagcacagtaccgtacacggctttgtaaggatggtacaagctgtaaccggcgtgtctgtttctttgcccacacaactgatgagctccgcccactgtatgtctccactggatcagctgtaccatccccaagggcttcagcaacagctgcaatggagatggctgcagctatgggcttgatgcctggttccccatcatcggtttcagcggtaatgtctccatttaccccaccaatgtccccttcaggcaatgggatgcccccttcattggggtggcagcagccaaatgttccaacattacaccttcctggcagcagccttcagtcgagcaggctccgaacatcacttagtgcaagggatatgcctgccgatgactactccctgatgcaggatcttgattcccagcttatgaatgatctgtgctattcacgtctcagttcatccacagggaaccactctgctcgaaccaagtccctgaatccgtcaaacctggatgatctcttctctgccgagatggtctcatccccgaggtatagtaatgctgaccaaggtgctatgttttcaccttctcacaaggctgctatcctgaatcagttccagcagcagcagcaagcactgctttctccaatcaacactggagtttactcaccaaaggctgtggacaaccagcagttgccttcacactcatccctgttacaagcatcacttgggatgtcctcccctggccggatgtctccacgatgtgtcgaatcaggttccccaatgaactcccacctagctgctgctcttgttcagcgtgagaagcagcagcagcagcagcagacaatgaggagtctcagttctcgtgaccttgggcctagtgcagcacgagcatcagctcttgttggctcgcctctaagctcatcatggtccaagtggggatctccttcaggaacaccggattggggcgtgaatggtgaagaattgggtaagctccgccgctcatcatcctttgagctgaggtctggtggtgatgaccctgatctctcttgggtacatacactggttaaggaatctccaccagagaagcaagttacaatggctgaatccattaactctgttggaccctcaccgctaatgcctcctggcatgaacaacagcgaaggttctggtctgaacacacagctggatggacatgaccaagctgcggttataggcgcattgcttgagcagatgcagcttgatcagcaagttggtagtctagcaacataggcctgcaatgagccttgaaggtgttgaggatactatattcttgtctaatgatttcgaagtatttttttccccgtcaattgaggtattcaacaaagatggatagctgaaggtggtgattcagagattggttttctttaattttggaggtaaatcatatacattattgaggttccagtaggttaaagagtgaagttcctcagttggggttgttccaaggccaacccaggtagaatcgcaccccggcagcatcagttcatcgatcagatgttctctattttgttaattaaccctgttaagaaaagaaggcttgttcgccgtgccagaattctttcctttccctagtggtgtttattttgttcattatgatattgatacttgatgtactgatggtgtaagtggttacttgggatcctatagtagtcctgtcaagttcaaaggtatttttttcaccctttacaaattgtcgcggattatcatgcagccttgttttggttagaccttgaggcctgcataatccccttggatgatatttgcaataatgtaatattgtttttgaacttactgctgttgtttagtctcgcaaaccttataaaaaaaaaaaaaaaaa

SEQ ID NO: 29621 - DNA, 235 bp, Setaria italica
  Peptide Sequence Number=SeqID_95595
tatttgtttctggacctaaaccgaatcagacgtctcctgaccaggcagtgtgcacactgagagagcaactcccattgtaccaactaactcagatgcatgccttgcttgttcagctaccttttcaaggggcaaaccagcatcggcagcagctccagctaccttattaacaagaattgtccctgcaaggcctctcctgccagctatgccttgagtcggtgggagagcacaatcatct

SEQ ID NO: 29622 - DNA, 462 bp, Setaria italica
  misc_feature (442)..(442): n is a, c, g, or t
  Peptide Sequence Number=SeqID_95596
gacatgagcgcaaggatgatcaactgggtgaccttgaaaatgtagatgaaggagttgcgcttcatcagcagctgctctctcgacatcaccgccttgaacgattcccagctggaaagcccatactttctggtggtcagcgcagcaggatgggttttggacttgtcgaaaggagtttgcagctccttgtgcatcagctggcctacatgggaagacctgaaacgttctgcaaactctgctacggatacataacgatactgatcctgatcaaggtaccagtattgctgctggtctttcttggaggtgacctcttgaagaaagtcggcgacacctttcctttcagggcagcggaagccagcagactcaaagaactccaagatgttctcccgtggcccatggtacactatgtatccttctgatagtaggattatgtcatacaaaaagnttgtaggtctctggtggtgg

SEQ ID NO: 29623 - DNA, 659 bp, Setaria italica
  Peptide Sequence Number=SeqID_95597
gtgcagaattgaggcatttggcacctacaccttttgagtttccaagtgccaagcttggcacaacagattcacagcccttaggactaggagcaaaacctggagccataatcccatggctctttgaagtattaattcgtgctaaagaagcacaaccaggaagccctgtggttggtgcaacagaattgcaaacttccataccaggagacgcagatattccagaagtcatcctcaaaaggccatcgcgacttataggtggcattcttgttacaataggatcttgatacctggcacatcgggttgcagagtttcccagtgacattacttgtctactaggagaatctctgcatttgggttccaccccttgagaacctgggcttttggcaccagcagaactagaaaattttggcacagcactttgtgctgggcagtcatggcctttgggcaccatatcagtaggaagggcactgcatcctttggtgctaagagctgcggaatgttcagccacagcatttggtgcatatgaatcaaaatggttgccgctaagagttaatgaacaatccctgcttgtcccatccaaggataactgctctgctgctgtcatccttgcaggatcactaggcacagctttaacagaagacttgtaccataatgatggctgc

SEQ ID NO: 29624 - DNA, 1067 bp, Setaria italica
  Peptide Sequence Number=SeqID_95598
ttgttactttggcttcttctgttgactatacaacatccaattcatcgctgaagctgttactgcctcttgctcatcctgcacaggctcttaatgttcctgcggtcccattgggtacattgttggcagcagcatatccgtgggcgtctggtccaccatatcttttttcctggcttaatcctcaaatatcagctcaggacatgatgcacccagagctgttgtctaagcttgttttcaacaacttttgtaagtagtctttcgttacacactgacactgtgttgtcttgatgtaatggtatgtatctattatctacctgttctgctctcttgcattaatgcaagctgtggttctatacaattagttgtgtattcgctccatgtttaaatatatgtgtgaactaattaacttgttctaaacgtcatatatctagaaaggagttagtactatttctgatagttactacattatgcatcactgctattttggatctacaaagatgtgtatgttcatagaagttgatattatcatacaatctgcaggtacagtgcctgcaaaggttgtactgcaactcacgactgcttttagggaaggtggactatgcaatcgaaatggaaccttctcgtacaaggatcatttgcgagagtgccagacacctgtcctggcattggctggagataaagacctcatctgccctccagaagctgtttacgaaactgcaaaactcattccgaagcacaaggtgaagtatagggtgtttggaaagccacagggcccacattatgcacattatgatttggtcggaggtcgactggtatgtattctgtctcctgacaagtgacacctagcatgaggtgttcacattgaatgtgccaccttttatgagatcgatctttgcatcatgaattcgttatatcagcaatgataccattcctgtttttacacaggcgatcgatgaagtctacccatgcatcatagaattcctctctcgccatgactagtcgttgatttggttatattatgctaacactgagtaacatacgagtatacgacaacatgttcatctcagaag

SEQ ID NO: 29625 - DNA, 1575 bp, Setaria italica
  Peptide Sequence Number=SeqID_95599
catctggctcggtcacttttcaggatgcctctggtagtattcagcctcttgataaacagggtgcatttgaggccgcttcccttcagagttctagtggctatgctagtgattgtgatgaccttggaatagttgctttggatgaaccacctttactcgcagagctttccaatttttttgatcgaatctcgaagcttatggaagaagctgctacaaatggaaatttccacgagatcacagaaaaagtttctgttctctcagaaatggtagagagctctaccattattggtccagtgagagaagaaagtctacgtcttttgaagaattttcaggaccagttggattcatgggagcgctttgtatcaacacagatggatctaacttctgaatataattgggacttcgaccattacctggaggaggatatacctgctgcggtggaatacattagacaacacagcaaaacaaaagatgggaagttgcttgcaattggacattcaatgggcggaattttactatatgcaatgctttcgagatctggttttgaaggagttccgtcaaatttagctgcaattgttactttggcttcttctgttgactatacaacatccaattcatcgctgaagctgttactgcctcttgctcatcctgcacaggctcttaatgttcctgcggtcccattgggtacattgttggcagcagcatatccgtgggcgtctggtccaccatatcttttttcctggcttaatcctcaaatatcagctcaggacatgatgcacccagagctgttgtctaagcttgttttcaacaacttttgtacagtgcctgcaaaggttgtactgcaactcacgactgcttttagggaaggtggactatgcaatcgaaatggaaccttctcgtacaaggatcatttgcgagagtgccagacacctgtcctggcattggctggagataaagacctcatctgccctccagaagctgtttacgaaactgcaaaactcattccgaagcacaaggtgaagtatagggtgtttggaaagccacagggcccacattatgcacattatgatttggtcggaggtcgactggcgatcgatgaagtctacccatgcatcatagaattcctctctcgccatgactagtcgttgatttggttatattatgctaacactgagtaacatacgagtatacgacaacatgttcatctcagaagatttttaagtgggctgaacaatcttttccatcgccgcctcaatgaatgaccagaaaaataggtaaatgtccgcgatcatatgatgtatcactgtaaacatgctactgtatatcagttagtacttctcacttccttttttgaggagaagttagtgctaatcttgttgtgaagaaaaggtagaaaatatactgtaggttacatgtactccgaacaagaagctgtagcttaggtcgcagaaactgtaccatacagggcttctgacgatgtaaccttttgtctgtgtcaggtggatacccttgttgacatgtaagtgtaaacaaaaaatgtacatttatgttgtatcatttgggaattaaaaaaaaaaa

SEQ ID NO: 29626 - DNA, 488 bp, Setaria italica
  Peptide Sequence Number=SeqID_95600
cgaccggcctcaacctcgccggcatgaacctgagcggcaccatccccgacgacatcctcggcctcactggcctcacctcgatcgtcctgcagagcaatgcattcgagcacgagctgccgcaggcgctcgtgtccatcccgacgctccaggagctcgacgtcagcgacaacaacttcgccggccacttccccgccggcctcggtgcatgcgcctcattgacatacctcaacgcgtcgggaaacaatttcgccggcccgctccccgccgacatcgccaatgcctccgcgctcgagacgctcgacttcaggggtggctacttctccggcacgatcccgaagtcctacggcaagctccggaagctcaagttcttgggcctctccggcaacaacctcggcggcgctcttccagccgagctgttcgacatgtcggcattggagcagctggtcattggctacaatgagttctccggcgccatcccggccgctaag

SEQ ID NO: 29627 - DNA, 333 bp, Setaria italica
  misc_feature (134)..(134): n is a, c, g, or t
  Peptide Sequence Number=SeqID_95601
gcaccttccagtagtggaacatggtgaagtcattgccatgttggacattacaaagttcctttatgatgcgatttcaaggatggagatggctgcagaacaaggcagcttaatagcaactgctatagaaggggttnagcgacaatggggaaatgactttccagggccacatgcattcatggaatctcttcgagaacagatgttcaagccttccttgtcaactatcataactgaaaatagcagtgttccagtggtatctccttcagatccagtaattctagccgccaaaaagatgagggaacatcgagttaactcgatgttccctcattctttttg

SEQ ID NO: 29628 - DNA, 256 bp, Setaria italica
  Peptide Sequence Number=SeqID_95602
aggcgcgcgagcaggcggctcccgacggggaagtggacggtgagcatgccccggccgcgggtgccccgcccccgcgcgatccctccccgcgccgccgtcgacgcggaggtgcaggtcctcgacctcgcacaccgcggcgtagtcgaggcagcgcctgaggtccggctgcgtgagctgcccgccgtggaaggcgagcgagaagcagtccatccggcgcctcccgcgccggtcgatgagcccgaatgctccacccgcg

SEQ ID NO: 29629 - DNA, 1145 bp, Setaria italica
  Peptide Sequence Number=SeqID_95603
ttttttttttttcttatgtgcgtaagcattcaaatgttagatactcatgacaaatggtaccaaagtaacaggttgcaacatgccccttttgttctggatctgagaagacatggagttcaacaacaattggtaactctagagactggatcgacatacttcacaccggatgcctgatagcattactaggtggaagcaacaattctctcatcatttcccaaggttatcctgatctagcatattgtctgaaaaacacttctcattgctaaaaatgagattctaagactaggccttttgccttttggtttttgccttaggagccacgaaatcgtcgtcgtcatcatctgactcgctacttgccttcctcttcttttgagatgtcggttttccagcacttttcttagctgaaacggacttcatagcagatgaagccggtgtcttggttggagaagtaggctttctcttggaaacagttgttttaactggtgacttcaacttttggccctgtttcttctcaaaaacttttctagccacatccaatgggagcaaaccccattccatcaaccaggttgcagccatgtcactagtaggcacctgctcatagagcgattcatagaaaatcctcaatggatccctttccgtaggaggatcatgcttctgccctggcaagtcatacactttcctctctctcttcgctttctcaccctttacaacgatcatccttgccccttctttgacacccgctcttttctttcttttcttgtcctccttgagatcttccaaatcttcatcttttagtttcttgaccttggatgccttggcattactgtttttcttctgcgaagttggcatgaaatcatcatcgtcagactcgacttcttgtttcttaactttagaggcctttgtgctgctattcatggtgcctttctgcttctcgtttcccttcttagctcgggaatgcgagatcggaaggttgtcttcctcgtcgtcgtcctcctcctccttctggactttggaggcgctcgcattgcccgcctttttggccctagacagtgcgattggaacattgtccaactcgtcatcgtcttcctcgtcctcctcctccttccggggcctctttaccgccgcagtaccggccacggtggcgt

SEQ ID NO: 29630 - DNA, 532 bp, Setaria italica
  Peptide Sequence Number=SeqID_95604
aagtaaaagaataccgtacgtacccaatcctgtcaacgtacaaggggcacagcgcacgcacgaaagcgaagcgaagcgaagccaagaggatcggtgctcgtgcgggacgggaccggacgggcgccctccccctcgctgctcggaagctgctcgattcggccagcgataaaaccgttcggggggctccatcgcaacattcttcgcctcctcctttcctccccccaaaggcgcggcgcgaattccacttccgggttccggcgcctccccaccacgcggcgtcgccgcctttttcccgtgcgctgcccgactcgtttccttcctccgccgcttttgttacgccgcggcctcgcctgctcgggcgcgttccctccacgttcctcctgggctcctggctgcccgcctgctcggcgcgtgccgcgtggggttcgttcgtcctgcttcctccgatcgggaggcggagccgctccgtggaatctgactggatcgtcgagcggggacgaaggctcggggctcttcaaggagggggagcgga

SEQ ID NO: 29631 - DNA, 1519 bp, Setaria italica
  Peptide Sequence Number=SeqID_95605
ccacgaccagaggcagcagccctcggcggtatccagttggctcgactcggtgcctaccgacccccgcccccgattccggtggaagcagaggtgccgacgtcggcgtcggcgtcgtcggtcggggttggggcagaggagaggagcgcgaggcagtccgcggcgactgagaggaggcgatcgcagcaggaagagatggagcggaggcggttgcaggaggaagaggtgttgagggagcggaggcggtcgcaggaggaggagatggggagggagcggaggcggtcgcagcaggaggacgaggtggaggagagggtgataagagagtcgtcggaggcggcggagaggaagcgggagagggagaaggaggaggacgacctggaggcgtaccagattcagctggtgctggagatgagcgcgcgggacaatccggaggagatggagattgaggtcgccaagcagctcagcctgggcttctgcccgccgcagacatcccccgcggaggtcatcgcggccagatactggaatttcaacgctcttacctatgatgacaaaatatcagatggattttatgatctcttttacgttgggaatgggccggcatcagttactatgccctctttttctgagctacgagcccagccattttcacataaagtcaactgggaagctgtgttggtccacagaggtgaagaccctgtgcttatgaaacttcagcaggaggccttaatcatggctcttgaccttcaatcaagaacatcagaatctgtgagcaatgctttggtgaagagacttgctagtctagttgctagacacatgggtggaatttttgatcctgagagcatgtcagtaaaataccagaatatgcttaactccttgagaagtagcattggaagcgtagtagtgccacttggtcaactaaaaattggtttagctcgccatcgtgccctgctatttaaggttttggctgatggccttgatgtaccttgtcggttgctgaaaggaaggcagtacactggatcagatgatggagcattgaatattgtcaaatttaaagatggaagggagttcattgttgatcttgtggctgatcctggtacacttattccttcagaaggtgctgaaaatttcacctctgataatcatcacttgaagaaagatgacactaccaacctgctgggatcatcttttagtggagcatcgagttcagcctatggttcttttgagtatgagttactagacagaagatccacttcaagcaatgttggtgcttctgatacagatggacctacaactaatcagacaagcaaccaacaaagtatgctatcaagttcattcgagaaactatcagttagcacatgcactagtggaaataagcctatcattaatgaatctacaaacacagactacattatggttgcaaaaaaacaaagagaaatcaattgcacctgtcgattcttcatcatcttcaccatctacgtcagatatgggcagcactccagtcctccggagaatggaaggtgaa

SEQ ID NO: 29632 - DNA, 612 bp, Setaria italica
  Peptide Sequence Number=SeqID_95606
cgttatggaagaagacctcggagaggaagcagatttctgctgcagggccttgtggtgctggtggacgctgcttccccaaggcaattggatctcatcacttgtgctgctcccatggctagctgtggcggcgctgtagagatagctcccgccgctccctccggcttctgaacaaactgtagtagttgggaatagcatctggccttccttgtacatctcttccccattagtggccaatcccccttgtatgagctggctccatgaatcctgctggccgtggctgctggtgctgctgctgtcatggtgccacggcgacgtgctggtcgtaggcagcgggtagtgattggagagcagcagcgaggagaaggaatggagaggggacgacgaagaagacggcgccgcggtggtggtggtggtggtggtggacggcatgaaaagagaaggatggtgctgctgctcaaaggggggcctcaaattattcacgctccaccatccatggcctgcctctcccatctcgcccactagaggcgatgatttgtggacgagtcccctatccatattcccctctgatatgctgatctctctctctctcactcactctctctctctctctac

SEQ ID NO: 29633 - DNA, 685 bp, Setaria italica
  Peptide Sequence Number=SeqID_95607
gttcgatccgtccaccactagtttcagttcagagaaatctgaaggaaacagagtgagcagactagcggagggaggggctcgagctggcagggcagggagagatgaagcccaggctgagcggcggcggcttcctcctggtcttgctgcttctgaattcttggagagcggtggctcaggctccgccgccgccgcagactgatccggttgaagcggcggcggtgaacgcgatcctgagcaagcttgggctgagcgcgccggcgtcgtggaacatcagcggcaacccctgcagcggcgcggcgacggacgacacgcagctggacgacaacccggccttcaacccggccatcaagtgcgactgctccgaccgcaacaacactctctgccacgtcatcagattcaagataaacacgctggacgcggttggtccgattccagaggagctgcggaacctcactcatctcagaaagctggacttgagaaaaaattacctcactgggccgttaccagcattcattggagaactaactgctctggaatacataactgtcggcatcaatgcattatctggacctatcccaaaggagcttggaaatcttgtcaatctcgtatcactggcattgggctcaaacaattttaacggcacacttcctgatgagctgggcaaaattgaacaaaacttcgaaca

SEQ ID NO: 29634 - DNA, 260 bp, Setaria italica
  Peptide Sequence Number=SeqID_95608
aagtaacgagaaaaagagctgaagttcatttgaatcaaactgcaaaaggaaacgaagaattgcctttcgatgactgacacctgcgtgcttgcgagaaccaagtagcttcaacttccttactttcggtgtcaacacacggataaccagaggaacaacacgacttctatgatctttcagaattgacaaggagtcatgtgaaactgcccatgtggtcatctcttcacgaagagttttaatgtcaatcagatttttaatgtttt

SEQ ID NO: 29635 - DNA, 620 bp, Setaria italica
  Peptide Sequence Number=SeqID_95609
cccggacaggttctacaagtactacctcaaggtgatgttcaccaacaggaaggagaggatggaactgttgcaggggctgttaaccagcaccatggacgccaagatccctgttttccaacagaaaataatgctgctgtggggcgaggaggacaagatcttcgacatcgagctcgccaagaagatgaaagagcagctcggcgacaactgcttcctgcacggcatccgcaaggccggccacctgctccacgtcgagcggccgtgcgcctacaaccgccagctccagaggtggctcgcctacgtcaactcccccgccggaggagaccaggccagctgatctgctgatgcatgtgtgctccctgctcctgatcctggggatcatgcatgcatgcacatgcccagttccacatgatacgccgtgaccattccttcgatatgcacctgttcttgctcagttattcgtgttctgtttttgcgagaagtaggcagccgacaggccaacacactgtagagttgacctcctgggcctggtggttcagtatactcatgatcgcctcattcgtcttggattcaattctttgtaattcttcagtcaactacacgcgcaatgcaatgtaacacaa

SEQ ID NO: 29636 - DNA, 882 bp, Setaria italica
  Peptide Sequence Number=SeqID_95610
aaaaaagagctatccagctttcatgaacatgggctcagggatttagatgatagaacaagccgtcgtaggcaaacagttcagaccattagttgcattggtagcttacatatagtctcacctacatgacaacctaagcttcaaacatttatgtgttcacatcccttataagaaagagaagcatgtctagtgcaaatggatagcccattaaacgacaatggtccacataccacgaactggaagtatgcaaaagctcatatggcgaacactaacatagtaacattagtcatctatgacatatcttcatggtagagatgaagtccaagaccaagacgtgcacaagcacgacgaaaagccatagcttctgccttctgcacgggatctccatagcctgtatcatcgacagaagcagttccagtggcctctctgtagatctccgcatcaatcccatgaagagtcacacggtagacaacagatacagatttcccatcagatgaataaacaatgctgcggacctcaccagaccactctggagcatgtatgttgagaattttgttcacaatgtgccatgggatgtacttgatagcgaagccgttatcctcgacgcgggtcttcacgagggagtcgggaaccctcttcccgagctccttgaggacctcggcgagcggcttgctgatgccctcggtgggggcggcaacctcgccgccggcgaagtcgttctcctcctccgacgggagctccggttcctgcggccgccgggacgcgcgggccttcgcggcgaaggggcgcgcgaggcgaggggtgggcgcgcggcggaggaggtggcgggctagtgcaccgggagccatggcggggcggagggacgagggagcctcggggaatgcg

SEQ ID NO: 29637 - DNA, 265 bp, Setaria italica
  Peptide Sequence Number=SeqID_95611
ccccggccagcggtgacagcgcggggaagttgggtgtgagcggcggcgggtgctgaaaccctggcgagagtagcgggtaaggcgacctgggcgtcggcgagagcaggttgagaaacccgctcggggaatggagtatcccgggagacggcacgggcggcggaggcgggggatggggatgcaaaggcgggggatgagggtgtggcggcggaggcccctgtcccgcagctgcagacgccgcggcagctgctgctgctgctgcggcggc

SEQ ID NO: 29638 - DNA, 459 bp, Setaria italica
  Peptide Sequence Number=SeqID_95612
ttgtgaatgtagtagtagggacatggatgtgaaaggatgtccatagccccatgtgatgcaaggaatcaggcattagggcaagctttgtccctatctccacgtttcagtgccgctcatgctaattcctcaacatggtacagctttgggggtgctcgttccatgtgcctactgttcgcgtccttgtggtctgtgtgtacaccctccttgtagtgtcttgtgtcctatatctcctgccttgcagcttttgcagtgaagctgccatgatgggcttcttccgggacaccggcgtcgtcagtgtcggtggccgcggcggcagcaggacgggcggcttgttccagtaccagcgactggaatgcctggacgaggaggtcgctccgaggtcccggtggcggtggctgccggcggcgctgaatggtaaggtggcttccccctgcttgttccatgtcaagaaggtgaagt

SEQ ID NO: 29639 - DNA, 315 bp, Setaria italica
  Peptide Sequence Number=SeqID_95613
cgccctcgctcggcgcgctctccaacctcaccgtcttcggcgccgccgccaccgcgctgtcgggccccatcccggaggagctcggcaacctcgtcaatctgcagacgctggcgctgtacgacaccgccgtgtccggctctatccccgccgcgctcggcggctgcgtcgagctgcgcaacctctatctccacatgaacaagctcaccagcccgataccaccggagctcgggcggctgcagaagctcaccagcctgctcctctggggcaacgccctctccgggaagattccgccggagctctccaactgctccgcgc

SEQ ID NO: 29640 - DNA, 588 bp, Setaria italica
  misc_feature (7)..(7): n is a, c, g, or t
  Peptide Sequence Number=SeqID_95614
ctttgtntaaaagataatgagttaataagcactcctactactgtttctgttagcaaaatttacaaactactttgtatgtcttgcaaatcaagagaccccaagcatagaaaactcttttcatgaagttggatggtcattctaaatttcaggaccatttttacccatgagccgaattctgaaatggttctgaaccacgagctgatgatgctgtttgtgttgatcgagagctggatgcacttaagatgatgctgccccaatcgtactagtttaagcaaattctattgccccaatcatatcacagactcacaggtgctagatctattgctgctcatgctaattcacaaaaggatctccaaattttcactgtagtggtttcttgatgcaaattgatcatactgtcatgtgtggtcctacagcaaaattcatccatgtcaagttatttgtttgcttaattaagatgctaatgttacattagcattcaaagatgctaatgctagtatttgctttaactattacattatacctgttcttggatagaagtcttttgttcttttttgttagtatacttgatctatagtatactttcag

SEQ ID NO: 29641 - DNA, 284 bp, Setaria italica
  misc_feature (12)..(12): n is a, c, g, or t
  Peptide Sequence Number=SeqID_95615
agaagtctcctncgggttgcttggcacctcactgccataggcgacctcacctcgctatttccattggttgctgcctggttgccctttgtggtgataaagcgcccattaggacctcgtggaagatgcctccggcgaacagccttttgctgaccaacacccatctcagacgaaccattatattctgcggacatattcagtattgcaggagcagagcactcatatgcctttgctgtgttccctggatcttgagacaatgatagggtaacagcttcaaatccagccca

SEQ ID NO: 29642 - DNA, 1480 bp, Setaria italica
  Peptide Sequence Number=SeqID_95616
ttgttcgttcttaatttaatttagttaatttaacttaagtaaggtaaagtcgtactttagcgagtagtgtgaaagagcacctgtatgttggttctcttccaaaaccagatgcacaggctatgcctcaacaatgcgcatatgatacagaggaaagcgacagggggaaataaagatctgatctaacatcgactatgatgtggagtcactggacaagtacctctttactggagatgcaagcactcctactccatgggggtggaaaagaacaaggcaagctgtgaaacacaacacagtggcaattaccagagtcatgccaagtcgcattctcgtggcaccaccaggatacttaacaactagcgaggggttaagccacctagcattcatatcaggctggcagcagtacctgtgtgagacatctctagtcacaagtgggacattttcttcctcataagctgcattagccgagtgcatattgttatcaccaccagcaccagcattttcattagcaagtggcacagaagtgcctaagcttcgctgatttggagaatcaatgctaatcaatcttgtttcaagctgcgtttccttgtcattgttagctctacaatcaataatgtttcgagcatggcttacatatccaagaaatgctgttacatgatcttccaacctccccttttccaagtttgaaagaacctcagaacccatgatgttgtccattgacttcacaattatttccagaacattcataaaatcattccttatcaagaacttcagtatgcatacccatctctgaatattcgttgaactcagtacatttttaaattcgtcaggagcaggcttcctgataagccatccaatgtctgtaaggaatccagacattgcagccatttgaagtttccgacgctcacaaggatcacaaggagcaccgggtaactctccaaataagctactgtcagaagaaccagaaagagcatcctgtatcctctctagctcagaacacagctgtttgctaccaaaaaggataggaacaaaatttgataatccaaacatgttttcgacttccacaaatgcaggtccatgaatgtctggtcttgactgagtgatgtttattcggaaaatttcatgttgagaatcaacaataagatcaccattgtcaatgcaattgaaggtatcaagagactttaaacggtagcaatcatgcttcaaatagtccccatcaaatgacagaagtgacctgaattttggctggtcaagggaacttccacaaaggatcagctcaacaggtttcccagcttcaaaccatgttggataaacataatcgatccttggggattgtacatctaacctggtgcccatcaatgttgctccatctttcagtacttgaaatatcatgttattgacatgaatgaagaaggcccctttacccaacagaagactggttaggggaatttaccaaagtttctgagaagatttgctgcatcgt

SEQ ID NO: 29643 - DNA, 1886 bp, Setaria italica
  Peptide Sequence Number=SeqID_95617
aggaagaatggagattgatagcataagtcatgtgtgtgttgggtgtggttggtggtgcatgtgcaccctatctatttatctatgtagtaggaacttattccctaaaatgcccctgctacctaccactgtctatctctatatatgtaccccaaaactactttgctatgtgtggttaatgagaaagagatcatttgggccaacaaggtatttagattggtcaaatgaaattaatgcaagaaaatttattcccataaaaattaatggccgaattccaactcacataacttggtagtgacaaatagacctgtagagttttcagaataaaaaagctcttgtccaacagccaagcaaattcacatgagtcaacagttaaacaggtcaatggcttattgtttcctaaggatcaacagaggggggactttgtacctgaattttggctggtcaagggaacttccacaaaggatcagctcaacaggtttcccagcttcaaaccatgttggataaacataatcgatccttggggattgtacatctaacctggtgcccatcaatgttgctccatctttcagtacttgaaatatcatgttattgacatgaatgaagaaggcccctttacccaacagaagactgttaggggaatttaccaagtttctgagaagatttgctgcatcgtctgataacttgtcccacatatgctgcggcattgcaacaaatacagttaaaatagtgcaaccagggcgaatgtaaccctccaattcaacaggcatgctagccaaccactcaaatatctggtgccgcaagcgtcgaggaaattcagcaggattccagtcatacaacttgaatgagatgcgtcctgttggacacgaggatgagtaggcactcttggtgtcatgtattggagaattggtggtaagttttgcattttcctgctttgcaccaacgcaggcttcaacagaagctgcaaaagtcactacacttttactttgttcagtttgtaaactgggttgtgtacaggttggtgaactgagcacatcttcagatcctgcaggtgttcctctgtccaaaaccttgttgctaagaacagtctcaagcatctcactggttgtgccttccatgttctcttctctaagttcaccatcggcgctaacatctgctgacagatccaattgttcatctatttctttatcaagcaatcctttagaatcaggttttcttcgtcttcttttgttgtggcgctccaactttcttctgcaactccttttatcttcatcgaaatctagtaaaacatggaacttgccgcactgctggcagtagcgcttttggacgccatcgaggatgacagcagaagcgtgcgcgcaacgcagacacacccggtgccggcggtggtaccccttgagctcacgtatatccgcctcacacccaggcacctggcacttcatctccatcgccgccgcacgggcagttcctccagcgactccaccgacacccgcggctcccgccttgccccgtcgggccgcggtcttagtcttcttccgcgcgccggccaggaactccgccgccacgtcctccacctccgcggcggcgaccatctcgtccacctcggggcacgcgcacggcaccatccccgcgaggtagttcgggcacaccagccgcgggtcccgctttctcacgcggcgcccgatcccctgcacccgaagagggggcggtggaagcaccggccccgcctccgcctccggttccggttccggctccgcttccacctccaccggctgcggcataggtgcggggagcggtggcgcggccgcctcggtggggtcggctgctcctattccggcggcgtcgtcgtcccacgggaggaccaacgagtcgtcaccgtcgacgacgaa

SEQ ID NO: 29644 - DNA, 572 bp, Setaria italica
  Peptide Sequence Number=SeqID_95618
cttgtgcttctcagtgttggcaaggaatgccatcatctccttctgcagcgggaaggggcacatccaccagcacatcatagcacaaggacatcgaggcagatatcacatcgtcgcaggcctcaatcaagaagatccatgagcaccgcaggaggagggctttcttcctgggtttcagtcagtccccggtggagttcattaacggcctgatagcttctcagagcaaagtattgaagctggtcgccggcgaagcgaataggaacattgaaaggaaagacgcgcagattctacaaccaaccatgggttgaggatgctgttataagatacctgaaccgcaagccagctaatgagggcccaggtggtggtgctggtggttcttgaggagaggatttcctctagtgcccttttggtgtagaaacaaatttatcttttctgtattagtagcaaaatccagcggatgcagtggtattagcgagattgttcagtgttgtgaaaggatgttcggctagtcactgtatgttgtgttctatattccctaactattgtggaagtataatgccaagagatgaactgag

SEQ ID NO: 29645 - DNA, 707 bp, Setaria italica
  Peptide Sequence Number=SeqID_95619
ttctttggtagtctactaagtatttaagtcttcttctagggaatgaagcgtccggaagtgcttgctacgatgtgctggtggatatacccttcccgctgcagaaggagatgatggcattcctcgccaacacagagaagcacaaggacattgaggcttgcgacgaggtaatatccacctcgattaagaagatccatgagcacctcaggaggagagcattcttcctgggtttcagtcagtcccctgtggagttcatcaacgccctgatagcttctcagagcaaagatttgaagctggttgctggggaagcgaataggaatgttgaaagggagagacgtgcagacttctacaaccaaccatgggtcgaggatgccgttataagatacttgaaccgtaaaccagctagcgagggaccaggcggtggtgctggtggttcttgaggagaggaattctctagtgcccttttggtataggaacaaattgtcttttctttattagtagtaaaagtcggcggtgttagtgattagatttgttcggtgcggtgaaagtatgttcgggctagtcactgtatgttgtgttctatatttgctttaaacggttgtggaaatataatgtcaagtgctgaactgagcatatgatgttgtattgttgtgagtcggtcattgtaccgactgaacggatgacaggccacaactttgctatgaatggcg

SEQ ID NO: 29646 - DNA, 1423 bp, Setaria italica
  misc_feature (1380)..(1423): n is a, c, g, or t
  Peptide Sequence Number=SeqID_95620
acggcttcggcagctgccgcgtacaaggcttcggcggcggcggcggccgtggcgaactccggaggcgtcgacctcacccccgccgccgacgcaacaagaagcgcaagctcccggagaagcagctcccggaccgcgtcgccgcgctgctcccggagtccgcgctctacacgcagctgctcgagttcgaggcccgcgtggacgcggcgctggcgcggaagaaagtggacatccaggaggcgctcaagacgccgccctcactccagcgcacgctccgcatctacgtcttcaacaccttcgccaaccagggcccgcgcgccatcccgccgcccaagaacgccgacccgcccacctggtcgctcaagatcatcggccgcgtgctcgaggatggcgccgagctggaccctgccagcgtggtgcccaagcacaacccggtgtatccgaagttctcccaattcttcaagagggtgaccattgcgctggacccacagctgtaccctgaaaacccactgatcatctgggaaaatgcgcgttctgccgcccagcaggaaggtttcgaggtgaagaggaaaggggataaggagtttgttgcaaacatccggctggagatgaactacaaccctgagaagtttaagctgtcacagccgctgatggaggtgctcggggttgaggtggacactcgcgcgcgggtgattgctgccctctggcagtacatcaaggcgaagaagcttcagaacccaaatgacccttccttcttcatgtgtgaccctcaattgaagaaggtgtttggggaggataaactgaagtttgcaatgctgtcgcagaagatatctcagcatctgtctgccccaccgcccatcaacttggagcacaagattaagctatcaggcaatggagcttccgcaagtgcttgctatgatgtgctggtggatgtgcccttcccgctgcagaaggagatgatggcattccttgccaacactgagaagcacaaggacattgaggcctgcgacgatgtgatatctgcctcgatcaagaagatccatgagcaccgcaggaggagggctttcttcctgggtttcagtcagtccccggtggagttcattaacggcctgatagcttctcagagcaaagatttgaagctggtcgccggcgaagcgaataggaacattgaaaaggagagacgcgcagacttctacaaccaaccatgggtcgaggatgccgttataagatacttgaaccgtaaaccagctagcgagggaccaggtggtggtgctggtggttcttgaggagaggatttcctctagtgcccttttggtgtagaaacaaatttatcttttctgtattagtagcaaattcaagaaagaaagaaaaaaaaaaaaaaannnnnnnnnnnnnnnnnnnnnnnnnnnnnnnnnnnnnnnnnnnn

SEQ ID NO: 29647 - DNA, 239 bp, Setaria italica
  Peptide Sequence Number=SeqID_95621
atgccactaagcacacctgctgaaatactgaattgtttaggaagaactacaaagatcaaagccattccgtgtaaactcgtttgcagtggtaaatataggggggcataatgggatatgagctgatttttgtaagtatcataagctaaggtttggttagattcttatgcatcaactatcaagttgtgataagtccgtgcaagtgcagctgctccatgaacgataaatcagagtttgtttct

SEQ ID NO: 29648 - DNA, 244 bp, Setaria italica
  Peptide Sequence Number=SeqID_95622
gttgaggactgacaacagtgacgactgacaagcaaagctgcaaccatggccgaggaccaagcccaaccatggaagataccgccgatcgtgcaggagctggccaccggcgtgcaggagccaccgagccggtacgtggtccgcgagcaagatcgtcccgccgcggctgcggccgccaccatgcccgagcccattcccatcgttgacctcagccggctgactgctgctgacgacgacggtggcgccg

SEQ ID NO: 29649 - DNA, 251 bp, Setaria italica
  Peptide Sequence Number=SeqID_95623
agcgcaacataccaccaatgccaccaaatcccctacagaactgtgatccctcttgagacttgttggtgacaaactcgagagaacaaccaaactttttgtattcattagcaaaccattccaagagagacatcttttcctgaacttccagctcagcattggtgaagttactataaaacatctgaacaaagagcaggaagctgaccagagcaatttccgtgatgcatccaccaatgctgaacttccagctcagc

SEQ ID NO: 29650 - DNA, 575 bp, Setaria italica
  Peptide Sequence Number=SeqID_95624
acatcttttcctgaacttccagctcagcattggtggatgcatcacggaaaagatgtctctcttggaatggtttgctaatgaatacaaaagtttggttgttctctcgagtttgtcaccaacaagtctcaagagggatcacagttctgtaggggatttggtggcattggtggtatgttgcgctaccagctggatatccgctcatttgatgagctttctgacgatgatggtttgtacgaggactctgattagcaatcagccaacctcacgcctgtgctggcccatggaaggacaccacagcagcaacagctcggggttgctacacctacgcaggaacacttgaaaagcagctgtaagcatatcgtcgtctgttcaaaaaatttttgccaccttctgcataccactattttgcttgactctttgcccctctttgtttcagatccagagcttgatgggcatgggccagcagcctcctcttctagaggagcttaagaacagaatgatgagtcacaatcatggcagtaatgtgtcaagagataccgaacttaatcaccatcatggcagtgatgtgtcatgaa

SEQ ID NO: 29651 - DNA, 351 bp, Setaria italica
  Peptide Sequence Number=SeqID_95625
agctgttgctgctgtggtgtccttccatgggccagcacaggcgtgaggttggctgattgctaatcagagtcctcgtacaaaccatcatcgtcagaaagctcatcaaatgagcggatatccagctggtagcgcaacataccaccaatgccaccaaatcccctacagaactgtgatccctcttgagacttgttggtgacaaactcgagagaacaaccaaactttttgtattcattagcaaaccattccaagagagacatcttttccgtgatgcatccaccaatgctgagctggaagttcaggaaaagatgtctcttttgtattcattagcaaaccaagtacttaaaaccttaa

SEQ ID NO: 29652 - DNA, 2628 bp, Setaria italica
  Peptide Sequence Number=SeqID_95626
taaacaaataagcttgtttcatattgaatagaattcgagtgttccaacaccaaattttttttttttttgcctaaacgaataagcttgtttcatattgaatagagtgttccaacaccagaggctgctcacaaatgcccagagcaagcaaaactgaatagtattacaaaagttgataaaacatagctgaaaccttacaaacatgtctaagaaataagcttcgactcgagtaactgtgctatcctaaatgattgaattaatcagggccaaaagccatgggcgttgccatgtatccagttttttcttccgtttgatattattgtgtagtgtttctaaggggtaactgtcaccatgatcaggtgactctattgcagcaagagggagcaggcacctctagtcgatcttaacagatgagaagaggtagtggacgaagtagaatgagagcaggaagccaatggcaccggtggagagcatgattgcaagagccatgatcaaggagtagccaaggtagagtgttgcagagactggtccactcaggctcctgaggtcgaataccaagtagttgatagagtagaggaaaacgtagaatgcaacagaaccagaagcaaagaaggccttccaccaccatttccagtcctccacgcaaaggtgcatgtaggttaggacaagagaaacctcaccacagactatgaccagcaggaagaggacaatgaacaggaagccaaagacatagtagaatcttcccaaccaaatgctggaaaggatgaagaagagctcaatgaagagggtaccgaaaggcaaagttcccgcaccgaggacaagcagccatgaggggaacttgcgctcagggatctcccgtggaatctggttggtgcggacagggtagtcaatgcttgcagcacgtgtacctagcaagcctccgataagtgtgagtggcacagagatgcagaaccacagagccaggagagtgaagaacaatgagatgggtatagcgccagtgctcttcttgccccacagaatggagttcagcacagtgaggatgacgaaaacaatgccagggaagaagcaggcagtcaaccaggcgacagatttccacccttcagtggttcctttgatagtcctccaaacacggacaccaacatatccagcaatgatgccaaggaagaggtagagaatgatcattccagtcaggagcattcccctggaagcaggggagaggaatcccagagcagcaaacacaattgtaacaactgccataccggtgatctggataccatcagcgaccataacacacaacagctttgaacagcatggctctctgaatacatcaccaacaacaagtttccatcctgagagctcctcattcatctgagcttgtgcttccttgtccatctcctcatatcttgtcagatccctgcggacagtcctcaagaatatgacaaacacaatgccagccaggaagaacacaaccatcattgagttcataatcgagaaccagtgcaccttggcaccatccatcttcaggtaagcatcccaccttgatggccacttgatgttgctcttgacatactcaacctcataggtaaatgtaatccgctcattctcacggatcgcctgagatttctcaagctccaatgggcagttcacagagtcaaccttgtcgtacatcttgagcttggacatggcctcagcatcacgccttacactgcaaggcacgacctcaaacccaacaatctggaatccgctcttgcgatcggactcgaccattgcaacaccatcctcacttgtgaccacaacatcgccctgcgcctggtactgatggaccaagactctgaacttgaggtggttgatgatataatcctcattgctccctgtcgggttgtacccaactgggaacccagtccactggattatcatcccattctgatcagtgaaccgcatgaccggtaaattgtccaggaccatgttgacctggtacagattccgcgccctcttcttgagcagctcagcctgctccttggtgagcgggtccgtggtgcaaaggtacacagattcattgacattgacgcggaatcggtatggcgagttgtcgatctgatcacccatgaggatctccccaaggttctcagcactcttcttgacaccctccggaggcttgcagtatggcaggctgtagtagctgaagggcagctcggtctcaatggaggtgagtgagttgaccttggctgagatcgcctctccgggggagtaggtgtgcatgaaggtgccagggagatagaaggcgtggacagccgggtgcaggctcaggagcaggacgagcagggaggccgagatccatttggatgacggcatcttggcgaccattgcagtgacagctcttgagatcgctcaatcaagaacctcacgacctcagatctggatcgcggccgggacgacgcgggcgagatcaaaacatgggcgcgcccctcccccctcgcgctcccctcctcgagatcgcggacgaagaagaagaagaagtaaacgcttcgccggcgggatcgaggagctacgagaggagacgcggcacgaacccgccaaattttatacccgcccgtctttcttctcccttcgttgcgtgcagtgcagcttaga

SEQ ID NO: 29653 - DNA, 412 bp, Setaria italica
  Peptide Sequence Number=SeqID_95627
gctgcagttcacggtgcatgtgatcagacagtccagagtctggaacacatggctcaggtaaccaccatttgtcctcactgcgctggaatgacttcttgctttcattgaaggattggttcctctgatctgcataccagaactctggcttgtcaaagctgtccaatataccaaggagcatggtttctagcttctcaagtgcaggaaggttcatcaggatgtctgatcttggtgaggtcgccatcacatcgtgtgtgcttccgtcaggcatggactgtacagtcggtgagaattccacaatatattcgcaaatggagaggaggcagtccatctccctgttccacatcgatctcttctcaggtggcagtggctctaatctgtggcaggtcccgaacacagttgcatagagatttgt

SEQ ID NO: 29654 - DNA, 401 bp, Setaria italica
  Peptide Sequence Number=SeqID_95628
ctggactcacttgctgaagcatttgagtccagtacagccattctcgtttctagatccatgtcttctctgaagcatcccctggtcaactgagagataagcatatcgcgttgtgccgcttgcgggcagttagtgtttcttggcaaacttctgcttgacactggaattggagtacgattgggtgcccaagaagcagaactttgaacaggtgagtgccggccaaatgaatacaagtgtgccattgatctgtccctctggctagaactagactgcccttctcttgcagcaaatctggcatgctcagcatcttgctcatgtaatgtccaggctattgtcatatcaaccgattcagaatgctgagagcctggctgttcctgattgagctgctcctgaagcttgcgggc

SEQ ID NO: 29655 - DNA, 1291 bp, Setaria italica
  Peptide Sequence Number=SeqID_95629
gggtgaaggagaacaagctggaccaactacaatttgctcggcagaaattgacatattgctatctgtctgctgctgctaccatattcccttctgaattgtctgatgctcgcatttcatgggccaaaaatggtgttctcacgactgtggttgatgacttctttgatgttgggggatcaaaagaagaattagaaaacctgatagcattagttgagaaatggcatgagcaccatgcagataagttctactcagagcaagtaaagatagtgttttctgctatttatgcaacaacaaaccagcttggagcaaaggcttcagcagcacaaggccgcgacgttacaaaacacctagcaaaaatttggctagatctgttgaggtctatgatgacggaagcagaatggcagagaagccagcatgtaacagcagttgaagaatatatgacaaatgctgttgtctcgtttgcactgggccccattgtactcccagcattgtattttgttggggaagagctctcagagcacgctgtcaaagatcaagagtacgataaattatttaggctaatgagcacttgtggccggctccttaatgacatccaaggttttgagagggaaggcagcgaagggaagctgaatagcgtttcactacttgttcacagtggcagttctgtgtccatagaagcggctaagaaggtgatacagaagtccatagacacgtctaggagagacttgctaagattagttctcaggaaagaaagcattgttcctaggccatgcaaggagctcttctggaagatgtgcaagattcttcacttgttctactttcaaaccgatggatttagctctccgaaggaaatggtcagtgcagttaacgcagtcatcaatgagccactcaaaatccaaatgggtgattcatccttgaacattttatcagaaaaatgaggacctcctgcattctatatatcaagttcatatgaatcagaggcagcagcaggccaacagctagtaccatacattataatttggctggtgtagcgatgagcaacgtaggtttttccggctgctaccttgttgtacatgtatcttgtgcatggatcatggtcttatgaagacctgtgattctttgatagtgagagttcgttgttctctttcgcaaaattttgtcaaaaacttagggtattctgggagtttctgaccaaaatcccaaacctattcgcagctcctttccccttaacatcagtagtaagatgtgttattgggttcttacccattatgataaaaggaaaaaaaaaaaaaaa

SEQ ID NO: 29656 - DNA, 234 bp, Setaria italica
  Peptide Sequence Number=SeqID_95630
ggcgacgagcccggagaagaactcggtgaactgctcgcgagagatggtagcgaggctccccaagctcgcgtacacgacggacttgtcggataggccgtcgagccacgccatgcagccgtcgtcctcgcgctgtcgcgcagcaggctgccgcccgctgccgacgctggggacattgcgtgcagaggcccgacggcgaacaagtcctgcatacgtggcgcgatgtgcgcgagcgct

SEQ ID NO: 29657 - DNA, 989 bp, Setaria italica
  Peptide Sequence Number=SeqID_95631
tgtaaatctagctaatatctagaattgtcatttcccagtcttatttcaaaaagtaggtgatatatcttaatgaatgatatgaaatatgggcaaatttacagaaagaataagtaatgtctgtacaccacaactaaagaatgtgaaaggctaaaatacttcaaataactttatgttctctggaaagcttctgaaactatttgcaggcaaggtgtctacttgtcttcataatcacaagaaaagacttgtacggccgaaacatactccagaaatgtttggccatgctatcctaattgcaagggaccagaggctacaaacctcagagcaagacctcagttgttctttcttctggatactctgctagaaactggtaccattgactcaaagctctcatagccatcatcaaacactctgctgtgacgtaacaactggcttgctgaatcataccccatgagtcgatgaagtgccgagtcagaaaccttcttaccactttgtgtggcagcaaggctactagatccagcttgagtaggcaagcttcttgtgtacgaggctccataatcttcactggtactaacaggaccccctgttaggcactcagcataataagaagtaatatactcatttgttgggattgtgctatcaacagggttgtatgactgttgaggcacgtccatgctgatctttgcatctgcctgatgcactgaaggaaatgatagtgcaaagaccttggagcacttgccacactgcattttgccaatcttggactttgatatgtagatatctgatggcatttgaaccaaattgaaacagctgttgcagatagtgtatggggaagcacctgacagaggtcgcaaaatatgctttctcaccactcgtttctgctccttgtagcttgatctaagcgactcgtagtcaagaattgtgctttcagcatatgaggattgataatagacttgaactaacaaaccaaactaacgtttaactaagaacaa

SEQ ID NO: 29658 - DNA, 223 bp, Setaria italica
  Peptide Sequence Number=SeqID_95632
accagtaaacatacgcactgatcatgtcaggtcgtgtgtttagccgatctttcaggtccgatcgaccgcccaactccctgttttttatacaagatcggttgatctttggtttaactagtagtgaaacacctggtcaagacaatgacagccaagatcaaccgatcacgaggcatgcaggctttgactgatcgatacgataatctgatgcgtttgtttactcttg

SEQ ID NO: 29659 - DNA, 406 bp, Setaria italica
  Peptide Sequence Number=SeqID_95633
gcatgaggcggcggcaccagcgggatcttggaccagtaccccgtccagctccgggtccaggtgcgccatgttgtgcacgatgtccatgccgtggagccggcagtagtcgatcttgttcttgatcgccttgaggaggtagtggtcgccggcggggttgtcgcagggccccggcggcgagccggtgacgagcaggacccgcgggctgccgcgcgcgtcgcgggaagggaactccgggtgccgggacagccactcctggcgctgggagtcccagtcgctcaccttgggacccaggatgtactccttcaccctgatcagcgtcgcggacgacgagaagttgccgaggccggccgtcgcgttattgggggacacgacgacccgtccccgagaggacgacgacgtcgtcggg

SEQ ID NO: 29660 - DNA, 515 bp, Setaria italica
  misc_feature (19)..(19): n is a, c, g, or t
  Peptide Sequence Number=SeqID_95634
agtttacttggataatagngttttaagtcagcagcaggttcaactcgccaccactgtcttcccattggacaatccagtatcatttattgagcccttatcaaatccgcagaacaatggtcagctcgacacagcgaaggacattgaagtggcctcctacccccttcaacatgcaaaaagcatcaaacagtcaactggtatgctttctttggttaataatcattcggctcaatctgctccatttcccatatccctgaaggagcagcagcagttaactaaccagagttgcacaactgcacaactgcacgaggataaagatcacgatcataatggtgtaagctgcgtagataaaggcagttcctgctgtgccgacaaccccgatgactggaatggagatttcatggacattgaattgcgtaaagatggcctgggtgttaatgatgaagatattcaaagaaatcagcaacaaagatacagcggttaacaataactcagagagtcaagagatcaagtccata

SEQ ID NO: 29661 - DNA, 263 bp, Setaria italica
  misc_feature (16)..(16): n is a, c, g, or t
  misc_feature (29)..(29): n is a, c, g, or t
  Peptide Sequence Number=SeqID_95635
ttgaaaacccacaaanccctttcgacttnttcccccaatctcgcagtcgcagcacaggactgttcgtccgtccggcgattcatcttctgcgctcccttccctcccgaacggtcggtccttgcatggcagcagcggcaagctccaaggggcgggcgatcgctggaagcttcgtcagccgcgtcctggccggcaaggccgccgcctccccgaggtacatgacgaacgacggccacctgccatgcccgcttgcggttattgtcgtg

SEQ ID NO: 29662 - DNA, 554 bp, Setaria italica
  Peptide Sequence Number=SeqID_95636
tctacggtcttcggcacctccgccgtcggctcggggggccccaacaccgtcttcggcctcggccagtgcctgcgcgacctctcccccgtcgactgcatgctctgcttcgccgaggtccgctccctgctcgagaagccgcccccgccgcctgaggccggccgtcagcccactgccgataagtttgtgtgagagcccggcactgatactcctatcactctgctccgctgggctcccttgcttatcgaccgctataatactgcttggaagtagtagtgtggctgtgctaatactgggtttatggtagtagtatcaggcatggcgtgcatcaggactggtagtggctgtagtagcaacgtgatgcttgtgcccgtgcctgtaataagagcaagcaggagatgcgcgcatgtcctgcttgtgggtgtgatgtacctgcgtcctttatccgtgttatataagtgttcgggtcactggtttgcgcatgtttcatgtccttgatgccgttcaattatataacacggataaaggacgcaggatcaaatcagtccgcatcaaaa

SEQ ID NO: 29663 - DNA, 661 bp, Setaria italica
  Peptide Sequence Number=SeqID_95637
gtgcgtggagcggtggaggtggaggtggaggcggtaggcgggggcacgtgcgccatcgccatgggctggtgtgccgcttcgtgtttgctaaggtttttttaaaagagtttgctaaggttttggcatgcaacgcctcgtgcgtcttcaaaatttcttgcgaacatgaaacaagtgctagcagtaaccttgattcaggagaacttgaacctgtcgcacggtgcgcacaatgcagcgaacgagatcagtctgccttggtatcgggatcccggggttgtcctggtttctgtcgttgttttgtcgtgacatgtcctgggattgtggtatcatcgttgcttgcagaacgattattcattcatcggatcttaagcactcttgttaaaaccatgtttgtcacaaggatcgtcagacactcgtttgctcgtccaccatttctgagttctgactggatgcgaccttgtgcaggagggccgtgcacgcctcggcgtacgacaagaacctggaggaccaggtgcgcccggcgttcgtgccggacgatgtgatcggcggcgccgccaaccccgacaagtactggggcccccaccccaagaccggcgtgttcggccccgcggcggtggacgccaacaaggccgccggcgcgccggacgccgccgcgaatggtgcg

SEQ ID NO: 29664 - DNA, 883 bp, Setaria italica
  Peptide Sequence Number=SeqID_95638
taccccactccctttcgacttcttcccccaatctcgcagtcgcagcacaggactgttcgtccgtccggcgattcatcttctgcgctcccttccctcccgaacggtcggtccttgcatggcagcagcggcaagctccaaggggcgggcgatcgctggaagcttcgtcagccgcgtcctggccggcaaggccgccgcctccccgaggagggccgtgcacgcctcggcgtacgacaagaacctggaggaccaggtgcgcccggcgttcgtgccggacgatgtgatcggcggcgccgccaaccccgacaagtactggggcccccaccccaagaccggcgtgttcggccccgcggcggtggacgccaacaaggccgccggcgcgccggacgccgccgcgaatggtgcgggctcggtgctggaccagaaggtgtggttccgccccctggaggacgtcgagaagccgccccccgccgcctgaggccggccgtcagcccactgccgataagtttgtgtgagagcccggcactgatactcctatcactctgctccgctgggctcccttgcttatcgaccgctataatactgcttggaagtagtagtgtggctgtgctaatactgggtttatggtagtagtatcaggcatggcgtgcatcaggactggtagtggctgtagtagcaacgtgatgcttgtgcccgtgcctgtaataagagcaagcaggagatgcgcgcatgtcctgcttgtgggtgtgatgtacctgcgtcctttatccgtgttatataagtgttcgggtcactggtttgcgcaaaaaacatacgcaaaccagtgacccgaactaaagagaaaaactaaaaaagaagaacgtacgaccgaacggacgaacaaccg

SEQ ID NO: 29665 - DNA, 315 bp, Setaria italica
  Peptide Sequence Number=SeqID_95639
gcgaggagaccccaaatggacgccaccgtcgtcgccatcgccggcgacggagacgacctcgcccgccgccccctcgtcggcccgaccgaagagatccacccctacgccgagcccccttccccccagcacccatctctggaggccgcggcggcgcagcccgagcagcagcggaagccgcagcgggtggcctcgctggacgtgttccgtggcttcaccgtcgccatgatgatagtcgtggacgacgcgggcggggcgtggccgggcatcaaccactcgccgtggttcggggtgactgtggcggacttcgtcatgccc

SEQ ID NO: 29666 - DNA, 515 bp, Setaria italica
  Peptide Sequence Number=SeqID_95640
gggggcagggcaggcagctgaggaggagagagcacgcgggcggtggccatggcgtcactgtctctcaccggcgtggcagcaaccacggcgaggccaagcagcagcggcgggagagggcgccgtctcagggtcgcctccatggccacccagaagggccagaagccgacgccgaagaccgtctcctccggcacgagaagatcgggcggcacgacggtgttcccgctgggcgagccggggccgcgtccggcgacggcgagcgggaaggcgccggtgaagctgctgacgaacgtggagaagctgcggctgctgacgaaggcggagcgggcgggtctgctgtcggcggcggagcgggcggggctgtctctgtcggcggtggagcggctgggcctgctgtccaaggcggaggagctgggcgcgctgtcggcggccacggacccggcacgccgggggcgctgctggcgctcgcgctcccgctgctggctgcggggcccgccgtggtgtacctcgtacccgag

SEQ ID NO: 29667 - DNA, 261 bp, Setaria italica
  Peptide Sequence Number=SeqID_95641
gcgggctgctgctcgacgccggcggcacgctgctgcaggtagcgcggccggttgccgagacctacgcctccatcggccgccgctacggtgtgacgaagcctgagaagggcatcatggaggggttcaagcgggccttctcggcgccatggccgaagacgctcaggtaccagggagatgggaggccattctggagaattgtcgtagcagaagcaaccaattgcactgatgatgattatttcgaagaagtgtatcagtactatg

SEQ ID NO: 29668 - DNA, 441 bp, Setaria italica
  Peptide Sequence Number=SeqID_95642
tttttttttttttttttttgggtttaacaccgtaacagcttttttgtcctctttttttttgttttcactcaaatataaaacagcccgaacacaaatatagagcgagcatgagctgaattccaattccccaaaactaacggccacctccatgaacgtccggtcaccagcacggtggctgcgggtggcagtggtagtaattgtggtaccaccagtacggcagcggctccggcttcttctcgtcgggcttcttctcctccggtttcttctcggccggcttcacctcctccactttgaggatctcggcgtggccgatcttcttgcgcaggcacaggacgaggcagaccgtgtcgacgccgtcgccgaccacctccagctggtccttgccgtcgccggtaacccccatcgagctcacccctgcacgcacacgaacggtcgggaact

SEQ ID NO: 29669 - DNA, 543 bp, Setaria italica
  Peptide Sequence Number=SeqID_95643
gtcgatcctgaagaagagcacggatgatggcacggccggcgccgccgccagggaggcccctcgggtcaagttcatgctggacgctggggacagcaaggtcgatccgcctgcaccgccggccaccggcggcgcggacagcagcaaggccaccaagtcggtcggtttcgccccgcagccacccgcgcgcaccctgcagccgcctatgcgccccacgcaaccgcccttgcagcagcctccccgcgccgccaccgccgccgccgtcacccagcagctcccgccgccgccgccactgccataccagcctcgccccagcgacgggctgctccccggctcaggccagcagctaccatacccgcctcgccacaccgaaatgccattggcagctttctccaacagcctaccgccaccgccgtacccgccccgccacagtgagggcccgtccgccctccctgggcccccgccgctgccaccgtacccgcctcgctccgccggtttccccagccagcagcagcaggagatacccgcgtggaagaggagcaaggg

SEQ ID NO: 29670 - DNA, 222 bp, Setaria italica
  Peptide Sequence Number=SeqID_95644
ccactgccactctcactgctgtagcctaatggctgttgaaaagggaaatacaacgtttggctacagcagtgagagtggcagtggtgacggtgcaagtatgaactcactctggttcaaccagaatgacttcaactgcagcacaatttccactgtgatgccaccagtttcaccatcagccctatcaacatcgatggggctgaatctcccaccaaataatcctcg

SEQ ID NO: 29671 - DNA, 1816 bp, Setaria italica
  misc_feature (1794)..(1816): n is a, c, g, or t
  Peptide Sequence Number=SeqID_95645
ttagtaaagaaaaaaacttacaatagaaatacaacaataaacaaagcatggccatggctgctggagttctgttcccaaactcgcagggctccaaaggtgcggaaagagttgcaggctgaggtggataaactatttgaggccagacctcaagagaggggcattctctcaagaggaagaagacctcatcattgagctgcatgctgtccttggcaacaggtggtctcaaattgcagcacagctgcctggaaggactgacaacgagatcaagaacctatggaactcatgcatcaagaagaaactgaggcagaaaggcattgatcccaacacccacaagccgcttgctgaggctgattgcagcggagcagctcccaccatcagcactgagaggacctcaggatccagcgacgtcaacccatcaagcactggtgctctggggaacttgagccacctcctcagcgagacagctcaatcatcaatgctgctgccagtgtatgacaagaatcaccctgaaactccaaacttagcacgccctaaggtgcctccaaaggagttatttctggaccagcttactgctggacacgagagttcatcaacctgccgctcatcaggccaaacgttgtatttcccttttcaacagccattaggctacagcagtgagagtggcagtggtgacggtgcaagtatgaactcactctggttcaaccagaatgacttcaactgcagcacaatttccactgtgatgccaccagtttcaccatcagccctatcaacatcgatggggctgaatctcccaccaaataatcctcgacatggaggcactggcattggaagtgcctcagtagattcattatactgggatggtacaaatcctagcagcagtagcagtactgggagcagaggaagcaacagtttgggatttgaaccacagagcacaagctcaattctggagaacagtgtgttcccatggacagacgtcggacaagaaaaagattcaagagctcacttagtagaggaacttaagtggcctgacttgctccatggaacctttgctgaaacgaccgtagccatgcaggaccagagccaatcactctatgatgacgtgatcaaggcagagagccaattcaacatggaagggatatgtgcttcttggtaccagaatcagcagccacagcaacagctgcaggcagcaccagacatgtatgacaaggacctgcaaagaatgcaactgtcttttgagaatatctaggccttatgttccaccatatggaacagagcataccagcagaagcagaaacttgtaattttcacagattgatgagcagaactatgctgagctgctcacatagatacataagtaagttgatacagaaaccatccaccacagctgttcctcagttgaagatcctgcagtatcgtggaaaggacagccctggccttaggagtggaagcagaatgcatagaaaagtacgttctagagtctccttttctttctcttcaaattgattttttccttctgtacacgacaactcaacttttggacatttgagttttgttcactctctgtttatcaaataaatatagacaggcatgggcaaaactgcatgtgtcggttgctctcataaaccatgcaagtagtcccaaacttttcaaccattgccatgcacgtccatgcaaattaattattgcatgttgtattttcatttcttctttgagaagttgccaacaaacggcagttgtatatttgtaaaggaagaaatatggaatattgacctgagagctatttagtttactttnnnnnnnnnnnnnnnnnnnnnnn

SEQ ID NO: 29672 - DNA, 609 bp, Setaria italica
  misc_feature (1)..(91): n is a, c, g, or t
  misc_feature (265)..(265): n is a, c, g, or t
  Peptide Sequence Number=SeqID_95646
nnnnnnnnnnnnnnnnnnnnnnnnnnnnnnnnnnnnnnnnnnnnnnnnnnnnnnnnnnnnnnnnnnnnnnnnnnnnnnnnnnnnnnnnnnnaaaaatttaaagcgtcgatacatgcgtatacacgaacagtacactgacacggtatacagacgcacacgtacgattcgcgcacgcatatgcaattatgcgtgcgttattccgttggcacgtacacggccggacgacgaggacacgacacgtacggcaaccgaaggaccacaacanacccccacaagctacccatccgtccatggagtgctcgccgcgccaacaagctaggcgacggcgacggcggcgcggaggagctccggctcgccgccggccgcattagtagtaaccatggttttcgggcagaagatgaccttgagctcgccgggcgcgacgcaccgctggtccacgtccaccgcgtcgccgctccacgtcagggtcttgggacaccgctgcttgaagtaccccccgggggccgggtcgctcctgcacgccaccacgccgccaccgccggccgccgtcacgcgccgccccgccgggcacctcgggttcaggtcctccgtgcacccgagcacggggca

SEQ ID NO: 29673 - DNA, 344 bp, Setaria italica
  Peptide Sequence Number=SeqID_95647
ctcatcgccgccgggccggtcatggtgatcgcgtccacgttcgccaacgccacgtacgagcgcctgccgctcgacgaggaggaggaaggcccggcgccgccgatgcccgacccgctcatgggcggcggccacggcatcgccgacccgtcggcgctgcccatgttcaacttgccgccgagcaacgggcagctcggcgggggcgacggcggcttcccatgggcggcgcacccaaggccaccgtactgatatccatcatattcatcggcggcaaggtgaagcagttaattgcctagcatggagaatggcgtcaccggcgtgcatggttactgttccattggagatgg

SEQ ID NO: 29674 - DNA, 794 bp, Setaria italica
  Peptide Sequence Number=SeqID_95648
actcttagcccaatatcgaccagatatctgacggttggcaccatgaacgttggggaatcgatccgggtcaagtttggaatgcaagctgaccagttgccgatccgagcgtgcagagccgtttgcacctcgagatgattgaggtaagatttgacgtagtgctcgctgcacggatcgtagccgggtaagtagctgctggagtagtgggtgccgttgcgcgactgcaggcagaccggagcgtagatgttaaagcaatcgactttcgctcccttgagcgtgcgatctgccagggagtacatcaagtcgtcgggcagggcgaagctaccgttggagaggatgtcagcccagacctcgtcggacaccacgccgtggctccacaggaactccaagtaccccttgttgaacaggtcattgtcgagcaacgggttgccaacgaagatgccccggaggttgatgggtgtctgcaggacggggatgcggcggttcatgagcgcgatgacggtggcgacctgcgggacgtagtggccgccgtagctctcgccggcgacgaagaactcgcggcccttgtactcggggaacctctcgaaccagttgagcaggaaggtgtacgtgtcctcggctgtcctcccgtcgtggacggttttgaagtcggcggcgtccctcgagatggagaatccgacgccggccggcgactccaggaagatcacgtttgccaggttgttccaggcgtgcttgttccggctcagcgtcttgccgtcggggttgacacggaacgggccgatctccaacatcgcccc

SEQ ID NO: 29675 - DNA, 308 bp, Setaria italica
  Peptide Sequence Number=SeqID_95649
ccgccccagccattcccaaccctaggagcccggcgagcttggcgcgccgcgcttcaaaccgtacgtgccacactccccttggcacgacggcgcacgagggggaaccgcagcgggagactgggctgcctccgcctggccagtcggttggtactgtagttgccaagcaagacggccaggccaaaagcgctcggcccgccccccgcgtgccggcgtgcgccgtcttgattaaagagggaggcgaggcgggggacgaagtgggggcctccctcgcctcgctcacggctcgctgggtgggtgggtgcgccgag

SEQ ID NO: 29676 - DNA, 968 bp, Setaria italica
  Peptide Sequence Number=SeqID_95650
tacagaaccttgaaaatcttactggaaagtagaggaaaaatgtatactggataaattttttaggtctgttcttttgcagaaagctccagaagatactctgcctccctcaggaacaaccttgttagctgcttttgccctcttcggtatactatacacgagtgactatttatttttgacttgtttttgttgttctcgtcacttccgctcgtgcagtcctccgaataatgggaattaaactgctcaagcaattcgctgtcagatgcttctgttccagtgccctcctcaagttcagccattttgaccctaagaagatccacaagcaaaccaagtgccccctgatccccgcacacctcccaaatagcactttggatctctgcatcagatggttctctatcttcactagatccaacctctccaagtaaagaagcaacctgttcaatctcatgttcttgcatggcaatcgtacgtaaggtactcaaaaattcctgagggaagacaattttgtggagatatgatggaactttgcgttgaccactccaactataattacaaaaaggactgatgtttttcttgtcatccttatcttcactggaacaaatacaaaaaaatccattatcaagcaaacttctgggtagaagacatctcaattcacccttctgtatctctagtagcctcatcttaatatcagcagactggatttgtctaagagcttccgcaggataatgaaccatgagataatcatcaggattgttgtcaaccacaaatccatagaggtacagtagttcctcatttcctttgttgccataatttatgtagatttctgccccagcctcaacagaacttttgtcagcaagcatgaggtacgttgaagcagggactccagtagcatttcccatagaatcaacttcccatgttgccagtgcctttacattatggttacagaaatctattcctggtataaggcccta

SEQ ID NO: 29677 - DNA, 252 bp, Setaria italica
  Peptide Sequence Number=SeqID_95651
aggcttactaacaccagggagcagatccagtcatatgtctttgatggttagactgctacttgtttcaaactacaaaattcaatattccactgcatccacagctttatttcgtattccttttattcctgatctcgttctatagtagtcacctgaatattgtttgattctatttctgttcgccttcagtcttccctttcaatgctaatggaactctggttctcatgttcagtcatcagggctagtgttcctaag

SEQ ID NO: 29678 - DNA, 428 bp, Setaria italica
  Peptide Sequence Number=SeqID_95652
accggtgggtggcggaggccgcgacggggtagcacttccgcgagctggtggactgggtggaggcgcggcggcccgagccgacggtggcgagggcgtacctgggccgcggcgagggcggcgagggcgcgacggcgtgcgtggtgtcgtcggggatgcggctccccatcggtgaggtggacttcgggtggggccggccggcgttcgcgtcgtaccacttcccgtggcccggcggcgccgggtacgtgatgccgatgccaagcgcgcgcggggacggcgactgggtggtgtacgtgcacgtggcgccggaggtggtggaggccatggaggaggagccgacggtgttcagggcgctggacagtggctacatgttcgggtgaagtgtctgctggccgccggtcggatgggaatgaagatgctggaacgagatg

SEQ ID NO: 29679 - DNA, 307 bp, Setaria italica
  Peptide Sequence Number=SeqID_95653
atgaccgcgctgccgcggtcgtcgtcgtcggccgccgtcacggtgcgcgcgccgccgtcctcgttctcgtccttggcgacgacatgccccatctgcaacagctgctgctgcttctggctctgcatctcctgccgctgcttgaggaaccttgccctcgcgcgctcgatgttcttggacggcttccccttcttgaagtgcgtcctccagtagttcttgatctcgttgtccgtcctgcccggcaggctccttgcgatcgtcgaccacctgtttccccacaaagcatggagctggactatgatgctctctt

SEQ ID NO: 29680 - DNA, 249 bp, Setaria italica
  Peptide Sequence Number=SeqID_95654
ccattgtagtgatggcagagagagacaaagaggaaatggaagcagacattgctaaaatggagtttgacttgaaaggaacagctgtaatatgtagaagtggaagccctctgattctcgctgacctgaaaaaggtctcagtttcaaaggcacgggcaattgtggttctagctgaagaaggaaacgctgaccagagtgatgcacgggcactgcgaacagtcttgagtttaactggagttaaagagggactaa

SEQ ID NO: 29681 - DNA, 457 bp, Setaria italica
  misc_feature (405)..(405): n is a, c, g, or t
  Peptide Sequence Number=SeqID_95655
gggtattgtcttggtttttgtccatgatgcttggtcttgtcactgattcaatctctgagaagtttgattctttgaggaaaggaagaagtgaagtcatagagcagagccacactctgattcttggatggagcgacaagttgggatctttgctgaaccaaatcgccattgctaatgaaagcttgggaggtgggaccattgtagtgatggcagagagagacaaagaggaaatggaagcagacattgctaaaatggagtttgacttgaaaggaacagctgtaatatgtagaagtggaagccctctgattctcgctgacctgaaaaaggtaaacaatgtgatctgcagatttactttcagacatacttttttctagcttaatacgccatcatggtctgttggcagttaanaggatgattgtgatgtactgatgttactatattagttaattcctggatagca

SEQ ID NO: 29682 - DNA, 661 bp, Setaria italica
  Peptide Sequence Number=SeqID_95656
tttaccttcggatagcacttcgcttctgtctttatgttgccttttttctaactaaatataccttcatgcaccaaggtctcagtttcaaaggcacgggcaattgtggttctagctgaagaaggaaacgctgaccagagtgatgcacgggcactgcgaacagtcttgagtttaactggagttaaagagggactaagaggtcatatagtagttgagcttagtgatctcgacaatgaagttctagtcaaacttgttggtggagatcttgtggaaaccgttgttgcacatgatgtgatcggtcgattgatgatacagtgtgcacgtcagccaggtcttgctcagatatgggaagatattcttggctttgagaactgtgaattctacatcaagagatggcctaagttggatggaatgcgatttgaagatgtgctgattagctttcctgatgctgttccatgtggcataaaagtggcatcttatgggggcaagattattttaaaccctgatgattgttatgttttgcaagagggtgatgaggtgatagtaattgcagaagatgatgacacatatgccccagcaccgttgcccaaggttaggagagggtatctgcctaaagattttgttgttccaaagtctccagaaagaatattgttttgtggttggc

SEQ ID NO: 29683 - DNA, 969 bp, Setaria italica
  Peptide Sequence Number=SeqID_95657
ggtttgttttactattagtacattgttcaccctgaaagaaatcctcagaagattcttctttgtggatggcgacgggatatagatgatatgattatggtaagttctttctttgaggctcctaattctttttctctctgttaaactgtgcaacaggttaggagagggtatctgcctaaagattttgttgttccaaagtctccagaaagaatattgttttgtggttggcgccgtgatatagaagatatgataatggtacttgatgctttccttgcgccaggatcagagttgtggatgtttaatgatgtccctgaggttgacagggaaagaaagctgattgatggaggtctggacttcagtcgtctagataatattactttggtgcatcgtgaaggaatgctgtcattcgccgtcacctggagagcctccctttagaatcatttgattctatcctgattttggcagatgaatctgtagaagattcagcaatccaagctgactcgagatcacttgcaacattactgctgatcagagatattcaggcaaaacggcttccatataaggaagcgatggtttcacctgttccccgagggaccttttctgaaggtgcttggataggggagatgcaacaagcatctgacaaatctgttataattagcgagattttggatcctaggactaaaaatttgatgtcaatgtcaaaaatcagtgactatgttctttcaaacgaacttgtgagcatggcattggcaatggttgcagaagatcggcagataaatgatgtcttggaggagctctttgccgaacagggaaatgaaatgcaaatacgaccatcagatttgtaccttagaggtgaagaggagttaaatttcttcgaggtcattttacgtgctagacagaggaaagaagattagtacaattagggtaaccgtacttagaaaggtagactagaagacgtagaccaataaatta

SEQ ID NO: 29684 - DNA, 1816 bp, Setaria italica
  misc_feature (1770)..(1816): n is a, c, g, or t
  Peptide Sequence Number=SeqID_95658
tagtaagtattattgtattaattgttggttaaaaaagttttagtaattaggtaaagtaaagtcttaatttaggttccttaattttgttttggtttctagtaactagtctagtcttgttaacttggttgttgttacccagggaaagaaagctgattgatggaggtctggacttcagtcgtctagataatattactttggtgcatcgtgaaggaaatgctgtcattcgccgtcacctggagagcctccctttagaatcatttgattctatcctgattttggcagatgaatctgtagaagattcagcaatccaagctgactcgagatcacttgcaacattactgctgatcagagatattcaggtttctttctagatcagagaatgattttgacttgtcaattatttatggattttacttgttattgatatcatcttcagatcacatgccatcatcttaaatcatgtgctattgtttccttttctttttctttttaaatttccatgctgtatttcccaatgttatattatactctttacaagaactgaagattgttctcatattcttaaccacttcaggcaaaacggcttccatataaggaagcgatggtttcacctgttccccgagggaccttttctgaaggtgcttggataggggagatgcaacaagcatctgacaaatctgttataattagcgagattttggatcctaggactaaaaatttgatgtcaatgtcaaaaatcagtgactatgttctttcaaacgaacttgtgagcatggcattggcaatggttgcagaagatcggcagataaatgatgtcttggaggagctctttgccgaacagggaaatgaaatgcaaatacgaccatcagatttgtaccttagaggtgaagaggagttaaatttcttcgaggtcattttacgtgctagacagaggaaagagattgtcattgggtaccgtcttgaaggtgctgagcgtgccataatcaatccaacagacaaggtttcaaggcgaaggtggtcgcccaaggatgtttttgttgttatatccgagaaagaatgaactacgccaaatcattgttaacatgaaataagttcctgacctcacctgaggaaaaaacaggcagcagtgcgattaggcacatcaacaagagcagacagctgtttcattctgatgctcatatggcagaaggcaagcactgagcgtgaaggagcgtggcaaaagcatggaccagatttcggataccttgacttgccatgtacaaatacagaaagaatgctacaatatgccttaaaaggatgtcgacagaatacacaagctttggaactttggatcgatcaaattcatttgtatagcatcacctatgttaaggcttaaagctcctcctgagttttgacactgagtgggaattcagttttccagtgaggctgttataccatggcgataaattgcagcgtttgttcagcatggcagttccattgcttaggttgtttagcattttgtacaaattgaggaaaccatttaactttgttacaaacaattttgccgcatttcttcatatttgtcaatagcatgagatgctgatcagcacatgtaaataggtaattgggaagatcatgtgtgtacccattttatgatgtttagatctttaggtagctcatgccagtttgtatttcatcgccaaaggtgtgctatgctaaatgccatttttactgtgataaagtggcacataataagccaattttggggctggattagctttttaaaggttnnnnnnnnnnnnnnnnnnnnnnnnnnnnnnnnnnnnnnnnnnnnnnn

SEQ ID NO: 29685 - DNA, 353 bp, Setaria italica
  Peptide Sequence Number=SeqID_95659
caacaaagtgagctcaccaagtgtaccaatgctcggtgggattggccctgagaggttgttatcgttgaggtctagatgggcaagacgaggcaaagccacaaggtcgagcccatctaaccggccagagaggttacacatgggaagagagatgctggccacgactgggacagcgtcgccgccgtcacccaagccacggccatgaggcaccgtggtgccgcaggcaacaccagtccagttgcacgggctgatgtgcttgctccatgacttgaggcagcttgaaggcccggagtcatcgccgaaggtggatttccatcgaagaagggcttccgcttcactatcgagcttcgaatttg

SEQ ID NO: 29686 - DNA, 248 bp, Setaria italica
  Peptide Sequence Number=SeqID_95660
ttgggttgctagagttcttcaatagtgaggctcccaatggtatgaagtccattggtgtagcactcttctggtgccaaattggtctgtcctcactgctgggcacactgctggtgaagctggtgaacaaggtcacccaaagcagcagtgcccacgggtggctggaggggccaaacctgaacagcagccaccttgacctgttctattgggttgtcacagctgttgcatttcttggctggtttaattaccta

SEQ ID NO: 29687 - DNA, 419 bp, Setaria italica
  Peptide Sequence Number=SeqID_95661
ctgaggaagctgaccatctccatctgcatctcttctgagccttccactagatgtctctgaagaggttctaagtagccactttcagccatgtgcttgatgttcttcgcacacttctccaggttcttaaggagtgctccagctttctcagcagcaattggatcatctgaattgttgatcttcattgtggtgaggatcagaatacttccaggtgttgagccaatattctccaacagcaactgtgacttcgaaagctccagcaagaaagagatggctgcatgtctttcatcagtagtattacttgagagtagctttattgtcctagcgatggccttagttttccaatgatatcccttccttcttcatcttcagctaacaagcacagaagctccagagcatcacattgaatctgtgcgttgtgg

SEQ ID NO: 29688 - DNA, 596 bp, Setaria italica
  Peptide Sequence Number=SeqID_95662
ctggacaaccttcatcatttgcctaatctcctcaagacctcaaccttcccgtattcccgtgtacgccttaaaaacccttccaaaaccataaatgctcgctctgtaggtgccattcccatctcgatgatctccctaaaacacctgtatgcctcagaaaccacacccctacagcataaaccagtaaccagaatatccagtgcatgccggtgaggtacacatccttttcccattatataatcccacagctccagcccaaggtcaggtcggccattctcgcagaagaccttcatgagcagcatagtcgtcctggtcctcggcataaaccctgaagcaaccatcttgctgtacaccttccaaatcccctccaagttgccaactctctggaacccacaaaaacattgtgttgtagctaacatcatccaagccaacccccttcctctccatcttgtccatcaccgccatcgcagacttcaaatccctagccctcacatacgcgcccattagcgcattgtgagcaccgcggtcaggggtcactccccacttctccatttcatcaaacagcagctgtgcccgcgctgcgttcctcacaattccag

SEQ ID NO: 29689 - DNA, 162 bp, Setaria italica
  Peptide Sequence Number=SeqID_95663
gcggcggcgtccagggacaccgcgagtggctggtacgacgtcgctaccatccaaacactaccagcctctcgtcgtcctttcaatcacgttaattaattgcgtgctgatgaatcttgtctctctggatctaatccgatctgagcaggcggaggtggtgtacct

SEQ ID NO: 29690 - DNA, 404 bp, Setaria italica
  Peptide Sequence Number=SeqID_95664
ctctcacatcctcacctagcacacgacaagaactagtattctgttctcccaaatcgatcactccatgttcaatatgtctagggacccgttggtcgtcggccatgttgttggggatatcgtggatcccttcatcacaacagcatcaatgagggtcttctacaataataaggagatgacaaatggatctgagcttaaaccatctcaagtgatgaatgagccaagggtccatatcagtgggcgtgacatgaggactctctacacacttgtcatggtggaccctgatgcaccaagccctagtaaccctactaaaagagagaaccttcactggttggtgacagacattccagagacaactgataccagttttggcaacgaaatagttccctatgagagcccgcgtccaa

SEQ ID NO: 29691 - DNA, 272 bp, Setaria italica
  Peptide Sequence Number=SeqID_95665
tctatacgctgggtggtgataaccaaaattcagtggggcatactcaaaaaattaagtgctatggcagtgaataaatggcaaatcctgtcttgttgttcactagcggagcgaaaggtgatgggaagcttctactatggaatgctttaagaggcgaacttgcttctgatctaaattcgaacttgaggtcccaggatatggtttatccttcagttgatacaatggagttctatagtgaaaatcatctggcatgtggaagtgactgtgactatggt

SEQ ID NO: 29692 - DNA, 670 bp, Setaria italica
  Peptide Sequence Number=SeqID_95666
tggggggcgatgcttgagaagttcaagtggagtacaggtagactccttgcttcttagtagagtcatagtcgcccctctcaatcacagcttggacgtaaggattggattctgctatgattttccaatgtctcgggtacacaagctgagtcatcacgtatctgaaatttaacggctcaatcttcctcaggatatcaactgtgtattgatattccttcagaaagagatgccctctattctccaggggggaccaggcaggaatgatattgaattgcctctgtcaacttgaagctgtcctgctgacgcataagatagagcaagttgtgcacttcgtcaggtacagactcatggccaggcagatgcttactgatcaaataggccaaaaagatagcagtacattagaaacagcagcacactgactgaacataataggcaaataataaacagcactaaaatacaaaaacagcagtagggcaagaaagaaacagcagcatggtaaaatagaaacagcagtagggcgaaaaaagaaacagtaccaaaggatggtctcaaagattcctgccaaggcagacattgctgcatcacaagtccgattatcagggttctggtcaaagtctacgttggcagtgaatctgggacggcaatcagggcttgttataacaatgttcttgac

SEQ ID NO: 29693 - DNA, 551 bp, Setaria italica
  Peptide Sequence Number=SeqID_95667
ttctaagtttgtctgcaaaggcacgctccatgccattgcctccaggatgctgccaacaaaatgagtggttcaagtggagtatacgtagactccttgcttctttcggagtcatagtcacccctctcaatcacagcttggacgtatggattggattctgctatgattttccaatgtctcgggtacacgagctgcgtcatcacgtatctgaaatttaaaggttcaatcttcctcaggatatcaactgtgtattgatattccttcagaaagagatgccctcctattttcctagcggcactaggcatggatgatattggatagcctccgtcaacttgaagcagtccggctgacgcataagatagagcaagttgtgcacttcgtcaggtacagactcatggccaggcagatgcttacaaaggatggtctcaaagattcctgccaaggcagacattgctgcatcacaagtccgattatcagggttctggtcaaagtctacgttggcagtgaatctgggacggcaatcagggcttgttataacaatgttcttgacaatt

SEQ ID NO: 29694 - DNA, 659 bp, Setaria italica
  Peptide Sequence Number=SeqID_95668
tagtatctatataactaactacaccagtgttcgccgattacattttaattccaggggaataggaagccggttcgtaggcaggcgagatggcctacacggtggaggagccagctggagcgaggctagtaagtgctcggacattatgtacagggcgtggttcatatccttaggctcaaagcccaggccatgcggcacacacttgttggcaaagtcctggaggcagtggcaggtggggcatgcttgagaagttcaagtggagtacaggtagactccttgcttcttagagagtcatagtcgcccctgaaattttaatgaaatccagtgagccgtattatcataggttaaatgaagcaggtcctctatgcataaggaaaacttcaataaaaaataaaaaggatacatgagcatagatattccatcacatccgtgaggatattactcagattgttaactcgataaagggcagagtaacagttaacaaacttttaaatggtcttgtacaagggaatgttcacatagtatcagatatttcgaactttgctagtgagcccgtgacaaaaacatctaaagaaaattgggcaagagataataacagaaaagacataaatcatctcctttgctagtgagccgtgaacaaaaacagtactaaaagaaaatta

SEQ ID NO: 29695 - DNA, 1731 bp, Setaria italica
  Peptide Sequence Number=SeqID_95669
taagttttaagtactaatttattaaattagtacctaattcatgtcattaatattggattttgaaacaaatagcattccaggtagtcaatgtgatccacccaatgagcataggttgataatagtaattgatgaagcaggtaaatctctatttttaatgctctctatcaaattgtcatatacagtactatataacagacctaatgtataaattctgtagtatctataactacaaaacaaaacgtgctttcagccatgtacagtactatataacagacctaatgtataaattctgtagtatctacataactaactacaccagtgctctccaattacattttaattccacgggaagctctccaattacattttaattccaggggaagaggaaacttgttttgaggcaagctaggtggcctacacggtggagagccaactgaagagacgccagtaagtgctcggacattatgtatagagagtggttcatatcggctggctcaaagcccaggccgtgtggcatcattttgttggcagcatcctggaggcaatggcatggagcgtgcctttgcaacttgagtggttcaagtggagtatacgtagactccttgcttctttcggagtcatagtcacccctctcaatcacagcttggacgtatggattggattctgctatgattttccaatgtctcgggtacacgagctgcgtcatcacgtatctgaaatttaaaggttcaatcttcctcaggatatcaactgtgtattgatattccttcagaaagagatgccctctattttccagcggcactaggcatggatgatattggatagcctccgtcaacttgaagcagtccggctgacgcataagatagagcaagttgtgcacttcgtcaggtacagactcatggccaggcagatgcttacaaaggatggtctcaaagattcctgccaaggcagacattgctgcatcacaagtccgattatcagggttctggtcaaagtctacgttggcagtgaatctgggacggcaatcagggcttgttataacaatgttcttgacaattaagtttcttggacagcagccaatgcctatgactttcagcagcaactgaatgctgagatacattgtcttctgtgcattaaggtgaaggtgtcttgggagataccccaccatctggcctttgggaacatttccaagaagggggccaccatcgagagtacccacgtacacatccaaataaacccagcgttcgctgtggagaatgtagtcacgcaattttgcaggttccatgccctggaaataagcaaagactgttagtatcgattcttgaaagaagctgtagacggaccgtagggaaaggtacagccggtaccccgcgcagatgcggcctgcgcgcttgacgactcctgctggagatcgcctgagcacgtgtatccgaatagggtagtcggcgcagtgggcgcaagccgtgcgcgcgcggatccaatctccgacgcggccgacgaggaatccaccgcgcgcctggcgcggggcctcgccggtgcgcatggccgaccgagcgccgacccgcccgaagaaaagtaactgcagggcccggccggagaagaaggtggagaggccgacggcggcgagcctccccgcggcggggaggctcgccgccggggacaatatggggaggcgcagggacaggataggtgggattacctgttgttttctggattggatctctcttctcc

SEQ ID NO: 29696 - DNA, 1103 bp, Setaria italica
  Peptide Sequence Number=SeqID_95670
cacgtgccccggtcgccgccgagcacgaaggaaacagccgcgtcgcagcgaccaaccaaccaacgacttccccctcctctgaccgcctccccactcggaacaagaaaccggcgactccattccgcacgatccgcgccgcgagtttcgttccgagcaaactcgctctctttcacaacggtgccgtaggcgcaagcgagccccacggcggcagagtcgatggccgcggcgcagatccgcggatccgccgcgccggcgaaggcgacggcgaggcggtggctggcccagcccagcgcccggatcctccgcttcgcgccgctagcaccgtccaccgtcccggcgtcgcttcggtggggggcgttcggtgaccttgccgctagtgccgcgtacaagccattgactacaatgtgcatgaaggcagactataccactcctgttgattctgtcaccgctacagagcaaacaggtggtgaaattgaagagccagccattgcggcacctgctaatgaagagataagtacagagcaggaggttgttcctcaacaaaagtgtgcaaagatacacgacttttgcctagggatcccttttggtggattcctgttttccatgggccttattggatttctattttggaggagtcctgtgagtcttactttcggtgttgcacctggccttgctatattagcccttggtgtgcttagccttaaagtttggaggagcggaaaatccagcttgccgttcatactggcgcaagcaggtgttgctgctgcggtatcatggaagcactgtcaggcatacacacaaacgaagaaggtgcttccctggggtttctatgctgcactcagtgctgcgatgatatgcttctacgcctacgttctgcttgctggagggaatccgcctccaaagaaggcaagagctgccgcttgattcattgttgaagacctttcgctgaatcttctcataattgtactaatgttgatgatagggttacgtttttctttatttccgttggtgaataccgaacacaaagttgtgttgtagataaattttaccttgttttacatgactttttgttgtttccttaatctaaatattgtaaagtgcgg

SEQ ID NO: 29697 - DNA, 236 bp, Setaria italica
  Peptide Sequence Number=SeqID_95671
actagtctctgaggttggcgtaggagttgtcgctagtggtgttgtcaaaggacatgcagaccatattctcatctctgggcatgatggaggaacaggagcttctagatggacaggaattaaaaatgctggacttccttgggagcttggattagctgagatacatcagactctagtggcaaatgggctccgtggccgagctgttcttcagacagatggacaattgaaaatcggtagag

SEQ ID NO: 29698 - DNA, 261 bp, Setaria italica
  Peptide Sequence Number=SeqID_95672
ccaacgccgtaccatgaatggaggacacaagtaatatgactgatgaagagaatgctagccgagcgaagacattgcaatggatgcagaagaagatcatggctttgatgaggaagcatgagtggacaaagtggcaggaaacaggaagatggaagacagtgggtttttaagtttctcattatgttagtttcagtggcaatgggaactttagtttgaatctgaactgaatgtatgaggcgggcaatttatccgaatctgagactg

SEQ ID NO: 29699 - DNA, 234 bp, Setaria italica
  misc_feature (229)..(229): n is a, c, g, or t
  Peptide Sequence Number=SeqID_95673
caccctcatgtcaggaacatatccaggcaacagtttggaaagtagtggaaacgattcttgtgcaacatttgcagggcccattgctcttgaaggtatcacagaactaacttggtttcggagtttgaagagttcaaatggtgtgcagaaaacagcctctacagcaccagcagctatgccagccaacatagcctcagaataatagacatagttgtcctcccttcatctttanagaag

SEQ ID NO: 29700 - DNA, 825 bp, Setaria italica
  misc_feature (773)..(825): n is a, c, g, or t
  Peptide Sequence Number=SeqID_95674
agctgagttggaggcggagcggaaggcaaaccctccccgctgccgcgccgccccgccgcctcctttcctcttctacctccgttccgtccggcttctcccgctcgctgctcccccagacaccgccgcgtacgagccccagcacctccccttcgaggatgagccgcagcctcgggatcccggtgaagctgcttcacgaggcggcgggccacgtcgtcacggtcgagctcaagaccggcgaggtctaccgcggcgccatggtcgagtgcgaggacaactggaactgccagctcgacaacatcaccttcacggcaaaggacggcaaggtgtcgcagctggagcacgtcttcatcagggggagcagggtcaggttcatgatcatacccgacatgctcaagaacgcccccatgttcaagcgcctcgaggccaggattaggggtaaaggctcagctgttggtgttggccgtggccgcgcggtcgccatgcgtgctcgggctgctgctggtcgtggtggtggtcctgtaggacggggtggcgcaccccctgtgaggaggtagatttgtctgaaagttgatggtgcacactgttgtgtttgcaccttagttatgaaattgcttgtaaggtagcttatgtgtaatctctacaggacgatggtttgtgtttactgagagaatgggtgaatgactctggtacctttgacccgtggtgtattgctctattctcttgacttgggtgatgagaagacttcaaatagtagggatgcaggttttgttttnnnnnnnnnnnnnnnnnnnnnnnnnnnnnnnnnnnnnnnnnnnnnnnnnnnnn

SEQ ID NO: 29701 - DNA, 819 bp, Setaria italica
  Peptide Sequence Number=SeqID_95675
agtagacgccgcctgctttttccacgagctggggttttagcggcgcggagaggaggggcaagagggagagagagaggaggacgacggggaagggaagatgagccggagtctgggaatcccggtgaagctgctccacgaggcggcggggcacgtggtgacggtggagctcaagaccggtgaggtgtaccgggggtccatggtcgagtgcgaggacaactggaactgccagctcgagaacatcaccttcaccgccaaggatgggaaggtgtcgcagctggagcacgtcttcatcagaggaagcagagtaagatttatgattataccagacatgctcaagaacgctcctatgttcaagcgtttggaagcgaggattaggggcaaaggatcagctgttggagttggccgtggtcgtgcggtcgcaatgcgtgctcgggctgctgctggccgtggtggtggtccagtcgggcgaggtggtgcacctccggtgaggaggtagatttcttcatggcatcgcgcagctttgtggctgaggttgctgtattcggtatcagtagttaaaaattgcctatgtgcctcctgtatgatctatcgctcaaggaacggatgtggcttgttgttagtgcctgtttgatgggttaacggtggacagagatggtagcttgaaatacaatctgttcgtcaccctgtttgaatgaatggaccaatatgtttgtttatcccgtgaaagaattagcttctgttttcgtcccgcagcatatgtggtagctgttttgatttgtcagaatggtaattttatctgagtatttcttcttcgaaaaa

SEQ ID NO: 29702 - DNA, 272 bp, Setaria italica
  Peptide Sequence Number=SeqID_95676
cgaccacgccggattccgccacagaattagccgtccgtcggcagcagcagcggcaagagcatggcggccatcgtggcggcgccgcgggcgtctgcgcccggcggggcggccgtgagtaccatcgcggcgttccacagccacgcgtccccaacccgcgctcccccgcgcgccgtgaccaccgccgcttcctcctccgtcggcgccaccaggcggtaccaccacggctccgcgtgctgcttcgccgccaagcccaccacgcccgtggccgccga

SEQ ID NO: 29703 - DNA, 412 bp, Setaria italica
  Peptide Sequence Number=SeqID_95677
ggctcccagttcttcatcaccttcgccgagacgccgtggctggacgaccgccacgtcgcgttcggccgtgtcgtggaagggatggacgccgtgcgcgccatcgagaaggccgggtccatgagcggcaggacggtgaggcccgtcgtcatcgccgactgcggcgaggtcaagcaccgcgccctgttctaattaacttactctctaccaaacttgacacctgtgcgtgcaactacaagagatacgtgtgaaactatgtagatcatcatatgtgtgcttgtgtcctcacatcgttcatgtgtgcacctattcgttgtgttgactgatgtagctataatgctggtgtgtgagagggaaaatggtgcttgagttaataaagtgctcacttttgccttggtgaccaaaaaaaaaaaaa

SEQ ID NO: 29704 - DNA, 825 bp, Setaria italica
  misc_feature (3)..(3): n is a, c, g, or t
  Peptide Sequence Number=SeqID_95678
atnaacccaagttaatctcagtagatgagactgtgatccagtacaaggtaacctgcctctacaaaaaatatgccacgctattctgacacagccagcgggcaactcttagactatagataatgctgctctttcttaactctgaagagtaagcacgagtctgactaggatagttcttggaagtcttaacatttctaactacaggcattactagttggagtccaagtacagagtcaccttcttcaccgacgtgaacgaagtttgcagcctccagtctttctgcttcctgttcaatggccttcctttccccgcttccgctctgttctccttgacatctgccagcttccagatgcagtgctcagcctgagtgtcaaccaactcgagcaagaagatgccatccttcagaaggttctgctttgagacaaggtcgttgtcgccttcagcaaggtattgcaccctcatagccatgtccttgaagcgatccaaatccccaggcaccttcagaagcctctctgcacctggtgacgatacctcaagtgccaggtccaggggtatttcgcctctttcaattatctcatccaatttctgcttgtagagcctattgaaactctctatttcctcaatatcagggcacccatatatgttggtgagcttgtcgaggcgcacgtagacgtatcccttgggcgacaccttgaatgcgaacatggcgacgtcatccccgaagtggccggcgaggacctcctgggccgccgcgagggcgcgctccccccacttgacgtcccgcagcgcgacgccgccgccgtccccgccgtcgccgatctgggcaac

SEQ ID NO: 29705 - DNA, 1175 bp, Setaria italica
  Peptide Sequence Number=SeqID_95679
ctcattcgggatcaagtgggcttgagatcaactgtggtgagctttgctgtatatccaagcaaggaaaactagctgaggatagtggtaactgtcctgcagggatcagcttatgctactttaccgagctaatttctttgcttgagctctttgggatttatatgagctgcgaatggacatacagcaacgttattgtccgtcttctggagattctggaatcgtgcatgtgcgatgagtattcagctgctctgttagtacttgtcagccaactcggaaggtcctttattgataatgttggttatgagcagagaagagttagtgagctgagggacaagtttatcatcattgttagcagggacaagttttacaaaatcaaggagtttaagtgttcagttttctgccattggtgcgttgctcagcgtccttccattgccatttgacaaaattattgccactcaaagtagacagttatctggtccctttgttgtgcaagagagacagatttctgaatggtttgttcagttaagcaacgagcatcaatctttagctcgttccttttttagctgaaatttatgtatcgctgcatgcatagctgggcctttcatttcacggaccagtgaagaatgcctcgtgcaattttgatatgttccgcacaggtgtattcatggtcccataacatgattttggatgactcccttgctttgacagttggcacagcatagcggatgatgtttgttctcatctttgaagatgccaaagtattttgcagatcatcttttttttttgtcaacatcatgttgtcaaaatttctgcaagagcagctaagaaacccaacagcgaagcatttggagaaaaggacatgcaaatgctggatttggactgagaattgtgttttcaccagaagtctgagtcgaaataggttgcagattttttgcactgtttggatgacaaacgtgatcagtacatcagagattattgaatcaagatttctaaattgaagagatggtccgtccaattcatgcatggtctcagtaagattgccaaatggcgatgatcggtgtgaggtttggatcaggatctgatgccctccgaggaagctgcaagtcacgattgggcatatggatgagactgggagtatgttttggtgtcaggattctttgctgaagtgaatttttgat

SEQ ID NO: 29706 - DNA, 256 bp, Setaria italica
  Peptide Sequence Number=SeqID_95680
acgaagggacaacgagggcatgttagatatgtatgtgctgtgtgcgtgtgtatggacctcctgtggttgtgcgccaggcccaggccggctccctgccatgcctagatagattaggataggcaggttatcccttgattagttatgattctataaacctctcccaagggctgcctatatatttgtacaccttgtataccctaatcaatctactattccacacaatctctattgctttcatttacaagtcttcaatacg

SEQ ID NO: 29707 - DNA, 405 bp, Setaria italica
  Peptide Sequence Number=SeqID_95681
aagccaatattatctcatttatggcaaacatgacatttctgctaagatcagactatcacctgtgaactatagaccatctgtattgatgatattaaactgtctatcacctgtgaaccatagatcacgtgtcatgattgttagatatgtatgtgctgtgtgcgtgtatgggcctggtgtgtctcacgccaatgcccaggccggctccccgccgtgctaggataggcaggttatcccttaattggttatgattctataaacctctcccaaggtctgcctatatatttgtacacctagtataccctaatcaatctattattccacgcaatctcaattgctctcaatgataatttccatgatacatgaattaagaacatggaacttaagtctgttttactgaatctgcac

SEQ ID NO: 29708 - DNA, 424 bp, Setaria italica
  Peptide Sequence Number=SeqID_95682
tacttagttagtaattaggaatgttgttcattcaaatctggctcttaaggtttttagtgagttgaacaaagggatttcatattcaagaagacgtaaccttaaaaatccccatgagaatcttcttggtcagctgccttgccagacacgggatgaacttgtggatcattggacagacatccaggaactgttgcgtcatttttggtcatcatatccaatcacaagtgcagtcctctgtgataaggtcgaaaggttgaagggcgcgatggcacagatatatcagaagctgcaggatatgaaggaatcagcacctcctgaagcaaggcacgaaatgtcccggctagtgaagcccatggctcaggccatggacgctgccttcagccatgatttggaacagcagcagaaatcctcaaaggcaacgaactag

SEQ ID NO: 29709 - DNA, 489 bp, Setaria italica
  misc_feature (444)..(489): n is a, c, g, or t
  Peptide Sequence Number=SeqID_95683
aagcaaatgatggaaaagaagcctgtaactgcagcctgagcactgatgatgcttctttcatttgattgatcaagtatcttctataaaagctaatgggttgaactgtgatgttgttcattcaaatctggctcttaaggtttttagtgagttgaacaaagggatttcatattcaagaagacgtaaccttaaaaatccccatgagaatcttcttggtcagctgccttgccagacacgggatgaacttgtggatgtgagatgctgtacctatctactccctccgtcctaaaatactgttaggtgtatatgtattcttgtattttccccattgtataaggggttttgtgcatagttcctaatacttgtatatgtatatatttgggcttagagcccccatattgaatacaagtgctattcctaatatggtacagagaccaaaaaaaaaannnnnnnnnnnnnnnnnnnnnnnnnnnnnnnnnnnnnnnnnnnnnn

SEQ ID NO: 29710 - DNA, 1345 bp, Setaria italica
  Peptide Sequence Number=SeqID_95684
tatttatggcctttacataatttaattgatgaggaggcaattaaagcatcaaagcaaaggccaggtttcaagagtgccatgctagatctcaggccatctgctgatggtcagacaaacagggttactttcagtgttaataaggagataattcatcagatttttgtggaaaagcctgctgtccatcgggcatttttggattttgttccggaaaagatgtcagaagatcatttttggtcaaaataccgtgaagctgagtatctactcagaacaaaaaatactgcattggcagcagctcaagctgctgaagatgaggtactagctgtgtccctgaagagtgatgatgtagtagccaaggaggcaaagttcaagataaaacaagtggatccaacgttagacatggaagcagatgcaggagattattacattcatcttctggaccacaggattctccgtgatggaagtatacagacagttgatcctgatagtgaatttgtcatgagaacgttgtctcaggatctgaatcagcatgcggctgttgttcttgaagggagatctcaagatataaaattaactgatacaaagactgtagcagaggcacttgcaaggctaaagaaggaaccatcttctagttataatactgatgatgctaatcatgagaggttggtaaaggtggcccgcatgacttatatagaggatctgcaagccccacgaaatatcctgtatgcaccactttgtataaagaatcctcaagagtattttgattctcagcaagcaaatgctctgagatctttagacggcagcaatgatggaaaagaagcctgtaactgcagcctgagcactgatgatgcattctttcatttgattgatcaagtatcttctataaaagctaatgggttgaactgtgatgttgttcattcaaatctggctcttaagcattggacagacatccaggaactgttgcgtcatttttggtcatcatatccaatcacaagtgcagtcctctgtgataaggtcgaaaggttgaagggcgcgatggcacagatatatcagaagctgcaggatatgaaggaatcagcacctcctgaagcaaggcacgaaatgtcccggctagtgaagcccatggctcaggccatggacgctgccttcagccatgatttggaacagcagcagaaatcctcaaaggcaacgaactagcccaacacgtcaggagccgagctgcggaggagagtggcttggtcagtatacggagaatggattacgaggctgtacataagagttgagaaagacgatagatccaatacacgattgcattgaccattaagctcaacctctgttgtctgtatat

SEQ ID NO: 29711 - DNA, 739 bp, Setaria italica
  Peptide Sequence Number=SeqID_95685
aacatgttctaacataagttactcttgctgaacttaccaaatagttattcttattatggctaaactgttgtgcttccagtatcatactctatatcccttcatgatcaccagcaatagttagctgtgggaaatgtggcatgtcttagggaaggagctaaatatgttgatatactactttgaaattcatgctccacatcacaagacctgtcctaagtgaattaatttgatgtacattgtttacttaacaatggttcatgattaagatccattcatcctacctttttacaactatgttgaattgtcatcatttgaatatcttttattttacatgcatatttttctaccatgtctttttctaagtttatcaaattgcatgaccaggaaaatctgactacctgaatggactgtgcctagtgatgttgttcattaaatctggcctctaaggtttttagtgagttgaacaaagggatttcatattcaagaagacgtaaccttaaaaatccccatgagaatcttcttggtcagctgccttgccagacacgggatgaacttgtggatgtgagatgctgtacctatctactccctccgtcctaaaatactgttaggtgtatatgtattcttgtatttccccattgtataaggggttttgtgcatagttcctaatacttgtatatgtatatatttgggcttagagcccccatattgaatacaagtgctattcctaatatggtacagagcc

SEQ ID NO: 29712 - DNA, 785 bp, Setaria italica
  Peptide Sequence Number=SeqID_95686
cttcaatgtctgattatagttcagttgcgaccaggttgttggttgtctttaggcacaaatccatcttctctgttctttatgggtagtgcaatttaggccttggaaactttttaaaaccctttcggtatacaaatttatgtttcatatttgaggttatctaaattattaaaattgccgaatgctgaggatcaagtactgcactttcctgatgcttctttagccttttctctattattgttgcaagggttcttgagccttttcaaatttcactaaaagttgcagtgaagaaaacagttgcagttgcagtaaaagggaaactatccacaatacaatgaataaaaaaatgaattggtggacatttcactgtactactcttcatccacaatatttgtccaactattgtgtgtgcatagatgaataagacatgtttctaaattggaaaaaaacttaacagagttaaaccaatagtgtctaatttaatttaagtttccatccttcgtgttttattcatatctaagccttgagaagattttatagttattatttttaggcaataaaattagcacaatgtgttagatgtgtatgtattcttgtattttcccattgtataaggggtttttgtgcatatttcctaatacttgaacatgtatatatttgggcctagagcccccatattgaatacaagtgctattcataacatggtacagagccaaactaggtttagatttcatttcaatctcctaggtgttcccgttccaaaagcacgttgcacttgcgtgctaccc

SEQ ID NO: 29713 - DNA, 303 bp, Setaria italica
  Peptide Sequence Number=SeqID_95687
gcagcagttccaatgtggaccgagcaactgaactagccattcttctttctttctttcctttttctctaaacgctcccacacctcgcgccgcggccgccgctcctgccccgcatcaccccgctcccgcggacgccgggatggaagggaaggccgccgagacgtgcgctcgcgccagggagatgcacagcacgctcccggaggcgaggcactgcaaccgcctgctcaggcttctcgtggagcgcctgcgatgggaggatgcccggaagctgtatgacgaaatgcttgcggaggagggcggcgcgg

SEQ ID NO: 29714 - DNA, 193 bp, Setaria italica
  misc_feature (190)..(190): n is a, c, g, or t
  Peptide Sequence Number=SeqID_95688
tagtattgtaacagaaagctgtagtgctcgggaataacacaaatgccaccgttcactgacagctttctgttacaatactatgcacatctttgttgatgaactgaataatgatttcagtttgtatgaggagctagccagctcggcaataaaatcctttacaattcgacccaaaaaaaaaaaaaaaaaaacngaa

SEQ ID NO: 29715 - DNA, 819 bp, Setaria italica
  Peptide Sequence Number=SeqID_95689
tgtgatggtggacgtgctcgccaaggcagggaggcttgatgcggccatggggatgtacagagagatggtggcggtggggcactgggtaagcacagcagtgagcaccgccatggtggaaggggctggtgaggtccgggaagctggatgctgggatggagctttgggaggagatgagacggggagggctccgaccaagctttggtttgtacaccatggtggtcgaggccaatgctcggtctggaaggctggacatcgccgccaagttgtttggggacatggagaaggctggtttcttccccacgccggctacatatgcatgtctggtggaaatgcatgcttcagcagggcaggtggatgcagcaatgcggttgtatcactccatggcaaatgcagggacaaggccagggcttagcacgtttacagcgttgctgacaatgctggcgaataaggggctgctagatttggctgcaaaggtgctgctggagatgaaggcatcaggtttcccgatagaggtgaccgcaagtgacctgctgatgatctatatcaaggatggatcgactgacatggcactccggtggctacggttcatgggctcagctggtataaggaccaacaacttcatcataaggcagctgttcgagtcttgcatgaagactgggctgtatgactcagcacggccattgcttgagacatatgttgctggtgctgccaaggtggacttgattctctacacatccatcctcgcccacctggtgcggtgccaggacgagagcagtgagcgggcaatcatggacatcctgagcgccagcaagcacaagg

SEQ ID NO: 29716 - DNA, 887 bp, Setaria italica
  Peptide Sequence Number=SeqID_95690
gtcgaacacccgctcgatgaggtcgttccagctcatccgctgcctggcccccgccggcgggaagctctcgctcctctccggctgctgctgctgctggcgcctgtcatccgccgtcgtcatcgtcgaacgtgccgtacagcgacggcgcccgcgcgtccggcaccgacagcgtcacggcccggcgcagcgcggccctgtgctcctccacgtgctccctctgcagggtctcgttccgctccatccgctgctccgatggcaccgacatcgtctcctcctcctcaagcatcagatccaaagccttctgggcttccctctcaatccaaataatggcatggtctgctgtggcgttgcaggaaagaacaatgtgctcaaatctaccatccacaggcacagctgttttaactaccggtggatatcttccgcacctgcacatttttctttccactatgtgatatatccggcctggtgcataaagcctccttggatcctttagcattgcgtcttcaggtatacatgtatccctcaaacatctcaaacataggaggcacggcaagcagaggattgacttgaaaatgtcttccaaaggagtagcagtcctgggcaagaagtcgtcctgtaggacgacggagttgatgacgtcggcgtatctgacggcgaggttgagcgacatgcacctggccggcgccatggcgtagcagcgcgtgcggctcctgtcgacgtttccgagcttgtcgaggttgagcacgacgaccatggtgagcatggctgcgatgccggcgccgagggaatgccccgtgaaggtgagcgtgtagtcggggtacctctcgaggagttccctgaggaggtcgcactcggcgtcgagcacccattccggtcggtcccttgta

SEQ ID NO: 29717 - DNA, 502 bp, Setaria italica
  Peptide Sequence Number=SeqID_95691
tttcctgaggtctcatggaaaaatgatgttggtattgtcaggcctagaaaaagaaggaagtgtagatgcgatgaaaatgaagtggacagctggccaagtggttttgtcactacagggcagatgaaagttgggcctgcttatcctgacactctgaattcctctagtaccttaaggaggatacttcttcctccatgcagatcatatgaggatgtaattagtctgtctccgcttggactaacgaggatttttaaagttcaaatgcagatggaaatgagcatgtcaaaatttttcataccgagttgcttatgtattcatcttttcttggcgaaagagatattgatgttggatttatggacaaaaggcttccatttaagaaagattctgcttttgtcggagattctgttgtttgctgctgtcagggatatctgtatctaatcactcagaatggcctttccgtggtccttccaccagtttctatttcattctttttcgtctcatggtg

SEQ ID NO: 29718 - DNA, 581 bp, Setaria italica
  misc_feature (548)..(581): n is a, c, g, or t
  Peptide Sequence Number=SeqID_95692
aacgtaacggaacaaaccaaataactaacttagtcgtcggcaccatctcttctcttctcctcccaaccaccatctcccattcctctgcgcgcgcgcggggcagctgaggaggtagcgcgccgccatgggcaagatgtgctgcagcagcgagtccgaggaggacgccgggttcaacctgctggggctgctcgtcgccgccgtcatcgcgctggtgttcatgctcctctgcacgcagcccaagaggccgaggcgctgcgtcaccatctacccctgctgctgagaggaggtttccaaggttccatggcggagcagaggccgaagcagagcagagcaggccaggcgtccaccggttcctgattcttcacttgtcgaataattttcttctaccctacctaattgtgatgttcgtcctaccgtaagtcatgattgtaatcagtatatattttagcaacctgagttgattgatgttatagctttggagagaatggtagacgttatctgaaactattgtgttgcgttgctgttgatatgtgaccaaaaaaaaaaannnnnnnnnnnnnnnnnnnnnnnnnnnnnnnnnn

SEQ ID NO: 29719 - DNA, 360 bp, Setaria italica
  Peptide Sequence Number=SeqID_95693
gttggtgacagcacagaggaggggtgagagctcgggcctcccgacgcagccggcgccgggttgtccgtgtgctccacgcgcaggggcgacggtggtggaggagaaacactcctgcgagcgcgcggccacatgaatttagatagtttggtaagagtagcccggaatccacctctgctgcgggcacgccgccgcctgttggctgccttgtctgccggccgcgcctcttcggtgttcaccaccaccagctgtgagtactctttgtccctgaccatcttcacatgcataaggctgatacacacaaggctttctgcgcagaccagcttctgcgcaggatagacaaaggcggatggtgtccacgcc

SEQ ID NO: 29720 - DNA, 967 bp, Setaria italica
  Peptide Sequence Number=SeqID_95694
aggacacccaccgcttcacgaactggagcttctcgttcaccgtggcgtgctgcttctgcagccaggtgtcagggtagagatggatggaagcgaagtcgatgtccgggatcttggcgttgcggatgaagtccgagccgtagttgttgtccttccagacgcccgggttgacgtcccgcttgctctccgggctcgtcggcccgtagaacccttcggtgccgacggtgaggagatgcttcttgtcgatggacttgacgtacgccgccatctcctcgatccagcgctgcagcgtgtcgccggatgggtccgtggtgcagcggggctcgttcatcagctcccacgcgaggatagtggggtcgtccctgtactccacccctgtcaagtggttcttcctcgtcagcagcgtcttgaggtaggctttgaagtagtcgcggatggcggggtcgtagaagaaggaatcgttggaggcggagaggccgacgccctcctcccacgcccaccgcacgtactgcgtcttcccgccgtacgcctccaggttgttcgccaggctcaggatcagccgcaccccgtgccgcccggcctccaccaccacccagtccagcgccttgaagacgcgcgtgtcgaagtggccgggggagacctggagcgcgttgtaggcgccgtcgttgaaggcccaggagcggcacacggtgaggcccatctcggcggcggcgcggaacatgcgggacacgcggtcgcggctccggggctccacggcctggtccatgagccagtaggagttccacccgttcgggtagaacggctggccgtccaggaacagctgcgcgccgcgccgctccacgaagggcgccgtcacggcggcggccgcgcgggaggaggaggaggagggcccggcgccggagccgaagccgaagccggaggcgggcagggacgagagcgagatgtggcggaggtccacctcgccgaaggt

SEQ ID NO: 29721 - DNA, 360 bp, Setaria italica
  Peptide Sequence Number=SeqID_95695
gacgaggcttccgtgctagattgttggcacgatcaacagcaacaagcccaaacttgggaccatacccatcagcccattcccaattatcggatgttgtccagaatagataaccaagcacacgcacacccattatgattgcagcatagatggctaacaggtgctccagaatgtatggtttacgaatcagatcagtctcatcagaaactccattttcagtgatcataaaaggtatatttaagctcttgtatcgttcattaaactgaatcaggacacggaatagcccatcaggataaacaccacgaccagattcgctgtactcatcattgtccacaagttttagaccaggacccgatatcacct

SEQ ID NO: 29722 - DNA, 1114 bp, Setaria italica
  Peptide Sequence Number=SeqID_95696
acattacgcccctcgccaccagcaccgcgaacccccacgccacggacaccgtccaccggttggcgccgtcatagcagatggactgctgcatcagccccgccgcgtccagcttcaccggcccgtcgaacagccgccgcaccgccgcgggccgcgacctcgcgtccgggaacaggggcttgacgacgtcgaggtggtgcagcgtcacgatcggcgccaccgggtgcgacgcgaggaggcccagcaggtcgccgtacacgtcgtactggtggaaccccgggtgcttggtgagcggcacgcccagctccgccatgcacgcctggatccggtcgtcgctgccgtagagcgccgggtagcggcggaggcagccgtcctgcatccgcgagagcgcctcggcgagcgggcggctgatggcgaagccgccgccgccgtaggccatcccgtaggagaagtagatgttctgcaggtggctctcggagagggagccaatgtagtatggctggcggtggtcgaacttgttgagcacggcgaggaggttgtcggggaagaagacggtgtcgtcgtcgcccatgacgaaccagcgcaccccggggaggccgaggcggaacgtctcggagacgatgcgggagatgcggatggcggagcggtggccgcggcggtgcgtgtaggggaaggcggaggtgtcggacgagatcctgatggccgggagccccgtccgcgcggtggacatgttggactcgcgcaccgcgcggtccagccacacgtagccgcgcatggcgccgcgggggcgccaccacaccctgatgtagtccttgcgcttgtcccagaaccgcgacgacgccgcgatgccgaacaccacgtgctgcagcgtcgtcgccgtggacgccgcggcggcggcggtgggccgcttctccgcctccaccgccgccgccgtgaggttggcggacatccgggacaccgatacggaggcggtggtggcggcggcagcggtggagtcaggcatgcagttggaggcggccgacgaggaggcggaggtgaggaggagggtggagcgtgtagaagaagtagagagcggtgagagggagcagcaggaggaggaggaagcggaggagggtgg

SEQ ID NO: 29723 - DNA, 657 bp, Setaria italica
  Peptide Sequence Number=SeqID_95697
acacgtttccattcacctgaataaagatactgtacaagtgctcttgggtgatacgatgccacaggtccactcagtttatcagctatatccaacaagttccataaactatgagaacagtgactatcatcttggtctgttcgcaagacactgttgctaccaatagtcccgctgttgtaattttctggtaacttgaatttaccaaaagcagtttcattgaaattgttagcacatggtaacatatcatgcacatatattgggcaagcacgtatctgggtagtgtactcatcagctcctgttactaaccatgaactgaagagtgaaagatggttctcatgaacaagcgtgatagttccctttggcccccaaagaaagccagcaatgtcatgatgagagtgtgataatgcaatacagctccaaagatgctcttcttttgaattgtcattgtgcagcacattctggacagaagcatgcttatgagaatatatacacagctcattaggtagacaaactgccagtagaaatcgtccatcacctaaggatagcccctctataccaacaatatagtcttgcaatattagtgcatcttctagcagaaaactgccatccccgatgagtttaactgcttcccagatatgaatagaggtgctattcttctta

SEQ ID NO: 29724 - DNA, 1204 bp, Setaria italica
  Peptide Sequence Number=SeqID_95698
gtcgattatgagatagatgtattttagatgagaacccatagttcttaatgaaaagtaaccacgtaacgatattgaagttacgaggtgattatttccatggagttcataatgttacaaaattacttgtaatgcgccgccaagctaatcagttactagctacctagcgcttgaaagtaggtggccttctgactttggtagcctgctcgaacgcgtaggccatctcgatcaacctcggctcgtagcccctgagcccgccgaagcttatcgcgaaggggaccccctccttgtcgtaccccgccggcacggcgatgcccggatacccgccgacggcgaggacagaggaggcgtcgctgttgggcgccacgatcgcgtccagctggtgctccttcatcagcttctccaacccgttggcggatatctcctcgagccgccggatcgcagctctctccctggcgccaatgccgttggtttcctcggccgcgatgaggtccggctgcccgaaatctttgagcctctcctctacagggtgtgcgttgttgaacgcaatgacatctgaaagggagcggaccggggagcgcagtaggtctgacaggtatgcattcaggcttatcttgaactctgcgatcatcaggagcgtctcttgggcatttagatcggtaaaatttgtcgcgatgtcgagatccttgatcacagtagcgccgtgttccctcattgtgttgagatgcttctcatacaccgccgtctggaagtcattgtacccttggaaaaatacagcaggggcaccgattctcttgcccctcaatccatccatcttcaggaactgcgtgtaacccccacgtgggatgaacttggaagctgctccggtagcttcagcgtcgagcttatcgtagccgacaatggcgtccagcacatggacggcgtcggataccgtacgacacattggccctatggtgtcttgcctcggcgtgattgggatgacgcctgaccggctggacagcccaactgttggcttgatcccaaccacggagttcgacgacgacgggcagagtattgagccgtcggtctccgatcccagcgtcacggcggccatgttcgccgccgcggccacacccggcccggcgctcgacccgcacggcgaagccgacagaacatacggattcagcgtctggccgccgcgggcgctccagcctttccttgactgcgc

SEQ ID NO: 29725 - DNA, 977 bp, Setaria italica
  misc_feature (937)..(937): n is a, c, g, or t
  Peptide Sequence Number=SeqID_95699
gcactgctgctgctgctcaggttagcttggacaggcagctccaagcttggaggaacaatcctagttggactgacgagccgccggaaatcaaggtgactgtaccagaaggctcccctttgcaacctcaatctaagattcaaggcaggattaccaccggacgcagtatacaacatcataattgacccagcaaacaagagagtgttcaaaatatcaaggaagtaatatcaagaaaagtcttgcttgacgaaggctcaaggcaagtagttgaagtggagcaggcagcaatctggaagttcctctggtggtctggcatcttggcagttcatgtttttgttgaccagaacagaaaaaatcatactgttaagtttaaacaaggacgagcaggttttatgaggaagtttgagggttgctggaggatagagcccatatttgttgacaaggatgtatgccttcctcttcatccatgcacactggaagaatatgaatcctgtactggcagcaggggcagagttgcatcagccattaccttggatcagcttatagagcctgcccttttacctccaccacccatctcatggtatttaagagggatcacttcaaggacaactgagatgctggtgaatgacctgatagcggaaactgctcggctgcgaggcatctcaaacaatgcaaatggcaagcaagatgttgaagaaatatgtgatgcgagcaaaagccgaccaggaatagagtgtggtgacattaaggaaaggtggcgacagagaagaaaaagtggacggcatggaaactcccttagattgacaagtcaatttttgtaagataagctacaaacagatgctcattttaggacatattgtattttaaggccaatttacctgtgtcataatgatcagggttttggttgtagatgttagtgtgagatggcactctgtgaacntgtagtaagcttggttgttcaacagtatatatgtctgata

SEQ ID NO: 29726 - DNA, 334 bp, Setaria italica
  Peptide Sequence Number=SeqID_95700
ggcggaggtggaggaaggtgtccgggagcacgccgcagaagcggttggagttgaggtggagcagcgcgaggtcggggaggccccgggggaggtcctccgggatgtaccccgcgatgtcggcgtggttgaggtcgatcccggccacggcgagcccgccgccggacgggtggggcgcgcagaagacgccgttgtaggagcagacgttggggcccacccagttggcggtgaagttgaaggggtcggagaagatggccgtccgcttccacgactgcagcgccgcgtacgccgcctgcagacgcggcgctgcagtcgtggaagcggacggccatcttct

SEQ ID NO: 29727 - DNA, 546 bp, Setaria italica
  Peptide Sequence Number=SeqID_95701
attctgcagtgtgtcaaatagaaccagaaatagcaacaaagtggaaccatcaattcatgaaagcttcccggggtgggtactacgattacattgaacacaatctgagggatgctggtggagaaatctattcagtaaaggaggagcttatggtggctcaggaccggattcatgagcttgaagcagagtgtcgatctacaaagaagcaacttgatcacctggtgaagaatcttgctgaggaaaaggcttcctggaagagtagggagcacggtaaggttcaccacatcttagatgctgtgaaggaggaactcaatcgggagaggaaacagagacagcgagcagaaatgatgaattccaaactgctcaatgatctgtctgagatgaagtttgctgcgaagcgttacttgcaagattatgagaaggaaaggaaggctcgggtgctcatggaagaggtttgtgatgaattagcaaaggagattgcagaagacaaagctgaggttgaggctatgagaagtgaatcaatgaagttcagggatgaattggaggaag

SEQ ID NO: 29728 - DNA, 370 bp, Setaria italica
  Peptide Sequence Number=SeqID_95702
gttaggaattcaaacaacaatggtttccgtacacatgatttttattacgggaatttcagaagcagaggaggatttgaattttgcacgagtgatgaggatgaggatgaaccagagattctgtttcgtgatgcttttcgagaccagcacacatattattggtctttttcctccgataattttcaatggaggaactccagacgtgctcgctcagaaaaatccagaaaatggagttctgaaacagacgatgaggatgaagtatccactccatcagaggtatctttggcacggcaagctctgggattgagcacttctggtccgctaaaacttgaagatgttaaaagcgcataccgagcatgtgcacttagatggc

SEQ ID NO: 29729 - DNA, 603 bp, Setaria italica
  Peptide Sequence Number=SeqID_95703
ccttaaatgacattacaatggaccttgtgaagtttaaacgtcatttgtttcttgtctggcaacaggaggatttgaattttgcacgagtgatgaggatgaggatgaaccagagattctgtttcgtgatgcttttcgagaccagcacacatattattggtcttttcctccgataattttcaatggaggaactccagacgtgctcgctcagaaaaatccagaaaatggagttctgaaacagacgatgaggatgaagtatccactccatcagaggtatctttggcacggcaagctctgggattgagcacttctggtccgctaaaacttgaagatgttaaaagcgcataccgagcatgtgcacttagatggcacccagatcgccacaatggctcatctaaggctacagcggaggagaaattcaagcattgcagtgcagcataccagaccttatgcgatagtttggctgctgcatagataattttgaatgaagattgtgctgcatgagcccctttcaaacttgtctgcaaattctgaagagttgccatgtgcttgtggtagccctcacctccccaatcccagaagtcacattgctcttagctcttgggg

SEQ ID NO: 29730 - DNA, 385 bp, Setaria italica
  Peptide Sequence Number=SeqID_95704
cgaattgagttctgaataatttgggagtttactgaatgtccacccacattatatgcagccttcagaatcatgtcagtgcttttcatgcgtttttcctgtagcccataggccatgaaagcatgcataaccaaagcattgtggatgttaatccaaaaacagagttgctcttcatgttccatctttgtagggtcaatcttctccagccgttttatcagcgttctgatagtatccagcattttagaggcatactcaaatttgtcttcatctatatgtatccttggaaaaattatcatcccagtgtattgtacattactcccatcaaatgaaccatatgcatcagaggttgtgtcgacattgtaatggcatcgagggctccaactatcga

SEQ ID NO: 29731 - DNA, 309 bp, Setaria italica
  Peptide Sequence Number=SeqID_95705
gcccaattcagcgcatttagccctgatcaaagccagcatactccaccaattcccgtattcattcccaattatgccgaatcctttggccacctcaatcataaaagggagggggacctttcaatcccccaaaacatgtaaacctagaaaacgggcattggtggagtatgctggctttgatcagggctaaatgcgctgaattgggcgttccccgcttggactctgccctagtttgaagcatctcattttccttgcgtgcttgaaactagaatatagattcttcatgagaataggataattctgtcgatttta

SEQ ID NO: 29732 - DNA, 605 bp, Setaria italica
  Peptide Sequence Number=SeqID_95706
cgtttcaaaatactaaagagagattgcagaagaccaaaagcacactcaacatccttccttgcccttcttgatgttcagcaaatagtttatgcttttctgattgtggttgacgtattgacttaacaaaagttgcccattctgggtatataccatctgcaaggtagtaaccagtgttgtattcccttccattgacatagaactgcacctgaggtccttcacctctcagctgctggacaaacagaggtgactgattaagcacgttgatgtcattgttggacccagcaaccccaaagaaggcatgccatatccaacgatcatgcgaagctactgcttctaaaatgaccgtaggaacaccttgatcaccacaggtatacattcccttccattcataaggacatttttcccaatgctaatgcatgcagtcaatgctccataacataccagggaacccatgccactcaccaatatgcactaagcgttcaatatcttgtgctgtggggcgtcgcaaatactctttaccaaacacctcaatcacacccttcacaaacttcttcaagcactccactccagtactttctccaatcactactcactcatcaaagttg

SEQ ID NO: 29733 - DNA, 473 bp, Setaria italica
  Peptide Sequence Number=SeqID_95707
ggctggtacacggccacgaacacggggccgctgcggtcgatgcaccacgtctgcacggcgaacgccacgcccgacgccaccaggcccgcgtagaggacggtgaggagctcggcgccggagccgagcgcccaggcggcggcgtcgcgctcggcgacggcggcaacggcgaggaactggagcaggccgaagaggcaggtgtaggaggtgacggagaggcgcgccgggtagcgcttcagcacgggcgcctgcagcaccagccacccggaccacgacacgcagtggcccatcaggtacaagcaccccagcatccagctcttgccgccgccgccgctcgccggcgcagcaggctggtggtggtgcgcgacgtcgagcgcggcagctgggccgaagacggcggggcccttgaagagcgtgatgacggaggcgcccgcgacgcagagcgcggtgccggccaccttggcgaggcccgtcca

SEQ ID NO: 29734 - DNA, 443 bp, Setaria italica
  Peptide Sequence Number=SeqID_95708
ggccgatgaggagcactcctagccaatgcttgatcacgagagccaaccaactcaactatcatcttttttatattattagccacatcttgtttagatggatcaagaacacatagggaaaaggtttggatcaggagctgagcatgctcatatatcaatacatgcagttggccaagttgctgatcagtaaatccacaaactaaaggtgcacaagttaccagtgccaatgatgaagggaaaagggcattctgggtaggatattgccatccaaaagcatgtgcaggagtcaccactgcagttggaacatatggcagaattggtcttaaatgagttttattggattcgtgacgatagctacctgccccaggcaactcggtgaatggccgcctctgcctagtctgaggcctacgaccatctttccccttttaccatttgtgtcatcatag

SEQ ID NO: 29735 - DNA, 720 bp, Setaria italica
  misc_feature (693)..(693): n is a, c, g, or t
  Peptide Sequence Number=SeqID_95709
ttctgcaatggacaagcttgatgtcaaaccaggggattctattccgaacaagttaaccagcccagtaataccatggatatcctgcccctgaatgacaaaatccgaaggaggctgtccaggaccagaaagctttggtctaatcccagaataaccaggttccaatgacccgtccttgagatttgggaaatacttccttaccacagggtaaaatacagaacatcgggtggggttgactgagtaatcaaatctatttagaaaacatgacacaggatcctatccaccatctagccattcaacatctgggccaaatctaacttggccattcaagtcaattgtgacatggacccctataccaccatcctctggtagaggatatatcaagtggctgaaaggactcttcgtttgagagagggtgaagtaacatccacgagcataatgagggttgggcacaaatgcttggtcaagaccatgaaattgtttggcaagtggaactgcactcaaacctgctgagtttatcagaagctttgggagcaaaacaagctgtggggtcacatgtgaccctacaggatggttctgcagttctttgctttcacaaatatggagttcgaggccttcatatccaacctgcccaccgataactgcagtgttataggatatggttgttcccaagttttcagcatcagccaaaagggngagcatgaatgaatgagagtcaactat

SEQ ID NO: 29736 - DNA, 276 bp, Setaria italica
  Peptide Sequence Number=SeqID_95710
gcagtccgggtggaacacgtgggagcacttgggcagcaggcgcagcgtctcgtcgtcgtcgaactcgctgaggcacaccgcgcactcgagcgcgcccttgccggccttgtgcgccttcacgtcggcgtacgccatggtggggaaggtctcgagcaccgccgcgtcgagcccgcgctggcgccgcgaccgcgcggcggcgccgttcggggcagggctcgcggagtagccgctcgagccgtcgccgtagcagtggcggacgtagatggagaagagcga

SEQ ID NO: 29737 - DNA, 825 bp, Setaria italica
  Peptide Sequence Number=SeqID_95711
tatcataattgtgtcaggcgtcctgaattatggatcgttatccatatgagatcgtgtggccagatcatgactgcatttttattctgtattgatcgctggttagcagaaaaccaattgatgccatgtttctggaagaactacttaatctaaatatatgttggcaatatctccttttgggtatctaataaatcgagtagaatcaacatgcctttttttttctttgcaatttgaatccttaactacctctgtgatgtttttgtgagttccatagttgaacatgccatgctgactaaaatactcattgtaggccaagactcaaatgctggacaaccatctcctcctagctgttcgctcttaagtgctggaagatgttttgctggaactcagaatgtttcgagtctgcagaaggatgaagcatggaaagttaatgtgcgcatccatggttgtgatcttgaacagggttatttatgtggaacgatggaagcgcttaatgttccattggcagatacgcctgtagtaccagaggatgatataaggcactggtccaagttctcatcatttacgcctcttctgagtcagattgagacagatggtggcaagtcgttagaccttagcaactatcctcatatatttatgaggtggaaagagcaatactttgtcaatgttggagttgactgtgggttaaccatcgctggtttctactacgtttgcttttcttgtagtgatggttccattagtggcttttattatgatccaaacagcagcccatttcagaagcttgaactgaagtgtaccaatgagaaaaattcttggtatttctacctt

SEQ ID NO: 29738 - DNA, 443 bp, Setaria italica
  Peptide Sequence Number=SeqID_95712
tataaaggcactggtccaagttctcatcatttacgcctcttctgagtcagattgagacagatggtggcaagtcgttagaccttagcaactatcctcatatatttatggtatgacattacctgatatgttcatttatcaatgtataagcatttttatttaccttttctctgatgcatgtagaggtggaaagagcaatactttgtcaatgttggagttgactgtgggttaaccatcgctggtttctactacgtttgcttttcttgtagtgatggttccattagtggcttttattatgatccaaacagcaggtaataaatatttttctgcaatttataaattacaatggcatggtatcagattcattaatgaagaaggagggctggtgtaaacacttctgttctcttcatgtgcagcccatttctagtaagtctttgtaacttgta

SEQ ID NO: 29739 - DNA, 1089 bp, Setaria italica
  misc_feature (1035)..(1089): n is a, c, g, or t
  Peptide Sequence Number=SeqID_95713
ggcaaactgtcctcgcaccgcagcccccttcctcgtcgccggcgacctcgcgcgccgccgctaccgagatgccggtgagggtggtcgacaccgcaactccatcgtcccagccctccccaggccaagactcaaatgctggacaaccatctcctcctagctgttcgctcttaagtgctggaagatgttttgctggaactcagaatgtttcgagtctgcagaaggatgaagcatggaaagttaatgtgcgcatccatggttgtgatcttgaacagggttatttatgtggaacgatggaagcgcttaatgttccattggcagatacgcctgtagtgacattctgggagggggagatagtagatgctaaaaattacacgtttttcaccggcaagtgggaagcatcaccagaggatgatataaggcactggtccaagttctcatcatttacgcctcttctgagtcagattgagacagatggtggcaagtcgttagaccttagcaactatcctcatatatttatgaggtggaaagagcaatactttgtcaatgttggagttgactgtgggttaaccatcgctggtttctactacgtttgcttttcttgtagtgatggttccattagtggcttttattatgatccaaacagcagcccatttcagaagcttgaactgaagtgtaccaatgagaaaaattctggattcaccttttcctcctatgagctacagtgacaggctcaatgcatccggtgccaactttctattagcatatacagtgtgtctagtgaactcataattcctaatgctgttgtattaaaagaaatgagagggtgtgtatgtaacagtttgtttccagacaaagcaacctgttactttgtaatgttaagggaagcaggcgccatttcttttctaaatttaccttttgtattatgcttgtgtcaaccatgatgtgatgtgtctgaattcagttggatgtggaatgtaaaggataaatgctgattcagtgaaatggtatatacctcttcccaaaactgaaaaaaannnnnnnnnnnnnnnnnnnnnnnnnnnnnnnnnnnnnnnnnnnnnnnnnnnnnnn

SEQ ID NO: 29740 - DNA, 420 bp, Setaria italica
  Peptide Sequence Number=SeqID_95714
gatggctcaccgacacaaagtatggataggggaagtaatcaaagatcttcttgttgaggatgttaaatattacattcaggaaataccacaagaagaagaagaaacctgtgacaagagttggttatctctctgcaattccctggggctttgcttctccggcggaacccgaggaggcggcaggcggcgccgcgcggaggaactgccgcctcgctggaccggagagggttacggaggaagaggtgagcaccggagccggacggagctgccttccgcaggcgaggcgagcgccatcgggggcgtaggcggccgcgagagaagagaaaacgccgcggcgccggcgctggggcacagaagcggcggcgccgccgccggggagcgttccgagcgccgccatttgggtttgcggggaagtgcggcgcg

SEQ ID NO: 29741 - DNA, 242 bp, Setaria italica
  Peptide Sequence Number=SeqID_95715
atgcgatgttcacttaatccctctcacattcactcatctcacatggatggcaaatctgttgccactcacccccaaatagtggcaaatagttaattatttcaattacacatgctgaagacgatgttagttaaaagcacgtatgcaaaggaaataatcctctgcttaacataaatcatagaatttgcatttattctattgcagtgtccttgtgtgactatttatttgtgaagggtgatttggtg

SEQ ID NO: 29742 - DNA, 320 bp, Setaria italica
  Peptide Sequence Number=SeqID_95716
tgcacgcctcggcacccacgtcgaccacgtccacgacattgtcacgcgcctcgagatggacctcgacgccatcgagctgcagctcgacaaaggtggtcactttatgaggaaacttttgctggatggcaggagattcccaaaaatgcatcttgatttacagcgcctgcttcaggttgtttctcatggtgaacaagtgttcccccgtgtgaaggaaaaatgtgcgagcaagagttggttctcaacaggagacattgccgcccttgaagatctgataggtcgccttaggaggctcaaagaaaacctaggattcataacaaata

SEQ ID NO: 29743 - DNA, 880 bp, Setaria italica
  Peptide Sequence Number=SeqID_95717
atccagcgcaagcacggcgagaaacccatccaaaaacacacacacgcccgtccgaggaacaacaattcagagtccagtagagtccagtccatgggtgccggcaagggaggagatgaccgcgccgaggaggccgcggcggcggagcccgtcgtgctgaagatggagctgcattgcgccggctgcgcgcagaaggtcaagaaggccatcaagcgcgtgcctggggtggagtcgatcaaggcggacgcggcggcaaacagggtcgtcgtgacggggacggccgacgcggcggcgctcaaggcgcggctcgaggccaagaccaagaaggccgtggagatcatctccgccggcggcgggcccaagaagaccgcccccgccgcggagcctaaggacgccggcgccggggagaagaaggacggcggcgccggcgagaagaaggcggacaaggacgcgagcccaaaggaggagaaggagaaaaagcaaccgccggaggagaagaaacccaaagaggagacggtgctgctcaagatccgcctccactgcgacggctgcgccgaccgcataaggcgacgcatctacaagatcaaaggggtgaaggatgtggtgctcgacggcaatgccaaggacgaggtgaaggtcaggggcacgatggacatccccgccatgctctcctacctcaaggataagctcaaccgcgacgtcgaggccgtggcgcccgccaagaaagacggcggcggtgagggcaaggacgacaagaaggacaaagccggcgagggcgaaaagaacaagggcgcggctgcggccccggtcggcgacgacacgaagtccaagggcaagggcatcgaggtggcggctgcgggcccgtccacggcggccgccgcgg

SEQ ID NO: 29744 - DNA, 547 bp, Setaria italica
  Peptide Sequence Number=SeqID_95718
catcgcgacaattatcgtgtcgcagacgagcaggaggtggcgcaagccgatggcctgtgggcggaggacgacgacggcggagaaggggagggacagcaccaggtaccccgccgcgatcgcgttggccaccatgaagaacaggagcgccgggaagtcgtcgaagcgggcgcggaactggaagaactgggtgaagacggagagcgtctcgtcggaggtgcctgtggcgatggcggcggcgagggtgggcccgaaggccgcgatcctgagcacgaagtcgacgagcgccacgcaccggctgccgcggtcggcccgccggaagaacgggacccccgtcttgcgaggcgccgtggtcgctgctgcagctgcggggacggctgacgatgtcgcgggaggagccgtggccacggccggggccttgccgtggtggtgggcgacgtcgtcgatggggatgacggtcgcggcggcgggggcctcgctggtgctcatggttgccgccgtgcaagttgggcgcaggctttttgtgaggtgatgaggtgcttgatcagct

SEQ ID NO: 29745 - DNA, 268 bp, Setaria italica
  Peptide Sequence Number=SeqID_95719
ttttgagaccccggccgagcgtgcaagtccacaataacacccaagttgtacttctctgcccagctgaatgcattatccaacgcttggagagagcctccaacgaatggaagtggaggattggggtcactggcaatccaccatccaactgggattctcaccgcgttcagtccacttgatgcaatgaaattgaagtcgttctcggttatgtatgtattccagtgattcctgagcacctctgtggcttttgttatgccatagccattgcata

SEQ ID NO: 29746 - DNA, 451 bp, Setaria italica
  Peptide Sequence Number=SeqID_95720
atggtcgaggatgccgtgcgtagggtagctgtggtcgacgtagtcgtcaaggttgccgaaaacgagggagttggacatgaagctgcgggcgtacgaggagacaccaaggggatggtggcgcatagggaagacaccaaagacgaagacggtgacgcgtcgaggcaattgtagaaggagaggtcgatgcggaagtcgatgctgtcaggccgacgtgtagaccaggcatatccgggtttgccaagcccggaaacacgtcggggatgatggcacgcaccaatgttgccaatactaaacgtgcaaggtagagggcaccggccatgtgtcagcgtctgagggactagcagaggaggcctccaggatggttgcgggcgcggaatggcgtgggggtagaaggtgccgatgcagcctgcggtttgttcggtaagttaagtaaagtaatttgttaaggtta

SEQ ID NO: 29747 - DNA, 181 bp, Setaria italica
  Peptide Sequence Number=SeqID_95721
taagccagccattagaatcaaatgcacaagttcttgtctcattacctccaacatatcctgtatgattcataggaagttaacattcacatcaagctaaaggtactaattaaacattactttgaaacttgtggcaataatatcttgctcaaaaaatatttaccactttattcattaattgcca

SEQ ID NO: 29748 - DNA, 500 bp, Setaria italica
  misc_feature (457)..(457): n is a, c, g, or t
  Peptide Sequence Number=SeqID_95722
tgatggtggctatgctgcatgttacacatacagttgtagcaaaggtgcctttgtgggctgcgcgttcaatggcagcatagtatcaactcgagacactgagaatgctcgattttacggtggccctgtcaaggcctctgacatccttctgggatccatggccaggccacctgcagcctcccctctgtacaaagccctgcctgaattgttcgacaggattgggaagtaaccctctcctcctttaggcatctggcagctggcatgccatgccgcctccttgtaaatacattcaggtcctcggatttgcgctcgtcacactatttcgttggaagcaattatgcaactgtacagtacgccattcttcgaccacatcaaaggttccttttcgttcgtgagtgttaagtgggttcaaacaacatatccactctgtaaatattgtacattgggttgacaattacancaagatatgaaagaagaaaaaagcttaatcctcaaaaaaaaaa

SEQ ID NO: 29749 - DNA, 632 bp, Setaria italica
  Peptide Sequence Number=SeqID_95723
gtgcggctgctgcaggacaacggcttcgacaaggtgaagctgttcgacgccgaggacgccatcctcggcgcgctcaagggctccggcatccaggtcatggtcggcatccccaacgacatgctcgccgacctcgccgccggcggcaaggccgccgaggactgggtcgctaggaacgtctccggccacgtccgcgacggcgtcgacatcaggtacgtggccgttgggaacgagccgttcctggagacattcaacgggacgtacctgaacacgacgttcccggcgatgcagaacatccagtcggcgctgatgaaggccgggcttgctgacaaggtcaaggtcacggtgccgctgaacgccgacgtgtaccagtcgtcgacggggaagccctccgacggcgacttccgcgccgacatccacggcctgatgctcaccatcgtgcagttcctggcgtcgacgggggcgccgttcgtcgccaacgtgtacccgttcatcagcctgtactcggaccccaacttcccgctcgactacgccttcttccagggctcctcgtcgccggtggccgacggcggcgtcacgtaccagaacaccttcgacgccaaccacgatacgctcgtggcggcgctgcgccggaa

SEQ ID NO: 29750 - DNA, 577 bp, Setaria italica
  Peptide Sequence Number=SeqID_95724
ttttttttttttttgtatgttaaagtgtaccatcaatccatcatccaaacttaaaaaaaacattcatgatatcgttgaaccacttcgtttctatgaagagtatgtatattgaataaattaaatccacgtatgcgcgtgttgcctcgtgtgcacttcaacatcttattgcttgtaactcctaccggcttcatggttgaagcaccataatttctgtaggaatttcggaggaaatatgaaggaataatctccaaacctcatcttcatgtgaccagttttcactcttgattctcatagcatcatcaactcccagggcagaaggtgacgtcgtagctggtggcgccggagcaggtgaaggtgctgctggcgtcgtcgtaggcgtagctgtacgccgccgggcaggtgctcttgaacacctgcgagtagttggtgggcccgcacgtcgccggcgtaccgtactgccccgtgcagcagtagcgcgcgctgccgtaggcggcgcacgcgctcttgcacgccaccacgccgccggacgccgccacgacgcggaggtccgcggggcacatggcgttcacgtccccgg

SEQ ID NO: 29751 - DNA, 819 bp, Setaria italica
  Peptide Sequence Number=SeqID_95725
ttccgttccgtttgtttgttggaccttccgtccgccgcgctctctagccatccatccagccttcctcgccatggcagccaccgtcctcctccctccggcgcactgccacggccaccgcgccgcggcgtctgcggcgacgacgagcgggagaggaccaggcgccctctcgcattgtgccctccctccaccgcgccggcagcgccggggatcgcgcgccgtgagggcggccgcgcctcccgagcagagccgcggcgtgtctctcgcgggtgactccgggcaggcgagcgcgggcgacgccaaggccgcactgtaccgagctctggacggcgtggacagggggatattcgggatgacgtccgcgcagcgatcggagatccacggcctggtggagctgctcgaggcccggaaccccacgccggagcccaccgccgcgctgcaggacaaggtggacggctgctggaagctcatctacagcaccatctcgatcctggggaagaagaggaccaagctggggctccgagatttcatcagcttaggggacttcctccagataattgacgtcaaagaggaaaaggcggtaaatgtgataaagttcagcgcgagagcattgaagatattgtcggggaagttcactattgaagcttcatacagtgtcactagcaaaacaagagttgatatcaagcttgagagttcaactatcaccccagaacagctgatgaatatatttcagaagaactacgatatgctcctggccatattcaacccagaggttggctagagataacatacgttgatgaatctttacggatcggaagagat

SEQ ID NO: 29752 - DNA, 1313 bp, Setaria italica
  Peptide Sequence Number=SeqID_95726
tactaagttacttactaagtaatttttactaattactaagtctttaagggggtactttcctttggaagctcatctacagcaccatctcgatcctggggaagaagaggaccaagctggggctccgagatttcatcagcttaggggacttcctccagataattgacgtcaaagaggtcagtgaaagctacctgtggtggaattatgtcatgccgatgtttgtgtcattgtgcgtagtatctgtgacgtgctactctgttctgttcctcctgattagctgtgggttgccgcttgatcagctcaaacttttaaactcactccatcctttaaatatatgacggcatttaaaacatgttagctaagtagatatattttgaatgttgaactaattagcatgtcctaagcttaataactttctaacatccaaagaattgtatgtgagttgagtgtttcctagactatgcaaattgcatttgggttattcatggtataatagccatgaaggaattgcatctgaatcgagtgttacctagagattctaattgcagaccaagtaagttttgattttgctatcacttgaaataaatggagatttagcgtcacttctctacacccaaaggaaaaggcggtaaatgtgataaagttcagcgcgagagcattgaagatattgtcggggaagttcactattgaagcttcatacagtgtcactagcaaaacaagagttgatatcaagcttgagagttcaactatcaccccagaacagctgatgaatatatttcagaagaactacgatatgctcctggccatattcaacccagagggttggctagagataacatacgttgatgaatctttacggatcggaagagatgacaaggaaaacatctttgtgctagagagagcagacccatcagaagtttgacaagacctttttttttgtaactttctgacaaggagcgtggcactccgagaagattattgcctgcatatcctacggctcacatggttattaccagctcgatcggtgcagctcagaggctgcacaacgttctttccgaattttgatgagaacacaacagtatatccgttctctgggaaaaaacaattacgcgaagctgggcattttctacatagggaattgagaattggtgaaccttataggaggcagacagtacagctgttggataaattcttccctctttgtttttttttggtgtcaatcttacactgctagtgttcaagtattcttccttgtaaccttgcagaaaaattgaaccattcttccttgcaagacatgatataatgagtgtacagct

SEQ ID NO: 29753 - DNA, 618 bp, Setaria italica
  Peptide Sequence Number=SeqID_95727
ccatgtatactgaccttgtcctactcacttaaaccatagttctgctgtgtgctgcctacgtgtcaagtcagatatatgttgtaagctttaatcttgaccatcgtttattatttattcggagttacaatatgcttcgtatatgacatagggttgctgtatatgtattgcacagtgcaccttttgtttcacgtggtggagatattctatctatgtcctgctcaacatgtcaatcctgtcttcttgcgctttgatttgcttgatttaatacttggtctttccggttttcttattttatcctcatgtgtatgcattttggaatattgtcaaaaccttgtactatataaacaattcagtgaatagcatgattgcatttagtgatgcttgagtgttctttgatgtgttttttcctgttatctgctgttcccattaccttgtatattttcaccaaccaaaaaaatcgccaccacgttgtgacctagacacttacaaaagccatctgtctagtcttcttgctattttcagaatggtacaaaaggatagctagtaggatctcttgacaacatcatacccatatatttgaccatctaactcgtgagactgtttaatgataggaagttt

SEQ ID NO: 29754 - DNA, 528 bp, Setaria italica
  Peptide Sequence Number=SeqID_95728
tcgtgatcgacgaagccctagatccccagcagctcgagcggcagagggactctgccatgccagcctacaacgacgaggcgtgccgcaagcggtcgttgccggcggagacccaagacgagacttcggaccttcagctcagcttgtcccccaccacggtgatggaggccaagaagagaacgaccactgcactaagcggtgagcaggagatcatggacaccagagagctctccatctcactctcactgtcgccacccgctgcagcttccatgcagaagcggcagcaagaaaagacaaggcgaagcaacgacagcagaagcagcggggaagccgttcttgggcagagtactttggatctgaccatgtcgatcagggcattggagtgagatctttcaagtactttgtcccaaggccttccaaaaaaacgcacactggaccatgcaataaacatatcgttaatttaaccttattgtctccagtacataggtatatcatatgtgcatgtcatgcttggttgttgtttctaggaag

SEQ ID NO: 29755 - DNA, 395 bp, Setaria italica
  Peptide Sequence Number=SeqID_95729
cacacctcaaagcggcggcgcatgctgctccgaagccgccgtcagccggcgacggaatggaggcgactggatccagtgctaagaagaagagatcggattagctcgaggccgacgagtccccgccgccggcaatgacggccatggaggcatccaatcccgaacttgcagcaagaaaaagaggagcagccatagccaagaaccagcgccgccacccggtgctggaggggaacgaggagccggtgatgtcgaccgcattagcggcctccccgacgccatcatcggcggcatcatctcgctcctcccctccacggacagggcccgcacctcgcctcgcggtggcggctcctctcgtgcttcgcgccactcaacctcgaccagagcgacctcccctccaa

SEQ ID NO: 29756 - DNA, 988 bp, Setaria italica
  Peptide Sequence Number=SeqID_95730
gtttaatatcttcagcttggaaatgctgcaactgttagaagatttaaattgagtcatagaaatcaaagaagtaagaagccataagcatgttaaaatgaacaaggattaaacagtggttcatatgccaacaggcagcagaaccagtgataacagtgctgtgtgtgaaaaaacatttagttcaggggattgaaattagctcttgcaacctagagtttagatcaccataaccatgggttcactaagctttgctgatattttttttataaccagtcaatttttaacctgtttttactttaaagcccagaaattgctactgcctgcaatgggacgcagatccatccagtatcaactttcagaaccttggatgccccaagccttccagtcccatatgctagcattagcaaagaaaattaaaaccacttcaaacaatttggagttaggatgtcagtttggtcataattgatagtgttccattatttcaaaatacaaataactccgctcagttgtaaattgggccaacattagcacctcaatgtaaatagacagtcaggagttcaactctgctcagctgacacagccctactaagatgttctacatcatggttcaaacaaaaacagtaaacattagtaaatcaaataacatgaccaaagagaaaatagactagccggcattctaatattatgcagctgagagttttgctagtatttttcccatgcggtggttggcacagtggcactgcctcccaagttcccaactagccgattatagaaaacttgtcagaagtctgccaaagaggatgaatttaaattggaaaaaaaaagctagaaggcataagccatggctaactggttctgagtttggaatttagagacaatgcttcactgcttcaacttgaactataagtttgaagacgttatagtgcatgtctggggtgcatcagcgcaacaatttataagaaacaagttattaaaaagttattactaccaa

SEQ ID NO: 29757 - DNA, 1039 bp, Setaria italica
  misc_feature (1)..(115): n is a, c, g, or t
  Peptide Sequence Number=SeqID_95731
nnnnnnnnnnnnnnnnnnnnnnnnnnnnnnnnnnnnnnnnnnnnnnnnnnnnnnnnnnnnnnnnnnnnnnnnnnnnnnnnnnnnnnnnnnnnnnnnnnnnnnnnnnnnnnnnnnncccttaattcatggtaacacaattaactgagagaagaatcaccaatttgacaacaattagtcacaaagatcatgaatcttacactgtgaaatcaaaagatagagactatacagggtaaattggggggcaattcaatatggtctagcagttagctcaaacaaggtgccaaatatttctggtgcctacatgctggccgaaaaataagccttgaagattccagaacaaagtaggaagggacatgagtatcaaagcaggagagcatgaagaactatcttgcaaatacagaggatttgagtgtctccatacttacactgaactagcagaagctgtaccagttgcaacttacacactgcaactgaaaaataatccttgtccctgcctaccatttatagaaacagttctattttcctgctacaagctgaattcactgcacttccaagatcctcaattttttcatattccactctgaacatgaccataacagtaccatctttgccagtgtcatagtcttgtttaatatcttcagcttggaaatgctgcaactgatggtatactgtgcccaacagatcaaatggtacctccatacccgcacgagcctttggtttcacaaggttagtaggagcatctttaaggcattcagaagcaaccccaccataagctctcaccagcccaccggttcccaattttatgcctccaaaatatctaatcacaaccaccataaccatgtcaatgccggaggaaatgatggcagagtatattggcttcccagcagtgctagaaggctcaccatcatcgttgtaacggaattgctctcccagcttgtatgcccagcaattatgggtagcacgtggatccttgacctcgtcgaggaaggccatggcggcgcgctcgttgacgacgggagcggcgatggcgatgaacttg

SEQ ID NO: 29758 - DNA, 367 bp, Setaria italica
  Peptide Sequence Number=SeqID_95732
tctgctgcgtatgaaagaaaggtttttcactgtgttgagccgtgatagggattcaatgccaaggacatggacaggagatgaagatctttgggcaatcactagagaagcacgcttagcagctttaagacttatgtctgtaatggcagctatacggttggatgataaaccagacaaaatagaacgggctctgattactgctcttttagatggtggacccctttccagaagaggagtgttgaatttacttatgacccacctgcttcaagcacgtgggaagaggttttgctgcctacactgcacctgcatatttacggtttattaggatgatatacagtgagaaatagtttggaatacttttcgaattgtg

SEQ ID NO: 29759 - DNA, 927 bp, Setaria italica
  Peptide Sequence Number=SeqID_95733
gacctggaccagacaatttccagtgagatggtctcagacttaaggaaacatgcaagaagtgtagtggaaatgaaatctagagaggaagctggaaatgttctgctgcgtatgaaagaaaggtttttcactgtgttgagccgtgatagggattcaatgccaaggacatggacaggagatgaagatctttgggcaatcactagagaagcacgcttagcagctttaagacttatgtctgtaatggcagctatacggttggatgataaaccagacaaaatagaacgggctctgattactgctcttttagatggtggacccctttcccagaagaggagtgttgaatttacttatgacccacttgcttcaagcacgtgggaagaggtgtcaccaagggatacactgattacaccagtgcagtgtaaatccatctggaggcaattcaaagcagagacagagtatgctgttgcacaagcgatgtctatgcaggaatcgcataggcgtagcaagaactggttgccgcctgcatggactgttctacttctggcaattctaggttacaatgaatttatgtttcttgttaggaacccgttgtaccttctagggctctttgttgccttcgtgctatcatatgccatatggctgcaatatgacatcactgcttattttcgccatggcacgctatctgctcttcttacgattttatcaagactgctccccacaatcatggacatcgtgaccgcgatcgtcaacatgagccacagccagaagcattccacaaaccagtctcacaccccccgctgctccacgctcagagcctcatgaaccagacatggcaacggtctcaagtgaagtaccagtctcctgactcgccacccggtcttcctcggactcgaacagcggtgtattgtctaaattccttgtaggttcgtt

SEQ ID NO: 29760 - DNA, 267 bp, Setaria italica
  Peptide Sequence Number=SeqID_95734
gcagaggcagcaagcaacagctagtccggccggtcgaaatggtccccgtcagagcggaggtcgctgctcttctcctcctcctcctcgtcgccgccgtgggcgttgccgccgggttcaggcctgggccgccggtgtcggaggatactcttgagaaggtggccgcatccctggaaatgtacgtcgacttgcttccccagatgcccaaggtcctcggctactcgctcaagtacggccgccccgcgccgactcacctcaccatcgggatcg

SEQ ID NO: 29761 - DNA, 403 bp, Setaria italica
  Peptide Sequence Number=SeqID_95735
gtgccatccagtatgttgtccctggatatgctgttcttgccgtagccgtcataggccttcctctgcagagggtcactcagaacctggtaggcctctccaagagcctggaacttctcggccgcctgcgggtcgttgggattcttgtccggatgcacctgcctcgccttgatgtagtaggccttgcggatctcgtcgtcagacgcggcggggcagacgccgagcacgtcgtagtactccatctccttcgccatcgccgccgccgccgccggtgctgctcgctaaccaagaactcctagtccgtaagcaagaagcaggaggccagcagccggggcatggacagaggaggcggagaggaagggtaggaggaggcgagccgagccagagtgggagggaagaagaaaga

SEQ ID NO: 29762 - DNA, 507 bp, Setaria italica
  Peptide Sequence Number=SeqID_95736
ccaggacggccctccggatccttaattaaagcgccccaacgctttcccttcttttcctcgcgtttggacggccgcctcctgctcctgaggttgtgcgctgctatttcttcacctcccccgtgcggtggtggccgaaccagaggtcagccgggggcgctcgctcgaggcctcgtccgacaccgcaagccatgggcttccaggtcgccgccgtggcaccgtcgccgtgcgcgcgctcctcctccgtctcctcgtcgccctccacctcctcgcgaccgctgcccgccttgctcggcggcggatgtgcggggctcgcgagatcccgcggcgtaatggtgtggcggccgcgcccggcgcggacgaccgcgaggagcgcgctgagcgcgagcttggatgggatgggggccggggacgcggagttcttgaggaggatcgaggagctcgcggcggcggcgggggtgcagccggcgggcgcagcggggtgcggctggccggcgagcgtggagcgta

SEQ ID NO: 29763 - DNA, 270 bp, Setaria italica
  Peptide Sequence Number=SeqID_95737
aaaagtcagccactgcagtcatatggcatggcttcacctcatgccattgatgtgtctgatgaaagccaacaacctgctgaagcatctgggttagggcgaagttgggtgcatagtatgttcagcagagacagaagtttaagaaccagctctttcaaccgagcaaatgatgcaagtactgtttctactacgggcaaaactgacatgtctgctccacaaaagaaaactcaaaccaatatgaggacccttagaggacatacaggtgctattact

SEQ ID NO: 29764 - DNA, 706 bp, Setaria italica
  Peptide Sequence Number=SeqID_95738
aacaaagaaagaaacaaagaaagtttaaaagaaaccaagactctttcaaccgagcaaatgatgcaagtactgtttctactacgggcaaaactgacatgtctgctccacaaaagaaaactcaaacaaatatgaggacccttagaggacatacaggtgctattactgctcttcattgtgtaacaagaaaggaggtctgggatcttgttggtgatcgtgaagatgctggctttttcatcaggtggaagcacagattgcacggtaaaaatttgggatccaagtttgcgtggctctgaacttcgagcaacacttaaagggcatacgagaacaattcgtacaatcagttcagatcgtggtaaaatagtttctggagctgatgatcagtctgttattgtctgggataagcagacttttaaccttctggaagagcttaagggccatgaggcaccggttagttcagtccggatgctctcaggagaacgtgtccttactgcatcacatgatggtactgtgaagatgtggggatgtccggactgatacttgtgttgctaccgtgggtcgttgtcaaagtgctgttctctgtatggagtatgatgattccactggaattctggcagctgctggaagagatgtaatggcgcatgtctgggaacaattacgactaccaagacaaagacaaagaaataagttaacaaaagaacttaacaaa

SEQ ID NO: 29765 - DNA, 2014 bp, Setaria italica
  Peptide Sequence Number=SeqID_95739
ctgcggaagctcctccaaaagactggcttccccacgctgatatatcattccagccattggtgcagtgcctggatgttgataaactaatacttctctttactgctgtcctgcttgaaagacgaatattgctgcgatcaaataagtataccctgttgactctagtttcagaagctatttgccatttaatatacccaattaggtggcagcatgtttatattccaataatattctccagtggggttgactacattgatgctccgacaccatacatgatgggacttcattctggtgttgacacgtccgcagtgacaatggatggtgtagtggtggtagatcttgaatacaaccggataacgacaacggaagaaattcctccaataccagaaactgaacatagtttcttgcgtggtgagatattaaaattgctacaacccaatgtcatgggtattgattacatgaaaatcaatcttggcagtatgagtgatcattctttaaggtctggcacaaaaccatggggccaggagcatgatttccaacttaggctgatatttttgagattctttgcacagattttgagtggttaccgtaacttcattgatactgcatcaacaaccggtttcaattctcaagcatttcttaaaaagcgttctagagcaactaatcagcctgtcgagtccatgtcaatgattatgcagtttttagagactcaagggttcttggattatctggagagatgcaacagcgcagaagaaaatgccaacaaccttcttgataagttgcaggatgcaaccggaagaggacaaaaccctctaagcatctttccttctgaagctgctgatcctgagattgtaacaatagctgatcctgagactgaaggttcagaaccaggcaatagacactgttacaaaaggtttccagcaaatgcaagaacagaagaacaagagaaaaacgcaagcagatactggcgttagctagtggggctagtaagcaagtaccaagttctccttctatccaagtaaacggggcttcaaaggcagaaagtctgagtccaagagagagggcggctgagagagaaaggatggttctggatataaaagtaaagctccagggactctggcttcgtcttctgagacttggggcaactgaggatcctctctcatcttttgaatatggcaccatcctagccttgattgagtccgatgcagaaggcattgggggaagtggctttgttgaatgcatcagagagcatattcattcgggctggcaatgccgcttgactgacgagcagtttattgctgtaaaagaactgcttaagacggctataactcgtgccaactcccgcaacgacctggcaaccattagagatgctcttgaagtttctgccgaaatgtacaggaaggacccaaataatgttcaagactacgttcagcgtcatctattatctttgtcagtatgggaggagcttcgcttctgggatggctactttgaatatttgatggaaaattgttcaaacaagtcagcaaattacgtaacattagttactgcacagctcattgtcatggcaactcacatggctggattgggattacctgacatcgattcttggaatatgattgagaaaatagccgagagaaataacttgggttataagcagcttatcaaacttagagcattgctcacacatctgcaacaactccgtattggctattggggggttgctacagggaaaagtcagccactgcagtcatatggcatggcttcacctcatgccattgatgtgtctgatgaaagccaacaacctgctgaagcatctgggttagggcgaagttgggtgcatagtatgttcagcagagacagaagtttaagaaccagctctttcaaccgagcaaatgatgcaagtactgtttccctagactttattttactttttaccacactttttgtttttttagtttttttatacctattactattgtattgggtacttttcttattttcttttggttttgttttt

SEQ ID NO: 29766 - DNA, 1488 bp, Setaria italica
  misc_feature (27)..(27): n is a, c, g, or t
  Peptide Sequence Number=SeqID_95740
ttaattaattatatatattatactatnttctttctaaccgtagtctcaaatgatgcaagtactgtttctactacgggcaaaactgacatgtctgctccacaaaagaaaactcaaacaaatatgaggacccttagaggacatacaggtgctattactgctcttcattgtgtaacaagaaaggaggtctgggatcttgttggtgatcgtgaagatgctggctttttcatcagtggaagcacagattgcacggtaaaaatttgggatccaagtttgcgtggctctgaacttcgagcaacacttaaagggcatacgagaacaattcgtacaatcagttcagatcgtggtaaaatagtttctggagctgatgatcagtctgttattgtctgggataagcagacttttaaccttctggaagagcttaagggccatgaggcaccggttagttcagtccggatgctctcaggagaacgtgtccttactgcatcacatgatggtactgtgaagatgtgggatgtccggactgatacttgtgttgctaccgtgggtcgttgtcaaagtgctgttctctgtatggagtatgatgattccactggaattctggcagctgctggaagagatgtaatggcgcatgtctgggacattcgctccagcaagcagatgttcaagcttcaagggcatacaaagtggataagatcaatgaggatgactggagaaaccataataacggggagtgatgattggactgctagagtgtggtcccttaaccggggaacatgcgatgcagtgttagcatgccatgcaggtcccatactctgtgttgaatactcaccttcagataaaggaattatcactggttcctctgatgggctcatacgattttgggaaaatgaaggaggaataaaatgtgtcaagaatctgacacttcacacagcatctgttctgtccattagtgccggtgaccactggctaggaattggtgctgctgataattctatgtctcttttccatcggccgcaagaaaggttcggtggcttctcaaatgcaggatcaaaagttgcaggatggcagctttacagaactccccagaaaactgctgctgtggtgaggtgtatagcatccgacttggataggaaaagaatatgcagtggtggtcgcaatggacttcttcggctttgggatgcgaccacaagtatctagttgccatactagggatacatatatgttcatgtaaaaagaaggcaattgcctcatgttgtacgcggattttcatcttgctctttgttttcctttttgctaggaatttctatgctcttttgaggataagggactggatttgttccgttccctctttctcgtcccaaaaactgtcccattgtgtacatgcttgatctcttgtgtaaaattttgtttatattttaggttaaggttgccctatacggcgatgattttgtaactatgagaaacttgggaggttcttgggctacttgt

SEQ ID NO: 29767 - DNA, 713 bp, Setaria italica
  Peptide Sequence Number=SeqID_95741
aaatattggaacgagattgttgggttagccattcgcccacagctactgcaaacccaccgctttccatatgctgaaacaattcattctgcttattgtcctctatattctgattgaaaaatggaaggagatcagctaaccctttagcagattctcgttgctcacagcctgaaggactctccaaactagaatgtacatggttcttcaatggaggcttctgagaaaatgtcatctgtaaacattcatcgtcagaataagccattgctgagtttggaatatcacttgcgaaatcatgaaattccaatcccccagaattcacaatttcactctctttatccatggtgcatgttgcagcaccagaactaccaactccaactgttcacgacgaagagatctcctccttctcatcaagtccctcacagaatgacagactgaatcatgtacacctacaaaactagaagattccccgtcagtgttgcttgtgatatcatgatagttcttatcagtggtactcttgttagatgcacttaaatccttctgtgagggcattgcactgcatgaatcatcagcatttcgatgcagccctttttttctggaaagaggcaaagaaccccagagatgttcagttcctgcacgcttactagctgattttgaagaattcttagtaggtgtgtaactaggcgatcctactgttttcctagtgatcttgctcctta

SEQ ID NO: 29768 - DNA, 325 bp, Setaria italica
  Peptide Sequence Number=SeqID_95742
cttgcttccaagttccttcttgctcggttgctcctgtttcttgaagaacttcctttggcttcggttctacccctcccaccaaattcccaatccaagagctccaaagtcgaatctttctcctgaggatccgctgccccgccgtctccattcctggttcccgccggcgtttctttttcaagggggtctgagtaggagccgtgatgcggccggggtccggagacgcgcggcagccagcgccggcgccgtgggcttacgcgctgtaccacttcggcaccagcggcgccgccgtcgccgccgctaccgccgtcacccaccctctcggtca

SEQ ID NO: 29769 - DNA, 260 bp, Setaria italica
  Peptide Sequence Number=SeqID_95743
ttagtttgccactactctcctgtcttaacctccagctgctaaccttttgctatgctaacaacaactattcgtcaacaaactgtggtgccgtcagtgttaggcaaattcaggcgaggcgaagtttctgacgagaattctgaaggcaatggaatggggacatctaccatcatgatgtggaccggggaactttctgatattttccggtcgcactcgaggattgattaatccaaaccaccatggctttgcttaaactcgcatag

SEQ ID NO: 29770 - DNA, 450 bp, Setaria italica
  Peptide Sequence Number=SeqID_95744
agatggggggcggaggaggagtgttccgtttctcctccatggcctcctcctctcctcggctcctcgtcctgctgctcgcgtggctttgctgcgcggcggcgcaggcgcagacgacgacggacacgctgcggcagggggcgtcgctgtcggggtcggcgacgctggtgtccttgccggatagggtgttcgaggtgggcttcttcccgccggaccccaagcagccctcccgcctctacctcggcgtctggtaccgcggcatcacgccgcggaccgtcgtctgggtcgccaaccgcgccgcgccggccgtctcgggggcgccgtcgctcgcgctcacggacgccggcgagctccaggtcctcgacggggcggcggcggtgaacgggacggccgcgccgcggctgctctggtcctccaacacctcgcgcgccgcgccgcgcgggggatactacg

SEQ ID NO: 29771 - DNA, 1470 bp, Setaria italica
  Peptide Sequence Number=SeqID_95745
attactaatattcctatgagatgagcccaaaaattcctccctacgctagattggttcccccacgtctgcctgtgccatccattcttagattgccacaggcttgccacgggtttatgcatccctctttaaatctgacactattacccttggtttcggattattgcttcactttataccaatgattttagcctatttttatttgtctgattagctgcgtgtaacattgtgagttcctgttggagccaaatatacttttcaatgataaatcactcttatagtaaattaacaggcttgcatagtacaaattctcctaatttactagaccttcattgacccagcaccgtagtaaatttactacttttctgaactacgtcgatttcaccaggttatacggttgtgattgatttatctggctttgggttctaaattgcatgaaattgaattttaaattatgttggaacctaaatgttaaagtaaatccatggattcatgttaaaatacttatcagtctttctcataaatcatagtcagtatttgacgtcaatcattgttgtggtacagaacttttacatgtaaagtatgtggtaaattaaccatattttttactagtatttatagagttctggttgttttatctggtaataaatattttgaattatgatggaacttggtcagtgttacagtaaattcatggattcatattaatatgaattacgtttcttgtaaatcattgtcagaaagttatgtcaaccaatgtggtgttactgtaattttgataaacaaattatgcggtgcatttatattggtcagcttatttccttctatttacaattctcagttctcgagtactacaggctgactgacatttttaaacattggtggtcaaattgtattatcataatgcgaatgcataattttcttgtttttggtaaatgcctttgtagtaaattaatgatccaatctggtaatttgatggtgccattgtggtaacccataagttctggtactttactgaaggcattgtaggatattggattctagttaattgggcctcattttatagtaactgatcacgccatatggatagatgcctttgtggtcttaccgtgcctttctatagagcaaaaccaaatttcttacactgctcttctggtaatttcgggtcatcctgtcctttaattctcgtaaattgtggttctcgtaaatcatatacattgtaatgatggaaactattggtgtgtatggtaattttgtctgacaatactggatatcaagaaaaaagtgtttgttcagatcactaggcatccagtgacccttcacaattgtaaatacatcatacaatttactggtctaatttactttttgccactattacgaagcgaatatcagcccatttgccctgccagattaccccactcgtcagtgacaaaatggattggaccatccgtgagagggtgccaaatagttaga

SEQ ID NO: 29772 - DNA, 855 bp, Setaria italica
  Peptide Sequence Number=SeqID_95746
cgcggtagggacaagggcgctgccggccggaagaagaaggatcgggcggacgttggcatgtcggtctccgtcgacggcgagcgcgtgctccacgtgcggcggctgcgctggaagttccgcggcagcgagcgggtcgacctcagcggcggcgatggcgtccaggtctccagggacctccacaactagctctccctccgcacgatccgctccccgcagacgcctcgacgcaggcgcaggcccacgcggtgctcgtcttccggttcgagctcgccaacggcggcgaggagcgcgatgccgatttggggaaggatccctcccaggacaaggcctcattttatagtaactgatcacgccatatggatgcatgcctttgtggtcttaccgtgcctttctatagagcaaaaccaaatttcttacactgctcctctggaaaaatgtgccagggttgctctaggcttaccatccactaaacagtaccaccaagcttcctgctggacatgaggcacacagacctcatcttgatctttcattgccgattaccgattataatagtcaaaatactgacacatagtgtcttcgatgccacaattttcctcgtgttctattctccgtccaaaaggtcagtttagttgtcagtacacaccaatacaattcttacctattatattctgatgaattgtaataggtgtgaggaggagcaccggcgtctggggaggctacctcgcgcggtgggggcaacgggactggagcgagacgggcagcaacggggagcggaggaaggggcgagcgcggaggttcgccaaggagagctcgtcgtcgtcggcgtccgtggcgtcctcgacggcgtcgtgggcc

SEQ ID NO: 29773 - DNA, 383 bp, Setaria italica
  Peptide Sequence Number=SeqID_95747
tttaaatgagtacaacacccaactatgtgagccattgttgatcatccacgggagattggtttctattgccttaactgaagcatacaaaggataagccagtgcaaccaaaggccctgcgaggacgtcgaagttcttcgcgaggaccttgagcaaagatccggagcccatcgccgcctccgcccccgaatcggcgcgctctggagattggagaggtgggaatgcgggaggattgcggtggaatccggagggtcccggcgttcttgaaccccgccgctttttcttcccttccacactcccccctttcggtgcttttggggtctcgaggggagcgaagagaacacgggggaggaaagtgcggtggggagtggagtggagcagacgag

SEQ ID NO: 29774 - DNA, 352 bp, Setaria italica
  Peptide Sequence Number=SeqID_95748
gcacttcgtccggcaacaggtagaaggtggcgacggtgccggcggagttgttggcgacgagcatgatgtcgatgtcgaagcggccgaagaggtaggcatccttggaggcgaacccggagccgccgttggtctcctcgaggcagagcgcgaggacgtccactcccggctgctccatgtagtagaagctgtggtcaccgccccaggtgacctcgatctgatcgtacagtaactttgccactcccggccgagccgccattgccattagcagcagcagcaacgacgccgtcagcggcatggaatggcaagaaggagatggtgacagagatgaactaatactcaacctttgatctat

SEQ ID NO: 29775 - DNA, 1158 bp, Setaria italica
  Peptide Sequence Number=SeqID_95749
cgcccaagtaggctatctgaactggaatccaaggtcagccagctgcaagatgaactgaagaaggccaaggagcagcttagctcatcggaggcacgaaggcgccacacacagcaggaggctgaggaagcaaaaaagcaagagcaggctgcaacctcgaagctggaggacttgcagcgccagcttgacgagtactcaacagcagaggaatcccgtctccaggagctgcgcaagatctcacaggagcgtgaccgtgcctgggagtcagagctcgaggctgtgcagaagcagcagtcagtagatgccactgcactcaactcggccatgtctgagattcagaggcttaagcagcagctggaagccacatcagagtctgacgcagcccgtgctaagcaatgcgagtatgcagaagctgagatcgagggcctaaagcaggagatggagatccgcctggcgaccatcgagggtctgaaggtaaatgttggtgagagtgacaaggctgcagctgaggcgaatgccgtggcaactgaggccaagcagcagctggagacagcaagaaccaccattgactcgctcatagctgagggtgtccgaatgcaagagtgcctgaggtcaaaggacatggagctcaatgagtccaaggctcacatagtgttgctagaggaagatctgaagaaggcacaggaaatggccaataccgaagtcagctttggcgaccctgagcctgaagccctgaagaaggtggtgactggtgatggcaatgggttctgtgacagttctgaccaggagattgagcacttgcggactgcgcttgaggtggctgagataaggtaccaggaggagcaaactcggatgactattgagacgaagacagcatatgagatgttggagaatatgaaggctgagtacacgcgcagagtgggcgagcttgagcttgagctgaagaacaagaacgacgcactcatggaagcaacggccacagcctgtgctgcgggcaaagtgcagcaggaccctcataaatcagatgccatgcagcctgagctggaggccaagctgatgaggtcgatcacggacattgctgagttgaaggcaagcctgatggacaaggagaacgcgctgcagagcctggcggaggagaatgagaccctcaactagtgcgac

SEQ ID NO: 29776 - DNA, 318 bp, Setaria italica
  Peptide Sequence Number=SeqID_95750
tttgagggtcatacttgtagccaaagcacacaacagcatggtaggcgccagaattaggaaacctatactccattggtgttcgtctataaacaatgtcaccaatggctctgtcataatcatcaagttctgcccatagtattccaattacgggaccatgtgcacagataagcctcattaactgaaagccaccaatatcatgcaaacaatgataaccacttattggtagcttgatattattaggcacgcgttcagttagcacaccgccttttttgagcaatcgccttcagaattcttctacgtaattattcaggcccatct

SEQ ID NO: 29777 - DNA, 243 bp, Setaria italica
  Peptide Sequence Number=SeqID_95751
ggttagcaggccacagctccgttttcctgccttggactggctgcgtgacgaggagcacgcactctgcccaatcaagcttaccagccgatgacccaccgctgaaatggtggccgaacccctggaacttgtcgccgcccccttgaaacgctatggcgttcttgctttccagtggcaagctgaagaactctgcagcgctttctttcatgcgctgtatcaccgcctcgtcaactccatggctcgtca

SEQ ID NO: 29778 - DNA, 2798 bp, Setaria italica
  misc_feature (2640)..(2798): n is a, c, g, or t
  Peptide Sequence Number=SeqID_95752
gagtgagaatggtgctgttggtatgtcttatgaaagaacaatcacaatgctgatgatgaaacccgctcttccgagattttatcaggaaacaaggtgtcaaacaactattttggttgtgcagatgtgatgagtggtaatggtgatggaacttatcctgtcaaaagtaacgcacagcaacctagcagtagtgctcctgaaataaggaaacggacaaaagcaagcatcacaatttatgagcctgacatgggtgtctatttaacttctgatatggtcagttcttgtgaggggccatatgcttctgctagtgagccactgcaaaggagtttatcatctggaagaactattgggaaagcaaatgtggtgaataagaggcttccatgcccatcgggtaaggtggcttcattacagaagtcacaggagagggtgtcaacatcatatcaaaatgatggccacgagaagaacccttgcaacaaaaatgaccaaagatctgcgcaagcaactgaaccagcaagcagcaacctacaaggatgcaatggaatctcaaagtttggagcatccaaggttgaagttttaaagaaaccctcaaaatttctcaaaaccagccttgtaggattgatcaatgataataagcggaataaggtattgtttccatatgaagatcttgtcaagttttttcagtatgaagcacggggtatttctcctaggggtcttttcaattgtggaaacagctgctatgctaatgctgttcttcagtgtctgatgtgcacaaagccactgatgatctacctgctcctgagattgcattcaaaagactgttgctcaaaaaattggtgtcttatgtgtgaacttgagcaatatgcttcaactttacgtgaaactggtggacccttatctccaagtagaattctttccaatcttaggaatattggatgtcgcttgggtggtggaactcaggaagatgctcatgagtttttaaggcatcttgtgatgtctatgcaagcagcgtgcttggatgggctgggtggtgagaagcatgttgaaccaagtttgcaggaaacaacactgatacaacagatgtttggtggccgtcttaaatccaaggttaagtgcctcagatgctatcatgagtctgaaagatatgagaatataatggaccttactttggagattcatggctgggtggagtcattgcaagatgctttgacgcaattcacagctcctgaagatttagatggagagaatatgtataaatgtggaaggtgttctgcttatgtcaaagctaggaagcaattgagtgtgcatgaggtgccaaacatattaacagttgttcttaaaagatttaagacaggaaaatatggaaagatcaacaaatgtgtcacgtttcctgatatgttggacatggttcctttcgtgactggttctggtgataacccccctctttatttcttgtatgccgtggttgtacatgtggatacagaaaacgcatcattctctgggcactacatatcatatgtcaaagatatgcagggtacatggttgagaattgatgactcagaggttcaggttgtatcagtgaatcaagttatgtcagaaggtgcatatatgcttttctacttgaggtcttttccccgaccaccaagaatatacattgagaaggggctcttgcctgttccaacatctggaaagcgtcacacatcaaaatcctccaagggctctaaacatgagcgcaagcagacagagttactcttttctgcaaatgatcaaacatatggtatttatgattttagacctgatggagaaggctacatgcaagatcagcatgcagagttgagatccagagatttccatcatgcggatgatacctttgcagactcagtcagcacagacttctcggaagctacatcaagtgaatggtctctgtttaccagctctgatgagtcctcgtttaccactgaaagcactagagattcattcagtgttgtggactatggagacaatgctggccttgatccgatttcctctatatttgggccatgttatgctccagaacatcctcctgggaatttcgtctcatgtatcaggttctcgccttccaatcctcaaacaaggtacttttcagagagcacagactttgtctcggactcttccatgccgacccaccctcacggcaatgtacatagaggaaggtacccggatagggcatgcgcctcttcagccgaacctcttgtttcagcacatcagcggagcgggtatggtcggtatccccttagtagagatggttttgttcaaacctctggattttgccaaatgtaatcggccaacatttcatagttgtagctgatgctcggcagctgcagttagcactgccgttaatgctgcctcatgttcttttatttcagatgaggcatatttaattttagctgcatatcctaggggtagttcaattcagtgtagcgcagaaattagattatgtccatatgcttagcatggcaagtggaattttagagcacagtgacaggctttgtgccagccattgttcaactgaagccggtctagcactgcttaaaattgtatgggagaaagttctgttcgctttttgttttgactttctataccttaaaaaaaaaaaaaaaaaaaaannnnnnnnnnnnnnnnnnnnnnnnnnnnnnnnnnnnnnnnnnnnnnnnnnnnnnnnnnnnnnnnnnnnnnnnnnnnnnnnnnnnnnnnnnnnnnnnnnnnnnnnnnnnnnnnnnnnnnnnnnnnnnnnnnnnnnnnnnnnnnnnnnnnnnnnnnnnnnn

SEQ ID NO: 29779 - DNA, 793 bp, Setaria italica
  Peptide Sequence Number=SeqID_95753
agatgacaagtctatactaaaacagtatatagaaagtgatcaggttattgatggtggcgaagtgtataaagcacaatctgaggtcatcccacccttagctgacaatcatcaacaacctatgacacgcccgattataaggttacaagagaaacacattatcttgacacgtataaatccatcgataagagatactagtgttctggtacggttaagaccagcatgggacgatcttcggaactacttaattgcaagaggtcgcaaacgttttgaggtgtatgtgtgcacaatggctgagagggactatgctttggaaatgtggaggttgcttgatccagattcaaaattgataaactctgttcaacttcttgacagacttgtctgtgtgaaatctggatcaagaaaatcattgttaaatgtattccatgatggatcttgtcaccctcgaatggcccttgttattgatgaccgtttaaaagtttggaatgagaaggatcagcatagagttcatgttgttcctgcatttgctccatattacgctccccaggcagaggcaaacttccctattccagttctttgcgttgcccgaaatgttgcttgcaatgttaggggtggtttcttcaaagagtttgacgagggcatcctaccccagattagtgaggttcgttatgaggatgaaatggatggcattccctctgctcccgatgttagcaattacttaatttcagaggacgagaattctgcaattataaatataaacaaagatccacatgccattgatggtatggcagtatta

SEQ ID NO: 29780 - DNA, 324 bp, Setaria italica
  Peptide Sequence Number=SeqID_95754
ccatcgtcttcaacctgcagcagtcgatggatcgatgcccgcacctgcagcaggtaatttatagaggatatatcggaatggataatcaaattaaggcagcaagcatcgcattggtggatgattgagggtgacaagctaagaattgaagcaaacatcggcatgggactggcctgcaggcaaggcattgcctttacctttacctgcaaaatgcttgcatattctattctatttctaccaaggaaaagtgaagtattaatttattccattccatccgtggtagcaaggaaaggtttattctgtcattgggccctgcgtggtattggg

SEQ ID NO: 29781 - DNA, 687 bp, Setaria italica
  Peptide Sequence Number=SeqID_95755
gcgaaatatctcttcgtcccccggtcgagtcggcgagatgcggggatctcgcgcgcgatccgggcctgcgccgccgcgtcccggcggagcctgtctgcttcttcggcggcagcggtgccgaaggacgcagctgcggctggggtcagagcggcggcggcggcggcggtggccgggcacaaggggcgggatcgggaggacgggaggcgtgtgcagtgggtgttcctggggtgccccggggtggggaagggcacctacgccagccgcctctcgcagctgctcgacgtcccgcacatcgccaccggcgacctcgtccgcgacgcgctcgcgtcccctggccccttctccaagcagcttgctgagattgtcaatcatggaaaactggtgtctgatgagatcatcataaatctgctgtcaagacgcctggaagagggagaagaaaagggtgaattaggattcatccttgatggctttcctcggaccataagacaagcggaaatactggaaggagtcacagatattgatttggtgatcaatctcaagctccgagaagaagctctggttcgcaaatgccttggtagaaggatgtgcagccagtgtggaggaaacttcaatgtggcctccattgatattgagggtgagaatggtggacctcgaatgtacatgcctccactactgcctcctccacaa

SEQ ID NO: 29782 - DNA, 768 bp, Setaria italica
  Peptide Sequence Number=SeqID_95756
catgatgagttgctttgcttatagaaacaacaaattagttgacttgtagtgcgatcccgagaaagaagtacatggcaatttatgaaccctcagaagcttgtaaagataagtggttgcatatgttgtttgttgtttcagtaaagctaatgatttagcattacagcttagtttttgcttagaccataaactgtgctgaattcaattctacataggccataagaaccttcttttttgtgcctcctgtctttggtcgtttttcttttagttccattttcttgattgtgttgtttgtgtgctatttttccagcttgctgagattgtcaatcatggaaaactggtgtctgatgagatcatcataaatctgctgtcaagacgcctggaagagggagaagaaaagggtgaattaggattcatccttgatggctttcctcggaccataagacaagcggaaatactggaaggagtcacagatattgatttggtgatcaatctcaagctccgagaagaagctctggttgcaaaatgccttggtagaaggatgtgcagccagtgtggaggaaacttcaatgtggcctccattgatattgagggtgagaatggtggacctcgaatgtacatgcctccactactgcctcctccacaatgtgaatcaaagctgattactagaccagatgatactgaagaggttggttaaaggtagtcgtaacttagtaacgttaagttaagttaaaaccaaaattaaagtaaaattttaaagtaaaagttaaa

SEQ ID NO: 29783 - DNA, 926 bp, Setaria italica
  Peptide Sequence Number=SeqID_95757
tcaaagctgactagccaaatttcattagccaagcacaagttggttagagtcaaatagatttcctcttccgtagccttcagcaaggaacaatataggatgggacccttggatttctagccatcaacatacattaacttgtgttgaagcttagacagtggtatagaatgttagttcctgatattatcctcggaccataagacaagcggaaatactggaaggagtcacagatattgatttggtgatcaatctcaagctccgagaagaagctctggttgcaaaatgccttggtagaaggatgtgcagccagtgtggaggaaacttcaatgtggcctccattgatattgagggtgagaatggtggacctcgaatgtacatgcctccactactgcctcctccacaatgtgaatcaaagctgattactagaccagatgatactgaagaggtggtaaaggagcgactgcgtgtgtaccatgatttgagtgagccggtggaggaattctacagggcgcgcgggaaactcttggagttcaatctacctggtggaatacctgaatcctggccaaagctattgcgagcattgaatatagaagaccccgataatgagagatctgccgcagcatgattcttgtttcaggaatgctcgtaacacatttgtagcttatgccaaagttagtttattgatgagcattccttgtatctcaataaactagaaagtagtccatttggggggtccaaattattttggtgtagcactcaattgtatagctgattgatcatcgatgggcaagatcgatgggtgtgttggttgttattctcaagagtaatgtctgtaaaaggcaaggaataattgttcaacgctgagacattcatttgtagcatgtatggctgtatcatactcgtgctacgagaagaggtatatacaccag

SEQ ID NO: 29784 - DNA, 385 bp, Setaria italica
  Peptide Sequence Number=SeqID_95758
tatggcaggaagaaatattcctgtttaggatggtgccctggcagatggtggatagcatatattctgcaacaggtcccttggcagatgctgttttgttgagttgaagtatgctaaacacagtatgtgcacacgcaacacaacaggaaacatatggaaacacatttcagctaccatttctgacatgttgggaaatagtcaaacggaaactacttcatttgccatgcctgccatgtgaacttgtggtatcctttgcggcaatagcatgtgggcctacattgtttagagacaagcatttcaaacccaatatagaacagtgatttcacacaccaatgttttgaaacagttactgtgtgttattgactcatgtctttctgtttctttcttg

SEQ ID NO: 29785 - DNA, 258 bp, Setaria italica
  Peptide Sequence Number=SeqID_95759
ggttcacgagggtgacttccctgaagatttcgtcttcggatccgctacctcggcttatcaggtaacggatgattcaatcaatactcccgtgcatggattggattcatggggtttccttgtgtgctctactcgaagccggttaacttggtgtgtccgcgaatcgttgatcatcttgatacatacaggggggcgtttggttacttgcagcagaccttagccaggctgcaagattcactgtctgtttgtttagtttgcata

SEQ ID NO: 29786 - DNA, 247 bp, Setaria italica
  Peptide Sequence Number=SeqID_95760
ttccagaatggctgcccatcaaatgtgagaccttgaacaggcacgggaaatggtactactctaataggaggacgattcgtttcagtagtgtcatgagagggtgttgctgaatctccatttctgttttccacgtctgcttgtgtttctgaggtgctgcataactgaccatcaccagcatttcctaatgtggacgcagtcctacagttatacaaggaaaatgcagacgaagttgaatggttcagttttc

SEQ ID NO: 29787 - DNA, 559 bp, Setaria italica
  Peptide Sequence Number=SeqID_95761
tctcatcttttaccagaaacaaagtatgccagtgtatttcctaacgcctaatgacaagccctaaatcgtaccaggtcctgtgcctaacctatgaaaagaacagagttagcctatacatacatatattgtacaagctttagcatacagagcaaacagtactcagtgtgattgcttccaactcttcagcaaaatctgacactgatgatcaggatactcgcagtgcgatagtcaccggtggtggctggactcctagcttccttggatgctatgatcttggcgaacaaactggcccttgactcgtggacgctgctccgcgagtaatttcctgctctggtaccggacctgcaaaagagtgtaaaggtgtaaaccaaaggtcctaataggtgaaagcaagaattggattgaaatgatgatgtgaaatcagttgcctaccttcttctcaaagcacctatcctttctctttagccggaatttgttcagtgcagcctcccgctggctcaagtgacgtgaagcttcagcatttggggcttcaggaacatccttaaatgtgttggatgat

SEQ ID NO: 29788 - DNA, 487 bp, Setaria italica
  Peptide Sequence Number=SeqID_95762
cgtgagaccttgaacaggcacgggaaatggtactactctaataggaggacgattcgtttcagtagtgtcatgagagggtgttgctgaatctccatttctgttttccacgtctgcttgtgtttctgaggtgctgcataactgaccatcaccagcatttcctaatgtggacgcagtcctacagttatacctgtcaacaagatacttccaactgtaagatctcactcacatttcaactcttgtggaaccgtgattccgtgaaagcaagcaaatcatgctgtaagctacagcaatacaggcacttgaagttccattcaaagtttgtgctgtggctacaatagtttgatcttttatgcttcaagatcatatcatggcaagtcaaatttaacagaagtctcttagcaatgcttggaaatgaaatggtgaaatgctaaaatgatcagaaacatttctgttagcctgttattgttactacttaggtacctaagta

SEQ ID NO: 29789 - DNA, 262 bp, Setaria italica
  Peptide Sequence Number=SeqID_95763
tatcaacaaggcagactctttcccagtgatgataaatgttctcgatggttacctcattagggtaaagcaaaagaaagtctctccattcttcaaaagatttagtaaaaacacgtctacagacttactcatgtgagggtggtaaagttccgagaattggtgcactatcaagggatattttgatgcatgaaggtcctcgagcattttatagaggtcttgttccatcgttgcttggtattgtaccttatgccggtattgatcttgc

SEQ ID NO: 29790 - DNA, 1110 bp, Setaria italica
  Peptide Sequence Number=SeqID_95764
tcaaggctgctataccagaaggcataagcaagcatgtcaatgcaagcaaatatctgattgctggagggattgctggtgcagcatcacgtactgcaactgcacctctggatcgccttaaagtgatcatgcaagtacaaacaacacgaactacagtcatgcatgcaattaaggatatctgggctaagggtggtatgctgggattttttagagggaatggattgaatgttgtaaaggttgctccagaaagtgcaataagattttatgcctatgaaatgttaaaagaatatattatgaagagcaaaggagaaaataagagtgaagtcggtgcttctgaacgtctcattgctggtggtttagctggcgcggtggcccaaacagcaatttatccaatagatttagtaaaaacacgtctacagacttactcatgtgagggtggtaaagttccgagaattggtgcactatcaagggatattttgatgcatgaaggtcctcgagcattttatagaggtcttgttccatcgttgcttggtattgtaccttatgccggtattgatcttgctgtatatgagactttgaaagatatgtcaaagacatatatactgaaggatagtgatcctggtcctctagtacaattgggctgtggaactgtctctggcgctctaggagcgacatgtgtttacccattacaggtcatcagaacaagactacaagcacaacaggcaaattcagaagctgcctatagaggaatgtctgatgtcttctggagaaccctacagcatgagggcgtttctggattttacaaaggaattataccaaatctccttaaagtggttcctgcagcaagtattacctatctagtgtatgaggcgatgaagaaaaatctctctcttgattaaattcaggagttctgcaaaaatcagccatcatattgacatggctggctgtagagataatgacgacacatgaatttactggttcaatagttccttcttgaagtcaaagatggtgcctttagtatatagaactggaagctatggtggcattttcctcctaattttgattcagagacaagaagaatagaaagtagaataaatactacgaaggacagtt

SEQ ID NO: 29791 - DNA, 720 bp, Setaria italica
  Peptide Sequence Number=SeqID_95765
gttcagaagcaccgacttcactcttattttctcctttgctcttcataatatattcttttaacatttcataggcataaaatcttattgcactttctggagcaacctttacaacattcaatccattccctctaaaaaatcccagcataccacccttagcccagatatccttaattgcatgcatgactgtagttcgtgttgtttgtacttgcatgatcactttaaggcgatccagaggtgcagttgcagtacgtgatgctgcaccagcaatccctccagcaatcagatatttgcttgcattgacatgcttgcttatgccttctggtatagcagcctgttcacctatatcaacaaggcagactctttcccagtgatgataaatgttctcgatggttacctcattagggtaaagcaaaagaaagtctctccattcttcaaaagtaataatcccattattgtctttgtccacatgctcaacaaatcttgcaagctcctcatcattaatctctataccagccttgatgagcgcgtcccagagctcctcggggaggatgcagccgttgtgctcgacgtcgatggcctggaagatgcggtagagctcgagctccttgtcgtccatgtagcgcctgaagtcgtcgtagccgacgcggccgtcgcggtcgcggtcgcaggcgcggagcagctcgcgggcgtacttgcactcggcgggcacctgcagcgcgg

SEQ ID NO: 29792 - DNA, 410 bp, Setaria italica
  Peptide Sequence Number=SeqID_95766
gtcgtatttgcgctgcaagaagtgagggctcttataatagctagtgaggactgatcggattggaatgccagcgtttgtcaatgtttcagctttcacaaagagaagatacatggccttcccctcaccaaggcctcgtatatactgatcaggagacatccaaaatggtgagttgcctttctctgtactctgtctatgagtctatccatagagcacttcaaagaaaagattaatagcttctataaagaaagagagataagaatcatttgtcatctaactcttaaataggaaccacaagagggaactttggataaatgtcctcataatttaagctagctcctttcgagagtgcaaggaggtgggtcaaacaatatgagatttagagtatagaagaaccctaacctagctccttt

SEQ ID NO: 29793 - DNA, 1739 bp, Setaria italica
  Peptide Sequence Number=SeqID_95767
tttttttgtacaaatcagctccatagaactgcattatatgaatgcatgactattacattacccacatacaacagaaaacaagatgaggtgcctgcggtaaactcagatgaaacttctcaaattatttaaatttaagaggggagcttctgaacaacgcagccagacaaacgaagtgaacggctagagaagctcctcctttcagcacgcagtgaacaacagagtttggaacagcctcggaagcacagtacatggctaaacctgaaagcttacacagcccattcaggatcccgggggctaaagaacgaaccagtgaccctggaattgagcagcttcagcgcaagaccagactcaatgcatctcggagttttgtactggttaatggagctgccctggctgaccaacagatccatgagagcgtcaaaggcgccagcttcaaccagccggatctccagtggccctactgacttgtcatgggctctgcagcgcctgtagacatagtctagtgcctcctcgacagcgatgcagcagctctcaaggaactgcgcatcaataggtacgcacggtgttgcatcttcgtaggtggatttaatctcccagaacaacacatagtggccagggatagtggaggtgtcggtgcagctagtgtactccaagaggaggtagtttcggctctccaggattttcttggcacgggtgacgctattgtggagatcctcctcattggtcttgtctgtatcaacgctgaggatcacattcctccggcagatgaatttgaactggggtgcacggttgtagaagcctgtgacctgaaggacatcacctaccctgtacctgtaaagacccgaaaatgtggtgacgacaagctcatagtagcatccgatcttgacatccaccatgctgacaagcttgtcattctccaccacctcataatcctctgtcaacttgaggccatcctccaatggtatgaattcaaagtaggccatgtttggaaggatggtgtaagaaacgtcttttgggctgcacagtggcctcagattgacgccaaagtagctttccgaggaagcatacatggtgcagaccaagggaatcctaccatcactgtagaattcaagcatggggatatattgtgccatcgtgcccgtaagaacagcttcaatgtacttaacattaggccagagcctgccaagaattcccttccatgacccagagctgcatatcgcctcgatttcatcagctagctcagggttgggcagtgcaagaaaactctgcatggccaactggcatgtggaattggtgatgttggaactgagctgaccaattcggatgtcattaactaggtcacaccaatgttgctcaagaaagctgatagaccgaaggaatgctgaggcaaaaactgctcctagacgaaggacatgctggcgttctaccaggccacagagtagctggcagtacatgctttgcttgttgtcagggcaaagaataacctcatcaggactggtatacttgttatacaggtcgtatttgcgctgcaagaagtgagggctcttataatagctagtgaggactgatcggattggaatgccagcgtttgtcaatgtttcagctttcacaaagagaagatacatggccttcccctcaccaaggcctcgtatatacttgttcatgataggcatgatgagactatacaggtacgttcgacgataaagatcctctgagatggacggcatcaatcttggctc

SEQ ID NO: 29794 - DNA, 393 bp, Setaria italica
  Peptide Sequence Number=SeqID_95768
ttttttttttttttttttagtttaacttacaagtgccaaattttggtattgcattcgtagagttctatcatattatacagagcaatctatcaagtcttcaaaggtagttgtttacatatgcagaacctaacagatacacacactgatttctccaaagatggagcgacacatatgagctatctgaggccctcgtatggtaatctggttgaactagaaacagagcagatgagatgagatcacttgataggacggcagccttgcctagaaatagtagttactctccatggttagctggaatggtgcttgcggtatcattgcagtgccactgaaattcagaattccattctgctcatttatctgcaggcacaagatcaagccaattgtaggttattg

SEQ ID NO: 29795 - DNA, 478 bp, Setaria italica
  Peptide Sequence Number=SeqID_95769
gcagcaatgttcgaagagcattttccaaggattgattctcctctaggaccaacactgtttccttctgaggtttaattgcttcctgaactgtctgaagggcaaatgtttctgggggttcagtcctagataatgcactccggaaaactccgatgatgcggtcgcggtctgtgtggctggagacggtggagccggcggtggatggaggggagggagacggccggtccttggacaggaggattcggaggccagcgttcgacgctggcggcgagggctccgccatggtgaggtgggcggtagggcttgcaggcttggagagatctactggtggggctgaagcaccagctcgggccgcgaaacccacggagcctgcctttgccgcggtgccggaactaggcaaagtggcggcgagcaccgggtgtagtgcaggccggcgggtggccgcggcggcggcgacgaacagagaacggtgaaggagact

SEQ ID NO: 29796 - DNA, 871 bp, Setaria italica
  Peptide Sequence Number=SeqID_95770
ccgtgatggtattgggagaatcagcttttggagaccaaggaagctcagaccaagaagagacacctcttgacatcaaccaacaacatcccacatatgccatcagtatcactgggattgccattggaaataacccaacggacttggaattcagtactattttcgacactggtacctccttcacatacttggcagacccagcatacacatatataacccagagttttcatgcacaagttcaagcaaatcgccatgctgcggactcgagaattccttttgaatattgctatgatctgagctctggtgaagcaaggattctaactcctgatataatcctgagaacagcaagtggaagtctgtttcctgttattgatccagggcaagtaatctctattcaggaacatgagtacatttattgcctcgcaattgtcaagagcatgaagctcaatattattgggcaaaacttcatgactggtcttcgtgtggtgtttgaccgagaaaggaaaattcttggatggaagaaattcaattgtttctcaccttccacgcctgagaattactctcctcaggaaacaaggaatccagctggtgtttcccagtctgagacacgcagaacaattcatctcctttaacgttacatgatagcttgctcctgatgcttcttttggtccacttgttcattatgctctgattcctctggttggttttgggttgatccggctgtaaattagttcttactgtaaaatagatactgttactgtagagcttgactaggtagtacagcatagagacaccattgcttagtgcttacacgttctgtaaattggacaatatgaattaattgtgatgccgattttatggctacattactacg

SEQ ID NO: 29797 - DNA, 321 bp, Setaria italica
  Peptide Sequence Number=SeqID_95771
tggagctgctgatgcgctgatgcagatgtcggagaggagcgcgttcttgaggggctcgtgcttggcctcgtaggtgctgaagatgaccggctgcaggtacttgacgtcgaacgccggcacgatgacgttggtcaccgtgtccgcgaccctcacgtcgtgggtgaggctcttgatcttgtcgtgcaggaacacgccgtcgtacttgggacccctcatccgccacggcaggtcgccccccgcgtacagaacccggccttcttctccggagatgttgggccgttcttgaggtagaaggtgttgagatccttggcggtgaagagt

SEQ ID NO: 29798 - DNA, 489 bp, Setaria italica
  Peptide Sequence Number=SeqID_95772
cgtgatgaagttgatccatcaaaagagagaacaaatgaatggacaagataatagagctagagaagacatactatcaagattcataatacagagcaaaacggaccctgagacaatgaatgatcagtacctgcgtgacatagtcctcaacttcctgatcgccggaaaagacacaactgggaacactctcacctggttcttttatatgctctgcaagaaccctttagtgcaggataaagttgcccttgaaatcaatgagtcagttgagtgggccagggaagatagcaacacagaggacttcactgtaagattgaacgaaggtgctattgacaaaatgcactacctccacgctgcaatctctgagacactacggctatatccagctgttccattggtacaaataaattctctgtggggtatcacttgcatagactaggatccaagtaaacaaattcaaccataatttagcctgatttggattcagactattct

SEQ ID NO: 29799 - DNA, 265 bp, Setaria italica
  Peptide Sequence Number=SeqID_95773
gatcaaggccgtgctcgtcggggaggaggaagagggaggtcgtcgagaggatgttccccgccggcgacatgcccgacgtcgggctcggcgaccgcgagagcgaccacgacttcatggccatctgcaaggaagcttacatggtgccgcccgaccgccgcgccccgcgcgccgccgcggacacgctgctgtcccgcgccgtcttccacgacggccgcctggtccgcccgccccggacccggcgcacgcgctcttcgcgctggcctac

SEQ ID NO: 29800 - DNA, 514 bp, Setaria italica
  Peptide Sequence Number=SeqID_95774
agaaaaggtctttttatgttatcagttggaaagtttttgtaattctgttggtcctgtagatggcaaaatcccaacctagcaagaaagccattcatccaggggtgttgatgggttaccttgttccaatgttttgtatactcttttggcttattctttgttgggttaaattacactcttctcatgtttagggttctcttctagttctctgtgaaaaccttgttctacattctcaaattgtctcggtagtgttctattccaaatttgtatttgtagagctaattctgcgcctttctgtatcaggtaaggaatagtcaagaacctactacgagacctacacattatcacatccttcatgatgagataggcttcaaccctgatgaccttcaggagctcgtgcactcactctcttatgtataccaaaggagcacaacagccatatcagttgttgctcccatctgctacgcacatcttgctgctgcccaggtcggacagttcattaagttgaagagatgtc

SEQ ID NO: 29801 - DNA, 425 bp, Setaria italica
  Peptide Sequence Number=SeqID_95775
taagggaaagtaggaagagaaagccagatcaaatcatcatcttcagggatggtgttagtgagagtcagtttaatcaggtgctgaacattgagttggatcagataatagaggcatgcaagtttttggatgaaaaatggaatcccaagttcacattgattcttctgggcaataatcaatgtgaacttgggattccattgattattgcccagaagaatcatcatacgaaatttttcattcctggcgctccagaaaatgtgcctcctggtaccgttgtggacaacaaggtctgccatccaaggaactatgacttctacatgtgttcccatgctggaatgatagggactacgagacctacacattatcacatccttcatgatgagataggcttacaacctgatgaccttcaggagctcgtgcactcactc

SEQ ID NO: 29802 - DNA, 2849 bp, Setaria italica
  misc_feature (2805)..(2849): n is a, c, g, or t
  Peptide Sequence Number=SeqID_95776
ttccattactatgtgaatttgaaatatgaagatgacacaccggttgatgcaaggagcaggaagaagtgtgatcgagaaacttcagcagacttatgccactgaacttgcaaataaagattttgcatatgatggtgagaagagcctgttcacaattggtgctcttcctcaagttaataacgagttcaccgttgtggtggaagatgtttcaaccggaaagactcctgcaaatggcagccctggcaatgatagtccacctggaagtgaccggaaaagggtcagaaggccttacaacacaaagacgtataaagttgagctgtcttttgctgcaaggattcctatgaatgcaattgctcatgccttgagaggtcaggaatctgagcatactcaggaagcaattcgggtgattgatattatcttgaggcagcactcagcgaagcagggttgcttgctagtgaggcagtcgttctttcacaacaatccttcaaactttgttgacctcggtggcagtgtaatgggctgtcgaggattccattctagttttcgtgcaacacagagtggactttcacttaatattgacgtatccacaacaatgatagtgaaaccaggtcctgttgttgattttctacttgccaaccagaaggttgaccatcctaacatgattgactgggcaaaggcaaagcgctcgttgaggaacttaaggataaaaataactccaacaaatgcagaaaataagattgctggtttgagtgacaagccttgccgagaaacaatgtttacactaaagcgtagaaatggagacaatggtgactctgaagagatcagtgtttatgatcactttgtaaagaaccgtggcatagaacttaggtactctggtgactttccttgtatcaatgtgggaaaaccaaagcgcccatcatattttcccatagagttgtgtaaccttgtgtctttacaaagatacactaaggcattgagtacacttcagaggtcttcacttgttgagaagtctaggcagaaaccccaagaaagaatgtcagttctgtctgatgtcctgcaacgcagcaactacgactcagagcctatgctaatggcatgtggtatttcaatagcaaaaagtttcactgaagttgatggtagggtgctgcagccccccaagcttaaagctggaaatggagaagacatttttacacgcaatgggagatggaacttcaacaataagaggctcattagagcaagcagtgttgacaaatgggcagtggtcaacttttctgcgcgctgtaatgtcagggaccttgtccgagatcttatcaagtgtggaggcatgaagggaatcaaagtagaaccaccttttaatgcatttgaagagaatccttctatgaggcgggcacctgctgtaagaagggttgaggacatgtttgaacaagtgaaaacaaagcttcctggagcacctaagtttcttttgtgtgttcttgctgagaggaagaattctgatgtttatgggccgtggaagaagaaatgccttgcagaatttgggatcgttacacagtgtgtggcaccaacaagagttaatgatcagtaccttaccaatgtcctgctaaaaataaatgcaaagctggggggcttaaattcaatgctccaagttgaatcatcccctgcaatgcctcttatatccaaggtcccaactatgattttgggaatggatgtgtcccatggttctcctggacaatctggtgtaccttcaattgcagctgttgtcagctctcgtgaatggcctcttatatcaaaatatagagcttcggtgcgctcacaatcacctaaaatggaaatgattgactccttgtttaagccaaggggaactgatgatgatggcctgattcgggagtgtctgattgacttctacaccagttctgggaagagaaagccagatcaaatcatcatcttcagggatggtgttagtgagagtcagtttaatcaggtgctgaacattgagttggatcagataatagaggcatgcaagtttttggatgaaaaatggaatcccaagttcacattgattattgcccagaagaatcatcatacgaaatttttcattcctggcgctccagaaaatgtgcctcctggtaccgttgtggacaacaaggtctgccatccaaggaactatgacttctacatgtgttcccatgctggaatgatagggactacgagacctacacattatcacatccttcatgatgagataggcttcaaccctgatgaccttcaggagctcgtgcactcactctcttatgtataccaaaggagcacaacagccatatcagttgttgctcccatctgctacgcacatcttgctgctgcccaggtcggacagttcattaagtttgaagagatgtcggagacgtcctccagtcagggcgagcacacctcggcgggcagtgtccctgtgcaggagctgccccgcctgcacgagaaggtccggagctccatgttcttctgctgagctgcagagcacttcgcgtgtgctgtggtctgctactggtgtatgcttggcggtttggaacctcagtctgttgtggcggtcagcactcgccattcatcatgggtttgcttttggtggatgtttctgaaccttggtagttaatcatgccggcattggtagacatctggtggcatgatgcccctaaactgattgcctgcctcaggaagactctggaacctgttaggatgtcgctgatcgctatttgccactgctccagttgttttaatcgtcagctcatgtttacgtaacaacaaaaaaaaaaaaaaaannnnnnnnnnnnnnnnnnnnnnnnnnnnnnnnnnnnnnnnnnnnn

SEQ ID NO: 29803 - DNA, 243 bp, Setaria italica
  Peptide Sequence Number=SeqID_95777
ctggccagccggccttgctccgtgcctccgtcgtcccgccgagaaggcttggcggccggctggccagcgggcaggccggtcagctcagctcagctgggggaggagggggcgaggtggacttgggcggccattggcatttggcacgccatcagcatgagctctcctcctccagcttcctagttctcatcctccctatacatagaaacctgcccaaacgagatgattggtggcaggagatggcga

SEQ ID NO: 29804 - DNA, 554 bp, Setaria italica
  misc_feature (1)..(1): n is a, c, g, or t
  Peptide Sequence Number=SeqID_95778
nttttaaaagttggtcagattaggccgtgctatacggtacattgtacaactgcagcacttactgtacatttcatcgtacaataagagcacaagagcatggagagaaccgcagagagatggacttggattggtagtaattacggctttgaatttttaggctgcaacgcgattcgtcatgctgtaccaccaccttccgctaccggacgtggactagcttagctaagcagctaagcaaggaggaggacctgcgagctaacacacacacaaccccctacgtggacagtacctgctgcaagtcagaacgcccgcacctctggcctggccgcgggtgtggcactgccacgcgcatggcggcgaggggagccggccttgctccgtgcctccgtcgtcccgccgagaaggcttggcggccggctggccagcgggcaggccggtcagctcagctcagctgggggaggagggggcgaggtggacttgggcgcggcagacggggcagcgcgaggcggcgcggacccagggcacggcgcaggaccagtggaagcggtgcgcgcagg

SEQ ID NO: 29805 - DNA, 303 bp, Setaria italica
  Peptide Sequence Number=SeqID_95779
gccatcatgcatgatatgtagagcatcaaggattgtcgtgtctaatgtagcacagtcagggtgtgcagtcattaccttttctactagagttaactcaggagaaagtttttgcgccacaacccgcataagcacatcctttgaggtaaagattccttgcagcgaatttccggcagtgataaccactgaattaactcgtaactcacgcattttctgggttgctacataaacaggatctgaaggtgaaacagttgctacttttgtattctccgtgataatggttgataaagaaggtttaaacatccg

SEQ ID NO: 29806 - DNA, 3531 bp, Setaria italica
  Peptide Sequence Number=SeqID_95780
ttagttacttgtgtgaatatgtaattatgactactattaagtccgttccaattgataggcttcctctgtaatttgcacaaattcaattctccgttcctattccttcacaacaaatatcatgcaaggtgttgtgctacggagaactggagaaggggcacggctggatcttcatagatgccgttttgttgctggaaaataggattccctgcccagttgactttacgaaccgacaggcatactttatccctacacaaaccgcaggagcacttgtactgtaccactgccacttgttacaaaccagcatgatggatgggagtttctgtataaatacatatgtacatgttcatggctgatcaaacagcatctgcctattttgtgttggagcctagttagcagccagctactgcaacctccctccagtcatccacctctcctccgagaaacaactgccttttttccttttatggggcttccaatggggccgcttggttggtgctttggccctgggtaccttcaagctgttctctagcgactatctacactgcacaatattgaatcccaatctgtgatcaactaagatcaaagccagcttctgaatttattgcatacaacagcttggtttgcaactgctccttggttttatagggggggagcttcagaaggttcatgcaagtagccgaagtaggcaagcggtcagcatgctcctccatgccaggaacaccagctctatgaatgcaaaattttggttcgaggtactggaatccaaggagtgggccacgagaacatccggtcacaaacttgagaaactttttctggttgtctgaactgaagctcttcatgacctcccaaaacatctcaataacctcatggtccggatgatatcctgcagaatagttggtgtttgaccgcaagtcatcaatatccaagctttctaaagagccagatatgagaacctgaatttcatgttcattgaacatatcgatccagtctttcggtataagctgttgaaaacctcgcaagaagtgtgtactttgcgcacggatctggtagtttaaccgatgattggcaacaagatggataaaagtaataacattatcattagtaacacgcatgtcccttccaccggggagaagttcttcttctgactgttcaccatattcattatttacaataacaaaatacagttccagttctgagatatcaccgttgtaatgctttaaaaataggagatgccgatataattctggatccaatgaaggaagatcatttaaaaaattgtacttttgtttcaacttgctcaagaagaacgttgcaaatggcaaatcaacaagtatgccctcatacattgccttcccaaggagacttccaagaaaatggaaatattgcaggtgtagttcatgaaccaatcctgatgcagggtttgggtacagaagatgatcagcggtctccttgaagagaccgtattgtacatcaaaagcagctcgagtgatattttccataaaatctttgaaaattccaccgccatcaattccagcctcttcctcaccatgctcattaataaatgacactcgaatcggtcctttgagatcttcttcagaaagcaaacttagctgatcaaaagcatcttccaaaagtcgatttcttcttattttgaaccgatgtctagtaaatgcagaatgtgatgccgattgtctagaactcgtcaattgagaagtgaagattttgactctactagtaaatggcgccaagaaaggagcaagctttataatctctgacgctcgagtattgccaagtatcgcctgagagacaaaattttcacttgttgcttcttgagaatagaaatcacttgcagaagtgaatgggagtcggctgttccagtcttgcaactgtgtgagtagttcagatagcccaaccctagctctggtcttgacattctccactgacaattttttaaggcctgaagggttgggtgacactttcagagtagaagaggaaggaataacccacagaagttgccataatgcctgctttaaaatgagaacaagggacttcaaatctttaagtgaaagaggtttctcttgttcatagaactccccattatcaattatcttcaacatgtgcttgtatatgggacaaaatacagacatgggcaggagccaaccaggtgcatctgcaggtaatgaagatgcaaacttggaaaaacatggccatgttcggttttcatggcatcgttttataaaattccatagtgcgggaacaatttcagtccggtaggccagtacagtcataatccgctctagcgggaatgtattgaatgtgacatgaagaaaagcacaaatagatcctacagcatccacctcagcatctgatggtccagaaagatcagaatggtatgtgcttaatgtacctctgaagagtgcattcaccaaatgttgaagtagctttgaatcaattgctgtagttatctgtctttccaaatcaacatcaagaccatttttgacatcgacatccataggcatctcgtcatcgtcatctgccctttcagtaggtgatgtgactgctggtaacgtgtccaacaacgatgtagaaacagcgatgatgtcagctgctgtgtcagaagcaaactttgcatcggacaaaatccaggttgcagcttcaagaacatttgcaaggacacacgcatatcctggatgattagctgatatatcatttggaagaacatcacgaagactgggcaaaaagctggctatttgatggatatagtatttgctgagtccattaactgagaaaaccttcttgagttgcggcaaacgatgccgtagaaaagggatggacagaagctgagaggagaaactccatcttggatccaccaccggacaacaacaaggatggtggccaacatgtgaagcaacaagcatgagaacttgctccagagcagacgcactatcaaaatgtccaaaacttctgtccttttgcggtatagatataataatgccccggaataagcaatagatctttctgcgctgaagatacccaactactttgcagttccatggaagcttaggatttatcaagcaagctacagtttctaataatgagacagaaggcactgatgcacttccaggtgttgtcaaaagttggctgccccaatcatgcctcttttgatagactgcttgtacacagatgagtgcaagtttttttactctgtgagcaacaagaggttgcagtgaggagtcatttacaccagcaaagagagttacagtatctccaccacgtttaacatattgcagcagcaaattgcagacttgacaaagtatagcaatatcattgtcttcatttgcattgaagaaaaacagcaattgacgaagaaagtcagaattagtgccaaagtttttccagtctatcctctcacaatgctccccgaaagtagagcaaaagttcttccgaatttctgaacgtgccaattccaaagccttcttaattctctagaatttctggatcttcgtggcggatgagttctggaggcggagg

SEQ ID NO: 29807 - DNA, 217 bp, Setaria italica
  Peptide Sequence Number=SeqID_95781
ggcgtgatgactgagactcttttaaccataacttcagtggagctttttcaaagtttttttcctgacgttttacaaatttttggttgtagaatactatgagatatatctattgtaatccaaacaaatcacaatcgaggcacgcgaaccaatggatcgattctgatatcataactcagaagacagaaggagcaacaaaagcaatatgaacagttcctca

SEQ ID NO: 29808 - DNA, 687 bp, Setaria italica
  Peptide Sequence Number=SeqID_95782
taaaccaatgcatggggattggattcgccagtttcaggttctgacggggctgatgagttgccagccctttatgcagtggcaattacattctcgtcaagtgcacagttcggaaaaattccctcatgtcacgtacctttcatactaggggaacctcctggttctggtatggacattgtccccgtagataatcagaacagggaagaatccacttactgtgcttcagtggtgattgagctggaacctcgagagccttcacctggccttattgatgtttcagttgcagcaaatacagagaactgtcaagtcttatcagggtcccttaaacctattacagttggcattgaggacatgtttatgaaggccattgtaccacctgatacaccaaaagagggtgtggctatgtactatcaggatctgtttcatgctttatgggaggcctgcgatagttcttctaacacaggtcgagagactttccctttgagtggagggaagggatcagctgccattaacgggactcggtctgttaagcttatggaggtaactccgaaggttttgattggagctgttgaaagatacctggcttcctttgttgtcagtgttgctggagattcacttgtaaccattctgagaggaaatggagtcattaagaacgttttgtgggaagaaagtgtctcagattgccagtgt

SEQ ID NO: 29809 - DNA, 166 bp, Setaria italica
  Peptide Sequence Number=SeqID_95783
acggcgttccggcacgacgccgccacgggcgcgttcgaggccgacctggccgcgccctgcacgacgcgcttcgaggtcgagctccgctacaacgccaccgtggccggggtcatcagccgcggacggatcgccgccatctccggggtcgccgcgcaggacctcttca

SEQ ID NO: 29810 - DNA, 417 bp, Setaria italica
  Peptide Sequence Number=SeqID_95784
ctggttttcagtataactccggagaagctcttaaggtttcagtaaccccatgtatactgtctctgtccgggacttcagctccgtgtccaatgaagagcaaagtgaactcttcctctaatcttttacccttggtcactcggtagggcgccctttccccgtggccttgcatgacacaagggcacaccaagcatgtcgatcagcctggctgctcagcagatcgagctgcagcatgcaacgctccaccacggctgcggcgccaggtcgaggctccaccacggcagccatgggtggttgacctctagaggggagagagaaccgcacggagctgcaggtagctaggccgaacgccaggcgactcatcacacaagtctggctgaattagctgtgactgtgagagcgcctaggcccatctgagct

SEQ ID NO: 29811 - DNA, 405 bp, Setaria italica
  Peptide Sequence Number=SeqID_95785
gtcctctccgccgcgccgctccgcctctacgtgctctggtacgggcgctgggaccccgcgcaccaggccccggtccgcgacttcctcctctccatctccgacccgtccccgccgcggccctccgttgcggactggtgggccaccgccgcgctctacgccgaccagaccctcgccaacgtcacccgacgcgtcgcgctcgcgggggaggccgccgacgagtccgcctcgctcggccgctcgctctcccgcctcgacatccagcgggtgctcgcctcgaccgtcgccgcgggccacctccccgcggacacccgcggcggcgcctacctcgtgctcacggcgcccggcgtcggcgtccaggacttctgccgcgccgtctgcggcttccactacttcaccttcccgtcg

SEQ ID NO: 29812 - DNA, 1021 bp, Setaria italica
  Peptide Sequence Number=SeqID_95786
ctacccgtaacggcactccactccacttccagcgctccttcaccgccgccgcctttgtcctcttctcgccattcagtccggtctcgccgcacgccgagagatctctccttcccagcatcgaccctgcactgggcttcagagattgcccggagttgcaggatggagagcagcagcgggaggagctggaggaggagttcccgggccacgagtggatcactccgcagtcctccatcaacgcggcctaccagtcccagaccgagaagggtatcaggaaatttgttctgagttgttggagttgaaggatgctattgaaaacttgagtggaaatatgcagtcaaagtacctggcttttctcagaatatctgaggaggttgttgaagcagagcaagagttaattgagcttcaaaagcatgtgtctgctcaagggattcttgtgcaagatctaatgagtggtgtgtcccgcgagcttgatgtttggttcaaatctaacaaggaagaagatgtgaaagaaaaggattttcagactgaactggatgaaattttatctgatgatacccaggatcccaaagctatttttctggataagttagatgctttgcttgcagagcacaaaatggaggaggcagtgcttgctctggaagatgaagagaagaaatatttggttgcaaatgaatctagcaaagaatcaaatgcagagctttctgcctttaagacagcactgtttaaaaggaaagcaattcttgaggatcaacttgttaggtggtctgaacagccatctttacctatagctgagctaaggaagactttggctggtttagttaagataggcaaaggttctttagcccatcaattacttctaaaagcttacggttcgcgccttcataaaaatgttgaggcatttctcccgtcgtgttcaatctacacagaaacttatgctgcatcgttgtcacagattgttttctcagctattgcaaaagcagcaaaagaactaatacactatttggagatagcccatgaatat

SEQ ID NO: 29813 - DNA, 270 bp, Setaria italica
  Peptide Sequence Number=SeqID_95787
gtggagttgtagtaggcgctgagctccgggaacgtccgcgtgtaggagccccggtacttgtcggcgaaggcgaacagccgctgggcgtggtcgaggagcgccgacgagtacgtcccgttgatgggcttgtacaccagcgaggccgcggccatggcggctgccgtctccgccgccacgtcgctgccgggggatttcgtggtgatctttgtcagcggcctcttctcggacattgtctccggacgttcccagcacttgtggtctgctttgggg

SEQ ID NO: 29814 - DNA, 262 bp, Setaria italica
  misc_feature (221)..(221): n is a, c, g, or t
  Peptide Sequence Number=SeqID_95788
cctcaattacgacgccacaaaccctagtaccaccaccaagcgccggacggagtagctacctgcctgctgcgccccttgatccgatccgtccgccgccgatcgatgggaggcgccgcgggaggcggctcaggcgcggggaggctctgaggttgcgcgcttgtcttctctgctctacggcgcccgcccccaaccgtgcgtgccggtcggcgacagctagggancctcgcgggcggcctcgccgccgtctgcttcctctgcaggg

SEQ ID NO: 29815 - DNA, 844 bp, Setaria italica
  misc_feature (841)..(844): n is a, c, g, or t
  Peptide Sequence Number=SeqID_95789
ctcaaattcagtgaaagctggtgaaaaggcagaaccagtgccgccattagcagtgctacaagtaaaaaatgctgctgccatggtacccatggaagtagatgatctggcagaagttcagcctcgcattgaacctgcagaggatggtgagattactcgggtgcaaaacaacacctcaaagtcaatgaaagctgatgaagaggcagaatcagaaccgtcaatggcagctaccaacagtgaaaacattccagccatggcgcccatggaagtagatggaccggcagaagttcaaccttacgttgaacgtatagaggatggcgagattactgaggaagctgtaggagagcactcagctgacagagcgaatggctctgtggcccaagcgaaggaatccgtggagaccaatgacaatgctgcgcctggtaagacaatcaagatccaggtggagggcaaggtgttcaccgtgctgcagcaacagaatggcgggctctcgtgccagacgtgcggcgtgcacggctgcaataaggacggcatgattctgcacctctacactcggatgcactgggacaaggccaatcttgcacaaaaggagaaagaggctgctgcaacagcggtggacgacaaggacggcaatggcggtagtgcggctggtgagtgctcaggtggagcactaacgacaacagtgtgatcatctgagcagttcgttgtttgctttttcgggttgctgtattatctgttcatgtgcaacaaccaagtcatgaatactaaactttttgggccattattttctgttacagtatatctgttaaaatggacacattaactttctaaaaaaaaaaaaaannnn

SEQ ID NO: 29816 - DNA, 398 bp, Setaria italica
  Peptide Sequence Number=SeqID_95790
ccgagcacatattcttcagttttaatgaattgacaaacatggtaaaccaaatattagaacttaaggtaatggatgttcaaaatgaaaatgctctaagtctggaaaaatctacaaacatcataaccattgcaaaaagggaaccaaatatgatgtatctgaacagctagaatacgcctctctttgtgcaaaagtgaactttatcatgcttattttaaaactatttagtaatcaactccctgagatgttattcatggctaagcaataagtattgctgctgctttaatctttgcaaatttctatgtaataaacaccttttatgttaaaccttaacagaattgtgggaaaaaaagtcccactaaagggagtgatagtaatcatctcacggcttattaatacat

SEQ ID NO: 29817 - DNA, 338 bp, Setaria italica
  Peptide Sequence Number=SeqID_95791
gaggccgcagagctcgcggcgctccggcgagacctcgccgtcccggtgttcgacgtcggcccgctccacaagctctcgccggcggccgcgaacagcctgctgcgacaggaccacggctgcctggactggctggacacgcaggccccggcgtccgtgctctacgtcagcttcggcagcctcgccagcttgtccgccaccgaccttgtcgaaatagcttggggcatcgctaacagcggccttccattcctctgggtgctccggccgggcctcgtccgcggcgcgccggcgtcacaggacccgccgccgctgcccgacggcttcgacgccgcgacgcgcgg

SEQ ID NO: 29818 - DNA, 650 bp, Setaria italica
  Peptide Sequence Number=SeqID_95792
gttcaacatgctttcccattggttctcttccagacatgtgtaggaagacttgaggggagagaaaaaggcatttgcagattctgtggagaagggcatgagccactctgcaaagatggcaacggctctggggctgctccttgcatttctggcgattggatcctgcatcgccgccgataacatcgacttgtggccgatgccgaagacggtgtcccatggaacacagaagctctacgtcaagaaagatatcacaatgtcaatggggggaagcacgtactctgacgagaaatcaatcctgaaggacgccttccagaggatggttgatttgatcacactgaaccatgtcatcgatggaataaacccaagttctttggttctcacctgtgttaatatagttgtccatacacctgacgatgagctcaactttggagcagatgagtcatataacttaactgttccaacaacaggagatccactgtatgcacagattgaggctcaaaccgtttttggagcacttcatggcttacagacatttggtcagttgtgttactttgatttcacatcacgactcattgaactcaactcagctccttggataattactgacacaccaagatttccttaccggggactgcttattgatactgcaaggc

SEQ ID NO: 29819 - DNA, 457 bp, Setaria italica
  Peptide Sequence Number=SeqID_95793
caaactaccatcagcatcatgcaagactgcctccccaaagttcaggaagaattgcagaatggtctgtgaaggaaaaatacatgtctctaaagtctaaacaattcttgctagaagtataactgaactctttatgaaataaggaaacatttaaaagtaatctgacaccaataaccgtgcagataaaattgactgttgggtgaatcaggaagtaatgcatttaccatgcgcttagcaatatattaactctctccccaaatgatatacgcacgttactgagaaatttcgataaaattgtaagggagaagtacagttctacggaaaaggacccatagttcctgacatccgagcatttatccatcaaaatgttaagaataagatctttgcagagcaagactgagaaaagtctgcttagaagaagcagcgcgccggtggaggccacggcctgcgtcggaagggc

SEQ ID NO: 29820 - DNA, 340 bp, Setaria italica
  Peptide Sequence Number=SeqID_95794
ctcttccttgatgtggaaggagaaggaaatcctgtagctccaatagcaccatttactgctgcatttgtcacttgctgcatgttaatggaatttttgtgatccccttggaaaagagctcttctttcgtcactcgcttcaaaattcttgcaatccatacacttgcaattttcggagcatagtatattagcttggaagcactcgcagtacttcttcaggcatcctgacttcttgcagtggcaccctttattatgcttccctattaaagggagatcactagacacctcattattcctattcgcatgtgggctgctcccaatcttaaggccggaatgcaatctga

SEQ ID NO: 29821 - DNA, 231 bp, Setaria italica
  Peptide Sequence Number=SeqID_95795
aaattagctgcagaggcgagaggcttccagccagctgacgaggatgttgacatctgatggtcaagatgtttacgaagaagttcttgaaattgtctcctatatgacatttttctctcctacaatttcactggacatgtggaccttgtggccattgatgatggaggcacttaatgactgggctatagatttctttgagaatattcttgttccgttggacaactacatttcccg

SEQ ID NO: 29822 - DNA, 253 bp, Setaria italica
  Peptide Sequence Number=SeqID_95796
taatgcgctctactacaatcctgcgctgacccttgaaaccttaaataagcttggggttgcagcagacatttttaaccattggtttgttatgctacaacaagttaaaaagagtggtgcccgtgtcaatttcaagaggtatggatcacgtttttgcacagttatatttcttcatgtacctacgatgagccagtattgttgtattgcttcatttgcagagagcatgataagaaagtttgctgcttgggcctgactt

SEQ ID NO: 29823 - DNA, 782 bp, Setaria italica
  Peptide Sequence Number=SeqID_95797
taactgtaagtcaaagtcttatcctaacgaaacaaaatatgccttacattcctggacagagggagtaacatgtagcttttgaccattggctggtacatatttgtgatccaaggaggtaacagttaacttgggtgtaattaggacattacagcatctagcagattgagaaaagtgcccccctttcctataagctggcataaaggagacggagggggtaaaaacatgctctagcagattgagaaaatgatcccctttcctataacatgtactggacttatatttgtgatcggaggaggtaacaattaaccttgcctggtacatatttgcctaaagttgtagtgcagtggctcccagatatctctttcagtgcaattgccatctaaatttttttcttcacatctcttggcaccttgtgccaaaatcagcttatggttttccttaactgtcatcacgtgtcatccaacttggtcatcgtagaaatgcttatcagtaattgtctgctttgtatcttgcagtgttacaaagaacagtatgtatcagatgatgcagcctcagattgatatacttcttttttgagataatttttcctctcatgtgcttcaatgacaatgaccaaaagttatgggacgaagatcctcatgaatatgttcgcaagggctatggtgaatttactcatttctgtatatgtcttgattggagttggcgattactgataaaaatgtgatctttgtttttgtctcagttcagaatctaattagatactcacaatgttatttttcatt

SEQ ID NO: 29824 - DNA, 3388 bp, Setaria italica
  Peptide Sequence Number=SeqID_95798
tttattgttcaagtgccccctttgttaagagcccagcttggagaaagtatcaaaacaataattcattctgattatcctgagcagtggccaagtctccttcattgggttacacacaacttagaaatacaaaatcaaatttttggtgctttatatgtgctaagagttcttgctaggaaatatgagttcaagtccgaggaagagaggatacctctgtatcacattgttgaggagacttttcctcgtctgctaagcatttttagcaaactggttcagattgtcaatccgccaattgaagtagctgatttaatcaagttgatatgtaaaatattttggtcgtcaatttacttggagattccaaagcaactatttgatcccaatgtcttcaattcatggatggttctgtttataaacttgttggaaaggcctgttcctgtagaaggccaaccgatagatcctgagatcaggaaatcttggggctggtggaaagttaagaaatggactatccatatcttgaaccgtctctacacccgattcggtgatctgaagcttcagaaaccagagagtaaagcatttgctcaaatgtttcaaaagacctatgcagggaaaatattagcatgtcacatgctgctgctgaatgcaattcgtaccggtgactacttgccggatagggttatcaatcttgttcttcagtatctgactaacagtgttacaaagaacagtatgtatcagatgatgcagcctcagattgatatacttctttttgagataatttttcctctcatgtgcttcaatgacaatgaccaaaagttatgggacgaagatcctcatgaatatgttcgcaagggctatgatattattgaagatttatacagtccccgaacagccgctatggattttgtgagtgaattggttagaaagcgagggaaaaacaatctccaaaagttcatccatttcattgtggatatattcaggaggtatgatgaggcacctgctgatcttaagccatatcgtcaaaaagatggtgctcttcttgctattgggacactatgtgataaactaaagcaaacagatccatataaatctgagctggagcggatgctggtccaacatgtctttcctgaattcagcagtcgtgttggacacttgcgtgcaaaggcggcatgggttgctgggcagtatgcccatatcaacttttcagacccgaacaattttcgtcaggctatgcactgtatagtttctggaatgcgtgatcctgatcttcctgtgcgggttgattcggtctttgcacttcgttcttttgttgaagcctgcaaagatttagatgagatccgaccaatacttcctcaactccttgatgagttttttaagctgatgaatgaagttgagaatgaggatcttgtgttcacccttgaaaccatcgttgacaaatttggtgaagagatggcaccatatgcactaggactgtgccagaatttggctgctgccttctggagatgtatggctagttcagaagctgatgatgaagctgatgattctggtgctttggcagctgttggttgcttacgagcgatcagcacaatccttgaatccattagcagcctcccgcatctttttatacaaatagaacctacattgttgcctataatgcgcaggatgttgacatctgatggtcaagatgtttacgaagaagttcttgaaattgtctcctatatgacatttttctctcctacaatttcactggacatgtggaccttgtggccattgatgatggaggcacttaatgactgggctatagatttctttgagaatattcttgttccgttggacaactacatttcccggggaactgatcattttcttgcatgcaaagatccagattatcagcaaagcctgtggaatgcactacaatctattatgatggacgaaaacatggaagattctgatatcgaacctgctcccaagctcattgaagtgctttttcagaattgcaaaggcaatgtggatcagtgggttgagcactacctcaggattacaattgagcggttacgtcgaacaaagaagccatatttgaaatgcctccttgtacaagtgattgctaatgcgctctactacaatcctgcgctgacccttgaaaccttaaataagcttggggttgcagcagacatttttaaccattggtttgttatgctacaacaagttaaaaagagtggtgcccgtgtcaatttcaagagagagcatgataagaaagtttgctgcttgggcctgacttctcttattgggcttccagctgataagattccaccagaagctttagatcggattttcaaagcaacacttgagttgcttgttgcttacaaagaccaagttgcagaaaataagaagcaaaatgaggaggctgctgatgacatggatggctttgatgctgatgaagaagatgatgaggaaattgactcagataaggatatgggtcttgatgatgaagatggggatgaagttagcagccttcagctccagaaattagctgcagaggcgagaggcttccagccagctgacgaggatgatgactcagatgatgattttagtgatgacgaggagctacagtcaccaatagatgaggtggatcctttcattttctttgtcgaaaccgtccaaggtttgcaagtatctgatcctgccaggttccagaaccttatgcagactttagatttccgctatcaagcgcttgctagcggcatagctcaacatgctgaggaaaggaaagttgaaattgagaaagagaaattggagaaggcaaacacacagtgattgattcaaagatgatatatggttacgttggattgctttgccattttgctggtttagcattggtggtcagtcaattttctatgatttgccagtcgcaggtaattgagttttgcagccttagccaacctttcaaggcaggacaattttaggcttgcaaaattctatccttgcgagagaagtcgatgatagggccatcttggataatctgtcatcggccgtcatgttcctcatgggctgttgttgcggtcttggttgtgcaagcgtgacaccagaaggtttcttctctcgatgacagttgcttgtcatgctgttagggccatcaattttttggggggcttgtaagagcatttgttggagtacacccctctggtggtggggttgcattctccggtcaagttttagaaccgttgggtgtagattgtatatggtttcggttttttaggcatggcattgcggttccgtggtggggctgtggtatatgttttcttttcctttttgcaagaggacattatattttgttttttggtcatttatttggaaagggcaaaagtcttggttacttctgcgaagtaacctgatcgta

SEQ ID NO: 29825 - DNA, 455 bp, Setaria italica
  Peptide Sequence Number=SeqID_95799
gctcctgacttgtcacaaaaaaagtgtcaaaaccaaaaacttgatccttcagaatgtctattgtagccttgggaatcctttcagcatcatcaagctgttgcttcattcctggcaatggagagccgctagcgacttcaacaacttccacattctcctgcatatcattggtggtagtggcatctccatcaatgttctgagctgcatcactggagctcagcagttctgcattcgtggtttcatctttcttctggtgagtcatgggaaagattgtctatgttggagtcactttttgcaggctcattgacttctgcagcactatcagccgaaggtgatgaagcatcatctccaaacacttctttctcctcgtcgtcgtcattgccttcgggctcggtctccgtcatcgcttggcacgcaacccttcgactcctcagcctgtgcccagcaatcgggaggca

SEQ ID NO: 29826 - DNA, 588 bp, Setaria italica
  Peptide Sequence Number=SeqID_95800
aagaaggcgctattccagaaacagcacctacacaacggaaatcatacccttttcgactattctcctgtcaaggtgatataagtaggaaagttatcaatcatcctaagatagcaaagaaggaagttctgtctgtcgagaaggctctatacaacagtgagttaacaatgactctggaacgagcaatttccatggtatccaattcagacagccttaggcagtgcgaggatgctgtgcatgaagttgccagagcatgttcaaccttgcaaggggaccctaatcttgtaaacttgctgtcatgtgcctcttttattcaagggcttctcgaggttacattcacctccaaagatgatgctgtactggagtcagctatcttgataatgggaaagttagtgttggggaatgaggtgattagacagcttgtgcttaatgcagatccacagcttgaggttttcttaaggcttctgagaagcaacgagttgttcctgaaggcagctatattgctttatatgatgaagcctaaagctaagcagatgctatcattggactggatacctctggtactgcacatattggagtgtggtgacgagg

SEQ ID NO: 29827 - DNA, 321 bp, Setaria italica
  Peptide Sequence Number=SeqID_95801
atttgcacgagctgaatatatctcccaatcagccgtgtttaataacctgcgatcttctgagatatccgaatcagtctacggcaacaagacgatcgaggccgtcgtcgagacaccgtaccaatggaaggcgcggcggggaggacggcggcggcggcggcagtgtgcgtgaccggcgcgggggcttcgtggcctcgtggctcgtcgagcgcctcctcgccgccggccggtacacggtccacggcaccgtccgcgatccgggcgacgccaagaacgcgcacctggcctgagacacggggataggcaaggcacacaggggatagg

SEQ ID NO: 29828 - DNA, 246 bp, Setaria italica
  Peptide Sequence Number=SeqID_95802
ttaggcatttctaaacagaactttagatggtgacttgatagtcggccattatcttagcttatatattcctgttttcttcatatgtagtgttccatacccaaacagattttaaaaacttggcacatgcatttataaataagtctagcaaagtactactctggcattcccagtggcattcgaaatgttgtatacatgtgcaatcatcattatgtgcatctaagttggcattctggtgagtaaggtaca

SEQ ID NO: 29829 - DNA, 1370 bp, Setaria italica
  Peptide Sequence Number=SeqID_95803
cgccgcgtgggcggctcgctcggctggactcttcccctctcctcccactgcgaccccgcgtcaccgccgacggacggagcaatcgagggggtgaggggaaaaccgcggccgcccgcccgcctgatcgagccgaaaccaggagccgcgcggcgcacgccatggcagcaggtagtaatctgccaccaaagccgtgggaacgtgcgggagcttcatctggtccagcaccttttaagcccccatccggaggtaccactaatgaagttgttgaagcttctgggacagcgaagcatggagaaattgtttctgctacagggaacaatgtcacttccaatgtaaccagcaacatctcaaggcctgttccgccaaggccatggcagcagcaaggctatggaaattcttatgggggttatggctctaatatgtatagctcttatggcggatttaatgggacctatggaaacaacatgtattcaggttatggaggaggttatggtactacgtatggaggttatggtgggccaatgtataacggtggaacgggaggaccctatggtggttatggcatgggcatgggtccttacaatcagggtccaaattcatttggccctcctgcaccacctcctggattctgggtgtccttcctacgagtgatgcatggtgttgtaaatttctgtgggcgggttagcttcctggttagccagaacactcaggcattccacatgttcattactgcacttttgcagctatgtgatcgggctggaatgctttatggtgagcttgcaagatttgttttacgtttgctggggatcaaaacaaaaccaaagaagggtggtgttaagggcagtggagctccgccattggagggaacaagccagcagtttgttgaggcaccgaaagctaccaacagctcatgggacagcgtctggactgagaatggcaaggggaagtaagggccccattggtgtgcagctagacaattttttgtgaaaggaggataatgagtttgcttgtgggaagagaaatctgctgatatctgttcagatgcattttgcatttgggttagaaggcaaaacaagtaatccctaatgctctttgcatttgtcatgttgttccctagtacacatagatctgttatggcggtagttagtctgccatgagaaatgtgagctggtaaaatatgcatttcctaaaaatggcgtggcagtaccctgtactgagaaagtggaaacaatacagagggtcctttatttagcgtgttgctaaataaaaaggagttcattttatcgaggcttatgtactgtactgcctgttcatgggatataacattatgggattataacttaatcaaataaaataaaaaaaaaaaaaaa

SEQ ID NO: 29830 - DNA, 375 bp, Setaria italica
  Peptide Sequence Number=SeqID_95804
caactatatctgcacgggacaggagtagaagaggtcattgatgattttattttcaagccaaaatagagctgaagttgatctggacattctggttggagaatggcaactgctgtggcgttcacagactgaaggtgaaagttggtcgtctgttgcatctgccggtctcaaggactttcagattattaaagaagatggtcaattgtagaattcggtgagtccctttccaggtgtcaacctcagtgcaagaggcaacatatgcaaaacagggaaaagcaatacctttagcgtgtccatgaatgaaggagctgttcaagttggtggtgtgcagtttcccttggatactaaaggagaatttgtcatggaaatcttgtacat

SEQ ID NO: 29831 - DNA, 397 bp, Setaria italica
  Peptide Sequence Number=SeqID_95805
ctggtttcattttatttctgatcatcatctgtatctattgccaaaaaaaatccagagagaagaagttggcaatatataatagctgagctgatatctacatctatatatgatttatttgcagcaggtcttacctgggttgttcctcatagcagctggtcgtagctggggacgatacagcagatgatgatcaggccatgctgcccttgccacgttgcctacccgcggcctccggctgcttccaccgccggtcggctgagacctagatggaagaagggatgtatcaggctgagacctagatggaagacctagccgacgatgaccggtatgaggttgtagccgacgacctgcgggaagatgaggcaacggaaggcctgctcatggcaagtattgtagggtc

SEQ ID NO: 29832 - DNA, 285 bp, Setaria italica
  Peptide Sequence Number=SeqID_95806
ggtctgtgtagttgcttttgttttatttggcatggcctggtgaccgagaccgaaacgggtgaaacccgcatatttcatgaaaacatggctggaatgacctgggttgttcctcatagcagctggtcgtagctggggacgatacagcagatgatgatcaggccatgctgcccttgccacgttgcctaccccgcggcctccggctgcttccaccgccggtcggctgagacctggcgggaagatgaggcaacggaaggcctgctcatggcaagtattgtagggtctatg

SEQ ID NO: 29833 - DNA, 308 bp, Setaria italica
  Peptide Sequence Number=SeqID_95807
cgccgtcgcggtggtacctgacgctcccggcgaggctccgcgccgagccgcccgggagaagacgtgggcgtcgaggatccggtccgcgaggcaggcggtccccgcggcgcccacgaagccgacggcgacgacgccgtcgtgggaggccgcgccggcgccgggaacggcggagggcgcggaggaggggttcggggaggctggcagaggatttcgggagaggacgcggacggcggcggatggggtcgccggaggaggaggaggcggcggctccatcgccggcggcgaggcggaggtcgcgcttcccacgg

SEQ ID NO: 29834 - DNA, 324 bp, Setaria italica
  Peptide Sequence Number=SeqID_95808
gaagatgtcagcaccaatcttctgctccatattatccaatgatgaatccttgattgcgtcaatcttcttcgataaccttaataggctacatccaccaccaactacaacaccctcctcaataggcatagatttgatcaatcaaggtaccctggttgcattaagagcatcttcaattctcaacttcttatctttcatctcaatgactgtttgagcaccaacctggatgattgcaattccaccacataaccttgctatcctctcacccaatatcttcttgttgtacctttcctttgagttctcaatttgtccttttatcagagcaac

SEQ ID NO: 29835 - DNA, 661 bp, Setaria italica
  Peptide Sequence Number=SeqID_95809
tttttttttttttttttggttccctgattatgagatctcgtatgtttcaagagtgtttatagagtgtcaggaggatatgtttcctgttgccatcagctcatgacaaagattgccatctgcatcctcaattgtcatgtgacagttatttctgtacatcctttgctaaatttaacatgaatcctagtatcctacacaagtgtaatggatatgatccaaagcagtggagggagctaagaatatcagctgaaatttccagcattgtcttctctattacatgcattatccaccattgctgctgcttgtattgatgtgacagaacacatagagcttcttggagcaatagtgcaaagtcattattgtggtgaaacctttcttcgcttgttatattagcatttttttttgcaaaagaattgtgtccatgtagtttttgtcatattgaggtcgtcaggtcgattctgtggaaatgaagcttgctacactcgaatacctgaaactgaggcaggcattggggggatcaagctcctaggaggcattgggggtcttattcgaattggtttactttcttttgcctccaccaccaccacatcagaagtgagaaaagatttcgcaaccacagcagcatgctcaatgctgccaagaaccgctatgaggacttgggggt

SEQ ID NO: 29836 - DNA, 530 bp, Setaria italica
  Peptide Sequence Number=SeqID_95810
ttacttcttttgtaaaagcatcagagatcatatttccaacagcgtaatcgtttcctgcactaactgcagccacatgtgcaagttcatggtcttcaatctcccgtgacattaatttgagttcagacaccaaagcagcagcagtcttctcaatgccacgtgcaacctgaactgggttgattccagctgcaagaaccttcattccttcagcaatcagacctcgagcgaggattatggaagtggtacaaccatctcctgcaatatcattggtccttgcaccagcctgtctgactagcttcactccaagattttctaatggatcctccaattcgatctccttaagcactgtttccccatcattgacaatcttgggagggccatacttgttaccaagcaccacgttcctccccttgggccccagggtgacccccaccaaccgcgccaccaggtccaccccggcctggagcttcttggtagcggagaggtcacggttgaagtgcaggtccttgtatatcggcatcggcggcggcttc

SEQ ID NO: 29837 - DNA, 1470 bp, Setaria italica
  Peptide Sequence Number=SeqID_95811
aataaatagaactttagacaactaataatgactttgcactattgctccaagaagctctatgtgttctgtcacatcaatacaggcagcagcattggggggatcaagctcctaggaggcattgggggtcttattcgaattggtttactttcttttgcctccaccaccaccacatcagaagtgagaaaagatttcgcaaccacagcagcatgctcaatgcaacatctcacaaccttggatgggtccagtattccggcagccatcaagtcctcatagcggttcttggcagcattgtaaccataatttgtggtatcattcaataacaccttttcaatgacaaaatcaccattcacccccgcattgtttgctattagtgaggtagggtaactcaaggctttcttgaagatgtcagcaccaatcttctgctccatattatccaatgatgaatccttgattgcgtcaatcttcttcgataaccttaataggctacatccaccaccaactacaacaccctcctcaatagctgccctggttgcattaagagcatcttcaattctcaacttcttatctttcatctcaatgactgtttgagcaccaacctggatgattgcaattccaccacataaccttgctatcctctcacccaatatcttcttgttgtacctttcctttgagttctcaatttgtccttttatcagagcaactcttttctcaactgcatgatgagtgcttccatcagtaacaattaatgttgaatctttcctgataaccaccttagcagcagaacccagaacctcttttcctgccttttccagtgaatatcccatgtcatccctcactactgtacctcctgtcatgactgcaatatcatccaagcattgtgtcttttgctccccaaaagagaaggccttgactgctgcaattttcattgtccctttcagcttgttttttatcaaatcagccattgctgcttcttccacatcctcagcaattattaacaaaggataattttcttttacagcactgtccagtatccttataatttcactagcatcagtaattttcttgtcaaccattagaatcttacagtctgtgaactcaaccgtcatatttgaacgatcagtaacaaagtaaggtgagaggtaaccacgttcaaattgcattccttcgacaacatcaagactgttctcagtacctcttccattttcaattctcaccattccttttctacctactctttgaaaagcatcagagatcatatttccaacagcgtaatcgtttcctgcactaactgcagccacatgtgcaagttcatggtcttcaatctcccgtgacattaatttgagttcagacaccaaagcagcagcagtcttctcaatgccacgtgcaacctgaactgggttgaattccagctgcaagaacctgaaaccttacaattaccttacaagacaaatacaagaacctacgaagaca

SEQ ID NO: 29838 - DNA, 538 bp, Setaria italica
  Peptide Sequence Number=SeqID_95812
tatactctgttaactcactgaacttccatcctgtgcacggtacatttgctactacaggatctgatggaggtttcaatttttgggataaggacagtaagcaaaggctgaaggcatttagtaagtgtccagcgcccatcacatgcagtacattcaatcaggacggctctatatttgcttatgcggtatgttatgattggagcaagggcgctgagaagcataatccttctactgcaaagacaaatatctttatacatagcgtgcaggaatctgatgtcaaaggaaagccccgtactggaaagaagtagtcatgccaatggcaaattgaagattggtgctcgtagactgataaaaaaagatgagctcactgctgctggtcactcacatgagtggtccgctcctgattgttagggtatttcttcgtacatgagactgaaagcaaattcaatatcacaacaattgctgtatgtgcgacatgttagctggaagtagccttggatattgttctgacggtagcttatctctagaatggatcttacta

SEQ ID NO: 29839 - DNA, 342 bp, Setaria italica
  Peptide Sequence Number=SeqID_95813
tatgcttttggacaccgaaagcaagcatccctgtaggatgttttggtcatttctactgggcaattgcaggccttaagttgttttctacggactggcatgaaagaatttgctaatggcttttagcaaggacttttggaagatcgtggcaccacttgctgtttttgataggtctgagaatgaagtatcgaggcttgatgaagctcgagaagaagccgaatcaacagatggagatggctcatgctgaaagacgttggcatcagtgtcagctggtcggtttagcgcttggtttataagaacaagccatctagcagctggttcgttgtcttctatcacaagctaccg

SEQ ID NO: 29840 - DNA, 781 bp, Setaria italica
  Peptide Sequence Number=SeqID_95814
tccagttaatcagttcttctgattcttcaaaatctgttcttccggcaataggaaaagttcctgctagcacttcctggccagaatttgagatagaaattgactatgaagctacttttgattctgatagctgtgatgaaaataactcgaaatccttggtaatgcaaagacatgggaaaccagatgctatgatgcagtcatggatggatcaatttgaggctgatgctgacaacaaatgctgggcatcttttcaagagcgggtctcaagagcaccaaagcaagtcttgaggtactgtcgagaacccaacgctaaacctttctgggcgttatcttctggatgtccggcaaatgctgatatcccatcatgtagctcctgtaaaggtccattatgttatgaatttcagataatgccacaattgctttattactttggtgtgggaaaccaaccagactcacttgactgggcaacaattgctgtttacacatgtcaagggtcatgtgaccaaagtgttagctacaaagaggaatttgcttgggttcagttgtaccctacaacaaccacgaggcgttaataatattttatcaattcctcggagtaactgctgtccaatgttgcagctaggtaggtccagggatcatctgcatacactccagatcggtgttccaagcaactctttttgatactggagattttgaaatagggagtggcagcaatgttgccggatcattaccacgcaaaaaatgtgtccaaatcaattggtcgtgcagttttaagcatcttcag

SEQ ID NO: 29841 - DNA, 618 bp, Setaria italica
  Peptide Sequence Number=SeqID_95815
tcgatgtgtgtacttttccagggaggtccactctgatgttaagtttgtctgggtcatgacattgttttctccttcatagaactactcatgcgacccttttatacctaggtgatagtttggttgcccctagtccctaggactcagtgaaatattaggttagggcccgtataaaaatatggtcatgcaggcatgcattatcaaacataaagccttcatacagaactatgagcatgttgacctgcattgccgaagatagaaagacttcatactaacttatttgtgctctattgtatagctaggtaggtccagggatcatctgcatacactccagatcggtgttccaagcaactctttttgatactggagattttgaaatagggagtggcagcaatgttgccggatcattaccacgcaaaaatgtgtccaaatcaattggtcgtgcagttttaagcatcttcagaccgtggtcccgggctcacaatgctcggtgctcgttacattggctttggtccatttagacactactcaagggcccatatagacgtgatggcaaacactattaaaccgcccatggtggtgaccacaaagatggaagtatgcaactgtttgccatcacgt

SEQ ID NO: 29842 - DNA, 659 bp, Setaria italica
  Peptide Sequence Number=SeqID_95816
ggcaccatcgaacacgcctccagaacctcaccctctcctacaacaacctctccggccccatcccggacaccttcaacggctccgccatccagaggctctggctcaacaaccagctcggggaagccaagctctccggcacccttgacgtcatcgccaccatgaccagcctccaggagctctggctgcacggcaaccagttcaccggccccatccccgacgacatcgccgcctgcaagggcctctacaccgtcaggctcaacagcaaccagctccgaggcctcgtgcctcctggcctcgccaccctgcccgccctccaggagctcaagatcgacaacaacaatctcttgggccccgtgccgcccgtcaaggcgccaaatttcaccttcgccggcaacgagttctgcgccgccaagccaggggacacctgcgcgccggaggttatggcattgcttcaattcctcgccggcgtgcagtaccccaccgggctcgtcgattcctggtccgggaacgacccctgcgcgggggcggctagttgggccggcgtcacctgcgtccaaggcaaactcaccgtgctcaacctgcccaacaaaggcctcaacggcacaatcagcccgagtctcggcaacatcaccacgctcgtagacgtcaacctcggcggg

SEQ ID NO: 29843 - DNA, 272 bp, Setaria italica
  Peptide Sequence Number=SeqID_95817
aacacctcaaaatggctggcatgaagcttgcagctctaggcttcattgtcctcataagtattggcttaggcgaggctgcgagggtagctaggtactctagctcagaagggtctgggacaggaaggggagagggcagtggatctatggatggtgctggttccgggtctggtagtggtactggatctggtgtgagtggtgactatgggggttctgcccatggaagtggtggaggtggaggtaaaggtggcggcggtggactgtatggtggttcg

SEQ ID NO: 29844 - DNA, 603 bp, Setaria italica
  Peptide Sequence Number=SeqID_95818
gtgagatcgtgggcgagctagcgtacgcaggaaagaaagaaagggtgtcggcttgctttactaggaggaggaggaggaggaggttgtggaggagaataatggaggaggctgcggagctggggcacctgctggtgttcgccttcctcttcttcttcgccaccttcatggtcgggtcggtgatcaccgatgtcaccatgggggcgctctgccccggtcgcgacgagtgctccctcgccatctacctcaccggactccagcaagctgttacgggctgggcgcgctggtgctgacgccggtcgtcggcaacctgtccgacaggtacggccggaaggcgctgctggcgctcccggcgacggcgtccatcgtcccactgggcatcctggcgtacggccggaccaaggggtacttctacgcgtactacgtaaccaagatgctgacggcgatggtctccgatggcagcatgatgtgcctctcgcttgcttacgtggctgacagggtgccggaggcgcggcgcgcggcggccttcggcgtgttcaccggcgtctgcagcgccggcttcgtcgccagcaaccttacgacggacccgacttacctaccccgtta

SEQ ID NO: 29845 - DNA, 322 bp, Setaria italica
  Peptide Sequence Number=SeqID_95819
aggtcctcacgctccatcctgatctccttgagcatcgccgccacgtccttcatcgtcgggcggtcgtcgggcgtcgggctgacgcacagcagcgccacgcccatcacctgcatcatctcctccacctcgccatccgaccggccccgcagcgctgggtccagcacatcggcgcggtccctgcaccgccgcacccagtccaccacgtggagcccgtccgggatcgtcgggtcgatcggctgcttccccgtcagcacctccagcaccaccacgccgtagctgtacacgtcgctcttctccgtgatcttcatcatgtacccgtact

SEQ ID NO: 29846 - DNA, 323 bp, Setaria italica
  Peptide Sequence Number=SeqID_95820
ggataagtctttttaatataattgcttatgtaattgaatgtaagcgggtgggattcaaacattaaactctaggtgaacttttgcaaacaaaactgccagaaaactatataccatgtatccctcgttgttgcaaaagcaaagcatctagaaagatagaatctgtgcagttcaattttcataccatacctgtgatacatcaagcctgcactgcaaattttccattgatgagcttgtcaacaatgtctgcaatagaaggcctttccttctgattgacatcaacacattcaagaccaatatgaatgcatgctttcacttccacaagg

SEQ ID NO: 29847 - DNA, 1386 bp, Setaria italica
  misc_feature (1)..(7): n is a, c, g, or t
  Peptide Sequence Number=SeqID_95821
nnnnnnntaaaacaccgacatataccacgtatgtgagttcatccatggctttgtaggtcccaagcgtataaccaatcacgaattcagagtacgtatacaaatttattaacaataaattagttctaattgtgtagatccattgatctactatataataacttttgccgacgacacagatgagagacatgaaggaagtactcctcgagacggaaaaaatcatggcaattcaagaacaactcagtggatttcttctggacgaggtagtaaatccatcggggcagttccttaatgatggatcaaatctgtgatacatcaagcctgcactgcaaattttccattgatgagcttgtcaacaatgtctgcaatagaaggcctttccttctgattgacatcaacacattcaagaccaatatgaatgcatgctttcacttccacaaggcgatctgccctcaataatgggtacatggatgctatatggtcatctgtccaagtttgacgtatcctatcaataaaatttcttccagccatgtctttgtcgttggaacaattcttctctcccgtggtgatctcaatgattactacacctaaactatatatgtcacactggggcgagatttcaccacggtacaaatactcaggtgccatgtacccttttagccccataacattcattgtgtatgtccgggatttgtccgtatcaaagagttgcgagagaccaaagtttgcaatttttggcaccttattgttatccaacaatatattggcagggtgaagatccaaatgaacaatacgaccaagcatcatcccctcatgtaagaaacttagaccctggcaaatgcccttaattattttgaagtttgtatcccagtcagtcttccttgtactatccgacagatagtcatgaaggctccccttatgtaaaaattcatagcagagtacacattcatccatgtcaacaagaataaatcttcctttgtgctccaccactttcttttttgattcgctgcagcagctaagcaactttactatattgtcatgttgaactgccataagatttgttgcagcgttgagaaatctttttccagcaggcacttgcacatatgccgctagcttcttcacagcaaccagttgcccatttcctagaactcccttataaactgttccaaatgcatcttcacttagtcttcgctcttcagagaagtctgatgtaatttctctcaaaaagtctaatggtacttcattgggtaacgtgctgagaagagttggctcactttctgagcttgcccccataacttcggcaaccatttttgatagatatggatgttaactggccaccggggacgaaattgatccagagttgtaacgcggaaacagagcagaagtggc

SEQ ID NO: 29848 - DNA, 269 bp, Setaria italica
  Peptide Sequence Number=SeqID_95822
ccttgctgcaccttatggaggcagaggttgacaaggagagaggagggacctggccaaacggcgccggcggtaatggtcaccgtggtcacggccgcggggcggctggcgccgcaccggttgagctcaacctccttgcggggatggtcggcgtgaacgcggtgcgcgccgccgagctgcccgtggtcgtcgtagtgccggacgtggcgcggtctgcggcggcggccgagcctgagccggcgcagctgttcgcgtgccactactgccggcgg

SEQ ID NO: 29849 - DNA, 417 bp, Setaria italica
  Peptide Sequence Number=SeqID_95823
gtatgcactcggcgccatcgtccccggcgcgctcagccacgtcgacgtcgtcttcgccgctgtcgcagatcaagcagcaggcgcggcatgttcgaacaggcagcttccagcggttccggcagcagatgcagcgcgcttggaagtgggggccgattggaggcggaggaggcggagagaggagccccagggaacagttgctgcggacgtctctgaacattgaggccatggcgaatcagaagcggcagtggtatcaaatccactccaaggcgcaggatcactggcaatataaggaaccagcatcgctctttgaacatttttttgtagttggtctccactcttatgcaaatgttggagtaattgaggatgcttttgcgaaaaagaaagcttgggaatctaatgtagcacgctcagagatag

SEQ ID NO: 29850 - DNA, 330 bp, Setaria italica
  Peptide Sequence Number=SeqID_95824
aagcgcttctggacctccatctgcagtttcagggcttcagatatctgcatcgtagaggaaccttcaagagctgccagcaaatcccctggatctttcttttcagctttgttgtctacacgacaggtatgaatgaaatgaagcaaaataatagtaaaatggtggtctttcttgaatgtaataaaacaagatgacaatggtcacctaccatcggttgaagggtctggaatgtattttgcaagacggtatttctgcaagtgactcttcacatggtatattgtaagtcctggcacacccataatcctaagaacctccctttggagtggctctatc

SEQ ID NO: 29851 - DNA, 1495 bp, Setaria italica
  misc_feature (1)..(36): n is a, c, g, or t
  Peptide Sequence Number=SeqID_95825
nnnnnnnnnnnnnnnnnnnnnnnnnnnnnnnnnnnncgtttttattactttgattttaactgttttgatgtagtacaagcgatcgttgcatccggtataaagtgatcgcacagtgggttcaagattctgatgataacagccaggatccgtaaatttaggaagagccccagccttaacagggaagcaacaaagaaccataaacggccatggaacattacagacccattctaaaagaatctgaacttaaataccagatacattacggtaacatctaattataatactagggagttaaagctaccatccatgccatgtgcaacccatctcctctgaacatctaaaactcttttgtctaataatggtatttctgtcaaaagagaccaaaatctaccagcgggctacagacgttaaccacatcatgtactgcaccagaaaaatagctttggacacaccaccagaggctaatggctggagtacggcattgaacattgctggaactctgagtccgtacttgactcaaagatgtggtgtggaagggcaaagtcaccatcagctattggggtaccatcgctgctgcccctctgcctcttggcggcgcgctcatgctttggactgagcgttggagagccaggccgacagttggagtcgggggttacgggttcaccatgaggaagatcatcatgtgaggcactctccatgggctcaactcggcttccattgtccttgctgaatggtacagcctgaagtggagattccgatgttggcacaggggttgatgggttagttctctcggagtcgggcaactgttcacttgatgtgtctctagaagctccagcaccactgatccgttgctgctcttcgatgatcttctgaagatacttgccttgtgcttcaatccgcagctgcagctgcctttgtacctctaattgttcatgcaagcgcttctggacctccatctgcagtttcagggcttcagatatctgcatcgtagaggaaccttcaagagctgccagcaaatcccctggatctttcttttcagctttgttgtcatcggttgaagggtctggaatgtattttgcaagacggtatttctgcaagtgactcttcacatggtatattgtaagtcctggcacacccataatcctaagaactccctttggagtggctctatctggcccgccaagttgtgtaacagcctccacgaagcggtcatgcagctcatttgtccaccgtaaccgttgtcttgctgccatgttagggttgctgtttcctccattatgagggaccatagcgccatcccctggacccatttgatcatgaggagcaggattgctttgagtcggaccaatgctcggatttggctggtacattgcgcttgctcaatgccagggcgcgcggtctgaggggggagggtggaggctgctcgacgccggccgagcgctccccctcctctctctctgcgtctctgggttcctctctctctcctctttctctc

SEQ ID NO: 29852 - DNA, 251 bp, Setaria italica
  Peptide Sequence Number=SeqID_95826
gttgtcgatcgccgtcagcgtgccgccgacgccgaacaccgtcgccgtgaacaggaacagcatgtccacgctcaccagcgcctgcaggatcgtgtagtcctcgccgcgcggcggcggcctcagcgcggcgaccaatctcgcaccgaccctcgcgggcttcgaggtgacaggcaaaggctccggcaacggcgccggcttggcggccacggtcgccggggacggctccggcgcctctgctcgcgcttcatgcg

SEQ ID NO: 29853 - DNA, 686 bp, Setaria italica
  misc_feature (57)..(57): n is a, c, g, or t
  Peptide Sequence Number=SeqID_95827
cactactactccacgatctaaccttttcttcttcttcgatttctctgatgacaactncggcatctccgaggtcgtagtgttgctctctgccccacgagcctgtgatccttcggaggccttgcctgacatgtttgagtgccccaggttgcttttgtcctttctcttctgcttgtgtttgggtgtcggctctgcgctccattggcccagtgaaagggctgagccttggctgctgcggttcttcgatgcgctagtgaaccgagacttagtcttcctagaagaacctgcagatatcttactgctaggagtaaggcccccaaaatttggtttagctaattcctcagcttcaggataacgaactaagcaaactcgccgtgatatcttccccacaggtttcatttctgatcctgatggttgaaagacagttgcatctggctgctgagctgcaaagctgacaagctcataagatttccctgaggaactttccaaactgcctatgtttccatccttgtgcagcttaagagaaagctctttaccatggaaatcagaaacatctaactgatctttaggccactgtattagccaaaattctgtcgattctgttggtgatatgtcaagcatggcttcttctttgacctccgcaaaagctggtccaggctcatagcgaacccttgctgccgccttcacca

SEQ ID NO: 29854 - DNA, 798 bp, Setaria italica
  Peptide Sequence Number=SeqID_95828
atctaaatatgagatgataagaagcttttggttgttttgcagtctgcagtggtcaaagtgatttccgatcttccgactgataaactttccattgatggagttccatttcttatttctgctagtgttgaacttgctgaattgtcgaagttgataattttctgtggccctattgaagatccctcaccagtggctactgctagaagaatatttaagtctgaacatttggaaggcttactttcatacaaggcgacgattggtcttataacttcttctaagtacagttttttgcagtttgatactgatccatacttattatctcttattcaggaaagaagttttttccctctgtctgcagccttgttgtcatcgcctatattgcatttagcaagtgggcctgctgctgaaattttgatggagatagcatcatcaattgaatctattatcctctcactcctcttttgtcgttcagggttatcgttcttgctcagtcaacctgaagcaactgagcttatagttctttctcttcaagatgcagaaaatatgaataaaacagaatgcataactcttagacaggcttttgttcttttatcaaaagggttcttctgccgcccacaagaagttggaatgatcacggaattacatcttaaagtgggaagtgctgcaaatagaatactctcagttcctttgaattctgatgaacttttgtgggttctttgggaactttgtgccatttcaaggtctgattctggtcgacaagcattattagctcttggctaggtcttgcggctcccgtaggtt

SEQ ID NO: 29855 - DNA, 569 bp, Setaria italica
  Peptide Sequence Number=SeqID_95829
ggggaattggtggcagtgtgactggcactgcagggatgtttggtagagatgggatggcagtgtggttggaactgctggtgtggatggctgagctggtgcggcctctggcgcagcttctgtgtccaaaagatggcgagctgcgaagctgttattgagggctgtcaaggctagcagcagaacgagaagaggtccatgacgagccatggtaagcgaatcaggaaactttctccttctccatcgctttcttcagggaaacagactgacagagagatgaaagaaaagaatgttgccaagaatgctcaagttttgaaaaagaagggagacgagaaggtgataccaggtccattgaaactgtctcgttcattaaacatgtctggaaagtctatcacgagcctcaggttgaaagcaatcagaaaagacaaaattgctcccccaatcaagagtagcaagaaggtttctgaaacagaaaattcagtcactgatgctaagaacgccaaggagaaatttctgaagatggcttcaccaaaagtgcgaaaaccagaggttaacaacaaagtgacacgacctcc

SEQ ID NO: 29856 - DNA, 2100 bp, Setaria italica
  misc_feature (2014)..(2100): n is a, c, g, or t
  Peptide Sequence Number=SeqID_95830
gggaattggtggcagtgtgactggcactgcagggatgtttggtagagatgggatggcagtgtggttggaactgctggtgtggatggctgagctggtgcggcctctggcgcagcttctgtgtccaaaagatggcgagctgcgaacctgatcattttagcagtatttcctgcgtggaagatttgtcagctgaagcatctgaacctattgtggcagaaatgcttccagctgacgcagaatgcttcgtcatctctcatgatgatgtggaagactgtgaagatcgagtttcatcagatggagctgaaagcattgagctggagatgccattagctatccaggacattgatgaatctgatgaacaaacagaggatgccattctgcctgctaacaatgtatgtgaagttgggcaaccgtcacttgtggatcatttgcctgatcaatcagcaaatgagtgtgcaagttcagataagaggactagtcaggctgtgatagcatcagagaagcatgaacaagctgcatttgggactaaatcaaagggctcagctaataaaccagaaaaaccaaaggtgaaagcgacatcgagtgtaacaaggaacactgtttcaagccagagaaatggaagagcatcgcatctgaaagcttctggtgcagcagatgaaagctccaggggaccaaagacaataagaaaaactgcagatgctactgctgctaaaaagttcagtaagccagagaggaaatttagctcaaatgttgcatcagctgcaccaaaagctaaagagatcaaagtaccatcaccatcgaatgcaatggattcatctgccaaacctcctaggttggccaaaccgaaagctacgacagccaagaaagctccttctccatcgctttcttcagggaaacagactgacagagagatgaaagaaaagaatgttgccaagaatgctcaagttttgaaaaagaagggagacgagaaggtgataccaggtccattgaaactgtctcgttcattaaacatgtctggaaagtctatcacgagcctcaggttgaaagcaatcagaaaagacaaaattgctcccccaatcaagagtagcaagaaggtttctgaaacagaaaattcagtcactgatgctaagaacgccaaggagaaatttctgaagatggcttcaccaaaagtgcgaaaaccagaggttaacaacaaagtgacacgacctcctcgcaaagaaaaatctgacactccaagaactgctatcgcaaggagaccaaagcctgcacccatcacctcctcaagcaccatggcaccagctccacagcctcgcaagctgactttccgccgcggcaaggtgctgaaccccgacgagagcagcagcaccccgaggcggctccggttcaggtctgccatggctgtggcagacacgagtggttccaggagcagaggcagcaggatcactggcaggaggaatggcatcagcatcgcggcgaaagaccctggcgctgaggtcgtcgtgctgcgacggcggcaggatggcaaggaggtgaagaagcaggagcaggtgctgctcaacaacgtgatcgaggagacggcgagccggctcgttgccgaggcgcggaagagcaaggtgaaggccctcgttggcgcctttgagactgtcatctcgctgcaggagaccggcaaggcttctgctccagcggcggcaagcgtggcgccatgagcgtctcttgatctgaatgtttggaccttctccctttttttgtgactgtaaatgcggttttgctagctcgtttgccttgttactccaataatacatagctcccatatatacatcctccaaaagaaaagaaaagcctgtaaaaaaattaagtttttggataggagttttttgtcctctgttgtagaccaaaggagagtttggcattaattgtactgcatatggtttaccaccaaggtactctaatgatgcactactaaacttgcttgtttcagaaaggaataagaaggtacaccaaattcagttctagtttnnnnnnnnnnnnnnnnnnnnnnnnnnnnnnnnnnnnnnnnnnnnnnnnnnnnnnnnnnnnnnnnnnnnnnnnnnnnnnnnnnnnnnn

SEQ ID NO: 29857 - DNA, 753 bp, Setaria italica
  Peptide Sequence Number=SeqID_95831
tttttttttttttattcaaaacgagtaatactttattaacagaagacaaaatggtacaatctactggctgcattcacaatcacacaaaatgctagccagtatcacccaaatagcagaacaaacatgacagacatactgatagtgaccacatatgacaaatcaaattcctgactaacagaaataaatagaagtctcctgctaccaacttcaagggctgctggtttgtgggggtggggcggtgaatggaatgggaggcacctggagacctggaatggtagggattgttgttggcatcgtggttggaatcgatggcatggtagtggggattgagggaattggtggcagtgtgactggcactgcagggatgtttggtagagatgggatggcaccagcggctgctggtggcagggtgacctttggaatgggaatggatggaattggtgggattgccatctttggcatcgctggtagcggaatggaaggaactggaggcagtgtggttggaactgctggtatggaaggcactgggggcagtgtggttggaactgctggtgtggatggctgagctggtgcggcctctggcgcagcttctgtgtccaaaagatggcgagctgcgaagctgttattgagggctgtcaaggctagcagcagaacgagaagaggtccatgacgagccatggtaagcgaatcaggaaactttctccttgcagttgcagggggctacctataaatgtgttgatctttgtgttaaga

SEQ ID NO: 29858 - DNA, 433 bp, Setaria italica
  Peptide Sequence Number=SeqID_95832
agaatactacgggaccaaccccaccagctctcattccgcccttccccgagaaccacgccggcagccgtcgagcagcgtgcaaactcccaggccgccttccataggatctgtccggcagccgggatttggatttttggggagggacgacgggaaagggacgagaagggagaggggctgagatttgagaatgacgtgttgagggcggactgcggagcaccctgggtcgatgcggtgacgccggacggacggcgagcattgtcaatggcattttggtccatccacatataatctgacatggatcttggacggaggtgaaagggaatgaacggaagtgtcaagtgaggcataaaagttagactcggtgttagataaggaatgaagaaattttcagtgtcgtaaggggaattaagctatctagtgtcaaataagcctg

SEQ ID NO: 29859 - DNA, 570 bp, Setaria italica
  Peptide Sequence Number=SeqID_95833
agcccaatgactgccaccatcttctagaatctgcactgttgacagacctttatgcaatacatgcatcttacccttgatgacaagtccagaacatgcagagctgtgtgcctgacgaagatcagggagaggctcccacatgtcagcttcagggtcataaatctcagcctttgatatcgatttgcggcagtttgtgaatccccctgcaacgattattttaccatccaatgcgcaacaagcaaacatcgctcgagccacaagcattggagccctctgggaccacactcgctgtagcggatcataagaccaaacttcattgctcgcaaagatcctgtcatggtctccagtaagcggatcaactcgatcactgccaccaccaattacatagagcttgccagcaactgaggccactccaaagcgggctatgttccttatttgagacggcatgacagggagagttatccacttgtcccgtagggggtcataaagttgccacatgttttctggttcaaatgccaacacacataacagttcttctgtcgcaccaatctgattccgaatcttaaagaaggt

SEQ ID NO: 29860 - DNA, 262 bp, Setaria italica
  Peptide Sequence Number=SeqID_95834
aagaataaaggatagataagaagcataagcaaatacaaacaagaggtaactcatctagagcaaagcctagactatgcatatgttgtagatctagctagatggcaagcaaacacacggttctcatacaaagcatctttaaaccaccaccttaggtatgagtcctaaaaacccccaccttacaaggtattagaccctatcatgatcctacttatcagcaaaagaagtctaagggcatgaacataaagcacacgcctagctgtta

SEQ ID NO: 29861 - DNA, 535 bp, Setaria italica
  Peptide Sequence Number=SeqID_95835
gcaagaccgagggcatcgccggcgacgtctggcagcacctgaaaactggatcgcactagtcggatactgcgatggggaggattgctcagatatcaaaggtcatatctgagggtggctacgacaagatattccagcagacttttgagtgcttgcctgatgagaagctcaagaaggcgtatgtgtgctacctatcgacatctcatgggccgatcatgggcgtcctgtatctctcgactgtcaagattgcatttggtagtgacagccccgtgaaatatgtgactgaggacaacaaaaagtgagtcatccttttacaaggttgtttttaccccttccccacttgagatcagttaatcccacagcaagtcaacaaaaaccctgcagagaggtacattcaggttgtctctgttggataaccatgaaccagaattcatggttatcaacagagacaacctgaatgtacctctctacaaggttcgttttacccctccccacttgagatcagttaatcccacagcaagtcaacaaaaccctgcag

SEQ ID NO: 29862 - DNA, 933 bp, Setaria italica
  misc_feature (840)..(933): n is a, c, g, or t
  Peptide Sequence Number=SeqID_95836
acccgaccggccaaagagcgccacggacaatctgaaggagatgttcggcatggtggggaagaagttcaacgaggccgcgcgcaagaccgagggcatcgccggcgacgtctggcagcacctgaaaactggatctagcatgacggatactgcgatggggaggattgctcagatatcaaaggtcatatctgagggtggctacgacaagatattccagcagacttttgagtgcttgcctgatgagtaaatacttactaaagcaaaggaaggtcgtttatgtgtgctacctatcgacatctcatgggccgatcatgggcgtcctgtatctctcgactgtcaagattgcatttggtagtgacagccccgtgaaatatgtgactgaggacaacaaaagtgagtcatccttttacaaggttgttttaccccttccccacttgagatcagttaatcccacagcaagtcaacaaaaccctgcagagaggtacattcaggttgtctctgttgataaccatgaattctggttcatgggtttcgtgaactacgacagcgctgtaaagaatcttcaggaggctgttcgtggtgttcagggcgcctagagatcacctgtgtatttacccacatgtctatgtggtatgccccttcaaggctgtaaatgtgtttatgcatggtgcttgtatacctctgcatctcgtgttgagatgtgtgccattggaccattatgcagtacattcatgtatctttagcatgttgatacttctggagaagtgtttgttaatactgaatgaagttgattgaaatttgaagccagtgaagttagtacaacaactagaagtacggaagaannnnnnnnnnnnnnnnnnnnnnnnnnnnnnnnnnnnnnnnnnnnnnnnnnnnnnnnnnnnnnnnnnnnnnnnnnnnnnnnnnnnnnnnnnnnnn

SEQ ID NO: 29863 - DNA, 274 bp, Setaria italica
  Peptide Sequence Number=SeqID_95837
ctgctgctgtcttcggatgtgagcgccgacggcggcgggaccaggcggggtttcttgtggctggtgcggtggccgccgagcgcctggaacgacgggaagcacttgttgcacgtcttgcactcgtacacgtactcgccggcggcggcgccgtcggccggacggcggctcctgaacctggcctccttggcgacgaccaccgccacctcgtcctccttcgcccccacggccgccgccgccgggacgccgtgcgcgaggagcatgaggcagagcgcca

SEQ ID NO: 29864 - DNA, 450 bp, Setaria italica
  Peptide Sequence Number=SeqID_95838
agggtaggtaggtggtggtgaggacgatctcgtcgtcggtgccggcgatgcgcggcttcttgtggctcgcgcggtggccgccgagcgcctggaaggtggggaagcacttgttgcacgtcttgcactcgtacacgtagaagccggctttgacgccgtccgccgtagtcacggcttccgtgtacttgcggctggtgtacctctcgctcttcgccggcgccggcggggcggcggccgggggcggcgaaagcgaaggcgaatgcttggagtcgacggcggcgtgggcccctgatgagccgccgccggctccctgggcgaggaggatgaggcagtgcgccatgtcctcctcctccgcgtcgtcctccgagagcacaaacaaaccaaccgaaggaaggaagacggcccgggcggggtggtggcgcggcctcttggtgcgcttgcgcttgacgacgg

SEQ ID NO: 29865 - DNA, 196 bp, Setaria italica
  Peptide Sequence Number=SeqID_95839
cggcaacgacctcaatacaattgaagcaggatggcaggtttaccctgagttgtacggggatagatctacaagactcttcatatactggactcgtgatgcatatcgaagaacaggttgctataacctacagtgctcagggttcatccaaacaaacaatcagatcgccatcggtggtagcttctcccctgtatccaga

SEQ ID NO: 29866 - DNA, 406 bp, Setaria italica
  Peptide Sequence Number=SeqID_95840
ttaggagaactcgtggcttctttttcctgggcttgctttgtgggtgctggagcttctgctgacatatcggctagcggcggctgtgcaggaccgttcgtctcatccgcccgcgaacctgcaccgccgtttcccggcgagccccgcaagagaacattagcgccatggagtgggaactgcggcggaacagagaacaagaccaccgccccgacgaacaggccggcgaacaccgcgatggcgagcttgctctccgcgagcgccggccatagcttcgtgaaggccttcatttggagtggaagcggcggcagctggttctggttggcacgacccggactctcccgtttctcctcctcaagaaacggcttcggctcctcggaattctgtgctcgttgactcgctcccagggaat

SEQ ID NO: 29867 - DNA, 290 bp, Setaria italica
  Peptide Sequence Number=SeqID_95841
cgtcccgtgcgcgctcttctggacggccagcgtctgcggatacatgggctaccgctactaccgcgacctcatggacaagggcatcttcccgctcaaagatgcggagcagctgacgaacgggttcttggacacgccagtggactgggcgccggggatgagcaagcacacccggctcaaggacatgccaagcttcatgcgctcgacggaccccgacgagttcatgttccacttcgccctcaaggtgacggagcagatagccggggcggacgctgtcatcctcaacaccttcg

SEQ ID NO: 29868 - DNA, 1273 bp, Setaria italica
  Peptide Sequence Number=SeqID_95842
ccccttgacactcaggagtcttctgcaaggccttctttgtagctgcaagctcctcttctagtgtactgatgcgagtgacagcagcctgcagcatctcctccttatcagcaggcattgttgcagattttgttaggagtgccttgatcttctcctcaagctcggcgaggcgcttcatagatatgacatcttcagctgccttcacagcctcaggtgatagcttggatcgctgacgggcttggacttttgatttacttttttgtggggtagtaggtttagcatcacctatggcagcgccaagtaccttcacaggcatgttgcgcgtcaaccggagcatcgttgcaatgctcatcacgagtgctatgatgccaccaaagagtggggggttggatccattagaggcagttacaacagctttggtgatggcgagtttctcatccggcagagttccctggctcttgcagattgcatctatggccttttcaaccataggaacatcacaagaatagggtgaaccaggggtaggatataaagtaggaataagttcctcatggacaggtgataattgaggatattcaatttggacgcgagaaattttccgtgacagagtgggttgaccatctccaactaattgtgcctccccatcggatgaagtttgtttcttcggatatataatgtcatcttcacaaatcattttatcctcaacctcagaagaggctgacctgcgtgagccacacctcccaactccactttgaaccatcttcatgatttcgggatccttccaagggcctttgtcagccttcatgcatccaccttcgcactggcaagttccaccaaaaaattctggcagctcgctggcatctatcacctcaagaagcttgctttggtacttgttacctagaacatgaatctttgcagtggtcttcgggtcaaggaagctcttgactgtgctccatagaagccggaatccctggcctgcattaatgatgaacatgcggcacagcgactctggatagttgtcaccgtcaatcttctgaagcatgcctatgaggtcccttgcagctttgctgaattgcttcatccccactccttgcacatcaagaattgttgtgctttgatcaatatgacgcttcgcagcgattgaacaagctgggaacttaacagcaaagttcttctcaaactccttgacatggttcttgacaaaacgatccattgtggtgacctgcattagcctattcacatcaatcttcttgtgcctaacaatgtagacaggcct

SEQ ID NO: 29869 - DNA, 754 bp, Setaria italica
  Peptide Sequence Number=SeqID_95843
cgaataaggaacccggatgagaaggcgcgacacctgaaggttgctcgccaactcccatgagatgcctcagtttcttcccaggaacacaagataacatccgcaagcaaatccttgcatggtcccgaacctcaagatcagggaaggactcaatggtgagcacaagaagatgcgaaaggggaaggaagacatgagagctgtgatgatgcttcagcatgacacggcaaatgcccacaaccttgcttccctgagaccatgatgtaagctctgtgtctgggccgtgcttcttggtgagagaaaccatctgcttggtgagcaattctaataggcggagctgaggcaccgtctcattctgtgcaatcttctcaaaaagagggtagtacgacgcaagctggtagcctggctcaagccttggaagcaggcgctcatcaagtgtccggagcaaccactccccagcccaccgatgtgagttacaagctagcagacggttggtgaactctgcaatcactgggactaaaccacgatgctccaatgccatatcaaccaagatagccagccccggagggaagatagtagaattcaggagctcaccagccccggagcagcacgtgtcatcggtgctgtgaggagcagcaataaccaagaccctgtgcagcgctcggaatgccacacccgtttcagtactccatgccggaagacacctgaaggcggagacgcaaaccaagccatcatcaaggagcctgttcgctttagactt

SEQ ID NO: 29870 - DNA, 372 bp, Setaria italica
  Peptide Sequence Number=SeqID_95844
cggcctgctggcgatgctactgctcggcgtgccggcgtcgctgttcctcgtgtgcgcgcagctgatccaggccgtggattccgtctcgtccggattactggccggccgatgagcgggaactgctgcattggtgtatggccagatggcgagccggcgagcacggtggaacatttcggcccagagattcataagatttcttgattcattgcatgcataaaaccgttttgtaacttcatcgctacagtttataaatagtggctatgtccttctgttaatacacacaaattcttctgttgataaataaaaaaaagaattgtatggccaattctcccgtcaataaaagatgatattgcagtgaaccgaacggaccaa

SEQ ID NO: 29871 - DNA, 666 bp, Setaria italica
  Peptide Sequence Number=SeqID_95845
actttaccttacagtatatcttattgatcagtatctttctcagaaatgtattcaaaagcaggaactacaacttctaggaataaccagtatgctgattgcatcgaaatatgaagagttctgtgctccaagcgttgaagaattctgtatcataacagacagtacatatcaaaaggctgaggttctggacatggagcgtaaagtgcttaatgacctgggattttatttatctgttccaacaacaaacacatttctcaggagattccttagagcagcacaaccttcttgtaccgctcctttgtctactttgtgttacctggccaaatatctagcggagttgactttgatcgactatggtttcttgaaatttcttccttcagtggtggcagcatcttcagttttccttgcaaaatggacactaaaccaatcagatcatccatggaaccctactcttgagtactacacctcttacaaaagctccaatattcgaacgtgtgtgtgtgctctacaggaactgcagcacaacaccagagattgtcccctcaattccattcgtgaaaagtcgggcagcaaaagttcgagtgtttttccaacctgaggtcaccagagctgctgcagtcactcttcacttgacaagctccctgcctgattcaaccatttgctgcaacc

SEQ ID NO: 29872 - DNA, 451 bp, Setaria italica
  misc_feature (425)..(425): n is a, c, g, or t
  Peptide Sequence Number=SeqID_95846
tgatcgagagagatgctgctgtaaaagatgtagaagatggggcgtctgacatgaaaaggaaagcagaagatctgacaaggaagttggatgagaatgagaaagaatatcagggtgtgctagcaggaaaaagtaatgcaaacgagaagaaatgcctcgaagatcaacttagagatgcaaaagctgcagttggagatgcagaatctggattaaagcagctgactaccaaaataagtcattctgagaaggagctgaaggagaagaaagctctgttagtatccaaacgtgatgaggctactgctgctgagaatgagctgaaagaaaggacaaaagacttggaagctatcaagacatcgatgggatcttttaattacaatgaggcccagatggaagctttgcaaaaggccattctacggagtcagaaattntcagatttgaaggactgtattcgtaa

SEQ ID NO: 29873 - DNA, 259 bp, Setaria italica
  Peptide Sequence Number=SeqID_95847
ggattgatgtcttcgccgactcggattggaatcaaggtcgcgttcctgtgctgtacctgtataaatagaagggcaaaacgaagatcaagcccttccggcaccgcgtgaagaccgaccccaagttcttcgacaagtcatggcggaagctccatgacgccatccgcgagatctacaacattgagacggagccatcttctccgctaacacctctgtcctggcgtcctccacccagccgcgcctcttccatcctccaccccca

SEQ ID NO: 29874 - DNA, 332 bp, Setaria italica
  Peptide Sequence Number=SeqID_95848
ctacttccgcttcctcgacacccgctccctcttcgccgcccaggagctggacgacgccggcggcggcagcggctccgacgacgacgaggacgcgcggctcgaccgcgtgacgaagcagcagcacctgctggacctgctcatgcagatccggccgtacggggacggcatggagcagggcctcatcctggaggcgatggactgcgtcgtcatcgagatcttcgaggtctacagccaggtatgcaccggcattgcccggttcctcgtcgccgtcctcggctcggccccgacgccgccgccgcggcggccgggggagacgatggcggaagcgaggc

SEQ ID NO: 29875 - DNA, 1419 bp, Setaria italica
  Peptide Sequence Number=SeqID_95849
caccggccacacctgcggtggcgcaggcctgaagaaggctcatggcgccgcccgttagcccctccccatcatcatagggagctgcaggcaaggggcactcgccaggctggggtcccgcgaggccacataggggcaggggtaggctcggtcgaggatgagggggcagccttgcctttggataccctgggttcttgcctgcagctttgatttggtttcctattgtcttcggtctgttcttcagctaccgttcattttgttatggctcttccatgagaggtgtcctacacactgctttctccttggtgtatggataccctgggtgtttgcaagacaagcttttattatctcctgtatgcgcggatggataccctgtatgcgtggacgccagtgaggacgatgctgtgaaaacttggcaaacatgcctagcactttgctccatatcttattattatctccttgataaaactagcatataaatatgaacataggtttctgagtttgttttgtttgagtatttgagttcaaaatcacaagcaaagtggcacattgcaccccactgccaatctgctgcttcagttcgaaattcagagtagatacccatagagtcagtctcttaatcctaaaacattagattacttcaattgtgttttgttcagtcgatgatttcatgtagagggcctaggtgtatggataccctgggtgtttgcaagacaagctttttacattcacacaattaattttatccaattttgtatgttcactgtttaatttcttattgctcatgtagagggtcaccagagaagagaaagaccaccaaatcatctgagacaagtattgtgcctttccagggtgatgaactaccagcatcatccatgtcttttccacctaaccaaagcttggaatctgcagctgtgagaaagggaaaatctaccaactcagcatctataggcttcaaaaggtcaagaagtggctcaaatcagcttgagcccattcctgtgtctagtgagcaaacatctcagcagccaattgcacctgtgaaggcaaaggtcaaaaggaaaaggaagcaaccagctaaaaaacaaggaaagaatctgcgcgctatcatttgatggttcagcaatgtgcacaagaagcaaaaaagggcagacccgactagtcctgcaatgagcacaagaagtaaaaaaaggcttaacttataatttgcatatgcctttcttttgaaccaaatgtggtgtatgtgaacctattgtaatgttggcttggttgtgtgtatctatgaacttgattgtaaggtatgcatgtgatcctttctgtaggtttgaattgctcatgtgaaccttatgtactgtttgaaattatcaccttgttgtgaacctttcttttgtgcaatgttcatgctggaattttaggaaaaaaaaa

SEQ ID NO: 29876 - DNA, 1029 bp, Setaria italica
  misc_feature (957)..(1029): n is a, c, g, or t
  Peptide Sequence Number=SeqID_95850
caccacaccacaccgtcctcctctcgtcgtcccgcgcttcacggctcggccagcagcgccgctttcccgcgcgtttcaattcagctcagaacgacgaacagcttgccgcgcggcgcgccgaggagttgttccttttctgatcgggtagctagctagctagctgatcggaaaacaagcaggataggatgatgtgcgacacggcggcggccgtgccggtggcagcgccgcggtacaggggcgtgcggaagcggccgtggggccggttcgcggcggagatccgcgacccggccaagcgcgcgcgcgtctggctcggcaccttcgactccgccgaggccgccgcgcgggcctacgacgtcgccgcgcggaccctgcgcgggcccctagccaggaccaacttcccctccgccgcctcccgcctcccgctggcatcacgccccgtcgcgccggcgccggccgcgcccacgtgcagctccagctccaccgtcgagtcctccagcgggccccgtggggcgcagcccagggcggcggcagggacgacggcggtggctcctcgaagcagcaggcggttggtaaagccgcgtcccccgcggaaggcggcgcccgaggccgactgccacagcgactgcgcctcgtcggcctccgtcgtggacgacggcgacgacgcctccacggtccggtcgcgcgcgccgctcgggctcgacctcaacctcccggcgccggtggacgaagaccacggcctccaactctgcacggagctgcggctctgagccataggatccaccaacagaaacagcaaaaaaagagaaggcgattttgctttggtcttcttttcttgacgagattctgattgacttagctgtgctcgagatagagcctgtacttctattctgtacgcgataagaatggcaatacatggatgatttcggaacaaaaaaaaaaaaaaaaaaaaaaaaaaannnnnnnnnnnnnnnnnnnnnnnnnnnnnnnnnnnnnnnnnnnnnnnnnnnnnnnnnnnnnnnnnnnnnnnnn

SEQ ID NO: 29877 - DNA, 305 bp, Setaria italica
  Peptide Sequence Number=SeqID_95851
aaaacccgtcaacaacgacgcctccttccttttcgtcgaatcaatcgagtcatccccgaccgagacgcgattcgagacgtcaggccgatggggatagaagccaaatgcggtggcctggccgtcgccaccggcgccacggtccggcggccgctgcagccgcgggacaccaacgtggccgcgtccacggtggtggtcgggaaggccgcgccgaagcccaaggcgaagccgaaggcggtgacgaggctggccgcttcgcctccgccgctcccgccgtcgccgccgccgccgccgcctgcgccggtggt

SEQ ID NO: 29878 - DNA, 281 bp, Setaria italica
  Peptide Sequence Number=SeqID_95852
ggcgacgaggcgatgggaggggaggaggaggagagggaggtgacgggcgccgtcggctgccggatgctggccgccggcgcggtgacgtgttgcgtgctggggatgggcgggaagacggtggagcggatgcggcaggagagcggagcccagatcagggtgttccggaacagggagcaactgcctccctgcgccgggccgggggatgagcttatccatataagtgggagcttttctcaagtacggaaaggactgcttgcagtttcaacctgtctccaagataa

SEQ ID NO: 29879 - DNA, 644 bp, Setaria italica
  misc_feature (56)..(56): n is a, c, g, or t
  Peptide Sequence Number=SeqID_95853
attgttctgtcctcttcatttgctcttttgggtatcaactcttccttcatcgatangttctacacatggggaatttgatagattgaatggaacagtactatatacattgaagccagcaaagaatggaaatggagaaatcagttctgaagggaagacacccattgctctacaaaatttttgttatctgcaggatagagacaaggtacaaatattagaaggattacactggaagcagtaattgtgctctcagtatggaatagaaaacagaaatgattaaagatcataactaacactttattgtacttacagaatattgatattaaaatgttatacaataggacagcaaatattgtctgtagttgtggttcaatcagagagcatgttttctcaatcgtaattagacaacaaacaataggccatggtgattatcaactaggtcaaatttgggaaagctgacaagtcaaatgaaaatgaatacaggattgataaaggagtgaggagattattgatgctacaaatacatgtctagggagcattaacacaaaccacttggacatatcacaatattgatgcaaagaacactacaatgatttttgatgggatggttaaattgaattcctgaagtttgcatcaaccaggaagac

SEQ ID NO: 29880 - DNA, 481 bp, Setaria italica
  Peptide Sequence Number=SeqID_95854
tttattcacccgcgcgccgaggtcctcgaacacgtagttcccgcgcggtagctcccagtcggcgccctccaggtgcagcgtcagcgccggcacggcgtggcggcgccagaacgccgtgacggggagcgcgaagcagaggtccaacgcggagccctccgccgcgccgctgagcggcagcccgacctgcgcagcgaactcggccctcacggcctcgtacaggtcctcggggagcgtcgtgatcgacgcgcccgagtcgatgatcgcggaccggcgccgcgacgccggcaacgggatgcgcgtcgagcccaccgagatggccttgagcgagaggaagtagagcgacggctgcgaggggtccctgagaagcggggtgctccggacctcgccgctgtgcgcgtggccgtggagcgcggctggcgcgccgccgagcgtgacgaggctgctcgtggactcgaacatggaggtgaagcagtaggagaag

SEQ ID NO: 29881 - DNA, 477 bp, Setaria italica
  Peptide Sequence Number=SeqID_95855
ccaccgccgctcccgccggcgtgctccggcgaggtggggttcgacgacttcgtgcactcgtacccgtcgtcgtcgttcgagcgcgccgccgcggcgggcggcgggtgggacgccgggacccagacgtcggtggccacgttcccgttctcgccgctgtccatgcggtcgacccacgtcagcatgtgacgactcgacaaccccctgggcccgcttgtaagaaagttgacttggtcagacgaagtggcccggaagcatgttttatatgttgtgctgtctcctgtctcgtatttttttcttctttttttttactgcactcagtaacggtgaacggcagagtgacagtagcagcctcttttttagcttcttttttttgttgtcgtggtttcttctagagaaaaaggctgttcaattttgggctgatgaatagtacaaaaaaaaaaaaaaaacaaactgacgacacgacaacggagggtagta

SEQ ID NO: 29882 - DNA, 768 bp, Setaria italica
  misc_feature (1)..(26): n is a, c, g, or t
  Peptide Sequence Number=SeqID_95856
nnnnnnnnnnnnnnnnnnnnnnnnnngtttaactaaacaccaacctgcaagattgtacaaggaattctatgtacgagttctcaaacacggtgatggcatcagcctatcggcctcactgccttcatcatcgtcccagacgctgcaaatggccgcgtctccggttcaacgaacacgaaaaagttctcatacagaacacagcaccgtctctgcgcacccactttgctcctctactgcccgagcagcctcttgactcccgacttctggtccgccgtgagcctcgacgggaacttgatgtcgaacttgatcctgaggttgcccttcctcgacgggtccttggggatcggcataccctcgccgcgcaccacctcctcgtaccccgggtggatcaccgagctgatcggcaccgtcaggctgcgcccgtccagcgtcgtcaggtgcgcggtgtaccccgtcagggcctcggccagcgggatcttctgcgtcaccaccaggtcgttgccgtcgcgggtgaacaccgggtgcggcttctcgtcgatgatgaagacgaggtcggccgggatcgtgttgggcgtctcgttgcccttctccgggaacgtgatcttggtgcccttcttccacccgggcttcacgtcgatcgtcaggatctcctccaccgggatcgtcttcccgctggcatcagcgatttccctagaaatcttcatcttcttggtggtccccttgtacagctcctccaggctgcaacggcaggcttaccgacatcgcggcgcc

SEQ ID NO: 29883 - DNA, 237 bp, Setaria italica
  Peptide Sequence Number=SeqID_95857
gatccatgagctttgccatgtcgaccacaggcagctcgaacgcctcaccatcgctgacgaccgcgccggctgcctggagctcgtcggtccggatgaacctctcagggatctgtttgacggagttggtgctgaacaaggtcgcggcggcgtccgtgatcctatccctgctgatgagcttggcggcagcagcctccattgcactccgcgttagtacctgctaattgggcgcggcacggc

SEQ ID NO: 29884 - DNA, 371 bp, Setaria italica
  Peptide Sequence Number=SeqID_95858
ttgggaattcaggaatggctgggccggttataaagggccagatggttacttccctaacggtgttggtggagtcctttcgggatcagcaaccctcttcttcgcgtttattggcttcgatacagttgctagcacggccgaggaggtgaagaatcctcagcgcgatcttccactggggatgggcctgaccctgtccctgtgctgcttcctctacatgatggtttctgctgttgtggtcggtctggtgccgtatcacgccatcgatcctgacaccccaatttcttctgcttttgcacaatacgggatgcagtgggcagagtacgttgttgccagtggggctgttcttgccctcatcgcatccctgataggcggca

SEQ ID NO: 29885 - DNA, 671 bp, Setaria italica
  Peptide Sequence Number=SeqID_95859
agttcaatggacaacaacaaaaaacaaaaattaaacaaattgaggtgccaaaaacataacagaaatggccatacacgtcgaatccattgtgtgacggggaaaaaaatctacgctgcaagttcaacactgacttcaaaattacccaacgcttgttcaagaccaactccaaattacttgatgtttgatgcggcaggttggttcagcaaattatccgtgaccctgcagcctttgcacacatgacaaaagcagctatcatttccctgtgcttccctaatgctacaaactaaaccatccattcatcccacaaggcggagacaagacacgcatccaaagctctcacgaacttgggccaggtgatgcttgcctcagcttggttcgtagcagcagatccatctcatctgctatggctttctttttcgtggccacctcgagcagttcatcaaaattcgacttcaataaattaattttcctttcacagtattctttcccttgatccatagttttctcaatgaagtaaccagtgccgacgtcgacgaggaccttctcggcgtcatcgagcgagccgggcacgtaaagggacgccgtgagcggcacaagcatcttcttccctgcacaccggagacctaggtcctgcagagcggaggaggcgttctcgagggcggggtgatggc

SEQ ID NO: 29886 - DNA, 390 bp, Setaria italica
  Peptide Sequence Number=SeqID_95860
tggcttcttcccagccgaagcctccgcgcccacggtttccacccccgtctccacatccccacactcccgcgccacttgcaccgcccggtttccccgaagcgcctcgtggcgacatctatatagccgcgtgctcggaggtcttggccgccggctacgacagacaagccaccggagttcgaggggaagacaccgaagaggcgtagcgcgaaggaatttataggccacggaatgggcggcgctggcgcggcggggaagcgcgggatgcggtgcgagctctgcgggggcgcggcggccgtgcactgcgccgcggactcggcgttcctctgcctgcgctgcgacgccaaggtgcacggcgccaacttcctggcgtcaaggcacacaggggatagg

SEQ ID NO: 29887 - DNA, 1091 bp, Setaria italica
  Peptide Sequence Number=SeqID_95861
ttaagttttcttccaattcaagctctcaatcactatgctttttctaaagcatgatccagtaactatttcaaagaatcactaattgctcagccatcttgcatagtctccaatagcatcaagatcacaatcttctgttattccaagatgatcaagtaaaattcttataccaccaccctttgaagcactgagtgggacaatatcaatcatatttggctgcattttgagaacacgtgctttcccttcagtcagttctgaacaatgctgcctcaggactgatgaatcctcttcagcactgtcaaagagtagcaacttctgaatagatgaatattccagaaggtcctcaatagaatgcatcacttttaccttgttctcgtgatgcacagtgtgcagcaagttaacaaatggatgttcaaacaaggtcaaacattgttccttgcagtacgcaacaacaggaattttatgctttaaagagtacagaaatgcctccttgcagatatctacatccaattctgctttataaacttcttggccatgccttccatagacaagtgaaccctgtaaaaatacaccaggtgatgtctctgatacaaaatcacctttatcatggaaatcaagaagcttcaaggttctaatgatggaagcccggctcttccgagtaaccatcataacatttactcctgttacaattgcctctctcaatgattctattgattcttcatgcaggcgcccgtcataatccacaagagtaccatctatatcacaaattatatggcttaatttggtccgagtttcctctcttacgtgcagtttctctatattgttattggcctcaacagaattttgtaaatgttccatattggtagcagtgtcatatgcactcttaattaatccctttcctttccactcaagagtatttaatacatgttcttcttccctctccatctcgacttcagcctcttcactgagttcatgatcaaagcccaataaatgcaacaatccatgcaccatgagaattcttatctcatcaagaagtgtgtggcctctttcttctgcttgccgccgtgaatgggaatatcaagccctgggatatg

SEQ ID NO: 29888 - DNA, 853 bp, Setaria italica
  Peptide Sequence Number=SeqID_95862
atgctttatttatgactattcaaagtacatttcatctaggatcaacactaatttcttttatgccacatttcatgagccatatgaaggtcgaacatttttaatggatggaatgagaaagggtgaatcataatcatcaaaactcaacatcgaagaaaatacagttatctttatcataatgcctccatcgaattcctactcatcaatctacaccagtattcttttcataatgaataaatacccacaaagtagaggagccatttacacacatactgagcaacatttagcagagatacacaaaacacaactatacaaaattctacggagggtcaaaattgttatgaactaatgatggtgacttgtcacatggctgcggcccattcgattctcctttcacacatctcaacagaaggatcttaacgaaatatttaagttgccattcaccgccctcttagccttttttccaaaatataaaaattgccagcctaaaaggatgtgctatgaatttatgatttttgcacccttcaaataaacatgtccaaagtgatcattctttatcttttggtgcatgacatgcataccttctctaacatctaaagctctcaatcactatgctttttctaaagcatgatccagtaactatttcaaagaatcactaattgctcagccatcttgcatagtctccaatagcatcaagatcacactgcagaagaatattcgtaagaagactgtaacgttagcacttggcacttttttaacagaggacaccacaaagattgagataaggtacaaaagatgaacactaaatatagttcttcgatgggaataaatacttacatcttctgttattccaagg

SEQ ID NO: 29889 - DNA, 433 bp, Setaria italica
  misc_feature (13)..(13): n is a, c, g, or t
  Peptide Sequence Number=SeqID_95863
gcataggaaatanatgaatactgaaaaaagtccaaacgaacctataatttggaacggaggaagtaaaagtcacagaaaataagcaaagaaccatgagccggtatccattgcctgaatttgaaatactaaagaaattgctaaacaagaagaaaaaatgaaccatgagctccatagtaactattcagatgatttcccgatagtaacagcaaagtctaagaatgatttatctgagaagatatgaaaaatataaagagatgtgatgcaacatctgtagttggtttcagagtaacaaaactagccaggtacctcagttattcaagtatcatacatctcaactgattcagaaccttagaaacaggaaaatgaacacatttttgtcatgatgatgacaaattataactttggcaaaaagattggaacagattgtctaagt

SEQ ID NO: 29890 - DNA, 390 bp, Setaria italica
  Peptide Sequence Number=SeqID_95864
ccggatagcatttttgacaagagttaaaaatattttgacaacacaactttgacaaaaaattgcataatttaaatatggccagactttgacaaattctgagaaaattttgatagcattacaacagcaactttgatagccaaatcaaatccagcacatcaatccatctccctcacggtaccaatctctcttagcggcagccaaaaatcaataaaatttctttcccaaaatcccaagcaccagcctccgttcctctcacaggagaaatcaacaagaatctgccaccaatccagagcagagcagagagcaccattcggcaggcccatggacgcccccagcccctctaagatgatctcatgccacaggtggagcacctctatgagcataccatcc

SEQ ID NO: 29891 - DNA, 232 bp, Setaria italica
  Peptide Sequence Number=SeqID_95865
cccggccatgagggggcgcagctagctagcctagcctagccccggcctcggcttccctcccctggcggcgtgctcgtcgggcccggggagtggagagaaggcaggtgggggcgggcgggcgggcgggagggtagtaatgggtggcagtgtgggagcgaccggcgacgcccgcagggcacagggctcactgcgtctgcgtgcgcggcgtcgtgcgtggcgtgggggtggaaga

SEQ ID NO: 29892 - DNA, 478 bp, Setaria italica
  misc_feature (19)..(19): n is a, c, g, or t
  Peptide Sequence Number=SeqID_95866
gccttttcaacagaacacngaaaaatccttcgttccaatcaatctttcgatagtccagttgcatccatgatggttcagctcaacagagataaaatctggcagtaactctaatccgcggggggagatactatcgattcatccctcaccacaccacgcttacaaaacacaagaagaatgtaaaagaaaaaacagaacattttcttttgttttgcttcgttattaggctccacctatctgcagagcgggttgttgggcgtgccgcgtccgacctcgtcggcggcgtactcgacgctgcagtagcagaaggcggcgtccttcttgttcttctcgacggccttgaggatggtctcgaagacggggacctcgcaggggatgcggagcacgccctcctgctggaacccgaactcctcctcggcctcccgcagcagcgccgcgaaggcgcggtgcttgaggtactccattgggatcacgaaccgct

SEQ ID NO: 29893 - DNA, 2690 bp, Setaria italica
  Peptide Sequence Number=SeqID_95867
ttctatagcgaactaaaagatttctttaatgctggcagcctactggagcaagtggagtccatcaaggaatctttgagcgagtctgccttggaggctctctcatcctttatgaagaccaaaaagaatttggaccaactggaagatgcaaaagaatttggataaaattggcggcagtcaagttttgctgaagaccttgcaatcattatcttctctaagatcatttctaatgaagggtcttgaaagtggccttaggaatgatgcaccagatactgctatcgcaatgcgacaaaagtggcgtctttgtgagattgggcttgaggattattcatttgtattgttaagcagatacatcaatgctcttgaagccttaggtggatcagcttcacttgcacagggtctagctcgaaatacaagtatatgggacgatgcccttgatgcccttgccattggcatcaatcaagttagcttttcgggttggaaaccagaggagtgtattgctatagggaatgagcttctttcttggaagcagaaaggtctatctgaaactgaaggcagtgaagatggaaagtatatttgggcattaagactcaaagccactcttgatagaacaagaagactcacagaagaatactctgaagcgcttctttctatattccctgaaaaagttgaggttcttgggaaagcccttggaataccagagaacagtgtgagaacatacaccgaggctgaaattcgtgctggtgttatttttcaggtctccaaactttgcactgtacttttgaaagctactcgagcagtacttggatcgtccgtttgggatgttcttgttcccggagtggcccatggagctctgatacaggttgaaagaatagttcctggatcattgccatcatccatcaaagaacctgtcgtgctagttgtaaataaagctgatggagatgaagaggtcaaagctgctgggaataacatagtgggtgttattcttctacaagaattacctcacctatcacatcttggtgttagagctcgtcaagagaaagtcgtatttgtcacttgtgaagatgatgaaacaattgcgaatgtgaggttactagagggaaaacatgtcaggttgggagcatcatccagtaatgttgatctatcagtagtttcaaatgacgatggtagtgctaccatatcttcagatccatccagtggaggaaatttatttgcacgagagttaccaaaagaattctcaccaccactggctacagacaagttgttagatgtgtctaagccaaagagctatacttcaggtgtgagtgttatggctggtgtgctcgagctttcagaggcatcagtcgaatcatctggtgcaaaagctgctgcatgtggaactctttcagttctggcctcattgtcaaataaagtttacaatgaccaaggaattccagcagcattcagagttcctgcaggtgctgtaattccatttggatccatggaggattccctcaagaaaagtggatcactggaatcctacacaaaccttatagagaagatcgaagcagctcaaattgaaaatggtgaacttgatagcctatcctcagagcttcaagcaatgatttctcttctttctccatccaaagaaatcattgagtctttgaaaaatacattcgatcagaatgctcgactaattgtcagatctactgctaatgtggaggatttggctggtatgtcagctgctgggctatatgaatcaattccgaacgtcagcctctctgacccaagttccttcggagctgcggttggacaggtttgggcatcattatacacaaggagagcagtccttagccgtcgagcagctggtgtgcctcagagagatgcaaagatggccattcttgttcaagaaatgctgcagccagatctctcctttgtgcttcacactgttagcccatccgaccatgatcccaagttggttgaggccgaggttgcccctgggctgggagaaacccttgcttccggaacccgtggcaccccatggagactctcatgtgacaagtttgatggcagagtcaccactcttgcttttgcaaatttcagcgaggagatggtggtgctcacctctggtcctgctgatggagaagtggttcgtcttacggtagattacagcaagaagacattatctgttgatgcaacctttaggaggcagtttggccagcgacttgctgctattgggcagtatctggaacagaagttcgggagtgcccaggacgtggaaggctgcctggttggcaaagatatctttatagtgcagagcaggccacagccataataaataaagttttgctaagatgaatgtggctacttggttaggtaaataaaatggatgcatggctggagaaatttatgggttttgtggcatgcatagcagtggttaaatttatgggttttgtggcatgcatagcagtggttcaagtctttttttaacaccttgcctcaggtaaaataatgagttggcccaggtctagccattctcttggatctgtttatgtgaactaacaaactcgagtattgtaacgatgtatgatgcaatatctagttagggagaatgcacccattgttgtagccacttcaaatagcagtgaccgcccatggaaaaaggacttcattcaatctaatacaagcatgttatatgtggttaaaaaaaaaaa

SEQ ID NO: 29894 - DNA, 449 bp, Setaria italica
  misc_feature (100)..(100): n is a, c, g, or t
  Peptide Sequence Number=SeqID_95868
ggtgatgagcatgacagttctggcagatgattgatcatatttgggatgattacttgcattcccccagtccatgctgctggtattttctcaatccagctancttttacaccgttcgattccgcaacgacgctgaaattagcagtggcatcacaacctgccatcctccgagcagccaagagtcattacgacgcattgctcgtggctgaacaaatggatgtttatctgaggaagtcggggcagtttgattctgatccagccattgaggaagctgtgggtacacctcaagatctctggtgggtgaagcacgggactggcacgccggcgctgcagtcatttgcgggtctgatcctaggtcagacgtgctacggcgtgtccaggtacaacctcgacaggagcttgtcggagaggctgcacaccgagaagatggcctacaccgagcggggagagta

SEQ ID NO: 29895 - DNA, 586 bp, Setaria italica
  Peptide Sequence Number=SeqID_95869
atactccggcgccgcgccgacacaaccaggcagcgcgccagctcacctcctcctctcccatcccaccacactctacccaccgccccctcccaaatctctccgccgctcccagatccaggatgtcctcctccgaccaggacgacgcccccgacggcggcgaggactcgcccctcttccgccgccgggggtccccctcctccggcgccggcggcgttgccgacgtccccgtcgcgcagtcgctcatcaaggcggcaagcaacgtctgcttctccctcttcgtgctcgccgtcctcgtcgtcaccgtcgtcgccgtcacctaccagccgccggacccctggctccagtcctccgccgccatcaccacctcgctctcccgcgtcctccccaactccaccttcctcgttcccgacgactcgctcctccccaccggcgaggacttcaactcctcctcggccgtcccggccccggcgggcgccgacgccaaccaggacgacgacggccgaggcgaggaacatcaagacggcggagaagaaggacgacgcggtggtgcagccgcagaccttcccgcccttcgaccgcctcggcg

SEQ ID NO: 29896 - DNA, 425 bp, Setaria italica
  misc_feature (362)..(425): n is a, c, g, or t
  Peptide Sequence Number=SeqID_95870
ggcgtggccggggcggcacctgctggagggcggggagcaccggcgctacttcggcctgcggacggcggagcaccgggtgatcgagttcgagtgcggcagccagcgggagcacgacatgtggaccaagggcgtcgcgcgcctcctcgccattgccgacgcccggaagcgcgccgtctgatctggcaaccgtcgtcgatgcaggtggcagcgacggctgatcacagggttgtcatgtagctatagctaggggtctcacactctcactcttactctcatgtcgcggctgtctttagagcagggatcaggttaacgcgtggagtcccatctctcaggaagaaatcgcaagtgctttgatgtaaagnnnnnnnnnnnnnnnnnnnnnnnnnnnnnnnnnnnnnnnnnnnnnnnnnnnnnnnnnnnnnnnn

SEQ ID NO: 29897 - DNA, 623 bp, Setaria italica
  Peptide Sequence Number=SeqID_95871
cgacgttgaaggcgagggctctgaaggaggtgtggaacatcgcggcggtgatcccggtggagaagggcgcggtggggggcggcgggcaccaccagaagcacggcgcgctgccgaagctgcagcagcaccgcaagctggagagcaacggcagcagcatcagcgacgacgtctcgctggaggaggagaacaacttcctgggcatctgcagccaggagctgctcgcccgcggcaccgagctgctcaagcgcacccggaaaggcgcactgcactggaaggttgtgtcggtgtacatcaaccggatgggcctggtgatgctgaaaatgaagagccggcatgtcgcggggacgatcaccaagaagaagaaaagtgtggtaatcgacgtgtgccgggacgtcccggcgtggcccggccggcacctgctggaggacggcgagcaccggcgctacttcggcctgcgcaccgccgagcaccgtgtgatcgagttcgagtgcaccagccagcgggagtacgagatgtggaccaagggcgtcgcgcgcctcctcaccatcgccgacgaccggaagcgcctcgcgtgaccccgccatgacctcgacggtcgccatcgtcgtcgccaacctgtctaa

SEQ ID NO: 29898 - DNA, 319 bp, Setaria italica
  Peptide Sequence Number=SeqID_95872
atccaagaggagcatctattaaagtgatctctcttctacttgatctccgttcttgtccctacagcgaagggtgtggttcagctcagcccacccaaagcggggttgcttgtgctacaactcaccatggccagcggcacgaccgccaccgccgacacgacggtgccgcagccgccgccgtcgcaggggaggctcatcacggtgctgagcatcgacggcggcggcatccgggggctcatcccggccaccatcatcgcctgcctcgaggccaagctccaggagctggacggcccggacgctcggatcgccgactacttcgacg

SEQ ID NO: 29899 - DNA, 370 bp, Setaria italica
  Peptide Sequence Number=SeqID_95873
tcttcctccagcttcctcaatgctcctctcagccccaaaacaatgaatagattggtaagagtaagcagcgattctgcactcccgtgcagccagtcgacattagacagagaggttccataatgaacttttgcataaatcccagcaggtactgtggtggcgccgacgaaggcgaggaggaagtagaatccgaagagcgtgagcccgggcgcggtcttggacctggtcatgaagtagaggaagcccaggtaggggaagagcgacacggcgaagagctgcgacgccacgctctgggagtccatggtcggccggcccaagggtccacgggcagcagcccgcaccgcaccaccgcggccctcctcggcgccatctg

SEQ ID NO: 29900 - DNA, 776 bp, Setaria italica
  Peptide Sequence Number=SeqID_95874
gaatactgaatagttatcccagtggaaagtgtagtaccatagatcgttacacagtgctgcaagaactgcggtaactcccatgttctggatcaccatatgcagaaagaaaatctgcgagggtttctatacataatccttactggctagttgagcagaagaaatatatgtactcctacatctctagatgcacaatcagggtacatatagatagaactgtctagacagaacttttttctttactgtcttgagaagcttcagaaatgctctcctttgtatcctcttcctccagcttcctcaatgctcctctcagccccaaaacaatgaatagattggtaagagtaagcagcgattctgcactcccgtgcagccagtcgacattagacagagaggttccataatgaacttttgtggtggcgccgacgaaggcgaggaggaagtagaatccgaagagcgtgagcccgggcgcggtcttggacctggtcatgaagtagaggaagcccaggtaggggaagagcgacacggcgaagagctgcgacgccacgctctgggagtccatggtcggcgcccaagggtccacgggcagcagcccgcaccgcaccaccgcggccctcctcggcgccatctgcctcgtgctgcggacgcgtgcaccgccatagccgattcctaagctcgccgaggggagcagccgcgaccgcgcgcacgggcacggcggcgcgccgcaggcggtcgccagcatttgggcgtgggggagggagggaaggatggcttgccggatt

SEQ ID NO: 29901 - DNA, 275 bp, Setaria italica
  Peptide Sequence Number=SeqID_95875
atgcctctcgcctccccgctcctcctaccaggcgccgccgccagcccggccgcgcccccgtggcgggagcaggtcaccgtccgcggcgtcgccgtagcggcggcgctgggcgcgctgctatgcgtggtcatccaccgcctcaacctcaccgtcggggtcatcccggcgctcaacgtcgcctcgggcctcctcgccttcttcctcgcggcggcgtggcaggccgtcgccggaagactagggttcggccgtgggccgcccttcaccaggcaggagaa

SEQ ID NO: 29902 - DNA, 264 bp, Setaria italica
  Peptide Sequence Number=SeqID_95876
acgggcgccaaccccagcagtggcggtggtctcggcctcctgctcctcgttcatggccgcccgcttcctcgtacacctgctcctcctagctgccgccagcgccgtcgccgtcacctcggccgcagcctcggcttccctcgccaccaatgccaccgcgggcccgctcgcgcccgcggctcccggcggcggcgacggcaatgtcaccgggttcagcttctcacgcttcgtcggcgcgaaccgcggcgccaacgtgacggtgctcgg

SEQ ID NO: 29903 - DNA, 1053 bp, Setaria italica
  Peptide Sequence Number=SeqID_95877
tctaagaagaatttggaattggagagccaacattccaagaaggccaatcaaacacaagacatggaacctgctggtggtggaaattcagatgctgaggatctggagctgattctcaggcagaaagctctcgagaacttcagaaagttcagggcagcagcggcaggtaaaacagataccaacggagctacagggaaggaagcattgatagatggctcacagaatacaggtacagaaattgctgaagtaaggtcttctgctgttaaccattttcagtggcagggaagcagccttgtaatgaaaaattctgctggatcacctagatcagaggattgtgggaatgctacaagtcattcttggaagcaggaaggcagtgctggcatgagtcatggggctgcatcacctggaatacttgaggctggcgagatcggtggtgcaactcaacagaaaggaagaacagtggaggcaactcattcaaattgtcagtttaggtcaccacaggatggtaggaacagtcttagtgtaatgcaaaggttggagagcacgccagggagttgtgcaggggtgttaggaagcagtgcaggggtgagtcatgtgaatggagctccaagggtcagatcagttgtgagcataccggccagggaaggtcttgatggtagcacatataccacgccccctaggcccagtgaaaattctgctcctgttgaaagcagtagcgatgttgggcggcctctgattgacattaacaaagctgaaagaactaatggagatggcagaaagacaagtgaagcttcagcctctaatggttctattttgtcacctgctgagggcaagagccagattaggaccgaggataaagatggtgctcagtttcagaagaagaccttctctagaatgcatgatggagagacggtggaggtcagctacaaagtgtacataccaaagaaaaccccggcccttgcaaggaggaaactgcagcgctgaaaacttcaagaaaatttggatgggaaaacgtcaagaaaatcaatctatagttgtccttagttcactgtctcc

SEQ ID NO: 29904 - DNA, 347 bp, Setaria italica
  misc_feature (324)..(347): n is a, c, g, or t
  Peptide Sequence Number=SeqID_95878
gggcccggccggcccctcttctagacgcatcttggaaagggatgcgcacaatgagctgagccaatggatccagcatatctgcccgcaatttcatatgtgcatgagcgacgacgtcgtcgtttaatttggtgatcttgacatcacttgtgcttgaatgtgatgtggagtgtgtgcgggagcgatctagtttatttgaagtgtcagctgcgaggagatcagaagcgtcgtctatgctactcttttgtgtacgctgtgctgatacatattgaacaaaaaaactcagaccgcatggagatatgacactccccttggctttgtaaactnnnnnnnnnnnnnnnnnnnnnnnn

SEQ ID NO: 29905 - DNA, 391 bp, Setaria italica
  Peptide Sequence Number=SeqID_95879
tgtgtttaggaaatcataacctgcaacgaattcatttgtctttccttctccactacctccacctttttgtctgtaacccttaaatagttcatcatttacagccgatgcactctcacgccataatgacaagccctgaatgcagtctgcgttgagctgaaggggtatgggcccagcattggatgaaactgtctgtgatgaattggacaaacactgaggttgtaccagatacagcttgttccctgggataaacaccggctctattaactgtgttgtccatggccacgtgtctgaaccagcgacaatcttggcgagcgcatcaagataattcgtgaaattgaacgaggaagtcgaaggaaacagtccacccgaaagactttcagcaagcgagcgg

SEQ ID NO: 29906 - DNA, 352 bp, Setaria italica
  Peptide Sequence Number=SeqID_95880
accaagcttactgacgaacacctttatgagcaagtccctgggcaggggttcctggccttcaaacatcagcggcgcgagcagcgccgacacgaggacctcctcggaatcggcccggcggcgcaggagcaagtccccagcaagcggggcgtccgatacggtgacgaaatcaggtgcgtcctggcaatggaagggagggggaacggagggggcggatgagggaagctcatgggcgagctcggcccgtagggcggctaggacgccgccgtcaatcgcgccgcgacggagggcggcggaagttctgagccgccgcaggaacatcgcgcacgacggcagcgtcctgaactcctgatgc

SEQ ID NO: 29907 - DNA, 574 bp, Setaria italica
  misc_feature (24)..(24): n is a, c, g, or t
  Peptide Sequence Number=SeqID_95881
tgcgtgtacacggtctacgttcanacggggtcgatctgaaggccgggacggactcggtgatcggcctgggtctccgcgccgccgacggcgccggcttcaccatcccggacctggccaagtgggcgggctcatgggcgccggccacgactactacgagcgcgggcacctcaacatattcagcgggcggggaccctgcctgccgtccccgccgtgcgggatgaacctgacctccgacggctccggcgcgcaccacggctggtactgcaagtccgtcgaggtcaccgcctccgggccccgcgcggcgtgcgccagggccgcgttcggcgtcgagcagtggctcgccacggacgcgccgccgtaccagctccacgccgagcgcagcgtctgcgggaagagcgacgcggcggaggagtgaactggtttatggtgctgccgggaccggatgtcatacgtcagatgtcactgtggttagccgtaacttacaggggtgtttgtttcacgggtcacatctcggatatttagatactaactagaagtattaaatataggttaattataaaactaattgcacaga

SEQ ID NO: 29908 - DNA, 230 bp, Setaria italica
  Peptide Sequence Number=SeqID_95882
ggtcaccattcatcaagagaggaacacatttagcgcatctgacgaacttgaagtgcacatcatacagagtgcacgacatcactttccctgtcactcaactactgtaattagtaactacgcacgcatgcgcttacatcagcagcagttcttgttttgttgtgtttgtatacagccgtcgatcggcagacggcagcaggtagcgctcgtccggacgatcagtagtacttcct

SEQ ID NO: 29909 - DNA, 967 bp, Setaria italica
  Peptide Sequence Number=SeqID_95883
cgtacgttacgtttcttacgttttttttttttagttttttttttgtttttttttttttttaggaaattaacggataagtatccaataccatatcatatcatatgatacaacagcgtacggataaaactctggagttctgaaacggacagagattgacacgtcttccaaacctctgttgcgcgcccaacgtgctagtgcaacttattcagctataggtggcgttgatgaagcaaagcgtagctacactagaatcaccagccgtctctacgcagagtggagctgctcacggcgggccttgttggccgcgacgagcctgtccctgtcgggcagggccgccttcaacacgtccacggcgaggatccggtcgaaccaggccttcatcagcggcagctcctcgtcggtgacgatgctaacgccgcacacctcctcgacgaccggcagccagtgcgcgaaccacccgacgacgatgtcgaggtagcccacggcgtcgccgccgaagaacttcttcccctccagcgccgtctctagggtcttgaggcactgctgcgcctcctgcgccaccttgcgctgctcctcgccggtcgcggtgaagatcgggtacagagcggcgttgcacttgtcttcagcgtacctggcccagaacctggcctgagcacgctcgtaggggtcggccggcatgatggggtggccgcccttccaggcctcgtcgatgtactccacgatgatggtggactcggcgatgggcttgccgtcgtggacgagcacaggcaccttcttggtcaccgggttgtagcggagcaggtcggcgctcttgttggccaggtcctcgtcgacgtactcgtactccacgcccttgagccggagcgcccactccacccggatcaccatcgggctcgcccacatgccgaacaccttcacgcccttctctgccattgctggagctccgctcttctgctgcttgtctgct

SEQ ID NO: 29910 - DNA, 236 bp, Setaria italica
  Peptide Sequence Number=SeqID_95884
cctatgaatggcattcatactggtagcaatgcaatcatatcgttttaggcttgtccagcttcttccatcttagcaagcgctgccatttcttccatcttagcaacaacagaatcggacagaacacatgggaaacagcaagtgttcttgcagagtgagtcggagccacctgcagtaatacaagacaaaacaacatgtcttttcggcccgggcggatacgcagcagctgcacgtgtcgg

SEQ ID NO: 29911 - DNA, 383 bp, Setaria italica
  Peptide Sequence Number=SeqID_95885
ggcctttatcacatcccataccctattgacctcgctcaaattgcctactgaagcatagaggctcataaggaaatcgaaaggttgcttgccatcatcaacaccaacaagcccttcaagtttcttcaaagcagactctgctttttcaaccagaccagcatttgcataaatagaagcgagtgtgctatatgcagaccacccaagagccacatccttctctaccatttctttcagaagttcttcgatagcatctatcttgtttgatgatgcatagctggtcatcagaatgcagcatgtgaggttatccggtttaacattcttcaccttcatctccttaaagagactgtcaaccttcccatgccggcctagcttcatgtaaagggaca

SEQ ID NO: 29912 - DNA, 1053 bp, Setaria italica
  Peptide Sequence Number=SeqID_95886
aaagcatcacttttactatgacctgctgtagatgtcctgtgtaaaatgtgagaatacatcgttgtgtttttggactcaaatttctggaaggctttacaaggagcgtccttccacagccaccagcaaagagctgaactgatatttacatattattactctcaggaagaacaaagttacacgtacaacacttgctagcacacaaatggctacaaaatcgccagtaaattctatcttacaagttcttattgcactttgcaaaaaaggcatcaataggaatatgttttccttctttggaagacttcagctttttcttgggtgtgggtgtagtagagcatgatctttcagcgagcctctcgttagaaatgggtcttttactatccactgtttcttcatgctgtagcgattcagccaaatgaaaatccgaatgttcttgcctctcctcctcaaatcctggaggtagttcaaacccacaaatagagcaaacgtagtcatcaatccataactgctgaccaggtttacttgatgaagctgtagcttcatgactggtcaactggcaaacatcatcaaacttctcagcattcataacctttgcactgggagtgacatcatctagctttgcttcacctaaggcatcatcaataactgggttgcttaagacagcctcattactgtaactgactaaattcctttgttctggaatgaaaatgctctcatcgtgcacaaagaaatcctgttgatctgtcgacgcactagttccagcatcatgtaccaagtactcatccttggttgtcacactaataggactaatatcctgccctgaggtattagtgctactctgaacatttgctccattgacatttaagtcattgcctgatgagcgaaaaaatatatctagcgtcttttgtgttgaagtagatgaatcatccttctcatcatgaagctgagacatccgcaaccccatcaatctcaaagaaagaggcatttcagccttaagcaacttcgtagcatagatcaggatgtcttccttggagttgatgtatcctcgtgtagtta

SEQ ID NO: 29913 - DNA, 389 bp, Setaria italica
  Peptide Sequence Number=SeqID_95887
tggtgtccaggaacacagcgtcagcacggacgaactccagcaagtaaggatcgtgcgtcatagactccgtgtaacggaagtcaccagtgtgcacatacctctcggtgtttggtccaggggaggagaagaggaactggacggcaccagggcagtggttggcgtcgacggcggtgacgccccacccatcgacggtcacacggacaccgagatcgagggcgacgacaagctgcggcggcacggagagcacggaagagacgaggcgtgccgtgggcgcggagcaaaagatgaggccgcggcgccaggacggtgctaggccgccgtagtggtcggagtggaagtgcgagagaaagtaggcgacagagaagtccccggcgtggcggaaggcgtcg

SEQ ID NO: 29914 - DNA, 356 bp, Setaria italica
  Peptide Sequence Number=SeqID_95888
ggaacactgacccagcctcgccggtcaccggtcaccaccacaccctccccacccccacacactgcgtgtgcatgcactgagctgagaagatgagaacttggcggattcccccgacagctacgtgtcacccgcgcgcgccgatggacaatcagccatggccatcgcttgacccggcctgcctctgcctggttgcccatccgcccagccatccttcttgatatactccagcgcaccgagtcgagccgggcacagccacgcaccaccaccagcgccatccacggaagaacgagcacggcggccctgctcatgcatggtgcagcctattagctccccgccgccggcgacgacgccaccaa

SEQ ID NO: 29915 - DNA, 601 bp, Setaria italica
  Peptide Sequence Number=SeqID_95889
gatgaagaggatgaagatagctttgttgtgcctgacggctatctctctgacaatgaggggatacagattgaaagtctattggatgataaggatgaggaagccattagctcaccaactggtcagtgcacagaagttgaagaattcaggtccctactgcgccagcaaaaagtcctgaacactttgactgagcaggctcttcggaagagccaacctcttgttatatccaacctaaatcatgaaaaagctgaattacttactgctgaagacatcaagggaacagcaaaggttgagcaactatgtctgcaagttctttcaatgcgcatctgtccgggaggtgtgattgttgatgtgcctacaattgacaactcatctgcaagtgctgaggaaattaaccagtgcaatgtgaaaaatggctctcctgggtctgcatctgcatctgctataccagaaacggacctgccagaaattgttcaggtgattcgatcatgtcgagagggtatctacaaggtggttgaattgctgcagcagaagtttccaaatgttgcgaagtctcaactgaatcgtaaattgagggagatatctgactttgttgataatcact

SEQ ID NO: 29916 - DNA, 460 bp, Setaria italica
  Peptide Sequence Number=SeqID_95890
tggaagcattagcgacgctccaagaaagaaagaaaaaacggtggcctcttgcagcagccgccgccggccggagtagcgcctaccgcttaagcaaggaccggaggcgaggcgaagcgaagcaaagggaagggatggaagcgcgaggcagcagagagagagcggcgcggctcctgaggctgtgggtggtggtgatggcggcggcggcgggggcgcgggcgcagctgcaggtggggttctacgacatgctgtgccctgcggcggagatcatcgtgcaggaggaggtcagcaaggccgtgtctgggaaccccggcgtcgccgccagcctcgtccgcctccacttccacgactgcttcgtcaggggctgcgacgcgtccgtgctgctggactcgaccccgggcaaccaggcttaaggacgcgtcccgaacacgagcctccgggcttcgaggtgatcgacagcgcc

SEQ ID NO: 29917 - DNA, 397 bp, Setaria italica
  Peptide Sequence Number=SeqID_95891
aacacatgagcattaattgtattgctttgctgaccctactagtgtttactagctatatatcaatgtccatccacagatatactatgatccaaatagggttactatcatccgcctcaccgatattactccaggaaagttcacacaaagcaaatatatcaatagggtctccgaccctcacagtcgtcaatctgtgctgaccggacctaggactattcattttagacttaacacgaaaactcacaccttttgaggttttccataaaaatcattattcagtggaatggccgaggcaacatatccctacaataagtccacattccaagcagtgccctctttcaggcaaagcatgtggagcaagtctacttggaaaaggtcaaaaacagagagagcaaacaag

SEQ ID NO: 29918 - DNA, 595 bp, Setaria italica
  Peptide Sequence Number=SeqID_95892
gccgctgccgctgccgcgtccgcatccggtgtccagtcactctacctcctggtcttgctcgaaaaaggcacaaaattatggggcatgaccatatgtctcgcataaagatgcatatggcagaaggttctcttgttgacaggaaccgttgccagcaacctggttgcaacgaggttgttgatggaagggtaatgtactgcaaagttcacagcggggagctgttacgccaacagtacagtcacctccagaatgcacaggggagctcaggtttattggtgccttctgttaatgacagcccatttaagggacctgtttccagtgctgtggcatgcactgagcaagaaatacacatcaagcatgaaggggatgatcgaggtaaactaaaggatagttttgggaacactcagggtcagactacgcagttggtcttccgtggggcagggatgctttgtaagcacgaaaactgtagcaagcaagcacaggagaactcaatctactgcaagttacatagtggtgttagcaaaggttgcatggtacggggctgtacaagaggtgcacatggaggcacacccttatgcattggccatggaggagggaa

SEQ ID NO: 29919 - DNA, 508 bp, Setaria italica
  Peptide Sequence Number=SeqID_95893
ggtcggtgggtgttccgggaaccatggagcagatgaaggtgtcggcgtggcccttgtactcgtggagggagcccaggcgctgcaccaggaaggacttggagatgaggatgcgcgcgccggcgtgcttgttgtcccagccgaaggtgttgtccgactcgtcggcgcccaggacctggccgttcacctggatgtagctcaggtaggacgggctcttggtggcgcggtgcagccacgccgcgccccacaggagctcgtcctggtacccggagtaggagcagtagtaggggcacacgtccgccgcgagccccgtgctgtaggagccccggtgcttgtccgcgaactcgaacaccctcttggccctggcgaggaggcggctggcgtaggccgggtcggacttgcggaagacgagggaggaggcggcgagcgcggcggccgtctcggcggcgacgtcggaggccgggggtgccggggtccaccttgtacacggtggcgggggggtgtccatgtc

SEQ ID NO: 29920 - DNA, 607 bp, Setaria italica
  Peptide Sequence Number=SeqID_95894
cgcagctcccgcagcgccgtcgtcgtccgcgccgccgccgcagaggggccgtggagctgcaggccaaggtgaccaacaagtgcttcttcgacgtggaggtcggcggggagcccctgggccgcatcgtcatcgggctcttcggggaggtcgtccccatgacagtggaaaacttccgcgccctctgcactggtgagaaagggtacggctacaagggctgctccttccaccggatcatcaaggacttcatgatccagggtggggacttccaggaaaacaatggtactggtgggagaagtatttatggtgaaagctttgacgatgaaaactttacattgaagcatgttggccctggtgtactaagcatggcaaatgctggccctgacacaaacggaagtcagtttttcatttgcactgtgaagacaccgtggttggacaaccgtcacgtcgtgtttggacatgtcttggagggaatggacgtggtgaagcagcttgaatctcaagaaaccagtagatctgatagtcccaagcagccctgccgaatcgtgaattgtggcgagttgcccttggacggctgagcaaggtcaatagctcagtttttttttttttt

SEQ ID NO: 29921 - DNA, 1494 bp, Setaria italica
  Peptide Sequence Number=SeqID_95895
agcaaagccccgcgccgccacagccgacgagggtagatcgtcggagggagtgggaggaggatgtctgagggcggggaggaggcgcgccgccgcgccgcggtcgccgagtaccgcaagaagctcctcagctgccgggagctcgaggcgcgggccaaaacagtaaattagaaccgtaaaaactttggtaaaaaacttgtaagtagggattcggatctcaaagcattgcaaagcgtgggccaaattattggtgaggtgcttcgacctttggacaaggaacgatttattgtgaaggctagcagcggaccgcggtatgttgttgcctgccgaagtaaagttgacaaagaaaagttgattgctggtacaagagttgttcttgacatgacaacacttaccatcatgcgcactttgccacgtgaggttgaccctgtggtttacaacatgctacatgaagatcctggcaatgttagttactcagctgtaggtggcttgtcggatcaaataagggaactcagagaatccattgagttaccgcttatgaatccggaattgtttctccgtgtagggattaagccgccaaagggcgtgctactatatggtccacctggaactgggaagacactcctagctagagccattgctagcaacattgatgctaactttttgaaggttgtttcaagtgctatcattgacaagtatattggtgaaagtgcacgcttaattcgtgaaatgttcaactatgcacaggagcatcagccatgcatcattttcatggatgaaatcgatgccattggtggccgaagatttagcgagggcacaagtgctgatcgtgagattcaaaggacattgatggagcttctaaatcagctagatggatttgatgagcttgggaaggtgaaagtgatcatggcaacgaacaggcctgacgtcttggatcctgcactccttcggcctgggcggctggacaggaagatcgagatcccgctgccgaacgagcaggggaggatggaggtcctcaagatccacgctgccggaatcgccaagcacggtgaaatcgactacgaagctgtcgtgaaactggccgagggtttcaacggagctgacctgcgcaacgtctgcacggaagccggcatggccgccatccgggcagagcgcgactacgtcattcacgaggacttcatgaaggcggtgcggaaactgaacgacgccaagaagctcgagtccagcgcgcactacagcgccgacttcggaaaggagtgaagagcgatgacctgatccggagatcgtctgatcgtagtgcaagtcctgttactgttaggccatcattttctcctaacctcgggcggaagagctctcatcctgacgctatcggagcaaacaagtcactagtttcgtcagatagattccaggatggatgtggctgcaagcaggtcggcgtaatgtaaacttggaattcactctgaaactgatcacgttgatgagaatgaaccagacagt

SEQ ID NO: 29922 - DNA, 287 bp, Setaria italica
  Peptide Sequence Number=SeqID_95896
cccggcggtcccgctggacgccgcggtgacgccgccgagcgggtggtacgccgaccaggacttccttcggctcgagctcgaccgcgtcttcctccgcgggtggcaggctgttggtcacatatggcaagtgaagaacccaaatgacttcttcacaggaaggtgcttacaattttgtttgcatgcttctgtagtctgaatcagaaggcaccttctgttttgtttcgtttgaagtaaaaagttttttttttactagttgtatagggtttcaaactgaaagtaaacaatgg

SEQ ID NO: 29923 - DNA, 1774 bp, Setaria italica
  misc_feature (1715)..(1774): n is a, c, g, or t
  Peptide Sequence Number=SeqID_95897
cgttctactgctcgacttctcccctcgttccagtcctcttccgccgccgccgccgcccaccgtcgcaggagacgatgctcgacatcaatctcttccgcaccgacaagggcggaaacccggacctcatccgcgagtcccagcgcaggcgctccgctgcagtcgagctcgtcgacgaggtcatcgccctcgacaaagcatggcgcgaaaggcaattcgagctggacaagatccggcaggagctcaacgccaccagcaagaagatcggcaagctcaaggccagcaagcaagaagaggaagctaagaagctgatggagagcacggacgagattaagaagaggttggctgccaaggaagccgaggtgcaggaggccaagagcaccctcgacgccaagctcaccactattggcaacatcgtgcatgattccgtgcccgtcagcgacgatgaggcaaataatgcaattgtacgaacatggggagagaagagagtagaggaaaatttgaagaatcacgtggacctttgcagaatgcttgacattgttgcactggagaagggtgctgatgtggctggtggtcggggttactatttgaaggatgaaggtgtcctcctgaacctggcgttgataaatttcgggcttgctttcctgagaaaacggggctttaagccaatgcaaaccccctttttcatgaggaaggagactatgggaaaatgtgcccagttggcacagtttgatgaggagctttacaaagtaacaggtgatggcgaggacaaatacctcatagccacatctgaacagccattatgcgcttatcatttaggtgatcgaatttaccctgctgagctaccaataaaatatgctgggtactccacctgcttccggaaagaagctggttcacatggaagggacacagctggcatcttcagagtccaccaatttgaaaaaatcgagcaattctgtattacgagcccaaatggcaacgattcttgggacatacatgaagagatgatgaagaattcagaagatttctatcaggagattggcctaccatatcaggttgtctccattgtctctggtgcacttaatgatgctgcagctaaaaaatatgatttagaagcatggttccctgcatcaaaaaccttcagagaattagtgtcatgttctaattgcactgactttcaagcaaggagacttggaattggttacggccaaaaaaagaatgatgagcagtccaagcagtttgttcatatgctgaattctacgttgactgccactgagaggacattatgctgtattctggagaacttccaaaaggaggatggtgttgaagtgccaaaggcgctgcaaccgtacatgggtggaatagagttccttcctttcaagcaacctctggatgtcaaacaagctgctgactccaaatcaaacaagtccaaatcaaagggaaatgctgcttgagctggacgaggaacaaattcaaatgcatgcgatgcagaagtgatggacaatatgcatccttgtattattttttgggtggtatcagtatttataacatgaccatgacaatgcagcttttgtgtacccattttggtttcttggttaccacaccatctgatgacagtacttgcacactgatgttgcatagcataggatgtcttgcaatcagaggaatgtttgagcagcaccatccctacctgctgtgtttcaaaaaaaaaaaaaaannnnnnnnnnnnnnnnnnnnnnnnnnnnnnnnnnnnnnnnnnnnnnnnnnnnnnnnnnnn

SEQ ID NO: 29924 - DNA, 447 bp, Setaria italica
  Peptide Sequence Number=SeqID_95898
gataatttttttatttccatatgtgctaggttttgtgttaaattgtattgatcttgcttttttattgaaggttctaccgccctttgttataatcagccctgttaatgaacaaatgtccactaccctgatttccccttcttagggggagtttgcaatcattgaatttttgttcgataattcattcatgaatcatgtttagatattagtatgctggttgttctcttgctgtcaagtagttataaccagattgggtgcagttgttagccatggagtcggtcagtcaggttgctctggtttgaggatgttgtgttgggtaattttagcatgtgtgtacagagaatttaagctagatggaaataatttagattacatgagatgaaactatgtcatctcatgcctcttgattaccaaagagttgcttattaggtttgtttgcttgttagagaa

SEQ ID NO: 29925 - DNA, 501 bp, Setaria italica
  Peptide Sequence Number=SeqID_95899
ccctcgctggcccatccccgacacatcgggaaccgttcttcactgtatctacctagcttggggcacaacgggttgacggggccgatcccggcgggcatctcggagctgaagaagcttgagatcctgcggctggagtacaataacctgagcggcgagatcccacagcagctgggcgcgctggagagcctcctggccgtgaacatctcgcacaaccgtctggtggggcggctgccggcgtcgggcgtgttccagagcctggacgcgagcgcgctggagggcaacctcggcatctgcagcccgctggtgacgcagccgtgccggatgaacgtgcccaagccgctggtgctggaccccaacgagtacacgcacggcggcggcggcggcgataacaacctcgagacgaacggcgccggcgcgggtatgccgaggaagaggcggttcctgagcgtgtccgccatggtggccatctgcgcggcgctggtgatcgcgctcggcgtcatc

SEQ ID NO: 29926 - DNA, 466 bp, Setaria italica
  Peptide Sequence Number=SeqID_95900
gagtacctccaggaccgcgcgcgcgtgttccgcgccatgttccccgaccgagagcaggagccagcggatcggcgatggggagtggcgggtccagatgctgccgctgcagttcctcctcgtcaccgtgcgccccgtggtcgtcatgcagctgcggcaccgcgccggcgggctcgacctccgaatcgtgcgtaaaagcttgacccccagctttaccaattcttcgtgcaccttccggcgaccgccagtggtgtggtgatggaaatgccgccttgtgcagacggagtgggagctgcgggggctggaccgcgaccacgcgccctcgagcttcgacctcggcgtgagcgggtcgctgtacgcggaccggagcctacgcggccgccgcgccgggtgccggatgaggggccacctcgagatctccatcaccgccgtcctgccgccgcccctgcgcctcgtgccggagagcgtc

SEQ ID NO: 29927 - DNA, 450 bp, Setaria italica
  Peptide Sequence Number=SeqID_95901
ccggccgtgacctacagcgcgagcatctccaccaacacgcccctccacgaaccccccggggcctccttcgacgagtacctccaggaccgcgcgcgcgtgttccgcgccatgttccccgacgagagcaggagccagcggatcggcgatggggagtggcgggtccagatgctgccgctgcagttcctcctcgtcaccgtgcgccccgtggtcgtcatgcagctgcggcaccgcgccggcgggctcgacctccgaatcacggagtgggagctgcgggggctggaccgcgaccacgcgccctcgagcttcgacctcggcgtgagcgggtcgctgtacgcggaccggagcctacgcggccgccgcgccgggtgccggatgaggggccacctcgagatctccatcaccgccgtcctgccgccgcccctgcgcctcgtgccggagagcgtcctgcgc

SEQ ID NO: 29928 - DNA, 129 bp, Setaria italica
  Peptide Sequence Number=SeqID_95902
gaccgatggcactcagcacgccggccccattgcgcaactttcgccagccatcagacgcaatctcctcggtcaatgtggcaactcgcgacacgtcgagctgcttggcccttgacgtgcaattccatctta

SEQ ID NO: 29929 - DNA, 1911 bp, Setaria italica
  Peptide Sequence Number=SeqID_95903
attgcatccatccacctctcagcttcatttctgtcaccattcttgcagaaaccgtgtaccattatatcaaaagtccatcgatttggttgatacccctttctgcacatcctttcatacaaattacaggcagaatccatcctacctgccatagacaaccctcgtaacagcatgttgtaagtataagtatcaacaggaaaatacttttccatctcctctcccaaatgctccaagtcattcatgttgttgatacctcttgcaaacgaggtaattagatcacctatcaagagccttcctgcctcccgaccttgaatctcttcacctttcacttctagaggttttgacttatctcttgaacgtaacaaagccttcagaaggctgctgcccatcaatgtgtgcaagagaagcacattacacaggaaggctgaaacagggcgacctgtttctctgaaatcgtcgataacctttataacactgtcataatctctgacagagcacagcaatagaacaagatgctcatagcagctgatgcttgggattacaccattatcccttgcctccctccagaacaccattgcctgctcaggcttctgagcttcacatagaccagatataaatacattatacagcttggtgccaggtggtttctttccacgaatgaggttaaaaaagttaagtgcatcaccaatacgtttgctccttagataactcatgagaagaagggtgttgctttccgctgatggttcaatccctgaaatctccattcggttatacacctcccttgccatgtcagccctcttagcatgaccagccccagaaataaagtagttgtagcacacaagtggttggagttcaccccgttgcaactggctgtctaacagctcaagaacttcagcatacttattcaattcacacaaagcacagacaactgattgatagaggcttcgggttgggatgtgccccatatcttgcatttccagcatgagccttggcagtatatcaaccctcttaatcaatattaatgcccgaatcaagctcttgtaggttgactcatagcgatataagcccacatggctcttgctgcttgctatctgaggcacttcgcatgcctcctccacattaccactcttgcatagtgccacaaggtacttggctaagacagagtccattggccagacttcctgcttgagtgccctgtctagcagctcccgcaccttatccagctttccctcctgacaaagcatatttgcaaacatggcaaatgtctgacgccctggaaagtgccctccttccatagcttgctccaataccagacatgcttcctctgtctccccaccccggcacagtgccctgatcagattattatagacatccttgtttgggttgatcccaagctccattcttgacctatacaaatgcatggccacttcaacaagaccagccttgcaaaagaagcaaagcgcagcattcatggtggatctgccaggagcaatgccctcctccatcatttccacgagcaagtcatacacttcgccaagtctgttacagcgaagcaagcgataaacaagcttgtcataccgctgcccatcagggatatacccttcagtttccttcttatcagcaatgaacttcaacgtagtatcaagccttccagcctcaatgaggccatggatccacgcaccatacacatcacaggatgcaaacttatcaacgatctgggctgcctcagcaaaacgtcgacggcggcagaactcagtgatgatggagccagcagcggggccacgggatgcttcagcaaacggcagggtgtcaaggagagccacggcatcgtcgaggcgggcacggcggcagagactcttgatgaggatgcatgtagtgacagggctggcggcaaggttgcgggcgaaggagtcg

SEQ ID NO: 29930 - DNA, 338 bp, Setaria italica
  Peptide Sequence Number=SeqID_95904
aatttgcaatcagtaagaacaaggctctggaggtttgagagattaggtagccaatcagggaaaagttttccataatagctcattattttgagagatttcaagcagtgtggaggagaaagccgatcaaatatgtctttgagtgttctagcatcttcctcttgtacttcagattgtctatcatcattgctacaacatagttcaagctccttaaggtgtgacttcgtttccagcatggcttcttgcaccctcgaagaatctgagactctttccaaccgaagaatctgcaggcttctcaatgcatcaagagatgttaggtcttccaaaggccacccagtcgg

SEQ ID NO: 29931 - DNA, 310 bp, Setaria italica
  Peptide Sequence Number=SeqID_95905
actggttgttgcaagcatattgccactgggtgagaaataagctgactgaatggctctgctgtactcccaaactttcaagtcggcaccccaccgatccgcggaagatttacagctctagctatcacggtgaaatttgtctcatggatgttgagaaggagagctttaatactatccacttgtgtgactcccccattttctcgctttgtcaagcaccagatagtcacagctccctatattttgccgagggaaatgatttgaaacatttcgatgaaagggcaggtaaggtgtcaactacatggaatttacatga

SEQ ID NO: 29932 - DNA, 262 bp, Setaria italica
  Peptide Sequence Number=SeqID_95906
ccggggtgcccaaggactacacgtcgccaccggacgggtggttgatgatgacgcccggccgggggttgtcggggctgctggcgatgtcgtcgtacatgaagacgatgatgttctcgtccttgagcccgcccttcttcatgatctggtacgcgtggcacacgtccgcctgttcacggtcctcatcgccggctccaacggatactacaatcaattcttcgcagcgcgtacacgcaaccgcttgcggttaaaccaccacacaagt

SEQ ID NO: 29933 - DNA, 430 bp, Setaria italica
  Peptide Sequence Number=SeqID_95907
acgaaccggatgatagttctattgcttctatactcattgtgaacaactctggcgtagactcaggacaagcaggcaatgtgcatcgccctatgaacgttatggatatcaaagccaccagagaaatgtacacggatgtgatacgggcatatgctcagcaaggcatggtggctgctgcccagaacgttcatagggcgatgcactttgccggaattgagtctacgccagagtttcagatctggtttgaaaccctcattccgaataaactcaaaagcctccttggctcgatctagattgcctgccttgctatacatgtggactaacgtgatagatgtgaggatatcaggtgcaacacctttctctttcattttaccaagtattatctcagcaccttccacatgatttgctttagcatgaagatcaattaactttg

SEQ ID NO: 29934 - DNA, 1666 bp, Setaria italica
  Peptide Sequence Number=SeqID_95908
aacttacacatcatggtatgtctgtctggaagccgaaaaggcattacaatcaccaaaaacaagtccaaatcctgatcgcttcaaacaacaaaatcatgagaccagcacctatcaactttataatctgtggaagcattttcatgcctcgagacgatggataacaaaaaaagaaattcggccaacctattttccaacatttgaaagtttggtcaatttggttgtgccgttgtcagtgctacctccaaggttctctgaccagaatcactgcctgcttgcgtgcccagcagatcactgccagcatacaagccctagcctcaatgcctaccagtgggacgaagcccacccctcatccttaaactggccttaacaccaacctcgattgtttctgatggttcaaagccaaatgatttcatcattttgtagtatttattggcctcctctgagaatccaccgtccagaaggcctcttataatcctctcgaactgatcagccttcaatagtttcttcttctcttccaacatcttgagggatctgcgggctttctcttcctggcgtgactttgcatacatatcagcaaggaacacatggacttctatgggttcttctcccagctgttttatcttccgcgcaagctgttcagcctccggaactagctgcaacatagatagccaatccagtaacacgaggttcgtcttgacaccaggtttaagtccttccttctctaaactcagcagccagagcaaagcctggtctaattggttcttcttcatgtgcgcagccaccacaccggcaatagaactatcatccggttcgtgtccagatctcctcatgtgttgaaacacgagacaggcattctcaggatcaccaatgcgtccatatgcttctatactcattgtgaacaactctggcgtagactcaattccggcaaagtgcatcgccctatgaacgttctgggcagcagccaccatgccttgctgagcatatgcccgtatcacatccgtgtacatttctctggtggctttgatatccatgcccttcatagtgtttagcaaattatctgcttgtcctggttctccatgactgatatagcatttaatcatcgaactgaagagtttcagatctggtttgaaaccctcattccgaataaactcaaaagcctccttggctcgatctagattgcctgccttgctatacatgtggactaacgtgatagatgtgaggatatcaggtgcaacacctttctctttcattttaccaagtattatctcagcaccttccacatgatttgctttagcatgaagatcaattaactttgagtaatctcggatgtttgcctcgaaagattcttcagctaacagaatttcagcaaccttgaggtacaactcaacattgcgtgccttaacccgctcaagcagtgccatccagtcaactcgctttggccggagatcctccttccactcctccatggcaggcaccggatctcctctcctcgggtcgacccgcagcagctgctcctcggccttcttcgctttcccttctacaggcttggcttcctgaggcacaaaatgtgcctcagcctcggccgtccgctccgcaacctcggcccacttcgggtcagacatgtccaacccgtacatcgtgaacttcacctcccccttcctcttcg

SEQ ID NO: 29935 - DNA, 591 bp, Setaria italica
  Peptide Sequence Number=SeqID_95909
gccgcagatcagaaggtgacggatatggagccataggagtaagaggcaaactgggaggatacggagcaactggcacatcagtaagtgacgacactgaaggactatagtttagagtacccattgggtgatcaaacttgcatgtcggcccaaacttgcaaaagccatggtgtgcatagtaactacaaggctgagaaccctgcaaatcaagagaagctttagttgaacatgtggaaccaagaactgaaaaacaaggcaacatatgacgtccatttcaaccttgtgtctcacattatctcaacactgttaccatatcgcattatagaaaattcaatgtcatgcaggactctgcgtgccttagatcacttgcaaccacagtgaaagtactaggagctttaacttaaaattgcttgtgagttgtgacaaggtaaactcagaaaaaatatgttgccaagtgctaaaagaaaaaagatggggcatgactacattcataactgtcgcaaggttcaagtcacaaataaaggaactgaattcacggcagatgccacaactaaacaaatgtcaatcattgatcagatcttacattaacattct

SEQ ID NO: 29936 - DNA, 2150 bp, Setaria italica
  Peptide Sequence Number=SeqID_95910
aaatgaccagcgaatggtttcagatggtcgaattaaggggttccaagtgtctcgttacaatgtgtcccgtattcccagtttggaactttggatatacatattgcggaagtcatagttgctgttccggggatatacatatttatatatatatgatgatgatgatgatgagataaacaaaaggtttgggaaagggctgcgaaacccattagcttccagaagataattagtcccctccgacggtgcatctactggcctgctccgttaattatgtacgagataacaacggagctctgaactacaatcagaattctctcccttctcttgtttcagagacggacagaaaaatggcaagtgaatgagcttgccaattcctatctttgcatttattcagccttttctatgtcagctgcagcctttattcacaatcgatggggagtcgaattggagcaaaaaagaatccgagacctcatttcacctatggcagaaagtccagataagcttgctgaagatacatcttcatgacagaaaggggactagagctctccacgctggcttcctatcacgcttgcatgccagcagctgcggatgttggggatcggataagcgtgtgcggagcataaacctttgatattgtcccaacaggtccataagtagttccaggaactgctggtggattagcagaggaatccttggttagagtgtattgtggccgcagatcagaaggtgacggatatggagccataggagtaagaggcaaactgggaggatacggagcaactggcacatcagtaagtgacgacactgaaggactatagtttagagtacccattgggtgatcaaacttgcatgtcggcccaaacttgcaaaagccatggtgtgcatagtaactacaaggctgagaaccaggacgaagtggaagaccaagagggctaagcacacaattagattttggtccactgaagtattgaggatgatggtatttgcaggcagctccatatttacaggttcctgtcttcatgtagtgttcacattcaggctgcccaggccgctctggtaaggtatattcttgtatgttgctgcttgaagtcccagttgaagaatacagctgtgcataatgactgccataagttactgcagagctaggcccctggtgcgacatgccataaggtggtccggcttgaacagtttgctgtcccccagctggcgcaacttggttcataggtgaaatataagggttccatccttgcattggcataagtgtaggtggaagcatcattggtggatacgagcctggtaaaaatgaccctggcacaacaggaggcctccccatttgccaattggcaagatgtggatatggatggggggaggaaagaggcgatggttgcactggcggatacatggtaggcgcctctgaaagaaaaccaagttctgggtgatggaatttacatgtagctccaaacttgcaatgcccggttttcatgtaataggagcattccttttcaccctgacgtatagggaacccactgctgtttaatgccacaggtacaaaaccaccttccctgggatgatcgaacttgcaattggaaccaaatttacaggtcccattcttcgcatagtactcacaaagtggctgtcctggtcgctccgggtactccactgtacctgcagtccttccaactccattaaccggggcggcccgatcgcggtcgcgggggtggttgtagcggcagcgctccccgtatccgcaggagcccgtgcggatgtagtaggcgcagtccacctcgcccggccgctccggcagcttcgcgtccccgtccccgtccccgccgccgagccccagcctccgcatcgactcttccaagccggtgccggcgtcgcccccgccgcccttcgccgccccgtacggctccatccgacgcccccaacccggagcgcggcgatcgggcgcctgcctcgccgagcgggctcgatcgaagctcacaggcaagcgggcgccgagagctcacggagccagccaacagggggagcagaaatcactccggaatttttttctccgcgctgcttcagtgctgctgcttccccgcggttgcttcctggcgactcctctcctcctctctcctctcccctctgctgctgccctgcacggtcgc

SEQ ID NO: 29937 - DNA, 360 bp, Setaria italica
  Peptide Sequence Number=SeqID_95911
ataaacaaagtcaggaccacagtatcattgattctgatgcaaggataaacaaactagtgcagagatctgcagacttctgctggcagaaaggaggtaacagtcaaaaaaggctccatattaggttggactgaaacaagacagcctagaaagaaaatctattgtatcactgtgcagatagacagagacactaaaaggacttaaaataatgtggagtgccagccagtatacttgtacaagagactttctggctactgtcgaacgctctacaatgtctatataatgtcatgagcctcagcccaagttaggaagagctacagccttgctccatctctcaccacagcaagctcaatggggaatcca

SEQ ID NO: 29938 - DNA, 533 bp, Setaria italica
  Peptide Sequence Number=SeqID_95912
ttttttttttttggtcaaatgattattatttttttcttgcattgctccataagatgcatggattgttacatatatacttctactccaaattaagtccaaatcagcagcaagaaactctctacttggattgatcgaccagatttgccgaaaaggggaaaaaagatgcattggccctctccctctgacacacacagagagtcgtcacagttaacaaattaattaacagtcagttaattaatccattaaacggtcgacgatcatcagtcggaggtcttgaagggcgccgcggccttgaggttgtgcacgatgtcctgcacggagccgatgctggcggcgacggagatgaggaggcagacgaagctcatggcctgcagcatccaccaccggggctcgccgcgccggatcttgagcctcgccacgtgcatgctgacggggaagtagacggagagcggccagaagcccagcgcgccgatgaggcccagcacggcgttgaagaagggcagcagcatcgccaccagcgttggttgtaacta

SEQ ID NO: 29939 - DNA, 350 bp, Setaria italica
  Peptide Sequence Number=SeqID_95913
gccaatggaggcccccactgccggaatcgcacgccgaatgacacggatccgtatgcaagacaagtggatccggcctccccagacgtggattcagccatcctcgtgcagctcgagctccaacaagaaaatgaagaagggaaggaagggaaggacacgcgcggcatcgcttgacgtcggcactggcccgacggcagtggccgaactggagatctggcgaggcctcgtttggggcgacggcgtcgcctcccgaccgcccaagtgagtcagaatggtgagagttaatcattgcttctgttccatgtgttgagtggatcaaattttgaaaaagactaatgcagttatgcagggcg

SEQ ID NO: 29940 - DNA, 313 bp, Setaria italica
  Peptide Sequence Number=SeqID_95914
cgtcaactcgtgaggaagttcacgggcagatgcgaaagttccaagtcccacccagaccggcgacggacgacgcctcggtctccacgccgccgccgccgccgtgtggctgacttgaccaatctcgaggctctcgtctccccccatcacggaaagggcttccggctccgcacgaccacgaggcctcgatccgcacgaccacgaggcctcgatccgcgcgtccccgcacgatgaggctcgtggctgtcctggtcgccgcggcggccctcctcgcggccgccgccgcgcacgagcaccacggcgaggcgcccacgtg

SEQ ID NO: 29941 - DNA, 935 bp, Setaria italica
  Peptide Sequence Number=SeqID_95915
tttggttgatgctcgatcgtattcttcttcttcttcttcttcttcttcttctatttcttcttcttcttcttctattttttgtatatataataatgagttcccactcaactacccaatcataggatacagcaacgaacgaacgaattaaattaaatttacgcagctggactggattaacaggtcgtcggggaatgaacgaatcatcatccatccatcatcagtcgaggcgcatcatgcccttgtggaagtcgtcgacgccgtcggcggcgacgcactgcgtgatgaggcgcgcccccggcttgtgcgccgacggccggaccaggatgcacgtcgcgatgtagtcgagattggtgagcgggaccacgtgcacggggcacccccacccgtagtccacctcctcgaaccccagccgcgaccagtccgacaccagcagcgtccggtagtccgacgtgatccggtacgggtcccctccgccgcccccgcccatccaccgcgcgaactccgacggcagccgcttcttgccctcgcggatcagccgcaccacgtcgtacaccgacgcgtccgccacggcctccgccgccgccgacacgcgcatgatgtagtagcagttgccgtagaacccgtctgggagcggcctcccgcgcatcgccgccaccgcgggacgcgcgttcatggcgaagcagacgtgcacgggggagcccggcgcgaacccggcggcgcgggtgcgggactgccacgccttggcgatgagcacctcgaaggcgctgcaccggtggcccgtctgctccaggaaccgggccttgaaatgctcgatgtactccgttgagatgtccatggcgaggtactggagccggagctccgtcgggaccgggagcgggcccaccgccgcgccggggccggggctcgggatcgcctcgcggcccaggaggggacac

SEQ ID NO: 29942 - DNA, 551 bp, Setaria italica
  Peptide Sequence Number=SeqID_95916
cacccaagcctcccctcccccatctctctctatccttcctatccaaggaccgagaagcctagcgggcttcctcttgcctcgcgccactcgagactcgggagggtcgccggggaatcgccggggcgcagctgcagacgttccgggcgcgtcggcgttctcggggaggcgtttcggcgatggcgacgaggaaccaccgcgcggctgccgctcagcagccggcgaacagaggtgccgcagtcctggcggggaagcagaaggtcgccgccgccggccgccgccgggccctcggtgacatcggcaacgtcgtgaccgatgtccacgacggaaagatccagctgccggaggggatcaatcgccccatcaccaggagctttggcgcccagctcttaaagaacgccgctttggcgaaacagaatgccgtagctcctccggccaagcctgtagcggcgcgcgctgtcccgaagccagccaggaaggctcctgcgaagcccgtcccgcgccctgagcaggccccaaagaacgccaccagctccaacgagaacaacaagccg

SEQ ID NO: 29943 - DNA, 508 bp, Setaria italica
  misc_feature (475)..(508): n is a, c, g, or t
  Peptide Sequence Number=SeqID_95917
acttaatagacaaaggactaagacaagaggactgatgctgctgcgcaaagactgtttgatgccagctccgtactcagcttatgcaaggctagcagcaagagggctccagcatcttatatacaatgttaacattccagcaacacctgcagcagagaggacactatccttcaacggatgcccagaggagacgggatcaggagactgaagcgtttcaggaacattgggagtgctcgatatatctaaaaaatattcagaactgtaggaatgctcgatatatctaaaaaataatcccaattgtggtattagaaagatgtattctgatgttttttgttcaatgtaaattgaaattgcagaaccgtattgcatacagtacatatcgtgcatcgttattctttggatcaatccgaccctgtgatcccagctgggaccttcagttttctcgcggaaggcccaaagctgagtattcaattaaacnnnnnnnnnnnnnnnnnnnnnnnnnnnnnnnnnn

SEQ ID NO: 29944 - DNA, 391 bp, Setaria italica
  Peptide Sequence Number=SeqID_95918
agataagtttgaagctggaaaacgtatgcctgcttaattgatctcaatcacagcccactcaagtactagtcctggttcgattcaactacacacagtgcttgctgaatccatgtgatgcagctccaggaagtaatgtgaaccacagatattttcagaagagcatggttacagcgctgagtacggagctggcatcaaacagtctttgcgcagcagcatcagtcctctgcttatgcaaggctagcagcaagagggctccagcatcttatatacaatgttaacattccagcaacacctgcagcagagaggacactatccttcaacggatgccagaggagacgggatcaggagactgaagcgtttcaggaacagttgggagtgctcgatatatact

SEQ ID NO: 29945 - DNA, 551 bp, Setaria italica
  Peptide Sequence Number=SeqID_95919
acctgcagatgtcttttgcagtcctccatcggaggctaggtcgtgagtcatgatgcaaggcaggaagtaatgtgtttcagaagagcatggttacagcgctgagtacggagctggcatcaaacagtctttgcgcagcagcatcagtcctctgcttatgcaaggctagcagcaagagggctccagcatcttatatacaatgttaacattccagcaacacctgcagcagagaggacactatccttcaacggatgcccagaggagacgggatcaggagactgaagcgtttcaggaacattgggagtgctcgatatatctaaaaaatattcagaactgtaggaatgctcgatatatctaaaaaataatcccaattgtggtattagaaagatgtattctgatgttttttgttcaatgtaaaattgaaattgcagaaccgtattgcatacagtacatatcgtgtatcgttattctttggatcaatccggtgatcccagctgggaccttcaggctgagtattcaattcgttaaaaaaaaaaaaaaactaagtaaagaac

SEQ ID NO: 29946 - DNA, 816 bp, Setaria italica
  Peptide Sequence Number=SeqID_95920
cgcaccggctgccgcgggtcggcgggtgggagcggcgcggcgtccccggcgtccgcggctcctgtttgagctgcaacccctgcgtcgaaatctggtgatgagggcagattatgataaacaacacaaacctgcagatgtcttttgcagtcctccatcggaggctaggtcgtgagtcatgatgcaaggtgcggagataagtttgaagctggaaaacgtatgcctgcttaattgatctcaatcacagcccactcaagtactagtcctggttcgattcaactacacacagtgcttgctgaatccatgtgatgcagctccaggaagtaatgtgaaccacagatattttcagaagagcatggttacagcgtatgtttaatttctagtaataatttctttttactagcgctgtcttgattttatcattttattaatatcaaaagaaaatatacttaactgtggtgctgaaatcttagttccttttccatttaccgctgtatgtttcgtttgtctgcttacttaggaaaatcgcatcatggaaaccactggactactgaacctgaccttaacattgtagactgtgaaaaatgataggcctgtgctctcaagttcagtgattaatcagttgtcagaaatgatacctatttgtcatcttttggttgcaatgtctattgttgatcatcataacttgcatgttgcaatcatgtattacctcttggcgtccattcgagaatgcacattgcacggacctttttactcggcatttctgtttagaactatgattggttgtcccagataggcgcttatactttctctggatgc

SEQ ID NO: 29947 - DNA, 1670 bp, Setaria italica
  misc_feature (1)..(24): n is a, c, g, or t
  Peptide Sequence Number=SeqID_95921
nnnnnnnnnnnnnnnnnnnnnnnnctagaatattttattattactattatttttgtgaataatcacaggtaaatgaagctcactggtcactatcatgtacttcatcctaagaagtgtcatcctcaccaaccaagggtacactacccagccctacactcaaactccacttttacctcaacctaactacctgtagtttctacagcaagattaatggtgctgcaattatacttcctacacttgtctgacataaggtctgttacaaatcagcggaaaactagctgccctcaatcatctgttgtggagatgagaagcgatcttctcacgttgcagagcatgatcatatcccagtaaccgatcattgaattgcactgctgtccaaagatcaagcaacgaagcttggtaagaaccgcctgattcagtgggaaagccgttattccgcccactacttacagcagcagcagtagtacgcccatttggttggcgcatcctcacattgtttccccttgctttcgcaacacctaaacaagccttcaacatctgacgcatgtacatgttcagcccagagttcaacgcatcagcacactctttgcgcatgctgagaccttgagccttcagcttatcctcaagtagcttggacagccactgagaatctggcaactcaccattattgtagcacacatctgaagagcaagatgtcgaaggctgagaattctgagcctttggaattcccagcggcgccctgattgggctttggctctgcacgcagaccggactaccccgggcctggtcgacctcctcgccatcctccacagagataacctcttgcagagccttgctaccagttgacacaaactccccagcccccggatgaccaagaggggacttgccgatcgggctcagcttgtcaccaaacctcctagtcagaggcctcaccctcctcgccggcagcaagccattgttcagcgtcccattcgacacggtgctcgtctgtgagttcccggtaggtgcctgcttgctcggcgccggcccatccgacacgcacgcgttgccgaggatggaccggatgaggacattgtggagcctgatgttctccttcccaagcgcagcgacgcagatcctctcgaactcggccttgccgagctgacagcccaggaacctcctgaggccgcggaagtagagctcggcgcgctggtggccgagccgcttcacgatctgcgccttgagctcgagcgtgtcgacgcgggcgagtttcttgggcggcggctgcatctcgcccgccgacggacgccaaatgcagccccgcaagcgatccggccgagcagcagctccggggagagcaaaccaaaccctaaacgacgacgcccccgccgctggcctcgggctcaagcgatccgcggccgccgagctcaccgcgagaagcgatcgctcgagctcggccccaagctatcccccccacctgcggaaccagatcgagaagcagcaattcagcacacggagagagaatcgcctcgggacaaactcccacacgagctcgggagatcgctccgcggccgaattcagcggcaccggctcacgggacccacctcggaaccgagctccgagcaagccccgggccgggattcgcggtgaatcccggcgagctccggccgaatcggtgcggggaaacagcg

SEQ ID NO: 29948 - DNA, 456 bp, Setaria italica
  Peptide Sequence Number=SeqID_95922
tgccgccgtcgacggcggcgggtagctggtgtgctctggcggaggcgcggggcaggcggtacatgacgcgggcggcggcgggtatgcattaacggcggccggtggtggcggcggcgggtaactgctgtttggcgatgggaactgaggattaggcggtgggtgaggtgggtagctgctcggcggaagcaagtcttgcagttgcgggtagagaggagcggaagccggcggctgtggtggcggagggtacccggcgctcggtggcgcgaagctcgccactgctggtgctgagtacgccgcgctcggcggaggcgcgcagcaaaagctcggatcttgatccggcgccgggtagagctgcggcggtggacgcgcgccggcgccggcgtggccgccgctgatggcgtacgcgaagctgagcgtgccgttcggcttgccgtcgggggcgctcacctggtagct

SEQ ID NO: 29949 - DNA, 233 bp, Setaria italica
  Peptide Sequence Number=SeqID_95923
gccgcgaatgacgttgaggatgagagtgcggtcggagactggctagcccaagtcaccgagcgcgtttgacatgctcttgaagcgacgacagtagtcggcgatggagaggttgccctggacgaagtggcggaactgcgcgtcggcgtagagggcgcgggtctccagttgccaaggaactgagtttcaatggcaagccatgaggcatgtgcaggcttgtcacgttccatcacgat

SEQ ID NO: 29950 - DNA, 410 bp, Setaria italica
  Peptide Sequence Number=SeqID_95924
ttttttaaagtaaactaacaaaaataaggtaagtaactaggagtatgaaccctgcatctattccttcatcatgtacacaaaagaatgacaaacgtatggtacacagggcatcagcaaagaatggcaaacaatgctaggtgcaacgctgtcggcagaggtcgtccctgcggtccggtgacgcgccgccggcgccggggatgaggaaggtccggttcctgccgttgcccccctcgcagacgaggctcagcgtgttccccccctgcacggtggtggtgctacactaggtcggcgacgagtcgcacttccagcgcttggtggggacgcagctgaggtagcggcaccaggagcagtgctcgttggcgttgtaaccccggaacagcagcacggtcgccaccgcgaacccgacgacg

SEQ ID NO: 29951 - DNA, 391 bp, Setaria italica
  Peptide Sequence Number=SeqID_95925
attcttcacagaagacgtccaaccaaactaggctggtacaaggtaaaaactcaaaccctcagcagaaatgtgaagccaagaagggaattcagccgaggagtgagacgcagaactccctgaagaaagagattctgcaactggagatgcacctcaaggatcagcaggtggtgcgcggcgcactggagaaagcgctggggcctgatcctgctcccatcactctccaaaacgagagcccaatgctaaagccggcgacccagctgatcagggaggttgcgacattggagctggagatcaagcacctggagcagtacctgctaacactctacagaaaagcatttgaacagcagcagcagcaacaggcacccacattgcaatcttcagatgctaccgg

SEQ ID NO: 29952 - DNA, 652 bp, Setaria italica
  Peptide Sequence Number=SeqID_95926
ttttttaagtaaaccaacaagaataagaatattgccgagcatttaataaatagatacagttacagcagaacatgggtcacagtctcagaaggtttgcttcaaaaaaagtcacagaaggccagaaaagaaaggacaagaaatcagaagaaactatacaggcccacgagggcaggtggccgtgaattgggctggcatttcagacagcacaaattaagaaaagatctctctgacaagccaatccaagctgggataagcgaagtagaggatcagaaatgatggcagcgcaaacaaaaatgtcacgaggaaatacagcagcagaacagtggcacttgcagggacagcataaaggactatcagcaggaagagtatcacaagtggaaacttcgctgtcaactgcatgaagcacaccataagcttttggagagacgcactgatgttgtcagtgtggaaaatgttacggatgacgtttgtatctctggcagaagagctctctggtcggataacagcatttcttcggtggtgatgactggaacttggcccagcactggaatgccatgaggaatgatgttcattgtgattagtggaatggaactttgctctctcaccattcatgctctcaaccatccagagaagaaagtagttcttgcgtggg

SEQ ID NO: 29953 - DNA, 667 bp, Setaria italica
  Peptide Sequence Number=SeqID_95927
cagaacataaaccgggtcaccgaccttgatgatccttcctttgccatttgctgacagggattccttgcagactagattttgcccaaagtacacctgccgttttttgtgtgtcttggacgcagcacttcaccggaccgaaatgtccgcagagtttcatttggttcgatgccaggagttccagtttcttggtcaacggtaggaaccttgcaacagtcgcgcaacctgacacccatgaatgttagcttgttgatcttcactgttttccacagatcctctgagtatgaatggcatccatccactaaaagatttgctctgaagcggttcattcgcacaggctccttaagaatctcatttagtgcatccaatgatccctgggaggctatcagaattgggaaggcatcagagaacatcactttgtagccttgagcatagtccggatcggtcggtctagtctccgatacttctttgaagcgcactagccggctgggctttccaaggtaagaggagaaccactcggctgcctcggctccttcgtcgtacgcagagccagaccattcccacacggcgacgccatcgatcgtggcgtgctcggcggcaagagggatcttcagagggtccattccgggtgctctgataaccatgtgggagtggctggctggctgccagt

SEQ ID NO: 29954 - DNA, 275 bp, Setaria italica
  Peptide Sequence Number=SeqID_95928
ccgcggccgaaatttcacccaaccaaacctcaaagccaaaccggagagggagcaaaacgagcgcggggcgagggccgacaccacaccaccgggcaagcgcgggcgcggcggcgggggcagcagcaatgtcggcgctgcagagctggcgcaaggcgtacggcgcgctcaaggacagcaccaccgtcagcctcgccaacctcagctccgacttcaaggatctggatgtggcgatcgtgagggccaccaaccacgtggagaccccgcccaaggagccg

SEQ ID NO: 29955 - DNA, 2173 bp, Setaria italica
  Peptide Sequence Number=SeqID_95929
tcgtcaactttcgcgaaaaagccctcgccttgttcatttttactccccgcgtcggcgaatttgacacgccagcacagaaaaaaaaaaagaacgcccaggaaaaaaaaaaaccgaatcaaacgcgttcccctcccctggaggccagaaatatagcgagaaaggaagaggaatagcgccgaggacgacgaacaagcggccgcgcaggaatggcgtcgatgcagagctggcgcaaggcctacggcgccatcaaggactccaccaccgtcagcctcgccaatctcaactcggacttcaaggatctggatgtggcgatcgtgaaggcgactaaccacgtggagtgcccgcccaaggagcgccacctgcgcaaagttgtcgcggcgacgtccatcgccaggccacgggcggatgttgcctactgcatccatgctcttgctcgccgtcttgccaagacccgcaactggattgttgcactgaaaacacttgtagtgatccatagacttcttcgtgagggtgatcctacatttcgagaagagcttcttaactttacacaaaggggacgaattctacaactttccaactttaaggatgactccagcccaattgcttgggattgttctgcttgggttcgcacatatggtttgtttttggaggaaaggttggaatgcttcagagttctgaagtatgatgtcgaagccgagcgtttgtccaaacaaggtcaaggtcctgaaaagggacacagcagaactagggagttggattcacaggatcttttagagcaactacctgcattgcagcagttattataccgacttgttggatgccggcctgaaggagctgcaaacaacaactacttggtccaatacgctctagctctggtgctaaaagaaagcttcaaaatttattgtgccataaatgatggaattatcaatcttgttgataagttttttgagatgccaagacatgaagcacttaaagctcttgaaatctacagaagggctggccagcaggctgggaatctatcagatttctatgaaaattgccgaggtttggaacttgcgaggaattttcagtttcccactctgagggagccaccacaaacatttcttgcaactatggaggagtatgtgaaggaggctccgcgtatggttccagttcgagaacccttggaacttccggagaggcttcttcttacttacaaacctgaggagtcagaggaaattcctgaacctgctcctgtagaagaggaaaaagcaccagttgaagaacctgagccggcaccacctgttaccgaagttgtttcacctcctcccaagactgaggtgcctgatactggcgatttactgggcttaaatgatccaagccctgctggatcagcaatagaagaaagcaatgctcttgccttggctattgttccaacagatggtacttcaacaactggtaacgctgcatttcaagataaggggtttgatccgacaggatgggaattggcccttgttactgctccaagcaacacaacttcatctgcttctagcagtcaactgggtggtggattcgacaagctcatcttggacagcctttatgatgatggggcttacaggcagagacaacagcaacagctctatggttcagcagtgcctaacccattcatgacaaatgatccttttgcgatgtccaaccaagttgctcccccaccatcagttcaaatggctgccatgtctcagcagcatcagcagatcccaacggtgatgcaaccaaatcccttcggaccaccaatgcaaccgcagatgggcatgggccctgcaacaaacaacccttttctggatgctggctttgggccattcccagtggcgaacaacgggcatcagcaacataacccattcggcggcactcaacttctgtaggctacttagttacatgaggaaatttgtgccccagcaaatgcgatttttgtgtgattatatcatgcattatgcttggccattcttgtatgcgacccctgtattatgcgttggctttcaccacacggggctgccgagttacccgacccttgttgtaaagaaattagtgacctgtgtaacaccaagtatatgtcaataaacagtaggacatggctataattataacaaaaacaaaagagcggcggaccaattgattgaacctaaaaaaaaaaaaa

SEQ ID NO: 29956 - DNA, 248 bp, Setaria italica
  Peptide Sequence Number=SeqID_95930
ttcgtttcagaaaatcgagggaagcgggtggagcgggaagaggtcgcgcaggtcctcgaagtagtcgttctcctgcaccgtcggcgacgccgcggcccagctgggcgcctcgccggaggaggcggggccaaagctggcggcggcgttccacgacgcctctggcgacgacggctcggcgtagaggaaccccgcgtcgggctggatgtcccagaagccgctggtggcgtacaccggcgcgtcctcaaacg

SEQ ID NO: 29957 - DNA, 778 bp, Setaria italica
  Peptide Sequence Number=SeqID_95931
taagtaagtacttaagtaaaaaagggttagtttttagtaccctagtaattctacctaggtaagtattcctagtaagtcatcaaacaagaaagtacagaaattgttctgcgtgatattgaggtggagcctcgcacatcaccaagaagatcaaatgggcacaatctgcagtacgatgaacttgtgaaactgaactcaagcttagatattgaatctggtgtcctcaaggaaattgacatgaaaaatgtcgatcatagtagtagtctcactaagaaagagcaggaaaagcagatggagtgcattttagatctattatgaaattatcaaaaagaatttgtggagattgagaaaaaaattatcaagtggaaagaactgaaaacaggtcagaggatttgagtgatcattgcagccacatggtcagacaagctgtagtactaacaaaaatggggctctggtataaacaaatgcttgaaacaagacgttttgagctccaaaaggctgaagccaaggttgtcatattgggcgacaagattaatgcacatttaagccttcttcaaaagatatacttaactctggatcgctactctcctacattgcagcatcatcctggtgtaagtaccgtgcggcaatgcataaaatgctaatggttcttcttaatgtctctgtcacttctgtttcacctgattattgactaacgttcaactcaagaagatatgttagaattttgttgccattcctgcgtcttagtcagtcgtaaatagatccaagtttaatttattta

SEQ ID NO: 29958 - DNA, 1850 bp, Setaria italica
  Peptide Sequence Number=SeqID_95932
cgaatcagcattgcaagagaagacagaagaactgttcaggtttaaacgggagaaggggtcacactctcttaagaatgacttggagtttgaacctttgaggaagaaaattccagagatcatatcgagaatggatcagatcatttccaagaatataaaagtacctgcgatctgcatgactcacgatgagctcgatgaaagatgcagacttacaagcagaatagatgctttgtactacgaaaatcagcatctccgaggattgcttgcagataagatgaaagatgttaaggcattatcatctcaactgtctgaagccagtacagaactgtctcttcaattgtcatcggaagaagagctcctgagacaaattgacaaaattaggcaagagtatgaggaactccgaattgaaggagatgttagagatgagctgtaccaagctgttacaagacaattgcttgatgactctaagaacagcatggatggtgctgcactgaattttagtgcaaaaatgtcttctcttgaatctgtaatctctgaaaaggataaagaattgtatttatacaatgaagaaaatcacaggttaaaggataagttagcagagctagaaaaagggtgtttgacccagaatcaccaggaagatccagaagtcatcaaacaagaaagtacagaaattgttctgcgtgatattgaggtggagcctcgcacatcaccaagaagatcaaatgggcacaatctgcagtacgatgaacttgtgaaactgaactcaagcttagatattgaatctggtgtcctcaaggaaattgacatgaaaaatgtggatcatagtagtagtctcactaagaaagagcaggaaaagcagatggagtgcattttagtatctattatgaaattatcaaaagaatttgtggagattgagaaaaaattatcagtggaaagaactgaaaacaggtcagaggatttgagtgatcattgcagccacatggtcagacaagctgtagtactaacaaaaatagggctctggtataaacaaatgcttgaaacaagacgttttgagctccaaaaggctgaagccaaggttgtcatattgggcgacaagattaatgcacatttaagccttcttcaaaagatatacttaactctggatcgctactctcctacattgcagcatcatcctggtctgctagatgctttcctgaagacatgcaagcttgttgcagatttgagaagtaaacacaatgaaggtgacgcgacataaatgagggcagcttggtgagatctcccttggtgactaatgttttgtgttccatcaggaacatattgtttgagagggaaattggcatgtattgacgagtgacgaccactggtcacccgctggttcctcatgtgcttaaccatgtgaaacccctgcagttgcagatcaagtgaagggattcttgtctaactgaagtttcagactttcagatcctgatctggctgtaaatcttactagtttgaatcagcagttaccttgctgaacctgtgcaatacaagtacatacatgcgggcagatttccagataacaagcttcatgaggatcatcaaagaaaccatgagcgtggtagcttgtttttatctgcagatgatcgatggtcagaaatctgaaaccacatcttgtaaagaaaaatgtcaatggcagcgactggcctgctaatgtacagatgacatttgcttactcgcttgttgagtagagaatagggttacttgtttagttagcactagcagcctaggtcagaatgtattgaaggatgctctgttagaggaccagggcaccagataggtcagatgtaagccacattgtaagcggacagtttatt

SEQ ID NO: 29959 - DNA, 277 bp, Setaria italica
  Peptide Sequence Number=SeqID_95933
ttttttttttttttttttaggtcataggtaagcaaaagacgagtacaagagatatataagcacacaatcgagaatataatatataatcaacttggccgatcgatcgaatgggctggtgttatccatggggctgtttgacagaaaggatggtcttgaagagtccggcgagcacgccgacgatggagaacacagtgacgatggtcttgatgttgttgtacaagaagctgtggacggcgatccacagccacctctcctgcctgtactcctgcaggcgctg

SEQ ID NO: 29960 - DNA, 658 bp, Setaria italica
  Peptide Sequence Number=SeqID_95934
cgcccagcgtcactagcacttaacatcttttcaaacaaaggagtaatgacagaatttgaatcgttagataagtgctgtagctcttgatctgttattcttggccaatagcgaggaagtaactgtgatctcgcctttgcatccattctgggtcttccattgcgcaattgagcttggaattcactataaccagttactgggtgagaatagaattgtttctgcaatgaggacgaagccatttgcgcttgctgctgagcaggtgcaattctgatgtggtctttcggtccattctgtgatgcaaaattagaagccaatccaactgaaagggatggtggatcatcctttaaaatagatggatgatgtgaatcatgcttgaagccatccacacctgtagaagcatctggcaacgccactttccgggaagacaaagaatcattttctccaccatggtgactaggatcatgaagattatttggatgcggtccatctctgtgatagaggttataagggtatgctggatccatattggtgggctgaccgtgcccattggcatctctctcccttataatgtggttcatgccagcaggagttgttggtctgtcatgcatgtcatcaaattcctttcctgggcatggataaaagtgcgcccaggaagttaatt

SEQ ID NO: 29961 - DNA, 620 bp, Setaria italica
  misc_feature (1)..(35): n is a, c, g, or t
  Peptide Sequence Number=SeqID_95935
nnnnnnnnnnnnnnnnnnnnnnnnnnnnnnnnnnntctacgtttttttttagtttttttgcacagaccaggaagttaagatagcaatacttcggtagcgaagcaatggaatacatgaataactccccgtttacactgccgaaacgacgcgctgatcttgcaatacatacatcatacagggtatgcaaggccccacgcaacacctacggatatcctgacctatggtatacacgataacattaccactggagtctgtctggggaaaaaggaaaccagctctatggtatggaaggtaagagataacacctacactacaacacctcatgccacatttttttcttaatgggtatagacatttcggaaggatatgttggatcagctatctatgtccactctcgccggtataatcctgcctctccgctcgccaccctaagtgggattgtctcggctcaatgcaccagctgcgcccgactttggtgattgctcatcatcccgttcaggctggctgttcaggtcaatgtggttcttgacgggagaggatgtcaccttgtggtcgacagccatgtcttcaggcccatcggcatttccgactgctttcttggaagagttggttgcattggc

SEQ ID NO: 29962 - DNA, 2627 bp, Setaria italica
  Peptide Sequence Number=SeqID_95936
taacaaaacctaaacaaactaacaaacaacctacaatagccaacaattttttcttaatgggtatagacatttcggaaggatatgttggatcagctatctatgtccactctcgccggtataatcctgcctctccgctcgccaccctaagtgggattgtctcggctcaatgcaccagctgcgcccgactttggtgattgctcatcatcccgttcaggctggctgttcaggtcaatgtggttcttgacgggagaggatgtcaccttgtggtcgacagccatgtcttcaggcccatcggcatttccgactgctttcttggaagagttggttgcattggcactggttgcctgcaggccagatccagcttgtgtgactgtttggctggattggcctgtctctttcctgcgaggcgaatctgtcgtcgccctcttctcgcggcgaagcatgagtgttctgaaacggcgtcgaaccgtcatacagacgttgcaggtgcatgtttgcttgtgctttgggcccttcccgcttggtggttggatgcagacgatacatgagcagccaggtcgatggcggggatgttttgtggttggctgggaagggagagcttcaccttcaccaagaattgcaaggtttgcaagcgtgtcgagcccatctgaagcatcaatagcttcaccttctatcttcgatttgggcttttttgctccacctggaccagattttataggaatcaattctgcaagctcctccatacttatttcttgtgcagcttcgcaagaagacctttctgaatcccatttattgtcattgcatgtccatttagagggcatcagggcatctgctggcagtttcctccatttggaacaattctcacattgggcccattgatgatttgaacctgattgatctgttgcaaaatacgtctttcttccaagtatcggtggctcctcatattcctcgaactcatggccatcgacaataacaattgagggggccttaggagggggacggagcaattcttgagcttcctcccatgttatcttcaactccattgattcctcattttccatccgtagtcgtttattctttggagtgagattagttgcttttctcttaacaggccctggggaagaactagcagttcctggcccttccttaggtgctgatacgtccttatcaattttagaagtagcagcttgttccacagggctagagcttttggtttctgtgttgaccttgttttgtcgggaaattgcagcatttggactggaatctggagcagaaactttaccatttgcctctgaagttgctggggcaccatttgcaggctttgttgtttgctcctgttcagaagacatattagttgccttcctgaatcccatgatcaacttcccttctggatctattcggctgaaggttactgtatcgcctgcttgtaactgcattgactgaatacaaggtgtgacaccctccaatacatacatcctgctattattattaggccagaaacggaattgaaatatccattctttaccactggcatcctgaacctttaaagggagcccttcagcctgagagattggagggaagtacgcctcagcacacttctttggcaaaactaaacgaccaatgcgcccagcgtcactagcacttaacatcttttcaaacaaaggagtaatgacagaatttgaatcgttagataagtgctgtagctcttgatctgttattcttggccaatagcgaggaagtaactgtgatctcgcctttgcatccattctgggtcttccattgcgcaattgagcttggaattcactataaccagttactgggtgagaatagaattgtttctgcaatgaggacgaagccatttgcgcttgctgctgagcaggtgcaattctgatgtggtctttcggtccattctgtgatgcaaaattgaagttggtgtagaagcatctggcaacgccactttccgggtaagacaagaatcatttctccaccatggtgactaggatcatgaagattatttggatgcggtccatctctgtgatagaggttataagggtatgctggatccatattggtgggctgaccgtgcccattggcatctctctcccttataatgtggttcatgccagcaggagttgttggtctgtcatgcatgtcatcaaatttcctttcctgggcatggataaaagtgcgcccaggaagtaatttttcgctaccactaggcctatcaaactcaaaagcaagacgctgctgcaagtccgattgtatactggacacactccaaagattagtctgtcgccactgacttgaaatttgcccagcaggaggtctccagctttttacaggaatgtcttttctgtcagctacattttgagaattatgcattggggacgcccataccggacttggtggtgccatggcagtacgggtgttccgagcacacttggcacagtcaaccccgccagcgtcacggagctgatacttgtggatggacacgatgcagccgcaatgcaccctcctcccgcaggattcgcagttcctccagcccccctcatcggaatggaacgtctcgcagtatatcccctgttcaaactgcgaatagcatctcccgcagaggtcggcgtatatgg

SEQ ID NO: 29963 - DNA, 2719 bp, Setaria italica
  misc_feature (2604)..(2719): n is a, c, g, or t
  Peptide Sequence Number=SeqID_95937
taaccggttacggtacttagggtaacccttccttgctctcctactctgactccggcggtgccgcacagagaacagtcctacggttcgtgaagctgccgttgattgagagaatccctccgtacaccacttggatcttcctggacaaaaaccaaagaatggccgatgatcagtcagttggtaggagaagaatttactatgatgcagccggagatgaggctctgatctgcagcgacagtgacgaagaaatcccagaaccagaggaagagaaacacttcttcactgggggagaagatcagttgatatggaaagctactcaagagcatgggctgaaccgagaagttgtaaatgttctctcccagtttattgaggcaactccgtcagaaattgaggaaagatccgaagtcctatttgagaaaaatgagaagcactctggatcttctgataagatacagaggcaactttctcttggaaaaactatggatgccattctggattcttttgataatctcttctgccgcagatgcttggttttcgactgccgtctccatggttgttctcagaatttggtattcccatgtgagaagcaaccatacagctttgaacctgatgaaaacaagaagccatgcggtgatcagtgctaccttcgaccagaggagagaaggatttcaagatgcacattatgatgatctaggtggctgtgcaacatatactatggaatcaagaactgcctcacacaaagttgatgttaacatcttgtctgaatctgaagattcaaaccgagaggaagacaatattaagtccatgacatttgttggaactagcggatcaaaaataatttcttccatgagtgctgaaaaaagtactacaccgccttccgcagatacctctgaaacagaaaatgtatcctctgatttgcctctcagtagtttagggaagcacaagatttcaaaacatggacccaggtatagggagcgttctcctggcaaaaggcagaaggttttcacttctgatgtttcttttgctagcaatatactgaacaaactttccattccggagattcgtgacacaagactagagtctagagaatctggaggcgataaactacgaatccttgatgagtccactaagaagtcatcaagcaaagatatctgggggggaagcacaactagtactactgaaaatgtgggaagagacagtaataacgtaacttcaacaaagaatttcatggagcacactctttcttgttggagtcccttggagagagatctatacttaaagggcatagagatatttggaaagaatagttgtctcatagcgagaaacctactatctggcctcaagacctgcatggaagtggccaactacatgtataacaatggtgcaacgatggcaaagagaccaagtaaatccaccttgggtgactttgcagaaactgaacaagactacatggagcaagacatggctgccagaacaagaatctatcgtcggaggggccgaaatagaaagctgaaatatacttggaagtctgcagggcatccaactgttagaaaaagaattggtgatgggaagcaatggtacacacaatataacccatgtgggtgccagcaaatgtgtggcaaagattgcccttgtgtggaaaatggaacttgctgtgagaagtactgtgggtgttcaaagagctgcaaaaacaagtttagaggctgccattgtgcaaaaagtcaatgcagaagcagacagtgcccctgttttgccgccagtcgtgaatgtgatccggatgtttgcaggaactgctgggtgagctgtggagatggttcacttggtgagccacctgcaagaggcgatggttatcagtgtggaaatatgaagctccttttgaaacaacagcaaaggattttgttaggaagatctgatattgcaggttggggtgcattcattaagaatcctgtaagtaaaaatgattatcttggagaatatactggtgaattgatctctcacaaggaagctgacaagcgtggcaaaatatatgaccgggcaaactcgtcatttctgtttgatttaaatgaccagtttgtattggatgcttatcgcaagggggacaaattgaagtttgcaaatcactcgtctaaccccaactgctatgcaaaggtgatgctggtggctggcgaccatcgggttggtatctatgcaaaagaacatattgaggctagcgaggagctcttctatgattaccgttacgggcctgaccaggctccggcctgggctaggagaccagaaggatcaaagaaggacgaagcatctatctctcaccatcgagcacacaaagttgctcgatagttgaagagtggtcccgtatacaatctggtgtaaatcagtacttcaattaatacatgatttagtcctagatcattatacaagggcttcatcggtagataaacatattttatattccttcataaataagctctcagacatcaagtttgagaaaaaaaaaagaatatcaacattgtggactttaggttggaaggtgaccaccttactgtgttggcgaaaagtttgttaatcattcatggactttaggttggaaggtgacaaaaaaaaaaaaannnnnnnnnnnnnnnnnnnnnnnnnnnnnnnnnnnnnnnnnnnnnnnnnnnnnnnnnnnnnnnnnnnnnnnnnnnnnnnnnnnnnnnnnnnnnnnnnnnnnnnnnnnnnnnnnnnn

SEQ ID NO: 29964 - DNA, 250 bp, Setaria italica
  Peptide Sequence Number=SeqID_95938
actctccagtctcctccttgccaagcaaagctctccggtctccgccgcacgcgaaaatgatagacatcaagctcttccgcgccgacgaggacgccgatccggatcgcgtcctcctcgagtcgcagcgccgccgcttcgcccccgacgaggacgtccacgaggtcgccgccctcgacaacgcatggcgcaagatgcaatacgagctggaaaagatcagggcggagcttaacgccaccagcaaagcgatcgg

SEQ ID NO: 29965 - DNA, 231 bp, Setaria italica
  Peptide Sequence Number=SeqID_95939
ccgcccagggatttcagagagagcatggtggagatgatcgctgagaacaaggtgcagacgccggaggacatggaggaacttctcgagtgctatttgtccctgaattccagggagtaccatggagttatcatggaggtgttcaggggaatttggctagagattgctgaagacattgttgaggattaaggttatgtgatgtctcaggaccggtagtctcggagattaagcttg

SEQ ID NO: 29966 - DNA, 213 bp, Setaria italica
  Peptide Sequence Number=SeqID_95940
accacccgcgtccgcgcgggcagctggaagagcagccccggcgagagcaccacgaacaggatcaccgccacgatgatcgggccccagtccgtgctcggccgcggcgacatgccggcgttcatgtcgactcgatcccttcctcccccgctgagaggttcgcttttctcggcagctcaaccaaccagtgtatcgatcagccggtgtatctgtgtg

SEQ ID NO: 29967 - DNA, 2038 bp, Setaria italica
  Peptide Sequence Number=SeqID_95941
cggaggagcaactcgaatccgctcacgagccgccgcgcacatacacgagcgcgaccatgtaccgggcggcgacttcggccatttccaggtcctcctcggcgctgcggaagcacctcgcgcggggcggcggcggggagccgcagcggctgtgggcgcgggggtatgcagcgaaggaggtggccttcggcgtcggcgcccgcgccgccatgctgcagggcgtcaatgacctcgccgacgccgtcaaagtgaccatggggcccaaggggcgcaccgtgattatcgaggggtcctataaaggtcctaaaatcacgaaggatggggtcactgttgcgaagagcgtggagttcgaggacagtgcgaagaatgttggggcgaacctggtgaagcaagttgctgaagctactaacaagacggcaggggatggtaccacttgtgcaactgtacttacacaggcaattcttacggaaggatgcaaggccgtcgcagctggtgtcaatgttatggacttgcgcaacggtataaacaaggccataaattccatcacttctcacctcaaaagtaaagcatggaagattaattccccagaagaaataaaccaggtagcaactatttctgccaatggtgaaaaggaaattggagatctgatatcaaaggctatggaaaaagttggaaaggatggagtcattactattgttgatggcaaaacattggacaatgagcttgaggcagtacagggaatgaagctttccagaggatacatatctccttactttgtgactgatgagaagactcagaaatgtgagatggagaaccctctgattcttatccatgacaagaaaatctcaagcatgaattctctccttccagtactagaaatttctatcaagaatcgcaggcctcttctcattgtggctgaggatgtagaaggagaagctctgtctatgcttgtactgaacaagcatcgcgctggactcaaggtatgtgctgtcaaagctcctggatttggtgataacagaaggcacaatctggatgatatggctgtgatgactggaggagaggttgttagtgaggaacgaggtcttgatcttggcaaaatccaacaacaaatgcttggaactgccaaaaaggttactgtatctctcgatgacactatcatcctagatggtggaggtgacaaaaagcagatagaggagaggtgccaacagcttagagaatcttttgagacaagcactgcaatgtttgaaaaagagaaggcccaagagcgtttatcaaagctatctggaggtgttgctgtcctcaagattggtggagctagtgaagctgaagttggtgagaaaaaagatagggtaacagatgctctaaatgctgcaaaggctgctgtggaggagggcattgtgccaggtggtggagttgcccttctatatgctacgaaggagctcgacaagattagcacagcgaatgaggatgaaaagattggagttcaaattatcaagaatgctttgaaggctcccttgatgaccattgcggcaaatgctggcattgatggggctatagtcatcgggaagctaagtgaacaagatgaccttagtttgggctatgacgcatcaagaggggagtatgtagacatgattaaggctggaatcatcgatccagtgaaggtgattcgcactgcacttcaagatgctgcaagtgtttccttgctgatgacaaccacagaagcggctgtttctgagctcccagcaacgaaggccagaatagccagccgcatgccgcaaatgggtggaatggatttttgaggacgactcttcgtgatgtaagattgacatgttcttggccaaagacagcacatgggatcaaactttgtttccctagcggatacatctagagtttatttcaaaagaggttcaaagctgatgctgagaagtgtttttggtatagggccaatggtgatgcgacattgtgacctgaactaatttagagcctttcattttgtagactctaaatgtgtgatatgcagcttggtactgttcgaagcagg

SEQ ID NO: 29968 - DNA, 357 bp, Setaria italica
  Peptide Sequence Number=SeqID_95942
attggaaacaatatacttttataaaattgcaagtcaaagtatcatattggagaccatggcaatgtcctaaacgacttatatttggaatcagaaggaatatttgattaatgcatgtttagcatgtgaacataaatactcttatccgtcctctgttttcagttcaacagcaaggaagcagataactcacaacatgaggatgctgacaatgttctaaccaaattcacatttcaatcatttgagaaactatctctgaagttaagaccaaagccagtactataggacgcaataaaattagttaagactaagtcattactcactcaaataacaattaggtaaacttaactaaagtaaaattaa

SEQ ID NO: 29969 - DNA, 508 bp, Setaria italica
  Peptide Sequence Number=SeqID_95943
catcgcttccttgaaacgccaactcctgtacaaatttgttgtcgcagttgtagcaagaatgcccccttgcgtaaagacttgtttgctcccataaacaaactgcagagcttttccattaccaataggatatttacggtttctaaaagcatatgaggttcggaatatttgaattgtactctcaagcaattcatcattgaatggcaaaaactttggttttccctgtgtcgtaccagaacttacggagagggaagtgatgggcttcccagttagcaccagtgagttgtctccatcaactatcctttggatgtaggactctatgtcactatgcacacatagaggaatgcaggatttgaagctcttggaatctgttctcctttcaagattgaagcgattcagatactcagcatcagcatttagttcaagaatctttctcagcgtatcctgctgcacgcgtccagcatcacgcgttagcaactcaaactcatcaatgatctcatcactgctgcag

SEQ ID NO: 29970 - DNA, 1383 bp, Setaria italica
  Peptide Sequence Number=SeqID_95944
tataaataccgtaataatgtgggtcaacaccggccaatacatcaacattgagaagcaatggctcccactactcgaataatcaaacaataagatattaccaatacaacaaaatctctggcactaaatcatgcctaatggtctcattgtacaaatcatgggtatagcacacggtgaccttaaagcccatgctatgtataataccacacatcatactaaggattacagttgctcagcttctgagcaagggtttaaaggttcagggaccgcgacagcaggacacatggttatcggtgtcccatctttcatcgaacgaatcaggtcagcattcttgttctactccaagtacatcttggttgtgactgctgggtgcttcctgccagagaactcatgcaattcataggtgaactccatatccataagtcgatggttttcctttgagcgaaccatcgagaaggaaacattaacattgtctcctttagatactttcagatgtggagtcagcaagaatacctgctggccccaatgagttcccccatgctcaactggagcagtgtttaactcaacttcctccacagcagggttttgcgcactacctcgaaaatgaacatcaaaccatccagccagtgctgataatctagttccatccaggctgattggcaacgtaacttgtgctctaacttctcgaatctcatcaacagtggctgttaagcaatcaatttccttaataactgcaggttggccaataacttggtttggatggagattgttccatatcgaagacttcagatagtatttttcatgttctgcacgatatgcctttgtcaaagcattcatattgactccataataagcttgagtgtcctgaacaaatagactccagtcttccatagcaatatccaagtcttccaactttttgtcacccaaaccagttcttatgggtgctagccacatcctagcatgactaggatacattacaccatctggcttcaaccagcggtcacgcgcgcaaatgacggaatcgaacatggattctctcaaaagaaagtagcccatccactctgatataatgacatcaactttctccggcagctcaatgtcttccacggtgccctgtatcacctcgacaatgtccgcgacgccgttggcgcgcgcgagctcgcgcgcatgctccgccatgttagtcgcctcgacggcgtacaccttcctggccccggcctgcgcgctccagatggcaaggatgccgctcccggtacccacgtcaaggactaccttgccctggaagtggggagcgttgcggaagacggaggagtggtaggcgtccatgcggacgcggtcgcagagcatctccttctggtggtagaggtagccgtaggtgcagaagta

SEQ ID NO: 29971 - DNA, 459 bp, Setaria italica
  Peptide Sequence Number=SeqID_95945
taattgtgtgggtaataggttcaagaaactgccttcagaagtctggtcttcactatcagcagtctctgcacagatgctcgtgaatgacaagtagtaaaatgctatgaaaaaaattatccacaaaaactcatgagagcattaaggatagttaccaaataatgatttgatggttggtcgctttggcttgttgctctttttctttagctcagctgcaatgtgagaaaggaaaatagttcaaaaaagatgtgtaattcaaagataccacccaagcttgggaaattattaaaactagggaaaagtgaatgagcaaagataggaactatttccaaccaatcctggaagttcaggatcattcactatttcaaagttcttgtaggtatatccaacaaagttcacatccttggaagaaagcatctttctccaaggacctgcctttgatgaagtttgcattggaggtgc

SEQ ID NO: 29972 - DNA, 2288 bp, Setaria italica
  Peptide Sequence Number=SeqID_95946
tttagtaaaaaaggaagacagaatacatgcgcctacgaaggcataaaatgggtgttgatgattttgaattgctaaccattattgggagaggtgcatttggggaggtgagactttgtagagaaaaagctacatccaatgtgtatgcaatgaaaaagctaaagaagtctgaaatgttacgaagaggccaggttgagcatgtgagagctgaaagaaacctccttgcagaggttgatagtgcttatattgttaagctttactgctcatttcaagatgatgaatttctgtacctcatcatggagtatcttcctggtggtgacatgatgactttactcatgcgcaaggacacactgacagaggatgaatctaggttctatgtcgcagagacaatactagcaattgaatccattcacaaacacagttatattcatagggatatcaagccggacaatttgttgctagaccgaagtggccacttgaagctttcagattttggcttatgtaaacctctagatagcagtagcttcccaaacctgagtgaccttgactttgcagtgggaaagagcaccaatccatcatcagatggtgataagcaatcaagtaactgtactgctcccaggcggacacaacaggaacaactaatgcattggcagaagaatagacggatgttggcttactcagtatcttgcaactttttacatggtaagggtatcatttggacaacttgcttgattctcaaactcaatttctttacattgtcgcaaatcttacaacaattatatcgaaatgcagatttctgcgcaggaaaacggaactggcagcacaccccatggcatgctccaatgaacgaatgaatctcagcaacacatagaatccaagaatttacaggagagaacaaatacctccctctctatgacaaccaatctgccagattgttggcaaagaaacttttaaaaacccattaacaatgtacaggatggagtgctgccatattagatggctgttcaagggcaaacttgatagagctcttcctctgaataaccacttgattctgcagattgccatccatctgtgtgtgcaaggttaagtcttgattttctcaggcccagcttacaggtgacaggtgccaaaaaaacatgcacctgctacctatgccgtgcttgggaatcctcagaagatatgctggagtgaggtgagggctcgaggctctccggcaactccaattgtgtgggtaataggttcaagaaactgccttcagaagtctggtcttcactatcagcagtctcaaataatgatttgatggttggtcgctttggcttgttgctctttttctttagctcagcaattcctggaagttcaggatcattcactatttcaaagttcttgtaggtatatccaacaaagttcacatccttggaagaaagcatctttctccaaggacctgcctttgatgaagtttgcattggaggtgcagtctcttcaaatttttcaaagttctgtgtgtccaactcatcattaacctcaggaatgaaagctgcttccatctgatacagtttctcccactcaacacttccaagccatggatgtgcctttatctcatgtgcaccttttgttccaagtctctgatccacattacacaataacttgccaatgagatctttagcttctggtgaaagtctggcctcttcagggaattttagatgacttctccaattcactatcttcctacatgttgacattggatcttcagaataaaatggtggatatcccacaagcatttcatacattatggcaccaagtgaccaccagtcacattccatcccatatcctttcttcaaaagtacctcaggtgcaatgtaatcaggtgtaccaacagtagagtaagccaacatccgtctattcttctgccaatgcattagttgttcctgttgtgtccgcctgggagcagtacagttacttgattgcttatcaccatctgatgatggattggtgctctttcccactgcatagtcaaggtcactcaggtttgggaagctactgctatctagaggtttacataagccaaaatctgaaagcttcaagtggccacttcggtctagcaacaaattgtccggcttgatatccctatgaatataactgtgtttgtgaatggattcaattgctagtattgtctctgcgacatagaacctagattcatcctctgtcagtgtgtccttgcgcatgagtaaagtcatcatgtcaccaccaagggaagatacctccatgatgaggtacagaattcatcatcttag

SEQ ID NO: 29973 - DNA, 440 bp, Setaria italica
  Peptide Sequence Number=SeqID_95947
gtatgatcgctaaagttaatggaattgtgtcatgggcagattaatcaatatgctgccagcatgaacctaacaaagtaacaagagtcaaaactcatgccacaagtcatattgaacttctgcgcagatgtagaagtgatgacatattcctacgtgacataataaatagatacctgaaagcgcaataaaaaaacaaggtccgtgcaggtgtagaagtgaagaaatattcgtaagtgacatacctgaaagcacaataataaaaactaggtctaataggaagcctagaatctagagctttgattggagttagcacagatgcgcacacatgaaggtgactatttaggaaatgatactgccttatccatacaataaagtttaaatgtgcataagccatactgttgatccatgtacgctagtccactattcatcgcaaattcttcaag

SEQ ID NO: 29974 - DNA, 244 bp, Setaria italica
  Peptide Sequence Number=SeqID_95948
agcagccgctagtagatgagtgtgcatgagtgcaattcgttgtggtgtgcaccggaccattaacccattacctatgcaatcactgtaattggaacagcaaatcaccattaaatgctatgagaaataccaaacgaggatacatttgaaggtggtcttttaagcaagcttatttttcgccttctcagttgttgaaggctgtactcaagtttatgcacatgaatataatttgactggaaaatggcag

SEQ ID NO: 29975 - DNA, 474 bp, Setaria italica
  Peptide Sequence Number=SeqID_95949
gctccagcagtccagctacttactgtgcgagtaaacgcccacgccagccgttgcctctcgccccccgccgagctagagctagagcttgtgctgtgctgtgctgtgctgtgctgtgccgtgccagtggtgggcgcgatggacccgtacaagtacctcaagatccggttcaacccggacggctcgctgtcccgctacggtgaggcgccactcctcccggcggcgccggcgggggagcccgtggccgtcgccgtcgccacggagggcggcgaggacgccgaccaaggcccgcgccgcattgtggtccactccaacgacgtcccgctcagcgacgccgccggcacgggcctccgcctcttcgtgccgtccggcggccacgcccggctgccgctcgtcgtctacttccacggcggcgggtacgtgctcttccgcgcggcctccgagccgttccacaacacctgcgcggcgctggccgcc

SEQ ID NO: 29976 - DNA, 358 bp, Setaria italica
  misc_feature (8)..(8): n is a, c, g, or t
  Peptide Sequence Number=SeqID_95950
tttttttntttttttttttttttgtacaataagagccgaactcaagctttatatgggccctgatattcactctgaattcctctgtcaggtacattattttcactacatctgcagtgacaatatgcaaccataatcttttcatcttctgggatcatcatgcttcactggaatgaaactgatcaaattcttgaaatctagcattgaacgcagatgaggaacgatcgtcaaggctgagggatcttgctgttacgctcctttgcatacgccgcaaagcgttctagacctttaagaagtaagccttccatgaatggtttcagtgctgatccaaccggagccaaaatttcaggaatctcatatg

SEQ ID NO: 29977 - DNA, 910 bp, Setaria italica
  misc_feature (57)..(57): n is a, c, g, or t
  misc_feature (73)..(73): n is a, c, g, or t
  Peptide Sequence Number=SeqID_95951
ttcgtccttacctcccttgttgtcgttgttctctttttagttttttttttttttttntttttttttttttttntttttttttttttttttttaattcggaagctggtaaacttatttttttccaaaataaaagtgagtcattgctctgactgattaattgcaaaatctatagcacttcttctcgtagatatcccaattgcattcacaaaatcaatggagtctctccatctcctctggtacatgcttatatatcgttatgtattcacaccaatttagcaattaaccaggcaagcaacaagaactcacacctagaactgaccatcgcgtcaagccgtcaagcaatagctgccgtcgtggttctagctcattgcaagaagtagccggagatgaagaagaggaagccgaggaggaggctgccgtagatgagcagccccttctgtcccgaggtgagggagttgccgccgagcccgaactgctggttctgcgcgaacccggcgatctcgacactcttgctctcgaagaaggactgagcggcgccgcaggtggggcaccgccagtcgtcgggcagctgcgcgaacggcaggcccggcggcaccgggtaagacggatcccccgacgcctggtcgtatcggtacccgcacgaccggcactcatggatccccgtgttgagcaccgcgaacttctcctcgaaccgccgcgggtccagcttcaggccgtcgtcctcctccgtctccaacggcgcggcctcggctcctcccccagcggcgtctacttgagcactctccgcagtcgtcgttgtcgtcgccggcggcggcgaatcgagcggcttgtcgtccttggagacgtcgacggagtggagcgcgaagtgatgggacgacgacggtatcagcgacagcgtggtggcggccgc

SEQ ID NO: 29978 - DNA, 278 bp, Setaria italica
  Peptide Sequence Number=SeqID_95952
gtgtgggaggtcccgccgggggcgacggtgctggcctcctcggagaagacgcgcgtggaggtgttcgcggtcggggagcacgcgctgggcatccagggccacccggagtacaccaccgacaccctccacaacctcatcgaccgcctcaccgcccagggcgccatcgaagcgagagccggcgaggacgcgcggcggacggtggcggagaccggcgggccggaccgcgcgttctggacggggctctgcaaggtgtttctcagaggcggaggaagcagccc

SEQ ID NO: 29979 - DNA, 464 bp, Setaria italica
  Peptide Sequence Number=SeqID_95953
aaaaatttgatctcctccctcaacccacctttctctctcctgccgtcgctgctcccgcccgccgcctggatgaagccgaggtcgagcagatccgtatggacgaagctgaggccatggcaccgctccgagctcgcccgcgctgctgttccggccgccgcctcgcggtgctaccttcgaccccgccgtctgcggtacttcctggctgcctcgtccacggccacacctgcaaccccagcatgcgttgctgcagcatgaaggttgggggcgtcgctgactgaggatggacggaggagcgtcgtcacctggactcgttcggcctccgcagcaatggcgtctggaacgaaggggccgcttcactggaggctatcttctccgaatccggcaccatagccttcagatccagccgctaggtgtttgatttgtgcctttttggggagtaggttgggaggatttgaggcagatca

SEQ ID NO: 29980 - DNA, 306 bp, Setaria italica
  misc_feature (288)..(288): n is a, c, g, or t
  Peptide Sequence Number=SeqID_95954
tctgacctgtagttatcgcattgtaattgcctggggagaatctagaatcttttgtataggagtataggacacaacatttctttggctgccactggcaatgtgggaccaggcatgcaccaatcatgggattccttttggacagtactatagctgattgcaagttttcaatgaggcagacgcctgaagctggattccaaataatgcacgagtctccaataagcttgctcccttcggattgatcttgatccacacaatagtgcagcagcggtgtacaaggcgacggaaacntacctgctatcctcatca

SEQ ID NO: 29981 - DNA, 1576 bp, Setaria italica
  misc_feature (1)..(71): n is a, c, g, or t
  Peptide Sequence Number=SeqID_95955
nnnnnnnnnnnnnnnnnnnnnnnnnnnnnnnnnnnnnnnnnnnnnnnnnnnnnnnnnnnnnnnnnnnnnnntttttttttttttttttctgttggaaaccaattcttttatgaaagaccatttattgatacaccaaaaattaatgtttttttgacattagtcttgcacatatttcatgtgcgagtatatgtcttatgagtatacagccgaacacagtgatttgcaaagaaaaaatggaaaaggaaacaaaagaagaaagggtcacctgatcctcttcggtgggctttatgggccaccatgcacagagcgacaagcggtgctgcgcttgcaggctgctgcccacgtgcatgcacgagctaggtaggcatgctcacggcggaaccgttcggcgcggcgcgcgtgcggtacggagccgggaaaaaaaaaagaaaagcaaagcgggcaagcggaggagcggttcgcggcggaccgacgagcagcgacacgtagttgtagagaatagcacgtcatgaccaaccaattttatctctacttaggcctactgtatgcctattaacctggcatagtccacccacagacaagaacccaaaaatgtgttccctgtccgaactgcaaaactcattgcggtcaatgctagtttgtggcggtgcagtagtggctcgagcagtcgttgttcaatcactccagccacaatctggtacctgaggttactagaaattgacatgtacacgccatacgcaatactagtttctacaattggaatattcttggcttccttgacttcaccggcagaatccgagctgacagcctgccttgcttttatcagtgcattggtcgcagtagtgccgatcagagaggcactagttcccactgcaaaaagttttgcaccattcctcacaatagctcccgctctctgcaaaagtgtgtatgatctcccagccaaagcaacctggaaggcattatctgggcagttgtagaagaatttagaaatggctccagaattcatcgctagtggtggccgcaaagacacggttggagcaggaagccatgcaagcatgaaatctgcaactattgccatgatcacatttgcaagcacaaagtcaagctctttgacaaagttctccttccttttctcatactctgcagcactcttggtgaagacgccgatgccgcactctatgccgaccttggtgaggaagaggtcatcagcgagtaggcgctccttgaagccgccgaactgcagcagccacctggataagggcgacgcctcgaggtccacgtaccggcgcacgatatcgccggtcacgcggccgccctccacggcggcggcgaggtcggccggtaggctctcgagcttccgccccagctgcgccagcacgaacagggcctccctcctgttgccagaggcgtcgtcgccgtccccggacccgtccgcgctgccgccgtcgccctcgtctcctccgccgccgctgccgccgtcgccctcgtctcctcctccgccgctgccgccgccgccctcgtctcctccttcgccgctgccgccgtcgccagagggtagttcgtcatcgccgccgcc

SEQ ID NO: 29982 - DNA, 837 bp, Setaria italica
  Peptide Sequence Number=SeqID_95956
gttccgtcggtcggctagggccgcaggcgtgggtgcaggcactcaaggccggcgagaaggagctggaggcgcgcgcggaggccgccgagcgcgtaaccgccgaaatgcgcgccagggaggccgaggcggcggcggcggcggagagcgcggcgggcgagcagaaggcgctggagcaggagctctacgacctgaacgcggcggcggaggcggagagcgcggtgggcgagcagaaggcgctggagcaggagctctacgacctgaacgcggcggcggagcgggacgggctgctgtgcgcgtacccgcggcggcggtcgagcagggtgtcggcgacgaggcggagggcaagggcgcggcggtcgtcggtgtcgtcggcggcggggatccggaacccgcggtcgccgtccttcaccatcaagaggaagaagaaggtgatgcccagccttttcaagctcatcaagcagagaaaagagaaacgcgcgagctgagctgagcatcattgccgaagagagccgcgtcatcggcgttcagctttgctgcttgtacatgtcagattgtcaggtgtcactgcgatgaaaaatgtacagggttcttgtgcatgtgtagcagtatgcaactccatggggagactgggagagtccccaatcatcaggatttatcatccaaaatgcaaaaattgtcaaccatggttgagttcggagagttacagttgcgcatagattaaagcacgctgtgggttagtaatcatataatcacgcacattgtgcatagagcatagcatgttttgattttcaaggttaggtttgtatgcctaatttttgtgttctatatcgtagccat

SEQ ID NO: 29983 - DNA, 286 bp, Setaria italica
  Peptide Sequence Number=SeqID_95957
ctagcggctacttcactcatgcttctgaagttatgtggtggtgcagttaccctggggtggtgggatttattcattaattttgggatttcccagggctttgcttttatggtatgcacaagatggtcaaatccaatggtcggtagacattcaatccttggacattggtggccctgtattgataattcctataatagttttccaagttcttctttgtatgcgcttagagggcaccccatctaatgcacattttatcccaatgcgagctatttttctgcccataattttg

SEQ ID NO: 29984 - DNA, 352 bp, Setaria italica
  Peptide Sequence Number=SeqID_95958
ggttgacaacttcataggatgtgtggtgctctaatgcctgggcatggagaaactataaccgacgaagcaatttgggagaggcttccttacttctgggttgcaatttccatggtatttctactagcggctacttcactcatgcttctgaagttatgtgttaccctggggtggtgggatttattcattaattttgggatttcccagggctttgcttttatggtatgcacaagatggtcaaatccaatggacattggtggccctgtattgataattcctataatagttttccaagttcttctttgtatgcgcttagagggcacccccatctaatgcacattttatcccaatgcgg

SEQ ID NO: 29985 - DNA, 654 bp, Setaria italica
  Peptide Sequence Number=SeqID_95959
ttttgaaatggttatgtattcaacttagcagttgaaagacattctgctaaactaaagtgtcagcagatatcatatcaatacaactacagattttcggttaatgtaagcctacagctttgttttcgcaagaatctttttaacccatgacttgttagaggtaccacattggcaacaatgtgtcatttgagccattggtatagaattttactgcatgattcgatttaaaactacaaaaccatgtgtatatgggtaccagcaacagctatttctatacatgatggatgacattgcttgagaccttttaatgtttgataactagatgccctatatgcaggctaaatatgtaactgttactaacaacttcatctttttcatagtacttctgggttgcaatttccatggtatttctactagcggctacttcactcatgcttctgaagttatgtggtggtgcagttaccctggggtggtgggatttattcattaattttgggatttcccagggctttgcttttatggtatgcacaagatggtcaaatccaatggacattggtggccctgtattgataattcctataatagttttccaagttcttctttgtatgcgcttagagggcaccccatctaatgcactattttatcccaatgcgagct

SEQ ID NO: 29986 - DNA, 472 bp, Setaria italica
  Peptide Sequence Number=SeqID_95960
caagagaccaaactacgtactgagcctaacacaagtgcagaacacaaacgacttgacagagaacaactgacagggaacccaagccggaactatcgtccccggcgatcaggccgcatacggggtacagctacggcatgaagcgatagacctggacgacgcggccgttcatcggctgcgtcggcctgttgttatgcctgtactcctgctccaggggcgccatcagggcggcggcctgatcgaccgtcatctccctcacctgggtgaggatgctccagacgacgttctcggtgcacggcggcgtggtgaaggacccgacgtacctgtagtacgcgtgggagtgcagccgcagcggccacaggctcacgacgccggcggccaccggggcgcccttctccgcgtcgcagccctcggcgtacagcgcggccagcttgtcctgtatctgccaaaggatgggtctggcctgccgaaccgg

SEQ ID NO: 29987 - DNA, 609 bp, Setaria italica
  Peptide Sequence Number=SeqID_95961
gggggacggactagaacaaagcaatgttgcagcgtcactatcatgtatacaagctgaagcaaatctatccccttctctctttcctattatttacatctgatgaccaaatggaggcctgctcatcatctgttggtaaactggtggggctggctctgccttcggttctactggcatcatgaggcctgggtacccctgcatagctgatgaatttccaaccatctttgttggagcaagagatcctagagagggcatcggaatcgccatgcctggcgggaccatcccgaagcggaaattgcctgttgctggccccaactggctgctcggtgggagaacgaaggagccgaaaggagcggaagcaccgaaatgagcaaagctggcttgtgctggttcttgcctacggtgagagctactaccttgtgaagcggatggagcgttggcagaactggaaccggcttgcccactgtttctggcagccggaacttcatggttgtgctttccctcataagttgtgatgactgacttcagatcatgcgatgctctctctacatgcttgcgcactgaacagccgagggtgtgtactatttgtagtagcttccttggtattttggg

SEQ ID NO: 29988 - DNA, 279 bp, Setaria italica
  Peptide Sequence Number=SeqID_95962
cggagatggagtcggaggactgcttgatgaggaggatggagtccgcggagtcgagcaggtcgcggtagctgcggccgacgagctgccggagctcctcctccttggcggagatctcgcggcgggtggcgccctccgctgcgcggatctcggggatgcgcttggtgcggaacaactcctcggcgtcggccgcgccgccgccgccggggacggccgccgcaggcatcgcggccgcgcttgccttcgagcgcgcggcgagatccaagaggggatcgggaggag

SEQ ID NO: 29989 - DNA, 728 bp, Setaria italica
  Peptide Sequence Number=SeqID_95963
tccaacgccgtcgtgcactccggcaccgtctccccatcaaggtgcatagagatgagagtaccttaaatatagggaacttggtaatggttcaggcagatgagggaacaatgctgaaggtgaatttgcctgttgagttcaagggggagagtgcttgccctgggttgaagaaaggaggctttttgcagaaaataaggaccagcctggtgtatctctgcccagctgagcacatccctccaaagattgaggtggacctggcgaatctcgatgtcggagatagggtattaatgcataacattcccgtccatccatcgctcaagttgctgagtaaaaacgagaccatgccggtatgcaagatcttggcctcaaagccagttgagtcggaaacgatgcaagatttgaagagttgataacattgtacctgaggtggtacaaccatccagcagttccacctcttgttctcaacttccttttttttttgttatcggtttgcttgatttcaatgtggtagtagattgaaacaagttattgtcttcaaaatagaatgaatgaaccaagcaaagaacaatcacaagaaccttgtctgtatcgatcgctacaaaataacatcctttttctcagttcagggacatgaaatgtaagacattgtggactattgtttgctgtggcctggtgaatgggcgacctggacatgattgttttagctgtatgcctgtataagctgctcctgc

SEQ ID NO: 29990 - DNA, 340 bp, Setaria italica
  Peptide Sequence Number=SeqID_95964
cccggggatggtctcgaaccggaagccctcgtcgccggcgtcgaaggcggcggcgccccgcgcgcggaggaggcggccgtggttgtactcggtgtggacgaaggtgacgtggaagccgcgcgcgtgcagggccttggccagcttcaggaacgggttcacgtggccctgcgccgggtaggggatgagcaggacgtgcggcttggccggcttcggctgcggctccgacgatgccatgttgttctcctcctctgctcagggctgaggctgctgttgattgggctgcgtggttagggaggatgggaggggaagaatatatcagctggtcaagataagaaggtcg

SEQ ID NO: 29991 - DNA, 692 bp, Setaria italica
  Peptide Sequence Number=SeqID_95965
taagatgaaggaagctggagtaaaaaccatctattgtgacatatcacagcttgctgctgggttactgtgagaaggggtgcatggatgaagcactcaagttatactctgagatgcctgggaaaggattcacacctaatgaggtcacttacacaactctgatgaagggttacatcaagaagaatgcttttgacaaggcctattccctcctcgatgaaatgcatcagaatggagtttcttgcaatgactttacatataacattctcataaatggactttgcatggctgatcgtgtttgtgaagttgatgaaatgttgaagagatttataagtgaaggttttgtaccaagcacaatgacatacaatagtatcatcaatggattcgtgaaagctggtatgatgggctcagcatttgctatgtatcagcagatgtgtgagaaaggtataactcccaacataataacatataccagttttattgatggttattgtaggaccggctgctgtgatctggcagtgaagctgctcaatgacatgaggcacaaaggcattcgacctgacattgctgcatacaatgctttcataaatgggttttgcaaacagggtaatatgtcacatgcactccagttttttgttcttctgttgaaagatggtttaaaaccagatgttactgtctacaattgttttattacgggg

SEQ ID NO: 29992 - DNA, 362 bp, Setaria italica
  Peptide Sequence Number=SeqID_95966
tagtgccatgggaatggtgcatttctgtgttacattgatacgatagcatagtggagttagccttggtgatcagttatatgatgtatagtgaaaacaacgcagagcccagtgaaattgcaatgcatgcctctttttttagatcagtaactgtctatttatgattaatctgtgaatcattataagtttccttgttatttatttgatcaatgtcaaccaccataaagttcctctcatccgtgtaattttggaagcttacatttttttacccctgtggaatctacaatcttttaatctacctgctgctgctgctgacaaaaaaaaatcttttattagcgtcatgggcatactttagatagcctacg

SEQ ID NO: 29993 - DNA, 674 bp, Setaria italica
  Peptide Sequence Number=SeqID_95967
ggagagcctgcaccgcgccttcgacggatgcgccggcgtgtttcacacctccgccttcgtggaccctgggggcatgtccggctacacgaaacacatggcaacggttagaagccccaagcagcggagcgggtgatcgaagcgtgcgtcaggacagagtcggtcaggaaatgcgtcttcacctcttccttgctggcgtgcgtgtggaggcagaactaccctcatgaccggcggttccccaccatcatcgacgagaactgctggagcgacgagagcttctgccgcgacaacaagctgtggtttgcacttggcaagacggcagcggagaaggcagcgtggagggcagcccggggacgagacctgaagctcgtcaccatctgcccagcgctcgtcaccggcccgggattccgccgccgcaactccaccgcgtccatcgcgtatctcaaaggcgctcgtgccatgctgtccgacggcctgctcgcgacggcgaacgtggagacggtggccgaggcgcatgtccgcgcgtacgaggcgatgggcgacaacaccgcgggcgggcggtacatctgctacgaccacgtggtccggcggcccgaggagttcaccgagctagagcgccagctggcgatgccgggtggggccgcggccgcggccgcggccgcacagggcgccggcga

SEQ ID NO: 29994 - DNA, 260 bp, Setaria italica
  Peptide Sequence Number=SeqID_95968
gacgccggcggcagcagcacgtagcggagacgattagacaagatcgtcagaggcggtgtacactgtacacgacgggcgcgggcacagaggaggagacgacgcgggcgctggcgtagagagctcggggaccgagcatggcgtggcgtggcaggtgcggccatggcaacggctgcaccgcatgcagtggctcatgccatgcggctccaaagctgttgtttactggctgccacgaccagcacagcaggacactgcagtagggt

SEQ ID NO: 29995 - DNA, 241 bp, Setaria italica
  Peptide Sequence Number=SeqID_95969
cgccagtctgctgcctgcacgactgcaccgctgcttgcagacgcacacgctcaccagcttctcccggggttgcgccggcgatggacctgcagccgatgcagccgcctcccagttccagggcgagatccaggtcctggggagccggttcctgggccacggccccgcctctgtctcccaggcagcagatgaagcctcggcacgagcgcagcaggtccaccacgcccacgtactcgccaccccg

SEQ ID NO: 29996 - DNA, 286 bp, Setaria italica
  Peptide Sequence Number=SeqID_95970
gacagagtgcttgccaggacctgcaggagcgaggcgcctccagcaagaagctcagcaggtaaacagaatggaagaaggcatctgatctgatggtaacccttgacgttcacatatcaccactggttatggactgcttatttcaggtggcccacaggccacagccttccattctgcagctgtgggtgtgttcttcatgagaaaccgtgtggaatatttgtgctcccagtcccagatggagatttgcccacacccattttgatactttgtctgtttgcatgctgcaaca

SEQ ID NO: 29997 - DNA, 298 bp, Setaria italica
  Peptide Sequence Number=SeqID_95971
aacatcaggaggactcttcttgatgttcctgaagtgcagatatctgaagagcttgctgtgaacattgcgctagcgttgcgtgcggacatcaacaaagcgcttgtcttgcttcgggagcttgctctaggccatgacctgatgaagttcctaggcgtgatcgtcgccctctggattgtctcggaaattggagagctctgcgatctcctgagactgatgtacattgtggtcttgatcctgcacaccgggtcgagtgatttgatctttaatctgttctagttctccttcttgtcctttggga

SEQ ID NO: 29998 - DNA, 1176 bp, Setaria italica
  misc_feature (1153)..(1176): n is a, c, g, or t
  Peptide Sequence Number=SeqID_95972
acaaacgaaaggaaacaagaactgctacagagagaccaaagaaaagggcagaacaccaagaaaaggggaaccggctgcacctgcctgcctcccgctcatcgatcctgcctgctagtcgacaggcttgattttctcgcccggccatggctggatcggcagaggaggcgcccgccgccgcgtcgccggtggcctcgccccgggacggcgtcacggaggagacggcgtcgccggcggcgaggtcccggggcttttggctccttggggaggacaagtccgtgcacaaggctctcggtgggggtaaaactgctgatgtactgttgtggaaagacacgaagacctctgctgcagtagttggtggcgcaactatcctttggctcctgttcgaagtcgtcgagtaccatctccttactctggcatcccacgtgatgattgctacactgacgatcttgttcctatggtccaacgccactgtcttcatcaagaagagtcctcctgatgttcctgaagtgcagatatctgaagagcttgctgtgaacattgcgctagcgttgcgtgcggacatcaacaaagcgcttgtcttgcttcgggagcttgctctaggccatgacctgatgaagttcctaggcgtgatcgtcgccctctggattgtctcggaaattggagagctctgcgatctcctgagactgatgtacattgtggtcttgatcctgcacacggtgccgatactgtaccacaagtaccaggaccaggtggacgatttcgctgccaaggcacacgcggagctctgcaagcagtacaaggtcctggacgccaaggtcctgagcaagatccccagggctccgccaaaggacaagaaggagaactagaacagattaaagatcaaatcactcgacccggtggatgacacgcgacttgttttgcttatggctggtacatatcgatggattgtgtgatgagaatctgtaagaagtaatggtctgatgtggttggtggcacggtgtgtgggtatactgtgtacttatgtttgtttgatctcagaagatgttctaccagctactatctgactgtagttgcgaagatagatcgtatacaactatgctcgatgtgtcatggttagaatcgaagatcctttgatattttatgtataaaaaannnnnnnnnnnnnnnnnnnnnnnn

SEQ ID NO: 29999 - DNA, 376 bp, Setaria italica
  Peptide Sequence Number=SeqID_95973
gttcaacctcaccgtgcccatgcccttcgcctccaactccctcaaggtgcagctgcggtggttcaaggacttcatgaagtccagcttcggcaccgacgaagagatacgcaagaagcttcagagttctctggttttggtcggtgagatcggtggaaacgattacaactacgagttcttcgcgaacaagcccatgaccgaggtggagaaactgatcccaggggtcataaagaccatcatcgacgcagccaaggaagtgcttgacatgggagcaggcaaggtgatcatcccgggtaacttccccatcgggtgcgtgccgggttacctggccatgaacgccggcacgtcggagccggcggactacgacgcgtacgggtcg

SEQ ID NO: 30000 - DNA, 488 bp, Setaria italica
  Peptide Sequence Number=SeqID_95974
acaaggtgtaagaatgaagaagaacctgctgagacagaggcaactgacctggatgttaatagtgtagctgcagaacattcaagaggcaatggacctgttgctgatggagttggttcctcaaaacaaaccctggcaagtgttcttttgtctagttgaacatccaatctaccaactaatcaagagttccaggggacttgctcagcgtacttacagattctcctaatgatgcaagtccaatggccgtagacgaaccaggtgctcagaaaagttgaaacagagagctcaaacaaattgcaggaccaaccaacgatgcaacagaagccataatcgggcaccttaacttagtacctgatgcaattgcatctgtagcctgtagattctttttttcatgttcgttgaccgtagacaagccgtgacagttgaaaagctttagcagggagctgaaacaaaatgcaattggaacagattatgcatctgaacccatgaca

SEQ ID NO: 30001 - DNA, 1267 bp, Setaria italica
  Peptide Sequence Number=SeqID_95975
gctcctcaagtatcatcagcgcgttctgtacgtcgatattgatatccaccacggggatggcgtggaggaggcattttacaccacggaccgggtgatgacagtatcgttccacaaatttggggattatttccctgggacgggggacattcgtgatgttgggcactcgaaggggaagtattactccctcaatgtcccattggatgatggtattgatgacgagagctaccagtcattattcaagccgattatgggcaaggtgatggaggttttcaaccctggtgcggttgtgcttcagtgtggtgcggattccttgtcgggagacaggttgggctgtttcaacctatctattaaggggcacgcggagtgcgtgagattcatgaggtccttcaatgtcccactgttgttgcttggtggtggtgggtacaccataagaaatgttgcacgctgttggtgctacgagacaggagttgcgcttggtcatgagctcactgacaagatgccccctaatgagtattatgagtattttggtccagattacactctacatgttgctccaagtaatatggagaacaaaaacacacggcatcaattggatgatataagatcaaaacttcttgataatctatcaaaactccgacatgctcctagtgtccaatttcaagaacgacctccagaggccgagttaccagagcaagatgaagataaagagaaccctgatgaaagacgtgatgctgattctgatgtggaaatgaatgatgccaagcctttggaggactctggaaggaggagcaacatacaaggtgtaagaatgaagaaagaacctgctgagacagaggcaactgacctggatgttaatagtgtagctgcagaacattcaagaggcaatggacctgttgctgatggagttggttcctcaaaacaaaccctgcctaatgatgcaagtccaatggccgtagacgaaccaggtgctcagaaagttgaaacagagagctcaaacaaattgcaggaccaaccaacgatgcaacagaagccataatcgggcaccttaacttagtacctgatgcaattgcatctgtagcctgtagattcttttttcatgttcgttgaccgtagacaagccgtgacagttgaaaagctttagcagggagctgaaacaaatgcaattggaacagattatgcatctgaacccatgacattttgattattacatttgagtttctaacatctgcaaatggtagttttgtttcgtacaaaaaaaaaaaaacct

SEQ ID NO: 30002 - DNA, 252 bp, Setaria italica
  Peptide Sequence Number=SeqID_95976
tcgaaccacacgcgtctccattcaacagctagtccggcgcaggctccgtgtcgccgctgttgttcggccaggctgccggcggcggcgcgcgcgtagcttcaggcgatgtcggcgcaggcggggacagggacgtactccccggcggctgcggcaggggacaagcggcgggagaggagggaggagctgcggcgccacctcgccgaggatgctgactggccccgcgccgacggacgctccttccatgactgccgg

SEQ ID NO: 30003 - DNA, 1956 bp, Setaria italica
  Peptide Sequence Number=SeqID_95977
ttagtaggaaagcttggagctgtattcctcaaatagaaagtaaaaagaaaacagttgctaatacataatgtgtgtataagagccacaggaccaagatgaatcaacatcaccagtaaaatcatacagcaatttccaccagataattacttgctattttctcgcgaggcctaagaacagtgtgcactatatatcagtgtcagcaatcgatcgtcaagttccagctgaacacacacactgcctgatgtaatcccgtatgccacctagacacctggttctcgaatcaggaatctgaaacgccactgcggggaataaggcagcagcagatctaatgctcagctcagatttacaagagctcgccagccaccaggagcgagaatgatataatctggccactccagcatgtgcgatggcaaggctcaacttgtctgcaggacttggacgttccccagcgccttctcgctgtcgtcgatcacgagcttctttcgcagggccagcagctgctctccagcaccgcagatgtaggctgcggttcgcctgcctgagagagtcgctccttccatgctgtcgatgtagtcctgtttcgtgtaagatccagataggaagaagttcttaacaggcgtcttctggtcaggtctgaatgggtcatttccaggagcctcacgatacaaagattgtccaattttcaccacactggaccatgtgacttccaatccccgggcagatgggaacaattcaacaacctgcttttgaaccttactgatgatctcctcatttggcaatggcatgtatggatcaccaggagttagcacagcttggatcagggaaccttgtccttcaatgtagtaatcagcaggagatgagagtgcaaggtctgaaaaacaggaaaagtccgcatctgcagtgtacaggaggttatccaaaccgaccgccttttccagttgtcttgatttctccaaatcttgaagttcagtaacccatccattgtaccgaagctgaacagtgacaacaggaacaccatctaacttgtagatattgtcgaacatttcccattccctccattctggcggtagtagtcttttgatccccgggacatcgcaagctgcaacgtatgcatcagctttgattatctctctgcttgtggcctttgtgagaagaaggcctttaacataggtctctccatcaggtgatttctcatacaaaacctccctgcatccccaccttaagtgaaacctaccacccctgtctgttatgtacttctttattgggccacttaagtacacatcaggcgaaccctttagcatgcgtaacaaagatgcctctgtttttgtggcaaacagggtgaaaattgtaagcatgcatcgtgcactaatattatcacagtcgatgaaacccagagcataagcaacaggatcccacattcttgtgatgctctcccgagtaccacctttggacatgaaccagtcactgaaactaacatcgtccaagtcccgcacttgctgcaatgcaccatccggatcaaccagagcccgaacaactgggcttagggcaagagcaactgcatttcttgctttatcatacaccttgagttggttagttctgaggaacgcttgaataccatgtaatggggctcccaccggaaaccgaaaatcaagttcaccaattgtgccccctttgtttacaaaagtatgtgtgtgctccttcaccagcagattattatcagcgccaaccttcttcatgaggcggaaaagattgctgtaacacccgaagaacacgtgcaggcccatctcgatatggtttccttgcctatcgacaaatgagccaaccttgccgccaataaatggccgggactcatacaaatcaacctcgtggccctggtccaaaagctcgacagcagtggacatgccggcaaggcctgccccaatgatggccaccttgagcttttggtcccccttgtta

SEQ ID NO: 30004 - DNA, 237 bp, Setaria italica
  Peptide Sequence Number=SeqID_95978
ctacattgcattaataagcattcagcagcacatcccgtccgatccggctccgctttattacgtcccgcggcaccggcgtcgatcgcgctcgccggccggcgggcgccgctagggtttgggcggtgatggggaatcgggcgaggagcgggaggcgccgccgtgcgggcggcggcggggaagcgagcagcagcaagcgcctccggtgggtagcggaggaggagcagggaggaggaggag

SEQ ID NO: 30005 - DNA, 1183 bp, Setaria italica
  Peptide Sequence Number=SeqID_95979
ggctcatgccgggacggccggggtgtactcggtggctgctggtgccggacttgggaacaagatcatcagccagggcagggatgggacatgtaaatgctgggtgattgaagaagctggcctctcacggaggcccatattaacagtcaaaacaagcacataccatttctgcaagatgtcacttgtgaagtctccttcgtttacacattccgggagatcgggctcaaactgcccaactagtgatgtagagccacaaagagtagccattgaagaaaatgcagaatctcatgttgtaaatcctacagaaggtccccaagaacatggagaaggcattacctctagtggacgaaatatgatggcaattgctggtcaagaatcgtcccaggttgaactttgggacattacaagttcaaggaagataataaacttgccccaatcatcaaatgctaatacaaaagatcaccctactaagcaaaaaggcctgtgcatggctgtgcaagctttcatcccctatgaatctgcaggctacgtgaatattttgtcaagttacgaagatggaagcactctttggtgggatgtacgaaagcctgggttacctttatcttcagtgaagtatcattcagaatcagctttatccattgccatcgatgggccttgcaatggtggaatctcaggaggtgctgatgataaagtagtcatttttactcttgatcattcaaagggcgcatttactcttaggaaagaaatagaacttgagcgaccgggtatagctagcacagcgattaggccagacaacaagatcgctgcaactgctggttgggatcacaggattcgagtgtataactacaacaaaggaaatgctctagctgtgttaaagtatcacagtgattcgtgcaatgcggtgactttttcatctgactgcaagctgatggcttcctgctcgacggataccacggttgcattgtgggagctctatcccccgaaatcctaaagcaagttagacatcataaaaacggatgaggcctcatgttaatttacttaggccttcactgctgaaaagtagaatagtggatgctacatttttgcttgtatgttagtgaaggagcatttgggcggtttgtctcgctgtgagtgttgtttctgcatactgaaattttcgtgcctcggtgtagtggaaatctaaaaa

SEQ ID NO: 30006 - DNA, 242 bp, Setaria italica
  Peptide Sequence Number=SeqID_95980
gtacaggtggttgctcagttgagtgaaactaccattccttttttcaggaactgtaacatttaagaatatctccaattatcgattcgtttccattgatcatatatcatcaattgaagattaggcataggtatttgtgccactttatcttcttttgaaggaactagagccccatccttctgcaaagtaggagcaagatatagagcgcttttgtttattcttttcagaatgcatagtactgaaaa

SEQ ID NO: 30007 - DNA, 472 bp, Setaria italica
  Peptide Sequence Number=SeqID_95981
aggggatgcagtcctggtccgggcagccggcgatgttggccaccagcgcatccacgtaagactgcatcaccgggataagcccggcaagccgcgccggctggtagagcgggaccaccgtgttcctcatggccgaccacgtcgagtccctggtgaggaagagggcatcctggtggagggagccgacagtcggtggcggggtgctccggttgcggatgtccttgaacttcttgataccaacttccttgcacagctcagcattggccacgatcaccagtggctgccttcccatgtgaaacctgaagatcggaccgtactccttcgctatagcacgaaagacgtctggtccattcttggcaagaagatgaagatggcctaaaggaaacctggttggaggccccggaactttcctcacactccagaagggtgcatagaagtatatcagaaatgtcgtcttgtaactagtagttactta

SEQ ID NO: 30008 - DNA, 232 bp, Setaria italica
  Peptide Sequence Number=SeqID_95982
ccaaggtgctcaacgtcaacctcgtgctcccccatcgccatcgaggtgctcgtcaacgagtgccacaagaacgtgcccgccagcttccagtgcccgtgatcaagctcactgttaatcactacggccgcgtatataaccttaattaacccatgcatggatgcatgcatgctgatgtatattataattgatggcacatatatacgcggccgtagtgattaacagttgagcttgt

SEQ ID NO: 30009 - DNA, 253 bp, Setaria italica
  Peptide Sequence Number=SeqID_95983
gctgagctcagagctagctactagccttcgcgcgccatggcgaagaaccaccgcattgtggccctcctgctcgtcgcggcgacgttggtagcgcaggccgcggcctgcccgtcctgcccgacgccgaagccgccgcctctcgctgccgccgtcgccatgggccgaagacctgcgaggtgctaccgccagatcaagaacaagccgtaccccaagtcgaggtactgccgtggtgtacctgaccccaagattagga

SEQ ID NO: 30010 - DNA, 215 bp, Setaria italica
  Peptide Sequence Number=SeqID_95984
ctggaaacattctccttctcccagctcacaaggtgaatgtttccagtgaggcccttgaggctgcccgcattgcttgcaacaagtacatgaccaagagtgcgggggaaggatgccttccacctgagggtcagggtccaccccgttccatgtccttcgtatcaacaagatgctttcatgtgctggggctgatcggctccagactggaatgaggggtg

SEQ ID NO: 30011 - DNA, 214 bp, Setaria italica
  misc_feature (161)..(161): n is a, c, g, or t
  misc_feature (209)..(209): n is a, c, g, or t
  Peptide Sequence Number=SeqID_95985
gggggcgtgatatggtaaatgcaaaaattaatggagcagcaatgaagctgcttcaggacagaagagcagtccttggaagcaagacatatctgatcaacagtagcggacttcagtcacagttctacggaattcaataaaaataacctaacataaggaaagtntgattgtaaaacttacggttcaaggcaatatctggataggtaataagngcagg

SEQ ID NO: 30012 - DNA, 266 bp, Setaria italica
  Peptide Sequence Number=SeqID_95986
tgggtgccttatttcattgtactgcaattctatttctaatgatatgctatgattcaatctcattttctgcacacttaactaggtgctactattattttgtgaccaggacccgctagatgctaccgccagatcaagaacaaaccatacccaaagtcaaggtactgccgggggttgtccctgaccccaagatcaggatctatgatgttgggatgaagaggaagggagtggatgagttcccattctgcgttcaccttgtgagctgggag

SEQ ID NO: 30013 - DNA, 176 bp, Setaria italica
  Peptide Sequence Number=SeqID_95987
cgtgttcagggggcacttgcccgtcggcgtcgacggcgtcgggcaagtgccccctgaacacgctgaagctgctggcgtgcgtggacgcgctcaacgggctcgtgcacgccgtggtcggcgccaaggccagcgagaagtgctgcccgctgctgtccggcgtggccgacctcgacgcc

SEQ ID NO: 30014 - DNA, 417 bp, Setaria italica
  Peptide Sequence Number=SeqID_95988
catactcattgatagtctgataaaccgccacacgttcatgccctgccgttgatctagaaacttcatgaattaaaagagagagttaagcatcataaattgaaacaaatacatggcaattgataatggaggatgaatagtcttagcgcatacacttctgcaagcctgcacaatatctgattcaggttctgtagagcatccacgtactccctgaggagaaaattcaaacataaaggttcaacagacagctacacaaatatcacatggcataaccaaagctcacttaattaccttgccaaagtagcgctgcaacaaaatatccttcaccacgttgcacatgccataataatatagtaaatttgacattaccttattataaaaccactctgaccatgagggagctttacatagaggtgaaac

SEQ ID NO: 30015 - DNA, 369 bp, Setaria italica
  misc_feature (345)..(345): n is a, c, g, or t
  misc_feature (350)..(350): n is a, c, g, or t
  misc_feature (352)..(352): n is a, c, g, or t
  Peptide Sequence Number=SeqID_95989
agctgagctcagagctagctactagccttcgcgcgccatggcgaagaaccaccgcattgtggccctcctgctcgtcgcggcggctacggcaactccgatgggaactggaggagctgagcggtggggcccgcgtggccaagttatcttgtcgctactactgttaccagagttatccctatgtgtcgtctagtgtcttcgtcgtcgtctccgacctgtgttggtcttctgtttcctgttgttgcccatctgtgttttttgatcgcaagcttgttcgtcgtgtctgtcgtcagagctatcctcatctccaaacatcccatcgaaccggtcgttggattggatgttggngatgngntacagcatccatccaca

SEQ ID NO: 30016 - DNA, 527 bp, Setaria italica
  Peptide Sequence Number=SeqID_95990
caaagatgactgttctaaggcagaggagctcctcctacagagagcaaacaaagcattacagctccctggatccttaggtgttggttgccccggtgtagatctgctggcttgagtgctgggcgaccatccggatgaggccacgagccatcaggtccttgatggccctccgggcaagggaaccattgatctacaagcaaatggaaataaaaaatttagtcatgcagtggcaagaaagataattgctaaacaatatgcaagtcaattgcctcaccagactgcattcaagttctatgcactgtaattatcatacttaaaagataacaggaacatatacgagagctggcattttaaaaggaacaaaagatacacatctatcaagataaaaaacaatacacaatgttatggcaataactacaagattgcgtttatggtaaacaatcctctgtgacacctagtatacccagcaagaacacagaatgcataaactaagcgtttgtaaaaacagcagacatctaattccacagaag

SEQ ID NO: 30017 - DNA, 404 bp, Setaria italica
  Peptide Sequence Number=SeqID_95991
aaaggatgccttccacctcagggtccgggttcacccgttccatgtgctccgtatcaacaagatgctttcatgcgccggggctgataggctccagtacttggaatgaggggtgcctttggcaagccccagggtacctgtgctagggtggacattggccaggtcctcctttctgtgcgctgcaaggacagcaatgctgcccatgccagcgaggctctgcgtcgtgccaagttcaagttccctggccgccaaaagatcattgagagcagaaagtggtgagtgtgaagaatacattcaagctgttgaaccataatgatacatgtcaaattgccttgatgtcttgcttgcatcaagtttttttgttgttaattttttattcttttgtctattttccctttttctagggt

SEQ ID NO: 30018 - DNA, 490 bp, Setaria italica
  Peptide Sequence Number=SeqID_95992
gcatccacgtactcccttgccaaagtagcgctgcaacaaaatatccttcaccacgttgcacatgccataataatatagtaaatttgacattacctagcaaaacaaatctatcagtatagcattattactctgcagggaaaatgtctctttgtgaagctaaatatcgaatagctaccttattataaaaccactctgaccatgagggagctttacatagaggtgaaacaagaataagtcctaatactcgctctctgtaaagctccctcatggtcagagtggttttataataaggtaatgtcaaatttactatattattatggcatgtgcaacgtggtgaaggatattttgttgcagcgctactttggcaagggagtacgtggatgctctacagaacctgaatcagatattgtgcaggcttgcagaagttttctagatcaacggcagggcatgaacgtgtggcggtttattcagactatcaatgagagaaaag

SEQ ID NO: 30019 - DNA, 550 bp, Setaria italica
  misc_feature (539)..(539): n is a, c, g, or t
  Peptide Sequence Number=SeqID_95993
tcatgcgccggggctgataggctccagactggaatgaggggtggcctttggcaagccccagggtacctgtgctagggtggacattggccaggtcctcctttctgtgcgctgcaaggacagcaatgctgcccatgccagcgaggctctgcgtcgtgccaagttcaagttccctggccgccaaaaagatcattgagagcagaaagtggggtttcaccaagttcagccgtgctgattacctgaagtacaagagtgagggtagaattatgcctgatggtgtcaacgccaagctgcttggtaaccatggccgacttgagaagcgcgctcctgggaaggctttccttgaggctgtcgcataagttgcctagacttctacagcgggaatgcgattccagatgttttgctttagcctatcttatttgctttgtggaacatgaattccaagtgtttatgtggtattactgtgccttgtctgacctacctatcttgttgaacatcgttatgcatggaattatatgtcacctgcctacaaaaaaaaaaanaaaaaaaaaac

SEQ ID NO: 30020 - DNA, 522 bp, Setaria italica
  Peptide Sequence Number=SeqID_95994
aagtacaagagtgagggtagaattatgcctgatggtagtacaaacgaccaaaggtaaaagactaataaatttttcttagctgcctctggttgtgtggatgtctcagaatctttttggctagagatataatattccttggccactgcttatgcaaacatattttaggctctgttgttttgacagcatattttagacaggtagctataaatctttttagtgtattttagtcaatcttaatgtcctactgtttatccctacatttgtctgagcatgctccatgtattagatttgatttataatctcgagcacaactttaaaatctgattccattgtcttgtacccttgttgcagctgcttggtaaccatggccgacttgagaagcgcgctcctgggaaggctttccttgaggctgtcgcataagttgcctagacttctacagcgggaatgcgattccagattgttttgctttagcctatcttattttgctttgtggaacatgaattccaagtgtttatgtggtaa

SEQ ID NO: 30021 - DNA, 729 bp, Setaria italica
  Peptide Sequence Number=SeqID_95995
ccgtgccgctcgcgcaggcctctcactacctggtggcgccgcgcaagctcactccggtggcacggtgcctgcttctccggtcgcgtcgtcccgcctgtgggatttggcatctaccaacacacagttaccagcaatactactgttttctcctagcagctttggtttagcagtcgcgggttctggattagaataaggaaatccagaggtgaaaaccctccattgcatatagacatttcaaatattttatctataccttgatggaaatatctgcagaatgtaagatgcaaacagtcctatcttccttatttaccctggattcccctgccatttgaccgcagcaagtttacttactgcatagcatttcccattcatttggaatggatcctcgtcctcctagtgggttttcaaattgtaagagttacccaaatggaccaccaggaatgcccaatcctgtgaacttccatcaacctcagtttccacagcatgtctcattttcccatccatcgtatgccatgagtgttccacaccagcaattttcccagcaacacctatacccaccaaatatccagtatgttgttgttcagccacaatatgctccattctcactgcaccaaccaccacctcaacctgctggggcaatgtcagcaccaccgcctccaacaactggaactatgccactacctgcactaccacttcaacctccacctgctggagttgtgccatttatgt

SEQ ID NO: 30022 - DNA, 566 bp, Setaria italica
  Peptide Sequence Number=SeqID_95996
tatattataattgatggcacatatatacatcagcatgcatgcatccatgcatgctgatgtatattataattgatggcacatatatacgcggccgtagtgattaacagtgagcttgatcacgggcactggaagctggcgggcacgttcttgtggcactcgttgacgagcacctcgatggcgatggggagcacgaggttgacgttgagcaccttggccttgatggtagcgcaggccgcggcctgcccgtcctgcccgacgccgagtgccacaagaacgtgcccgccagcttccagtgcccgtgatcaagctcactgttaatcactacggccgcgtatatatgtgccatcaattataatatacatcagcatgcatgcataccaatagacatgggttaattaaggttatataactatagtgttccatatcagagatacatatagcttaagcatagctttatacatgagctctttggcttgtgataagtatggagctgcgtatatgctattttattttgtaattttgaccaataccatatcatgaaccagatatatgtatgaataagtgtg

SEQ ID NO: 30023 - DNA, 934 bp, Setaria italica
  Peptide Sequence Number=SeqID_95997
ctcttcttcgtttcctccccgcgccgccgccgccgccgcctctcgctgccgccgtcgccatgggccgaagtaagctcgcgtttcctatttccctacttttgattgcttccttgcggtgctgaatagggctacaagtctcgattagatccatgatagttctgcgaaatctgtttgatccatttgttttttattatccctgcgagctgaccgcacgcgcccagttcttgtagtttgctgttgatttgatttgtgagcctcacaaggatacctgctatttggttagttatgttgtggtcgcctagtataagttgttgatttgcgagacctgcatcgtaggaccaagcttgggcattggatattaggccctccagatttcctgtgcctaatactgtactggattgttagtctgtcctgaaatgccttctcctggtttgtaataatcactgtcataatgatctttgtgactaatggtagagcgaagaaattgattcactattagtaattgaaaagccttcttcttagggttaattcttgggattccttaatcagatgtatgctttcccttgtaaaatggtcagcaaacgcatgcttcacaaaaatttgacagattaggatgcttcctgtttgcaagcctttcccttttcttgtaacattatgtctcgatgttttatttttctttttgtcatgaagcagcactgttgcacaatctgcctagaatgcatatactcttactcttttaatacatgatgtgtatgttcattttatcattaactgcagttgatgctagtgttcgctgttgaaaacaagactttatgtttttgaatttttttcaggacctgcgaggtgctaccgccagatcaagaacaagccgtaccccaagtcgaggtactgccgtggtgtacctgaccccaagattaggatctatgatgttgga

SEQ ID NO: 30024 - DNA, 615 bp, Setaria italica
  Peptide Sequence Number=SeqID_95998
ttcttctttgggtagtaaggagaatttctccagtgaggctcttgaggctgcccgtatcgcttgcaacaagtacatgaccaagtctgcaggaaaggatgccttccacctcagggtccgggttcacccgttccatgtgctccgtatcaacaagatgctttcatgcgccgggggctgataggctccagactggaatgaggggtggcctttggcaagccccagggtacctgtgctagggtggacattggccaggtcctcctttctgtgcgctgcaaggacagcaatgctgcccatgccagcgaggctctgcgtcgtgccaagttcaagttccctggccgccaaaagatcattgagagcagaaagtggggtttcaccaagttcagccgtgctgattacctgaagtacaagagtgagggtagaattatgcctgatggtgtcaacgccaagctgcttggtaaccatggccgacttgagaagcgcgctcctgggaaggctttccttgaggctgtcgcataagttgcctagacttctacagcgggaatgcgttccacaccagcaattttcccagcaacacctatacccaccaaatatccagtatgttgttgttcagccacaata

SEQ ID NO: 30025 - DNA, 545 bp, Setaria italica
  Peptide Sequence Number=SeqID_95999
tgaggctcttgaggctgcccgtatcgcgtgcaacaagtacatgaccaagtctgcaggaaaggatgccttccacctgagggtccgggttcacccgttccatgtgctccgcatcaacaagatgctttcgtgtgctggggctgataggctccagactggaatgaggggtgcctttggcaagccccagggtacctgtgctagggtggacattggccaggtcctcctttctgtgcggtgcaaggacagcaatgctgcccatgccagcgaagctctgcgtcgggccaagttcaagttccctggccgccaaaagatcattgagagcagaaagtgggggttttcaccaaagttcagccgtgctgattacctgaagtacaagagtgagggtagaattatgcctgatggtgtcaacgccaagctgcttggtaaccatggccgacttgagaagcgcgctcctgggaaggctttccttgaggctgtcgcataagttgcctagacttctacagcgggaatgcgattccagatgttttgctttagcctatcttattttg

SEQ ID NO: 30026 - DNA, 796 bp, Setaria italica
  Peptide Sequence Number=SeqID_96000
atcaatttgcgctagagctctactcgatcgcaagtgaggacccattgctaggagcagcagcattcgccggtacagacatgtgcacgatcagctccaccacaatatacacctcggacaccaccttggccatcctccacagcacgtagccggcggcgcgccggagttggcccgtcccgccgacgatcgcgagctccgacttgtcgtcgtagatcccgacgcggccggcaatgacgaaggtgctgccgctgtacggtccgtcggtgagcgcgacggtgacggcggccacgaggacctcctcgtgctgggaggacagcatgtaggtgccctgcgcccggccgacggagccggagtcgatgccggggccatcggtgacgaggtcgtcgatggccatcgtgtcgccgaagtacgcgcccttcagggacttgtgcggcggcccggcgttccggatgaggtggatggccgtctgctccgggccgccgatgatgtcgtgcatgtataaccgtaggtgcaccgggcgccggcgggcgtccgcggagggaagcaagagaacgatgacggcgacgagtagtagcagtctagcagatgctgcggctttgcaaagctggccattgtgatgagtttgtgagatgctggttgctggaatatatccaggatttattatagttgggcttagcaaaagcaatttcataatccttattaggccatctgtagaagcaattcgtcatggggaaaacagaatagtgatgaagcatagtatgaaatgaaagatcatgtacgactataataaggttgtatt

SEQ ID NO: 30027 - DNA, 1404 bp, Setaria italica
  Peptide Sequence Number=SeqID_96001
cccttattattttctctttcttcaacaaataatctgtgacaatttacaactgtttaaggctacaaatcaatggaattgaacccccaccccaccctcaccaacctaacctcttgtctatgtacatcacggtaacaacagctatgtcacttcaccaaaaattcaagggatacacatcagttcctacgccttctcatcatctgttcctacgctttctggttggctcgtgtcttgattggctttagcttcaaccccatgctctcgggtgagaggagctcaggtgatatgcagaatgggttcagagggctgcgagggctgcagtttatctggctcggcctgtacaagccatatcccatgaggaagtattccattggtataagcattgcatgtggctgctcctctgtcacaaccgatccgcaagcttgtacctccacgagagcactatatcggctatcaagctttgcagtcatgtgaacagcctcagcatggaactgggagttctcaccaacaaaaattagagttctgcactgcagctgcttcaggttttctgtcaagtcttttctctcattgatagtctgaataaaccgccacacgttcatgccctgccgttgatctagaaaacttctgcaagcctgcacaatatctgattcaggttctgtagagcatccacgtactcccttgccaaagtagcgctgcaacaaaatatccttcaccacgttgcacatgccataataatatagtaaatttgacattaccttattataaaaccactctgaccatgagggagctttacatagaggtgaaacaagaataagtcctaatactcgctctctgtactttgttgcaaagagagtaagaatgtatgcgcccgcagtgacacctaaacacataacagaatccaatccaaagaaatcgagtacgtccgcgacttgatctgctaagtcatcaacagatgccaccggtgtgctcggcaaaattggagcagctcctaactcatgtcctggggggctgatatggtaaatgcaaaaattatggagcagcaatgaagctgcttcaggacagaagagcagtccttggaagcaagacatatggttcaaggcaatatctggataggtaataagagcaggcttatcatggtcaccatatatggcaacagatacagatccgtgatttgtttgtatatggtgttccttgcctccgaaggagatgcgctcgacgtccaccgacacgacggagccgccggagtcgcccatccccgccgccgccgccgcagccgaccgcacgtgcactgctgtcaagctgacgtggctcctcctctcctccctcccactcctgacgcctccgatttcacctaccgccccttctttctctctccaagatgctccggccgcccgctggcttgcttcc

SEQ ID NO: 30028 - DNA, 1062 bp, Setaria italica
  Peptide Sequence Number=SeqID_96002
cccccgccgccgccttctccttctctacgtcgccttgcctccaccgtcgccatggggagaagacccgctagatgctaccgccagatcaagaacaaaccatacccaaagtcaaggtactgccggggtgtccctgaccccaagatcaggatctatgatgttgggatgaagaggaagggagtggatgagttcccattctgcgttcaccttgtgagctgggagaaggagaatgtttccagtgaggcccttgaggctgcccgcattgcttgcaacaagtacatgaccaagagtgcggggaaggatgccttccacctgagggtcagggtccacccgttccatgtccttcgtatcaacaagatgctttcatgtgctggggctgatcggctccagactggaatgaggggtgcttttggcaagccccagggtacctgtgctcgtgtagccattggccaggtcctcctctctgtgcgctgcaaggaaagcaatgctaatcatgctgaagaagccctccgccgtgccaaattcaagttccctggccgccaaaagatcatccgcagcaggaagtggggcttcaccaagttcacccgtgctgagtatctcaagtacaagagtgagggcagaattgcgcctgatggtgtcaatgctaagctgtatggtgtccacggtcccctgtccaagcgtgcccctgggaaggcgttccttgcagagaacattcaagtgtctgcatagactaatatctcttctggaactccagagattttttgcttagatgatctaattccgcatgctagaacttgagtaatatcttgtttgaatgatcaacttgtgtagccagtttgatgtggaggttaaatatccataatatcttgtttgaacccttgcctcagtcgttatcaaaagggttcatctttttgggctgaagagtctatcttttctgaaccccttgtgctctgatttgcattatttttttcctgtctttgtacctttttggtcatgttctcagtttttttgtttgggggccgattcagagtcccatgacaaaggatcaggtttttcaacattgtg

SEQ ID NO: 30029 - DNA, 986 bp, Setaria italica
  Peptide Sequence Number=SeqID_96003
ccgttcttcgtttcctcccctcgccgcccgccgacgccgtccgccgacgccgtcgccatgggcagaaggcctgcgaggtgctatcgccagatcaagaacaagccgtatcccaagtccaggtattgccgtggtgtacctgatcccaagatcaggatctatgatgttggaatgaagaggaagggagttgatgagttcccctactgtgttcaccttgtctcctgggagaaggagaatgtgtccagtgaggctcttgaggctgcccgtatcgcgtgcaacaagtacatgaccaagtctgcaggaaaggatgccttccacctgagggtccgggttcacccgttccatgtgctccgcatcaacaagatgctttcgtgtgctggggctgataggctccagactggaatgaggggtgcctttggcaagccccagggtacctgtgctagggtggacattggccaggtcctcctttctgtgcggtgcaaggacagcaatgctgcccatgccagcgaagctctgcgtcgggccaagttcaagttccctggccgccaaaagatcattgagagcagaaagtggggcttcaccaagttcagccgtgctgattacctgaggtacaagagtgagggtagaattatgcctgatggtgttaacgctaagctgcttggtaaccatggccgacttgagaagcgtgctcccgggaaggctttcctagaagccgtcgcttaagctgcctgggcttctacagcgggatgttttgctttagcttatcttgttttgctttctggaacaggaactaagtgtttttggtattacagagccctgtttgaattggcgttatgcggttgaattagttatcttgtgtcgtatttgattgagaatgtgctgctgctgaatgcccctatcgaggattatggttctgaatctatcgttaatgcggtggtgtttatggtgccacgttagcatgacaattggaatggtccaaaggtttgggg

SEQ ID NO: 30030 - DNA, 952 bp, Setaria italica
  Peptide Sequence Number=SeqID_96004
ttttttttgaccaaaaacaagcaaaaagcaatgcagcaaaggtgtaaacatccacacttaacacgtatcacaggcacatcaacacagatttcccaagaagctttgctaccggtgtaggaatctcagatctcacaatgggaaagctttccaattcagggagcaaaaagctattgaggcaaggtaacttatgataggcaaaccatagtaacgaactaatgcgcaaaatctctgaaatgtttcagccacatagagatactcatcacaggtaacataaccattagcaaactcttgacaaagatgactgttctaaggcagaggagctcctcctacagagagcaaacaaagcattacagctccctggatccttaggtgttggttgccctggtgtagatctgctggcttgagtgctgggcgaccatccggatgaggccacgagccatcaggtccttgatggccctccgggcaagggaaccattgatcctgaggcgctcggagaggacggagggggtgatctgcttgtacttgggcgcctcggtgagcagcttgtcgtaggtggcctggtcgaacagcaccgagttgttcaccttctccttttgctttcccttgctccacttcttcttcttctgcttgccaccgccggacttggccggcttcgacgacggcgatgttgcggccgtcgagctccttgccgttcatgttctcgatggcgtcgagctccttgccgttcatgttctcgatggcttcgagcatcgactgctcagtggagaaggtgacgaagccgaacccgcgggacctcccagtctcccggtcggtgatgaccttggagtcgacaacgtcgccgtaggaggcgaaggcaagctggagggactcgctgtcggtggcccatgcgaggccgccgtacgtaagtctaacggttacttcctacgttccgtccgtccgtcctattcttcct

SEQ ID NO: 30031 - DNA, 1062 bp, Setaria italica
  Peptide Sequence Number=SeqID_96005
agtccaagctcgggttcactgtgtacccatctccccaggtctccacctcagtggttgagccctacaacagtgtccctgtccacccactccctcctcgagcacactgatgttgctgttctgcttgacaatgaggccatctatgacatccgccgccgcctctcgctgccgccgtcgccatgggccgaagacctgcgaggtgctaccgccagatcaagaacaagccgtaccccaagtcgaggtactgccgtggtgtacctgaccccaagattaggatctatgatgttggaatgaagaggaagggagttgatgagttcccgtactgtgtgcacctcgtctcttgggagaaggagaatgtctccagtgaggctcttgaggctgcccgtatcgcttgcaacaagtacatgaccaagtctgcaggaaaggatgccttccacctcagggtccgggttcacccgttccatgtgctccgtatcaacaagatgctttcatgcgccggggctgataggctccagactggaatgaggggtgcctttggcaagccccagggtacctgtagactaagggtaggaacaattggccaggtcctcctttctgtgcgctgcaaggacagcaatgctgcccatgccagcgaggctctgcgtcgtgccaagttcaagttccctggccgccaaaagatcattgagagcagaaagtggggtttcaccaagttcagccgtgctgattacctgaagtacaagagtgagggtagaattatgcctgatggtgtcaacgccaagctgcttggtaaccatggccgacttgagaagcgcgctcctgggaaggctttccttgaggctgtcgcataagttgcctagacttctacagcgggaatgcgattccagatgttttgctttagcctatcttattttgcttttgtggaacatgaattccaagtgtttatgtggtattactgtgccttgtctgaacctacctatcttgttgaacatcgttatgcatggaattatatgtcacctgcctcatggaattttatctcacttgtgccagtatctgattgggaatgtg

SEQ ID NO: 30032 - DNA, 605 bp, Setaria italica
  Peptide Sequence Number=SeqID_96006
ccgccgccaatccatcaggatcggagatgtctgaactcgtctgcggcggctgcttcaccatgctcgtgtacaaccgcggcgccgccaacattcgctgcccgcactgcggcagggtgaactcgacaagatcagcagcgaaccagattggccacctgtcatgcgggcattgccggactactctggcatacccaccgggagcctcaaccgtcggatgcccaacatgtcgctgtgttaatcctgtcaggaacaacaactctggtggctccgcacggcctgcgcaatcggatgctcggccccagacggttctggtggagaatcctaagacgctggatgaaaagggcaaactggtgagcaatgtcgccgttggcgtcacctcgtggaaaagatgaccaagctaaaacttctccgcggcaccagcatcccgaggatctactgattaaaccctcggtgatgaaaatgtataactattatcatcgaattaatgtaaaatcaagtgtgttttgaagcttgataaaaaattgtaacagttgaacggcaaaagatctgaaaatgtaaatatgatggccgtgtgcgctagcctatgtactccaagccaaaaaggaata

SEQ ID NO: 30033 - DNA, 296 bp, Setaria italica
  Peptide Sequence Number=SeqID_96007
catcccggcaactgtggagatgatgagggcctggccggtggggttgatgttggccttcgcccacggcagcatccgtacgcttgccagggtggggaccgcagaggcaatggtcgctacagctgctgccttagctcctgcaagtgtcgcctctcgcgagcaacgcttggcgagggcaagcttctggtcgagggatgcatggctcacggtcgacatgatcctgttcttttgctggagaagatcagaagaatgaagcagacgatgggcgagtagcgatggcactgagcagctaggaggag

SEQ ID NO: 30034 - DNA, 302 bp, Setaria italica
  Peptide Sequence Number=SeqID_96008
catggaggccatcgtgaaggagaccatgcgcctgcatcccgttgctccacttatgtcgccgcggctgtcccgggaggacgtgtccatgggccgctacgacatcccggcgggcacgcgcgtcctcatcaacgtctgggccatcggccgtgacccggcagtgtgggaagcccccatggagttccggccggagcggttcgtcgggagcggcgtggacgtgaaagggcaggacttcgagctcctgccgttcgggtccggccgccggatgtgccccggcatcggcctcggcctcaggatggtgcaca

SEQ ID NO: 30035 - DNA, 352 bp, Setaria italica
  Peptide Sequence Number=SeqID_96009
ggcctagccacttccggcagtctcattccggagaggcggagacagcaggatagaagagaggcagcagcagaggcggagaaggcggctggccggaggagcagagagcacccagccaggaggaggaagacgaagacgaagcgagggtccgaggatgccgtgcctgaatgtgtcgacgaacgtcaacctggagggtgtggacacctccgccatcctcgctgaagcctccaaggccgtcgccaacatcatcggcaagccagaggcctacgtgatggttgttctcaaaggttcagtgcctatggcatttggaggcacccaggagcctgcagcttatggtgagctggtttccattgga

SEQ ID NO: 30036 - DNA, 1217 bp, Setaria italica
  Peptide Sequence Number=SeqID_96010
agacagagacagcagcaggatagaggagcggcaccagcagaggcgcagagcagaggcggagaaggcggctgtggccagaggagggtgcaggcaggagaaggaagaggaagacgaagcgagggtctgaggatgccgtgcctgaacgtgtcgacgaacgtcaacctggagggtgtggacacctccgccatcctcgccgaagcctccaaggtcgtcgccgacatcatcggcaagccagaggcctacgtgatggttgttctcaaaggttcagtgcctatggcatttggaggcacccaggagcctgcagcttatggtgagctggtttccattggagggctgaaccctggtgtcaacaagaagctgagtgctggcattgcttctattctggaatcaaagctgtccattcccaagtcccgcttctacctcaagttccatgattcaaagggctcggactttggttggaatggctccaccttctagatttgaggtccatgggtgtggctccagtgaaggaagattgtgttccctaatgtgttgtccattgcataatggcctaataaggacactgttgtaagatattagttaatttgtgctgaactgaagtgaaaactgtcatgtggaactggggcacagacttgttcaatgcaacatagcatattcgtgctgtgctgtgttggcttgcacaaatttggttatcttggttggtcctttgggtttggtatggtaagcttgaaatgattgtgtctatcttgttctgtttgataggggatgatggctggtaagtgaacttgcaaagggttacttcttttgtcttgtttgttgtattttgtaagcctctcgcgcctctccctttccctttgccccctcttctctcttcccctcgcgattcattgcctgtgtaggacgtctctcctcttgcatctatttggttggtggagattatgcttccattttgtaattggctcctgcaacctgttagggttttgagcaggatgtgcatcactgcatgtcacctttctgtaggctatcaatcgattaatcgtgttttccgatgctagtttaaagagaattcgtgtggatcagtaaaatctcgcaacattcccctttgataaatactacaattggggattttgacctctaggcttttattcattttgggggagtattctttaggtttttcatggacaccccgatgttgattctcactgcactcactcgaa

SEQ ID NO: 30037 - DNA, 1129 bp, Setaria italica
  Peptide Sequence Number=SeqID_96011
cattagcaagcctaatgaggatgacagtggaggtaacatcacatcattaccgaaggcgaatgggtctgccaggggaccccgagtcaaattcagggtcattattgaaatcatctccaaacattcatcgattacaagccagttctgatgattgggaacatgcttctggaacaaataagttgatttctgctggtggatctggcaatcctaagcgtacgaaatctacgcattcattgtctcctcccactcagtggggtggacagaggcctcagaagatatcccgttcagcaaggaagtcaaatttagtccctattatcaccactgatggtgcaccggtaccgggttcgctagatagtcctgtcaatgaagattcagcagggctgccaaggcgtgcatctgtaaatggtattcaacaaacaaaacggggagatcatgggctctcaactggatctgaaggtgatgagcctgtagttgctgaaaagaagttaagagacagaagcaaaagggctggtgaactggatgatgggcatggctctggttttcagaagattgctatgcttgggcatccttccaaaaggaataagttgtctgctgatgaggatattggagatgctgcaaggagacaaggaagagttggacggggttttactccaaccaggcctggcactcctgtatcaatggacaagcttgaaaatgctccaactacaaaacaaagaagtgtgaggacagtctcagagagaaatgagagtaaatctgggagaccaatgatgaagaagatgtccgagcgcaaaggcaatgcacggcctaggcatgcaaataacagtgtgcaatcagactctcctgtgcaatcagaagatgatcatgaggaacttcttgctgctgcaaatgctgccctaagatctgcttgcgcaagtccattctggcggcaggttgaacctttcttcgcttttttaaccgcagaagacatggcctatcttagtcaacagataaatttgtcagatgattccagctcgagcaggtcagtagaaggagatgaaggccaaaaatataagggtggtctggagtacatttcacagccatcaactccagctacaagcaataaagatgatcacaccgcccttccaaatggttt

SEQ ID NO: 30038 - DNA, 240 bp, Setaria italica
  Peptide Sequence Number=SeqID_96012
tagattggcaatgctagcgcgggcgtttggcgttgtgggcaaagcatggaagcgaacgcggcatatatccatccaggcctcgatctcgccgcgccgctgctcccacatgtcaccgcagctttgccacctccacagcagactggcgcaaccggaaaatttccctgaagaacagaacgcgctacaaaacaatagcggaggagctccgccaatgctgaattatatctacgaacagaaccggag

SEQ ID NO: 30039 - DNA, 720 bp, Setaria italica
  misc_feature (671)..(720): n is a, c, g, or t
  Peptide Sequence Number=SeqID_96013
ttgaatatcgtggtgaacaagttagacgaagtgttgctgacttgagggaagcacgataccatagagaaaaaaagattgctatctcttcaagataagtgaagatgttgtgattgatgcaacagagaaaggaaacatagcacgtctaattaatcactcgtgtatgcctaattgctatgctaggatcatgagtgtcagtgacgacaggaaccagatcattcttattgccaagagagatgtctctgccggagaagaactgacgtatgactacttgtttgaccctgacgagtcggaagattgcaaggttccatgcctgtgcagagctcctaactgtcgtggatacatgaactagaagagtaaaccacctcacagctcacaaggactgagactaactgcttacagacgccaaaggccggccattttttcccaaagattcagccagattctttcgtttgttcgccatgttttgctcaattgatgcgtggcaatcaagattatgctattgccacatagtttattcagattgcaatgtagagtaggtagggcctacagtattaggaaaaaaaaactggctgccatagccatccattgtatattcttccattggtgtagtgtaataataagaatgcttatatttccattaatgtatacgctgcagggcataaattaaaacnnnnnnnnnnnnnnnnnnnnnnnnnnnnnnnnnnnnnnnnnnnnnnnnnn

SEQ ID NO: 30040 - DNA, 456 bp, Setaria italica
  Peptide Sequence Number=SeqID_96014
atcccaaggactaccagcaccagcagccggcgcagcaccaggagcagcagcagcatcaccacctgcaaatccaaatccaccagccgcagcagcaggacgggggcggcggcgggaaggagcagcagcagctgctgcaggtggcggcgccggcggcggagcggagggtcgcgctcgcgcccaagcggagctccaacaaggaccgccacaccaaggtcgacggccggggccgccggatccggatgcccgcgctctgcgccgctcggatcttccagctcacgcgggagctcggccacaagtccgacggcgagaccgtgcagtggctgctgcagcaggccgagccggccatcatcgccgccaccggcaccggcaccataccggcgtccgcgctcgcctccgtcgcgccctcgctcccctcgcccaactcggggctcgccaggccgcaccaccaccacccgc

SEQ ID NO: 30041 - DNA, 283 bp, Setaria italica
  Peptide Sequence Number=SeqID_96015
aaggtactgcgctatggtgcaacacttttctgccctatctgattgttgaagctggtgaactaaatgaattcgcactgcatttgcgagttgccgagccgagacaagtgcgaatttcatttgaatgtagaatgcaagttccattatttgtttaccagctctaattggaagtaatttcatgatcttcaatctatgtcagggcttgtgtttaattacaggatgcgagatcctgaaccctcaacaaatacttctaaaaagcagaagatataggaccacaaataaggcc

SEQ ID NO: 30042 - DNA, 297 bp, Setaria italica
  misc_feature (266)..(266): n is a, c, g, or t
  Peptide Sequence Number=SeqID_96016
aatgcacgtcgtggatgcgaaccccggttttcagttcagttgtattcagaatgatgtagcaattcctggagtagaatttgccgtgctggggtttcgcaaccgggaccagaccgctccccacaatgcaccaaatgtccaggccaggcttgtcgccgacgcctaggaacgcatcgtcgacgcccttcatggccaccacgacgggcggcggcgctggaacgaccgcagctacagaggtgcagaagcaagcgagcaagtggggagggganctcacctccccacccggcggctgcagtgctg

SEQ ID NO: 30043 - DNA, 349 bp, Setaria italica
  Peptide Sequence Number=SeqID_96017
gctccggtgaggtgggtgcgtcggaggcggttagcctcgtgttccgcatcgcgacggtggggctgtccctggcgtcggcaatcatgacggccgcctcaacgcagtgcgtgtaccgggacgacggcgttcccgccggcacggtctcctacggcgactacgcctccttcaagtactcggcgctcgccgacctgctgtccgcggtgctgcagggcgtggcgatctacctggaggcgacgaggaaggacagagcggccagggccgtcgagctcatcgacaagctcgtgcaggccctcacgtcctcgtcggcggcgctgctgctcgccgtcgacgacatcacctcctgcggagg

SEQ ID NO: 30044 - DNA, 322 bp, Setaria italica
  Peptide Sequence Number=SeqID_96018
ggcgagcgaggtgccgtacaggctgcagatgtttaagattcgcatggtttacgcgtccgacgtccggaaggaggactatgaggtggctgacgagaggattaagccggtggtttctgaggccaatgagaaggctcttccggatttgctttcagacccgccgcagcttgaagatgtacttggaaagcctgaagctgagctgtgcccattgtggataaagaagttcaatagagagctaatgcaaacgttatcctattcggagcatgagacgtttgaccatcccgtggcatgtcttctggttgtgtcgtcaatggataaagaaccc

SEQ ID NO: 30045 - DNA, 519 bp, Setaria italica
  misc_feature (476)..(476): n is a, c, g, or t
  Peptide Sequence Number=SeqID_96019
ggttggagcatttgacaagcaggagctcttttagattaggcatgttatggaagaagtcgccttggaagttgcttatattttgaataggatagatcgaagtagtagagcgagctgagctttttgttgttgttgttttcaaggagagtaatttctgtatctgggaagctgaatggacttgtgaggttatagcagcccctaagagaaagcaattggagtttttggagacaacggattgaaggaggaagtgattctagaggagtgtaggaaagatccagaacatgaaggcaagaaagcttggccaagaaatgattagattgaagcttcatgaacaacctcgactgctgggggcaatgccttataatgagtgttgttggaccgctggctccctgcctttaaccattctctgcttacatgccatccttgatcacccagatgtgagatccaccgcatgcgctccagtccaggatgatttcccncacacaaaaaaacttcttctgttgtgtggcactctgcaacaag

SEQ ID NO: 30046 - DNA, 261 bp, Setaria italica
  Peptide Sequence Number=SeqID_96020
cgtcctgtatagacgtgtaccgcggtgccatcgagttatcgcgcgccgcgttcgacgcggcgaacgccctcggcatgccgcccatgcgcatcctcgacatcggaggtggcttcatggccggctccacattcgacgacgcggcggcggtgatcaacgacgcgctcgcgcagcacttcggcgacctgccatgcgtggaggtgattggagagcccgggaggtacttcgccgagacggtgttcacgctcgccgtgcgcgtcatcg

SEQ ID NO: 30047 - DNA, 273 bp, Setaria italica
  Peptide Sequence Number=SeqID_96021
agcgaatcgaatcatcatccccttccccaaaaaggccccaccgcgccgcgcccccaaatcagccgcagcatcgatggcgcctaaggcggagaagaagccggcggcgaagaagccagcggaggaggagcccgcggccgagaaggccccggcggggaagaagcccaaggcggagaagcgcctccccgcgggcaagtccagcgccggcaaggacggcgagggcaagaagggcaagaagaaggccaagaagagcgtcgagacctacaagatctacat

SEQ ID NO: 30048 - DNA, 194 bp, Setaria italica
  Peptide Sequence Number=SeqID_96022
aaagttcgccagcatcagctctacggcggccatcccgaagttcattccagcgcacatcctccgtccagacccgaaaggcaggaactggaaatcgttacctttgaagctaacatgtgcagcgctggcatcaccgatgaacctctcggggatgaactcctcggcatcgtccccccaaatcgggcgtccctgccgat

SEQ ID NO: 30049 - DNA, 452 bp, Setaria italica
  Peptide Sequence Number=SeqID_96023
acctgtgcatctgataggatgttactgcttctggttaaaagatcatgatgtttgatttagctactgtaaggagaaatctactcatccaggcaaggtaattaaatgatttgttcacatataacatccactgtggagggttatctggaaagaaagaataccctagtgccgtaagctaacaggcttggcatttattaatgcagctatatattttataccctttgctgtatgtatgccacttctgttaataccgaagttactttctagttttgacttgtgataatggtgttgagtttcgaactcctgctgggtccctgcctaatcattagtgaatgggggatttgtttcttatgaaaaaaggctgaagtgcatattctgtttttaatgtttgttattcccgttgatcaagttgaagttaagctgatggcactattgatgtacctgtttagcaaatt

SEQ ID NO: 30050 - DNA, 307 bp, Setaria italica
  Peptide Sequence Number=SeqID_96024
ggaggccaccctggcgtcgctcaggaagtaggggtggaccaggacgacgccgctgattctggcgctccccgggagcccctcggcccttgcgcgcatggccatgtggtgcgcgatgttggcccccgcgctttcgccggcgaggcacaggcgggagaagtccgcgtggtcggcgagccagggctcctcgccggcgccgccggaggcgtgggaggcgacccagccgagcgcccgccacgagtcctcgtacgcggcgggaatggggtgctcgggcgcgaggcggtactcgacggagaccacgacggcccgg

SEQ ID NO: 30051 - DNA, 310 bp, Setaria italica
  Peptide Sequence Number=SeqID_96025
ttcatgaaattgaccctgactctgagagcagttcctatgactctctgaatgatagtgcatctgattatgaagatgcaaatattggttctgcaagctgtgggaataagaatgttggaaaatcaaaaactggcatgactttggtaaaagaaaacaccgaaaatgagttggatctgtatccaggaactgatgattttgatgtttcatgcggggagttccttgaaggcttgcaacctgagagctctgcgttccctgctcattccaatgaaactagcttgtcaggatgtttggatcaaggtcctacaattgttta

SEQ ID NO: 30052 - DNA, 315 bp, Setaria italica
  Peptide Sequence Number=SeqID_96026
cctgatggagtccatgaaatctgcttccagctgcccggtgtgcaaggtcccattccgccgaagagaaatacggccggcgccccacatggacaatttggtgtctgttttcaaaagtatggaagttgcagccggtactagtattgtggcaacacctctggctccttcacccaaggttgcagatggatcacaatgtggtgggaacagtggcagcaagcctaaaagctcgcggaaaaagaaggtagcatcaaagaagaaaaacatacatcgaaggctgctgcagcttctgcatcttgtcctactacaaagccttcaatt

SEQ ID NO: 30053 - DNA, 360 bp, Setaria italica
  Peptide Sequence Number=SeqID_96027
cgtggcctaccgcctaacatcaatcttgatatagttggcactagctctttatcgcaaattctcattcgcaatgcctgatttgcacgctgagctcagaacctaatttatgtcaatggggctgtaaatccttgattgtcatgctactttttaagtttttcatgcagaggtcatttccattattgcccaataactgtttccatgcaggtggttggttgatgaagttcgagaaagtgcccctaaggaattggactacttgaatgaggccaaaaacagtgaaaaatgtttggataactttagaaggttgtctcctcacattgccggtagcatctatgcccccaaggtttattggaatctcagcac

SEQ ID NO: 30054 - DNA, 1754 bp, Setaria italica
  misc_feature (1698)..(1698): n is a, c, g, or t
  Peptide Sequence Number=SeqID_96028
acaagtggtccctctttggcctcgagccgggcacccccgcgtggcagagcgccaagcacgacgcccacctccgctcagccaaccgactccaggagctctgcttccgcaatggcggcatctacatcaagctcggccagcacatcgcgcagctggagtatgtcgtgccggaggagtacgtgcagacgatgagggaatcgatgctgaagaagtgcccggtctcgtcatatgaggaggtccgcggggtgtttgccaaggatctcggagaatcgccagaaactttttttgcagaatttgatcctgtccacttgcaagtgcttctcttgcacaagtccatgctgcacgaacccacgatggacaaaaagttgctgttaaggttcagcacgatcacctgacagataccagtgttgtagatatagctactgtggatttgttagtgaatgctctgcactatattttccctacatttgactacaggtggttggttgatgaagttcgagaaagtgcccctaaggaattggatttcttgaatgaggccaaaaacagtgaaaaatgtttggataactttagaaggttgtctcctcacattgccggtagcatctatgcccccaaggtttattggaatctcagcacatctagaattctcaccatggagtttatggatgccaaggaggtaactgatgttcatggcattaaagaaattggcattcacccttctgatgtttcgaacctagtcagtaaagcatttgctgagatgattttcaagcatggttttgttcattgtgatccccatgctgccaatatgatggtccgacccatgccacaagacagcagaaaattttttggttggaaacagccacagttggttcttctcgaccatggtctttacaaagagcttgattatactactaggataagctatgcttctctttggaaggcgcttgtttttgctgatgcaaaagcaattaaggagaacagtatcaaactaggtgctggggaagatcttcatgcactctttgctggtgttctcacaatgaggccatggcaaagggtgattgatccatctcctgatcatcttgtcctagacggaaaaactactgattattctgaactgcagaattacgcctccttatatttttctgaaatctcggagctgctgaggagattaccaagagtcatcttgttgatgcttaaaacaaatgactgtttacgcgcagtcaatcatgccctggttggaggcacttctttggagtcatttatgatcattgggcgtgtctcttctgaagctgtgctggacgctaaaaagatgagcaggaggtcatttctagatagattgatgatatggctggaggaagctatactggaagctcgattctttagtttgaagctgatgttgtgctttatgcaacttaggaagttgttgcccagctaaaaagcagttcggtgcatcgacagtttttggaccgcgcaactgtgaagttgacatctagttccatatcttttctgagagagaaacttggcattttgcgtaggttgccattctttctgtatacatcaattctttcgtcgaccattgtttcaccatgattggtcatcatggtacatatgcgcaccagtacagttgttaacgttatgtttcttctgataggtgaatacaggtatacaaattactgtcgttgaaacaaattaaaaaaatagcanaaaaaaaaaaaactgagacacgcaacaggagataggcaaggcacacaggggatagg

SEQ ID NO: 30055 - DNA, 362 bp, Setaria italica
  Peptide Sequence Number=SeqID_96029
gtttcctacttagcgcagtgtaatatgcatggtgtgcaaattaaagacatcttcaaaggcacgtgcaacgcagcacatctgcagtgcaaatgtgcattacacacactccctcaatcctcgtatacatgctttctaacagctgaagcatcaacacattattcgtagcaacattaattaatgtagtaattaacacgtagctaagctaagctaagcgatctcttctctcttgtgcaccctcaccttgagcccgtccttcatgtggagtatgatggagagcttgggccgcaccacggcgccggcgtcaacctccacccggaaccgcggcagcacggcggcgaccaccgccttcatctgcgcgtacg

SEQ ID NO: 30056 - DNA, 423 bp, Setaria italica
  Peptide Sequence Number=SeqID_96030
cgacgaagcagcagctgcaacgactcgactcccacccaaatcaaaccaaaaaccaaatccgccgccctcccaatccccagctcccgccgccccgcaccaccgcccgggcctccacccccggcgatcgacgccgcggcatccgtgccggcagccccgcttctgcacctcccgcctcgatggggagcgacgcggagcccgccaaggggctgctgccatacctgcagcgcgccgacgagctgcagaagcacgagcccctcgtcgcctactactgtcggctctacgcgatggagaaggggctgaggatcccgcagaaggagcgcaccaagaccaccaactccatcctcatctccctcatgaaccagctcgagaaggacaagaaaaccttgacgtttggggccagacgacaaccttcatttgggaggg

SEQ ID NO: 30057 - DNA, 227 bp, Setaria italica
  Peptide Sequence Number=SeqID_96031
cacagctctctttgactgccattgctaggttctcccctgttcctcttcctcttctcacaactcggacacctgcttcacagcttcagcaactgcagagatggaggcgcaggacgactgcaagtggcgccagattccggcgttcggcgactggaacctgtgggacgacatgccagtcacccaatacttccaggcagggcccttcttcttcacagcactggtggacaaag

SEQ ID NO: 30058 - DNA, 334 bp, Setaria italica
  Peptide Sequence Number=SeqID_96032
cggccggcgatgagaaggtcccgttgggaggggatggtcttggggtgaagctcgggaagctggcgatggtcacgctggccgccggcgtgctggcgctcgggcccgtcgacggcgccatggcggccaagtccggcggcagggtcggcgggcaggcgttccggtcagcgccacggtcgtccggccctcggataaacaactccaggtatttagcgctcttgctcataacctgtctgcatcggacaccaaggttcagttcgagccgtgttcaggacagagttcagactcgatgatgtcttcttgcctctgattacaagcactgaatctctgaattctt

SEQ ID NO: 30059 - DNA, 273 bp, Setaria italica
  Peptide Sequence Number=SeqID_96033
aaatcatcggtgacatgctgcgtctgctaatgcaaaatgtttgtacggtgtacgtggtgcatgggcgcaggacgaacatctacgtcaacccgccggtggcgccgccgctgggcgggtacggctacggcggctacggcagcccgttcttcggcggctacgggtggtcgccgttcaccttcttcgcgcccggcccgagcgtcgccgtcggtgtcggcggcggcttcgacacgctcgtcctcttcttggtgctgggcgccgtcgtcggagccatca

SEQ ID NO: 30060 - DNA, 1230 bp, Setaria italica
  Peptide Sequence Number=SeqID_96034
gcatccgccgcggcaaatcaagaaagaatcttgctggtgtttgagttcgacaaaggaagaagcgcacagagcgagcgagcgtgctgactgctgagaagagaagagatcgagtacggccatggctctggcacccgcatctctccagtgcttcctcacgggcagaccggtgtgctcggcgacgctgcccaagctcgcgaggaggccgtcgaggatctcgtgcaaggcggccggcgatgagaaggtcccgttgggaggggatggtcttggggtgaagctcgggaagctggcgatggtcacgctggccgccggcgtgctggcgctcgggcccgtcgacggcgccatggcggccaagtccggcggcagggtcggcgggcaggcgttccggtcagcgccacggtcgtccggccctcggataaacaactccaggacgaacatctacgtcaacccgccggtggcgccgccgctgggcgggtacggctacggcggctacggcagcccgttcttcggcggctacgggtggtcgccgttcaccttcttcgcgcccggcccgagcgtcgccgtcggtgtcggcggcggcttcgacacgctcgtcctcttcttggtgctgggcgccgtcgtcggagccatcaggcggtttctcaacaggaacaatgatgattacgacgactattgattattactatactacctactagtagtaacgtaacgaatctcatgcttaatcttcatctgtagtatggcgagatccttttcttgttgatttccaggaatagaatatgctgctgcacaagggaattgtacgtatgattttgcttaatgcaatcagagtagcaaagaattgtaaccccgctccacgacgcggcgcctgtagtggttttttttatgtagaaaaataggaatccagtgccataattgttgcttgtgttgtgtctatgtcaatgagctcaaattagagcacctattcttaaaatagattgctatttagcgctcttgctcataacctgtctgcatcggacaccaaggttcagttcgagccgtgttcaggacagagttcagactcgatgatgtcttcttgcctctgattacaagcactgaatctctgaattcttctgaagtttaaagcttttgaattttaatcgtccttcttgtgcaacctcgatcgttcagttcttctcaatcatttgcaagaatgtaccgtagtaagataggcaactgaaatcatcggtgaca

SEQ ID NO: 30061 - DNA, 270 bp, Setaria italica
  Peptide Sequence Number=SeqID_96035
cgtggccgaccggggccaccacggggacatgctgcggctcacggagatcgcgctgctctgcgccgccgtcgaccccgacaggcggcccaaggtgcaggacgtcgtccggatgatcgacgagatcgccgccagcgacgggccggagctagccggacgctgagctccgcgacggtgcagcgtgtggactgatcgacgtgatcttcttggcttggaacttgtacgatttgtgtctcgtaatcggtttcgcaaccttaaaaaaaaaaaaaaaaa

SEQ ID NO: 30062 - DNA, 274 bp, Setaria italica
  Peptide Sequence Number=SeqID_96036
gtcaaactcgaacacgcagccggcaggcgggactgcggtagtggaaagcgccggaaccagagcaggcagcggccgccggcggccagggtgttcggctggagcgagccagcgggcagcgaggggactgggacgcggcggcgtcccgacgtccggggaagagggggagcgcgtaagggggcgcaacaaggcattgatggtagcagctaccagaagcgaggagattgcacgttcggtttgaccttcgacttcccaccccaccgccggcgatggcggc

SEQ ID NO: 30063 - DNA, 1992 bp, Setaria italica
  Peptide Sequence Number=SeqID_96037
tagctataaataaattccacacagggtacaacaagactatttattgtctgtgtatctggtctgtctaaatctaatataccccagaaaacttgcataagaccatcaactagttctgtaccatgagtttcgagaaaagaggccaggtttgatttcctgtgtaatgcaactttggaaactgtatggatctgggctataaattcttttatcacccagctagatgcagcacctccaactccaattcttgaagtaattgctgggagtgattttattacccctagaaggcgcatcatgtccttaacatgatagtacatgtccttctttgggaacacagcctgaaggacacagcatgcagcagaatgtagcagaggttccctgtcactttgaaagatggtttccaataaagctctgcattttagattattaagttccatgcctgcatcagccatgtcagtaaagcaacttggtgggcatagcaggtatatgcgtgagagaatcctgagggcatctgccaaaacttgctcttggataggagcagcctgcacaatttggggtctctttcctgatcttccaccagtagaactaccacccagtgcttccatatcaagcgcagcatccattttctctttccatccaaattcatctttagctcgaccataaacttcaatagaatctatcctaggtatagatgaaccgtcgaacgtccgcccaacagaaattgtgaattcttcatctgccaaaagtgattcagcagtagtaaatggaatatcataccatgatctcatgccttcatccagcttaatgactctatgaaaaattgtgatctcagaaggaatgttgctagcagatgtattgcccacatggatccggcaaccaaccatgactatatctgggttaggatttgaaatagtcaccttgaagccagcagatgtcagactctctaaatacccatcatctgatgtcaatctttgcttaatgctttcagaatcgccactcttggttgtttcgctattatatttaacatcacttgtaatgcaagttgtcttctcaaagaaatcaagtggaaattctggttttatgccagtgtaagctctactgctgaggatgctgctgcccaacttctttgtttgctctgctgcaaggattgtcgaactttcacctccattaggtgtatgagagtaaatatgaaggctgccatcatcatacaaaataaggcaatgtgttttatctttagacaaaggcttataggcagcaacaccaaccactgaggaatttgtaccaatactgtgcctcatattttgtgcaaccaattcatgaggacccaacgacaccgcaaaaggagcatttgatttagattttgataggcaggtaaggattccactgccagctaatagctctctccaacggtagagcccggctggcttggatttaccatcatgatcttcctcacatatatatgacaattccgttatcgacgaagaatcagcattcaagcagcccatgaaggttgtaccatcttgatgagatacaaatagaagcctgtacgttgatgagaagtacaatgacaaacctttatgcatggatacggcatctttgaccaagactgtttcagccaatatttttgcaccaacatcaccctccaatgtaacattcagcctatacaaaaggcccccttcagaaagaacaagcagcaccaatttccccatcgaggaggggacaagggtcgcatcaactattatatcatcagctacagtaaaataatgcatggggctgatgttgtcttgtgagagatcatatatcttcacaaacaaatttgttactaccatgagttgtacttgagaacccggaacccactccacacgtcgaatatatgctccttgcagagcaagttctatggcaaggcggtcagttacttcaccacgactatttaatgttagcacttggcagtcctcatatccagaaacggcaaggtaatggtccaccaacggattgaaa

SEQ ID NO: 30064 - DNA, 412 bp, Setaria italica
  Peptide Sequence Number=SeqID_96038
atctaatccagggagttgaagactgagtcttgtggagatgggacgcctctggagtctattctactcgttcagcctaccgcgccttcttttgtggagccacaaagttcgctgccgctaagctgatttggaaatcatgggcaccaatgaaagtgaaaattttcatctggttggcagttaaggagcggttgtggacggctgatagaagacatcgacataggttacagggaaatgcggagtgtacattctgtgaacaggagctagaaacgacagtacacttgctagctgcttgcccttacacaaaggaggtttggcacatcgtctcgacagtgctgcacatacagaacaccacctcactatctgaaacctccttaacggactactggtgcataagcggcgagccatgagcagatca

SEQ ID NO: 30065 - DNA, 305 bp, Setaria italica
  Peptide Sequence Number=SeqID_96039
tgtcaaggaaccttagtgcagctcaagcgtgtgagatcgctgcgggatccagcgacaaactcattgagcaagtacgcatctccttctgatcacatgatctgggagactgcttctagcaatggggtgactctggagctcggcaggtcagtacatcatcagctggttgaagaagatgaagatctgggagctgaggctacaatggggtcagagcggagttttcgggcaccaaatgcaaggactgcatcgtatagaaaaacttctgctgtcaagatcagaggcttgaacccgccaagaaacaagctagg

SEQ ID NO: 30066 - DNA, 703 bp, Setaria italica
  Peptide Sequence Number=SeqID_96040
gaaattcagcactagtcgctacatgaaatgcaatggctccaatagtgcagtgcctaaataaaggggcaactggtgggtgctgttgtggctccttcctttttgaagcgagatcatgctgatcaaaacagcatggctgatagaaaagagctacttccagactcatgagaacaagctgctactcttctacaacttgatatactataatacatacagttgatagaactttatgtacgcagtatattaggagaaatgtttgccttatccagcatataacaaattctaacaacaggatgccagatgtgagctacttaccttgatgcacctgacctcactgttgagcaatcagaattcatacagattttcaggtcttcgatagaaactcacattcgaaggtatttttttgtttgaatagcacggtcaaattcaacagaagtgactgtgcaataaatccacaattggtctatatctcacttgttggcttgacaacataaagagctgctgctcctgaatctcttagttcaatcaattgagcaacagagcaagtaccaaaactggcagtatctatttggcactgtcccataaattacagacagtgttaagagagttaaagctagatctaaattatggtcagaaactcattacgctagcttcacacattgcaacacagtataacggctataatgcaatttctttgttggtctta

SEQ ID NO: 30067 - DNA, 352 bp, Setaria italica
  Peptide Sequence Number=SeqID_96041
cgacgcccaacaacacacccttcgagtcatcaccgccaccacggcacgccaccacaccactccaaacttccagtctcccaccggcttcccccacctcctcggcggcgcctcgcgggcggagagaaccccgctccctcccctagggttcccggaaccctagcccctacccgtacgcgcgcgcgagggccccggcggcacgaggaggcggcggcggcggcggagaggggagggggcacaaggcgcggaaggcgcaggcctgtgctgcatgtcagatcgtgggagccggcgaggcggaggcggaggcggagactacggacacggtcagctcgcgaacccgctccaatggccgcag

SEQ ID NO: 30068 - DNA, 266 bp, Setaria italica
  Peptide Sequence Number=SeqID_96042
cgagcgccgcgcgctcgacctagtccgcgcgctcggcgtcacgctcgacctcgtccgccgcctcgccgtcctcgtctccgaccacatgggaggtgccttgcgatctgaggacggagacctgtacatgcggtggaaggcggtgagcaagcagctgaggaagcggcagaagtgcatcgtcgtccccattggcggcctgtccatcgggttctgccggcaccgggccatccttttcaaggaactcgcagatttcatcggtctgccatcgg

SEQ ID NO: 30069 - DNA, 410 bp, Setaria italica
  Peptide Sequence Number=SeqID_96043
tacgaaagtttttttagtactaacaaagttctctcatggccctgggaggtgtctacttttagttttactggttttagtccggtgtttgtaaagatgtcctagtcctagatttctatgtagtttttgtgtgaaatagattctagatgaaactatgttgctttttaggtgaacacaaactcttttgtgtcaacttgtttttcgtatggtaccagtaacttcaattttgtatacactttttgtgtgaagtagttccttctttttagatgaagcgttgttcctttttttagatcaacacaaactcttttgtgtagtgccagtagcttgagtcacagtttttctgtttggtgatactagtagaatatggatccttcttttgggaaccatcaatcatgatgctagatcgatgcacg

SEQ ID NO: 30070 - DNA, 258 bp, Setaria italica
  Peptide Sequence Number=SeqID_96044
ggggtgaaggagcttgaggacggcgatgggtgccctgccggagcaagcgctccccgagatatcatatcccctcctccccagctcatcggcacaacggagcctgtgggcttggaggacgccaagaatgagctcaagccatggtttatggaagtggggcgtcagagcactcatggtcagcccaaattcattgccattgtcgggtttggtggccttggcaaaaccacgctcgccatggcgctgtaccgcgagtttggggaa

SEQ ID NO: 30071 - DNA, 289 bp, Setaria italica
  Peptide Sequence Number=SeqID_96045
aaccatggcagcaggttagccaacagtgtcaaaacatttttctgtacaatgctagatgcctattcatatagtcttcactaaacttcataaaagtttgataagcatgtgacttgggtactgtaaggaaagatggctgcaggtgggtgtggaatcagtcaacctaacaggaaggaaatgtatatgtttatttcaatttatgccaggactgaatccactctcgtatacggtatgtagataatcgatcagtactgcatacgcagtatgagagattgtgtaggcaaggcagagc

SEQ ID NO: 30072 - DNA, 344 bp, Setaria italica
  Peptide Sequence Number=SeqID_96046
cagcacggagaccgacccaaggaaagggggccccaagaagagcaagcgatcggcgctggtggggtggttcgagaagaaggacgtcaaggcggagcgggtggtgtatacggcggagttcaccgtcgacgcgtccttcggcgagcccggcgcggtgaccgtgctcaaccgccaccagcgggagttctttatcgagagcatcgtcgtggagggcttccccaccggccccgcgcacttcacctgcaactcgtgggtccagcccacccgcgtggaccgcaacccgcgcgtgttcttcaccaacaagccgtacctccccgccgagacgccgccggggctgcaggagctcc

SEQ ID NO: 30073 - DNA, 242 bp, Setaria italica
  Peptide Sequence Number=SeqID_96047
tacctcgccctcgcactaccagcagcagcagcacagtttccagcctccgcatacgaggcctacggctcctccggcgtgaacgtggacttcaccatgggcacgagcagccacagtggcagcaacaccagcagcggcgtcatgtggggtgccaccgtgggtgcaatggggcagcaggacagcagcagcaacaagcagggaaacacctatggaagcaacattccttatgctgctgcagctatggt

SEQ ID NO: 30074 - DNA, 863 bp, Setaria italica
  Peptide Sequence Number=SeqID_96048
ctaattgccacagctaagatcaaaattaggaggcacctaagcagtgacatggatgcagcaaccttgatcaggggcttaacaattgtagcagcgaaagtgagcccacatacctcaatgaaatggttcattagcagctcgctctgtggctcatagctttgctccttggaagaactgctagcttccctgatggccggcgtcagcagcacagggcttgatccatggcttccctgaaggctctcctgccgcggcatggcaccatcgagctttgagcagatctcggttagtaaccgggattgtgcatcgccgacggacaaggtggattccctcagtttcgtcagctcggtctggagagactgcacggtggttttgatctgctcgatgtcggcttccactgcggcgttgctcttgcacgatttctcgtcttcttcggcgatgatctccggcgaggtcctgcccgctgagcgcacgccgctttgcgcgggatagctcggcgcacgaaggagacggtgggaggcggaccggtacagccttggcggcgccgattggttgtgcctcgccctgtcctccctgccgatcacctcgccgatgtccgacaccgtcctcgccggccttctgtcgccggcactcttcttgtcagcggcagcgtcgtccgtgcccacggcgacgtcgagctccgagcagagctcctccaggtgcgccgccgggagggacgcgttcctccgcgacgcgacgccgttcttggccagcttcctgagccaggggaggtcgagggcggaggccggcgagaacgggtcgtcgccggtggcgtggacggcgagcagccggcggttgaggggagctggatctccatctcctgctggaag

SEQ ID NO: 30075 - DNA, 442 bp, Setaria italica
  Peptide Sequence Number=SeqID_96049
catccaatcctttcctttgcaggactggcagcatttcaagaggctttaggggagaattcaagcattggcagataactcctggttattgtgaaatgtcacctgtgatggccaatcaattttcgatctttgtcgctcggggaggaaacaagaaatatgcttcagttttggcccctggtcaacttgatggtttgaagaaatctagtgatgatggtatatcatcctgggattggaaattaaagggtgatcgttcaacataccatgctctgtttcctcgagcatggactgtttatgatggcgaaccagatccggagctgaaagtatcttgccgtcaaatatcaccatttattccacacaactatcaagagagcagccttcctacctcttgtttttgtatacactctagtgaataccggaaaggaaagggcaaaaagttagcctattg

SEQ ID NO: 30076 - DNA, 363 bp, Setaria italica
  Peptide Sequence Number=SeqID_96050
agtgtaacttatgaggaccttttttgttttacctgacattcctggagctaacaagtaactaatgtctacttgaactaagtgtcaagacattgtcaattatactgcatatatacttatgtcagcaaactatgaagtaatctagtatgtcacacaaagtatatgcctcagaaaccaggggataaattaaatgaaactattgaagctataaactgatgtttcaatcctagttgaggccttccttttatcacaatgggcaacaatacgcctctgctgcccagcactaccgctgcggcctcgcctgacggctggccgggcagcgctcgaaaatctgctcggcgttgaggcgggccggccagccagcgg

SEQ ID NO: 30077 - DNA, 1016 bp, Setaria italica
  Peptide Sequence Number=SeqID_96051
gctactctttattctcatggttcagatggggacaattttgatggcaatacaagtatcatggtccccaaagtctactggaattatacacgtaaaccatattgacactggaatggattgatggaattaagctaactgatgctgagcgcatcagcaaagccaacttgaacaggaaaaggatgattgatgagggtctctattgctcattgagacagctgcttgaagaaggctttttccatgcagacccccatcctggtaatctagttgcaactgaaggtggatctctagcatattttgacttcggtatgatgggagatattccaaggcactatcgtgtgggtcttatacaaatggtacatgtgactgtgttctttacttgttctgcattcagctgatgtaaacttacaaatagttttgacttttcattgctattgtggaaaaatcagaaatattgagacttaggtgttgcactgcttaatcagttctctcttttggtaatttcagttttaacaggctaagcattattggtaaggtcctctgagtgcagcaaagttggcaatgatttataagttggttaaacgtggctagcattgtttcctgttccaaatcacattatgtagaaactaacataggaagtgcgtcaaggaataatttgcagaagggctttactgcttacaacactagctgtttagaataaacaaaactgaactttgagacgtgagtcgacaaaaatacaaaatagtcctgttttaccaccattgttgtggaacattatacttgtagccttgtccaaccatctttgtgagctttgttggattactttttgatgtatgaaatttatactatgaataatcttccgtgttaccatatacaagcaggttatacaagcaggtaactgtaaattttcttttgtgaaacgagtggcacagtaacttcatttctctagtttgtcttctttatgtctggttccaacttccaaatcaagaaatagagaactgaatttatttttttcagctcgt

SEQ ID NO: 30078 - DNA, 760 bp, Setaria italica
  misc_feature (20)..(20): n is a, c, g, or t
  Peptide Sequence Number=SeqID_96052
aagtctactggaattatacncgtaaaaccatattgacactggaatggattgatggaattaagctaactgatgctgagcgcatcagcaaagccaacttgaacaggaaaaggatgattgatgagggtctctattgctcattgagacagctgcttgaagaaggctttttccatgcagacccccatcctggtaatctagttgcaactgaaggtggatctctagcatattttgacttcggtatgatgggagatattccaaggcactatcgtgtgggtcttatacaaatgctcgtacactatgtcaatcgtgactcgttgggcttggcaaatgacttccattcactagggtttgtccctgagggaacggatttacatgctgttgcagatgcattgcggttttcttttggtgatgccaggaggcaatcaaatgattttcagggcttaatgaatcatctgtatgatgtcatgtacgagttcaatttctctcttcctcctgattatgcactggtgataagagctctgggttctctagaagggactgcaaaagcactggatcctgattttaaagttattgagagtgcatacccatttgtcattgggaggctccttgcagatccgagcccagatatgaggaaaatattgagggagcttcttatatgcgatgatggatcaatcagatggaatcggctggagaggctgattgcagctatatctgcacagtcagcagagtcttcaaatggatctggagctggctctggtgagag

SEQ ID NO: 30079 - DNA, 318 bp, Setaria italica
  Peptide Sequence Number=SeqID_96053
acttccatatcattttccatattgttttgtgttttgggtctatccttgcttctgtaaatacaatagacaaccaattgaaggatgcctgttgcacacccaacacagtttggcgacgtgatatagggatccctccctaggagtccatataccatccagattaaactggttaagaaggaaaataatgacaagtagaaaggcatgaactcaacacttctcgtccttacaacttggttcacagcaacaaggggagagctgtacatcagcatggcagacaacacaccaatacttccaacaaatatgttgcggatgtggtgggtg

SEQ ID NO: 30080 - DNA, 475 bp, Setaria italica
  Peptide Sequence Number=SeqID_96054
gagaattgtccaaccactcatattcaggatatatgatgttgacacaaagtaccaccagacttcagtgaagctgttgaagttggatcaacaggactttttaggggaagcttgctgcaacttatcagagattgtcacaaaatttaaccatagcctgacattgaatcttcgaagtgattgtgggcatggtcttcatggaacaatgactgtacatgctgaagaaagcgactcctcaagaatggcagttgagatgacgctgcattgcttgaacttggaaaacaaagatgtgctttccaaaagtgatcccttcttgagaatctcgaaactggtagagactgctggtcccattcctatctgcaaaacagaagtcgtaattaacaatttaaaccctgtttggaggccaatcactttaacatcacagcaatatggaagcaaggataacccactgctagttgagttgtttgtatttgagtccagg

SEQ ID NO: 30081 - DNA, 689 bp, Setaria italica
  Peptide Sequence Number=SeqID_96055
ggcctcccacggggtcgcggagtaatcgaggcacccgacccggctcatcgtccgcgtctccagggggccaccgtcgaacacgcccatcagcagatcagcatcgatcgggtgttccaaagtatactccttcgagagaggcacgtctccaatgctcaacacagcatggacatcatcaagatcgacggagctcacgtcttcttcctgatcttcttccattttggctctctgctcaatggccgacgacttcgttttccacaggccaattattgtcttgctagccttgctgaaggatgcgaaagagtggaactgaaacttcagtctcccttccttatcttgggacttcgcaccgctcttggcatcgagtcctcggccactcttcagagtaaacagcagtgatggggtgcctactgttgtaaaagatggctgtagcacttcgatttcctccacatcttcccacagaaagaagaattttgttttgtgtccaaacaaattagcgtagaaaccaactattctggctgacacaaacagcctcccctgcaaaggcagcttccttttcaaggagcatgcgtaatccgctataaggaattcttcatgtggcagactgaaaagcttctggaacgttgaatttctgtgaggcgaccgaacatgtagctttttaccaacttccttctccatcttacttaggtatt

SEQ ID NO: 30082 - DNA, 545 bp, Setaria italica
  Peptide Sequence Number=SeqID_96056
ggccctgtgcgccagcttctcgcagatgttcctggcgattctcttctggaatttgctgctcttgagccactcgatgcccaccaggatctcgcaccggctgctcggcgcctccgacgtcacgctctgcacgttgtacctcagatggacccggaagtagtcgccgaaggggacgttgtggagcgtgacgacgtcgtggatggcccacccgcagccgtcctccgcggggaacttgagctgggtgctcaccacctcgccgccgaagatggacatgtaccggttgaacttgtagctcacgtgccgctccaccacgcccggcctcgcggcctcccacggggtcgcggagtaatcgaggcacccgacccggctcatcgtccgcgtctccagggggccaccgtcgaacacgcccatcagcagatcagcatcgatcgggtgttccaaagtatactccttcgagagaggcacgtctccaatgctcaacacagcatggacatcatcaagaatacgaacggaaagaactaacaaacgttaaactttaactttaacaa

SEQ ID NO: 30083 - DNA, 283 bp, Setaria italica
  Peptide Sequence Number=SeqID_96057
ggcgccgaagccgaggacggcgagggaggggcgcgggaggagtggtgggagcgtggtgaaagcgtcgaagtaggtggctgtgagcgggcagtggtgggcgcggcgagggaaagagagggagtggatgttgccggggccgtcgaggaggaggaggcgggcgccggccaggggtggcccgcggcacgcggggagacgtcggcgacgcggatgtggttgtgcggggagcggacctccgcgacgagctggagctcgtcggggaggggttggatactgggggttcttg

SEQ ID NO: 30084 - DNA, 283 bp, Setaria italica
  Peptide Sequence Number=SeqID_96058
ggcgctctatataggttgcttccggggcgggcgggcggagacggcaaagcgacgggggcgcgcgtgcgcgggcgcaatcgatgcgtgggacgaccgaattggaaggcaagggactgtgctgccgtgcgcctccgcctcctccgcctcggtggtggtggtggggttcggtgggcggaggcaggcagctgctacctgtctcgcctagtcgccgccgcggctagccttggtgcgggtgctctcgctctcccgcggcgtgggcgtgggcggggaggtcagagtgcgg

SEQ ID NO: 30085 - DNA, 334 bp, Setaria italica
  Peptide Sequence Number=SeqID_96059
cggtggccacctccctcctgcgctccgcataaaaccccctcgccgctgaccgggcgggacccacctcccctcctccgtcttctccactccgctcccccgcgctcgcggcgggcgccgaatggacgccgcctcatgctgccgcgtcttctcctcgcagcggtgccggttcccgctacgcaggctggcagcaccgccgtggtcgcatccgctctgcaccgagtcgagcggcgggctcgccgccgcgtcgatctcgaagcggaggtccagggggcccgtcatggcggcgaagaaggctgagcagggtgcaaagcaagaggatggaaaatacaagcac

SEQ ID NO: 30086 - DNA, 238 bp, Setaria italica
  misc_feature (235)..(235): n is a, c, g, or t
  Peptide Sequence Number=SeqID_96060
cggcgaaggagaagaatacattggccggcccgtggctgccttggtgcgcgccgcttgcttgctattgccttgggagttggcgctgccgctgctgctgctacaagtctagctgggcgccggccggcagcgcggctctgaagtgagatactgagaggtgcgaactggcggacgggtcgtcgttgctttgggcaaacaacaaagacgaagaggcactcgtcctccctgtacgcaaagntct

SEQ ID NO: 30087 - DNA, 628 bp, Setaria italica
  Peptide Sequence Number=SeqID_96061
gagtgcagtttgatacactaacagtttgaataagcatgcttctcatgttgagcgaccaaaagtaagggtattttggccatcaatgcagacctcaggaagcggtcaaggtgctgttctaattcatagaggtgaccatccataatagccgcagtatcaaaaaccccatgacctctatgaaccatgtgatcatcaattggtatcaccattgcagaaggatctgttgtaattccaccaaaaatgctagaatacatggccatgtaattttgattcctagcaccagacgcttggaacgtaccaagcctttcagcaacctcagagaaagacaagacagggacatcgtttggattgataattgtcccagccgatgcggccttgttgtccgagcccgtggctgccctgaccgccgccgccgctcccctccacgaccgcgaagggggacctccggcggctccaatcgacggcagcaaggtcgtcctccgcggcagggaagcggaagagcgaggcgagggcgagacccggtggccggtggctgccgcggccgacggagtggcagggaagtgagccatcgggctctgagaagtggggtggagtggaacgggggccggggctaactgctgaggaggcggac

SEQ ID NO: 30088 - DNA, 500 bp, Setaria italica
  Peptide Sequence Number=SeqID_96062
cttctattgaaaatatcaagaaaagtgcagcagccccacagctaaatgatggatctcttagtatacacattgctgatggcagggaaggttggccagagctggcaccctatgatgccatccatgttggagctgcagcgccacagatcccagaggcgctgatcgagcagttgaagcccggtggcaggatggtaatcccggtagggacagtcttccaggagctcaaggtggtggacaagaagctggatggcacagtcagcataagagacgagacatctgtgcgctatgtgccgcttaccagcaaggaagcgcaattgcacgcaaactgattgcaccaaatgcaccttgtcagctcaggcgcaaactgattgcaccaaatgtaccttgtcagctcaggccttcgatgattcgagatcgaatcactattgttgtacataaattgatcctaccgtgttcggttggaaataatgtaaacagctatctcgttacgaagtatatgcttg

SEQ ID NO: 30089 - DNA, 1548 bp, Setaria italica
  Peptide Sequence Number=SeqID_96063
acctcctcctcctccccctgccgccgccgctgccaccaacaccatcaccaccatcaccacctcctgttgaaaaagtaactgtaaatcccattgtcaggccagaaaaaagagttagcactccgccaaggactggtccctcaacatctgcgacatccttttctgttgcatcacttcagcaatatacaaatagcttcgaggagcaaaatttgataagggagagtaggttgggaaaagtgtatctggcagaacttcctgaaggcaaattactggaagttatgaagattgacaatgctaatggaagaataccagtagatgactttctagagctggttgctcgtatatcagatattagacaccctaacattctcgagcttgttggatactgtgctgagtatgaacagaggttacttgtctataaccacttcagtagaaaaacactacatgatgtactgcatgaaagggaagatcaagatgatgcattatcctggaatgctcgcctccaggttgctcttcatgcagcaaaagccttagagtatctccatgacacctgtgaacctccagtagtgcaccagaattttgaaccagccaacgtgctccttgacaatagatgctcagtacgtgtcgctgaatgtggactggcagaattgatgttgtcaggttctgttatacagctctcaggtcgcatgcgggctctactcaattatgaagcacctgaaatccacgaatctgggccttttaccgatcgaagtgatgtttatagttttggtgtggtgatgctagaacttctcactggccgtagaccatatgacagttcccgtccacgtgctgaacaacatcttgtaagatgggctggttctcagcttcatgacattgaatccatatcaaagatggtcgatcctgctattcgaggagagtgttctgagatacagttgtcacgttttgcatacatcatcagtcaatgcattcagacggaaccggagtgcaggccggcaatgtctgcaatcgtccaatacctagctaggattgtagatgctactggtgaggatttggagtgacaaatcaaggaggaacagcaaggccagccaatcaagacgcacagtgaatacatcttgagcacaatggtggggaaccctatcagaatttttcctggacgagattatcggctgatgtacatgtcattttggagcctcatttacttttggaaagatggtagactgtagtagtagcagtagtagtatggtacaaccagagagaagtggcttcgcattgttattgagcagattcctgtgctctgctagacattataattccacctgtaggcagtatctcttgtaactaattctattttttattactttattacactatagctagttatgttaaatatgatccttttagtatgacttggacctcatcattctcagggagggggaaaactggctttgctaactccatatggtttgttgatcttagaaacctactgttagagagattctttacagaggcaaatgaacttgcccacttgacatggatctttaaaaaagacac

SEQ ID NO: 30090 - DNA, 1283 bp, Setaria italica
  Peptide Sequence Number=SeqID_96064
caatatagccgaagctcaaagctgccggtgaagtttatcagaccaagaattttggggttcaacgaagcccccatgtcctacagtaaacccggccatgcttcaggccgggacgcggtgttctggtcggataaaatgaacgagtatctaatcgattcgctgcttcaccagcaatccattgggaacaggggtgaggccaggttcttctcggtagcatatgatagcatcgtcactggtgtcggtgaaaggtttggggtggccattgaccggaacaatatcaaaaaccgcctcaagtatatcaaggaatcgttctacgagtgcaggaacattcttagtgaagacactcggattaagtggtgcccagagagcagaagattcaatgccgatccaaatgtttggagggagttgatccagagaaaaccggaagcaaaaaaatggatgacaaagacgattgaccattatgataggttaatggagttatttggtaaagagagggagaaatgtctggttgtcgagagttcaaaagataccccgaagaaaaaggcgcgaacagaaccaccaaagcagcagagacttcaacgtactccattaaatggccattccgttgctgaaagttcaaataagctttcgcaaaaaagagaaagttcagataagctttcgcaaaaaaaagaaagtgcagataaaatggcgaacaaaagtgagatccctgacgaggcaataacaaatgtggaagttgatttgtcagaattgtgcagaactgagaatggcattgttgccatacctgttcgtgccaatacatatggtaaaggtttgccctatgctcctgacaattggccatgttctggggatatatggtactggaaagtgggaaacagggcttctggagcgggccattgggctgacaggtatcttacgccgccatcgcgtttccgtgaagctactcgtaagagagtaggattcgcaagtagaatacaagttgaagaatttattaagagagagtttccagatgttgatcctagcacattcttttctatgtttatctggaagatccctgctgaaggacacaggatccaaaaaggcacccagcaagtgaggctccatgaacctgaacctgttatggctgatccagtgttcccatgtaaggctaggaataacttgtgcaaccttgaaagagaaggctttattgaatcagcaccagcacaagcttgtaatatttgctgcacagtgcctggtttctgtcgcgagtgctgctgcattctctgtaacaggacaattgactattcttt

SEQ ID NO: 30091 - DNA, 1551 bp, Setaria italica
  Peptide Sequence Number=SeqID_96065
tttttaagtttttaactttttaagtttttaaggttttaaaaatttttaactttttaacctttaaagttttaagtttaacttaaatttaccttaggggtaataccaaaacaaccaatttactagaccaaaatttagaggagtaaggctaaactacttgtgcaaccttgaaagataaggctttattgaatcagcaccagcacaagcttgtaatatttgctgcacagtgcctggtttctgtcgcgagtgctgctgcattctctgtaacaggacaattgactattcttttggaagttacagctgcataaaatgtgaggcagttgtggaagagaactacatatgtgggcatgttgcacaccttgattgtgctcttcgatgttacatggctggaactgttggaggaactataggcttggatgtccaatattactgcaggcgctgtgataacaaaactaacttaatgatgcatgtggagaaactcatggaaacatgtcaatctctcgaatcaagggatgatattgagcgtatcctgaatatgggcttatgcctcctgcgtggctcaagacaaatgagagcaaaaggcttggagaaccatatgggatcggcgatggcaaagctgaaatgtggggttgatcttgttgaagtttggaaagtggaaaacaacgagggtggggcaactctctgtgcaggagagaattccccgcataccagtggtgtgactgtgcttgggactcggcaagtttctgaagtgggtatgttgacagagcatcctgatctaatcgatccaaatgacttaggaattgctgtggaaaatcttccagtgtacaatcctggggatccaaacaccatttctgccaaatttgaggatgagatagatcttgcccttcaagaactgaaaaaatctcaggaagcggaatatagggtggcagagcaaaggctttattctcaaaaagatcgcatcctcagtctgtataggcagcttgagtatgaaagagctcagctttcagatcccatgcccttatctgacacttcacaatatggtgtgctccttgccaatgtgttaagccgcgtgcaccagtcaaagtgtgaggaggagaagtttaagtgcatgctgaaagttgctggtggatttgggaaagcaccagaaagtgtcaccaaggagttctttgggttacctgctgataagtagttagaaatcgatatctcaggacttagctagtgataggttgccagggttgaactttgcctgcggtgttgcacttgtatgggttgtatacatcctacccagtaccaaggggtcgccctcttagggttaccccatcagtctggttttggaagaaacctttaagcgctgtggatgcgcagattatgtgtgcacaactgcacatgttgtgccgtaggaacagtcgttcaatgagagatactgaatggaaccgaatctgtgctgttttctgcatacaaagtagggtaatagttagaacaagaagacaatacctagaatactaaatacgaataccaaaatagaacttaaggaaatttagtacttagttagta

SEQ ID NO: 30092 - DNA, 332 bp, Setaria italica
  Peptide Sequence Number=SeqID_96066
tgcattctctatgttctgtgtatctgattttgaaaaatacaagtttcagttcttctctgaatttcagagctgcagatccccacaggtggtccacttcagtaatggttctgcactcagttgattctatctcattcataagatgaagtatctccaaatctgtttcactaagagttgcatcataaatagacaaaagcaagaaaaccaattctcttgattccctcaattggctattgttctgttgccggctcttaatatcatacagtacccttagtaatctgatgatttcaactcttcccttttctttggtacaaagttgtggtttgttttcttcc

SEQ ID NO: 30093 - DNA, 714 bp, Setaria italica
  Peptide Sequence Number=SeqID_96067
agtcctgcagcagtatccatggaactctttctttcctgtcccatggatattgctgcaagacttgcaatcattcctaagaaaattcaaaatatacaaaatcgataagctcgaactagagcaaactctgggtgaattctgggagcatctgcctcccatccgatctgtctttcatacaaaaccatatgtttcgtcttcaaaacaaaatccacgttcttgaaacagaaaaagggggttgctgaaaaaataggaattgttcaccatggaggttaacctctacggagaccgtagaaactaaaataggaaaaaagtagttacttgtctatctcaatgtaaatgaatgaaatcacttggtcttcctgttgcaaccgctcattcttactttctgttcaagtctaaagaagaagaggttttattagcaagcgtgaatctggtagcttctactttgttctgttgtctcacttatgaggaactagtattacctgatcaagagataaatcttgcattgttaggtattttcttttcaggtgaggtgtgcatagatatctcatgtatcaagtttttcacgtgggtgtgtagagatatctcatgtactgagttcaggtgcggtgtgtatcaagaccgcaggaagctcagtgggcggaggagccgtggaggcggttgcacgcgactgcgcggcctcgccgacgaggaagacgccgaaggcgacgatggcga

SEQ ID NO: 30094 - DNA, 676 bp, Setaria italica
  Peptide Sequence Number=SeqID_96068
tatgtacttgtccagtgaaccattgggcatgtactcatagacaagtgcccccctcaattcttccgagcagaaccccacaaggcgcaccacattgacatggtggatccggccgattgtggagacctcgctgatgaactcttctccattgcatttggagttgctcagcattttgacagcaacatggacatcacctgggagtaccacacccttgtacacggatccataacctcctcggccaagctcctctctgaaatggcttgtgattgcagtgatgtttgtgtaggtgtatcttgtcggaccaatcatttgttgcattcgcagaaacttctcaactgcgtcaattgttattcttgttttcaagtatttgtgggcaaggaagatcaacactgctagtggtgccaggacgaacctgcacaatacagctataagcttcacaatcaacagggcaagtgctattcctttgctgacatgaagcatcccgtaccagacataaaaatcaatccaaaggaggtagaaaatccgatgataattgtttctgtcttcacggaatatgcgatatagcttggcaaaggagatatccctgtttgtcaatttaggcagattgtgggtgtatggaaatcggacagcgaatccattcctcatgaatctcacgacatcttcaaaacttgcgttctct

SEQ ID NO: 30095 - DNA, 255 bp, Setaria italica
  Peptide Sequence Number=SeqID_96069
aacaaatgctaaattgtgttgattagactcactggaatcataaaccaaaggaaaccaagctccaagaaatatatttgggtatatacatgcccaggtgttctcttatagcaggatagtaaaaaaatacatatgagctcataacaggcctgtgggaatctcagctaaagaaacccatactagaatcttaaaaacctcttagaagaaaatggttatgagttgtaacactctttggcaaatatacagtcatacaagcaa

SEQ ID NO: 30096 - DNA, 553 bp, Setaria italica
  Peptide Sequence Number=SeqID_96070
tttttttggcacagaacaagaaactggttacctgctcaactagcttacccacaaaggcatatatatacacatgatagtcgacagtacaagactcatggtgcaaaaaaaaggcagattatattacatgtagtgattcaaaagatacgacattaacttgcaaaggtagcatttacaattgatataaacagtgataattagtggtcagtggcggtggacgctcgtctcgctttcctgaagtgaaacttcagctcttggcagacgcagaacaacgtgtccatgatgtcctcatctaggtgcccgtccttcacgatgaccgacatggccgtcctcagccactcttcatgttgggttgagaacgcggcccgctcttcgctggacttgaagttaccggcaatcttcaacctcatcgcctggcctgcgacggatgccttgtccactatcgacttcggaatccctgccattgtggcgacctgtaggccgtagctctctggacaggcccctgaggcaagacggtagaggaaggtgagctccttctcgccattgacatcattgt

SEQ ID NO: 30097 - DNA, 1218 bp, Setaria italica
  Peptide Sequence Number=SeqID_96071
tttttcatctgtaccaccaatctcatttcaaatttgatggcaatgacatgttttatctacatggtgcgtttctgcattccagcgataactggaagaaatcgaaacaaaaatgaatactattttctttacattgacatttgtaaagtagtatggctctaggtttatgtttatccccattcccagttcttggtcaaaatgaaccatcaagctggtcaatccaggaaccagccagtgatgcccagttcacagcagtaccaaagaagagctcccagaaccaaagatccaccgcaagcactgaagaaaagatgagcagagcaagtgtctcatatctattcaaaggccagcctgaagcctctgccagtgtcttcaagaatgggagggatttgctttctagctctcggctccttattgaccatgctgtaacccactgcacatcagctgggaccatatcgagctcttctccaaggcgtcttcccaggtctggcatatgtccaccaccataaagaactgctattctcttgtacccgcggtttattgcttcctttatcttctcagtggcaactctgttcctctccccaatgataactgacttttcctcaacaggagatgtcacagctgtgaattcagatgtcagttgctttgccaagaaaatcttcagtgcagctccaaaatctagcttagacaatgcctccagctcaggaaatccatcttggttctctactggcaaacaaagcccagtgatgacgagtagtccaacaagtggcattggtagcacacgtgaggcccagagtaactttgatctccaaaagtcaagaccatctggcatgttagttggttgcaccaaggctttggttgatttcagtgtcatgtctactgcaaatgtgaggatactttcacctctttcgctctgaagctgcttgaatgtttcatagtcaaggtcagcatgttgccatttctcattgccataatcaagacagtctaactgataatccaatgaaaggatccgagccatttgcttctgtatgaagccaagaatactgaatcctctacgtgaagatttcatcttcttagcagccattggacctttcggattgttcaaattatcccgactcataaccatttcatacaggacacaatcataacgtccaagctcttgctgcagcctatcaaaagttaatttactttttaattacggtactaaattagttaggtaactta

SEQ ID NO: 30098 - DNA, 329 bp, Setaria italica
  Peptide Sequence Number=SeqID_96072
tacgccgctagtgatgtgtatggggacaaggcgctcccactgaggtctatgactccaatgagaataaatggtcggtgcaccagatgatgcccgcggcgaatctgtgctcatcgaaaatggcattctgtgactccagattgtacctggagacgctctcgccgctggggctgatgatgtatagagtggatgcagggcgttgggagcatatacctgccaagttcccacgttccctgctggatggttatcttgtggctggagctcgcacaaggttgttcttagttgggcgaattgggctgtacagcaccctgcagagtatgaggatctgggag

SEQ ID NO: 30099 - DNA, 280 bp, Setaria italica
  Peptide Sequence Number=SeqID_96073
ctcagatctcccgacctgccaccacccccgagctccccaaacatcactgcctcctccttgctccctccccagatctccagactccagatctctgctcccgcccccgcccgcctctcgcccgcgacgaccccgccgccgcacgcggcggccgcggcgagatgctccgcctccgggcgttccggccgacgagcgacaaggtcgtgaagatccagctccacccacacacccctggctcgtcaccgccgacgccaacgaccgcgtctccgtctgggactgggag

SEQ ID NO: 30100 - DNA, 679 bp, Setaria italica
  Peptide Sequence Number=SeqID_96074
caatttccacaatgtggacggaagcacctctgaatttgctggccaaaaacaatggtaagctgccgccaccatggccgatgcacagaattttcatattgtcttgtccagatgctgcttcggggagatcataagcagaacaaggaagtgttgtcaatcctgctgacaccatactcttgacatatggaacagctaaaacatgtggttgctgcatcaagaataatgatctctgacccgacgtcctatagcatgtcattacttttgcggtgctttgccgtgtatgatcgttaaaacgcattactcgccactggtagcctagtatcttaaactggtcagcacccgctgattctgggtataatcttgcatttctttcttgaagccatctctcctttgctggccaatgctcagtagccgggcggaaggcggggtaggcggagacggagacgacgccgttgccgcactcggagtggcggcggaagacggtctgcgccccctcgccaggaccgtcctcctcgccccaccactccgggtggtacgaccagtctccctcgtcgagggaaggctttctccgtgctcccacggcggctggggacgccgccaccgcctcggcctccgccgccgacgacgacagccgccgggcggcggcgcgggtgcatctcgaagccgcccctgcagcattgtg

SEQ ID NO: 30101 - DNA, 384 bp, Setaria italica
  misc_feature (368)..(368): n is a, c, g, or t
  Peptide Sequence Number=SeqID_96075
aagtagcgcaagctctagcagccatcatttgggccaaaaccaattcaaagattccaaacttttttctcagaatcacaacaaaagctgaaggcggcgaggggcgcagtaagtaaaggttgctttgctgaactggcttcaatacttatcctggttgtcaacacaggctgcataggcactccacgcgcccaaaaatcctcctcaggcactccttctcctccttcgggctaaatattgttattaacacccactggattagatcctttcatctttgtagtcgtcatcatcagcagcagcagcaccaccaccaccagcagcagcagcaacagcacaccaccagcagcagcagcacagcagcaacagcagcacancacagcagcagcagca

SEQ ID NO: 30102 - DNA, 574 bp, Setaria italica
  Peptide Sequence Number=SeqID_96076
gagagtactggtgttttgtgatattaccagatctgccttatcgtttcaaaggcagtgggggttaaaaaggacagtgcagcaccggaatagaaagacagggagcaaaggaagggagagggaagctgccagtgcgcaagctctagcagccatcatttgggccaaaaccaattcaaagattccaaactttttctcagaatcacaacaaaagctgaaggcggcgaggggcgcagtaagtaaaggttgctttgctgaactggcttcaatacttatcctggttgtcaacacaggctgcataggcactccacgcgcccaaaatcctcctcaggcactccttctcctccttcgggctaaatattgttattaacacccactggattagatcgcaacaattctaccctttcatctttgtagtcgtcatcatcagcagcagcagcaccaccaccaccagcagcagcagcaacagcaccaccaccagcagcagcagcaccagcagcacagcagcaccatcaccagcagcagcagcaccatcagcagcaccagcagcaccatcaacgcaccatcagcagcagcagca

SEQ ID NO: 30103 - DNA, 494 bp, Setaria italica
  Peptide Sequence Number=SeqID_96077
atgcagcgtatataactatattaaataactgatgcgaaggttgttacatgttgaccaaactgactagaacatttttttagttaaactgctagtaaaaagaagataaacatggcagagttgggctaacaaattttaggataaccatttccagatgtttggctacaaagaactgcctaaatatgaccatctatgtaaggggcatggggcagtactcctctgtctcaaaactgaaactccctatacattgttgaaatatctcaaaaaaaaaagttgtattccaattctgtaaaataaacaattcagtatgggtggagatgaatgcagaaccagtaagtagtacaactcacagtcataccattaaaaggttaaacatattatgctgcttacagtctagctacgaggatggattctctggaaaacctttaaatacataaggatattaccagatctgccttcttctttttttcctgtttgttatatccttatgtatttaa

SEQ ID NO: 30104 - DNA, 480 bp, Setaria italica
  Peptide Sequence Number=SeqID_96078
aactagttactgtgcaagcaagaacacacttacctccatagcaagccactccacaacttgtgaaatagggattccttgttcactctggagaccactgtgcaatgaagcgagtgcttgcctccttaactttgcaaagtgagcatgcatcaaacaagcctgcaaataagttgctttccttgagagacgaaagaaggctataaagttccccattctgcaagctctcgcaatttctcttgcaaacaagatctctggactgcctctgatttcacgagacatcttagcaagatccagagataactcagcaggttcaacctaattcagatgtatgtacaagtcagcagatatctgaacgcaaccgactagatccatcaatttacctcaccttgtgaccaggatgcttgtctaacttgaggagtgcataataaccccgaaattccttttctgttaagaagaaaacaccctttctcctatggtcatcat

SEQ ID NO: 30105 - DNA, 926 bp, Setaria italica
  Peptide Sequence Number=SeqID_96079
tagttgtttacagtttacacacccacttgtagcatccttccttgacaattgtaaaaaaaagtaatctgcttattttgaaggccctaatatgccctcctgcatgttctcaaaaaaaaaaagctttcatatgcatgaacacatgagcagcaaagtttgatcagatgaggatgacaagcaattttcaagtaaaaaggtaattcaaaatttgatgtaagctccttgagttcactatcatgctagtctcgtatgatatccactgacaaacagcaatcctatcctgataaagtgcagccatatggattagctttaaacttgataaaaattgttgggcataacaataaaaagatgtgtgaagaattttttgcaaggtcgaaagatatgcgaagcagctggcactccgagagtagttggaacaatcagtaggtacgcagccttaatgtggcttaattattcagaaaaggatttcgcatgagctgtacagactacagagtaggccacatcctaagtcaaacaaaagcatatgtcagacaaagaacagctttcttgatacagcaacaaataagctgaccaatgaacaggtctacgaccctaatttattgaggtaaaaagttaagaatgaaaattggtagatacataatctctgtgaaataaaaaaaaaactgttgtgatttataaactcaatgcgtgaaaattaagtgaacatcatattttaagttgacataccttggagagaaattcttcctttgctaatttgtagttactctctgcatggttctttgctactgcacgttcttcagcccagaagatgtaccatttagaccaatcaagggtcttgctgtatggtgcttcacagagcttccttttttaagaaaaaaacagttgagacgtcagacacatacaagaatatacatatagagttatagatt

SEQ ID NO: 30106 - DNA, 1308 bp, Setaria italica
  Peptide Sequence Number=SeqID_96080
agcaaaaatactgctacccgctagaaaataatacaataaaaaggaatatgataaaactgaggcaacactaaacagtatcatatgaccaacgttcgaacttagctactctggtacttcagttctcggcataaaatacatgttgcatcattttttcgacttctcagaaatcagatctaagtgctccccaaaacttctcccatccaaacacatcaacgacatgaacaactctacattcacagcaaaaggaagaagaagaagaagaagaagcagaaggatgtccaggtccaacacttgtctcagtactggtgctcgtaagcatcgttcccagcttcaagggatgaggcagccgcctcatccagaaaccataccaacttcccgtcagttggctgaaccattgtagcaggtactgatgtagcacctaggctttcgttgcagtcagaaatagcaaaagacacagccttttccttgtcttctccagtggcaacaatagcaatgttcaatgccgagtttatcacagggagagtgaaggtaatcctctcaggtggaggctctggagaatcggtgatgtaggtgacccagtcatctttcagctcaagagctggatggttggggaacaatgaggctacatgaccatcaggaccaatgttcagaagaatgaggtcaaatttggggcagtcgttgctctctgagactccaactgttcgaaccttgaccagctgcctgatgacaaattcatagtcagttgcagcctgttccaccgttgcgttgtcgttgatggagtagacatgaccattaagaataggcaccttggagagaaatccttcctttgctaatttgtagttactctctgcatggttctttgctactgcacgttcttcagcccagaagatgtaccatttagaccaatcaagggtcttgttgtatggtgcttcacagagcttccgcatatgtctgataagaggccctccgcagagagcaatagcaaagtatcctctttccttaacagaaatttctgaaacttgtgaaataaactctgccagatctgttgccatctcgtctgaactctcaaataccctaatttcacagttcttcttggtttcataggaggtcatgatttccctctccatggttttgtttgctcttgaaccttaaatcaagttattgttccaacttccaatctaacacacctgagctaagcattcgctgccgcgcagccagccctcttctcttccttcccacaagagaatagcgcacaagaataaaaaggaaaccatggagagggaaatcatgacctcctatgaaaccaag

SEQ ID NO: 30107 - DNA, 3267 bp, Setaria italica
  Peptide Sequence Number=SeqID_96081
cctgtcctgtagcttggtacactgctcgagtagccgagcaagcttgtgtcccccccgagtggcaccagctcccccaaacctacccttcttggtatgtacaattcaccgctaacaccatgcaccgtgttcatctcgacgtccgtgtctgctggtgcatggggttcttcatgaatctgggtgggtggtcgtggctgttgacttacaggttgcacatcgacagcatcgagatcgcaactgatctcgatgatttcatctagtgaaagcccagttgacacagcaggcatcgtgctgtgatcctccaaaatggacgcctcattgcaggtgttgcttctagcagtgcgcccttgtgtggcagtggcaccattagagttagctgctgcaggagtctgatagaggtgctggctcaggacataagcttctgagaactctccggtagaaagctttgctagcctccagttgtaaatacgacggaagatagtcacccatcttggaacaaggtagtagtatgagtctcggagctcaaggccaacatatttctgcaccataatatttacttcggtggccacctgagtttcatctaacaaccgagttgattcagtcagatatctcgccaagcactcctgaaggaacttcttctgatcttgggtttgcttgcccatgtgagaaccttggtttagccaagataaatcataactgaactctggaatcttgcaagcgttaatggccgcaaccagtggctggatccttaacggcgatgaccatccaatgctaggcaagaacacttctgcatatatcctctcattacttgttctctccagaagatcaatctcaagagctggccatcggttagtgtttgtgtgtgctgcagccataacctcttctacaacttgatcgacagcattgttgaatgctgaaatacaatccccaggtccagctccaggtgcaacacgggtattaaacagctcaagttgtgcgctcaagtagttcagaagcaactcatgggtcttcacaagagtgacatcaggctgccttggcaaacttctaatcagccacttcagaccctcacgcaacttgtcatcatcaaagaaaccattggcataatcttccatgtgttcaacaagaaaaataaccaatgatgaagcaatctgtcctccatgaagaccactgaggccaagcctgtcagtgatatattgtgaagcatagtcataaccttcatgatatttatcgccgctcaatatcaggagaggaagattggattgagctggtatggaggctaacagactgttaagtcgtgccttctgcatttcccatgaaatgccttcagacactacaaatgctatacagcttgtactattggcaatatcattaccaataacttgctgatcactggccctaacaacagacagacagcatgtgttcggaaagctcatccactctgtccaaattgataggcctgctgatgaaacaaccaatccactatctccatttccagaacccatgagcttcctaagtagccattttgaggcaaaattgttggtctgggattccatggcacctggtgggacaagtacaagcaacttccagcagaggcatcttgcatcagggttagtttcaagtaaaataggaccagacaactccgaaacattgagacgcgaccaagatctttgctgccttgcttgtctttctttaaaggcatgcccaatgtctagctcttcgacagcaagcttaggaaccattgtagtattatgaactggcgggccaagtgatagagaacacaatgcttcaacagcaagagcatttttctgctccctaagaaatcgtttgtccgcagcacgttgactccatttcctcagtattgccttcagcttttcaccggaaatttgtttcttgggagacgtaacaattggtaaccaatcatcaactgtgctgctactaatattatgatcctcatattcattgcgatcagacgaaggggagccaataggtgatccaggttcgataaccagaacttcatggtctggagttccctcatccatgtctaccctgacctcgtcttcatctccaagcatattggagtaatctaaagaaacgctatctgcaagagaatgcgaaacaattggttctgccaaagcattgttgttttctgtattagcttgtgaccacagtatctctgtttgcatctccactttcttaggggaccctgcaagcccactatcttgatcttcagctgtaagatcatcagtcaacttgggcttgccttcaggttttggcgatgctacttttggtgtttttgagaatatctccctcttgctactttgtggagaagcagcagtagggaaagatgaaacactgtcttctctaccagcatttgggataagaggacttggacgtgttggactgaataatttattggcagctttcggagaaaatggattaggaaacatcgagctaatctgtctgccaggagtggttgaaacagacccagaaaacagtgaagagggatcccttctgccatcatgaggaaccacaggagcatgcagtgatggaaatagatctcttttgccagtagcgagtcgactagaatatgaaacagaagtatttttttgctcataggagcacaaactggcccagaagaaacatcaacaatgactctctgcgatttctttgaatgcacaagctgagaacagccagatgggaaatcactttcactgttaagaaagggtccttcttttactaggtacagttcttcatactgcctcaatccaaaaccatggtactctaagagactttcgatgtcctcatcctccatagcaagccactccacaacttgtgaaatagggattccttgtccactctggagaccactgtgcaatgaagcgagtgcttgcctccttaactttgcaaagtgagcatgcatcaaacaggcctgcaaataagttgctttccttgagagacgaaagaaggctataaagttcccaattctgcaagctctcgcaacttctcttgcaaacaagatctctggactgcctctgatttcacgagacatcttagcaagatccagagataactcagcaggttcaaccttgtaaccaggatgcttgtctaacttgaggagtgcataataaccccgaaattccttttctgttgagaagaaaacaccctttctcctatggtcatcatacatttgaaatagctcaactgatgttttattcatctgctcaatgttgaggtgtgcatcaaaaccctctgaaaaaccttctccttttg

SEQ ID NO: 30108 - DNA, 2325 bp, Setaria italica
  Peptide Sequence Number=SeqID_96082
ggagaccactgtgacaatgaagcgagtgcttgcctcctttgcaaagtgagcatgcatcaaacaagcctgcaaataagttgctttccttgagagacgaaagaaggctataaagttccccattctgcaagctctcgcaatttctcttgcaaacaagatctctggactgcctctgatttcacgagacatcttagcaagatccagagataactcagcaggttcaaccttgtgaccaggatgcttgtctaacttgaggagtgcataataaccccgaaattccttttctgttaagaagaaaacaccctttctcctatggtcatcatacatttgaaatagctcaactgatgttttattcatctgcccaatgttgaggtgcgcatcaaaaccctatgaaaaaccttctcctctgttgtattcacacaattcgtgcattgcaataatgtggagccttatcttggagagaaattcttcctttgctaatttgtagttactctctgcatggttctttgctactgcacgttcttcagcccagaagatgtaccatttagaccaatcaagggtcttgctgtatggtgcttcacagagcttccttttttaagaaaaaaacagttgagacgtcagacacatacaagaatatacatatagagttatagatttattgcttcctttgaaaacagaaaactgatatatagttaatgaaactgatgtggatacagcattactgcatatgtctgataagaggccctccgcagagagcaatagcaaagtatcctctttccttaacagaaatttctgaaacttgtgaaataaactctgccagatctgttgccatctcgtctgaactctcaaataccctaatttcacaacacttcttggtttcataggagctcatgatttccctctccatggttttgtttgctcttgaaccttaaatcaagttaatgttccaacttccaatctaacacacctatggaagaagagcaggacaagaaagtttaggaaggccttccagaaagccatgtccaactgccatttagaacatccgaagatgaacttgtatggattgagccttatgtactagttcaggcagatgtgttcattatgtgcagttatattgcttaataaaacatatgtgctatttgtgcaacatctgtcaaacagccaacatcagttctactatgcatggaaatacagaaaaaaaaggttcatatttgtatggattgagaaacacagaactggtgtatgcagcgtatataactatattaaataactgatgcgaaggttgttacatgttgaccaaactgacagaacattttttttagttaaactgctagtaaaaagaagataaacatggcagagttgggctaacaaattttaggataaccatttccagatgtttggctacaaagaactgcctaaatatgaccatctatgtaaggggcatggggcagtactcctctgtatctcaaaactgaaactccctatacattgttgaaatatctcaaatagaaagttgtattccaattctgtaaaataaacaattcagtatgggtggagatgaatgcagaaccagtaagtagtacaactcacagtcataccattaaaaggttaaacatattatgctgcttacagtctagctacgaggatggattctctggaaaacctttaaatacataaggatataacaaacaggaaaaaaagaagaaggcagatctggtaatatcacaaaaacaccagtactctcatctgagcaacaggaaaatgacatgtttaaagaccatctgctttatcgtttcaaaggcagtggggttaaaaagcagtgcagcaccggaatagaaagacagggagcaaaggaagggagagggaagctgccagtgcgcaagctctagcagccatcatttgggccaaaaccaattcaaagattccaaacttttttctcagaatcacaacaaaagctgaaggcggcgaggggcgcagtaagtaaaggttgctttgctgaactggcttcaatacttatcctggttgtcaacacaggctgcataggcactccacgcgcccaaaatcctcctcaggcactccttctcctccttcgggctaaatattgttattaacacccactggattagatctggcacgagatcaccaaatacagtggcatttaagatctccgggtcatcaacagttaacactttgatgttgctatcaggtatatgtgaaatggaattcttgacgaaccgcaacaattctaccctttcatctttgtagtcgtcatcatcagcagcagcagcaccaccaccaccagcagtctagtctagtctaactagtcta

SEQ ID NO: 30109 - DNA, 3493 bp, Setaria italica
  Peptide Sequence Number=SeqID_96083
aaattgccatgacacttggtaagatgatttctttcttctttttgcaaaatctaatgttacaagttacaagtgtggaaggatggtgtaatgtaacccttccagcgttccacgggctcaaaagtaaatggaaagcgtatcatcgatcctgtcctgtagcttggtacactgctcgagtagccgggcaagcatgtcgtccccccccgagtggcaccagctcccccaaacctacccttcttggtatgtacaattcaccgctaccaccatgcaccgtgttcatctcgacgtcggtgtctgctggtgcatggggttcttcatgaatctgggtgggtggtcgtggctgttgacttacaggttgcacatagacagcatcgagatcgcaactgatctcgatgatttcatctagtgagaacccagttgacacagcaggcatcgtgctgtgatcctccaaaatggacgcctcatcgcaagtgttgcttctagcagtgcgccattagagttagctgccgcaaaaaaaaaaaaaaaaaaggagtctgatagaggtgctggctcaggacataagcttctgagaactctccggtagaaagctttgctagcctgaagatagtcacccatcttggaaaaaggtagcagtatgagtctcggagctcaaggccaatatttctgcaccataatatttacttcgatggccacctgagtttcatctaaccgggttgattcagtcaggtatctcgccaagcactcctgaaggaacttcttctgatcttgggtttgcttgcccatgtgagaaccttggtttagccaagataaatcataactgaactctggaatcttgcaagcattaatggccgcaaccagtggctggatccttaacggcgatgaccatccaatgctaggcaagaacacttctgcatatatcctctcattacttgttctctccagaagatcaatctcaagagctggccattggttaagtgtttgtgtgtgctgcagccataacctcttctacaacttgatcaacagtattgttgaatgctgaaatacaatccccaggtccagctccagctgcaacatgggtattaaacagctcaagttgtgcgctcaagtagttcagaagcaactcatgggtcttcacaagagtacatcaggctgccttggcaaacttctaatcagccacttcagaccctcacgcaacttgtcatcatcaaagaaaccattggcataatcttccatgtgttcaacaagaaaaataaccaatgatgaagcaatccttcctccatgaagaccactgaggccaagcctgtcagtgatatattgtgaagcatagtcataaccttcatgatatttattgccgctcaatatcaggagaggaagattggattgagctggtatggaggctaacagactgttaagtcgtgccttctgcgtttcccatgaaatgccttcagacactagaaatgctatacagcttgtactattggcaatatcattaccaataacttgctgatcactggccctaacaacagatagacagcatgtgttcggaaagctcatccactctgtccaaattgataggcctgctgatgaaacaaccaatccactatctccatttccagaacccatgagcttcctaagtaaccattttgaggcaaaattgttgttctgggattccatggcacctggtgggacaagtacaagcaacttccagcagaggcatcttgcatcagggttagtttcaagtaaaataggaccagacaactcagaaacattgagacgcgaccaagatctttgctgccttgcttgtctttctttaaaggcatgcccaatgtctagctcttcgacagcaagcttaggaaccaatgtagtattatgaactggcgggccaagtgatagagaacacaatgcttcaacagcaagagcatttttctgctccctaagaaatcgtttgtccgcagcacgtttactccatttcctcagtattgccttcagcttttcaccggaaatttgtttcttgggagacgtaacaattggtaaccaatcatcaactctgctgctactaatattatgatcctcatattcattgcgatcagatgaagaggagccaataggtgatccaggttcgataaccagaacttcatggtctggagttccctcatccatgtctaccctgaccttgtcttcatctccaagcatattggagtaatctaaagaaatgctatctgcaagagaatgcgaaacaattggttctgccaaagcattgttgttttctgtattagcttgtgaccacagtatctctgtttgcatctccactttcttaggggaccctgcaagcccactatcttgatcttcagctgtaagatcagtcaacttgggcttgccttcaggttttagcgatgctacttttggtgtttttgagaatatctccctcttgctactttgtggagaagcagcagtagggaaagatgaaacactggcttctctaccagcatttgggataagaggacttggacgtgttggactgaatagtttattggcagctttcggagaaaatggattaggaaacatcgagctaatctgtctgccaggagtggttgaaacaggcccagaaaacagtgaagagggatcccttctgccatcatgaggaaccacaggagcatgcagtgacggaaatagatctcttttgccagcgagtcgactagaatatgaaacagaagttattttttttgctcataggagcacaaactggcccagaagaaacatcaacaatgactctctgcgatttctttgaatgaacaagttgacaacagccagatgggaaatcgctttcactgttaagaaagggtccttcttttactaggtacagctcttcatactgcctcaatccaaaaccatggtactctaagagactttcgatgtccttgtcctccatagcaagccactccacaacttgtgaaatagggattccttgttcactctggagaccactgtgcaatgaagcgagtgcttgcctccttaactttgcaaagtgagcatgcatcaaacaagcctgcaaataagttgctttccttgagagacgaaagaaggctataaagttccccattctgcaagctctcgcaatttctcttgcaaacaagatctctggactgcctctgatttcacgagacatcttagcaagatccagagataactcagcaggttcaaccttgtgaccaggatgcttgtctaacttgaggagtgcataataaccccgaaattccttttctgttaagaagaaaacaccctttctcctatggtcatcatacatttgaaatagctcaactgatgttttattcatctgcccaatgttgaggtgcgcatcaaaaccctatgaaaaaccttctcctctgttgtattcacacaattcgtgcattgcaataatgtggagccttatctgctcagaaagaaaagacagattccaagatgaaatactccagaaaagacaggttccaatacagca

SEQ ID NO: 30110 - DNA, 260 bp, Setaria italica
  Peptide Sequence Number=SeqID_96084
ctccgctaggccccggcccggcacctaccggcctccgcccgcgccccccgacggctccgctcgaaccagcgccacgcgtccatgccaccgccccaagcccctagctcctccacgggccgccgcctagctccccactccctttgtagcgcgcagcggcggcctcgcatcgtttcctcgctaaggggatgctaacccactgtccgttccatgccgaagcgatgcatcctactgagatccaagctctcaatctatcactatca

SEQ ID NO: 30111 - DNA, 271 bp, Setaria italica
  Peptide Sequence Number=SeqID_96085
ggaggaagaggtgtgaagcgaaggcaaagaggaaattagtcaaccgcacaagagcaagatggctgacattgcattgggcagcgtggggaagatcgttgaaatcgcactcaagatcaaggaggccgtggagacggttaagcagaacgagaaggagtgccacgagatccagaggtgcgttgccaggatcagcgctctcctcaggaagcttgacgagacgacggagacgatgaaggacgaggtgatgcgtgacgcgctggaggatctggccgaa

SEQ ID NO: 30112 - DNA, 363 bp, Setaria italica
  misc_feature (345)..(345): n is a, c, g, or t
  misc_feature (356)..(356): n is a, c, g, or t
  Peptide Sequence Number=SeqID_96086
cgccgggtttcgtcccggggccctttttctggagttaaggaggaaacgcacgcctcggaggggtcctcggaggggtcgccgatcgttgtcggggccgggtcgtccgaagactcgttcggctttcgctccctagtttctacccctttcttggaagggcaacctttcaaggaagaaaggagggctagggagggtcgttcgagcttcgcttcccgtcgtagctccgcgtcggcttcctttttttttttttccgggggttccacctctccttggcctctgctcctccgatctaggttaaagacattgtcaggtggggagtttggctggggcggcacatctgttaaaagntaacgcaggtntcctaag

SEQ ID NO: 30113 - DNA, 789 bp, Setaria italica
  Peptide Sequence Number=SeqID_96087
gccgggttacttggcggcctgccaagtattcctttgccagggtgaggactagctatggatggaaactcaagcgatgacccgtagccaaaaccagaaggtatgatacgaggccatggaataacgggcacaaaatgatgaatgctagactgctggatggggcttcgatcatgtcgggcaggaggaaagaccttgtcagacgcaggagcgggtaacaagtcactactggttgcagcatcaccaccatgttttgctctcttttggaatgcatatccaccctgcgggaaaagttcacgcttcttttttctcttgccatgcttcaaacgaggtttgctgaccaactcatctgggctaaggcgcccaaacaaaagggtcttcagcttctgtgtgttcactttccccctcatgaaatccaacaaattcaaagcacattgtctaaggcatttgcagatcttctgcatctgcaccttccccaccgaccttgcgaaattttgcgaccggtccaagaaatcttcaacacttaaattgccaactcccttcttccatgtcttggagatccatgacgcttcaaaattgctagcacacaacccatgctcccataaactctctgctgataacagtttactaatcagtgacacaaacagttcagccacagattctgtatttctgctcccaaactccttaaacagtacaatgttcctctcaacgcttgcacaatctaaaccatcttttaacaaggcagagaacgcaggcaatattggaggacatcgggtctgcactgcaaatggaaag

SEQ ID NO: 30114 - DNA, 756 bp, Setaria italica
  Peptide Sequence Number=SeqID_96088
tgttgtgggttctaaaaggacctatgttgtgtatgttagaagagacatccaacataacaaggtacaacatgttcttatagattcaattacggaaagtaatttccacttcgaacataagtagaaggtgaaccttataattactcactttactaatcagtgacacaaacagttcagccacagattctgtatttctgctcccaaactccttaaacagtacaatgttcctctcaacgcttgcacaatctaaaccatcttttaacaaggcagagaacgcaggcaatattggaggacatcgggtctgcaaatggaaagcaactaatgaaatgattgacatggagctcattgttagtgctcttgggctattcagatcatgtactttagcccagaatttaaccaagtaacttagtatctgaaacctttcgtcaagcaaggaaacaaatttaaagatcattgaccttgtcatgccatctttatttcaactgaaatgtcacattcaatccctgtgccacaatcaataaccttcagaataggcaccctagcacttacaacaggtagaaccccacagaaaattccattcctctgatgagaatatagaactttggaaaatttcctgattacagaaatcttttgcttgcgagtatatcgatcatcagtattagcactgaaattgacagagaggtccaggtcactacgaggagttaaataaatccatcgtgaatgatccaaatggttccacaacttggtaaaccctattct

SEQ ID NO: 30115 - DNA, 279 bp, Setaria italica
  Peptide Sequence Number=SeqID_96089
tggtaacaggtgatcctcaataaagacccgggactaaaggccgggaccattagtcccgaatgattagtcccggttggaaaaaccgagatatatgaggttttccaactgggactaatgctcgtttctctaccagtgaattatacagcaactgatatttacagtatatgatttttctgaatagagctcacagttgacttgataggtattgtgtttgcttctttgagcaccaacgcccatttcaatctccagcaacctcatactggcatcatcaggcactta

SEQ ID NO: 30116 - DNA, 247 bp, Setaria italica
  Peptide Sequence Number=SeqID_96090
agatgctgttgggctcctaaaccaagcctcaaataattgagctgtggaaagagatacctgcctgacagcagccctaaacttatgcagcaaataatacaccttgtctccgcgtcgcccaaccacactaaccctgagaagcatcttcaactcagcttcttccggtgtgattccacattccaacatatgggcttccacttcaaatgctttttcaacattaccactgttgcaaaacgcagtcaaagcagga

SEQ ID NO: 30117 - DNA, 1497 bp, Setaria italica
  Peptide Sequence Number=SeqID_96091
tgcatagattcctgctggctctgatgatacagttgtagttgaggaataggaagctggttagaaaattgcaatggaacttgcggcaagatagcactctgtggatatgacagaggctgatcttgctgcggcagttggatagcgccaagttgttgtagtgtctgagaaggatgtggctgctgagggggtggtgggggtggaggtggccgtggttgtacagaggagacagaaggctgagagttagaaatattttgtggaagagcagatgagagttgaacttgtggaagaggcgtgccaaaaaatgaagcaggcattgaaggcctggccataagaaattgtgatgcaaatgaaggcaacagattcgaagcaagcatgctgccagatgcagagttcaggcctaaatttgaatcaatagaagcagttggagaaggctggacaacactgccttggttatacagtgttgcaggagagctagagctcatagtagcatgttgagtagccacagctgaataaggttgagggggtggcatcggccgagcagacagaccagagctgaaggtctccagagggatcctatttactggaaatgtgttccataaaagcttggcatctgcattgggtaaatcatttgttgatgaaccaccagcacccgtaagcatatattgagtttgaccctgaaggcctgtgaaagcactaggcatactagcgtcaaacgattgtgtaggataaccagaagcattagatgttggtcgatctctagaaccataggaagatgactgcctgttaactaaatcaggattttgtgtgggcatggatgaaattggaggtggcattggtggcagaggtggatggttattggaatgtctatgctcatgcccacgggatccacttgacacagaagtctcagaaaacttctgtggacttctcttctcatatctactacgagatgattgttgatgaggtgcttgtgcagacgatctcccagataaactactaggagaaacacgatcacggaaagaattcttctctgggctaggaactaaatattttcgttccaaaggatcattagcttctgaaagcattgctgtctgagaagaaatgtcaacgccaggactttcatcatccttttggagtgatgtgaccctctgggaaaagggaattctttcgttctcctgattttctgtctcctcaacaatgggacctggagaattttccccaataatgacaggtggtgattggagactatcatctggttgaggaaaaggaagtttatcatctgaacctgattcctcatcaaaaacaatttcaatttcttgatcgtcatcgagatcagccttgggctgacgtgtgttctctggcttagcatggagattgtcatctaaacttgtctgactttttacttgaggtgcatctccagttggggccggcacaggatttttgacgttctctctgccttgccataaattcatcaacatgaatggatggaggccttccactaag

SEQ ID NO: 30118 - DNA, 765 bp, Setaria italica
  Peptide Sequence Number=SeqID_96092
acatcagtcttggggcgagtctccatcaatgaagctttccccatgtaattcaaatcccatgcgcctaatatcccctaatgtaataattccttcaaggaaatcttcagtgtccacaacaagggcacaattttgctgattgtcatgcaatagctgaaaagcttctgttactgttgcagatggtaacactttgacataaatccttgacatggcctgggagaccttcaaatcatccagaagcatttcttcattataagttccataattattaacatcactttgtataatactgagctcaaggtcatccgcaccatcagctcgcttcgagctaccatttctgtcttctgatgaaattgaagaataacctcgtctgggtgttctaaaaccagaaggctcactgtcatttggttgatttactacagaaggaacccatattgccaacccaactgctcccatgagaggaagcaaaatcctgtaatcctttgtcagctcgaagagaagcaacactgaagtcaatgggactgaacagactgaagctagtgtagcagccattccaaccagagcataagcttgtggctgtgcaacagcagcattaccaggtatagctgaatttattaaataagcagctgatcctccaaatacagctccaacagcagccccaatcatcaggctaggagcatatagccctcccacgaggccagagcccttgcagagggcagttgcaaccacctttgcagctgcgagttgagttaacaaccatataccagg

SEQ ID NO: 30119 - DNA, 328 bp, Setaria italica
  Peptide Sequence Number=SeqID_96093
atcaacctcaccgtccgcggcacgccgccgccggcgccgcgcccgggctcgccggggtcgctcctcgtgtgcaaccaccgcacggcgctggacccgatcatcatctccatcgcgctgggccgccccgtgacgtgcgtcacctacagcgtgagccggctctccacggcgatctcgcccatccgcgcggtggcgctgacgcgcgaccgggcggcggacgcggcgcgcattgcggagctgctggaggagggcgacgtggtggtgtgcccgggaggggacgacgtgccgggagccggcgctgctgcggttctcggcgctgttcgcggagctc

SEQ ID NO: 30120 - DNA, 461 bp, Setaria italica
  Peptide Sequence Number=SeqID_96094
ttcgtatatggcagtatggaacatcccttttagatgttgctcttctttctggcctaggacagataggataaggtatgggaaggatatttactcaagttcctctcctcttgacgtagcatgggcaggggccatcgtatagtatacgtgcccatatctcgcatttatgctgctcatttcagagcatggaactagacataagaagtagtatctaattcagtaagatatattgtcattgtggtattgtttgcatcttggtctatgttcatacttggatgccatttagtgaactatccttgaggtttcgaagccttatatttatatctaatatccaatagctgccctaacttgtatgaaatgtgatgactagtgtagtaatcaatttcatgaatatttagcttgtttgtggactatttatgatgcaaatggttcctaacttcatatttgttccatgtatgcaggaa

SEQ ID NO: 30121 - DNA, 291 bp, Setaria italica
  Peptide Sequence Number=SeqID_96095
cacgcttgcagagatctagtgagagggacagatctacagagagggagggagagagaggggtagagggagatcaccaatcaccatggtggtggcgctgggacccggccggttctacggcagcagcctcccgcgaccgcgcttcttccccggcgaccgcgtcgacccgccggtgtccgtcaccgacccgctcctcgcctgggcgcaggaggcgcactggtccatgggcggcctcggcgtcaagcgcctccacctccagggccggatcgaggggtccatcgacaagctccgccg

SEQ ID NO: 30122 - DNA, 355 bp, Setaria italica
  Peptide Sequence Number=SeqID_96096
atcgagcggctgcggaacgtgctgccggggggaagctggtggcgcctcgaggacggcgacgaggccggggacgggggcggacgcgccgaggggagcggtaccaccgcgctttccgcgctcagccggatgtggggcctcgtcgccgccgaccgctgggtcatctacgccggcttcgtgtccctcgtcggcgctgcgcttgcggagatcgctataccccatcttcttgcagcgtccattttctctgcacagaatggaggagctgtgttcttcagaaacgccaagcttctagttgtcctatgtctgatttccggagtgtttagtggtgtacgaagctgctgttttggtgttgcaaaca

SEQ ID NO: 30123 - DNA, 660 bp, Setaria italica
  Peptide Sequence Number=SeqID_96097
aaattgtcttgatctccaggaaggcgaaggcctcaccatggcagccgtgcctgccgccaccgaaggacgtgtacgagaaggcgcctgcagccttgtcctcctcccttcccggcgcaaaccggtcagggtcatacgagtcagggttgctgtagatgtgagggagcctgttggcaaatgctagaggtgatgcgaccatgtggcccttggggatgtcgaactccttcccctccttggtggtcaccgtgaagtcgcagtgcgactggcggagcagcatgggtatcggcggctgaagccggagagcctccttgatgcaccggtacaggaaatgcatctccgacacgacgtcgtaatcggttctgtctccatgccgcttcatgacctgaatctgctcctctacagccgttgcgaagaactgcttcaactgaagaaggtaggctccggtccaggtcgaggcgatagagctggtctggaatccaccaaagactgtagtgataagtagccctgtgatctcctcttctgtggtgttccgtccatccttgtacttggaatcgattaggaactgcagcatgtcttcctcctcggaccgtccagaggccttgcgggacttgatgatggtggagaagatctcccccaaacgcgcgcgtgcccggtcacggcgcc

SEQ ID NO: 30124 - DNA, 268 bp, Setaria italica
  misc_feature (251)..(251): n is a, c, g, or t
  Peptide Sequence Number=SeqID_96098
cacgggcgggggcgcgccgagcgcacacaagtcagtgcggtaataagcaggggagccagcggagcggagagcagcggccgcagaagcagcagcagggccagccaccatggcggtgggcactaccgccgtgaagctgcacctctcgtcggccgccgcggccgcgcgccgcccctcgctgctccacctcgcggccgtcgccgccctctgctccctgtcctacctcttcggcatctggcaccacggcggcttcnccgcggcccgcgcctcc

SEQ ID NO: 30125 - DNA, 303 bp, Setaria italica
  Peptide Sequence Number=SeqID_96099
ggcgggggtggcgggggtggcggaggaggccggatgggaagggtaagcagcgggggaggctaattggagtggttaggggagggcagggatgagtggcggcggtggtatgtgtgggtggcgcggcagaggcggtgtggcaggggacaacagcaccggaggccacggggcggcagcagggcgggtgggggaagaggtcgacgggggagacgcgatggatgcgcgaggttccgatgcgcaaggaagaagatgcgctgcggtcggggacggcaatgcgggaggaagacgaagccagttttttccttt

SEQ ID NO: 30126 - DNA, 590 bp, Setaria italica
  Peptide Sequence Number=SeqID_96100
acgccttgctcaggccgggggtgaagtccggccgcactatccacaggaacggccggccggtgagctccagcccctcggccagctcctcgaactggcgcgggtcgaagatggccatgctgccgaaggccacgtacacgacggacccgtcgggctgcgcgtcgagccacttgatgcaccgctcgtcctccggcaggaagttcccgacgggcttccggaactcccggtcggcgaacagcgggccgatgggcaggacgttggggaagagcttggacgcgccggcctcggcctcgtggaaggagttgcccaccgtcatctcggcgaggccgttgagcttgttgttccgggtgaccaggtcgaagatgatgtgctgcccctccggcgcgccggcgttgttccacgacaggtgcgacgtgtgcagcggcggcatccccggggcgagctggaacgtctcctgacgccgtggcaagcccttgtcgtcgatgagtccgtcctcgatcagcttggggatcttgagcatcaaggccaagcacgccgtggccgccggccagaaggacacgaccctgatgccgaacttcttggcgacctcgaag

SEQ ID NO: 30127 - DNA, 432 bp, Setaria italica
  Peptide Sequence Number=SeqID_96101
cgtagcgttcgcctcgctctacctcgtctacgttctcgccgtcgcgtttacgccggaacactggaccagacgccaggatgaagaggaggaccacggccccgccgccgcttcctcggagctccacagcgtcatagagaccaagttctacaccgaccaggaggctcgagatctactcctcgccgacaccgccgcgcctctcctccagtactacgccggcgacaatatcagcggcggcggcaacaacaagagcacgttctggaccgtcatgcgcgtgctagctcttcccctgactctcccacggcggctgacgatcccagacgcgagcaaggagcggtggagcaagacgaccgcggtgaccgcggccacgctcgcccccatcttcctggccttcctctgcagccaccgcgccactgggagcccgttccccgccgt

SEQ ID NO: 30128 - DNA, 711 bp, Setaria italica
  Peptide Sequence Number=SeqID_96102
aaagtttgttaagaaattcaatattccccttctgggtaactggaggtggtggatacaccaaggagaatgtagcacggtgttgggctgttgaaactggggcctttttagacacggaacttccgaatgagattccaaacaatgattacattgaatactttgctccggattatacattgaaagttccaaatctgaacatggtaaaaaaaacttctgctcatatggcttaatttatattatacctggtcctttttttctttgtattaagtgacttcagcatttaaaatattgaactgtgcctcgactatttgacatgttgttaataaatttagtgttacttgaagcttgaaactttcatacttcttgtggattaaaaatagtttatgactttttacctattgttcaactggagtaggacaatttgaatagtaagacctatctcagttcaatcaaagtgcaagtcatggagagtctgcgctccatacagcacgcgcctggcgttcagatgcaagaggttaggctttatcttctagttgttgattatgttcatttacacttgcatggtgaaaccttccaagtgaaacaggttatgcagaaaaagggcggtatcagaagttcacaacactaaattatgcatttccacagttttttgcttctatcaatatgtttttatttatttattttttttctgatggaatcgtgtaataaatcctt

SEQ ID NO: 30129 - DNA, 1655 bp, Setaria italica
  Peptide Sequence Number=SeqID_96103
aacctccccccctacgaccgctcgtgcacgaccggcccgccccacctccctccgccgccgccgtcgcggcttggtctggtccgggctccgtttccctgcgcagccccgatttcgcagcccctgcggcagccgcgctcgggagtgaggcgatgctggagaaagatcggatatcctacttctacgacggagatgtgggcaatgtctactttgggccaaatcaccccatgaagccacatcgtctttgtatgacgcatcaccttgttctttcatatggacttcataaaaagatggagatatatagaccacacaaagcatatccagtagagcttgcccagttccattctgctgattatgtggaattcttgcaccggataactcctgacacccaggacctatatggaagtgaattaactagatacaatcttggagaagactgcccggtctttgataatttgtttgagttctgccaaatctatgctggaggaactttagatgctgctcgcagattaaatcataaaacatgtgatattgccattaattgggccggtgggctgcatcatgcaaaaaagtgtgaggcatcaggcttctgctacattaatgatctagtcttgggaatcctggagcttctcaagtaccatgccagggttctttatattgacattgatgtccatcatggagatggagttgaagaagccttttatttcactgacagggtaatgactgtgagtttccacaagtatggtgacctgttctttcctggcacgggtgatattaaggatattggagaaagggaaggaaaatattatgccatcaacattccacttaaagatgggatagatgacaccagctttactcggctttttaaaacaattattgccaaggttgttgagacatatttgcctggtgccattgttcttcaatgtggggctgattcattggcaagggaccgtctaggctgcttcaatctctccatcgaaggccatgctgaatgtgtaaagtttgttaagaaattcaatattccccttctggtaactggaggtggtggatacaccaaggagaatgtagcacggtgttgggctgttgaaactggggtccttttagacacggaacttccgaatgagattccaaacaatgattacattgaatactttgctccggattatacattgaaagttccaaatctgaacatggacaatttgaatagtaagacctatctcagttcaatcaaagtgcaagtcatggagagtctgcgctccatacagcacgcgcctggcgttcagatgcaagaggttccacctgatttttatatcccagattttgatgaagatgagctggatcctgatgagcgtgttgaccagcatatccaagacaagcagattcaccgtgatgatgagtactatgaaggtgacaatgacaacgaccatgacgatggcacacgctgatctgttcctgatgagcatgtaatggtgtaaacggaaactgggaacattcactgttgttgtgtagctcatcaggcttgagatggagtgatttgcagattttaacagtagggttaacttaacagactagcaggttaaaaatgtttagagttctgacccttccctgaatttacaccgtgtggtacaatcctgccccttttctgcatacagaaatgc

SEQ ID NO: 30130 - DNA, 207 bp, Setaria italica
  Peptide Sequence Number=SeqID_96104
cagcgtcacatggcatggcatgagcacatccacatccatgcgtgacatgatccggacggacaccgagacaaaccagagcgagacccatccgccgccgcggagtcaaaccctcctccggagcacagcacagcaaagcacagccagctcggtcccctcccctccctcccccggcgcggtcctcccgctccacttcactccccagtcccc

SEQ ID NO: 30131 - DNA, 248 bp, Setaria italica
  Peptide Sequence Number=SeqID_96105
agctacatggtcggctaccggcagctacttcccgacgcacgtgcaccaccgcggcgcgtccatcccgtccgtccacggcgagaaggccacggtcgggtgcatggacggcttcgacaagtactacaacagcaagggcgctgaccccaacgtgctcaacggcgccatcgtcggcgggcctgacggcaacgacggattcgtcgacgaccgctgcaactaccagagtgccgagcccaccatctccgggaacg

SEQ ID NO: 30132 - DNA, 410 bp, Setaria italica
  Peptide Sequence Number=SeqID_96106
ctttgacaccaaccatccgctcaccgaaagaaacatcaccagttctttgctttgctcccacaacctccacccaatcaattcttgaaggatactgaggaagagggtatacataggcatcatctgtaccagaagtagaggcagtagtgctgccatctctgaaatggtgagcctggcgagcattgctcctgcgattatctgtaaaggatccattttcatgtggctcccctgaattgagcagaatctgttccatctcttggaccatatcatcgaataaatcattgtcatcaaatatgcccacctggttgtgatccgggcgcggaggagcagccggcgaaccaggactggacccctgctgcgcgagggcgccgcctccggcggccgccggaggaggaggaccgatttccggccgc

SEQ ID NO: 30133 - DNA, 280 bp, Setaria italica
  Peptide Sequence Number=SeqID_96107
caataccctagggtttcggggcctcctcctcagtggactcctgcggtgcttcctcctcagtggactcctgcggtgcttcttgttcgcttaaaaagttagcactgtccgaagggttggcctcgcaggggaccagttcaaagatttcctcaaactccgaagatccttctgaaaattccaagtaatctccttctggcgcttcggggtctggaatccaacactaggttagtgtttgttagacgacactcgcttggcgagcatctcccatctcagtacttgctta

SEQ ID NO: 30134 - DNA, 322 bp, Setaria italica
  Peptide Sequence Number=SeqID_96108
agatccgctgcggcttcttcttctggtgccaggtgcagctcgtacgtgccgttagcaaagttcacttcagcagcagtccaggcgcacagaggaggggcggcgcagaagggctccatgggcggcagcgcgcacgccggtgacatggccggaatcgaccgtggaaacaaagcttggaaggcggaacgatgagcgcatgagaatctagagatcaccgcggttccatttgtgcgcttggttgatgatgaggagggccggagcatggggcgccatggtgaggcataggcggcggcgggtgaagctctggaggttggggaaaactcgg

SEQ ID NO: 30135 - DNA, 350 bp, Setaria italica
  Peptide Sequence Number=SeqID_96109
tgtcagcctttgggtgtgcttggttgacacaatttttgccgaaaagcttactacgagtgaggccttagttttatcttttattttagttaagtcattacctaaccattctagatgataacagaagtaaaagcaaccacagctgttaagtcatacattacttgacaacaggagattttatatcgcatgagttgatactacgatgctcaacagtgatcaagtgcattcataaccgagaattgcggcgatccggatcaattttacatcctgcaggagagcaccacgatcaccagcattatacgactgtccaggtcgtactaacaacctctcgattagtaaagtcaatgattagg

SEQ ID NO: 30136 - DNA, 258 bp, Setaria italica
  Peptide Sequence Number=SeqID_96110
cggatccggatcaaattacatcctgcaggagagtaccccgatcaccagcattatacgactgttccggtcgtatctcacaacctctcgattagcaaagtcaatgattaggaatacaactacccggacccagggatgcaccccacatgggaccccacgtctggcctgatctccatgtgagtttcaggctacacccctgccaatctccagcacgtcaaatgcgggtacgaagcattcctgatcatagaatttactaactaa

SEQ ID NO: 30137 - DNA, 503 bp, Setaria italica
  Peptide Sequence Number=SeqID_96111
tgggttacttactaattattttaacaagtggcaaagatatccttaataacaaggttggattgtgcataaaagtaaggtttcaatcaactcctagacttaatgcattcataaagaaataaccaatagttgtacacatgaaataataactccaaaatagataggcatagatgcaccggggcttgccttgatctgtaaaaatgttagcattgcccgatggtccggcttcacaagggatcaactcaataatttcctcaaactctggaggttcttcagagatttccagaaattctgcttctggagcttcagtatctacgataaagcgtatgcatgagttagagatgcaactttttaagcacaggactctacaacttctttcatgataaagttgcaagccaacaatgacttagacaacttaacttcatgataaagttgcaagccaacaaaactctacccataacgtctaactcgcgatttaaactcccttaattaaacccattttagac

SEQ ID NO: 30138 - DNA, 452 bp, Setaria italica
  Peptide Sequence Number=SeqID_96112
cagggtactcagcaagtcttacccgactaaccaatataatagctttctttggatgcatatgatagcctttggtgtacttggctgatacaacttttgccgaaaagcttactacaagtgataccttagttttatcttttatttgggttaagttattacctaaccattctaaatgatgagcagaaagtaaaagcaacaatagatattaagtcatacatcaaacattatcagaaaggtatattattcatgaatttatactacgatgctcaacagtgatcaagtgcattcataactgagaattgcggtgatccggatccatttacatcctgcaggagagtactctgatcaccagttttatacgactgtccaggtcgtacattaacgacctttttgtatttagcaaaattcttattgtattgggaattaagacttacccggaccctagggtacgtcta

SEQ ID NO: 30139 - DNA, 413 bp, Setaria italica
  Peptide Sequence Number=SeqID_96113
ttttttgggacaacatcaacaaatattacatttttacatacatacaagaggtacgagttaatacaagacatagtttgaagcaaacttaatagtgcagtgttagacagagttctagggcttaaaacataaacggttcgggtggagatgaacattataaaacttcttctaagggtattgtgagactcataacaataccctagggtttcggggcctcctcctcagtggactcctgcggtgcttcttgttcgcttaaaaagttagcactgtccgaagggttggcctcgcaggggaccagttcaaagatttcctcaaactccgaagatccttctgaaaattccaagtaatctccttctggcgcttcggggtctggaatccaacactaggttagtgtttgttagacgacactcgcttgg

SEQ ID NO: 30140 - DNA, 449 bp, Setaria italica
  Peptide Sequence Number=SeqID_96114
tagtttccaagcaattaatataggtaacaaaatttgattatcatcatctttcattcttacttagtgtagcatagcgatcaagtagtcccaaactgtaagaggcagacgaatcaattcgaatttcttaaccatgcatggtgaacctaacctcacgacatctgcgcaccgcgaagggtcgcttcatttgtcagccgtccccatcaattcccagacccgtgtcgggcccacttcccctagtacaaggcccatagacctggcctctgccgttctatgaccacacttgttaccacatgcggccgcaagggaactctgttcaagagacagtggaacgatccgctcacatcccggttcaatcaggtactaggcttccccatcccatactaggtttgaaattagtaccttcaacacttgatcacgaacaccatcatatttcgactttagtccaattt

SEQ ID NO: 30141 - DNA, 437 bp, Setaria italica
  Peptide Sequence Number=SeqID_96115
aatttacatttttacatacataacaaaggtacgatttattacaaaccatagattgaagaaacttaacagtgcaagttaaaccattgctaagagtttaaaatataaaacagtccggggtaagtaattaaacatctaagtttattctagggtatcatgagactcataagataccctagttcttcggtgcttcctcctcgatgggtccctgctgggtttcttcacgcggggaggtagcaaacgggtcttcggcttgctcgggctcggctccgatgggctgcagctcagctacggctccttctggcgtcgggtgaagctcgtaagtcccgtcagcgaggttcagctctaagttccatttgagctattggttggggacgaggagggccggagcatggggcgccatgtgaggtcgacggcagtggtggaaaaagtttcgtgta

SEQ ID NO: 30142 - DNA, 610 bp, Setaria italica
  Peptide Sequence Number=SeqID_96116
gttcaccagaactaccttgaaaacctccacggtatgttccactagccatacatcaagatcgcttccacgatgggatcgcatcaacaaacattacatttttacatacataacaaaggtacgatttattacaaaccatagattgaagaaacttaacagtgcaagttaaaccattgctaagagtttaaatataaaacagtccggggtaagtaattaaacatctaagtttattctagggtatcatgagactcataagataccctagttcttcggtgcttcctcctcgatgggtccctgctgggtttctgaaaacaacaacaaagagtcccctgagtacgaagtactcagcaagtctgacccgcctagccgatataaatatttttgacacactgtatgatagctttatggtgtactggctgactcacattttgcagaaagagcttactataagtgaaaccttagttttaacctttattttagattgagtttgttacctgatcagtctagatgatgaaaaatattttagcaaccagatggaactaagtcatacaacatctttattcgaaagcaacgattcccttctctttgttacactacgatacttaagtgatga

SEQ ID NO: 30143 - DNA, 833 bp, Setaria italica
  Peptide Sequence Number=SeqID_96117
gagttaacaacttaaccacttagtttgattatgaaataaacatcagagttttacaggatttcagaaaaacaacagaaggtaaaacactagcggaagcaacgtcgtggtcggacatccctggtgaggccagccgggacatcactgatccctctcctcgccgtccgaggagggatcccactcgaccgtccaacccggagggagctggggcggccaagagccagcaggagaagggtcgggagcagcaacttcacctggaatccaacactaggttagtgtttgttagacgacactcgcttggtgagtatttcccatctcggcacttgcttagtccttccatcttcgagataggtccaccatacaccatcttcgggttcggttccatcatcacatccttcacgttgtttatctagcgtatctagatgagatgcaagtgcatgaatacgaagaatggtaacatgagatgcattacataaaagcattcaggacaagcacaaggtacaccacaagacataagtacttagaaagcaagttatttaactaactatcactcaagtctccatagggatagcaagcataacaagcatggcacactagttaactcaagtcaagctattgcaagcatttaacagtcaagagctaattaagcatagcatcgtacaagaactaggggtgatggtgcttatcaacatggcatacataagtgcatcacacaaccagcaagttgaaggtgatcaaagtatattacatttgtttttaaactactcatgcacaagcaagtcgcacaccaacatcactaaggttctagtaagctatgcagcaaggttattttgtag

SEQ ID NO: 30144 - DNA, 800 bp, Setaria italica
  Peptide Sequence Number=SeqID_96118
ggggggttgtacacaacaacctttcgattagtcgtactcaaagattaggaatatgacttcctgaacccagggacgcacccccacatgggaccccacgtctggcctagtctccatgtgagtttcaggctacgcccctgccattctccagcacgtcaagcacaggtacaaaatattcccgatcagagagccacctaacctaccgggctttgttggtcccatacccagtaagcaaccaggtaaaaatcacttgatcaaaggttaagacaacgaacggtccttaaccacattaacttagcaaacagaactaccatctttagcttctgtccgcatttccaaaatctcaggccatttccttgattaacatgtatgatcatcttagcctttagtgttgagtaaccaaagttactcataggtatctaagcattgcaaagcataggatagttacttattagttgaacaggtggcaaagatgtccttaataacaaggttggattgtgcataaaagcaagttttcaatcaactcctagacctaatgcacatataaagaaataaccattaattggactcatgaatagtaatttccgaaagtagatgagtttaaatgcaccggagcttgcctgggatcaacaaatgttagtccttcggaaaacccttttagtaaaagaagcacttcaacatttctcggactcttgacaatcttcagatgaattccacaaattccacctcaggagctttgacgtccgcaaccaaagcatcctcccgattctgacaatgtttcgttagcaataaaaattagtaga

SEQ ID NO: 30145 - DNA, 629 bp, Setaria italica
  Peptide Sequence Number=SeqID_96119
cattaggtcgtcaacatcacctgaaagagatatgccacaacaaggctgagcgactacgctcagcaagacttaaccgacccccggtggtactaatccaccaacacctagacaagcaagtttttgttgctctcgggttttttttgtgccaaaaacgactagagtaggtccttattttcaatattttagccacaagttctatgttcatttaccagtctaagttagcaactatactaaacaagcatagtttccaaacaatttatgacaagcattaatattaataccatgcatggcgaacctaatctcacgacatccgcgcaccatgaagggtcgcttcctttgtcggccgtccccatcaattcccatacccgtgtcgggcccacttcccttggtacaaggctccatagacccggcctcggccgttgtatgaccgcacttgtcaccacatgcggccgcaagggaactccgttccagagacagtgggacgatccgctcacgtcccggttcaatcaggtactaggcttccccatcccatactaggtatgagattagtactttcaaacacttgatcacgaacactatcacatctcgaccttagtcaaaattcatgtagacagacagggcaatccacc

SEQ ID NO: 30146 - DNA, 615 bp, Setaria italica
  Peptide Sequence Number=SeqID_96120
ctccgactcagtctagcgactagggtattgtgagactcataacaataccctagggtttcggggcctcctcctcagtggactcctgcggtgcttctgaaaagatagccacaagggataaccctgagtacggggtactcagcaagtcgtacccgactaatcaatataatagatttttttggaagtacatgatagctttttggttgtatttggctgatacatttttgccaaaaagcttactacaagtgatgccttagttttatcttttatttgagttaagttgttacctaaccattctagttgttgagaaaagattaattgcgaacgacaaggtattaagtcagacatcaatcattaacagaaagatataacatccatggatttatgctacgatgctcaacagtgatcaagtgcattcataaatgaaaaattgcggcgatccagatcatattacatcctgcaagagagtaccctgatcaccagttatatacgactgtccaggtcgtacgtaatgacttttcgattagcaaatccaatgattgggaataagactacccagacccagggacgcacccccacatgggaccccacgtctggccctatatactgtctgagtcg

SEQ ID NO: 30147 - DNA, 466 bp, Setaria italica
  Peptide Sequence Number=SeqID_96121
actcagtgcagaatagcgatcaagcagtcccaaactgtgagaggcagacgaatcgattcgaatttattaaccatgcatggcgaacctaatctcacgacatccgcgcaccacaaagggtcgcttcatttgtcagccgtccccatcgatcccttaggcacgtgtcagggccaactgcctttggcatgcaatgctccataatcccggcctctgccgtactacgaccgcacttgcacccacatgatgcaccacgggaacaacattccaaggacagccggagggtatgccacaccccagttcaatcaggtactaggcttccctatcccatactaggtatgagattagtactttcaaacacttgatcatgaacgccgacacgtttcgaccttagtccattttcattagacagacagggcaaaccaccaagtatcgaacataagcccgaccccgtccatcatccttatagtta

SEQ ID NO: 30148 - DNA, 831 bp, Setaria italica
  Peptide Sequence Number=SeqID_96122
gggcaatccaccgaccaccaaaacagttcataaggccctgccccgtccatcgcccttatagttgtaacaaaaggaaagcaaacaactcctataactcatgagtgatagtccatcactcgacttttaccgagtcctattaagcattgcaactactcgacttcttatactagtgttcatgcatctatggtttcaatcaattcctaggaacgtaaaggcacaatcaaaacaaccaatatattgcgagtaattaaacataggaatttatgctccggggcttgccttcacgcggggaggtagcaaacgggtcttcggcttgctcgggctcggctccgatgggctgcagctcagctacggctccttctggcgtcgggtgaagctcgtaagtcccgtcagcgaggttcagctctggaatccacacctggaaaccacactaggttagtgtttgttagacgatactcgcttggtgagcatctcccatctcggcacttgcttagtcgttccatcttcaggatagctccaccatacaccatcttcaggttcagttccgtcatcatgtccttcacgtggtttatctagcgtatcttgggccaggggcactcccagcaagtccagcgacaggaggaggcgcaccccagggaggtctccacgagtagcagcacggcggcaaaggagctcccgtggagggcgtcgtccggtaagggagcacggtcgggaagtagcaaaatggaatcgcgacgtcgaggaggcgccgtggctgcaaggaattggccggagatgcaccaaccgcggtggatttcgccggcaaaaaattttgggaaaagtggaactcag

SEQ ID NO: 30149 - DNA, 643 bp, Setaria italica
  Peptide Sequence Number=SeqID_96123
tcgcgagtgacaggaaatcactcgacttttaccgagttctattaagcattgcaactactcgacttaacatactagtgttcagatcaagggtactatattcatgcatctatggtttcaatcaactcctagaatgtaactgcgcaatcaaagaaatcaattgtattgcaagtatttaaagataggaaatcatgctccagggcttgcctggaatccagcactaggttagtgtttgttagacgacactcgcttggcgagcatctcccatctcagtacttgcttagtccttccatcttcgggatagctccaccatacaccgtcttcgggttcggttccatcatcacgcccttcacgtggtttatctagcgtatctaagttccatttgagctgttggtcagggacgaggagggctggagcatgggacaccatgtgaggtcgacggtggcggtggaaaagtttttgtaacttgggggaaacttcgattcccgtcgattcggtgggcgattgagggagaggaggggctgatggtgtagctggggaagtggcgcagctttgagtgagaggaattgaaggaagatggtaggagttggatggatttcgctggcgaatgaagctcggtcagccatggctatagtgaggaaggtta

SEQ ID NO: 30150 - DNA, 900 bp, Setaria italica
  Peptide Sequence Number=SeqID_96124
taatcccatgacatccatgcaccacgagtggtcgattcatttgtcagccgtccccatcgattcccagacccatgtcgggcccacttcccttggtacaaggctccatagacccggactacgccgtactatgaccgcacttgtcaccacatgatgcaccaggggaaaactaagtttccagagatagtggggaaatccgctcatgtcccggttcaatcaggtacttggcttccccatcccatactaggtatgagattagtactttcaaacacttaatcacaaacactattacatctcaaccttagtccaatttcatgtagacagacggggcaaaccaccgagtaccgaacataagcccgatcccgtccatcgtccttatagttgcaacataagtaaagcaatcaactcctataactcgcgagtgataggcaatcactcgacttttaacaagtcctattaagcattgcaactactcgacttaatatactagtgttcatatcaagggtactaagttcatgcatctacggtttcaatcaactcctggaacgtaaatgcgcaatcaaagcaatcaattgtattgcaagtatttaaagattggaaatcatgctccgaggtctagccatcacacttggagttagcgaactggtcctcggcttgctctggcacgggctcgactccggtgtggtgcagatccgctgcggcttcttcttctggtgccaggtgcagctcgtacgtgccgttagcaaagttcacttctacacgaaatgcaaatgcaacaagttcaatcttccatgctttcacatgcaggatgcaaaacatgaattagtgctgaagtgtaaattacattacgacaacattcacctaaacaaggttctaaactttcatttattctttctattgtaa

SEQ ID NO: 30151 - DNA, 903 bp, Setaria italica
  Peptide Sequence Number=SeqID_96125
taaagtaactaaaaactttaaattagcaaacttaatagtgcagtgttagacagagttctagggcttaaaacataaacggttcgggtggagatgagcattataaaacttcttctaagggtattgtgagactcataacaataccctagagtttcgggacttcctcctcggtggactcctgcgatgcttctgaaaagatagccacaagggataaccctctgtacggtgtactcagcaagtcttacccgactaaccattataataataatttttcttggaagtacatgatagctttttggtgtcctgggctgatatcttctttgccaaaaagcttactacaagtgatgccttaattttatctatttatttaacatccatggatttatgctacgatgctcaacagtgatcaagtgcattcataaatgaaaaattgcggcgatccagatcatattacatcctgcaagagagtaccctgatcaccagttatatacgactgtccaggtcgtacgtaatgacttttcgattagcaaatccaatgattgggaataagactacccagacccagggacgcacccccacatgggaccccacgtctggcccgatcactatgtgagtttcaggctacgcccctgccaatctccagcacgtcaagcgcgggtacgaagtattcccgatcagagagtttactaacctactgggctttactggtcccatacccagtaagtgatcagatgattatcacttgatcaaaggttaagacaacgaatcgggccttaaccaaattaatctagcagacagaactacatccctagcttctgcccgcttctcaatctccatgccatctttccataaataacatgtatgactcaaaagttttccctaaggttggtaaaccaagtatttaag

SEQ ID NO: 30152 - DNA, 895 bp, Setaria italica
  Peptide Sequence Number=SeqID_96126
tattacaaaccatagattgaagaaacttaacagtgcaagttaaaccattgctaagagtttaaaatataaaacaggccggggtaagtaattaaacatctaagtttattctagggtatcatgagactcataagataccctagttcttcggtgcttcctcctcgatgggtccctgctgggtttcttgatctgtaaaaatgttagcattgcccgatggtccggcttcacaagggatcaactcaataatttcctcaaactctggaggttcttcagagatttccagaaattctgcttctggagcttgagtatcttcacgcggggaggtagcaaacgggtcttcggcttgctcgggctcggctccgatgggctgcagctcagctacggctccttctggcgtcgggtgaagctcgtaagtcccgtcagcgaggttcagctctggaatccgcccctggaatccaacactaggttagtgtttgttagacgacactcgcttggctagtatctcccatctcggcacttgcttagtccttccatcttcgggatagctccaccatacaccgtcttcgggtttggttccatcatcacatccttcacgtggtttatctagcgtatctaagttccatttgagctattggttggggacgaggagggccggagcatggggcgccatgtgaggtcgacggcagtggtggaaaagtttctgtaacttgggggaaacttcgattctcgttgattcggtggatgattgagaaagaagaggggctgagaatgtagctagggaagtagcgcaactttgggtgagaggaatcgaagggagatggtaggagttggattgattttactggcgaacaggaacctctcaagccggctgtctggggcaataatggaggaaggcttg

SEQ ID NO: 30153 - DNA, 781 bp, Setaria italica
  Peptide Sequence Number=SeqID_96127
gttccgttccgtaccttacccgttcccgtttggttcggtcggttcgttcctacgttttgtttttttttttttttttttttttatacgaactttggttgataacaaagccgacaggctgtacgaggcacgcagcaccaattttaattgtatatgccggagtacaatatcaacatcgataaaaagaaggcagcgatcgaatatcaacaggataacaggcagagatccatggtgatgatcggagctagcagtacaagcaaagctagtaggcgaatggaggaggatcggaggagcaactgaacttagatcttgccgcgcgggcccggcaccggcggctgctgcggccccttcttgatcggcaggaggtccggcgacgccgacgcgctgacgtaggccagcagggatccgccgcccagcagcaggaacttgagcagcaggcccctcttggtgaacggccccgcgaacgtctcgaagaacttgctctgaagcgggttgtagggcgagggcgcgtcggagccgtagaggtcccactgcccggtggtgttgccgatgtcgtcgaggtcgaagtagacgctcttgtcgccgtacttggccaccacggcggcgcggggcctgcgggcggagcggcaggcggcgcggggcgccggcctgacggcgagcctcctgccggagatggagctgccgccgaggcccttcacggcgaccggctgcacggagacggcggcgagggaggccatggcgttcgctgagtactgtcgaggttactaccggtagtgtccaagtg

SEQ ID NO: 30154 - DNA, 1256 bp, Setaria italica
  Peptide Sequence Number=SeqID_96128
aaacagcatccatctatccaatcatgacaagaaacaatgtacaagaacatccatcaggtgaacgcccatatgaacatcaatatttgcttgccgttaccacgatatcccactgatatagggtcagattgtcctaaagccctataactcgcacaagaaacgggatgatagaccaggttctacttacatatgtacctatataaattagcctcctcggcatccggcgagctgcttcgagcctcttaaaaaagcacacagcaccagacgcccagggctcagcacaagacgtagcgcacccataaacaattggctgatgagcccagcgtcacttcacatgggagtcgtagatgtcaaggaccgattctgggatgacggtgggcaacttgtctatgtacatgaagagtcgcctcaggttctctcttcggaccgtcgccatgtcgacgatgtccctgtcatccgtgtatatccacaggtcagcagagtttaccctcttgaggctgtcacggcagaatggacaggactgagaccttgacctccagtcacgatagcatttaatgcacatagcatggctacaagttggaagaacaactttggtgtttgtctccatacatatgccacattcctcctctatattatcgtcaatctctgatatcaccattttcggatcctcatctcgttttctatacctctctatacatattgctttctgtttcttatcctccacttcattgattccttcatgtagttgcatcaaagaaggaaatatgacagcataaaattccctgatgcttgcttttctttcatgagtagacatggtggttgtcccatcagcataaaccttataaattagaatcctcaacagcccaagtgcaccagcaaggctgcaatctgtccactgcacaagaaaaaggaaaaagtgggcagcagggcaatatgccatcctcatctgaaggcaggcgccatcatattccctccgaaattcagaagcaagcgagttggcgtgctggatgtcggcctcgagcaccttgagcgagtccctgaacgacctgcccatggacacagcagcctccgggaagcacaccaactccaccaccgcgccgccgcgaccatccaaatcccgacctcctccccctgctgtcgccgcccaaaacctcacccaaaccctagccgcctccgctcctcccgatccgcgcggcggagccgacccccccaaaaaaaaccccaatcgctcgctccgcgggctcgcgcttcgaataaac

SEQ ID NO: 30155 - DNA, 303 bp, Setaria italica
  Peptide Sequence Number=SeqID_96129
cagaggaggaggaggcggcggcggcggcgatggagccttggagttcctgggcacggcgacgcagcatctcgtagcggtagtcatcgaggacgtcctccgcgtcgcgggccaagaccgtgagctcctcgatccacagcttgacgtagctctcctggatctctcgctccccgacgtcgtcgagcgtggcctggatcctcctcagcagccgctccagccgctgcagatccgcggaaaaagtaaatcgctcgccacgaggagcggctgccgccgggctccataggaggtcgagcagcttcctcgcgg

SEQ ID NO: 30156 - DNA, 618 bp, Setaria italica
  Peptide Sequence Number=SeqID_96130
cgctcagccggttcttctggtagatgggcccccatcgggtagcgccacccgtcgggtagcaccataaaaggatggtggggggcctggggcacacgacatgaggtgaatctgagctgcaagtgccccatcgaagttcctaaccctagaccgatcgagaggggcgctgtgagcgacgggaaccaccatcgcctgcaccaccgcactggacttcgccgctgccggatctaggatcgacggccgccgggagtgaaggagcatacccggtagacaaaggggagacggcggccgccggccaagatccgacgtccgccggtagaacaaaggtcagggagacggcggctcacctcgcgcttacctcgccgccgtccactcaccggacatctccgggaaggaccacggctcgccgcacggctcaccggtagcgccgctcgacgcgcgctcacccttaggtgaatgcgcacgccggcgaaaggggctactggggagccaaggggccggccataggggactcacctggactgccgctgagctcaccggcgctcgctcgccggagttcgctcgacggcgtcccggcccttactcgactctggcatgtgtggcggcgctgaaagaagaaag

SEQ ID NO: 30157 - DNA, 583 bp, Setaria italica
  Peptide Sequence Number=SeqID_96131
caccgccggccaggccttgcagagcagcttcttcagcaccccgccgctgccgtgcgacctctcggagctccccgtcgtgtacaaggaggaggtcgccgaccctgctgcttcgaagccgaaggtgagacagcgttcccagagacggaaggacagcaagctgaaaaccgaggagcaacggtcagggatcaacaccgaatctcccaacaaagaggaggataaagtaatcgacagagcaaattcaggccatgaatcagatggtgcagcgaacgccgctgccaatgcttcctccagagtccaagaaccactagacgtcaccatcaacgttgccacgtactcatacagtacagtcccaggacggttttcagttagcccggatcaggtactacttccacaagaagcctcacctgctgcacctcaagatcagcagcagctgccagcggctaaggcctcgcaccgctcaggcagcgacgacgatcacgagaaccgcaagcagattcgggctctggacgacgacaacgacgccgccgacggcgccggcgagccgccgtctggtagcggcaacgagggtgtcgctttgaacggc

SEQ ID NO: 30158 - DNA, 960 bp, Setaria italica
  Peptide Sequence Number=SeqID_96132
ccgaggaaccaaaattgatctactctccagatttcaaagcatacagcaactccagatcaccgttgcttgaggcaaatgaagggtgaaggtccgaaagaagtttatctcccctcagtctttccaagccatcaaatggacgtggttctgcctcacctgtactggaagcctttgagccaacacttccattgtgccggtccatccttatgtacatctcaagttcttcgtctttccgagacaattgaggagcaatgagctttacaagatgttgaatggacaaggttggtcgacaacttagatagggcttttccaaattaggcgtgctttgtccattgataggaaggagaacaagatacaagtggaactctttatccatttcatcagtagtacggaggtgatcaaccaattttgcaatgcgcccactcctccctattctgccattggaactagcactgccatgtcgattctggctccgtgtaccattttttccccatgcaagcatctctccccgcagtggggatgtggccaaaatttcttttccaccaactacttcgttttcttcaacgctttggtcactactgccaatggttctagcaggtgaagcttgtgatgcagacctcttcctacaccttctctgtcttaaatctggagaatgatcatcagcagaagatggctctttggtgacctcattggcattttcttcttgtatatcctcatcatcagagccagtaggggcaatatcaggggttacggttctgcctctgccccgtgtttgcatatttctcctgtacttccgtgcaaaggcagtggcggttgcttttgctgtggaacgcttcttaccaattgcctcggactgtcttcgaaatgtttcctcaatggtttcttgaattcttttttattccgagtcttctcctgttcactgaaagcaagctcctcttcctcgtactttgtcaattatctgga

SEQ ID NO: 30159 - DNA, 233 bp, Setaria italica
  Peptide Sequence Number=SeqID_96133
gtgacagaagcgagaacccgatcgagagaggcgcgcgtggcgtgcttacggtgctagactgctagctagagctgcggtggcgtagcagcagccagcagccatgagcagcggcggccgcgagagcaggtggccggagttcgccgccctccgccgcgcgctgatggcgcgcgacgccgcgcaacggcaagagggcgaagctgctgcagctcctgctctggggacccaagtgatcg

SEQ ID NO: 30160 - DNA, 358 bp, Setaria italica
  Peptide Sequence Number=SeqID_96134
atggatccattaaaaatggaccaatttccaggaaaatgcttcattttcttaaacctgggtggtgaagatgattcgcaggggccaatttccaaggggtcaggagagcgcccggtactcatgacatcatcttcatcactgtcttcgtcagagctcagcagtgcatcgatttcttctgtatcctccttgaaagatgaggcatgctgttcaagattgccatcatcttggtgtaaacttctgcaaaccacctgaccacggcatgggaaggcatcgatgtttgtgggattcagcttgttcaccaaggcaggatgatacatgatgcgccctttctcatcagtatgatcgaagatgatgaagtagt

SEQ ID NO: 30161 - DNA, 1198 bp, Setaria italica
  Peptide Sequence Number=SeqID_96135
tgtacctaacggtactttagtcttgtagttctactattggtctaattttgccttccatcctctgaggatgacaaaaggtcaattatgcttggtatggtgagggtagatccctagcatatccatggcattcttgtttgtgcaccatccagctagggttttgccttctcttgatagtgtgcgatgacgtctgtcggtaacacagctctttcgcaccccatacgctgagatgtcccacatatcccgccaagtggaggtcaaactttggtgcttctttcgaaagccacatccggaggtatgtcccttataagccctctggtgtttgcctccggtggctccgcctatcttggcatgtgcatctgttgtcgacggctccgcctatcttggggtcttctggccccttgtctttttgggagcccttcgacgttgaaacgtctctagacgctgctttccttctcaacctgacatttttcatgtctgtgacctattccccagcacttaggatgtgtcctaagtgtcgaaacatgtaacacaggctagatttgttccttcgtatcatatacgtaattttttacacacaagctgcaacaattgagatagggtatcaaaagttcaaaactgcaaaagaatatcataggagttgcaagtaggtatgccccaatgtggtttagagaagaatgatgaagttattgtgggtagattcaatggtgggttgagccacgaaatttaggacattttatattagaaatagtacaatctagtcactcgtttcatcttatttgtaaagttggaagggaagtgcatagacgtcaagcaaaggacttggtagcccctagactgcccatcatcctctactggtttaaggtccagtttgtttgagcttcctaacagtttctcagcgtgaaagttcagaagctcaaacaaacagcgaacttctcatgtagcttctgaactcagaaaagttgaatttatatggaaagctgaaaaattcagttttctcaacttttcgtagctttttgagtccgggaagctaaacacatcttataaaaactaatattaactttttagaacctaaaagccagcaacagtttttcaaaaagctcaaaagctgacctaactatacccgtttttgatagatgacaaataggcttttgttaacttgctctaaataaattttagatggttggctagttttaaaaac

SEQ ID NO: 30162 - DNA, 275 bp, Setaria italica
  Peptide Sequence Number=SeqID_96136
gcattcactggggtaggaactgaagatcaggaagatgcagaggctggagcacggtatctgtgcttagctgaattttccttgctgccaacacaaggatatcacctctcagctcacttgactgtcttgtatccattcctgggtgaaagtctgttaaagctgtgtagctcttgtacctgaaacagtccatgatgatggcgataacttgatcagagtagaataaaagagttcagtaccaatgtgtaatggtcatagaacaaaaaaaaaaaaaaaacaaa

SEQ ID NO: 30163 - DNA, 334 bp, Setaria italica
  Peptide Sequence Number=SeqID_96137
ccgtgcaattctgacaggatccatgcgctcgtgtcgtcagaccgagagaagcaggcaaggttggagtacggaggcaagacactcgtcttgcacgaggtggtgacagggatccaggggccagctgatcatgaacttgatggtgtcattgatctatcagaggtggcgatgtttgaggaagatgagcatgactaccctgactggacgcactcactgttcaacgacgacgacaactatattaacgatgatgagggtgatgaaggccatgatggtgttcttgatgtgctcgacgagccctctgtgatcgatgtcatcaggagcaaccggggaggtaggg

SEQ ID NO: 30164 - DNA, 328 bp, Setaria italica
  Peptide Sequence Number=SeqID_96138
aaaagtaaaataaactaacaaaaggaaacaaaagaaatacaatacgaatacaatggcattggattgtctgcatcgactagtaaaattctatttgaatgtttatgcggattaccaaccgcgaaatcatgtatgggattgtttagacagtgttacctctcaattacttactgttttgaagaaaggcttgctgactcaagatgtgcagcacgataaacttgttgagttctgtgtgaccttagctcagagcaacctggattttgcaatgaatcatatgatattggaattattgaaaccggatagtttaagtgaagcaaaagttgttggttcg

SEQ ID NO: 30165 - DNA, 353 bp, Setaria italica
  Peptide Sequence Number=SeqID_96139
gcagagacgacttccccgggggcttcgtgttcggcgccggcacatcagcgtatcaatgggagggcgcggcggcggaggacggcaggggggccagtgtctgggacaccttcgcgcacgccggccattactctggagatggtgatgtagcagctaatggttaccacaagtacaaggaggatgtaaaactaatgaaggaaactggattggatgcttataggttctctatctcttggccaaggcttattcctaatggcagaggagaagtcaacccacaaggattggagtactataataatcttatcagtgaacttctggatcatggaattgaaccacacgcttacccttttttcaaa

SEQ ID NO: 30166 - DNA, 568 bp, Setaria italica
  Peptide Sequence Number=SeqID_96140
ctgctgtctctttccagtgatgattttacagcatattcagatgtctgctttagggaatttggcgatagggttacgaattggactaccctaaatgaacctaatgcttttgcattgcttggctatgacattggagtggcaccaccagggaggtgttctgagccatttggcaattgccccaatgggaattctgtaactgagccttacattgtagctcatcatagtttgttggctcatagctcagctgtatcactgtataggcaaatgtatcaggaaaagcaacatggagttattggcatgaatatttttatatatgactttgtacctttaacaaactcaacagaggatataactgcaactgaaagagcaaaggccttctacactggatggttcttggatccgctttatcatggagactatccagatataatgaagaagattgctggttccaagctgccaaaattctctaacagccaatctgaacaattaatcaatttctgttgactttcttggtgtaaattactactcaataatgtatgtgaaggatgatccacatgctgctcctagcaat

SEQ ID NO: 30167 - DNA, 1145 bp, Setaria italica
  Peptide Sequence Number=SeqID_96141
aaagcgccggcggctcgacccagagtccccgccgccgcgtgctgtgggaaagcaagtgggctgtgaatcggccattactctggagatggtgatgtagcagctaatggttaccacaagtacgaagatggcagaggagaagtcaacccacaaggattggagtactataataatcttatcagtgaacttctggatcatggaattgaaccacacgctacccttttcaatatgatcttcctcaagcccttgaagatgaatacaatggatgttgggtcctcaaataatgtatgtattttatttgcattcactacacactttgtcttcgttgatgaaaaatttgatgtgttagtgctggcacactaatatttatcaatcattatagaatgtcatatgttatgcatgatcatgcagaaaaaaggtgtgttgaacaatatgctgtctgcagaaaacatatatcatgtccggcttttatgaactttcttttgtattaaactctgttttctttttccagtgatgattttacagcatattcagatgtctgctttagggaatttggcgatagggttacgaattggactaccctaaatgaacctaatgcttttgcattgcttggctatgacattggagtggcaccaccagggaggtgttctgagccatttggcaattgccccaatgggaattctgtaactgagccttacattgtagctcatcatagtttgttggctcatagctcagctgtatcactgtataggcaaatgtatcaggtactatttccttaaggatctaatatttggtgaacctcgctaagctaaaagcaacatggagttattggcatgaatatttttatatatgactttgtacctttaacaaactcaacagaggatataactgcaactgaaagagcaaaggccttctacactggatggttcttggatccgctttatcatggagactatccagatataatgaagaagattgctggttccaagctgccaaaattctctaacagccaatctgaacaattaatcaattctgttgactttcttggtgtaaattactactcaataatgtatgtgaaggatgatccacatgctgctcctagcaatgaaagggatttcctggctgattactattattgtttaaaacta

SEQ ID NO: 30168 - DNA, 273 bp, Setaria italica
  Peptide Sequence Number=SeqID_96142
ctgccatttaacagacttatcctgttatccatgacctggtcgagtcgcaatcagatggcggcaaaacctgtgggttttgaactcacagcagaggtagcagcatgttcaaccgcacggggcctaaaagaaggaaggcagccgggagtctatctggcccaggggccagttacatgggcgacatgggaggcccacaattgcccaacgctgtaggcacaagcgcaagtatctggtttgcaatgatggagagataagtctctatgtctttgtagattg

SEQ ID NO: 30169 - DNA, 408 bp, Setaria italica
  Peptide Sequence Number=SeqID_96143
atactctggatctaagtacccaaatgtcccctgcacagctgtaaccacacgagactggtcaatggaaatggatctggaagcaccaaagtctgaaacctttgtagtgaaagcatcatccaagagtatgttagttgatttcacgtctctatgaaagattggcatagcagcagaagaatgtaggtaagcaagtgctcctgcagcctctagagcaatcctgatacgatcctcccatgttaaccagcatttggcgctcagattgccatgaagaagatcatgaagtgtgccattagagatgaattcatacacaagaagaggcacctcagattcaaggcaacaaccaaaaagtttcaccacattgcgatgaattatctgggacaggatgttcacctcattaacaaattggtcaat

SEQ ID NO: 30170 - DNA, 236 bp, Setaria italica
  Peptide Sequence Number=SeqID_96144
aatcatctccctcattgctgaccagttccatctgtctgatggaatgacattccacatatcaggttgaagaatgcccttgctgacagggctcccagcatacgtttcataaggaccttcttttgcagcaagctcagcagaagctttcaaggcatgataataaatagtttcaaaaatatccttgtttaactgctgggcctctggtgaatcaaatggcattccaagtagaataaaagtat

SEQ ID NO: 30171 - DNA, 647 bp, Setaria italica
  Peptide Sequence Number=SeqID_96145
ggggtggggattcttataggctggctctcgggagcaaacaaatcggcgaaggcgagcaacagccgacctgaaatcacgacgaaatcgagatgggaaggaagctgcgagctgtcgcgagattcaagcaaagactgattgcgctgctaagaaaccaagagaaaagggaggatttttatgcaggaactgattctgcttccaacgctgctactacagctacgggattcaagaacaagctctccctccactggaaatggactaaacacaaaatcctgagggggttaagattcaacttttggaaggaacaaattttctcccggggaaaatggaaattccgaacagaccaaatcaagaaactctgagcggcgagattggactccggcgacgacgcatgggtgacttgactagacgagaccgagagattcttcccaagaggaacccaagagctagccaagaactggaagaagccgagagggagataactgctgggcctagaggaatttcttctcgcagcaaagcaaagcaaagcacagcacagcacggagcagatctgaaagaacagggcagaatttatgagcggtcctggcacctaactcatctccacacacacgaatctcgccggaggaatttatttcgccctgctctgcttt

SEQ ID NO: 30172 - DNA, 1777 bp, Setaria italica
  Peptide Sequence Number=SeqID_96146
gcacccaagacagcagcagtgtttctgctactgcgagtaaccttgtaaacaaaaacggttacatgaacggaggtccagggaagctcacaacaccaattgcccatagcaaaactagctgcattaagctaacactatattcatatgtaaaatcacagaccaaagaaacctaaaaccacccccgggaaagattacagaaacgctgctagtcttattttttctcaaccagaacgtctattttacaaagcaagccaagagacaaacatcaggcctggatttcaactgttcagggctcgcagggaggggctcacttgccccctccgggccctcccagcgtgagcacaacgtcgtgcaggtcgctgttgccccgctccggctcggacttgacggccttcgctgggaaccctccttgccgcgcgtggtgggcgcagtccggcagcacaaagcccgtcgcctgcggcaccggccgggcgtggaccgggatggcgtgcgccagcagtggccgctgctggggaggcacggccgagctcgtcaggatctggtggtgtactgccggtcttggagccgtcactccaggtccaggagcaaagagaacgcctctgaagagttggccattcaccacagcggtcatgaggtaccctgagtcgaatgctccgtcaatcgtcccatgaacctctgcgccaattaggggaggaccgggaggccggggctgtggtttgtgatcggaggaaaggaactgcacttcctgccgatgcggtgcaatggtgcggagaaactggtcagtcttcagaggcctcgacgaaacacccccaggtccaggagccctcagcgtgccgttggcacctccaggtccaggagccctcagcgtgccattggcattgaggcgggtgaatggttgcagggctgaaatcgacgtgtttggagaggctgaaagcttgtgagctccattctgctcctggtcagactgcgacggtgaagaatgttgggaaagagacagtgagtgctcctcttgctctgactcgggttcatttgggcgggcttcaccagtttttcttcgcttcgcatggccattctcaaggccacgcaagaacggatttctttgctcaatttctgcttctcgaggtttctgaaccatttctccattgctcacacttgcatctttctgagtttctgatctcagaaattttctcttctcctggctccaatggttgctaagaaccttgcacatcgaaatgttgtaccggccatttggatgctcggagcccaattgcagaatgagaagctcattcaggggacgttcatcttcaccgcatcccccatagattgcaatgtcagtattcatgactaccgctgtatgagaaaaccgtccctgtggttgctgcccacatatctcaagctgactccatgaacggtttgcaacatcaagaacccagacatcactgtagtattgtttgtcaccaactcctccaataatatagaccttagaaccaacactgatagatgcatgacctgccctgacaccaggagatgctccctttactggaaaccttgaccacgccatggtgtcgacgtcgagcagtcgctagactgagtggtaccggtcgccgcagtccccgccatagacgaagagcctgccgccgacggcgacggcgccgtggctgtccctgggcgcgggggccgtagtctcccttcacctccggcgtggaccacgtcatggtgggcacgtcgagcacgtgcacgtcgctgaggtgttcccctccccctgccgctcccgccgaag

SEQ ID NO: 30173 - DNA, 904 bp, Setaria italica
  misc_feature (1)..(26): n is a, c, g, or t
  Peptide Sequence Number=SeqID_96147
nnnnnnnnnnnnnnnnnnnnnnnnnngtttaaaaaggtcaaaattctgcagttaaacatgcattgtggaagtcagcatcgaagatgaatatactcctgggattttgcgagaaattctaatccagcaagtcaccatcacatttggaaagcgaaagataatggcaatcaatctacaccggaaacatgtgcatctggcagcgctgtcacatttgagccaagccaccatacatgacaaggacgtgtcgcttacacttgaccacgccatggtgtcgacgtcgagaacgtccacctcgccgtggtaccggtcgccgcagtccccgccatagacgaagagcctgccgccgacggcgacggcgccgtggctgtccctgggcgcgggggcgtagtctcccttcacctccggcgtggaccacgtcatggtgggcacgtcgagcacgtgcacgtcgctgaggtagttcccctccccctcgccgctcccgccgaagacgacgaggcggtcgcctccgacgacggtgacggtgtggctctcccgcggcgacggcggcgcccccttgcactgcgggcgggtccactccccggtgcgcaggtccaacacgtggaggtcgttcaccttcttgccgccgttggtgccgccgaagacgagcatccggtggcccaccagggcggcgccgtggctgtcccgcgtgcctgggcgctgccccgtcgtggccatggagctccacgccatggtctccacgttcagcgtcaggacgtcgctgaagtgcaggccgccgcagcatcccccgaagacgtagacgaccccctcgaagaagcaggcggagtggccccacctctccggcgggttgaagccgaccaccttggggtacagccacattgccttccgccgccgctccatccctccgcgg

SEQ ID NO: 30174 - DNA, 342 bp, Setaria italica
  Peptide Sequence Number=SeqID_96148
ggcggcgttgacgaggatctcgtcgaagatcttgtagaggcctgggacgtaggtgaccgcgcggttcaccatggcgccgccctcgtagacccagagcgtctgggtgtgcttctccaccgagccgatgtaggtgtcggggcgcagcaggatgtgctccagctgcgtcttcttctggtacatctcctcgatggtcttgccgccgccgcccccaccggcggcggcgttgtggccggagctggagtggagagggcccgtcatggcggcgccgcgcagcacacggaggtcgtgtgcctgcgctagggtttcggggtggggcggcgagcgggggtgggggaattgggg

SEQ ID NO: 30175 - DNA, 690 bp, Setaria italica
  Peptide Sequence Number=SeqID_96149
gcctcctcttccgtatggtggagaaccctctcggaacctcacacctcctctaccacccccttgataaccatgggtgtaacgtggacctgcatcatcaaatttgctgccttctggtctgcgtgggcgcggtggcgaagggcctccatgcattccatatccattgcaactgcagcccaactgaaaacgaaactaccagccttccggtggttcacaatgtagttagtagctacatgtccaaagagtggtgttgtctgttgctaagaaaatcttagttcctctagccaataggatcccataattccatgcaagcagctctcaaacatctgtcagggcaataactatgtgatgcgtagaccgctgcagcagtttgttgatgctatctcaaatattagaatcaagcatgtcggtccagtgaccaaatgcttcgcactccacatgattgcacaagattatgcaattgtcacacatcacaaaactgtccattgatctatagaagagctccaactttcaacagggaagagatcaaccaccagacatcctatgtccctgtgaatgctaccaactcatgttccttaacagtcaccttgttggtttctgtttctcaaccataaaaggaacttcaccttataagcatgcagcgtctagggcaaaagtgatctttggaatgtcccacattgcaacctgagacag

SEQ ID NO: 30176 - DNA, 1956 bp, Setaria italica
  Peptide Sequence Number=SeqID_96150
ggttggcaactgccggtgaaccctactccgtgacaagacacagcaaagagctcgaatgaacatcgacgtcacgaggatcccatgacgatcctagacaggacgcacattcgctttgccatggcatcaatgtatactagaagggcacatcttcagtggggtacactcaggaacagtttcactatccgtggtggccacgaaccaagatcatgtggaagtggaacacagcactgcgaactatcagtccagactccagagctgagattgcttcatagtccaaaaagtgatgacggcttcacataaacatcacagccactaccagaaggaatcttcagtgatcctcgcattttcactcgttaaaccaaacaaattcatgtgcttctgcacatctgcccatgcactgaaataatgctgtccactcgagtaaactgaccaagctagcaacatgtagactaccaagttgcattgtgctcaattgctcatcaaccttagatgcttccaagggatgtgccgacccagcaaaggagaaacatataatcaattgccacgaccaaacagcccaagtagctcacatgatcatccaagagacggttaaagaatagtgagtttgttcatttctgaactcacctttaattgtcgacctctgaaacatcatgcacctagtgacagaagtcaattataacctcacagcatcgagcaacacagttaccacggttcagaacacagtatggaatctttaatattacaggctgcagatatcgtcaacctccaccttgactaggtttcctttcgggaccaactaaacgaaaatgcaattgctcaactgctttgaaatgatgatctagtagttatcttcgttcctaccacgtggagcagggcgtcggtcacctctaccctcgccggggtatgggccacctcctggtctataaccatgcccgcgcccatggccagcctccatactgttgggtctccctcggcttgcatatggatcagcagcatagttgtctggtcgacccctgccggtgaaggaactcttcatcagtctgttccgtggaggagagcggcttctgtcacgcagatcattgccccagttagcccgaggagaccctgagcgacgccgactcctgtcaatataaccatcatgtgggcgctccctccgaccatagtcatcagtggcagaccactcaaactttgcacggtccctcaagtcgcgctcgccacggaagcccattctttccttaggtgatgcatctgtaaaccgtactggtcgttctggaggggatcgagctgcatatcccctagattcacctgcaccccagccatgaggtggtgatctgtacctggccatctctcttgggggggctcgatcaccaggtggaccaaccatccttggaggccctcggggaggagggctggggtaaccccttggagggctacgcctaggttcatatgcttcacgtgctgaatagcggaacttgttgcagttgttacagtgagtgcgccgagcaaaattgagatttccacaatttggattctggcatatccaatcaccttctcttggcgacaaatttggatcattcctgtgaacatattctccatcaatattaatgaaatcttttccaggaggagcaccatagcctctcccgtaagatctgcctcctcttccgtatggtggagaaccctctcggaacctcacacctcctctaccacccccttgataaccatgggtgtaacgtggacctgcatcatcaaatttgctgccttctggtctgcgtgggcgcggtggcgaagggcctccatgcattccatatccttgctgctcgtcgtggaagcgtggttgccgtagaggctggaaccggggcggtgggctgaagcggcggcgctggagcgggggcctcccaggacgccgcctctccggcggcggcgaccccggttacggttacggtttagttaacctta

SEQ ID NO: 30177 - DNA, 268 bp, Setaria italica
  misc_feature (237)..(237): n is a, c, g, or t
  Peptide Sequence Number=SeqID_96151
gccgcttcttgccgtcgagatggtgccgccactcaccgctacagctgatgggcgccgcacgaggcatagttgctctggagtctccatcggcagggaccatctcgagagcgcgacctgcacgaaggcgcccaagctgcgactacggattgaacatcgccaatcagtggactgcgaccgcggaagctctggtggctcgcctcgccgatgctttaatggcagtcggttgctacggcaagntgcggtactagggagtagggagaaggcatca

SEQ ID NO: 30178 - DNA, 297 bp, Setaria italica
  Peptide Sequence Number=SeqID_96152
tcgcttccttccccaaacccccgtctcgtcccctcctcccccctacgccggcggcagcgaccgaagcgctctccgccgtgatggagcaaacggacctcgagcctcggaagctcttcgtcggggggctcccgcggtggggggtcaccccggagcgcatgaggtcccacttcgcccggtacgggcacgtggtggacgcgctggtgatgctgtgtccggacggcatgggccgcggcttcggcttcgtcgagttccaggacgaggtggcggcgctcagggcgctggacgtgagggagaggg

SEQ ID NO: 30179 - DNA, 286 bp, Setaria italica
  Peptide Sequence Number=SeqID_96153
gtgtgggtaatggttctgtagtgttgaagaaaactgcatttccgttgaagcataaagactggtctctagacgagccaccaattgatgtgcagaagtcattttctgagcgccagacatcagtgagctttgatgatgaactaggtagtctcgcacttccttgcaatggaggttgaaagggagagttcactattgtcacatttttgcaagtttcccaaactagtttacagtagtcttgtgtagaatcttttgattgagcagaacttgccgaagaactatagttgcacag

SEQ ID NO: 30180 - DNA, 388 bp, Setaria italica
  Peptide Sequence Number=SeqID_96154
catacacgaaactggtttgctgattttggctggttttattaggctgggtttgctgactaggatagacatgttggttatctacgtggcatatatgtttttagaatcaaatcccccctcccctcccttgtgttgcccattcgatcgtccgttgttaggtcacaacaggcggttgtctcttccgcttgttcctggttctgtgctggtggccagaacatccaagatccaggagcagacaaggtaatcgctgtgaaggaagactgccaggtgtaatgtgcggtgtaaatttcattttcaattttactttggcatctaggatttggagcaccagtgcaccacccgtgtccaccccctcaaaatcagtctcagactctctcaattgaagcggctt

SEQ ID NO: 30181 - DNA, 314 bp, Setaria italica
  Peptide Sequence Number=SeqID_96155
atggagcgggagctcgcccgccgcctcggccgtgcgccgcccgtccccgccgtcttcgtcggcggcaagctcgtcggctccaccgacacgatcatgtcgctgcacctcgccggcaagctcgtgcccatgctcaaggccgccggcgccatatggctctgaatccctgcatccaccggcgacagcaactataatcactcacaagtcacacccctaaattttgtaccttgcgtgcatgcacctgaccaattgcaggcacgtaaattaagagctatgtatacacatgcacatatttgcatgggtataagtatacacga

SEQ ID NO: 30182 - DNA, 257 bp, Setaria italica
  misc_feature (252)..(252): n is a, c, g, or t
  Peptide Sequence Number=SeqID_96156
tcacttcagcgcatagccaaacacttcacacgctagcaagctaagcatcctcctagctcattctcactccgttccaagctcgatctagaagtacagaagagcggcgatggcggagagggtgtcaaggctgtcaacggagaaggcggtggtgatcttcacgacgagccagtgcccgatgtgccacacggtgtcgagcctcttctccgagctcggcgtgtgcgcggcggtgcacgagctggacaaggcccccgnggccg

SEQ ID NO: 30183 - DNA, 729 bp, Setaria italica
  misc_feature (667)..(729): n is a, c, g, or t
  Peptide Sequence Number=SeqID_96157
caaagacacaaattaacatcaacattgtttgctagcaagttcgagttagcttagagaaatcaagaaagacggcggcggcaatggcggagagggtgtcgaggctgtcgacggagaaggcggtggtgatcttcacgcgaagccagtgcccgatgtgccacacggtgttgagcctcttctccgagctcggcgtgtgcgcggcggtgcacgagctggacaaggacccccgcggccgcgagatggagcgggagctagcacgccgccttggtcgtgtgccgcctgtccccgccgtcttcatcggcggcaagctcgtcggctccactgacagggttatgtctcttcacctcgccggcaatcttgtgcccatgctcaaaggcgccggcgccatatggctctgaatcaatccacccatcggcgcagcgactatatatttaatcactcacacccctgattttgctgggtttatatataaatttgcaccttttgcacggatgcaaattaatcaaactgcagggtgcatccaacaagaatattcgaaaagttttgttttgcggctagagtaacctcgcagatgaaaagagtgaggaatgtgtagcgcttgtcattgaatgtaaatggacatgtaatcctgtcttttccagtatttcaatgggatatgaattttgataannnnnnnnnnnnnnnnnnnnnnnnnnnnnnnnnnnnnnnnnnnnnnnnnnnnnnnnnnnnnnn

SEQ ID NO: 30184 - DNA, 296 bp, Setaria italica
  Peptide Sequence Number=SeqID_96158
aggcgaaggtgaagctggtgttggagtctggggaggggagggagcttagggaacgagcggcggagctgaagaaagaagcggaggcggcgatggaggacggtggctcgtcgcggatggcgtttctccagttcttgtcggatgttaagaaccttagggggtaattaagcttgacgaatttgcaaccactccttgggtgtttatgcttgtttccttgtactgtccaccttttgtcaatcctcctgttgtctagtcaaccattttgtttcgcttcacaaaaagtacaaaaacgaaaaaaa

SEQ ID NO: 30185 - DNA, 386 bp, Setaria italica
  Peptide Sequence Number=SeqID_96159
agctttgtcccagccaggacaagtcgctgcctcgctgatcgctacttgtagcctctccgaccctggtccctcctcacggacggaactcggaaggctcctccgctcctgcatggtgaccgcagccgccgcggcccgcggcatgtccttcttcgcattggccccgtcgtcgtccggccgccccgcgtcctgccgccaccgaccgtaactcgcccgctcgtcaccaccgaccggtcgcctcgacgacgttcgcagctgtccctgcgacccgcgcgatgcctcctctggcgccggcgccgcacggcgacaagagcggctccggtggcaggcagcgccaggagacggcggcggcggtggcccggcagcggtcggcgtcgttccacggccgg

SEQ ID NO: 30186 - DNA, 359 bp, Setaria italica
  Peptide Sequence Number=SeqID_96160
aagaaggcggcgctgttggagccgtacttcttcaccagcgcatcctgcgagccgccgttgtagagctcctggtcggagtggagcaggcctttgttcttgagcaggtccccgtagtaggcgttgtcgaaggtgagctgcgtcgccacgtcgagcggcgccaggacggtgtcgttgatgccctgcgtcgctgggcagtcgctctggcgcagcttagcgaactgctggttgatgttgttgtccttgtagatgcggtcgcggtagacctggcactgcgcgaagccgacggtgtgcgcgccggagagcgccgtcatgtcctgcgcgctcaggcccttgctgctgaacgccgcgatgagcgtgct

SEQ ID NO: 30187 - DNA, 226 bp, Setaria italica
  Peptide Sequence Number=SeqID_96161
ggcagtctccggctcctcggcgacgcgcacctcaagaatggcaccatccgcctctcccgcgacatgcccgtcccgacctccggcgccggccgcgcgctctacgcctccgccgtccccgtccgcgccggcttctccacccagttcgccttcaccgtcgccacgctcaacccctcctccgtcggcggcggcctcgccttcgttgtcgccgccgacgactccaccgtcg

SEQ ID NO: 30188 - DNA, 238 bp, Setaria italica
  Peptide Sequence Number=SeqID_96162
cgagccgcctctgccccacgcacccgacacctctcgccactcccacttcgccgccgcggacgccatgagcgcgggctggaggaccctgctgctgcgcatcggcgacaggtgccccgagtacgggggatccgcagaccacaaggagcacatcgaaacttgctatggcgtgctaagtcgagaatatgaacactccagagacgctatatttgagttcctccttcagtgtgcagaacaactg

SEQ ID NO: 30189 - DNA, 218 bp, Setaria italica
  Peptide Sequence Number=SeqID_96163
ggagcccaggggccccaggcagaacgccaacgactggtacaagtacatgcagccatcttcttgaggccggcgtggacaacgtcgtcggcatgagcctccggaacgagctcagggggcccaggcagaacgccaacgactggtacaagtacatgcagctcggcgcggaggcggtgcacggggcgaacccgcgcgtgctggtcatcctctcgggcctcagg

SEQ ID NO: 30190 - DNA, 439 bp, Setaria italica
  misc_feature (435)..(435): n is a, c, g, or t
  Peptide Sequence Number=SeqID_96164
tacgaacggacaacggcttcttcggcgacgcggacttcgacccggacgtgtgggtggagggcctgaggaggatggccgccatgttcgccggcgaggagaacgtcgtcggcatgagcctccggaacgagctccgggggcccaggcagaacaccgccgactggtacaggtgagctaatcgttggcgtgacgcatctgcatctgctgagaggacatgcaccggtggatctgtcggcgtgtcgtgctacctgccccccacgttgatgtgtcgttttgcctacatctttgcgccatcattacttggccacaccaaccagcccgtgatggagtgtttaataccgttagacactcttcctttgaagcatgtaagatgatataattacaaataataagagccacctttcaaatcaaaacacaaaaaaaaaaaaaccaactganacac

SEQ ID NO: 30191 - DNA, 885 bp, Setaria italica
  Peptide Sequence Number=SeqID_96165
ccagcggctcaacctcaccgagtcgctcgccggtatcagggccaacaaccccgacttcgtcgacctcaagctcatcgacgcgctcaaggccgtggtgagcagcctgggcaagcacgacgtgatggtgatcctggacaaccacctgagcaagcccgggtggtgctgcagcaacaccgacggcaacggcttcttcggcgacacctacttcgacccggacgtctgggtcgccggcctcaagaagatggccgccatgttcgccggcgtggacaacgtcgtcggcatgagcctccggaacgagctcagggggcccaggcagaacgccaacgactggtacaagtacatgcagcgcggcgccgaggcggtgcacgcggcgaacccgcgcgtgctggtcatcctctccggcctgaacaacgacaacgacctggccttcctcaactggcgcccggttcacctcaccttctcgaacaaggtggccttcgaggtgcactggtacagcttctccaacagccgcggagtgggggctcgggcaacgccaaccaggcctgcgcgcgcatcaccgccggcgtcgcccgccgcgcgctctacctgctcgacaaggggtggcccgtcatcctcagcgagttcggcgtcgacaaccgcggcggcaacaccaacgacaaccgctactacggctgcgccgccgccgccgccgccgacctcgacatggactgggcgctctgggcgctgcaggggagctactacctccgggagggcgtccgggacctcgacgaggtctacggcgtgctcgaccgggcctggagcgggccccgcaacgcctccgcgctgagcagggtccaggccctgcagcgcccgctcaggggccccggcctggaccaggtgccgccg

SEQ ID NO: 30192 - DNA, 241 bp, Setaria italica
  Peptide Sequence Number=SeqID_96166
tcccccctactgacaccgtctactccatcgtctgtgatctgagtaacaatgaatctattgagcgccttcgcaggtaaattcatttctttggtcattttggtaagatgagttatcaaatccaatattttctcactcttttagacatgaagtaaatcatttcagctctaactggtattatatgcttgttctcaatgcagagtgaaaggcattggagactcaaaggcatgaatagcagagctaa

SEQ ID NO: 30193 - DNA, 673 bp, Setaria italica
  Peptide Sequence Number=SeqID_96167
ctgcctgcctacgccagatccggcggctgggagagcacgcatggttggcgcacacagctgctgcggtggtacgacgtgcactggcgcgacctcccgtggtgacgcgccagcggcggcgagatgttggaggtgatgctacagcagatgcgggtgcccgtcgtgtgtcatcgtcggctactacgaccggtggatggcgcggtggcccaccgtgcggatcctcgccgccgccacgcaggaggagatgaacgagatgtgggcggggctcggctactactggagggctcgatttcttctggaggggggagaacttggaaaaaatcttactatccaattacgctttggaccatagagaaatctttgcacgaaaatgctcctctaacctatctgaaatttgtccagtccacattccgcaacgtagtttcagatgagtttctttttcaaaagaaggggtcccagatgaattcccatttgacaaactgttggttatatgctgccgtctttgttcagcatcgccatttggcttcacttctgtcagtagcatgtctataagctgatcacaccattctctcgtttcaactatgtagaagaacattcttgtattatcgggcaattacggcaacgattgttgttgtgcatagttttgatttgttcacaaagacttttgctttcggtt

SEQ ID NO: 30194 - DNA, 951 bp, Setaria italica
  Peptide Sequence Number=SeqID_96168
gaaaaggaaatgcattgaggaagactcgaaaacaacagaagcagcctatggaaaaaggcacgccaacagtgagaaagatgctcatccaaaagcttctgataacaaggagttgcagaagaatttggctgaatcagtgaaaggccaagttaaacctgatgatatggcaagtcttggagataaggccacaaaaggtaacaatgaaaaggttgtggtggctgatgagaggcctggaagttttggatctcaatctcaggaaaatatcccaaagagtcttgaagagccttatttgatgactccatataaagattctgatgatgaggatgatgattttgaactaaaagaagaatcaagacggagaaggaaattgattccgtcatgggctcggggggagaaattggaaaaaatcttactatccaattacgctttggaccatagagaaatctttgcacgaaaatgctcctctaacctatctgaaatttgtccagtccacattccgcaacgtagtttcagatgagtttctttttcaaaagaaggggtcccagatgaattcccatttgacaaactgttggttatatgctgccgtctttgttcagcatcgccatttggcttcacttctgtcagtagcatgtctataagctgatcacaccattctctcgtttcaactatgtagaagaacattcttgtattatcgggcaattacggcaacgattgttgttgtgcatagttttgatttgttcacaaagactttgcttcggttgcattattctttgtgcaagctaggggataaactgctcgttgataagagtagcattcctgtctaatggaactgtgctcaaaggagcagcatggtagcagcgaaagctgcttgtgtacattatgtccagactctagcatgtaattccaagaagtgattttaggcatcaacagaaaatatctagctgctttttaacg

SEQ ID NO: 30195 - DNA, 335 bp, Setaria italica
  Peptide Sequence Number=SeqID_96169
caatcaagttcaccgccgtgacgctgcgtggcagctcgccggagaggctgttgtcgaacaggtagaggttctgaagcttggcgtgctgcagcacccacgccgggatcgagccggtgagcgcgttggacgccaaggagaacaccgtgagctccgtgaggttggaaaaggcctccgggatctccccggtgaggttcattttgtccatccagaggtaggtgaggttggtgagcttggcgaactccgcgggcacgggggccggcgcgaacgcgttgtaggccagcgtgagggacctcgagcccggcgagctccgcgggcacgggggccggcgcggaacg

SEQ ID NO: 30196 - DNA, 2144 bp, Setaria italica
  Peptide Sequence Number=SeqID_96170
ccaaggagctcaacgtcccggagctggtcgccatcggggtcggttccacagttggagctggagtatatgttctcgtgggaacagttgctagggagcacgctggtccagcattgacaatttcctttctgatagctggaatagcagcagcgctttcagctttctgttatgccgagcttgctagccgttgcccctctgctggaagtgcctaccattattcatacatatgtgttggagaaggtgttgcctggttgattggttgggctttagtgctggaatatactattggtggatctgctgttgcccgcggcatatcccccaatttagccttgttttttgggggaccagatagtttgccatggcttttagcacgccatcagcttccatggtttgatatcattgttgatccctgtgctgctgctcttgtttttgttgtgactgttttactatgcgtgggaattaaagagagttcatttgcacaaggagttgtaacagttctgaatgcttgtgtaatgatattcgttatcatagctggtagttatattggcttccaaataggatgggtcggctacaaggtttctgatgggtatttcccgtatggagtaaatggaatgcttgctggatcagcaactgttttctttgcgttcataggctttgatacagttgctagtacagctgaagaggtaaagaatccacagagagatctaccattgggaataggtgtagcgttggctatttgttgtgcattatatatggccgtttccattgttattgttgggctagtaccatatttcgctatggacccagatactcctatttcatcagcctttgcaaaacatggaatgcaatgggccatgtatgttgtgacaagtggtgctgttcttgccctttgttcaaccttgatgggttcacttcttccacagcctagaatacttatggccatggcacgagatgggctgttgccatccttcttctctgatgttaacaagcaaacacaagtacctgtcaagagcacaattgtgactggcatctgtgcagctgctctggcttttgcaatggatgtttcacagttggcaggaatggtcagtgtaggcacactccttgcattcaccatagttgctgtctcaatcttgatactcagatatgttcctccagatgaggtccctttgccaccctctatgcaagaatcattccgtttgaaccaggaatgtgatgaggaaaaggatagggatcttcttggagatgggaactgcaacacatctcaaacaaatgatgtgattgttttagtagaatcaatgaaggaccctcttattgagaaaagacaacataaaggcaagatggacgagacaaaacgtcgaaagatagctgctttcagcattggatctgtgtgtgtaggggttctgatcctcacgtcttcagcctctgtgacatggctgccttttctcccaatatgtatcggctgcattattggcgttgttctcctttttgctggccttggcatgctctcttggatcgaccaggatgatggcaggcactcttttggtcattctggaggattcacatgcccttttgttccagtgctaccagttatgtgtatcttgataaatacatatctgttgataaacctgggcggaggcacatggatgagagttggcatatggctgctgatgggtgttcttgtgtacattttctacgggcgaacccacagttccctaacagatgttgtctacattccggtagcacaagccgatgagatatacaggagttcatcaggatacgtatcgtagaaaagaacagcactgcagagtctcatgtgacgtattagagttgttaaaaaaaccgacagatgatatagttgttgttgcagattagtggttatcagccaggaagacacggaggtcgaacggactgttctttctttcgtacttggtcaacaagatctcatggatgcaagatttatgctgcgcgtgagccagatcaatttacacattgttggagtttgcgtatagatgtggtatataaacccaattgggtggagtatgtgatatatgatgtgtatgattcatgtacaagctttttgtactgaaatgggtggacactgaaaagaactactgaaatattacactgattgaaaagaagacaaaaaa

SEQ ID NO: 30197 - DNA, 458 bp, Setaria italica
  misc_feature (457)..(457): n is a, c, g, or t
  Peptide Sequence Number=SeqID_96171
atggcggtgccgacgatcttggcgacgtttctcaggtttctgatatccaccttctctaacccgatgacggcggcgatggcgaaggtgatgccgggggcgaggttggtggtggccctggccatggacggagacgccaggagcagcccctcgaggtagaagtactgcccagtcgcggtggctagggatgccgcgaagatgagcccgaaggcccgcgcgccgacggccatgggccgcagcgtgcagcccctggcggcgaaggaggcgaggaggagcgtggcagcggcgatcccctggcggtaggtgacgaagacgatgggccgcatccccacccgggacgccgtcttgagcgccacgtccaccagcgcgtagaacagctgcaccagcaccatccccacgctcggtccgtaacgctccagccacggaccgccgcccgccatggctggcgagatcgagggana

SEQ ID NO: 30198 - DNA, 1085 bp, Setaria italica
  misc_feature (858)..(858): n is a, c, g, or t
  Peptide Sequence Number=SeqID_96172
agctggtaccaattccttccatcacagaacagcagctgcacagagaaaaaggaaggactcgtataggcagattaacttttgcatttactgctcatccggaaggtcgtcgaggatgaacggaccaagcttccctgacctgaagagggtcagcagcttcttcgaggtagggccctgggtctcatcaaatggtttgtgaggtatcctgaacaccttgcgaagagccatgagctgcatgtctatgaggctttccagttcgctctcttcctcggtgttgccagtgaagtccaggaatgtactgcatagcgtcctctggacctccatcactaaatcctgaacgtatactgcatcagagttattcacacgtctcctccttagtgaatccctagagtcattttcattaaggctgcatatttcttcatgcaactcttctctcctgtgcagcaaccgctcccagtgtaggggtgtttttctaatattaagaatagatagtaaatattttgctatacgttcttctccgactaccgagtctttaacagcccctgttaaagcaagctttagacctgtctccatatctggtatgcttggcacaagaacaccaggtgtatcaagcacataaatacttggctgacttgcaatcttatatcctgcaatatcttgagtgacacctggcagtggccccactgtagcccgcttgattttgtcgttcactggaaatcgagaattagcaattctgtgaatggaatttatgagcgcagacttgccaacattagggacaccaacaaccataataagaagtgtaggctctttcaagattgcttcctttagttcagttcagcaagcccaagaagctgattaacngaactgctgctatgtgcatttattgaaatacaatccttcttgcatgattcaaaatgattaagccacctattcattatattggggttcgctagatccttcttgcttagagcaagaatacgccttttagctgaaagcactggttgaaggtcttcatttgctgaggataatggaatgcgtgcgtcgcggacctcgatgacgaggtcggcgagcttgaggcggtcccggat

SEQ ID NO: 30199 - DNA, 1022 bp, Setaria italica
  Peptide Sequence Number=SeqID_96173
atctggcggaagacgatctccatcctccacccgctccgctcggccgacccctcgctccacgccgacgccgacctctcgggcccgttcctcttcctcctctcttttggactcttccagctcctcgcggggaagtttcacttcgggatcgtgctcggctgggtcaccgtcgcatccctcttcctctacttcgtcttctccatgctgtcgggcggccgccgcggggacctcgatctgtaccggtgcgtcagcctcgtcggatactgcatgctgcccatggtcatattctccgcggtctccctcttcctgccgcggggcggcggacttatatttggagtggggatggcgttcgtgttatggtccaccagggtctgcaccaggctgctcgcagagcttgcatctagcggcgacgagcataggggcctcattgcctatgcgtgctggctcgtgtacatgctgttctcgctgctcgtcatcttctgataccgtttatggtatggaagataatgttcggaatttgtttggtggatggagtggactgccttttaaccagtcagtcactggagtgtttttgctgtgaccttgcagaactacttatgatctggccagtggggaaatgtcctgtaatgtcctgaaatgtccagtgggcatggtgggtgctcagtgtagatcttggtaaagaaaaggaagtaattaggttttgccgaagtattattggtggaaatctgactttctaaagtgagctgtcgtggtctgtgcaaaattttcattgtgattacttaccacgactggtttatttaggatcaccatgcttagtttcctttatgttcactgttcaatttttagcgttgcaatttataagagataattgttcaatatttaggtatgtgtgctaattactggttcaaaaatcagaggaaggctagctttatctcttgttacaagtcggcccttgagttcgtgttgttgggtagttctatttgctactatttgcatttgtgctattgcatgattagcctttttca

SEQ ID NO: 30200 - DNA, 241 bp, Setaria italica
  Peptide Sequence Number=SeqID_96174
aggcagatataagcagttatagggatccatgacgtgtagggatggtacttgttgtatgtaactttgtctagcttgtatatatattcataccacaggtaaccagccatcactgaaagagtcacgatggttcccttgattgataatctaaccttagtctcagattcttccagcttctccatccatctttcaacattagggtggaagtaagcataaatcattccaataatccatatatatcgat

SEQ ID NO: 30201 - DNA, 214 bp, Setaria italica
  Peptide Sequence Number=SeqID_96175
tttgcgaccggacaaacataaaataaaccagaacaatgccaaactcagccatggctctcaccatccacaaaggttccggaacttgtctaccaaagccaatttgattcggttttattaacaatggacgaatcaaattggctttggtagacaagttctggaaatatgtttgtccggtcgcaaatataaaaataaaccagaacaatgccaaactcag

SEQ ID NO: 30202 - DNA, 340 bp, Setaria italica
  Peptide Sequence Number=SeqID_96176
tacgattggttcccttgattgataaatctaaccttagtctcagattcttccagcttctccatccatctttcaacattagggtggaagtaagcataaatcattccaataatccatatatatcgatcaaggccagatcggaaatgccactcatgtagaaggggtaggtgtgccttagcaggtgatggatctttatagcctagtaggaatgtaaaggggcccacaatagttcaaataccccaggaatttcccatatcaaaattacagacaagaagcagcaagcaatcttaatagccatgactgatggtatctcgttgtatttgttaaacagaccaagtgctcc

SEQ ID NO: 30203 - DNA, 470 bp, Setaria italica
  Peptide Sequence Number=SeqID_96177
ttcaatgtcccagttgttcggacgagcagcagcttcaggtattccgactattctcctgatgcaaacgggaaacgtggccagagctaaaacatcctatcaatcaaacatcttgcagaagcgacctttctaccaagattgcttcatttggtatatcttcatccctgtaaatgcagtaccctatcggagttacacttcaaaaaattgcttggtattgggactgacagaatatagagcttcaagtatagtgagttctagatgttacctatacaacaggaatcttcagaagaataagtgagcagaaatacaggcacactgagatggcgatcccagcaacaaaattttggtatagacgattgttatccctactggggataaatgcccccttcaagacatttgtgatctcaaacacacggtatgacagaagaagatagattgcagttgtaagcatgaagttaagcataggataatct

SEQ ID NO: 30204 - DNA, 879 bp, Setaria italica
  misc_feature (1)..(2): n is a, c, g, or t
  Peptide Sequence Number=SeqID_96178
nncgtacgttctttcgttagtttttttttttttttttttgttaaccgtaaagcaccattcattcttgaatttcagggcgcctcatgtagtatcatgcgaatactattttagttacagttgaaatgcgtgggctctgcctgtatattttccttttacaaagaggaaagccccgtctatggtacaattgtacaggataactcttacaaggcttgtattgtatcaacatacgctagtagttgctacaacttccaaagaatgcacgggtttgcctaattgtgtacaatgttttcaacgaacaaaaagatcaaaatttggacttctatatctgcagcctctggcagttcaatgtcccagttgttcggacgagcagcagcttcaggtattccgactattctcctgatgcaaacgggaaacgtggccagagctaaaacatcctatcaatcaaacatcttgcagaagcgacctttctaccaagattgcttcatttggtatatcttcatccctatacaacaggaatcttcagaagaataagtgagcagaaatacaggcacactgagatggcgatcccagcaacaaaattttggtatagacgattgttatccctactggggataaatgcccccttcaagacatttgtgatctcaaacacacggtatgacagaagaagatagattgcagttgtaagcatgaagttaagcataggataatctggtatgaaacaaagaagccattttggctgtccatttggcatgctagacctaagccaaatgtggatctgagaaatataagtctccagtgtaatcttgccaagccatgcgaaaagagccaaagaggcactcctcaactgctgggtgcaattgcgcaggcagatataagcag

SEQ ID NO: 30205 - DNA, 1366 bp, Setaria italica
  Peptide Sequence Number=SeqID_96179
cccccgaccgcgaccagccaccgtctcgcccgccccgcctcgccccggcggttgcttcagatctcctcttcccccccaccccgagcgcccagcgcggcagcagcgccaacccgcgcgccattgcacgcgcgcgtatataaatcctatccccatcgctctcccccacccgccccgcccccctgctgcgcgtctgctccgcgcgccatgatctgattcccggcggtgggctcggtcggtgaggctgctgctgtcctctggatctgggggtgatcggtcgcaagccgagtcggggggaggagcgggatctcgggcgcacggaatggaggtcttcggccccgtcacgcccggacaggtgtcatttttgctaggtctattccctgtcctcatcgcatggatctactccgaaatcctcgaatacaggaagtcttcatcgcatgggaaagttcattcagatgcaaatttggataatggaaccatcaaggaggaagacaagacggtattacttgaaggaggccagttgaaatcaccatccacaaagttccggaacttgtctaccaaagccaatttgattcggtttataacaatggacgaatcttttctgcttgaacaccgtgctgtactgagagccatggctgagtttggcattgttctggtttatttttatatttgcgaccggacaaacatatttccagaaagcaagaagagctacaaccgtgatctgttcctgtttctgtacattcttcttatcatagcatcagcgcttacctcacttaagaagcaccatgaaaaatcagcatttaccggaaagtccatactctatcttaatcggcaccaaactgaggaatggaaagggtggatgcaggtcttattcctgatgtaccactattttgctgcctcagaaatatacaatgcaattcgtgtgttcattgcttgctatgtctggatgactggatttgggaacttctcatattactatatcaagaaagattttagtattgcaagatttgctcagatgatgtggaggctaaatttctttgtggcattctgttgcattgtccttgacaatgatctcatgctctactatatctgtccaatgcacacactatttactcttatggtttacggagcacttggtctgtttaacaaatacaacgagataccatcagtcatggctattaagattgcttgctgcttcttgtctgtaattttgatatgggaaattcctggggtatttgaactattgtgggccccctttacattcctactaggctataaagatccatcacctgctaaggcacacctaccccttctacatgagtggcatttccgatctggccttgatcgatatatatggattattggaatg

SEQ ID NO: 30206 - DNA, 260 bp, Setaria italica
  Peptide Sequence Number=SeqID_96180
ggtcctcctaattagcatccgaagattcgatgtgatatggattaaactttttctaaggattcaaacaacccctgatactaacatacacggagcgagaaagttatatcagagtgggggcagggcccgctgtgtcgttatcgtgacatgcaacttttctgcgcacacaacaacaaaatcgaggggggccgatcaagatgctactacaagtctacaactcatcgttccatgaatcggcggcggcggggtcaccctgctgccgg

SEQ ID NO: 30207 - DNA, 2711 bp, Setaria italica
  Peptide Sequence Number=SeqID_96181
tagaaaggaaagggacaagaacaagaaactgcttctgacgaggttaaaagcacctcttcacgtagatcaggaggaaaagttgctataattgaagcattatccatatctactggctgaccaactggttgagagtgagcaatcctctgtgctcgctgctgggctagaacttcagcttgaatgtctggtggaagagcagccaaaaactctggatctatttcttctgcagctggtggagtataggaagcagctggggcagaacggttctgctgagaagcaaggacctccgcacgaagatcctcaggcaatgcttcaagaaatgtgggatcgatttcattagcactagaggcctcattgttagcatttggttgctctgtctgaggctcttgatgagcttcttcatgtctcctagaagacaagccattgccatcagaaccaggagccgagtttccaacttcattatcagcaatatcaacactgttcatgtcaacatccgcattcaatgcagcagaatctacatgagcatcactcagctcaggagcagcacttgcagaagtgacaagtgcatggcagcttgactccagatcagatggggcttccctaggatcattactcaactgagcttgttgaggtgcttcaatctcattgtgcataatatgatcacaactttgattaccagacaaggaatctctttcaggacaatcaccaagttgtgtatcagcaatagacaacatttcatcactctgaggcataggatcatcagctgctgtttgctgtaccgcttcctcaacacgattatcatgaacagaaccaaccgactgttgatttacctgcacatttgtaggacagagaccatcagcaggagcaggttcttgattaacagtatgaacttgctgatgaccaccaacaggttgagcaagagaattggttgctatagttcctgtatctggtgattgtaagtgtgcattcacatcattgccattctgttcaggctgcaccagaggagtattatttgaattactaaccgcagttaactgcgacacaaattgatcctccactgcctgagcaacagcagctgcatgattacctgcctgtggttgaccatcatcagtccatggattatcaccagggccccgcctaattcggagggaatccccaccaagtgagaaatctatcaaaggtgggggagcagtacttacaacacgctcaccaaacactgggggagcagtttctggcggaaacccagcatctaacatgtacaaggggatgtctgaattcccaaaagatagtgtgtgaaaatctcttgatgaggtggtgccgccagagggccacgctgaaccagttccctccctagactgagctggcctgacgagcagtggatgaagaaaagcatttccatcagaccttggtcgatcaagaagtgacctacttccactttggcggcgacgctcaagaccgaacgaacgatgcagattaaatgaatcctccgttcccacaccatgaaatgactcagaagatatatcaataaaaccacttgagtctgcacgacccctggaaaatctcagatgatgatccattccagttaagctctccctccatctcacttctataacacggttctcaagaaagtcgtcatcttcttcatccatcagatcatcattgtattcctcaccaatggcattgttctcctggtcctcaatatctgtgtcagctatggacatcaaaccagctccctcatctgctatttcctcatcatcctcatcctcgtcttcatcctcaccttcctccccaatatcctcatcttcctcacccatttcgtcatcaacttgatgttgcactgggaaaggcaaaccaacgtcagtactagtagccattacattaccttcaattgtttcgtctcgcatgaactccacaccatgcattggaggattaccgctagagttattgtccactagatcaactcccatttcttgttcagaaggttggacatgattctcattattgtccctatcaacatgagacagttcttgcgcttgttgacttgtagattggatggtgtcatcagtatgatgatgtctgttatccgtgctttgctcatggactacagtgtcatcagcttcatgtgtttgttcatgtgaccctggtaatctgttcttggtatatcgatctgacttgagaacttgatcactagcataagcagtcctggtgaggctatccaaagccttcaatatcaagttgacaacctttgtagcatctgggtgatccaggtcaattactttcagaaaaccagaaagagattgtaccattccaccatctaccataggttttgcaatatcaggcgagcaaccaagaacaggcaagttgctctgactattccgcgacaatattgaatttaccagctcagagaaagccaaaacttttctgtcaggtatcaaagatcctctggaggtactgcttgctgaatcaatgaaatagttaaatgccttcacaatttcagaaataacccttctacgaccttcagcagatcggcagcataaagctaccaagaaacaggaagccctctcagacaacttccctgtccaatcatctgagacatcagcagttttaaccgaagttagtggaagtagcagatagaatatatgatgcagtagaccactgtgtccagcaccttgatcgcaacttcgtgactgtgatatctctgtatcccgtctcag

SEQ ID NO: 30208 - DNA, 239 bp, Setaria italica
  Peptide Sequence Number=SeqID_96182
tatcaagcacctggagtgcgccgcatctgccaatctccgcaggcacggcaccagtgaaagcattgccaccaaggcgcagctccagcagtgcagtgagctgcccgaccgccggcggcaactcgccgatgaacgcattgccggagaggtcgagcagcgtcagtccccccgccccggtgagccaggtcgggaacgcgccagccagcttgttgccacccaggtccaccacctggagatcccgg

SEQ ID NO: 30209 - DNA, 744 bp, Setaria italica
  Peptide Sequence Number=SeqID_96183
cttgctgaaaaaaggaaaagactcagaaaagaaacaaaaaaaaaaaacaaaggaagaagaagaagaagatttaagttaagcgagcgaccataagctaggcacaggtgtgatagatacaccaacctatctacctcctcctcccacctctggatcggcggcggtcatggcagcctgctcatggcctcccgcagcgcgctcttgaacctgtccaggtccatccgtatgttctgcttgtccaggtacgcggccttgagcgcgtcccacccctgcttgtgcacggcgtaggggtcggtgagcacctggtggttcctcgggtactggtcgatcagcgagctctcctccagcttcacctcgtagtccatgtagctgacctccatgtccgccgccggctccttgaacgtcacgctcgtcagccactccagcccgccgaacggcaccacctggatcagcacggcgccccggggcaggaacaccatgttggtcagcccggcgccgtgcaacccccaccatcacgtccgccgagttcaccagccgcgcgaaccccgccatgtccgtgtgctggtcgggctccgccacgcgcacctcgaacccggcctccgcgccggcgcgcgccatctcccgctcgttcaggaaccgccgggacccgcggcgggagatgatgaggagccggggcttcccggcgcccgtggccccgccgcgggacgccgcctcgcgctcgagcccgaatgcccgccggagcgcgcg

SEQ ID NO: 30210 - DNA, 1855 bp, Setaria italica
  misc_feature (1837)..(1855): n is a, c, g, or t
  Peptide Sequence Number=SeqID_96184
ttgattgtacttgtgacaatgacaaaaatcagtgcacttatgagaggcagtatgctgaaatgagctccagcagtggggtgcttggtgaggacattgtgtcttttggtagagagagtgaacttaagccacagcgtgctgtttttggctgtgaaaattctgaaaccggagatttattcagccagcatgctgatggtataatggggctgggtcgcggtcaacttagcataatggatcagcttgttgaaaagggtgtcataagtgattcgttctctttgtgctatggtggaatggatgttggtggtggtgctatggtacttggtggattgccttctccttctgacatggttttctcacgctcagatcctctccgcagcccatattacaacattgagttaaaggaaatacatgtcgctggcaaggcactgcgggtagacccaaaggtcttcgacagcaaacatgggactgttttggatagtggaaccacatatgcttatttgccagagcaagcttttgtggcttttaaagatgctgtgacaagcaaagtccactctctcaagaaaatccgtggccctgatccaacttacaaggatatctgctttgcaggtgctggaaggaacgtctcaaaactacatgaggcatttccaaatgttgacatggtatttggaaatggacagaagctctcacttacacctgaaaattatttattccggcactccaaagttgacggggcttattgtttgggtgtattccaaaatggaaaagatccaacaacactattaggaggtatcatagttcgtaatacacttgtgacctatgaccggcacaatcaaaagattggcttttggaaaactaactgttcggagttgtgggagaggctccatattggtggtgcttcttcaccaggaccttcaagtgatacaggttcacaagctgatatgtcacctgctcccgcccctaatggtttgccagaatttgatgttggtctcatcactgttgatatgtccataaatgttacttacccaaatttgaaacctcatctccatgagctggctgagctgatagctaaagagctggagattgactcccgtcaggttcgagttatggatgttacaagccaaggaaattctactctgatcagatggggtattttcccggcgggacctgataatgctatgtctaacgcaacagcaatggttatcatctctcggttaactcagcaccatgttcagttgcctgaaaatcttggcagttatcagttgctggagtggaatgtgcaacctttatccagaaggtcatggtttcaagaacatgtagtctctatactgcttgggattttgctagttgttttggtcactttgtcagcctttttagtagtacttgtttggagaaagaaatttggtggtcaaactgcctacagacctgttgattcagtggctcctgagcaagaactccagccactataatccaaagctgtttggcggagcaacatatagatgattctttggtagagataccctcgtctgggcttacacatcgcagcggcacacatctgctgctggattagcccttctttgtatgtaacacaagctacaagcttacagaagaagcacaatatgattacatcacctcgaaacttagaggtattgttcataaactgcctagtgattcagatcaagagcttcctcttgtgcttacagtagaagaaggttttgttcatgtaatgtagattaaggtaggggtagagaagaggcaagcacacccgcagaacggaacaatgtaatatctatttgataagtgctgaggatatttggcttcttaacaaaaaaaaaaaaaaaannnnnnnnnnnnnnnnnnn

SEQ ID NO: 30211 - DNA, 359 bp, Setaria italica
  Peptide Sequence Number=SeqID_96185
ctcgacgccgtatttgatggcgatgccggctagcgtgtccatcctggaaacctcgtgctccaggcagtggtggccgggcggcggcggcggcggggacgagggaggcgtcctctccggcgagagcagggcgtcgtagtcgtcggagagagggtgagagatgcccatggcgatgaaaaagtaactccggcaggggctccgaatgaaatcgcgcgcgagaggggttgtcttgtcgttggtgggcagatctcggcagggaatcaatccgggaaatggtcgccggtggagaaggaaggttgctgcgctgcggtcggtgagggaggaggaaaggcgagtctgccttttcttgcgttggaggcagg

SEQ ID NO: 30212 - DNA, 496 bp, Setaria italica
  Peptide Sequence Number=SeqID_96186
agaggaggagcggaagaggacatggatgatgcagctgacggctgacgcgactccaagctcctaagacggcataaacccctcgccatttagaggaggagggggagggaggagaagccaacggcggccttctcctcctcgccctcgtgaagcacggccagcgacgggacgggagctcgctcgctgtcatccagagatctcaagcagctgataattgaacatgttcttctttttataatatactaccttacaagctagtaaaagatgagttcgacccgtcgagcttcaaaagctgcaaaatcaacaatcaattaccaccggctttcattagatgagcaccaattatttgagccagatgctttaattactaaggatcgagatgccaatcatcagccaaggcaaagtcctcaattgcgcagaacatatactgatagaagattgaccactccccagtttgtatcagcattaacagggatctggaatcttgttggccagtctg

SEQ ID NO: 30213 - DNA, 663 bp, Setaria italica
  misc_feature (633)..(663): n is a, c, g, or t
  Peptide Sequence Number=SeqID_96187
tttttttctttttttatttttttcttttttttgttttttttttaacttttttttattttttttcttttttaccttttttggttttctttaattggatgtcatcagatggaactggatcacacatgtggcgatatggggtagcattgttgcgacatggatttgcgtcatgatcatagactccataccgatcatgcctggtttctgggcaatctataaggtgatgggaactgggttgttctgggcattgttgcttgcggtaaccgtagtcgggatgattcctcattttgccgcaaaggccttcagtgagtatttcacccccagtgacattcaaatcgcaagagaaatggagaagtcacaagatacccatgatgcaacccatccagaagttcagatgagttctgtaagtagagcttagagtaggggattactcagtgatcttttgttcattcaaataggatagctctggttctttttgttgtgtataggcaattctttcagcagtgggcaagctttcttgatgcttgctcccttgccaactatccaaaggataggtcccttgtatccattgtgtgtatccactagccaaattttgttgatttacatagaaggaggtcatacaggagttaattgtcnnnnnnnnnnnnnnnnnnnnnnnnnnnnnnn

SEQ ID NO: 30214 - DNA, 277 bp, Setaria italica
  Peptide Sequence Number=SeqID_96188
atcgtaagaccaataactcgaatggtaacacaggggtgcaggatttaaacagattcgagccttcggagagtaataccctacatcctgtgttctggtggatggggtattgctggtatgggatacgaagagttgatgtaccctagggggggcatccctagccaccttatataggatgacaacctagggttacaattggataggatctaatcctagtcggttgttacatgaaaagcaatctgagtcggtttacaacaagccttgatatccgggaagaatt

SEQ ID NO: 30215 - DNA, 1135 bp, Setaria italica
  Peptide Sequence Number=SeqID_96189
cttgacatagtattgaaatattattacatgttgaacctggaccgtctgaagataggccactggtaatcataagaaaaaagataggccactagtgtgcatacacccacccgctagacaggggaccagggtcgtggctaaacaagagtgctaaccgagatatactccgtatgtttgtagcaactgttacagtaaatgaagaggtaaaacacctgttgtttaataagcctacggatatgcccgtaactggttgtttaatataattgcagatgtctttcttcttgagccaaaaaaaggcattctgttttggtaaacacaaaaggtagctcaagttctactacaattatttcaaataaccatcattgctagcaactggagcaataggacggacataatcccttcttgcctcaatggttttctcaatcaagcgtattccagacaggacatcattcatttgtttgctcactgacatttcatgttttgccatgtatctaccagaagattagagctgaaaactccgtcctttgccctcaatacttctccgttccagttggtacaaatggaaatcgatagaagcaggagcatctgcaccaccaatccgcataggagtccaaaccagagccccattcctccaagatggcatacaaaggcgaaaaagaatgcagcagggataccagcaacataataggccacaaggttgatcacagcaccgagcttttgccggccgcaacccctcacgacacctgaaagaacagtctgcaggccatcaaacaagatgcacactgcaaggacaggcatcactctagcagcgtactttgccacatcctcgtcgttgctgtatgcataccccagtagattccttgccaacaccatcagaatcccttctgagacacatactgagaatgccaagaacatgacaacctgagttgccagatgagcgacatggggtcggccagcaccatgctcatttgaaacacgtgtgcttaaggctgcaccaagtccaattggcaccattgatgcaaacgtgatagtgatagtgtgcaggcagatggacagcacggcagttagaacaatcggagtggcgagaaggccagcgagctagaagtgagcaccaatttcaccagatggacagcacagc

SEQ ID NO: 30216 - DNA, 437 bp, Setaria italica
  Peptide Sequence Number=SeqID_96190
aaggaggctgaggccatggagatccccgtagcgatcaagggcgtcgacggcaacgggaggatcgtggacatcgtggagctggacgaggtgcagctggagaaggcccaggccaacaccaaggcggcggtcgccgtcacggtctccgtagaggaggcccgggtgcaggggaaggacgaggcttaagatacgaaaaccaaaatgcgccgatcaatcgattagcacttctcgcgtcattttaccccttttagctgttgcctttatgagttctcccccatggtgttgtagtgtggggtgatctgatggtggtggtagtattgtagtagtgactagtgaagtagtctcaagatggaagctgaggaggatgtcatgagggagagttttgtaacccctccttctataagcagatgctgccagtgataaaacaaaaaaaaaaaaac

SEQ ID NO: 30217 - DNA, 1240 bp, Setaria italica
  Peptide Sequence Number=SeqID_96191
tgacactacattaactcaagagaatcggaatttatcctcggagcgtgccactaacctgagtaacagcaagccagggcaacaaatcgaacatggcacacataacatgaacaccagttcaacaaatgcaacttccagttggagcattgtgaaagaggagtttacatttccagcggctggtcgttctttcaacaactgtcatgcttccacaattgtagagattgagaaagacaattttttggtctcatattttggtggatccatagagggtgctcctgatgtcaaaatctggacacaaagatacagtgatggctactggcatcctccagtagtagctgatgaagaaaatgcgacagcaatgtggaatcctgttttatttcagctcccctctcgtgagttgcttctcttctacaagataggtgaacatccccagaattggagtggtgccatgaaaagatcgctcaatggtggcatgtcctggtcggagagagagcagttaccacctggtattcttggccctataaagaacaagccctttttgcttgatgacgggcgcttactatgtgggtcatctgttgaaagctggaactcttggggtgcatggcttgaggtcacagatgatgctggctggacatggaggaaatatggtcctatatttgtcgaaagtgagaaacttggggtgattcaacctgtcccctaccagaccaccaatgggactatacgtatgctgctgaggtcttatcaaaccatcggtcgggtatgcattgctgattccagtgatggaggtttaacatggggttatgcgcgcaagactgagctgccaaaccccaattctggaattgatggaatcaagatgaaggatggaagagttgcgcttgcatataacaccgagtccagaggtatcctcaaagtcgcagtctccttggacgacggcatctcatggggcgaggtgttgacgctggagaacaccgaaggcgtggagttctcgtaccctgccgtgatccagaccatggacgagctcgtgcacgtcacctacacgtacaaccggacacagatcaagcatgtggttcttcggcccagttgagttgtgggagtcttgagtttgcggctggacagaaccgatggaggtttaagtgtactagtagtgccgtgaaggctctgctgttactcctctgaatttgtgtctgctcatgtaggagggagagttctcacttgtaaagcaacatgcttgactagttttttt

SEQ ID NO: 30218 - DNA, 705 bp, Setaria italica
  Peptide Sequence Number=SeqID_96192
ggatctacaagctcatgtagccttccatcattccacagttgccatgcatctcgtacgaggtaccaacagaatctccttgctgctccagtatggtattctttcgcccactgatgatgactaaagccatcactccaaaactaaacacatctgtcttgagtgaataaatgcctcgagatgtgtactccggagctttgtaaccactagttcccacaaccctgcttgtacgctcttccgcggtatctgaactcagagttctagctgatccgaaatcagtaatctttgggttcatgtcatgatctaagaggatgttttggggtttcaaatccctatggacaatccatagcatggactgcttgtgaaggtaaacaagtccagcagctaaccctttaattatattgagtcgcttagaccagtctagcaatgacccgtttcttttgtcgaagatgaaccggtgcaggttacccttgggcatgaagtcatacactaaaatcctttctttctcatggatacaccaacccaataatctaacaagattactatgctgaagcctcgcaagcagaaattcactgctgaaatcaaacacagtagcatattcatccatccttttgacggcaatcatgaatccatcaggcaattgacccttgtaaactgtagcaaaaccaccccaccgacgtttctattttctgagaaattctctgtagcata

SEQ ID NO: 30219 - DNA, 297 bp, Setaria italica
  Peptide Sequence Number=SeqID_96193
cgagctcgcgctcctcaatggcgttgaagaagtgcgggctcttccatatcaggtcggcggtgaacctgacaatgacgggagggagacggcggcgggaggggcggcggccgcggcttgggaatgaacggggagaagagtggaggaaatcggcgaggccgggagactttctagagtagtatcccaccgctcgaagccgctccccgccgccacctcacccccgccgccgccagctgccgagctcgaaaggcttcaaggcagccggaggttgactggagggttggagatgcgggagagatg

SEQ ID NO: 30220 - DNA, 339 bp, Setaria italica
  misc_feature (295)..(295): n is a, c, g, or t
  Peptide Sequence Number=SeqID_96194
tacagcgacaccccaccgcaccgcgagccactccgcacgcgcaccaaccctctcggcctctccgctccgctccccacggcctccacccccccgactcctccgcggtccagtgctccagtcacctccgcttctcgctccccgtctcgtcgctttcccctctcccccgcccgggcgccgcggccgcccgaccaggcctcgggaggccccttccgatcccacttccgccgccgacgtcggagccggcgggccgtaggagagcttggagaatgctttactgctatcgttgatggtaggnttggttttccacgaccacctggaaattttgttcaagctccgtag

SEQ ID NO: 30221 - DNA, 1553 bp, Setaria italica
  Peptide Sequence Number=SeqID_96195
gtaaagtcaagatctcactcgctttttctgctttgtattcggctgttgcctttttccatgcccatgagcagctcatatatacatgtgaacggccatctagaagatgctacagtagataatgacgaggtgaaattctacactcaggtcaggtcaggtcaggtcataaaactaaggagcatgtttaatatgaagattagttcccacagcgctgaacctctgcttcaagttgcggagtcgctgagagtatgatatccgcataaggctgctcttggttaacttgtacgagctcacggctcttcagaatcagagtttcatagaacaaagttgctgcagttctcctctttgccccttcaaggacttgattaagacttaaagtattagttccctccttactcttctgatccaggaatagcttatggaggcaatttgctattttcctagttcgagttgaattcagcaaaccttcatctctggtaggctcttcattaggaatatcctcatctatattatctagagcagcattcagtgagtcattgtgcaacgaaatttggttttctgattcatgcagtcccttcttcggtagtatttctgaactaggttcatctccttcaactcgagggcccttctctttggctgtatcttcattgcattcacaaactccatcttgaacaggcccattttctgtgtgacagccaacagaagcctcaaatctgttccctcatccagctttctctttcttgatgcatctagaatgctttctcgttctgtacttccagtatccttgcaagaatggacagattcagtgtgttcgtaggaaaggcgcctccttgctttaactgatccctcccataaactttcaggtgcctctggtgcagcaacgcatgcaaggggggttgaagtcttatatggaatcagtggatccatgaacgtatatggtagggaaccaacttttgccaccttccaagtatcaagatgagtatgaggcgccttccttctttgctgcactagatcacttgcatcctctattgctgctctcattatcatattcggtagtacggtaccctcatcacacaatggccaagttaaccttctcctaaccctccgcctgccttctcgttctgtcggtatgtaatcctccttattgtacaacaccctcctttttctagtagcctggctcttctcagttttagctggtgtcctaaccctaaatctagaagacgatgatggccctgggacgccctctggcaagggctctggagtagaaggtgatagctcattctctgcccctgtttcacagcttaagacaggagcttcaggtgactcatgttctccagcgtcatgctctggaaattctgctgaaggtggaggaattgtgttcgatttttctagcagtgaattattccctgatgcttcaattgatgggttattttcactaagactcccacaggtcatgttctcaatattctctgagttttgcccttcttgactttcttgcggagggataggagccatagagcaggcggaacccccattagtctcatccatgttcacaa

SEQ ID NO: 30222 - DNA, 362 bp, Setaria italica
  Peptide Sequence Number=SeqID_96196
cacaggaatatactgacttgttctttattttattttcaagaattaatacagatagcataaagcagaatccagtccatgaatagttagcgatctagcatctggaggtgaaaatctagcttggttagaacttagaagcatagttgtggataaaatttgtgggaatctaatttgacaaaacaagtagacatgtctggctgcatatatgaacctttcaaactgcatcttattgtttctgagatctgattggtgatttttccacatttgcattgtagcacacatcacttggatattgttttagagagcaaacttgacaatcgagatatcttgattgctgaaattgatgctaacaatgttctgttatt

SEQ ID NO: 30223 - DNA, 1008 bp, Setaria italica
  misc_feature (1)..(41): n is a, c, g, or t
  Peptide Sequence Number=SeqID_96197
nnnnnnnnnnnnnnnnnnnnnnnnnnnnnnnnnnnnnnnnnaatggatattcaccattgtatttcaatccaatagctagcgaagtctcatactttaggggcatcatttatctgtagtttacaattaaacatactattaacatcactgcgctaaacaactggtaaagagccctaggaacctaataaaaatgctacaaagaacaaatttctttttgaacaatgtcagcatgagcaagagctacaaagaatcgatgagacatggtgagcaaacagactcaagtgaatattaagtctccattctacaagtcttcttgcaggagtttgttcaacagagtggtcaggagggcgtcccttttatcagctcgtgcttcctctctcatccgtctttgttcctcccgttgtatccacgagtgttccagcatcaatctctcgtgctccagcttctgcatcgactgccgccattcttgttcgaaaacaacccgctcattggcacgcttctccatcatctcctgccactggatgtcgatgcgctgttgctgtgccaggaaatcctgcagcagttcatggatgtttgacacgcctgttctagacttctctagcattcgttgggattgttgtttcttgtcatcagctttcctctttctgctgtgaatgggtttctcatcttcgctttcttcaccaccatcgtcatcgtcaccagactccccagatgaccgatcaccactaggtcgcttcagtttccttttaacagaagctccagattcagactcaaggagctggcgttgcatatttctagcacgttctgtgaagacggcatgcagctcttcaaagaagggacactgtctgccattttctggatcagaagtttctttccccttgtagcggttgacgaggttcttccatttgcacttgcactggtcggcggtccggcggtacccgcgctcccggagccgcgcggcgacggcctcccacatcgtcttggcgctgcggcgcgcggcgtcggcctccc

SEQ ID NO: 30224 - DNA, 253 bp, Setaria italica
  Peptide Sequence Number=SeqID_96198
ccggtatgtaagagaaactctgtttgtaaacgctcctgcatctttggacctggaggaatcgggcgatcgggggcgcgaagggggcagtatgagtgcgggggaggcggaggagccgaagagggtgccggcgtagaaggaagcggcgacgagggcgacgcccaggagcaggagctgcaccgaccgcggctccaccgccgccgacgccggcgaccaccaccgccccatctcgctgctgcttctgtgtcaagactct

SEQ ID NO: 30225 - DNA, 1206 bp, Setaria italica
  Peptide Sequence Number=SeqID_96199
ccgcgatcatcgagtttgcgcagctgactaagctttctggtataggcaacacatccaaacaccttcatatgccccaatgtcggtgagcgtccatgccaggcctcatagggagtaattcctttcagcgcacgtgtcggtgatctgttcaggatgtgaactgctgtcattacagcctccccccaaaatctggccggcaatcctcgctgcttgagcagtgcccttgccatagccaccactgactgattacgccgctcaacgaccccattctgctggggtgagtggggggcgctgaaatgtctcttgatgccttgctctgcgcagtaggtagcaaaatcagcaactgtaaactcaccgccattatctgtgcggagcactctgatcttctggccactttctgcctctgcgctcagcttgatgcgcttgatagcctctgctgctgcgtccttgcttggtatgagcgctgcccacatgaaacggctagcgtcatcgacgagcagcaggaaatatcggtttcctccaggagttgcaggtgtcactggcccgcaaagatcaccgtgcaccagctcaaggggctgcttggcacggtactgtgtcgcagccgggaacggacgccttctcatcttggtggtgacacaggtgtcacacacctgctcaacatgatcaatcaccgggacaccacgcgccatctcttccttcccaagtctgcggagtgcatcaaaattcaagtgccccatcctctcatgccactgccacgctacatctcctctgcgtgctgcaagacagagtggctgggctgcctgaagttggagtgtgtacaatctgttagcccctctcttcaccttggcaatcaaacgaccagtgtgttcccagatacgcagcacaccgtgatatatctccaccttggaaccagtctcgtcaagctgaccaagactgataattgaattcttcagggctggtatatagtacacaccctgcagcaccctatgctcaccagttcttccttcgaaagcaatcgatccgatgcctttgatgtcaaccttggacgcatctccaaatcggaccgtgcctcgcacgtccgtgttcaaacgttagaagagctcacgccgtccagtcatatggtgtgtagctcctgaatcaaggtaccaacaaacaaataaactaaaagtaaaaccttttaaaacttaaaaacaaaaataaaacgaaaac

SEQ ID NO: 30226 - DNA, 408 bp, Setaria italica
  misc_feature (1)..(37): n is a, c, g, or t
  Peptide Sequence Number=SeqID_96200
nnnnnnnnnnnnnnnnnnnnnnnnnnnnnnnnnnnnngtgagtttgaagcagtctctttgcattattctaatggaattttacaacaataaattccccctttgaggctttacttaattacatttgagtttgaggcagtctctttgcattattctgagtttgaggctttacttaatacatttttgactgttgaacatttttgactctttggccgtcgttcagggtcactggatcgcacagcagctttgtggagccccacgaccattgcgtggctctgcgaggcagatcacgccgccgagcacctgcgagcccgccgccagtggtgccgcgccaagccccatgtccatgtcgtcgttgtagtcgtcgtccgccatggccgccgccgccgccgccgccgctcgctctggtcg

SEQ ID NO: 30227 - DNA, 358 bp, Setaria italica
  Peptide Sequence Number=SeqID_96201
tgagagcattcttgcaggagttctctggagctgatgatgtggtactctacctcctaattagtgcctaccactctgacacaaacttcattgggcaaatccgcagatttgtgaaagaatcaagcattaatgagccagtggaaggatgggctgaaatccgtgttattgatgtgcatgtccctcagtcagcacttccaagtttgtacaaagctgcagatgcatttgttctgccaacccgtggcgaggggtggggtagaccggtggttgaagccatggccatggctctgccagtgattgtgacgaattggtcaggcccaacagagtatctgactgaggagaaatgggtacccattctcctcag

SEQ ID NO: 30228 - DNA, 245 bp, Setaria italica
  Peptide Sequence Number=SeqID_96202
gttatgagaccaggtcagcaacaggctgccacatcatggaaatctagctcagtgctgtttatttacaggaaaattttctgtaattctagtgttgcgctgctactgtacaacatttcttggtcctcagacagtcagaccccacaagaaagaattttgatccaaattaaaatagttgccaattgatagggctagctactgggcagataatggtcagcacatagctacgtaccacaccgctacacgta

SEQ ID NO: 30229 - DNA, 710 bp, Setaria italica
  Peptide Sequence Number=SeqID_96203
acgccctggggctgtcttgattctgatcccgtgcaaggagttgacgatgcggaggccctctgcccgaacttctgatatgccacctgacatctcacttccaaaggcaatccctgcaccaccccttgtctctccagtgatgttgcttatgctgatattggagcttggttgagcaagtgaaatgccatactcatcccacccgcttttaatgacaataacatcatcaccatttctgacataacaatgattgatgcagacattcgtggacgagtctggatcaatgccgtcagtgttcggtgaattcaaaggcgctaggattgtgacatgctggacaagcacttggctgcaatatacagggtggatattccaaaacggcgagttcttgaaggttagattagatatgacaacattggtagagtacatcaactcaacaagatgtggcctagtataattcagtgtgtggttgtggaaccagccccaccaagtagctccttgaccatcaatggtaccattagcaccagttatgattacatctgtcagatgtgatccaaaaatcagactctggtgcctttttccaggaagctctctacctcgcccataggatggaagaggatcaacaactggccaatcagatgaatccagtgatccaattattactgcatccttatccagtgacaaagtgaggtggctgataagaccaaaactccctgtta

SEQ ID NO: 30230 - DNA, 1777 bp, Setaria italica
  Peptide Sequence Number=SeqID_96204
taatgtgaatgtgatcggtacgtttcagagcctcaaaaatggtaacaaaacaggcaagctgcaccaacagtcatctcatctcgacagatatatacaaggaccaagcagcactctaagcacaaataatcgcaagaatcagatatacatgactaacaggactcatcacaggaaggaaatcccttcgcaacgatagcaagcacatctctacctacactaaaatgaagccaacttcagaaaaggacttagaaattggctggtgctcgacttatgtcttggtgcctgcacacgcattgctgaagaagtgctgccatcatagcaaactggcgtctgcctacagttgcttctaagctgttcgcatgattctgggatcacggagtttgaatacccttcaataagcgaacaattccatggatgtagagattgcacactgagggaaacattggacaggcaaatgctgctgaagttatccccctgaattccctccaatatgccagcaacaccaatgttgataccaacaacatccttaattgtaatattgcttatcatggggagagcattcctgtcatatttgtcatcaggatgttcaccataatttccagtgatcctgatggccattgaaacgttctccatgctcacatctgctatgtacacattcttcacgtagcctccacgccctggggctgtcttgattctgatcccgtgcaaggagttgacgatgcggaggccctctgcccgaacttctgatatgccacctgacatctcacttccaaaggcaatccctgcaccaccccttgtctctccagtgatgttgcttatgctgatattggagcttggttgagcaagtgaaatgccatactcatcccacccgcttttaatgacaataacatcatcaccatttctgacataacaatgattgatgcagacattcgtggacgagtctggatcaatgccgtcagtgttcggtgaattcaaaggcgctaggattgtgacatgctggacaagcacttggctgtttatttagcaaaacactccagataatataattgtattgtgaatgaattcttatgttttaatagaaagcaagtggctatctagaaaccaacctgcaatatacagggtggatattccaaaacggcgagttcttgaaggttagattagatatgacaacattggtagagtacatcaactcaacaagatgtggcctagtataattcagtgtgtggttgtggaaccagccccaccaagtagctccttgaccatcaatggtaccattagcaccagttatgattacatctgtcagatgtgatccaaaaatcagactctggtgcctttttccaggaagctctctacctcgcccataggatggaagaggatcaacaactggccaatcagatgaatccagtgatccaattattactgcatccttatccagtgacaaagtgaggtggctgataagaccaaaactccctgttagccactttcctgcaggcacaaagagctgtgcgccacccttgtccgcaaacgaattgagatagaagattgcattctggaatgcttttgtattgagagtcacaccatccccaacggcgccaaattcagttattgtgacactgtgaggtcgatatacatttggcgacatttctttgcagtaaatgccagatacagtggaccattgagtctcaaccacagttgtgaaaaccagaaggacttgaaataaagatgcagatctcctcatctttcccggcgtgatctttgctcctcgtccggaatccggagg

SEQ ID NO: 30231 - DNA, 498 bp, Setaria italica
  Peptide Sequence Number=SeqID_96205
ctcgcactgcagcaagttgagccatcagcaacagcaagcctagtggtgctcatctagcgctgcaaaaggacatactataatggagtccctaggcttgctggttcttgccctcgccgccgtgctcaagctcgccggcgccgacagctggaacagcggccgcgccacgttttacggtggcatggacgcttccggcactatgggaggagcgtgcggctacggcaacttgtacagcacggggtacgggacgaacacggcggcgctgagcaccgcgctgttcaacaacgggcggagctgcggcgcgtgcttcgagatccggtgctccggcagcggcagctgcctgtctggctccgccctggtgacggccaccaacttctgcccgcccaactacgcgctccccaacaacgatggcgggtggtgcaacccgccgcagtcgcacttcgacctcgccgagccggtcttcaccaagatcgccccgccccagcgccggcgtggtgcccg

SEQ ID NO: 30232 - DNA, 450 bp, Setaria italica
  Peptide Sequence Number=SeqID_96206
cgggctcctggccttcgtctacacgacgctgcagctgctccggcacggcgtccgcctctccggcggccaggacctgcaacccaagaccggcctcatcgtcgacttcgccggggaccaggttaccgcctacctgatgatgtcggcgctgtcggccgcgatcccaatcaccaaccgcatgcgcgagggcgcagacaacgtgttcaccgactcgtcggcggcgtccatcagcatggccttcttcgccttcgtctgcctcgccctctccgctctcatctccggcttcaagctcgcaaaacagacgtacatctgagcctaatcgcacggacgcacttgcacatatgcttcattcatgggtttgttagtttggtcaattgtgtacagtagtctgaattgcgtttgtcattaccgctggtgtatatagccgattatttctaccattaaaaaaaaaaa

SEQ ID NO: 30233 - DNA, 325 bp, Setaria italica
  Peptide Sequence Number=SeqID_96207
tttttcgtttttccttttttctttttctttttcgttctttcttcgcggcctttctttcctttcctagcggcgacgacagggcgagcgccgccgcggcttggccagttcttcgtcggccggcgagcatccgacaggtaaaggccattgagtattaggtggaagaaagatcagaattgtaggcactggcccggctgctcaaaaggggaaggactccagtctcaattgggggttgtgaactatgatcctctatgaaccataccctggaaaagatttcgctccaaagggagcataatccgaggagagcagacaagggggctgggagaag

SEQ ID NO: 30234 - DNA, 546 bp, Setaria italica
  Peptide Sequence Number=SeqID_96208
aggtgctggcgcacccgctgtacgagcagctgctctcggcgcacgtggcgtgcctccgcatcgccacgcccgtggaccagctcccccgcatcgacgcgcagctcgcgcagtcgcagggtgtcgtcgtcaagtactccggcctcgctaccgccgcggccggggacgacggccgcgagctcgaccagttcatgacgcactatgtcttgctactttgttcattcaaagaacaactacaacagcatgttcgtgttcacgcaatggaagcagtgatggcttgttgggaacttgaacagaatctgcagagtttgacaggtgcctcgccgggtgagggcacgggtgcaaccatgtctgatggtgaagatgatcaggctgatagtgagggtaacatatatgatccaggcttggacagtcctgatactatgggctttggcccgcttgttcccacagaaagtgaacggtccctaatggaacgtgttcgtcaagagctaaagcacgagctcaagcagggttacaaagagaagcttatagacattcgagaagaaattt

SEQ ID NO: 30235 - DNA, 316 bp, Setaria italica
  Peptide Sequence Number=SeqID_96209
tctctctcttaagaggaggaggaagaagaagccgagggcagggcacaggaggagtgagagaggagaagtacaggggcaggaattgaattccaccgacccacgcacctctcagtcaccccctttccatttacctccacctatatagctctccataattccccgggcctcctctctcttgttaggagtacagttctccttataattggagttgtacaaggcacccagcaactttcttcttcatcttcctccttccctccctctctgtccaccaagccacgcaggaggagtagagtacaaccagagaaagagagagtta

SEQ ID NO: 30236 - DNA, 592 bp, Setaria italica
  Peptide Sequence Number=SeqID_96210
gcttcaaggcattcacatttcacaagaactagtagtagtgtagtacatcaaggcagaggcttgaatatcatagtggtgcttacaaatgagaactacatccaggaagaaggcaagaatgtcaaaaatgattggtgacaagaagtgccatgaatggcggcaactatacccgaatcaccatgatataatctggctactttgatagggtaatcaagtctgctatcaagactccaactttttgagaaactcaggcaccacctggctgcagtttgcaagaagctcagccaaaggtttcgcaacaggagcatcagtgttacaaaagacactatggacctccccaccaatcgtctgacgagcaaccccagtgaggatcccactgtattcatcaactgaaggaggcaaatcaacaaccaacacaatgtcaaacccctctatatctgtcatcaccaggttctcccggtctttaatatgtaggttcatcagccccacactgctgcatatggtaaaagagttgccatgtgagccatcagttactgtgcaattttccagtttaagtgatgatgataggtgctgtgctttttatcgcttgctgcta

SEQ ID NO: 30237 - DNA, 355 bp, Setaria italica
  Peptide Sequence Number=SeqID_96211
tttttttggttctattccgactagtcatcccctacccccaactgcaatctggacgcgtctctccttccgaatccatccagaggccacacccgccggccgccgcggcaccgaccacgaaagggaggacccatcccccctcccgactctttcttcacccgcaagaaagagttggagaggggagggcaggccgggatggaggaggggggaggcgcggcggcggaggaggccagggccgtggaggagttccggcaggcgttggccgcgcgcgatctgctgccgcccaagtttgatgacgaatacactatgaggagatttctaaaggcaaggggatttgatattgacaagacaatagata

SEQ ID NO: 30238 - DNA, 316 bp, Setaria italica
  Peptide Sequence Number=SeqID_96212
gaagtaggtcgggtacggtatggcgaagtcgaagtccgtccacgggagcttctcgacgaagagcaccgtcatgttctgcacggcggggaggtggaggagcttgctcccccactcggagtcgctttccggctgcctctggtggtcgtacgccgtcctcccggacaggaagaagtggtcgcggccgcccatggcgcgccactcgggccggcgcgttagccattcgacgaggtcgagcgacagggcgtccttctccttggccgtggagttgacgccccacaggtgctgcacgatgtcgaagccggcgtagaacggcacg

SEQ ID NO: 30239 - DNA, 1100 bp, Setaria italica
  Peptide Sequence Number=SeqID_96213
ctatgtgggcattcaatgtggtgttcgaagtggaagcgaacactttgcaaacaggacaagtctttgatgccattggatctgaaactgagctagagttagatgctatgtcttccgtccggcgaatatctgtcggggtgcctaacttgactacaaacttgcacttcttttcagatggctcacacgatgaaccaagatttctcaaccgccacgagggcacagcaacctcagttcgacttgcttttgtagagctattatcttgcagatctataggtacagcctcatcagtatggtctgatccgtttgtactccccacttggtcgataccagatttcccatcctccggtgatgtgtatggtgaaggtccaaatgactcatctactggttggcatgattggaagttgatatcacttgtatcctcatttgacgaaccagcatctctagtcttcaccagactaacactagcaatggcttctgaacacgcagcagattgctcaacgtctgtgaaagtacttaatggttgtgaccggatcaaatcgggaggctcaaatggaggcagtggatctttaacaccacgcttcaggcaaagctgcaacgagtgtggatggaaaggccagcttctcttgacgcctttgctccttgaagcaaaaacataatctcttatggagaacttgggatacggttggaccagatctctgggatcctggctcgccggctcccccgccgcggacgtcgccggatcagcgctcacacccaggccagcagacttggaggaacatggaggggcctgaagggtgctcactggataacatctgatgaacgccttcggtgctccccccagatctgctgctgctacagtccgcaccaagaacccaagagctgtgaagcaattgggcctgctcttatccttgcactccagcataccaagttggtaagttcaactggtggagagcaagaaactttgcttccttggccgcccactacctcatcaggcacctttcttcacacccgttcccacggccgcgcgcgttatagggcgaccatcccgccggcagatccacgcagcgagcagatgaggaggaggttgaggagctcccggagcc

SEQ ID NO: 30240 - DNA, 315 bp, Setaria italica
  Peptide Sequence Number=SeqID_96214
atttatttattttttgcaaaaaaaagtacaggtgtacatgtgtacgcccttgtcctatacttggtccgtcctccccgctcttcagcagccgcaagcagggcagtggtggcagcaaggggtcggaattgcaagtcaggcttttgtttaagcactttctgcttgcaatatttttatttgacttggaattttcaatgcccctcttgaaacatcccctcaataaaagagaaaaaggataaaagaaatctcaatcaatgttcactctacttccactgctgtatgatctttcgtttttgtttgttctactcttgagtgcta

SEQ ID NO: 30241 - DNA, 311 bp, Setaria italica
  Peptide Sequence Number=SeqID_96215
tggtttgcaaaccggagcttttaattccagttctttttttaatggaacaggaggcccgttatatattaaaagagggtaggcccctactagttatatattaaaagaaaaatacatttatatattaaaagaaaaaatttacatcagagtcaagaacaagaaaaaggaaaaagaaaaattacaaaatagactataaccatgagcctattaccggatgatattttgcctttgccctatataaaactctggagaatttctctctaaaaatttctttacatctttgtattgtggctgttgatcttcaaagattaaat

SEQ ID NO: 30242 - DNA, 209 bp, Setaria italica
  Peptide Sequence Number=SeqID_96216
gccagcagcagtagagcagaagccgcagctgaactcgccggcgatgaccatcgcgttccatcagaacgatcagagcctcgccgcgaacgatttctgcaaagacgggtactgggacgagattgcaaggttcatggaggtcaatgatccaacagtattttacgactgtagatatgcttgatcaggaacctagcttcgtcttcagagttcag

SEQ ID NO: 30243 - DNA, 227 bp, Setaria italica
  Peptide Sequence Number=SeqID_96217
tagtacggagggagtatgctttgaacatgcgtgcacaaaatgtgcacgcaatctgcccaggagcccagcacgcacagccatatcagcatcagatcagcttgacagctcgtggatgatctgcacgagtgacgagtacgtcccggtgatcagcagcagcgagcccagcgccaggatcgccgcgatggccgcggcctcggcggcgcgagccggcaggccgaacaccctga

SEQ ID NO: 30244 - DNA, 674 bp, Setaria italica
  Peptide Sequence Number=SeqID_96218
atcgcgagaagtggggcgctgccgttgccgaccatgtcgcagcagcctgcgccgccgccgccgtatcggccgtacaggcaggtccgggcggcgacgccccacagccgggcggtctcctgcgtgcgcttctctccctgcgggcgcctcctcgcaacggcgtccctcgacgggacggtggcgctgctctccccgtcctcgctcgccgtaatcgccgtcctgcgcggccacaccgacggcgtctccgacctgtcctggtccacggagtcgtactacctctgcaccgcctccgacgaccgcaccctccgcgtctgggacatccgttccgtcctcgccggcggcgcccagggcgccgccgatcccggcgccgaccgctgcgtccgcgtgctcaaggggcacaccaacttcgtcttcagcgccaacttcaacccgcagacgagctcgcagatcgcctccgggggattcgactgcacggttcgcatctgggacgtcaagagcggccgatgcaaccgcgccatcgacgcgcactccgagcccgtcacctctgtgcatttcattagggacggctcaatcattgtgtcgggaagccatgacgggagctgcaagatttgggacgccaagactggggcttgcctcaagactgtcattcgacgactaagtaagtcccgtccgttcta

SEQ ID NO: 30245 - DNA, 369 bp, Setaria italica
  Peptide Sequence Number=SeqID_96219
cgggtttgtatgactcgaactcgagtcttaaaaatagacgccgataccttcaacaaatttgtaagacggtggttaaacaaattgcgtacatgattgctagagcttgtgagtatttgttttagaccagtatataaagctggtatttggaaaggtgcaggtgaataatttctttgtttatagaccagtcctttctcggcaggtcttaggccagacgtcagaggtttcggtggccctcggtcggtacactgaaaagctggaacatgcacatggacaaggctgagcctggacagacgtgacgtgacacgctcggttgttgtggtagcattggcggcacacgggacaacgtgcacgcctaccgagccgagcgtc

SEQ ID NO: 30246 - DNA, 366 bp, Setaria italica
  Peptide Sequence Number=SeqID_96220
tcaattaggtcaaatactgatcagcctgcaaattgaagcatattgcacgaacttctccaccctgtgcatcaaggagatcaaaggagaatacttttccagcacctttgctgttggtgaagcgcttaagatctgcctttgcggtcaccctagccttgatcttccatctagcttggtaagggttcaatgcatcaataggggttatgcaaagaggagcatcattcctagcaatatggcttctatccatatgcattggagttgaatgcagtattgagtttccataagtattgccagaagggccagaggcatcacttgttgcggtcaccacaaacctttggttttgtgtatgatcatttaatgaaagctgct

SEQ ID NO: 30247 - DNA, 1818 bp, Setaria italica
  misc_feature (1806)..(1806): n is a, c, g, or t
  Peptide Sequence Number=SeqID_96221
ctagcgggatcccgccggtggcggtgcgacctcggcggagacgaccgctggctctcgggggccgccggcgacgaccacttcgaccgcctccccgacgcgctcctcctcgtaatcttcaaccgcatcggcgacgtcaaggcgctcggccgctgctccatcgtctcccgccgcttccacgagctcatccccctcgtcgactccgtcctcgtccgcgtcgactgcgtcatccccgacgagcccccctcatcctcctcgccgtcggcgccgtcctctcccacggcctccgtgcgcgcccgcggggtcttctcacagatcgcgcgcatcgtgctcggcggcatcgtgaagcccatccaggcgctcggtcagatcctctcaccggccaactctgcctccggcttttcggcatcctccgcttcctcgtcttcatccttctccccatcttcgacgtcgtactcgccgctgcctcctggggatgtgtcgcaccactcgccctcggaggtgctccgctccttcaaggagctccgccaccttcgcattgagcttccgtcgggcgagcttggcacagacgacggcgtgatgctcaagtggaaggctgacttcgggtccactctcggcagctgcgtcatcctcggcgcatcctcggcctcgccgtcctccgctggctcagatggcacgagcacagctccctctgttgatagtggccgcagcgagcctgacgaatgtgatgattcaggaagcatcccggaatcgttctatacaaatgggggcctgaggctgcgggtggtgtggaccatcagctcgctgattgcagcagcagggaggcattacttgctgcagccaatcgttgctgaccacacaacgctggaaagcttggacctgacggacgcagatgggcaaggagtgctcaccatggacaagtgccaactgcaggagctgcgcgtgagaccggtatcagcatctgcggcctcgcaccggacactcatgccggagcttagcatgtggctgtggtatgcgccatgcattgagctgcctgggggtttggtgctgaatggtgcgactttggtggccatcaagccgagcgaggaggcaacaaaggacatggttgggaatggggcttctgtggcaacctgggtcttagatgcattcgaggagccataccggacagcagcaaggatgcttctcaagcggaggacttacacccttgagatgaattcattctaatccatagaggaggtggtgcttttgaagcttcatatatgaaaggatgttatatctacaaggggcatctctggctgccttttataccccaatcaacacctactttggatgtgctacaattatgtttggtgcatcccttctcatgttgggcatctgccagcaagaacatggatggaaatggagagaatccgtgtgttaatttatcgatgctggagtagaggcaagccattgctgaactgatggtgttcgctctgagggaacccttactgctgagacatgtggtggcatagatatattttttcccttatatgtatccacatcaaggtactaaccttatgcaatttctgctttggattgcactgcttgtttgcagaatagcgtccgatgtgccctgtaaatcaacgtgtgtcgtgagtgtactcagattggcattagcgaaagctgagaactgttactatagtatttcgaaaggatctgcaaatgttgtagactgatactgtgaatctggaaatgctgtaagccttctgatgtgaatctgcgtgagcgcttgagtatgttataaggacagtttcgctggttcaaaaaaanaaaaaaaaaaaa

SEQ ID NO: 30248 - DNA, 445 bp, Setaria italica
  Peptide Sequence Number=SeqID_96222
ggccccctttcggcatttggcagggctccgagtcgccagcggaacagctccaccaagggagccccaaaaacccgctctctcgagcagatcggaggagacggagccaaaaattccggctccccgctgctccctccctatcttcgtgcgttctattaccaaattgcccaacgagatggcaaaaattacaccgaaatcgccaccagcttcccccaaattccctgtgtacctggaggcccgccccccttggctgccgcgggcgcgccaccggccgtcttcgacttgaatggagccggcgcaagcaccgccggcatccacgcctctgccgaggccgcagatgcttggaacaatggggagaagtcgagatgtgggtggtgcttgggcggcaggagagcaggccggataagggcgggaggagcaggtggccggaggcccgcgcggcggccgg

SEQ ID NO: 30249 - DNA, 293 bp, Setaria italica
  Peptide Sequence Number=SeqID_96223
cgcgaatccccagcgagtccacggagacgcgagccagagccagagccctcccaccaagcgatgcctcccaagcgcaagtccccggcggcggctgccccagcggcggggtccccgcggaagacgcggagcatggccgccgccgggaagcggggtgcggcggcttctccggcgaaggcggtgacggccaagaagaaggaggaggaggcgggggtggccgagccgaaggggaggaagagggccaagaaggacgaggcggtgacggcggtcgccgagccgaaggggaggaagagggg

SEQ ID NO: 30250 - DNA, 250 bp, Setaria italica
  Peptide Sequence Number=SeqID_96224
tcgagcacgccatccttgtcgaagacaacggatagggcggcgctggggtcggagagcatggcgatggtgtatctgcacttggctccctgctcgcacctcacgctaagggccctcggcctcgcgttcctcctgctacctcgagcagtggggcgtgctgacgtcacggacagccggggaacaccattgcctgctgcggaggcgagacggaggcgaggagaagcggaggcgatctgcgcgtccaggccgccgc

SEQ ID NO: 30251 - DNA, 487 bp, Setaria italica
  Peptide Sequence Number=SeqID_96225
aaatgacagaatccaacacagtaccagatggaaactaaacatggaaagttgggcttctattacatttaaggaagaaaaacaaatgccactatcaggctaggtcttaccgttacagtctcaacagagtaataaccacgatccacataatctcccataaataaatagttcgtgtctggacactttccaccaatccggaaaagttctacaaggtcatggaattgtccatgaatgtcgccacaaattgtcaccgggcttttaactggctgaacattgctttcatccatcaatatctccttggccttctcacacaatgctctaacctccgtctccgggagcgggcggcactccatgagctgctcgatctgcgcgtccaggccaccgcatcccccgccgccacgcgagcccgcagaatcctccatccgttctccggcgaaagcgccctgatctaccttactctagctggcgctcgtcgccggcgaaagcgcgc

SEQ ID NO: 30252 - DNA, 436 bp, Setaria italica
  misc_feature (1)..(20): n is a, c, g, or t
  Peptide Sequence Number=SeqID_96226
nnnnnnnnnnnnnnnnnnnnaagtttttaacggtaagaactagctgcatgccattcttcacaattctagcaacaagaggatcagcatgtcttaagtcttaatcacagaggttgtaagcacaccaatacaaaatgaaactaaaggaagaacccaagcaacttatgctaaaacggaagctccatctctgttgagaaccaacggaggtgccaatttaccgccggattcttacgtcagcttgggtggtaggctgatagcacctcttgcagcaacgaatggggatcaactttcacgctattagggatgtggcattttcttgctattgcaatcttgcacaaaaatcaaaatgacagcaaataactcaaaggaaataatctggtgttctccgtgtcacatctggttcacctctcctcggagctggctcaacctgactagatgt

SEQ ID NO: 30253 - DNA, 629 bp, Setaria italica
  misc_feature (177)..(177): n is a, c, g, or t
  Peptide Sequence Number=SeqID_96227
ctagcatccgaacgagaccaacaatagcccatcatgcctggcctgaaccacctgcaccgcccttcactacctcatagaccgccgagaagtccaggtcccccagccccagacttctggccttcttgaatgcctgtgatcgaaaaatggtggtgtcatgtgccttcactcaaaccctgngttttgtgaggcgtagcacaagtcgaaagggaagtatggcgcacctcgttcgcagctgcagagactggcatggagacggcgttctcatctcccagggccagagctaacctcatgtccttctgctgatgtttcagagggaacgcagggttgtagctgccctgcagcattgcgggcccttcagcttgaaccaattaggggttatagggagtagacccaggacatcaagaagtgcctgggggctcaacccacttttgtcggccaaagaaagtccctcggacaaagaattcatcatactgcaccaagaaacgtagttgtgatcagttaacttacaaaccacaaaggtaaagaggcactaaaatgtgctaacagcagaaaggggttgtacgcctctgaatgtgcaacaagcatctcaacagaatcacatctgaaagagaaggcccacaatctaacag

SEQ ID NO: 30254 - DNA, 775 bp, Setaria italica
  misc_feature (1)..(65): n is a, c, g, or t
  Peptide Sequence Number=SeqID_96228
nnnnnnnnnnnnnnnnnnnnnnnnnnnnnnnnnnnnnnnnnnnnnnnnnnnnnnnnnnnnnnnnnttttttttttttaacggcaacaagtgcagagtgcaggtacacaaccacgtcaaaataattccttgcaaataacaaaaacatagaaaatgcatggtacctaatgcaatttgctctgcaagaaaactcctgcgataataatcagtacggagtagtatttttttccctctccctcccttcccaactgctccaataaaagtctctatttaactcttctctgaacacaacaaaaactgcacacacatacaaggcactagatgaagagctcgaataatggaagggccggctgctcaggatgcaatcctgttcgggaatcagtcctgcgacccggattggaagatgacgaaggccgtgaagatcccgaccacgccggtgagccccagcgccaccgtcggcagcggggcggtcaggccaacgttctgaagcacccctttgccggtggtcagctccacggccaccacccccacgaagcccagcatcgcgccgcggcttagccacacgtccagcccgccgccgccgccgcccttggctccctgctcgcacctcacgctaagggccctcggcctcgcgttcctcctgctacctcgagcagtggggcgtgctgacgtcacggacagccggggaacaccattgcctgctgcggaggcgagacggaggcgaggagaagcggaggagaggaggggatgagccatggatggtggagcagagaaggg

SEQ ID NO: 30255 - DNA, 1210 bp, Setaria italica
  misc_feature (1)..(28): n is a, c, g, or t
  Peptide Sequence Number=SeqID_96229
nnnnnnnnnnnnnnnnnnnnnnnnnnnngtattattaagtcaagaaatgcattaacattaccaaggcaattagaagttagaaccaaagagatggactgtaacatgttggtgctacatgaaagaagtgcacagctggtaatatcagatatacgtagtaaagaacggaagaactagctgcatgccattcttcacaattctagcaacaagaggatcagcatgtcttaagtcttaatcacagaggttgtaagcacaccaatacaaaatgaaactaaaggaagaacccaagcaacttatgctaaaacggaagctccatctctgttgagaaccaacggaggtgccaatttaccgccggattcttacgtcagcttgggtggtaggctgatagcacctcttgcagcaacgaatggggatcaactttcacgctattagggatgtggcattttcttgctattgctggtcaggataatttatcatatggatccaacaaaaatgtttctgaccagcaaccactattgcaatcttgcacaaaaatcaaaatgacagcaaataactcaaaggaaataatctggtgttctccgtgtcacatctggttcacctctcctcggagctggctcaaactgaataaatgtgtggttcctgcagtcatcaacctcaaggatggatgccatgttgccacaccggtaacagtaattaggtgcactgaatatggtcaccaccttttgttcatgtgcccagttataaccctccataaccaactgatgagcccgggcaacaagtttaagattgttggtgtgattaaactgttccgatatgtcttggccaaaagtgtatccagctcctcgaggagaaatgccccagccacatcgatcatctggatcagaccatagaaggtcacacataggtccctcatgagggacctcttgaacacgatctaagctacgaacactatcgagattttcaatggaaggagataaaccaccatggaggcagaaaatttctgattccaccaatatacaaggcgcaactactttttctccggtgtctgttaatacaaggcgccaactccctgagctccattcgcatacatggatgaattaaatgtctccgttccctcacagtccagcatggtaaaagagtctgcatgttagacatgcaaaccaaccaaaaacctccgcatgcattaagagtccttggtacatgcataccagcc

SEQ ID NO: 30256 - DNA, 999 bp, Setaria italica
  Peptide Sequence Number=SeqID_96230
taaaattgttttcttgtacctagtctaacctacttatttgtctaattctttgcacaaatatcaaaatgacagcaaataactcaaaggaaataatctggtgttctccgtgtcacatctggttcacctctcctcggagctggctcaaactgaataaatgtgtggttcctgcagtcatcaacctcaaggatggatgccatgttgccacaccggtaacagtaattaggtgcactgaatatggtcaccaccttttgttcatgtgcccagttataaccctccataaccaactgatgagcccgggcaacaagtttaagattgttggtgtgattaaactgttccgatatgtcttggccaaaagtgtatccagctcctcgaggagaaatgccccagccacatcgatcatctggatcagaccatagaaggtcacacataggtccctcatgagggacctcttgaacacgatctaagctacgaacactatcgagattttcaatggaaggagataaaccaccatggaggcagaaaatttctgattccaccaatgctgtcaatggaaaatagtcaaaaagatcagtgaagatcttccagacatttgcactgccatattttcgtaggcattcatcatagaagccatacacctgtgtgatctgtctactctcatggtttccacgaagaatagtaattcgttgtgggtaccgcaccttaagtgcaaccaaaagcgttacagtctcaacagagtaataaccacgatccacataatctcccataaataaatagttcgtgtctggacactttccaccaatccggaaaagttctacaaggtcatggaattgtccatgaatgtcgccacaaattgtcaccgggcttttaactggctgaacattgctttcatccatcaatatctccttggccttctcacacaatgctctaacctccgtctccgggtactcgggtcggtccaactttccttattttgtttagtttctttttgtttttcttttt

SEQ ID NO: 30257 - DNA, 1352 bp, Setaria italica
  misc_feature (1)..(75): n is a, c, g, or t
  Peptide Sequence Number=SeqID_96231
nnnnnnnnnnnnnnnnnnnnnnnnnnnnnnnnnnnnnnnnnnnnnnnnnnnnnnnnnnnnnnnnnnnnnnnnnnnttggtttttcagtgcacttaaaaaggataggagtgtcattctatgtcatacgtcttcaatgcaacaaaaccattcctggtgcaggcagctaattccaagtttccaattacaatgttacatccatatcgtgcacgtacgctagaatcaatgctgatttatttctcctgcgaggtcaggttccagatcctggatatacacatcgctaccatgacgagccaattgcctttgacagaaacttatcacgaaagagatagtgctgcaaatctgcgtagaaactggggaaccacggccatgtgaatgtgattctagcatccgaacgagaccaacaatagcccatcatgcctggcctgaaccacctgcaccgcccttcactacctcatagaccgccgagaagtccaggtcccccagccccagacttctggccttcttgaatgcctcgttcgcagctgcagagactggcatggagacggcgttctcatctcccagggccagagctaacctcatgtccttctgctgatgtttcagagggaacgcagggttgtagctgccctgcagcattgcgggccccttcagcttgaacattgggtttgcgatagcgccgaggtccaggacatcaagaagtgcctgggggctcaacccacttttgtcggccaaagaaagtccctcggacaaagaattcatcatacttcccatgaccatgttgaccacaagcttcatcttagctccatttccaatctctcccaaaaagaacgactttttcccaagtacatcaaatgcaggaactatttcatcatacaatgtcttgtccccggcagcaagaatgaccaattgaccatcttcagctggcttcttgctccctgaaaccggagcttcaacaaaagctccgcctttttgtttaactgcctcactaatcttggacgaagtcgcggcatcgacagtggacatgtcgatatagcctttgccatccccgatctgctcgagcacgccatccttgtcgaagacaacggatagggcggcgctggggtcggagagcatggcgatggtgtatctgcacttggcgacgacggcggcgggcgtctccccgacggtggccccgagcgcgacgagctcttggcacttggcgagggtccggttccagacggtgacgcggtagccgtggcggaggaggttggtcgccattgccttccccatgatgcccagccccaagaaaccgacctccatctcctctcctctcctctcctctcctctcctccgtgtgcgcgacgcagcaaccgcga

SEQ ID NO: 30258 - DNA, 308 bp, Setaria italica
  misc_feature (283)..(283): n is a, c, g, or t
  misc_feature (303)..(303): n is a, c, g, or t
  Peptide Sequence Number=SeqID_96232
tctaatttcttttcctttggttagttaacgttagttctgaacgagctgtcagtagtacttacggttcgatcgatgggaagactatcagtaagccttgttgagttcccccacagccgaagttgcaaaggttgacatgtgcaaggataggatggaattttcgtcaacgcacggaaatagtttgttgagcttacaatgtcgcataataagctggtggtgattctgttgctgctacattctatgagaacgatcagagcataagcgtgcgaaacaaaaaaaaaaaaanaaaaaaaaaactaaaaaagngaact

SEQ ID NO: 30259 - DNA, 1015 bp, Setaria italica
  Peptide Sequence Number=SeqID_96233
caagccacaatggaaagatatgtcaaatgtaacctagcatttcctctaaccttttcaaggagtatctggtcctcatatgctaatcttgtatcgctgttggatctcccgctaactatttctagaagaagaacaccaaaactgtaaacatctgatttgcgtgtcacttgtcctcgaataaaataaagtggagccaaatagtacagtgttcctgcaacccttgtgctaacatgtgttgcatttggtggaagaagctttgctagaccaaaatcagagatttttggggtaagatccctatcaagaagtatattgcttgctttgatgtctcgatgaacaatgtggggatttacaccgtgatggaggtatgctagcccacgtgcaatgccaaggcaaatatttactcgagttttccaattgaactggatattgctgtggttggaacctaggagcgtttgtgaaaggctattattttcaagatgattgtaaactaggattctttgatctccttccgcacaatacccataaagcttcacaagattatcatgtgagatgtcggaaattgccacaagttcattctgaaactcccttactccttgtcttgactctgacgaaaggaccttgacggcaataattgttccattcttgagctgtcccttgtaaactgaaccaaaaccaccctcaccaatcttgttcgatttgttaaagtttcctgtggcccttactaactctcttataggtgtatttttttatacttggaccaccagggacgtcttcattatgattggaacttggttggcgcgttgtccttctcttcttgcagaagatagagaaacaactcatttgagattctcaaaatattatatctgccgtagtgctatcagctcgataacttcagcttgcacttatgatatcaacagaagcattttactgctgctcattgacttatatcatgtcctgaaccgccgccgccgtgacccgggaggatgaaccgaatccactccaatccagccgccgcgac

SEQ ID NO: 30260 - DNA, 518 bp, Setaria italica
  Peptide Sequence Number=SeqID_96234
cccctccccttcccctcctttttccacccgagccccctatctcttcagaattggactgagggtttatttcacgaaacgtcaggggtttttttttgcaaaatgaccacgacgtacaaaaatccggggcagaggcgttatataataggtaaagatagggttataggaggctcaagcggccaggagatatgcggacgtctctctcctccggtgctctgttctcttatcttctccactcctagccctcttctctaaggatgagaggctctcttggatctgttcttccccatggacgggccacgtctacagaggcctcttatccatggcgagtccagggagtcttcttctccatgggcacgtccacggatgagaggctctgttcccgcgtccacggaggagatccctcttttccatgggcacatcacggaggagagtgttcttctccatgcctgccacggttggagatcgactgtcagacagtcagatgtgtaccggatctacatgctgtagcagccaacaag

SEQ ID NO: 30261 - DNA, 437 bp, Setaria italica
  Peptide Sequence Number=SeqID_96235
gatagttggaactcctatggattaaacatggcctccactatcactatttttttatattatatatggactaatcatttccaaattgcaatatcttgttacctctaagggcctcaatccaagggttgctatgctcttaatttgaactttatgtaattgtctgatcttacatttttgttatgaattttcttaaaggagcaaagtgaggttcggttttcttctataagatgggcaacggcattgtatgatacacagcactgcccaagccggtacatttgcatgactggagcttcagatgttaaactggacataagggaaatggctctagctggcctgaatcttttaaatgatgggaggcaaccatctgcaggatctgttgatttcaactatcctgatgttacagagatgataaattatatctgccatcaacgacctcagtt

SEQ ID NO: 30262 - DNA, 1116 bp, Setaria italica
  Peptide Sequence Number=SeqID_96236
tgctatgaactttgcacctgagattgtctactctctttatttatctgctgcttcagatagtcaagaatcagtttctaagaaaggagaggagttgttaaagcgcaaagcatcagcagtaaatttagaagatcccaacctcgtcaagaaactgttcacgctgttcaatggtactgtgggtgcagaaaatatagctgcagagctgaaagtttccccagcacatgcttcgttgcgcatgcggcttatgagtgttttctgccgatccattgctgcagcgaatgcatttccacacacacttcaatgcatctttggctgcatctatggaagcggaactacttcaaggctgaagcagttaggaatggagttcacggtctgggtgttcaaacatgcagtaaccgaccagctaaagttaatcggtcctgttatccttagtggaatattgcgctcccttgatggttcttccactacagaaacagattctactggtagagataccaaaatatttgcataccaggctattggtttgctggcctctcgcatgccaaatttattcagcgataaaactgacatggctatacgactctttactgctttgagactggaggatcaatctcttcgtttgacgattcaggaggcggccacttcccttgctacagcatataagggtgcttcaatgagagtactgaaggatcttgaggtgcttctcctggaaaattgtgaagcggagcaaagtgaggttcggttttctgctataagatgggcaacggcattgtatgatacacagcactgcccaagccggtacatttgcatgactggggcttcagatgttaaactggacataagggaaatggctctagctggcctgaatcttttaaatgatgggaggcaaccatctgcaggatctgttgatttcaactatcctgatgttacagagatgataaattatatctgccatcaacgacctcagttgctggattctgatgagcagagaaatggaaaattgctattccccacaaaaacatttctttcaatgatcaagtttttgatgaagtgctttgaggctagtgatagcccagatcttgtgcaagaagattcatctcattctccggtagcaaatat

SEQ ID NO: 30263 - DNA, 653 bp, Setaria italica
  Peptide Sequence Number=SeqID_96237
aaaagaaaagaacaatgctcaatgttgacacatggcatttgctggagcacatatttgaatctataatttgctgatggtaaccacaaaactgtggtactttagatgtatccacacccattaaaatataattgagaggaaggaggagagcgtgagccgatctggatgccttcagcaattgggttagaaccattcttgatgatattgattgttgtattattttcggacatccagatcagtcccaagccaagggaaaatgagaccttgtgtgcttcttctctatctttatttcatcataatggatattttgatggtcatactatgttctatcaaattactataattttatagtgtccatcaaagaattatcaatttagagcatgctacagaaaatgccacaacttttctcatgaacaacaaatgccatgcttttgcagtgctctaacaccagtgctgtctatattaaagctcccctgtcccatgtgacaaagcaattttactcctaggagtggatgcctccatcttgttgggacatgtgtgatattaaaaaatctagaaaaaaatgtagatgtgctctcctgcaaatttgttgggacttatggtcatatgtgggacattgagaaaagataatggggacaaaaatgtgtaaccaatta

SEQ ID NO: 30264 - DNA, 422 bp, Setaria italica
  Peptide Sequence Number=SeqID_96238
atcataccaacctctttcgcctttgtgaagagttttgaggccaaagcagatgacatatgtacaaggaagaccctagtttgcattgtcatcaacttatagagttccagagtgatttgttcactcgatgctgacagagggatcacgctccgatagggaatgcggacatcaatttcttggagggcatcaatgagatatggaatgatacctttaccatactcagtatcttcgtaaataggcacaacctgtctccacccataggctttgattaaggaggcaatggtattcacttgtgcagagtcattcaatgttgcacggacaaagtatggaagactgccagaggaaatggacgggcttgttgctgtgaaggatatgacagggacctgagtcttattcccaagatctgatacaaaagaggttgcgaa

SEQ ID NO: 30265 - DNA, 487 bp, Setaria italica
  Peptide Sequence Number=SeqID_96239
cttttgtggaaactcccatcaaagtcaccatagaactcaattgcatcattagcctgtagcttttctgcccatccatttaggacgtacggatcattcacagctacacagataacagagtcaatcccttttgctttcaacttatcaatgttgttcttgtaactaggaacatgtgcttgtgaacaaactccagtatatgcaccaggcaagccgaagatgaccaccttcttcccgtagaagatgtccttgagaggcgtggtggagaacttggtggcgacgccctcgtcccaggaccgcgccttctgcagcgacacgccgggcgccgctgagacgatgtcggaccccaccgaagcgaatccccttgccgcgccccacagcgccgctgccgccgccgcggagcccctcgccctcctcgccagcgccgacgccatggaatccttttcccctctctctctcttgacgtctcaactcaactgcgagaagatgggag

SEQ ID NO: 30266 - DNA, 893 bp, Setaria italica
  Peptide Sequence Number=SeqID_96240
ttttgagcatcaaatactcgggtccttcactctccagttaattatagtcaaacacgtagactgctcaattttacctcggacagtaatattgtaaatgaccgttgattgattaacttcataaaaataatctcataacactccttataccatagtatggaagtaacgcatctaacatctttacaagggtaaaaggagatttcatttattcgttgcagcacggcaagtgtgcttcatgagcaaacggaagatcacttgtaaatatcaggtccattggtaagctcagatctggtcaaggatcacttcggcactagaaaccttgaaatcagatggtgcttcctcaacattgaaagacttgatcttgccattgtcaacgaaagccgaccatctgtgagatcggcggccgagcaaagcagcagataggtctatctccaaatccaagcttttgtggaaactcccatcaaagtcaccatagaactcaattgcatcattagcctgtagcttttctgcccatccatttaggacgtacggatcattcacagctacacagataacagagtcaatcccttttgctttcaacttatcaatgttgttcttgtaactaggaacatgtgcttgtgaacaaactccagtatatgcaccaggcaagccgaagatgaccaccttcttcccgtagaagatgtccttgagaggcgtggtggagaacttgggttcgacgtacgtcccttcgttccctaggtaccgtcgctttgttcttagttcgttacttacgttccgggttcaggaccgcgccttctgcagcgacacgccgggcgccgctgagacgatgtccggaccccaccgaagcgaactccccttgccgccgccccacagcgccgacgccatggaattccttt

SEQ ID NO: 30267 - DNA, 268 bp, Setaria italica
  Peptide Sequence Number=SeqID_96241
cgcttcttcccccactaccagcacgccactgctcacacttgcagcggagaaggggagcctccaatccaatccctcgcaaatccgaaccatttcgccgaattcgaacaccgactcccccgtagatggccgctcgctccccgattcgtccattctgagcagccggaatcggttcttgccgctccccgatctcggctactgctcattccgtggataattttgttaaaagctgcaactttctcggttttgcttgagggagcacggtaatcgg

SEQ ID NO: 30268 - DNA, 284 bp, Setaria italica
  Peptide Sequence Number=SeqID_96242
ccatccgcaactctgagctccttcactgcacggagaatgagtgatgaaaccaaactcgaagcttttggattttaggtatccactgaccagattcttgaaaaatacctttcttgctgaatcccaaagcgtcaagcaatgtatcaagctcatcaacccggctgggaacacctctccaagcatacaagaaggcgagggacccaaagctctctacgtctggcgagaccccaatggctgacatagtctccaggaccctctcagcatctgccaccgaaccaatcctgcgg

SEQ ID NO: 30269 - DNA, 626 bp, Setaria italica
  Peptide Sequence Number=SeqID_96243
attattattacctttctatcatgtaagatattccaaaagaaaaaaagaaataagatttaaagagtagatcaagctcctggtctccaactgttcagtgagtcgggctattatttaatgatacaacactagttttacattgtcctgcaagtacgtcttattactatgaacttctctatatctgaggttaggctgctatgcagtcttgcaaaattggttccattacacaaggatggtgaaaattttttaatgctcttctttatttctggaaaatatgtacaatgattagtttagtttctcattatgtcgttcattaatgttttcggtgcagcaatattagagaattggatggtgcttcactagttctgaagcactccatcagtcccttgtgtatatgacacggtagaatgatactaggaattttacattgtctagatgtgaccctagtaatccattcgacactaggtccgcttctctatcatttcaatgataatcttctctctatagtgcatgcatgttcacatgatactgctacttccacaatcttttccgtacctgcattggatatgactcctaaactgttgcaggaaaggggactactatcgttacttggctgaatttagcactgg

SEQ ID NO: 30270 - DNA, 376 bp, Setaria italica
  Peptide Sequence Number=SeqID_96244
tccacctcgcttcctcctccgcgcccccttcgccgaggccacagcgtgagcgtataaagcgccgcccccaccgcgcgcgtccgcaccgccaccgccacctccacctccaacgccgtcgccgccgcccgacccctctgctagcgcgagacgagacgggaccaatggcggccgctgcgtcctccacgctgcacggcgtcggcgccgtagcctccgccaagcccagatccgccgccccagcggcggcgaggaggagcgtgcgcgtggccgcggcggcgaagggaggagcgggctcggcgcgaggcaggctggtggctcgcaacgccgttgcagcgaaggcggatgaggcggccgccgaagcgggatccaagtctggcgg

SEQ ID NO: 30271 - DNA, 375 bp, Setaria italica
  Peptide Sequence Number=SeqID_96245
aactttacctgggactaccttgatgccccatcatgtgcttgtcatcacaggatgtgccgacgccatatgcttcaaccctggaggatgcgaccgtcgtgcagcctgcccagatcgtggccgcggttgagcaaatctgccaataggaagatgacgactgtgttggaaaatcatcgggttattatatcgttgctgccataaaagttttctgtttttgccttgtagctaggcattcgttgcggtacaggcttatagccgtcctgttcgtattttgaggtgtatgcttgaatgcattgctgcatggagttgatctaattgtcccttttctgcgagttgctgattgccgaatgctatggtttgaacatgtcattacttact

SEQ ID NO: 30272 - DNA, 1495 bp, Setaria italica
  Peptide Sequence Number=SeqID_96246
ttgttagttcttactttcttaacttaagttcgtttcttttgttagtttcttatttactttccttagttctaatttccttggtcctggcgccgtagcctccgccaagcccagatccgccgccccagcggcggcgaggaggagcgtgcgcgtggccgcggcggcgaagggaggagcgggctcggcgcgaggcaggctggtggctcgcaacgccgttgcagcgaaggcggatgaggcggccgccgaagcgggatccaagtctggcggccatgagttgctgatgtttgaggcccttcgtgaagccttgatagaagagatgaatttggatccaacagtgtgtgtcatgggtgaagatgttggtcactatggaggttcatataaggtgaccaagggcttggctgagatgtttggagatcttcgggttcttgatacacctattgctgagaactctttcactggcatgggagttggagcagcaatgaaagggctcaggccagttgttgaaggcatgaacatgggtttccttctccttgcctacaatcagatctcgaacaactgtggaatgcttcactacacttcaggtggtcagttcaagatcccggttgtgatccgaggccctggtggtgttggtcgtcagctcggtgctgagcactcacagcgtcttgagtcatacttccagtcaattcctggccttcaaatggttgcttgctctactccttacaatgcgaagggcctgatgaaggcagctataaggagcgagaaccctgtggtgctgttcgagcacgtcctcctgtacaacctgaaggagaaaatcccagatgaggaatacatctgctgcctggaggaggctgagatggtgcgcccaggtgagcacgtgaccatcctcacgtactcccgcatgaggtaccatgtgatgcaggctgccaagaccctggtgaacaaagggtacgaccctgaggtcattgacatcaggtcgctgaagccgttcgatctgcacacgatcggtaactccatcaagaagacccaccgcgtgctgatcgtggaggagtgcatgcggacgggtggcatcggcgccagcctgaggtccgccatcattgacaacttctgggactacctggacgcacccatcatgtgcctgtcatcacaggacgtgccgaccccgtacgccgcaactctggaggacgccaccgtggtgcagcctgcacagatcgtggcggctgtcgagcagatctgccaatgatcgcagtatcacgacattgctaagttacatcgtttgtggattcgtaaacaccgtgttctatttgttttgctatgtagcgacacttgattgtggcgtagacatatgttctatttcccagtggtgcatattttgcaaaattcaatgccctgtgctggtccttgttctccaatgttaggtttgagcatttgtttgccactttgccagtgatcagttcccataaacattctgggggtatagtgacagcctttaattacgtta

SEQ ID NO: 30273 - DNA, 353 bp, Setaria italica
  Peptide Sequence Number=SeqID_96247
cgtctccaatctcgctcctctcaatcaacaccattgaattgcttggcagattcctcgtcgacgacacgccgatccgggcgtacaagaacgaccgggcgcgcggcgtgccgttcccgacgtggcagagcatgcgggcggaagggagcctctggaacgccgaggagtgggccacgcagggagggcgcgtcaagacggactgggcgcaggcgcccttctacgcctactaccgcaacttccgcgtcacgccgtgcgtgccgtcccccggcgtcgcctggtgcggcgacgagccgccggagtcgacgtggttcgaccagcggctcgacgcggcggcgctgcagagagtgcagggcgag

SEQ ID NO: 30274 - DNA, 972 bp, Setaria italica
  Peptide Sequence Number=SeqID_96248
tttatacggcattgcagcaatttttttctattcaaaacaacacaatattatcgtacataacgctcaaaattgttcaagtacaatactgagtgcagacgtgtgaagcaacagcgacaatacagcgcaagatttaccgcctgaacgcattgccctcagcatcacggccaccctgagagtaaaaagcacggcgcctgatgctctcttcgatcgtggcgctgccacccttctccgttccaaatatgctcttcttttcctcttccaagaagttctttcctttgaactggttggcgctcacagttgctgcttctttggcatcatcatctgcagctttcttcagcctcttccatctctgctcctcgtggacctcagcgtcagcctgcatctggcgcagccgagccaacctttcctcttccgacatatggtggacgccaccccgtcgacggttgaacggaggaccattgtttctgccatgttcactttcttgccttgtctgctctcccgagccttggacagcgcgcgaatggtgttcagaattggaatttccagttttgttcccatcctccattcttttgggcctagggtctggaccgtcatactttgagtatgcatgatggcggtctggtggcgaatgctgtctcctcttcctatcatcagcatccaagcgatcatatcgtggatggtcatcatgccatcttccccttggttcctcatcgtcctgccgtcttctccttggttccaaatcttcctgccttcttcttggttcatcgtcactttgccttcttctcctcggttcatcgtcactttgccttcttctcctaggttcattgtcatcatgccgtctcctaggttcatcatcatcatgacgttttctccttggttcatcatcgtcatgccgtcttctccttggctcatcatcttctgacacatcctgccgtcttctctgtttttcatcattgtccgaatctgatgaat

SEQ ID NO: 30275 - DNA, 1457 bp, Setaria italica
  misc_feature (1421)..(1457): n is a, c, g, or t
  Peptide Sequence Number=SeqID_96249
ctgcgccggctgtcgcaggagcgcgaccggtcgtggcagtcggagctggaggccctgcagaagcagcacgccgcggactcggccgcgctggccgcggccatgggcgaaccgcaccgcctccgcgtgcagctcgccgccgcggcgcgcgccgaccaccggcaggacgtggtggaggcgctggccaccatcgacgagctcagggtcaagctcaaggcgagcgaggaggccgaggcgcaggcgcgcgccatgcacgaggagtgcaagcagcagctggaggcgagccgggctacgatcgactcgctgctgaccgacggctccaagctgatggactccttcagcctcgtggtcaaggagctcgaggagtcgcgcgccaaggccaaggctctcgaggaggagatcgccgaggcgtcgtcaagagccgccagcgagcgctgcaactgctcgggctcggaagccgccgagctgaggtcggagttggaggccgcggaggccaggtatcaagaagagaagatccttagcaccgtggagacgcagtgcgcgtacgagctcatggaccagataaagactgaatccgacctgcggcacggcaagctcgccgcggcactcgagagcgccaagtccgaggtcatcttcctcaaggcgagcctgttcgacaaggagtccgagctacggcgcgccctggacgcgaaccagaagctgcaggccgaggcgagagcggacacgtcggcagacgcgctgaaagagcagctgcagggcgcgctgcaggagaacgggcagctgaagcaggagctacgccagtacgagtccgagaagggctccgcgacggcgaggacgccggaggccgacgcggcggaggcggcgaagaaaggggagatggagaccgagctccgccgcctgcgggtgcaggccgagcagtggcggaaggccgcggagacggccatggcgctgctgacggtgggcaagggcgggaacggcaaggtcgtggagcggagcgagtcgtgggagggcggcaagtacgcgggcctgtgcgaggacttggaggacgacgcggcggcgaggaagaacggcaacgtgctgaggaggatcagcgggatgtggaagaaatgaggggcgatcggccagctgagcggcggcggcgtggcttgtaccgctgctccacggagccctgggtctctctggtgtaattgttttgccgggtcgtgtggtgtaaaaacatagagtgctgtactggttggggtaaaacatgctcatatcatagctgtattatacaacgtggaatatggaggatcaattcatccgggtgtgacaggtcgtggtagggatcacttatagttgcattgaacagtgattagccatcaagaattcgagttgatgttttttttccctttgaaaatggaaaactccattgattcttataaccnnnnnnnnnnnnnnnnnnnnnnnnnnnnnnnnnnnnn

SEQ ID NO: 30276 - DNA, 491 bp, Setaria italica
  Peptide Sequence Number=SeqID_96250
acatggtcaactgatcattagaattaaaaaaaaatacctagtacgaatcacctgtgtgagggccttaacattgtccctgctgagctggacctcaaggttagggtcatcggccagctgcagcagcacgtccaccatgtctcttaccacgaacccctctccctcgagccgtcgccgctggttgtgctcgtccaggatatggttcagaaactggtcaaacatactgctcgccctcttcatcctcccgacgtacccctgcaggtccagccacggtacaaaatcaccaatgttaaaaacaccattcagcgcgaacaactcatccaccatctccctgaattctgccggcgtcatcctcggcggcgaaccatcctcggcggccgcctcctcttggatgtacttcatgccgagaaccatgcgggatatcacgccgagcgtcatcatctgcaggtagcccctgagccgcacgacgcgcccggctccggacgccgcgcgca

SEQ ID NO: 30277 - DNA, 468 bp, Setaria italica
  Peptide Sequence Number=SeqID_96251
gggtaatgctgagcctctcgtttgctgcctgcgatgcttatgcaaatgtccaggattttgggaatcaactgaataatcacttgtacagtgggaatagagactgacagtacacgaaacgttagcattctgccaagcaacttgatacgacatgcacgataagttcatgctagatagtagtctgcttggtcttttagcaaattcattccttctaataccacttcacaattctttttggtgttagtgttaaagatttagattacaggaaatgtttgtcaaaaatacacatactatttcactacatattttgcatgcatatcaaaggaatatgagctcataaatgtttgacctgtataagccaagggcataaaggacttttctcattagtgtactgcaaataaagagcaccacatctgcgcaaggatgaatttgacccaaaaacaaagttgagggactaaattggccgatctg

SEQ ID NO: 30278 - DNA, 510 bp, Setaria italica
  Peptide Sequence Number=SeqID_96252
acgtggcgcgatgtgcgcgagcgctgaccgctccagggtggcggtggtgttgagtatgagcgcccgcgccttgctggcgtcagcggagagcttggcgagcgcgcgcagcgccgggctgacgtcgtcggtgtcgtttcggcggcaatggcctgggagatctcgtcgccgcaggaagctctccattcccggaacgccgctcaccggctcgtcgaggtcgctgccagcggggaaggggagctcgccgagctcgaagagcttgggcgcggacaggaaggccaagaagctgccggcgctggccgtgcggaagacgatcgccgggacgcggagctcctcggcgacgtcgatggcccaaggcagcaagccatcggcgacaaggcacgtcaccggcgggaagccgccggtgaggtcaacgccggcaccagcagcaaggctggtaccaatggacgacggcgcgagcagagcacggtacgggcctgtggcccccgccgccagggacttgtagagctccgg

SEQ ID NO: 30279 - DNA, 841 bp, Setaria italica
  Peptide Sequence Number=SeqID_96253
ctcgtcgtcttctttccgtccatcccatcccgggcggcggcggcggcggcggaggtgagagcaagagatgtcgtcctcggggacagcggcacagcatctgccgcggacggaggcgcggtcactatctgggcacgagggggcggtgctcgcggtgcggttcaaccgcgacggcaactactgcctgagctgcggcaaggaccgcaccctccgcctctggaacccgcacaccggcgcccacgtcaagacctacaagtcccacgcccgcgaggtccgcgacgtccattcctcctcggataatgcgaagctggtgtcgtgcggcgccgacaggcagattttctactgggacgtcgcctcgggtcgcgtcatccgcaagttccgcggtcacaacagcgaggtcaattcagtgaagttcaatgagtacaatgctgttgtagtctcagctggttatgaccgtacggtgcgtgcatttgactgcaggtcacaaagcagtgatccgattcagactattgatacttttcaagacagtgtaatgtcagttaacctaacaaagacagaaataattgctggcagtgttgatggtactgttcggacatttgacattcgcatgggtagggagactgttgataatctggggcatcctgtgaactgtataactttatcaaatgacggcaattgctatttagctaactgtttagattctactgtgaggcttctagacaagtcatcgggagaactgttacaggagtacaaggggcatgcatgcaagtccttcaagatggattgctgcctgacgaatgatgatgcattcgttgttggtggatctgaggatggttatgtttct

SEQ ID NO: 30280 - DNA, 380 bp, Setaria italica
  misc_feature (23)..(23): n is a, c, g, or t
  Peptide Sequence Number=SeqID_96254
aatcctaattcctaaatgtaccncaaaactgcagcaatcttccatccatgttcaaatatggtatcttccaaagaatgtgtggacacacatggcaatgtgatcaaaacaagtggaccgaacttttcgtatgaaaatctaacctgatcataaatcaaaaggcttcggatacttccaaaaggacctatgagcttttgtccaagtacatactgaaaacatcatgtgatctaatctaacacaatactttgtgtgcacttgtgacatgaatgcaaatgcaggaaaaaaggctcccgagtggcccagtgcatacgtacagaatacacagcacatcaaacaacacaaacagtcaaacactcaagtacaaagcagtttacttaacattg

SEQ ID NO: 30281 - DNA, 251 bp, Setaria italica
  Peptide Sequence Number=SeqID_96255
tcgatcgatcgctcctccgcatcgcatcgcatcccacccattccctcgtcctcatcggctccatcctcctgccgctctttggaggcgggctctcgattcgatcgagcgggacggaacgggaggatcggcgccgacaccggagccggagccggaggagagagggaagggccatttcctcctctccccgcgcgatatctcatctcgagttctctgagaaatgccgtgtgcacttgaagtaattgactcaaggg

SEQ ID NO: 30282 - DNA, 490 bp, Setaria italica
  Peptide Sequence Number=SeqID_96256
acttctgtagtatggacatctggatcaggcaattgatgttttagtagatgatggtgagtgagaaatgctttcctgatatagtgacatacaacacacttctgaatgccatctctaaaagggggatggttgaagaagctctcgggatttttcattctatcagagaaaatggatgccaggtggttcgtatcacatacaacaccctcatagatgctttagcgaagaagggtgaggttattaatgctatgactctgtttgatgaaatgattggtgatgggatcagtcctgatgatgtcacttatggttcacttgttatgggattctgtaagaagaacatggccaaggaagcactggagtttttgaatcagatgcttgctcttggtttttgaggtttaaagcaactacattttccatgatgatccaagcattgtgcagagagtgtaaagctgaagctgctgctgaaatactaagagtaatggtatcaaaaaatatt

SEQ ID NO: 30283 - DNA, 840 bp, Setaria italica
  Peptide Sequence Number=SeqID_96257
tacatagaacaaagacaattgctccaggagcacaacacgtgaacacataatcaatcatcagccgataaccatgcttattgaggtaatgtgcgcgaagcatggcacagaaccacggtctctgaacaatgctgctctctgctgctttgtgatgtgaggcttaaagatgaaatgcatagcacgaccccactgtgtccattctatgccaagcatcatggtgtggtactggcaaacagtcctcttccgcaaacaagtgtgacctcatcgaagccatcatgcacactgcaaaacatccagaaattatctgctgtagctgacttgaattttctaccactttcataactattgagtgacttgaggatcttacaatccagcaactagctacttaaacaaattgagaatcttctttaaggaccttgcactctactaactcctggtgtagcatttgggcctctttaactcgacctgatttggcaactcttgtcactatagataagtaaaatgcactcctgtggttaatattttttgataccattactcttagtatttcagcagcagcttcagctttacactctctgcacaatgcttggatcatcatggaaaatgtagttgctttaacctcaaaaccaagagcaagcatctgattcaaaaactccagtgcttccttggccatgttcttcttacagaatcccataacaagtgaaccataagtgacatcatcaggactgatcccagcaccaatcatttcatcaaacagagtcatagcattaataacctcacccttcttcgctaagcaatctatgaggtgttgtatgtgatacgaaccacctggcatccatttct

SEQ ID NO: 30284 - DNA, 566 bp, Setaria italica
  Peptide Sequence Number=SeqID_96258
tatcgtaactgttgccttaaagccattgagctagttgcatcagggaaagtttgttgcttcaaagaaatcaagggaggatggctgaaatctttgacaaaatgaaagtggagttcgtcgaccaagatgagtgtgtgcaggttgttgccgacaacatccgtggcaccggtgaggttcctgaaaggtatgtcaggtctgagattatgtctgatcctgccatcgacgatgccaagggttacaatctaccggtaattgatatgtcgagattgctgaaccctgagttttctgaggaggagactgctaagcttggatctgcctgtgagcactggggattctttcaggtttgtgttctttcagactacagcaccttttaaagaatgcatccccacaaatttatctcactgtctgtctgtcttctgtctttctgtaccatgtcattgtattgcatctgtccctgtgatgtttatacactctgtattttttttgcctcaaataacatttcttgtttcacttaataaaaaagtaaagagagatccattatttgctctgccataccaccattcactatt

SEQ ID NO: 30285 - DNA, 688 bp, Setaria italica
  misc_feature (651)..(651): n is a, c, g, or t
  Peptide Sequence Number=SeqID_96259
ggcaatgaagaggcaccagctactggaggacgctggtgattctcgttgttggccggtggggggaggtacactccctcctaaaaaatactcaaactgaacgtttgccttgttttcttaatgaaatggggcagggcatgcctgcctgtctgtctaaaaaaaaaattgcttctgttgtgtgggtcttacatctaaatagtgctgaggcttactggtacaggcaagaaatctacaattcagaatggtatgtgcctgatgttgtggttatgcttgctcctactaaatttaatctagatatttacattactgttctgcttctgtttttacacacctgacgatagacattttacttcaggtgaagatcatgtaggccctttggaagttcagggaaaggatggagggtggagaaacaccagaagctaacaagctgtgagtgtaatgctatgattgatttcaagagaaaagacgatggtacataccagttgctcattttgatgaggcacacaccatgtaagagactgttaatcacgtcgaagagtagagcaagatgccaagttaccaacattgttgttgtaatgtgttacttattgtaactgttagcaatgtaaagagtaatgtgtgcttgattgtatgtactgtgtgctgccaaaaagntgcatttacatgtaagtaaaaaaaaaaaaaaaaaaaa

SEQ ID NO: 30286 - DNA, 847 bp, Setaria italica
  Peptide Sequence Number=SeqID_96260
caaaaccgatccccaatttccaccgatgccgagctaacatagagctcgatccccagcggtggcggccaccggccagccatcagctccgccggcgcggatcttaaacgctgccaaggccaagcacccccgcgcagacaatggtgactatgacgtcggtgaccttacaagggtacggaagaactactaaggcgaataagaagcacgatggtggtggctgcatcggcggcgttggactctctcgtcctcagccggtgctgtggcaggacatgaaactggtgttaaggaggatctggaggtgtttcatgacatggaaactgatgtgcaaagaaagtttcggagagggtttcgaccaatggtgtaactacttggaggaggtgattgactcttcctgaagaagatcaaagatggggatagtgaagcgggaactctgaatcatcttccatgaccaaaaagcgagcacaagctagggaactcaagtctgtattttctctattttgtaaggctttaaactgatgttgtgcggcaatgaagaggcaccagctactggaggacgctggtgattctcgttgttggccggtgggggaggtacactccctcctaaaaatactcaaactgaacgtttgccttgttttcttaatgaaatggggcagggcatgcctgcctgtctgtctaaaaaaaaattgcttctgttgtgtgggtcttacatctaaatagtgctgaggcttactggtacaggcaagaaatctacaattcagaatggtgaagatcatgtaggccctttggaagttcagggaaaggatggagggtggagaaacaccagaagctaacaagctgtgagtgtaatgct

SEQ ID NO: 30287 - DNA, 247 bp, Setaria italica
  Peptide Sequence Number=SeqID_96261
tcatcgccaaccttcggcgcagggatgccaagaagatgagctttgttcttagagcgtcggacttgctcttaacggacgtcgccgccttcttcaggaggttgggggcggctcttgctgatcctcatctttgatgtggagggcttatgaggctgcttgtcaagaagatttactaaggagttgttgtgcctcaagcttggcacaagtgagtagtatgtcagtgaattcctgagatgagatagcttgtaag

SEQ ID NO: 30288 - DNA, 325 bp, Setaria italica
  Peptide Sequence Number=SeqID_96262
gctagctaggcagtaggcactgatcatgccggcgatggacggcgacgacctcacgagtcaagtgaattgggtggcgtggcacctgacgcagcagctggaggaggctgcggcgacggagcagcaccggatcatggtgaacacccaccccgtgtcccgcgtgtcccgcgtcccggaccacctccgcgtccataaccgggacgcctacacgccggggctcgtcgccatcggcccgctccactccaaggacgccgagcgccgcctccgcccggggaaccagctcaagaggacctacctcaacagcctcatctcccgcggccaccccgac

SEQ ID NO: 30289 - DNA, 261 bp, Setaria italica
  Peptide Sequence Number=SeqID_96263
tgcaccccttcctgctgacggtggccaagggcatcgccgactgcggccgggcacgcgcgctcgtgctcaacaccgccgcgtccctcgagggcccggcgttggcccacatctcccgccacatgcgcgacgtcttcgccattggcccgctccacgccatgccgtcctccgccgctccggcggcggcggccgggagcctgtggcgcgaggacgacgggtgcgtggcgtggctggacgggcacgcggacaggtccgtggtgtacg

SEQ ID NO: 30290 - DNA, 242 bp, Setaria italica
  Peptide Sequence Number=SeqID_96264
cagcaaggtgcccttgtcttgggtgtcacgaccgtacaacatgtacaattcgtcgaggaacgggggtagcttagcagaactcgtttccccttcattgtcatcccaaaagctggaatcagcagcaacgctaccagtttctttgtcacggcctaaaccagattgggcttgcatgtccttccagctctggaatgctctccgcatggcgttcagcttgttctgcagcttgtctttgtcttgtccct

SEQ ID NO: 30291 - DNA, 412 bp, Setaria italica
  Peptide Sequence Number=SeqID_96265
tttagaacggagggagtacaatataagatcatcttgtgaaattcaagaatactgggagaggtactccggcagattgattttcccaaccccttttcatctcctctagcatgtgggtccaagatgtcagtggcacaatcaactctccctctcttctgtctttcctccgccggaagttcatcgcatgcaccgcgtgcttgagcaccgccaggggatccacggccggcacgcaaaagcaattgcagtattaccagttgttgatgatcatgaagaagacaagatcgatgatcttttttttgaacaaaagacaagatcgatgatgatcaattgaattcgatcgatcgatggactcaatgacaagctagcagcagtcaaggcctgctcctccgtcgccacgtccgccatgaggtgacgg

SEQ ID NO: 30292 - DNA, 604 bp, Setaria italica
  Peptide Sequence Number=SeqID_96266
gcgcgaaaacaacgagacttgcaagccaacattgtattccggtcatgcacttctgtagttttgttcaaacagacgagtagcatatgcacaaatctgatagtgttaaggtaaatcactagaactccatggacacataggttgcagagtaatcgggcatcttgtgcagtcgccggaggatgctctcggcggcctgcttggtgctcgcatcccctctgtggaaggcactcaccagcgccgtgggcagcatccggtcgccggtcacctccctcacgcaccggtcgtcgccgtgctccaggagcttctccaccaagcagaagcacttctgccacagcacgttctgccggtgctgcctcagcccgcccagcacgtgcgtcgccgcattgagctcagagagagcagccacgctcttctcgacgtccaccctctcgtcgaggagagtgcacagcgctccgagcgcagcctccaccacccggatgttgtcgttctcgaggcagcccaggagaccctccacggcgcccgcctcgaggaggcagaaggtcgtcgccggggaacagactccccggtgcaccaggcaaacgttgacctggtggtttgagctcttctt

SEQ ID NO: 30293 - DNA, 347 bp, Setaria italica
  Peptide Sequence Number=SeqID_96267
gccgccgtcccctgctcaggcgccactggcgcagggcagggatacatatggatgtcgcaccggaagcccggcagtgacatgtgggagctggcgatgcggagcaagcagctgtgggaggagctcgcggccgaggttgacggccagggcggcggcggtgcgcgggagaggctgggttggatgaggacaggaagcttgctagttggcagaacttcggaagagctggccacattgcaggaaaggaccaatgctctgtctcaggctggcatacatgcggaattcttgtctgcatctacactacattcgttagaaccggcacttagtgttgggaaagatggtggtgctctgtt

SEQ ID NO: 30294 - DNA, 559 bp, Setaria italica
  misc_feature (1)..(24): n is a, c, g, or t
  Peptide Sequence Number=SeqID_96268
nnnnnnnnnnnnnnnnnnnnnnnntttttttttttttgcaaagatgctagtcaaatgcatccatcatgcaccaagtacaggttcttctccattcaacaaagatctccagtcaatttcatgcattgatcatctccaagtcttgaccatgtcctagtgaattgttgacttatttgatggtatgcagccagtttttccttaaaagttccaagcaccaacatgcttgtccattcaccgatcaacgaagtacattgacttattcccaggagcaacatgcttgtccattcagcattcaccgatcaacgaagtaccttgacttattcccaggagacgagccagctgtttcctcatctcgccgccggcacgcctatccgcttcccggccgtgaacccgccgtcgatgacgaggttgtgcccggtcacgaacttggcctcgtcggacgccaggtacacggccgccctcgccacgtcctccagctccagcaccgcgccgcggagctcgctcatgcccgtctccaccattcgcttcagctgctcgtcggcgacgcccgggtgcatcctcg

SEQ ID NO: 30295 - DNA, 232 bp, Setaria italica
  Peptide Sequence Number=SeqID_96269
cgcttccgcttcttcttcctcgtctccttcgtcgtcggaggatgaggaggaggtgtcttgccgctgctcctcttcgtcggaggcctcctcgacggcgcgccgcccgccgctgcggcggcggcggcggcggttgtagacgaactgggtgcgggttgtggggcccatgcgtcggcgacagaggcgaagcctcgggaggcgggaatgggaagatgtggcgagcaacggggagacg

SEQ ID NO: 30296 - DNA, 250 bp, Setaria italica
  Peptide Sequence Number=SeqID_96270
ggaaagttctgtggtgcacctgcatttttccaaaccccagcagatcgctgatttgccccggaaggaatagcttgctccttcaaatcatgcgcaacaaatggcttcaaacaattctgacagcgcaaagccttcttcaagattgaacggtagtactgatatctcatgccacaagatggacagagagtccaaaatgttgtttgtgtccctgcaggatttgaggcctgctgctgctgctgctgatgcatattat

SEQ ID NO: 30297 - DNA, 208 bp, Setaria italica
  Peptide Sequence Number=SeqID_96271
gagaggtacccggacagggtcgccgtcgcggtcttcgcctcggccgccatgcctgccttgggaaagcccatgaccttcgtccttgaagagttctcgcaagaaacgggaccagatttctacatggattgcacatatggggctagcagcaatcctcagtatccagtggagacgcttctgctagggccagagtacttggccaagagattgt

SEQ ID NO: 30298 - DNA, 300 bp, Setaria italica
  Peptide Sequence Number=SeqID_96272
aagaaggccgggcagcgcgcgtccgtggccgagctgctggaacacccgttcgtcgccgagcgggacgcggccggagcgcagcaggcgctcgccgcgctcgtcgccgaggccgagcagggcgacctgtagcccagctgccagtggggccggttaattaattcactaggagatttaggaggagagtcaggacaagctgatgtgtacataagagtcacgccacgtggacgaataacctgtcataggtggcgttttctcccctttttgatgcaattttttaatcagttttctggatccaaaaaa

SEQ ID NO: 30299 - DNA, 564 bp, Setaria italica
  misc_feature (506)..(506): n is a, c, g, or t
  Peptide Sequence Number=SeqID_96273
agggacgggactagacttaccaactaacaaaagggcaacgacgacccgtgccacgcctcagccagtccgtacatcgccatcttcggcgtcatgcaaatcgtttttactcgtctcgcagatcccgtacctggactaaggtctggtggctctccgtcgtcgctgccatcatgtccttctcctactccaccattggcgtctcccttggtgttgcggagatcgcagcaaacggaagactaaggggcagcctcgccggggtcatcggcgccggcgccagggtgacattgatgcaaaaggtctggcgcagcctgcaggccttcgggaacattgcgttcgcttacggtttctccatcattctgctcgagatccaggatacgataaagttaccgccgccatcggaggcaaaggtgatgaagaaggcgacggcagtgagcgtggtggtgaccactgtgatctacctgctgtgcgggtgcgtggggtacgcggcgttcggcagaacggcccccganaacatgctcaccggcttcggcttctatgagcccttctggctgctggacgtggcgaacg

SEQ ID NO: 30300 - DNA, 261 bp, Setaria italica
  Peptide Sequence Number=SeqID_96274
ccgacctctggtccgctcgtccaccgccttccccgctgccatgcccggcgcgcactccaggttctcccctgcgagctatactgctggagcaccgcaagtttttggcgcgtgaatcctctcggcatccaggtgcggcgccatagtctgcctatccacatttatcttgcagcatccttttccccaatctctcgccttctctaatctatctgcttgccggctagaatcggccaaatccaacccaatcgtatatccttgaggaag

SEQ ID NO: 30301 - DNA, 620 bp, Setaria italica
  Peptide Sequence Number=SeqID_96275
gccaccgccttccccgcctgccatgcccggcgcgcactccaggttctcccctgcgagctatactgctggagcaccgcaagtttttggcgcgtgaatcctctcggcatccagaatcggccaaatccaaccccaatcgtatatccttgaggaagaaattgtccccaactcatgcgcaacaatgaatcgggggggacttcaatcgagatctactcaagccgccgtttgaatcggccgcccttgctgtagtcgtcggtggtgctccagacgctgctgctgttgccaccggtggtaatccagtcgccggtggtgctccaggagctggtggtcttctaggccctcgtgctccagccaccagtgtcctacctactcttagtgcttatcccgcctgtgcttggtgaccagctgaatctcttggcgcatccttcacggttgaatcgtctctttgcggctctgattgctgattgtattagcagtcatgccatttttggtgttgccgtgctctgggtgaactgattgcacattgcttactggatcaactgctaccaaaattagtatctaaagtttattttcgattgtcatgagaaactacctaaattactatgtattagcatggcaacact

SEQ ID NO: 30302 - DNA, 955 bp, Setaria italica
  Peptide Sequence Number=SeqID_96276
catctgatccatctgaatgagaactgtatagaaggttcaaaccaagcttctcccattcgtctcttgagtgcttgtgtgctaatttggcagctacggtaactacagcaagtggcagaccacaacatcttctcataacctgattaaaaacgtcctccagatgtggaggacaaacattcccattgctgaaagctttcttcagaaacaattgcttggcgtccgtgtcactgagggggctgatctcgtgaacaaatttgcttggacaggaataaccatctgttggcaatgcgccattccttgttgtggtgattatcctactaccaagaccgttctccggaaaacaacacttaattgttgcccattgttcgctgctccatagatcatcaaccacaatgaggtacctcttattcgtcagtatttctctgacactcgtaatgagttggttaatgtcctggccacctcggtgccggtcaccgaattgtgagagcatatttctgactgtcttactgaccatgtccagcttgggtccgatggagacgaaagcggagcaattgaagttgtcctgcgtctgcgcttgaagacgccggtacactgcattggcgagcgtcgtcttcccggatccggccatccccacaatggagacgattttcagctcagtcctgccggcatccatgacaagcctggacacatcctccactttctcgccgaagccgacgaggctgttggtgtcgacgaagagcgcagacagccggggatcaaggggagcttgcgcgggggtgccaaccatcccgcctaggctgtagcgcttccgctggtcgctgatctcaaggacgcgctccttgaggccctggagctcgccggcgattgtgtggcgggccgggagcgccgtgaacttatcccagacgcggcggaaccaggcgcggaccccggtggcgggcggggcgccgccgtcgacgcg

SEQ ID NO: 30303 - DNA, 745 bp, Setaria italica
  Peptide Sequence Number=SeqID_96277
tccttgtaaaaagtattgtctttcacattggaatcgtcttagtcgaaataccaaaaaaaaattgcctcgagggcagtagacatatttacaagtaagaggaggccatgctcctcacatcggttggcatgaaggccagcacaatcagtaggatgagcaggcagactggcagccatagcagcagcgatggaggtggcggcaatggaggcagtaccaacggcagtatcagcaatgatacggtgaggcaggcgagcacgaggaacgctccgatgctgaagtaagtcgacgcaatgaccttcctgtcattcagatcagcctcctgctgccgctgctgcaggtggcgcttcgcggcgtttggcctgaccaacactgggttcctcctctgtctgctagtgcccactccatccatggcaccagatcggcttgccatttgttgttcagtgtttaagtcagatcgatgacagcgagtttccaagaactgacaagggtggggatttgtgatttctgaatgttgtacaatcagatctgtttctttgtgactgaattgcctgtcaccggcttaggaagaatttcaccttcaatcctgaacttggcattgctcccctccgtcagtactgttcatccgcctggaagcccctgtgctcctttcaagaacacgcgctcctcttcttcccccaaccaagaaagatctcaacagcacagcctacaactccaagagacttcaagccacgaaccctccacccctctc

SEQ ID NO: 30304 - DNA, 715 bp, Setaria italica
  Peptide Sequence Number=SeqID_96278
ctacctgaagtgagaataccaagtattactttcaaaaaaaaagaataccaagtattagaggattagcaatcatgtttcttacgaacctgttaccatttttagagatggaactaacagccccagaatctaaaaaaaatatttctagccaagttcatacttttctccacaaatttcagcaaagaaactgctttaaacaagtactagttacttcgaacaatctgacgaattcaatcaaaagaaagaccacgaatcacctaagcatatctaatttattcaaaaccacactttctttgtgactgaattgcctgtcaccggcttaggaagaatttcaccttcaatcctgaacttggcattgctcccctccgtcagtactgttcatccgcctggaagcccctgtgctcctttcaagaacacgcgctcctcttcttcccccaaccaagaaagatctcaacagcacagcctacaactccaagagacttcaagccacgaaccctccacccctctcaccaggaccaatcggcagccgggactggaaccacgggacgcggagtaggcagcagagggggatccggcgatggagaagtagatatctccctccgcgacgccgactcccgcacgctttctggcgacgctgcccgctcctgctgctgctgctgttgcccggggggatggatggggatggaaacggtgagggcatgatgacgggacagggagg

SEQ ID NO: 30305 - DNA, 151 bp, Setaria italica
  Peptide Sequence Number=SeqID_96279
agatgaccgatatgacaagcaagcaagctgtggaagtgcatccacagggcggaggaagctgagaagtagatcaggaaactactcgtgcaacttgctgaggctaaggcccaagcaagtgcatccgaaagcgctgagaccactgcaattgaag

SEQ ID NO: 30306 - DNA, 163 bp, Setaria italica
  misc_feature (157)..(157): n is a, c, g, or t
  Peptide Sequence Number=SeqID_96280
gtggttctttccgacttcatctccgctgttgcttcagcttcacccaatggttcatttcccgattccacgtctttgcctatactgctgaaatttcttgctagtggagttgcatgctcactgaccttgcgtccctgttccatcgaatttctctctttcnacgaaa

SEQ ID NO: 30307 - DNA, 1178 bp, Setaria italica
  Peptide Sequence Number=SeqID_96281
ctaaaagtagctggcgaaaaagatgttaaggggtcatcagggaagggtaataaaaacacaccgagaaaaggaaacggtcagagatctaagcatgtaccctctatggagaaagttgtttccgccatagaggctatgggagtaagagtctatggatttgatgaaacatctagtgttccaatggatggcactgtaatctgggagaaccttgcagggtatgaacctcagaaaagggaaatagaggataccatactattggctttacagagtcctgaagtgtatgatgacatcgctcgtggtacacgctgcaaatttgagacaaatcgtcctcgagctgttttatttgaagggccacctgggacgggcaagacatcttcggctcgggttattgccaaacaagcaggagttccactactatatgtgccacttgaagttgttatgtcaaaatattatggtgaaagtgagcgcctgttgggatctgttttttcacttgcaaacgatcttcctgatggaggtattatattcctagatgaggtggattcttttgctatggctcgagacagcgaaatgcatgaagctacacgaagaatcttgtcggtaattctgcgacagattgatggatttgagcaagatagacgggtggtggttattgcagcacaaactagaataggaggaccttgatccagctctcatcagccgttttgattcaatcatctgttttggcttaccggatcagcaaactcgtatggaaatagctgcccagtatgccaagcacttaagtaaatctgaattggttcaattttcgttggccactgaagggatgtcaggaagagatatcagggatgcttgccagcaagctgaaagacactgggcgtcaaagttaattagggggcaagttccaaaagatgagaagggggagccaagtcttcctccaattgccgaatatgtttcatgtgctgaacagagacgaaagtccttgcctgatagaacgagatggacatccaggtcccctgcccttaagttagcatgaggattctactttctttacaatcccatacaatacatagtaccaattgtagttgaaatgaaaatgtatgtaggttctgctaaacaggttttcttgcgacagatgctaatatttggaaatgtgtatccaaatttcttgcatcagcgcacctgaa

SEQ ID NO: 30308 - DNA, 1368 bp, Setaria italica
  Peptide Sequence Number=SeqID_96282
cggctgtggctgcgccggcggaggttgaggttgaggtcgaggtcgccgtcgaggtgtctcgcatggggctggagcaacctgaagcagcaccaagtgtgtctgtggagatgctacagtttgtgcccaatatccggtctggtagtttttcggatattgggcctaggagatacatggaagatgaacatatccggatagatgatctttctgctcatcttggctcgctgttggtctgcccgttgccgagcgccttctatggagtttttgatggccatggaggtccggatgctgcagcctacatgaaaaggcatgccatgaggttcttgttcgaggacagtgagttcccacaagcatcgcgggttgatgagatgtaccttcagtctgttgagaactctgttcgcagagctttcctgcaggcggatcttgctctggctgatgatttggatatcagccgctcttctggaaccactgcactcgctgcattagtatttgggaggcaactgttggttgcaaatgctggagactgccgagcagtcctatgccggaaaggcatagccatggagatgtctcgggatcacagggctaattacattgaggagtgtgaaagggttgctgcgtccgggggattcattgaggacggctacctcaacggtgtcctttctgtgacccgggccctcggggactgggacatgaagactcctgatgcttcggcatccccgctcattgcggagccagagttccgacaggccactctcactgaggaggacgagttcctcatcatgggctgtgatgggatctgggacgtgatgacgagccagcatgccgtgagcctggtgcgcaggggtctgcggcagcacgacgaccccgcgcggtgtgcgagggagcttgtcatggaggcgaagcggctagagacagctgacaatctgaccgttattgtcgtctgcttcgtgtcggagctgggcgcgcagcagcaggagcagctggtgaggccaaggagctgcaagagcctgtcgaccgaggcgctgtgcaacctgaggagctggcttgagaccgaccaccgctagactgaagagggttggggctgaggactgaggagggggaaggattgattgggatgtgtaaatacaactcgctgacaacactgattgacggatcatgagcgccgggttctagcttccacttgttgagaggctgctgcggagtaggcaggtcagctgcagcagcagccagcagttttgtaggttatttttcattctgttctctcgcttctttttttttaccctttcgctagttgtcgatgctattgtttaacactcctctgtgttgtacatatatctattgaagttgatgccatctgtttgtgcttcaaaa

SEQ ID NO: 30309 - DNA, 656 bp, Setaria italica
  Peptide Sequence Number=SeqID_96283
ctagccaactgcaactcttgtcagaatcatcgttatcattgccatggttcttggcatcagaactcttccgcctaaccacatgctgccatattgtcctcaactgctcaatacgcactggcttcagcaggtagtcacatgctccatgggtgatacccttcatgactgtttgtgtctccccatttgcagacaacataatgaccgggaggtccatctcgaggcccacaagctcaaggagcttgaaaccatccatgtccggcatgtggacatcactgatcacaaggtcaaactggtccttcttctccctcaacagcttcagggctgtggctgcctgcccagttgttgtcacgtgatactggcagcgaagcaagaggttctcgaggaccttgaggcaggtggggtcgtcgtcgacggcgagcacgcgcatgccgacggggaactggtccttggccccatgcccaccgttggccttcgcctgcagcttcacctcctccacggtcatctcctcacctccggctacacgaatccaacagcaccgcaaggaatcaagaaacttaagcgcccgcccggatcaccggactccttgtacgcaagggagtttcttggatcctagaaatccaagaaaaaggcggggggaaggcggataaagccagcaagga

SEQ ID NO: 30310 - DNA, 236 bp, Setaria italica
  Peptide Sequence Number=SeqID_96284
cggccgcggcgctcgtgtgcgccgcggcggccaccgtggtcgcgctcgtgcacatctaccggcacctcctccactacgctgagccaatctaccagcggttcatcgtccgcatgatcttcatggtcccggtatatgctgtgatgtcattcctttcccttatccttcctgaaaatgcgatatatttcaattctattcgagagatctatgatgcttgggtcatctacaatttcctctca

SEQ ID NO: 30311 - DNA, 290 bp, Setaria italica
  misc_feature (283)..(283): n is a, c, g, or t
  Peptide Sequence Number=SeqID_96285
atagagttacgaagaaaagaaaactattttccttaaaaaccaactctacatgaaaacaaggaagagggaaagggataggaagattgggagaggaaaggagatagaagagagaggattggttggaaatttattttgaagaaactatctactgggaagataatttcattgagctacatgcaccaactaattgaactaaaaaagtatgagctgataggaaaatgtgatatttcacttgtatttcaaccctccctcacgcatagtatatgcgcgcagcatctttccncagaagg

SEQ ID NO: 30312 - DNA, 446 bp, Setaria italica
  Peptide Sequence Number=SeqID_96286
gtgtctagcgctgcgagttttggcgtgctgtagccactgctggtgacgctggaatgcatatttactagataatttctggatttcacctgcaaaagagcatatgaagacaataatgtaatccatcattaataatgtattgccatttttcttcgtgagatacctttgctgcaaccattttgttgccgatttcagtatggatcagataagcataatcaaccactgtggctcccttaggcagatttttaatctcgcctttaggagtaaacacaaagacacggcttcccagaagatctcgggtgatagtatcaacaaactccctagaactcatattaccaacaaactcttcttgccattcgcggattgcattgagccaaccaatcctcagagcaaagccttgttatttatttgaggtctagtatttactttttccctttggtaattttctt

SEQ ID NO: 30313 - DNA, 651 bp, Setaria italica
  Peptide Sequence Number=SeqID_96287
ccagtttgaatttactatcttccttcttggttgctttggaattgaaagctcactgtcactttcgtcttcaatatcagcaacaaaattattgactgcctcagcagtaatttcagcagcagaaagggcagcttgctcctttaagaactggataaggaaaagattcattactgcaatcatctgataatgtaggaaaataatttttaaaatgatagtaggacatactttcataattttgtgtctagcgctgcgagttttggcgtgctgtagccactgctggtgacgctggaatgcatatttactagataatttctgaaataggaaataaatacattgagttgatcgggatgctcatggatataatacattttcgccaatgcaattgctcccttgaaaccttcctcatagatgcagtgcggtaaaatgaggagcatcgtgatacttcaaacatatatgtagtccagatatgcatccaaattgttataatatcaaagcaatgttttaaaagacagttgcagttagtgggcagtaatcacacctttatgcacttatgcaggtcagtagccttgagggctcttgatatgttgattaagggcattgatatcagattggttgggctacccgagtgccataggttaaaaaccacagatttgt

SEQ ID NO: 30314 - DNA, 1027 bp, Setaria italica
  misc_feature (7)..(7): n is a, c, g, or t
  misc_feature (794)..(794): n is a, c, g, or t
  Peptide Sequence Number=SeqID_96288
tcagtcngaaaagaaagcaagatatcatgaatcagttagacaagaaaacacggaaaggtccatgccgatccctgcatgtacaatctcttttaaactcagtatgcatgtacaagaagtgccacaacctcatgtgacctatcaagggaattatcagttatagctaactcgctgggtattccaaggtttgcatttcaagtacagtggttgtggaggagaatgtaaagatttatgaaggcctgacttggtaaaagctggaaatgcccttttgggaatcaacaagaatcttcaacactcagtaattggcatatttatatccttccgagaaggttgtcatactgcactatgcatttctctccaatactacctccagataaagaaaacatgacgatttggacaaataaaacatttcgcacatgctggtaatattcttgtataacatttcagaactatgatcatacagaggttcatattaggaaaacaaatttaagagcataaagtgaccaataagcatgtaaacactgcagaagtttgacaaaaccaaaattgcaccttgtatgtgtgtatcttgacattgcaaaaatagtaaaaagtgtagaacagaaagaaactgtgtgatctatgaaaggaatactgacatcataagttataatctcgaccacttcagcatttgcaagtacatggattggtgaaactagattgccattcacctttgctgcaaccattttgttgccgatttcagtatggatcagataagcataatcaaccactgtggctcccttaggcagatttttaanctcgcctttaggagtaaacacaaagacacggcttcccagaagatctcgggtgatagtatcaacaaactccctagaactcatattaccaacaaactcttcttgccattcgcggattgcattgagccaaccaatcctcagagcaaagcctgtattattgaggcagattacttttcccttggaatttcttccacttgatattccagggcgaacaggtccagaaaccacccctcttc

SEQ ID NO: 30315 - DNA, 352 bp, Setaria italica
  Peptide Sequence Number=SeqID_96289
attattgagcgatccatgtggtgctttcaaaagtacctccatcttggaggagataatggtgaagggggtgaactaatgtggtcacacaagtctcctgatatccactagcactcaagaacacccaatggacaccagctacatccaacggaccaaccaagaacaccaagaatcatgtcaacacttgagcatgcactgaccacattctcatagcttccctcaaaatggaacagcactacacccattcccctccttttattaacttcagccacacaagaacagaaggcagctctatccaatggctttgcatagcctgtgttgaccgaaaagggatgaactactacactgagtctca

SEQ ID NO: 30316 - DNA, 2105 bp, Setaria italica
  Peptide Sequence Number=SeqID_96290
taggtggacattattaacaggtaaaaagccatcgctacttttgttgacaaaggataatttatctgaatttaatatcttctcccagttgaatttactatcttccttcttggtgcttggaattgaaagctcactgtcactttcgtcttcaatatcagcaacaaaattattgactgcctcagcagtaatttcagcagcagaaagggcagcttgctcctttaagaatttcataattttgtgtctagcgctgcgagttttggcgtgctgtagccactgctggtgacgctggaatgcatatttactagataatttatcataagttataatctcgaccacttcagcatttgcaagtacatggattggtgaaactagattgccattcacctttgctgcaaccattttgttgccgatttcagtatggatcagataagcataatcaaccactgtggctccagtacgcagatttttaatctacatgtacagcgtatatgctattgtaatgtctccaagttcattgcctcacctcgcctttaggagtaaacacaaagacacggcttcccagaagatctcgggtgatagtatcaacaaactccctagaactcatattaccaacaaactcttcttgccattcgcggattgcattgagccaaccaatcctcagagcaaagcctgtattattgaggcagattacttttcccttggaatttcttccacttgatattccagggcgaacaggtccagaaaccacccctcttccactgtaatgtgcagcaatgcctctttctgctattaaatccatatcttctgttctaatctgaacttccaaatggaacatactttcattaagaaatggtatcactgttgtgtgtagactttggtagccattaggttttggagttgcaatgtaatctttcacagcttgaggaatgggtgtccatatgccatgaacaagaccaagaacatgatagcagatctgttgcgcagtgcacaatggcccaacaccattgcaggattttggttttatgatgatccgcagctgagcaacctggttcacctcatttattgaactcttggatttgagcgtagttttgtaaatgctgtagagctctttgtaaactgagcgcacttctgtctcaacactcacaagatcaagaaactgatcctcaccaatcttttgccttaaaattctatttgcctcttccaattcctgttcatgggccttgtacaagtcttcaactcttttccttagttcagcaaaaccaatggggttcacgtacatgaaggatagatattccaattcagactttattcggtacatcccgaggagttttgctagaggtgcaaagacctgcaatgtctccatggcaatggcatactgcttgtgctgaggcatatgtgtgagagtacgcatgttatgcaacctgtctgccagtttgacaatgatcacacgaacctcttctgtcatggcaagaaacatctgccttaggtcttctgctttaagatcttgtttcgaactaccctcacttttgcactgaagtttccccaacttagatacctttgtctctccttcaacaatacgacgcacggttggaccaaactcattctctattctttcaaaggtaaccacatctgtatcttcaacagtgtcatgcaataaaccagcagcaattgattcccagtcaagttcatgctctccaagaatacgagcaacttcaacaggatgaataatgaatggctctccacttcgccgtttttgtccactgtgtgcctcatatgccaacttcaaagcatcatgcacaaagtttaactcttcaggttgaagatacgaaacaactggtttgagatcctcccacaaagtctctggggaaatgaagaaggattcagatgatgaatagcagtaagttctccatgttgggttgacagaagtagaccaaggtctgaaaaaactttcagagtaagcaggtgatggaccataaccaaatctccctttattgatgtcttcatccaaggtgatgtgcggtaacgagttgttactccgacgcgaccgcccacgcctcctccagccgcctccggcctcggtgtggccgcaggaggagcactgcgcggtg

SEQ ID NO: 30317 - DNA, 1316 bp, Setaria italica
  misc_feature (1)..(71): n is a, c, g, or t
  Peptide Sequence Number=SeqID_96291
nnnnnnnnnnnnnnnnnnnnnnnnnnnnnnnnnnnnnnnnnnnnnnnnnnnnnnnnnnnnnnnnnnnnnnnttttttttttttttttttttttggcaggttattcaaactgtgcatatctcagttaaactgtgctcaaaattttccactgcaaaattgaagctatacaataaaatttacaggcagactacgagaataaccaaatacggacaaaatttgggaattagagttccggtcaaaattctagctgcacatttaagtagacaactagtatatgcaagccacataagtgggagaacagcctttagcaatcttttttaaggccttctgtataatccaacagatccctgcactaacactctaacagtaccctactcgctctgctatgtacactcacatttagaatgatgcatatgtctggttctagtttgcttgccctcactgtctattttgacagagaagtaaagggctccactcgctcaccaaccatgatctgaccaacaaaattattgagcgatccatgtggtgctttcaaaagtacctccatcttggaggagataatggtgaaggggtgaactaatgtggtcacacaagtctcctgatatccactagcactcaagaacacccaatggacaccagctacatccaacggaccaaccaagaacaccaagaatcatgtcaacacttgagcatgcactgaccacattctcatagcttccctcaaaatggaacagcactacacccattcccctccttttattaacttcagccacacaagaacatatggtaattccacaggctgttaaagccgatgtaacttctgccatcatcccttttcggtcaacacaggctatgcaaagccattggatagagctgccttctgtattatgccaaccagaaattttaccagatttccagtgatccaaaccaggaaaaacgtccttgcaggtggaattgccagggcgcattaattcactgaagctatcacctcgaattgtagaatgaccattaattttgatgcccagttccttaacagttttgttttgcttcccattgacctttggatggacattattaacaggtaaaaagccatcgctacttttgttgacaaaggataatttatctgaatttaatatcttctcccagttgaatttactatcttccttcttggtgcttggaattgaaagctcactgtcactttcgtcttcaatatcagcaaacaaaattattgactgcctcagcacaagtaaatttacaagacaagacaagaaaagggacaagacttagactacctttaaagaaatttacaataaattt

SEQ ID NO: 30318 - DNA, 274 bp, Setaria italica
  Peptide Sequence Number=SeqID_96292
ggcctcatctggtcgctctacaccgtctacacctcggaggatccaccccagcaggttgttgctgagcctggggctcagcgaacaacctgctggggtggatcctcctgggggtcttcggcctcatctggtcgctctacaccgtctacacctcggacctcgacgaggacgaggagtccggcggcctctcgctctagatcgtatcccgtcccctcccgttgttgttgatccggatgtaaacatggccatgcccgagtttacaccgatgaccaccgcc

SEQ ID NO: 30319 - DNA, 753 bp, Setaria italica
  Peptide Sequence Number=SeqID_96293
ctccaaggacggcaggaacgcggccgccgtgagcgccaagggcgcgggcgcgtcgctgctggcggcggcgggcgcggtgaccgcgtcggcggggccggcgctggcgctcgtggacgagaggatgtcgacggagggcaccgggctgagcctggggctcagcaacaacctgctggggtggatcctcctgggggtcttcggcctcatctggtcgctctacaccgtctacacctcggacctcgacgaggacgaggagtccggcggcctctcgctctagatcgtatcccgtcccctcccgttgttgttgatccggatgtaaacatggcggtggtcatcggtgtaaactcgggcatggctatttgtatctaagcttcaacttttgcgagatgttagcggtcgagtgaagtgatccgtggagattacgcgcatatagcaaacttcacgagaaacgttctgcataaatttgagctttcagtagagctcttgctgtttagaggcgacaaagccctttaagctcctgatcagcctgggacaaacattcatctccctccctctccacgctcaacttcgtccacacaaatacacaatggcacaactcgcttcctccacggtggccgcaccattcccacagcccacaccgccacagaccccagtcctccaccgtggccgaaaatgtacaaccacatgacttatgttaattactcacgtcattaattctacagtccatgtcccccacacttacataacagcttgtta

SEQ ID NO: 30320 - DNA, 253 bp, Setaria italica
  Peptide Sequence Number=SeqID_96294
gcatcggcgccgtccgctggcgatcgcgcggcgcgcggcgacggggcgacgtggccaggcccccctggcgcgcctccgctcctttctaatttcatcgaacaccctgggagcatccctcaagcgattgaagcagccatacatggcgacgatgaagttgtcctggttctgcacgttgtggaagccggccgaaaacagcggcatgaacaggaccggtgccaacagcacggcggctatgcctgctgctgagcacgtt

SEQ ID NO: 30321 - DNA, 272 bp, Setaria italica
  Peptide Sequence Number=SeqID_96295
ggtggcggtggctgccgccgatgacatcgctggcgtcctcgccgccctcgtacgttgaggccgtccggcccgccggccagatgggtgatctggcgctcgagcttcccggaccacgtcttgaacgagtcgtagcgcctgtcccagttcatgggggcggtcctgcgggcgcggccggacctgctggccagcctcgccggcggcggcccggggatcggctgcgaccggaacatcatggcctccctgtccggctgcgtgaagcggacgctgttgct

SEQ ID NO: 30322 - DNA, 1127 bp, Setaria italica
  Peptide Sequence Number=SeqID_96296
aacacagagaggaggaagtaggttaaaatcatcatatcaaacaaaaagaagtacaacctagtttcaaaaaaaaatgtcaagatcaagaaatctcccttgggagaaatccaagtcgtttccagccgcatctgttactatacctccagcttctgtcacgacaattgaaccagccgcatggtcccatatcttctctctataacctttgtgtggaaaacgcaagtaaatggcaccatcgcctcgggccagagcaccatattttgcttggctgtcgattctaactggaggagctaggacaccaagtttctctgcaatagagctagtcaaatcatgcatggagtgtgcactttcataggattcgaagaatgaggcattgactggattgtcaatagagcaaacaccaatcttttgtggcggagaaccatctagagactctacttcagctccacaaccaattgtagcagaaaaaagggcaccaacttgattgcccgaagagctaccattggggttgcttattgatgacaaaggaagatttggacaagccaatacacccaaaacaattttaccttcatcaagcagggccagtgcaattgcatattggtcaccccttaagaaacctttagtaccatcgattggatctaggacccaatgtcgtccagatgatcctccctcagacttgccatcatcaatcgctgagaggataccttcctttgaaaatgaaatgttatatgaaccatcatcaacgatggtttcattcacaagatcagtaatttcttccaaaatttcttcagcaccatcttttctcaattcttccgagtcctcctcagccaccaatgaaaatgggccagatacttccatcgtcaaggcaagactgaccaatatttgagacccataatcggccacggtgacaggacttttgtctgccttagactgaatacccgaatgcacaatgtcctgttgcactgtcttgcagaggcgggcggcgagggtgacggccttctttgccgcggcgagctcggcggcgtaggggttcccagacgccatggagcggaccggcaggacacgcggcgacgcgcggtgggagcgggagcggaggcgcggcggcgaggcggaggaggaggaggcgccgg

SEQ ID NO: 30323 - DNA, 579 bp, Setaria italica
  Peptide Sequence Number=SeqID_96297
tcttatagaagtggtgctgtgtttgctttttatagtatcattgcgtagcttgatacaatggacgggaggagaacaatttgatggacgttatgaaatcgggaaacagttggggcaaggaacctttgctaaggtcttttatgctcgtaatcttactaccaacaaggacaaggtcataaagatgattaacaaggacaaggtcatgaaggttgggctcatggagcagataaagagggagatttcaataatgaggttagtgaagcatccaaatgttcttcagcttttttgaggttatggctagcaagagcaagatttattttgtcttggagtatgctaaaggtggtgagcttttcaacaaaatagctaaagggggaaagctcagtgaggatgctgcgaggaaatatttccaccaattaatcagtgctgtcgattattgtcacagtcgaggtgtttatcaccgtgacttgaagcctgaaaaccttctactggatgagaatgaaaaccttaaagtctcagattttggtctaagtgctctaactgagtccaaaaggcaagatggtctcctccataccacatgtggaa

SEQ ID NO: 30324 - DNA, 773 bp, Setaria italica
  Peptide Sequence Number=SeqID_96298
taggttattaacttgattaggggtttcagtaaagaagattaatgccacttcatttttgattcgaatcaaccattggacaagctgcttgaggacaaaagattccggatgtctttcatgtcatttgcggacagttgcttagctggagagagtgttcatttctatgaagaggtgtatgacctgaagaagatacatctggatgattccattagaagaatatacatggcaagacacatcattgaaaaatatattgacgcaggtgcagaaatggagataaatatttctcacagaactcgccaagagatactaggaacacctgatctaactcatccaaatctgtttgacagtgcagtgagtgagatattgcagctgatcaaaatgaatttggcaaaggattactggtcatccctgcactttgctaagctgaaggaagatatagagagagggcccaacggccctgagctcatgccattggattactccccaagagttacttttgtgcggtgtactgatgatcccttttacgaagaacacgctgcgacttgtaattgaacggttgatagacaatgtggatgcggttgtatgcttggctcggccttgtcacgtcgaaatggtgggtaaaacagcagtttttttttatagatatgtccagttctgtcagatgggacaacggacaatggcgtgctttcttggtgatgctcacataaactctttgaaggcttcattcattcttatcctgatttgtacaggttattgcacttgaaaatgcaagagtc

SEQ ID NO: 30325 - DNA, 241 bp, Setaria italica
  Peptide Sequence Number=SeqID_96299
accgcggccacgacggcgtcgtgcatggcgctcgcggccggagcggtcgtggcgcacgcgccaggccggagtggatcgcgttcggggggcacgtatgggattaagtagcacgtacgcaagataggccacacgtgcgacggtacgtgcgcgtgcagatgtaggtcaaacctgcgatgcgtacactaccgtgaaggaatggactgtcagtgtgggatgtgtcgcgacgatgttgagcagctca

SEQ ID NO: 30326 - DNA, 1032 bp, Setaria italica
  Peptide Sequence Number=SeqID_96300
ccatagcagccatagactatattatatcctataccatttatacacaggaagatatcccacagaaaaggagaacaataaagctcgggacaccagctttagatgttagcgtcagatatcgccgacaggttcatgaatagctgggctggaatctcaccaccactcctattcggctttctcctcttgatggaacaactttccacgaaaaactttccttggagcgcaatgcttctcatccgataacaccttcagtagcctttcctcgaagggtgtggtgtgccaactaacccttcgatcctctttgtatctggtggtggtgttgggaataccgttgccattgaatgtcttgtgtaacttaggagtaggattctcgatatcccagttaaaatcagaagccatgaagacaggtctctcggctggaaagctgcactcatcatatgattgatcccctgcgacaaccttaacatcaccttgattctcaacatctttggaggaagatttcacccagtgagacaggctcaatgcagcatttctttcatctgacttggtttttgatagttctccaccatccaataactcctcaggagagagtgcttcttttacttggcgtgaaattggtggagttttggacaatcctgatttagccactgaatttgaagatgtttgcttgggcttcatgacatgatcttcttccaagtttctctttttttggaggattggatgacagcaatggtgaagaatcttctgccagttccatctgcttaactctgttctcgatgggtctcaggacagggtagatgaattgtttccgtgtctgcacacgctttccagacatagaagcccctctatgtgaagtatagactgttccaggggtctgcatatcatccctgagaactaaaggagtcacaaagggtgaaccagtgcaatcatgcagcttgtgttggatgttctgaaacgggctcttttccaagaaagctgaatgatcaactgattcaactcctagaagatgctgagtatcttcaatgtccagttcag

SEQ ID NO: 30327 - DNA, 334 bp, Setaria italica
  misc_feature (312)..(312): n is a, c, g, or t
  Peptide Sequence Number=SeqID_96301
ctgaaaaatgcacgggagacacggcggaagaagctcggcttgaagatactgaaccacttgttcaagagggtgaggagaggcgaggagtttgaatttgatttccggattgagaatgaggcgcggcgagtgttcaaggattgggcagagggggcagtggctgaatacttcaagtcacaggagcattgccaatattggcaccgactgctcgcatcaggtgacttcttgtcattgactagggtgagggatcaattgccacctgctttggtggactcatatgacaaatttcaagagacactggactaggttttttangcctatgagggaccgtgacatg

SEQ ID NO: 30328 - DNA, 301 bp, Setaria italica
  Peptide Sequence Number=SeqID_96302
cggcaggtcccccgccgcggcgcacatgaccaggtcgtcgaacgcggcggcgaggagcttggaccgcctggtgatggacgcgagcgcggcacgcaggaacggggccggcgtctcggcggcggcggacaggtcccgcgcgaggcggtgcagggaccggagcagctccccgtcggacggcgacggcggcgcaggcggcgcgaacgccgaggaggaggaggaggaggaggaggaggaggaggaggaggagcacccgggcggcgacggcgcggaggtcagcaccgttcttggattagccatggcg

SEQ ID NO: 30329 - DNA, 316 bp, Setaria italica
  Peptide Sequence Number=SeqID_96303
ctggatttattgaacacgaagaggtgggcatcttaaattattggctttgaatcatttttttcgagatacttgctttgaatttgctgtatgctttttcgtagttcccttgaatgaagacaatacttgtaaaaagtgcaaaagtatcacatactgtagttttcatataacctggaattccatataaagtgctgctgtactttatttgtcttcacgcaagaaaagtttggatcagaacttatttgtctttatctttgaatatccatgcagttgaaggaaatggtgcttgcaattctgaatgaatcagatctaattcttt

SEQ ID NO: 30330 - DNA, 277 bp, Setaria italica
  Peptide Sequence Number=SeqID_96304
gtccttgacggcggtgacgaagagaacgaaggcgagcgggagcacggacgcgccgcggccgaagacggcgacctggggcagctggttgagcacagtgatggcgaggaagtagacgtacgatagccgccggaactgctcgaagaggttccgcggcaggaaggtgagcaacgagtacttggccgtccggatggcgttcccagcgaactccggtgagggctcccccacgacgaccccgcgggactcctcgtcaccgacctcccgctcccgctgcgacgcc

SEQ ID NO: 30331 - DNA, 710 bp, Setaria italica
  Peptide Sequence Number=SeqID_96305
aaataaaaattggccatctgggcactgtgctacaatggtcagagattgactttagagctgccataatttacaagcatacaatattacaatgatggagctgtcagtcttcaatgaggctatactgattactatgcttgcgcagccggcgccgcctcctggtcctggggcgcccaccgccacaccttcagctcgccggagcagtctccagtgaagagcggcccaccatcagcgagctcgatggtcctcacttccttgttggagaagagggtgcccacctcctggaacgatggaaggtcgagcaggcggatgcggttgcggttatggagggagcagagaagaactggcgtcttcccaacgcggtgcatgccgaagagtgtgcgcaacccatgctcctcagcataggtatatctgacttgaaggtttccagactctgaaagggtccagacctttacagtcctatccagggagcaagataataacttgtcttcccaacatagaacagatgttacagcagctttatgctcagagagtgtttggagacactgcatggtcatgagatcccatactctgatggtcttgtcaagtgagccagagtaaagtcttgttgccgagattgaaagtgaaatcacagcacgttgatggccactgaggatcgccactggttcaatgttgctctccttagaaggaatttccaagctatgatgcgacca

SEQ ID NO: 30332 - DNA, 481 bp, Setaria italica
  Peptide Sequence Number=SeqID_96306
cctaccttcaacacctgtaacaaactcaacttcaacgctttgcttgtccaaattgttttcttgagtagtagaacaggatgtagcatgtggagccagtattatggagttttaaaaagatgccacaggctcttgctttcctgcaacttgtgaagccacagtcaatggcatttcatcgggctccttccttgaataagccttgaccaaaattgtcctgcagatatctatctggaaactcactcactgggaacatacctggatggttattgacaagaaacaagatcgcgtaagctattgtctatttgcacaaactctgatacagtgatacctacatatatccatgaaaatatgtcacatacctttcttttacagggcatattaaagttagcattaaatttaagaaaggacgacttcagctttctaagatgttggtgtgttaatacaatgctgattgccgaattgatgatctagaaaactgaaaaaa

SEQ ID NO: 30333 - DNA, 1532 bp, Setaria italica
  Peptide Sequence Number=SeqID_96307
ttttttttttgattgccaatcctccacaattccttactaaaataccaaaacaccccatccatgtctgtaggttcaaaccatacaactaggattggatttattgcgccaaattaaatatccccagtcttctgtagaacagaaccctaagctatctcacttatttcctagaactaaaaatcccaaagcttttaggtgagtcggtattaccaggcttactagcagtaccagcaccatctgtctttctcatatcagatgaggcaggttttggagtactactaaagattccaaaactcttgcttgtttgattaggatcgctgcttaaaccaccaccacctgcaggttgcctttggttgttgttgttcgatgcaaaatgacctctcctgtcgtttcttggatcctgtggcaatccaccttggttgaaccttggtaacggtcggttatgctgctgctccagaggaggtctctggttttcataacggcctgcattttcacttctaccatcttgcacgggtcttccttggttgaaacctcggttgttatctcctctcatcggctgttttcgagcagcatacctgtttgtttcaccaggtttttgatcctgcatgctattctctggcctttccatgccagggtttacgtcaccaagtctacgttcagatgcttgtggtccccactgcccaggattcattctgcttcccccagcattggcattgtgcaatttttcacggttggcccctggatctggtttcgatcgattcaactcccttttaaatcttctatcctgcccttctttttggatgggagaatcactggagtgatgggtggctgttttctcaacagcttccccaccacattcaattgtctcatcttcactatcattaccagcaacaggtgcagtactgtgggtaccttttccagcatcttccatggctttgctggctttctttccacccttctttgttgcaaacttcacatgcctgacaataacgtatgcatgcttcgagtctaagtgtggaccactttcgacaatgcacacatcttgtataagtcctaacaaccgagatagtggtgctcctaaatcttctccttcattacctgagggcatggccatgcacttcaccctgtaaccccgctccattaatctggtaattgcctatgcttgcctttcactgccaaatcttttagttctgttttccccttgaatcgcacttctttgttttccccaccacgtaagacaatagcagacttggttttcaatcgctctttctctttggtttctttcttatacttctctttgtgaaaatccatgattttgcatacaggagggtttgcttttctgtcgacctcaactaagtccatgtccttcctggcagctatctgcagcgcttcatgcctggggacaacattgtggccatcatctgagacgagcctgacgatcgttctggtgatggcgttgttgatgcggaggcccgctttgtcatcgtcgtcctccttgcctcccttcctattggcctgagtaccaggcggcgcgg

SEQ ID NO: 30334 - DNA, 345 bp, Setaria italica
  Peptide Sequence Number=SeqID_96308
caggacgtgagcgatgcggttgccttggcgatggcggagggaggggatagggacgggaggaagtggagggagttcttgacggacgacgccgttcagaagaggttcgccggggacttcgtccggcagctcaaagagctcgtcagggcagcctgactctagctcgtatgtgcaaaaatagtttgcatcctctgttgcacggagtacggttacctgaatgtatgctgtgtaattcgcttcttttacagcacgtggctacaagcactagaagtctgcaaccaaaaactccttattaaaatacaagcctgttctgatgacccaaatttactctcacctaattgttcttag

SEQ ID NO: 30335 - DNA, 533 bp, Setaria italica
  misc_feature (247)..(247): n is a, c, g, or t
  misc_feature (261)..(261): n is a, c, g, or t
  Peptide Sequence Number=SeqID_96309
tgatggatgtaagggagacctttgttgcccagtaagataagcttagactctgggcaacaaaaggtctcccttacatccatcattgttactactagatgagtccaaatagttatgggggcagagaacaacacttgctcatgatgacccatcctttataggaactagtccagagccagtgaatctgtcgctgaagatggagatgcaatgtcatgatgctctcgtgctttaaccttcatcttggttgaanaacccttgctgacngtttcagagtcacctgtgcacctggaaattggaaaatgcctagatagcctggtgtgcacatagttgaagttgatgacctcatatctcgaaaagaaaggtgccacccccagtatcttcttgctttccatgtccactccaagcaccgccgcttcagcatccgtttggtccaccttgaccgtgaagtaaagtatgcgagcagcatcatcgttctttgtctaggtccgtacgtactaggtttggtctattacgtaggtaggtttccttgtaaggta

SEQ ID NO: 30336 - DNA, 1859 bp, Setaria italica
  misc_feature (1)..(3): n is a, c, g, or t
  Peptide Sequence Number=SeqID_96310
nnngtgcagtttctgatgtgcaggtcatgcatggtggtgcgaatctttcctcctctcttcttgcaacacaactagctttcttgacaccgaattgaatacatgtggttctagaccaacagcatttaacaaagtttagacacccatttttctccagagtctaagcttatcttactgggcaacaaaaggtctcccttacatccatcattgttactactagatgagtccaaatagttatgggggcagagaacaacacttgctcatgatgacccatcctttataggaactagtccagagccattgcatctccatcttcagcgacagattcactatcatgatgctctcgtgctttaaccttcatcttggttgaacaacccttgctgactgtttcagagtcacctgtgcacctggaaattggaaaatgcctagatagcctggtgtgcacatagttgaagttgatgacctcatatctcgaaaagaaaggtgccacccccagtatcttcttgctttccatgtccactccaagcaccgccgcttcagcatccgtttggtccaccttgaccgtgaagtaaagtatgcgagcagcatcatcgtcttgcaggccgacgacaggttggcatacgaggaggttcctgaaggattggcgatacacgcctctttggcctgggaagagattagtgcgtgggttgttgacctcaatttccttgaaacttgtaatcttgtactgctgactccaaacaccactggtagtagccggcctgatccacagggagcgacttgccaggtccacgcatttgagatggccatcaaggaaagcaatgtcacgataaaggcgggcatcactcttgagcttggcggttcttctcagttcatcaggcagtgagacatacccaagcacggggatggtttcgctttgcgcttgacgtgcagcttcgtgttccagccgaagcacatcacaaaagagcatgccacgccagaggtcgacgaaggccatggtgccagcagcatctcctccaattgtcaccaccttgcagtttttatggagaaaagacttgtctccatattcctgccggccctgcaggctcagcgacagagcatagagcttccaatctgcccgcttcgagtcgtagacgcacaaggttaaccctccccagggatgagctaagggtaagaacctgaatccggcgacgatgtattctttgccggggcgacgaagcatgccgatatccttgggtaggaagcagcggtactggggggtcggcggcaggagcgtgagggacggcttccctgacttgtcgctggcctggtagacgtagtagtcctgatccagggcacaggcgctgacgtcgacgcggatgagggcgaggtcgtcctcgacggcgacgatatggggattccggtgcatgtaggcgccatctgggctatggatgcagcagcgggagaggaacggcgggggccgggggcagaaggtgatctggatgtgcttgttgtcggatgttttggagatggccgtggtggcgttttcgaccttgtcaatgtaggcacacacctcgaggagcatccaggagaggttgctctcttcggcggcgccatggatggcggcaggcatctgcagggaggcggggctcacatgatcggtcgccatggatctcgccccctggatggatcggggcatgttcagggaggcgaggctcacgagatcggtcgccatggatcttgctccctggatggatctactcaacccagtatatggagaggcggagacgtgaggggatccgaagcgacctcggccggcggcggcgggggtgtaggtgggttgcgggtggggcgtgggggcggcggcagatccacgggcacctagg

SEQ ID NO: 30337 - DNA, 420 bp, Setaria italica
  Peptide Sequence Number=SeqID_96311
cttggattccatctccttctttgatcttctcgatcaggtcgaagccgcgcagcgtccggctcgcctccgcgtacttctcgctcttcttcggctcgtcgatcaggacggacgcgtcgacgccctggacggcgaagtcgtggaagaagaggcggatgaggctggcggcgagtgtgtagtcgtcgcggatggccttcctcacggccttctggacgatgccctccatttccgggcacgacttgcggtagaacccggcgtccaggcctttcacgggcttctcgtacgccgggatgtggtaaacaccttcctgctcgccgttgcccttcggccccgacgaagcgccgtcgccaccgccgtagccgttcgccgccaccgaggtggcgaagaggaggaggagcaacgccgagacggcgaggaaggggg

SEQ ID NO: 30338 - DNA, 270 bp, Setaria italica
  Peptide Sequence Number=SeqID_96312
gcgcaggcttatagctccaaaaccagaggacaggctcgtcgttaagctgctcccgatatggctgacgagcatagtcttcgcggtcatcttctcgcaagtctccactctgttcaccaagcaggtcagcacactggaccgccgcctcggcacgggaacgggcctggccgtaccgcccgcggcgctccagtgcctgagcaacctcaccttcatcgtcatgcttccgctatacgaccgcgtcatcgtgcccctcgcgaggcgcctgacggggca

SEQ ID NO: 30339 - DNA, 390 bp, Setaria italica
  Peptide Sequence Number=SeqID_96313
tttttgagccataaaataatatgttgttaatatcaataccatgttttccatgttagaattttttcatagcccatagcaacacacaggcatgatcctagtattatgctaataaagaaagataagtggaataaaatggcgacgaacgaaggctagtaagtcgacagcttcaatgccagcagccaccaagtaatataagtgacgctaaaggggccctgtacaagatgtggcaagttagaattctaaaccctgaagaaccttctctggatccagttgcccactacagtaactggaaggaacagctgagagctccatccttcctttccactcctcaccaggcttcaaggtaatgagtttctcaacagctgcaggctccacgcacagcatgtgttt

SEQ ID NO: 30340 - DNA, 487 bp, Setaria italica
  Peptide Sequence Number=SeqID_96314
cttcgacgagacgcaagctgcaagcctgcagcccgccgctcgcgccatgaagtgctggtgcgtgcacgcggccaggggaggagccatggcgacgccgctctccagccccttcgcccccaccaccatcctccgctccccgctccggcatcgcgcgctgctactgccgttccctccccgcgcggcctcctccggcgaggacaccgcggaagcagtggccgaccaggagggcccggccaccaccaagacggccaccgcggacgacgacttcgaggagcgcgtcctgcggatcaagtcccgcgtcgggcccaagaagcgcggcgcgcgcaagaagaaggctggggcgtccgcgcccgcgaacgccgtgacgctgccgcccgtgccgctgcgggagccccggtcggcgctcggcgcgcccgtggagttcggcttcaccgcctacagcgagcggctcaacggcgcgctcgcggcgctggggctcgacacgcaa

SEQ ID NO: 30341 - DNA, 381 bp, Setaria italica
  Peptide Sequence Number=SeqID_96315
ctctcctgtccttacgaattaagttcaaaacgacagtggaacaacaaaatacgacagagagcagtctcctcttatctcctgcttatagtatgtactgtagttagcagagttcatcagctgatcatcatctcgtcgtctcacatggcgcggttgatgaggccatggacgagcacgagccccatgatgatggaccgatccacgccgggctccaccgccagggtcagcacgtcggcgccgagcgccaccccggcggccgtcgtcttccgcttcacctcggccacggcgagccccgtggcgccgtccacgatcctgcaggcgccgcgcgccgtcgcgatcctcccgtcgtccatcctgtagcgcaccacggtcgccgtgtcgtcg

SEQ ID NO: 30342 - DNA, 284 bp, Setaria italica
  Peptide Sequence Number=SeqID_96316
gccggttggattgggcctagccacatgaacaccttgaaataatcggtacacagcccattacttttataggtacatcactgtaattcaataacacattattcttttacgtatatcactgctgttttgacacatcaattttactgcacatcacttaaaacatatatggatggatcggatgtcacaaacaagaacccggtgcagaagcagcaagctagggagatctagctcattgtgggaacgttagtcagaccttgtcgcaggcggtgccctcggggcagaagggt

SEQ ID NO: 30343 - DNA, 1385 bp, Setaria italica
  misc_feature (1348)..(1348): n is a, c, g, or t
  Peptide Sequence Number=SeqID_96317
ttacggctttgaccacaaatacacccctctgctgcgttatacacatatttacatccattaagtgatcaccaaagacaaccatccagagtttttatgctgaggatcatttgaaaaatggtgatccaagctgccgcatgaacttcacctcctgggtgatgagatatttcgatctctataataggggccagtatagaagtgatgcaatgacccaccagtgggaagataacctgggcgcaaatgagatagatgttgcaggtgatatcgatgagaacttgttgggaggcttcaaagttctcatactgggcggcattgcaggaaagacaacagcaggaagcggagatgatgaaatccttggatgaaatgatggtggatctgcatatggacctgaagctccataactatttggagaagctgcaggcacaatatggcgtaacagaggatccctgatggaaggtgaatggtgcttagcagtgctatgttctttcctgcgtgtgcatgtagaaccacagctcagaaaagtaggtgcaccgtgaagaggagcaggagcaggggcaaatgctgtaaactctgatgactatgatcgtggtggtggtggtggtggtggtggtgatgatggtggtggtggtcaatgtgatcctggtggattgagggaggttgattataaggttgaggagctggacttggggaatgagcgttgcctgagttgttcagtgaatgctgaagataggatgacagactaatctgcttaactcgtccaaatacagtgtggttcaaacccaagtttcctgaagaagaatttcttaacgtttgggctaattgttttaatctttgcaaggatggtggtttgttatctgcccctacagcaagaagaacagatgtttgaacaatggtaggaggtgcaactgttgaaccatacagatttgtcaatgtaacatataagatctcatgttcattaagaaataacccagatttcatctgggccttcaattcactcagtttgtcttgtaccacatcaatgggaaagttcaacgagaaattaaataatccatcaggcttctgaggaacaaaagcagtctgtggaggtataattgttatgccgccaggaaacctcaagatctcaaaagaagaagaattcccaaacagagatggtgtcaaatggagtatagactgatgtataaccaaggacaccaaagatgaccgcagtatgcttaactctgttggtgatatggtgaaattactaggatagggccaaattccaaaagtcacggtagtccagtttgattctgcagttggatccaaggaaagtacagacactgcagaattgttgatgccaatttcttcaaaaatntcatactcaagttttgatttatttccactcagctcaa

SEQ ID NO: 30344 - DNA, 1650 bp, Setaria italica
  misc_feature (14)..(14): n is a, c, g, or t
  Peptide Sequence Number=SeqID_96318
ctacgttttttttnttttttttttttttttcgttttcaaatcgaagcctcagcagacttctccagggccgcaaggggggcaaacaggcttgaaggcatcaagctccagccagcatcacgtttacatcacatcatgtaaaatctggctgagacatgctctcagttcagtaaggagaaaaacaaaaggtgcttccttttgcgaaccaacgtccaaaatataataaaaaaagaaaataaaaagaaaaggcagatccagtgaggactcgattgaccaggcacggggaattgcaaacctacataacttagtaacttgctacggcggtacggccaacccctatcacctgggttgctcaattctcccaccgaccgagagagactgtcatcttattttgagctagactgtcagcttgaagcagctcagttgtccttccatttgttgacgtacttgaggaacgccatggaagggttgtccttcggttgagcccggactcgcgtggagcggcgcagcaccccctcttcaagtaacatcttgttcacgatttctttcgttcgcttctccagggtgttacttatcttattatagtacttctctagctgccgtttcagagctctctcccttatacctttcacattcaacgaacccatgagtgcatcaagctcttccttagtgctgtagtaaccccattctctggaatctgcactttcaacaaaaagccttccttcacgcctgaaaaaccagtacctattgtagtgtctgtctttaccaagagggctagaacggatggatagtttctcaatctccgtctcaagatgccataccagatgtcgtttgccttctgtcttgcttcgagaaacattgctcttatccttttcttcttttcctctagccggctcatctacactctcattgccatcttgcacagcatctgtctggttctcttcattattcatggcaatttcagtgttcaagttttgctcttctttgtcctttctggtactctctctttttgttgcattaagggcttgtttctggtccacccgctcaattagtatctcccttatggcagaggttttaatagcttcttccactagttcccggaggatcttaagcttcatatcagtgtcaatgagaccgtaataaccccttcttactgtcgcaatgttactggatagttcttcaatttttgtcatttccaagaaatcacatagatattcagcccatgttactaaacttacctttaacttccgtttcttgtgctgcaggacactgaaatagtcacctttgtccttaatgagcaagtgaaacatagctgcatgtatttccacaagaagaacattgctttctttgtggcaaattgcattctccatatctgttagcggaaatggggacagattcagaaccctcccaaaagatgagcagaagtcccataccataaggagatctcccacacaaccccttggcactctaaaatctgtagcaagaggaggtctcttagatagagccggatcatctgcattgggccttactaacagatcatctattggatacttaattgggacatgtgcatctccttcatccttcttcatcttttttctcccatcttcataagttccattctcttttcttctcttcctttcttatgcatttaaa

SEQ ID NO: 30345 - DNA, 393 bp, Setaria italica
  Peptide Sequence Number=SeqID_96319
gttggcgaagttggtcgtgaacacgtgcgccacgttcgccgggtccgctgtgacgaccacgtcgaccggcgagccccacgggccctcgatgacgtacgaaagccccgccgcgcacaggaactccgtgacccactcatgcacgcgcccggcgttgatggtgatcgccgggagcgcgccgatcaccggccagttcgtcggcagcccgtcgcgcctgttcagcctgtggaatagcaggagaaagcaagcaagggagaccatgagctccgggtacctgccgaggaagccgagaaaccatgacgcgacctccattgcttcgctttcttgaagctgaagtgtgttatgagctaatgaattttgagttttttggggtaacctttgtttttattagttttt

SEQ ID NO: 30346 - DNA, 1242 bp, Setaria italica
  misc_feature (1)..(33): n is a, c, g, or t
  Peptide Sequence Number=SeqID_96320
nnnnnnnnnnnnnnnnnnnnnnnnnnnnnnnnnggtctcacaataacgtacagcatcaaggcacaatgctgctttattaaaaccaaaacttaattaaagcataacagggtccaaatagttcatcggcaccaagcaaacacatactccacaaggtctcaacttcaaatgaaaaaatgtttcagaaacaaaggcacttgatacatgacaacagttcatgttcatcccatttcgtttcaccgcaagatgctaacgaggaaacaacaagccctcttcagatctctgcaaaactcggagcttctccgctgctcactgcagctgctcccggaacaccctcagcacgtccgcgaacgtgactatcccggcaaggcggcagtcgtcctcctcctcgagcacccacacgtagctcacccggtgggctagcgcctgcaccatgacggccaccagcgagctcgcggggctgcacaccacaggctcctcggccgaccggcgcccgtagctccctgaagacgggcgcctcagcagcggccggccggtctcctcatcggaggacgaggaggcggagagggaggagaacgacgacagcgtctcgtcctcaatcagatcaagcatggcgtcaaggcccttgtccttcagcccggccttaaccgcacgcaggatatgctccggcggcgacccgaagtagtcgatgtaggccatgaggtccgccaccgagagcgttgcgatggccgcggcagccgtctcatcgcatgcggcgagaagggccggggagatctcgccgacgaggtggccgtcctcagtgaccacggcgaccgcggtctccgtggcgacggcgtggcggatgaggggcgcggcggacagggccgactcgccggggcgcaccgagaggaagtcggtgcgcacgaggccgagggaggacacggagcgcgcggcggcatggtagaagaggccgatggagttgaggaagtagcggacgaggtcctcctgcgtgagccagcagaagtcggcggcggcggcgccgccgatgagctgcttcttgcggccaccagcgcggagcgggaccgcgagcacctgcgctccgctcaggatcgcatcaagcgcctccaagatgctagagcgggggtcgacgcggcggacctctccgccgccgtccttgggcaggagcgcggagaccggcttggcgagcgccgcggcggggcgggcgagcgcctcgggctcggtgcagaggaagcagagcaggtccgc

SEQ ID NO: 30347 - DNA, 434 bp, Setaria italica
  Peptide Sequence Number=SeqID_96321
cgttcgtccgccctaaggaagagatggacacatcaagccctgcagcaatcgtcaatggagagattctgaacaagtttgttgggcgaagagttcgcacggtggttcaagtccaacgcaacgaaggtggaatggttttcgggcagtccactgacgggcatcagttgactatcaaaagtgccatggacattcctgtatcgcacttcatggaggtttatggaattgctgagcacaaccagaccatccgtgctgaagtttgcacagattttggtcccaactttgatgccaaggcatttgatgggctgtgcaagctcgcgaatgacagttcaagcacctgttcctgtagaggtcatcatcgtatggaggacctttggccaactaaagcttttttgaagctgatgatattgctagatttaagatctggctaaatgttacct

SEQ ID NO: 30348 - DNA, 1412 bp, Setaria italica
  Peptide Sequence Number=SeqID_96322
acagggcattgcgaagggtctcgctgttggattcaccggcctttctttcgccatttgggccttccttgcatggtatggcggcaggttggtgatgcaccatcaggcaagtggtgggaggatatatgctgctgggatttccttcgtcttgggtggcctgtcccttggaatggcactccctgagctgaaacatttcactgaggcatctgttgctgccacgagaattctcgatcggataaaccgtgtaccccagatcaacgctgacgacccgaagggccttgttttggatcaaatccggggagagcttcagtttgaatctgtccgttttgtgtacccgtcaaggccaaatatgccagtcctcaaagacttcaacctccagattcctgctgggcaaaccatcgctctggttgggtctagtggcagcggcaagtcaaccgcaatagcgctagtgcagcgcttttatgatgccagtgaaggaactgtcaagattgatggtttcgacattaaggaactccaactcaagtggatcaggagcaaaatggggcttgtcagccaagatcatgcattgtttggtacttcaataaaagagaacatcctgtttggcaaaccagacgcgaccatggatgaagtgtatgcagcagccatgaccgcaaatgctcacaacttcataagggggcttcccgaagaatacgagactaagattggcgagcgtggggcattgttatcaggtggacaaaagcagcgtattgccattgcaagggcaattatcaagaatcctgctatacttttgcttgacgaagccacgagtgcacttgattcagaatcagagaagttggtgcagcatgcgcttgatcaagcatctatgggacggacaactctggtagtagctcataagctttcaaccgtgaagaatgctgatcaaattgctgtagttgatggcggtgcaatagctgaaattggtacacatgatgaattgatcaacaaagggggcacatactcaagacttgtgaagttgcagaagatggtgagttacatcgatcaagaaaatgaacaatttagggcttcatcagtggccaggaccagcaccagccgtcacagcgtgtccagagcaagtccaatgccacttacaccagctgtcttaaaggaaattagttctgatgtttccccacctgcaccatctttctccaggcttcttgcaatgaatgcaccagagtggaggcaggcagtcataggcagtctgtctgcattggtatatggttccttgcagcccatctatgccataaccatcggaggaatgattgctgcattctttgttcaggaccacaatgagatgaatgcaataatcagacggtatgccttgatcttctgttcactgtccatggtatccattgtcgtaaatctattgcaacactaca

SEQ ID NO: 30349 - DNA, 220 bp, Setaria italica
  Peptide Sequence Number=SeqID_96323
cggcggcgaaggttgctccaccccgtacgacggcgggctcggcgggaagaaggcgaagcgggccgcgaccgtcgaggtgacggcgcccatctagggttagggtttgcggatgggccggagggcgggaggggggaggagggcgcggggagggagggagggcggagcgcgtcgatgtttttcggtttcggcttggcgtcgttgaatgtggaagggaaagagg

SEQ ID NO: 30350 - DNA, 407 bp, Setaria italica
  Peptide Sequence Number=SeqID_96324
cgaacgcccaacccggagcccttcatcgacgagcgcgtggcgcgccacgggagcggcgtcttcaccacccacgtcttcggcgagcgcaccgtcttctccgccgacccggccttcaaccgcctcctcctcgccgccgagggccgcgccgtcgactgcagctacccgtcctccatcaccacgctgctgggcccgcactcgctgctcctcaccaggggacccgcgcacaagcggctccactcgctcacgctcacgcgcctcggccgccccgcctcgccgccgctcctcgcccacatcgaccgcctcatcctcgccaccatgcgggactgggagcccgccgccaccgtgcgcctcctcgacgaggcgaagaagattaccttcaacctcaccgtcaagcagctcgtcagtta

SEQ ID NO: 30351 - DNA, 906 bp, Setaria italica
  misc_feature (876)..(876): n is a, c, g, or t
  Peptide Sequence Number=SeqID_96325
gatgtacgagctcttcctcgagctcagcacgcacctcaacgtcaacctcatgggttacgattattctgggtacggacagtcatctgggaagccaagtgagcaaaatacttatgctgatatagaagctgtttataggtgtcttatagaaacttatggagcctctgaggaaaacatcattttatatggccaatcagttggaagtggccctactttggatttagcatcccgtttatctcatttgcgagcagttgtactacatagcccaatatcatctggtttaagagtgatgtatcctgtgaaacatacatactggtttgacatatataagaacattgacaaaattcctctggtcaaatgtcccgtcttagtaatccatggtacagctgatgaggttgttgactgttctcatgggaggacactgtgggagctatctaaagtgaagtatgagcctctgtgggtcaaagggggaaaccattgtaatttggagctatatccagaatacattaaacacctgaaaaagtttgtcacagcgatagagaaatcaccaccagtgaaagatgaatctctggagagttcaggtccctcagatcctagtgaaacaggatccgaaggcacggagagctcaaggagaagcacagatattagggacaaaccgaggtcaagcattgaccatagaccaagcacggatcgacgggagaaacctaggggcagcatagaccggagagataaaagcagaaaaagtgtggatcaacttgacaaaccacgggctagcatggatcaacctgacaggccacggaaaagcattgaccgatttggagggatgatgagatcagtcaaattgtgcaatattgactgtttcactgcagcttctggganctgaaagtaagggaaggttagtacctggta

SEQ ID NO: 30352 - DNA, 398 bp, Setaria italica
  Peptide Sequence Number=SeqID_96326
actgttacctccttatgcagcctgcgttctggcctgtgtgtaattatttacttaaagggcatgaacccttggtaaccttccattagattacttccatgaagcatcttaaaagaatgacaggaagcatgaaccttccattagattacttccatgaaataagcaggattataatttaaactattctactattttagtaatacagatgtcaagatgcttccagttccctctcaaatcatagcaagttatgccttataatgcaataattgtgcttagcttcctttcaaaagaataatcatgcttagcgaatgatgagaactgccatgtcattgcaagaagtgtgggtacttcaaagttctcaacactcaaccagggattgacttaacttgttttgtactatt

SEQ ID NO: 30353 - DNA, 1114 bp, Setaria italica
  Peptide Sequence Number=SeqID_96327
cttgtgatgcctccaactcacacctcatagtgtagctgtgttaaaaacctatgcgagatttccacaccaggacttccagctccctatgaacttctggatttcttgcttggaactcatacaacgttgtctttggaacatcaatcagaggagaatgtgttttaaaacaaagaactttgaacctcaaggaattgttggacagactccaaacatacgcagtctgttttttctgaagaagagtgtgtggatgttcaccaaagaggaggagatgccactgtacataatctctctgcaacttaaggatcttgcgccagaattgcgcatgttgattagctcttagaatgccactgatgacatttccgcccaagaaagatccatcaagctctgctgcaatttccattgctattgatgctagctccgggtccacctcgggatctgtgcttccaaaggccattaccttgaaaaataccagtaagcttcttgagtcagatatttcagtctaatagctcccgttgtaccgagtttcgcgatatcctctgttctgcttgtgataatgaccttacttccaagtggcatgtggcttgaagagtacagctttctccattgcctgtcgcctagaaccaaatcctcagcaagctccatgacaataagtgatcttccatgtgagccatgactttgcttcttgacgacatcactgccttctggagcactagggtctccgctgcacagaattattgaggaaaagtgattgtgcaccctctcatcgtaacagacatgctcaacaagggtgcttttgccaactctcggtggaccaattatcggaagtacttgcaaactatttgcgcctggaggctctggctgcaacaagaatctgatgatcttctccatctctgcctggcggccaaacatgcacttctccataaacaagtacttgctatagggctcgcgaatgatgggaggataggatttcaagaatataatgaactctgccatatcgtcgatgatgctatgcatgtttcctagcatcttctgaacgtcctccaccccatgaccttgaaatatcgcgcctatcctcctgttagagaagcagaagcgcttggctgaactgaatttggat

SEQ ID NO: 30354 - DNA, 274 bp, Setaria italica
  Peptide Sequence Number=SeqID_96328
gcggtgacgacgtcgcgacctccacggggcagcgccgcgggcagcgactgggatggagtgcgggcgtgcgggagcggcggcttctttgggagcgagacgcggatagaagaaggcaagtaggagcggtggcggctggtgacgcaagaaggggcggcggcaactggcgacgtagggagaaggacgaagggagggagagctggcggcaacgtagggtttcgcgcggaggacggacggaggaggaattcacgcgagtgacaggggacgcagggttttt

SEQ ID NO: 30355 - DNA, 713 bp, Setaria italica
  misc_feature (702)..(713): n is a, c, g, or t
  Peptide Sequence Number=SeqID_96329
gttttgctttctggagtagatttggttgacggcacgcctgttattgacattaaaccgtacctgccatattctgatagtgttaaaggtgcggctgttcccaattggttagagattgatggtgcattagctgtggagtccatccatttttctgaacaattcatatctgcgcttcacatctgctgggtgcatgcccaaaagcagtccctctatgcttcagcagatgaatttcaggatctcatcaagcaggtcctctcttgggacatcagatcgctctcccagcggatccgcccccatcaagtagacatggaaagggaaaccaacagccatcgcagcgaagaagctgatgaggaccacggggacggagcgagctccggcgtcgtctaccacctccatctcgaaggcatcgatgtgtcatacaggatagatcaaggctccaacattgtcgtcgaggatgccgctcttcttactgttgtcaggaaccagaaccgggacggttacctggcgtggagggataaacttggcagcagcggtttgtagcatagccattcttccctctgttttctcctccgcttgttgtaggatgtcgtgatgccgatgaatgctaatctctgaactgaatttggaatgtatatttcgccgccgagcacacagaaagaatcaccaaagggtcgaaatggcgcctttgataacaaaaaaaaaaannnnnnnnnnnn

SEQ ID NO: 30356 - DNA, 946 bp, Setaria italica
  Peptide Sequence Number=SeqID_96330
aacacataatttccttgacatggcatgtcattatatgtggattcagaagttacacgtaagatggccgattggtgaagtactgaatgactgatgatctaagatattgaataagagtttttgtgggtcttttgggaacattccttgtggtttgggctcactgtgaattttggttttgaaggctgcctttaactttaccatgcttgaaagattggtcaattctatactacaaaaaataaatataagcaaggagtgtccgaacattcaccatattgtttgacatacatacaaatccaatgaacggtatttctccctaatgcgataaacatatggataggaatggacaggaattttctcaatcacaaaacagtacaagtaggggatggataatgagtgactagcaacatgcagaagagtttggagatgtcgttttcatgtacgtcagcattagattatctgggaaacaagttggaaggtactgccttacgtgtaagactgagaattgatggatcaaagtttatctttctattctgatggattatatcagtccttagtccttacaggagaatcattcatgaagttgacaatgtctatggcaattctcagccattacttgttattctgttttccaagcttcaactccctgaagctctgttttggactttcctcaccaatttgctgtccatgtgtacaggaccatgaagagaaatctggctggagaagatcatgggaagaccagatcacggagctgaagagaaggagcatgacaaaggattcagaagtagaaattctggttcgttgggagctcggatgcggagaagggccgaggcatcatcagcagaatgactgtgatagtaacccttccaacgcaacaatactcatatctagcatctgaaccaaagccctgagacacgcaacaggggatatgacaaggcacacgagggatagg

SEQ ID NO: 30357 - DNA, 1158 bp, Setaria italica
  misc_feature (1086)..(1158): n is a, c, g, or t
  Peptide Sequence Number=SeqID_96331
cgaagcgcagcaaggaaaccacatgccccacctcgccgccactccctccacttcctccgcggccgccgccgccgccgccacggtccccgccgccctccccacgggttccggctgcgtcgcgttccggcgaccgtggaccatcccacagccggtggcgctacggctgcgcctgcgcgcgcagggcgtccggcgggagagcggcggcgtgcgaacagaggagcaggagcaggagacgacggcgcggacgttctacgacctgctcggaatctcggcggaggggagccccgatgaggtccgggcggcctacaggcggctggcgctcaagtaccacccggacgtgtccccgccgggcgccgcggcggagaacacccgccgcttcatcgaggtgcaggaggcctacgagacgctctccgacccgagccgccgcgccagctacgaccgcgcgctcgcccgtggcgtctgccgcctcgccttctccggctctcgtgcccagcgcgcctactaccaccaccaggaccatgaagagaaatctggctggagaagatcatgggaagaccagatcacggagctgaagagaaggagcatgacaaaggattcagaagagaatctgtcgtggggagctcggatgcggagaagggccgaggcatcatcagcagaatgactgtgatagtaacccttccaacgcaacaatactcatatctagcatctgaaccaaagccaactatatttttgggtaggcgcgatttgaaggtgttgtctgcgaggttttaagacgtgtgtctaagatgaacctgttgaaaaacctgcagcaaccccttatcagaatcgcttagcaagtaatatagcagtagtcgctgtagcagtgtcatctaccaggatgtgaaaaacagcagcacctggagtgcggctgctgagtgctgaccaacatccatggccctggtgtatatagttgaattacctgcctggctgcatgtagaaaatcaactatgttactgttatcgagtcatgtactgcctggtgaaaatgtaaatagtacaaataaataagaaatctagctgttcttacccaaaaaaaaaaaaaaaaaannnnnnnnnnnnnnnnnnnnnnnnnnnnnnnnnnnnnnnnnnnnnnnnnnnnnnnnnnnnnnnnnnnnnnnnn

SEQ ID NO: 30358 - DNA, 227 bp, Setaria italica
  Peptide Sequence Number=SeqID_96332
tgatcacagaactaccgctaacaacaccactctgctcgcttcggctcatcagctcgtcgccggccggccgcgatctcgccccgcactccacgcacctcccctcctcgtcgccgtcaccgcatcccacgcccacgtccacggccacgtcgtcggcgtccactccccggcccgacgccggcatggcgaggaacgtcggcctctcgtcgccggccatgatgaccaccaca

SEQ ID NO: 30359 - DNA, 305 bp, Setaria italica
  Peptide Sequence Number=SeqID_96333
gccagagctagcgagctttcagtagtagatagatggaggaggccatgctccaactccaagccctgtgactacatactgatgtggtatcaaccgcgacggcccgccgcggctggtcccttctcgcaaccggagccgcagcatctgccgcaagcacctccgcctcctgcctccgatggccacccggccgacgcgccgccggccgggcactccgttcggtggctcgccgccgcgggcttcgccttcctcatcttcaactccgggatggccgtccaccgctcccggggcgacctcggtgccatcgcgtt

SEQ ID NO: 30360 - DNA, 683 bp, Setaria italica
  Peptide Sequence Number=SeqID_96334
ctcgaataaaaaggtggataaagacatccaatcaaacaaattggggttatttgggtttactcccaaaattttaagttgcagtaatatgctattaatataatgactgcagcaattgctgccagtttccaagagaaaaaaagagggcactaaaatggagttaatagttcaccaaaccagtgtaccactgcaatggttgaaggagcaaagagcttcttcaggtcaactttttggaagtcgatgatatcgatttccatgtactctccagcaggggaaccttatttttagttggaggtatatccgtggatatcaacgggagtgtacgctcatcactgtgatcattcaaggctgagcagatttcttcagcaactgtttctgtagcacttcctggaattaacacttctgtttggtttgtttgagcattgccatctccccccagtcacatttgaggtgacacgaacaatattatacacaatcgaccatagaaacacagcaccgatagccattgagagtgaagaatatgctagtccataagtctgacaaacatcatgttctccaaacgggcttcccttctctttgcaaagagctggaatgattatgagaaagatattgcccaaattgcctgcatccaaccagcaagttaactgtaatttttgaaaagataagaaaaggacaaggttcctaag

SEQ ID NO: 30361 - DNA, 347 bp, Setaria italica
  Peptide Sequence Number=SeqID_96335
ggcgagcaacgtgctcctcgacgccgagatgaacgggaggctaggcgacttcggcctggcgaggctgtacgaccacggcacggacccacataccacgcacgtggttgggacgatggggtaccttgccccggagctcgggcacaccggcagggcgtccaaggcctccgacgtgttcgccttcggcgtgttcatgctggaggtcgcctgcggccggcggccggtcgtgcaggacgagcacggcgaccaccacctgctggtggactgggtggccgagcggtggcgcggggggacggtcaccgacgccgtcgacccgcgcctccggggcacttcgtcgtggaggaagcgag

SEQ ID NO: 30362 - DNA, 625 bp, Setaria italica
  Peptide Sequence Number=SeqID_96336
tttcttgggttcctttgttactaaggttgtctaggtacgtacgtagttccgtagtctgttcgacgtgccctacgcccgggtgtaccgcggcatcgccatgctgagctccggccagcgcgggctgcccatgcacagcctgtggctctgcaggaccttcttcgcgctggcgctggcgctgagcgtgctccgggacgtggcggcgcggaggcggtggcgcgtggcggagtacctgccgagcaccatctgcgtggccatcgccttcgtggtgccggcgcacatgcccatcgacatgttcacggggagcctggccatgtacctgtggaggcgtgccgacccacgcaaggcgcgggcgttctcggcggcggcggcgtcggggctcatctgcggggacgggctcgggatcctgctgtcgtcggtggtggcgctgacgcacgccagggcgcccatctgcatcaagttcgtgtcgagcagcgacaacgtgagattggacgccttcctggcgacactgccaaagatatcatagcagcttcctcttccttcttgggatgtttgtaaattttcctaggggacaccatagctgttgtgttgcatgcacttgtaatcgggattcagtctggtcgaattt

SEQ ID NO: 30363 - DNA, 674 bp, Setaria italica
  Peptide Sequence Number=SeqID_96337
atggggaccgatgtccagcagcaacaacctgatgcaggagctcaagacggggtacctgaccctgacctcgccgcgcgccgtgttcatcagccaggcgatcggcacggcgctcgggtgcgtcgtcaacccgctcatgttctgggccttgtacaaggtgcaggacgacgagtccgagctgttcgacgtgccctacgcccgggtgtaccgcggcatcgccatgctgagctccggccagcgcgggctgcccatgcacagcctgtggctctgcaggaccttcttcgcgctggcgctggcgctgagcgtgctccgggacgtggcggcgcggaggcggtggcgcgtggcggagtacctgccgagcaccatctgcgtggccatcgccttcgtggtgccggcgcacatgcccatcgacatgttcacggggagcctggccatgtacctgtggaggcgtgccgacccacgcagggcgcccatctgcatcaagttcgtgtcgagcagcgacaacgtgagattggacgccttcctggcgacactgccaaagatatcatagcagcttcctcttccttcttgggatgtttgtaaatttttcctaggggacaccatagctgttgtgttgcatgcacttgtaatcgggattcagtctggtcgaatttacaagtgaatgcaatttcaatgca

SEQ ID NO: 30364 - DNA, 663 bp, Setaria italica
  misc_feature (24)..(24): n is a, c, g, or t
  Peptide Sequence Number=SeqID_96338
catggaggccgccgcggacgtcgngttcgccatggtggtcgccgccggcggcagcgggtggttgtggtggccctcgtacgtcgttaccaggatggtcttgtcctcggcgcaccgttgcacctgcttcctcacggggcatgccacagccattgtgcaccggtagtatgctctcggacatggattacccttggccatcttctgcccgtacttcctccactgacacccatcgctgatcattggtgcctcagatcgtgcgcgaacagacaccctcgccttccggcccggcagctctgctgacgaggcctgctcgccattctccctcgacggcgctgtcccatcctgagacaacttcctcttgccgtcggagtcgttgtttccagcattattgctcagcgaaggtgaggcctcgccggctccgtcgctggcctcatcctccactccggcgtccggctgcgtctgcgccgtggaggaagcccgcgcctccagcagctgccgggtcgacgtgttgggcgcgcccatggtgttcaggtgggtatgaggtagtgacgatcggttgttcatgagatcaggatgctgatgctgatgttggggttgcttgtctacctggagaagctgctggtacagcgtgccatagctccgggtgagctcctccagcatgccccg

SEQ ID NO: 30365 - DNA, 761 bp, Setaria italica
  Peptide Sequence Number=SeqID_96339
ttgaaacaagatatatttggagtaaaagtgggtataaagataaaaggaagtgggtcagttaacaccccgcctggtattatgaaaagtatgctcccaagagttcgtacatttgttggtttcagacctcagccagttaactcagaggacagtggaggcgaggcaactgatattccctggaagaaaatatctggcattccctgtggtaatagacaagcgcatagaaggaggtccggagggcacagaataaaaaagattgatgttgcaaaacggagaactgtgccgatacaggattctaactctttttgtggagtggtgctagaagatggttcttcttgtctggagcacccagttgaaggaagaaagagatgcagcttacacaaaggtagaagagtcaaaggcagccctaaaagctcatctactagctatccttgccaagctgagattccaatacctcacctaactgaagatttagacaactcagatcaaacacaggagattattgaatccatacctcacctaactgaagatttggacagctcagatcgaacacaggaaagtaaaatattgccccaaaatatctctacaactgtggaggaatccccaagacaaagcaatagcatcaaagaagaggaggtgaaaactagagaagctcctacagaagatggaaaacatgacgcctccagggatgcttgtatctgtgactgtgaagagaaggcttcccatgctgaacctgacgtcccaggtaccgcacgccctttcgt

SEQ ID NO: 30366 - DNA, 288 bp, Setaria italica
  Peptide Sequence Number=SeqID_96340
ggggtgagcttgatcttggtggtggcggtctcgaacctcaggtcatggatcaaatccaacctccgctgatactcttcgtccttgcggagggcgcgcttcttcttggcgagtacccagggggcgacgtagcggttgccggtgagcgagtagagcttgaccccgttgatggaggtggacttgagcgtccccgcgccatggttcgccgccatactcaaagcggccgccggagccctatcccgcgctcctcgtaatcgtcgtcgacggcgccggcgaggtggcgggcgccgc

SEQ ID NO: 30367 - DNA, 372 bp, Setaria italica
  misc_feature (1)..(25): n is a, c, g, or t
  Peptide Sequence Number=SeqID_96341
nnnnnnnnnnnnnnnnnnnnnnnnnatttccatcaaacttagatagcatcatgaaatcaaatgttggcgatgagcattgcacagttcaattcgacatcttgtttcaagaacatgagtaaatcaaacaaacacatgagctatgcatttttacacacagaaggaggtgctaatcatgtatgagggactaatcatgtataaggaggggctaatcatgtatgaggaggagctagctacacatcaccttactcatccgaatgagatgtcctgaaaaatataaccactgtgatgagcaagcaaacacctctagtcatctacgtgttaattgtcccacaagtgtcttcaaatttgcttcagggtcacaacagagtcttc

SEQ ID NO: 30368 - DNA, 1498 bp, Setaria italica
  Peptide Sequence Number=SeqID_96342
ttttttttaaggtaaataaatacaacttacaaagtttttaaatactccttcaagttttttaaatactcctaccgtctgcacaaaagaatattaaccccacaagttgaaacaaatcaactatgcaagtgaacctgactcatctgaaaactactgattgacaacaacctacggacacttatctgacatctcacaaggtatacaccaactggctctcccaagttcttttttggggggctccttctcaaccgtatacaaaagccctgagtcatcaaaagggtcaagatccagatatctacaaacaaaatacttccatttgaactaactggcccactttattcaatgtctagttggcgactttgatggcatacaccagctccagaaccccattgggaaatgtgaaagaggaacgcaagtctgaaaggcgttcctcccctacaagccttgccttatcgaaaccagatgtgttagtgctgacaaggtcgctgtaagaaggcttcaacgcgtatatctcaacttcttcatctttgtgagatgtctgagtggcgacaaactgacacagctgtttgatggagagagttgggccacaacacagatatggcttctccagatttggtgtagtttgtccatccagtggaagcagacaaagatgtatgtcacgctcactatcattgtcatcagaatttcgcaaacattcgaccaacttgatcatgcgcccacccttgaccaccctgccatttgaaccactaaagctactgtagcgagtctggctgcgagtaccattctttccccatgctcgcagtggagatgtgctaaaattttctctggagattcctacatcatccttatcatcagaagcaacctcttcattgcatgctgctcgggcaggtgaagaacgtggtgttggccatttcggtggtcgtttttgctttttctctggggaactctcctcagcagatgactcctctttgccaccgttttcaccatttccatcctcttcatcatcagaacaggccagtgcagcatcatcagaactagctcttcctctgccacgaaaataggtactatgcccattggcccgaatgttgcggcgtgatcttcttacaaatgcagccgcagtagctttggcagtagatttccgcccaataacttctgattgtttcctaaaagcctcagcaatggatgcttgaatctgcttattgcgatcattctcctcttcattgaaggctagttcctcttcttcatatttgtcaatatctgggtacagagctgcaatcagggcatcgtagttcggatcatctctcaaagaacgccgacttgcacaatgagtgcggcatgctgggcactcattattcccaagtcgcatggatttgtcaatacattccctgcagaaccggtgcaggcactccataactgttctagtcttccggatgatgcctaagcatatgggacactgtacttctttgcgtatgtccgccaatttcactggaataaactcctg

SEQ ID NO: 30369 - DNA, 444 bp, Setaria italica
  Peptide Sequence Number=SeqID_96343
ggtgaatgtgtggagccctggtggtgcagggaacataggggtcaacgtacgcaagggtttggcgtcaacaactgttgaattactcaacagaattgaagccttctgctgagccattgtaagccaccaattgaccttttaccaaagcaagtttttatgtgattagttcactattttttttgtactttcctccgcagttgcttgcaactcgtgcttcaaagaaagctccatatttgctgtgcaatgaattccatgatcttctgcatcattgttcacatgacatggcacctagtggaaacattatttcttcactacaagttggtatcctttctgttcaggtcgccggtgtggaggacggcgcggccggtgccgatctgctcgccgccaaccgggagcgggcgcgggtgcggcagcggcgccgccgagatccagatgcgccgcccctgt

SEQ ID NO: 30370 - DNA, 388 bp, Setaria italica
  Peptide Sequence Number=SeqID_96344
ccttgagccagttgctggtgtagagctgcacgccgggctggttcgcccacagctcgaacgcccgcccggacgccgggtccctgacgcgcgccaccagcgtgaacccctgcccgtgcaccgcgtagttgacgtcgtacccgaccgctccgccgccggagacgaggccgatcctggagcccaacggggtcggccgccgcaggtcgtagggcgtgccggcgacggccgcgatctcccccgtcgggatcatggactggtccacgggcgtgtactgcgacgccaacacctggatgacgtggcccaggacgtcgccgctgccgtggcccgccaggttccagtacgcgtggttcaccaggttcaccggcgtcgccttgttgagcgccgtcgcgtt

SEQ ID NO: 30371 - DNA, 639 bp, Setaria italica
  Peptide Sequence Number=SeqID_96345
tgaaaggtcaccaaccaatgcgccttgacaattcgcatcagcagtcccaaatatggcgctgattatgcacacaccaacgaacactccaagcccaccccgtcctttagtagcaacatccagaattatcaatgaaaaagaaccgaggaagaaaagggaaaatcctgctagatttctccgtcttgtgttcatcttcgcttcatagtatgtcatgatgagggttattccaaaggcaagagtccttacactaggtgtaaggactcttgttgggtggtaatcctgcaaccattacatatttgttacaaatttgaatgtatgaatacaataagtactgcaacgaataagggactaattttatcttctaattaaccattaatcaatggactgcactgagaacaaagtgataaaccatatcaacaacaacatcaacatcaaaacctttcagtcccaaactagttggggtaggctaaaaggaaacagatgaaattaactgaaccaataagcaaaatgctggttgcattcagtttaccccaagaaccaagataaatcagggatgccacccctcatgtttctcaaatgcatgtttgggctactatgctatgccgaatactgaacctgttcaaaccatcaactgagttccgc

SEQ ID NO: 30372 - DNA, 439 bp, Setaria italica
  Peptide Sequence Number=SeqID_96346
tttctagccgtttgcttgatgacaatccgttgcctcttaatgaggtttcagcctcagaattgctggtgtcattttctcatggacacctccaaagtggccagccacctatagtgggcctcaggtcatcaatgcctcaagtagataggggttttgttacactggttgcttctgaccatccaggaattgaggtttgcaacccaaatggtcattggtacctggcagatggggtctcaggccctaatgacctattgcttttgactggaagagccttgagtcacgttactgccggtatacagctaaattctcagtacaggaccactaacagcgaaacagggcatcactcatgtttaggctgatgcctcgtgccgatgctatattggactgctctccaatttcagctgctggacattgcattacctactagtattcttacctagta

SEQ ID NO: 30373 - DNA, 337 bp, Setaria italica
  Peptide Sequence Number=SeqID_96347
ctccttgttgtcatcttcagctcgcgctgcatccacctcaattgtcaattcctgcagcaccgccttccttttctcattgggtcttgcagtttctgtacgtgagtttctcatctgcagcagtgttaccacaaccatttcggttctcatcaggttcagcattagcacacttcaccgagcgtcctaaaattttcttcttgacattggtcctagactcttgccctctcttggcactcttcgtcagcgcggtctcttcacccttcttagcagtctttggattcgtcagctgacacatgtacctgctcggcacctcccggcaccccaagttcagcttccgcag

SEQ ID NO: 30374 - DNA, 282 bp, Setaria italica
  Peptide Sequence Number=SeqID_96348
gttcgacaaggacatgcgcgggacgcggagtggcgagggcgagatgttgaagctgctcaaggtcggcctcgggtgctgcgagcccgacgtgtcgcggcgctggggcctcgaggaggcgctcgcgcgcatcgaggagctcagggagcgcgactccggcgacgacagcatcagcaccgcctcgtcgttcgtcagtgacggcgagccgcagtcgcactccgcgtagtagcgacgaggaaccatgtcgtgtgatgttcgtgtaccgtggcggcatatgttggtgag

SEQ ID NO: 30375 - DNA, 592 bp, Setaria italica
  Peptide Sequence Number=SeqID_96349
acttgaaactgaagaaagattttgaacagcattatcaccagtagacttattgttcattgggtgtttcttcatcctcatcgtagttatcctcgtcaaacactgaaactgtattattgaccgatgcatacactgcagatgacaagtaatctttttttgacaacacattatcctcctctgtagctgcttcaacttcaggtccatcatattcttcatcaatatcttcatagtcaacagcatcttctgccttctcatcatagtcttgctcagaaggatcagttggtgctggagaagacttgattaggtcaatgtctttgaaagatggaccaagcttgtctgccagtgcaaaaaggtgttcctttgcatcctcatcaagatagtcagcatcaaagtcaccagaatcatctacattgccgaacataaaccccaggaagtgatttcctccaccaggttcctcataatcctcatcgtcgtcatcatctgcggcactggcggtcgggttctcctcatcgcggcgctcgccgtcgctcatggctgcggctgccgctgtccaccactgcctcccggccccgggacggcaccaccagtctttact

SEQ ID NO: 30376 - DNA, 409 bp, Setaria italica
  Peptide Sequence Number=SeqID_96350
ttagttggtgcttttgaaacagtgatttctctccaagatggcaaacccacatcatcaacacaacaagctggtagttcccaagatttatttcctgatgatgaggtgaatgcacctgaggaagctgaatagaatgtgcatgtctttcaaagtttgccatgtttgtattcggcttttgggttccttttcttttatgtgctctagaattgagcctgatggagaggattttgtacagcagatttgtcctgtagaacaaaagctgctaaaaaggttttagtcgattcggttccatggaatgagtgctttgaagtttacataattgtaaatcaattgagacactgtaataccccttttgtttggcttggatttccctaaatgctttattagaagagttgatattatttgaaaaaaa

SEQ ID NO: 30377 - DNA, 375 bp, Setaria italica
  Peptide Sequence Number=SeqID_96351
ctggggaccatgagtcatacaatatatctaaacagatgtgcccattgctgtaaatgtgcggatgcatcggagctggatgcaggaatataacctgaggtgcctccatggggtaatgctcggggaagtccacctgcagctggtacgtctcaccggtgtagagggtgcctggcgccccagccacatcgatgacccacctttcgtgttgtttcatccatcgttatttttcattacgtttttttctttcgttcaggatcacaaagatgctacaaaaattgtaacgaaaaaccctaggaaaagaagacgagagaaatcgcaaagaattccacagctacaagcccaaaacgcacgcaacgcgacgtcgttctttggaccagg

SEQ ID NO: 30378 - DNA, 931 bp, Setaria italica
  misc_feature (1)..(45): n is a, c, g, or t
  Peptide Sequence Number=SeqID_96352
nnnnnnnnnnnnnnnnnnnnnnnnnnnnnnnnnnnnnnnnnnnnngaaatccagcaagtaaaaggttcaacctgcattgcatttttgtgtctgttccgtaaattgacaagatacaaacattattctatatcaacaaaggtaacaatggcaggacctgccgctgatgcacattcatttacaaccacaggggcatgttaatttcaggtcaaatgggtcgattgaattaagcctaaatcatctcccatgtaaagcaatctggcaactggagggggctgctgccaggaaggaaacgccaattggaacacccatcacactgtgtcatcatggaaccaccacctggtctccttcggtgacctcccgttgcggcagttcctgacatagcgatcattatcggctgggcgttgctttgccggtgagcttgacaacatagacaagatgctgatacagacagaactgaccgtcatcgctggggaccatgagtcatacaatatatctaaacagatgtgcccattgctgtaaatgtgcggatgcatcggagctggatgcaggaatataacctgaggtgcctccatggggtaatgctcggggaagtccacctgcagctggtacgtctcaccggtgtagagggtgcctggcgccccagccacatcgatgacccacctctggaggttgtcggtgaccctgtgcttgaagccggcgggcgggttgacctgccattccgagagctccttctgcaggcggctgcacgcaatcttgctcagcgccttccgggaagtggatgaggaggaggaggaggagctcgtcatggcgcgggcgggcgggcggccggcggccgctgggttcccgcggaggccgaagggggcaaggagggggagggggagggggaggggaggggagggggagaggaaaggtatctgtgcgggcggcgcgg

SEQ ID NO: 30379 - DNA, 477 bp, Setaria italica
  Peptide Sequence Number=SeqID_96353
aattttccttcatagttactgcacattgatacgagtgctgcacaaattgcaaattctggtattgagtactagaagatcaggggcaactataaagttataacagataattctgctgttttactcttcttggactacatttgggctgaaaaagttaactttctcatatctggcatttattaacttgctagatcatctgctaattcactgtcatgctgaactgaaactgaagaattacttatacatgccaatgccgttctaggatacatattaattaaccaatagtgccccatgccacaaatatgctatggtatagtagttttcagatcgacagtgaagtagtttggctgaaaactggaactgaagaatttcttagacataccaacgccacaagcctgcaatgatgatgccaagttaaataactgacaaaactcctgataaagcctctgtaatgcatagcatctcattacaaaagagaag

SEQ ID NO: 30380 - DNA, 509 bp, Setaria italica
  Peptide Sequence Number=SeqID_96354
cgacgccgccggggccggatcgtacgcgaacggaaatatgtgtcgcgtcgacggcagcgacgtggccggcggcgacatggggttggaaacagaggacgagtcgggggacgggggagcggacgagagcgcggacagggagcggttgaggcggcggtcggggctgcggatcttcttcaggggccggagcaatgcggccgccggcgcgtcttctaaaactggcgccagctgcctccccgcggcggagcccgagctcacgcccttccccttccagcccctcccgcgccctccaccgcccctgtccgccggctccatcccgacgagccccgcctccagcgcgtcgatcagcagactaggttgcgtgtcgtgtgtgggtgtcccggccgcccgctgcaaactgcaccgaggagctatggctttgagccgcgcgtggaaaacggggaaagcgaggctttgccaagggagcggggggcgggcgaccggtgtgcgcgagccaatggggcgcgcggttc

SEQ ID NO: 30381 - DNA, 743 bp, Setaria italica
  Peptide Sequence Number=SeqID_96355
aagggaacaatacaaggaagaagacaaaattcttttttaagttttcaacaagtctttggaaaccgcagaacattgcaagtctttgtattcctaaagaaacatatgaacgaccacctcttggggtaaacaccatttgaaaacacctaactctttgtaccgtgtgaggttaaacacttgcacgaagccgtgatattgggatttctttcaactcccgccgaatgcataggtattcaccaaggagagccataattgccaaaccagcgatattgacaacccaccatgtaactgaagctggccaaccaccatatacaatacaaatgaagagatggattatgtagagggtcgctgcaaagtccaggcacttcttggctctctcaatcacataaagcatgaatccagcacctgcgacggcggcgaggaggaacgaggcgatggcgcaccacccggtcggggtgcgcggagtgagggtggcgaagtcgaagaagtagaggagggtgagccgcgggacgcgggtgccgacgaggagcgacatggagaggccgagggccaggtagtagaggcactgcaggcacacgatctgcgacacgatcagccacgggtcccacacaatcgcgccgtagaacatcttcgctccccgtccccggctaatctcaccggagggaaggaggaagggaggtggcttcttctctccccgtcccagcttttctcaccggagggaaggaggaagggatgcggcttctctc

SEQ ID NO: 30382 - DNA, 234 bp, Setaria italica
  misc_feature (204)..(204): n is a, c, g, or t
  Peptide Sequence Number=SeqID_96356
gtcgaccccatgggggacctcaacactgaggccgagaaaaagctgggcgagcttgttcgagacaagtacggcacggagttctacatgctctgccggtacccgtcggcggtgaggccgttctacaccatgccctgctccgacgacccacggtacagctgctccttcgacgtcttcgtccggggcgaggagatcatctcgggggcncagagggtgcacgacccggagctcctggcg

SEQ ID NO: 30383 - DNA, 217 bp, Setaria italica
  misc_feature (173)..(173): n is a, c, g, or t
  Peptide Sequence Number=SeqID_96357
ccgaggggacagctggggtcaacccagataacaatgacaatggtggggccaaggccaacccagcttcgactgataacccgatggacagctcttaagatgatttcaggctattgaatctccaggttgctgaagtaacctactactaggtgtatcgaatactcatcgggggggtntttagctttcctgagacacgcaacaggggataggaaaggcacac

SEQ ID NO: 30384 - DNA, 725 bp, Setaria italica
  Peptide Sequence Number=SeqID_96358
tactttagcagagcctttgtctttcctgcttccccgtgcttcttccagctcctcaggcagttcaaacctcctgtttctgaatgcaaccacaagaacctgcaggattcgagttagagggcttccctcaggtacttggttgcggtagaaaggaagaccagccgcaaatacaagcaatccaagaagaattaggatggcacagaagccaagtccaatgtcccaccccttgtagttctgaagccacacaatgaaaattagccccacaaaacctccaaaggagatcccaaatgtgtaccagttaaagaagctggactgctggtgggattcagaggggtcttcatggtcaaactgatctgctccgagggatggcaagcaagcacgtatgcaaccttctccaaatgcactgatatacaaggctgcataaaatagtgtagcgttccaaccatggacctctttgcagtcactcagttcaatgttgcaaggtggtggatggagtgacggaatgtaggcttgcagtgcaagcaatccatagcccagaaactccaatggaccaaacagaagtatagtcctagaacgagtgatgtacgagtctgagaggaaagctcctatcaaagcaaatccagatgtggcgccaacaagattagtgactgtagttgcagagcctgatactcccatatgcattgttccttggagatagatgaccgaattcagcaaaaatgggatattaa

SEQ ID NO: 30385 - DNA, 903 bp, Setaria italica
  Peptide Sequence Number=SeqID_96359
caaatgaacttgttcatccaaacctgagaacagactgttcagcactcactcgaggggagcatcaatccacagcaaaagttagacgcggagaggactagaactgcgatcacggggcacacttacaactcttgttcaaaaactctcatctcccacaaaatttgtacaacagcatctagggcgggaaagaaagaaaaaaaatgaagcgaaggattgtttgatcaatggcagtagggttgggggttgacgatggccatagcacctctaaaggatgaattattgctggaacagttcccagcatttggatgccttcagtttcgttgaaggatgcgcaatcagttcttgctcttctccttcatgccggagtgccggaacccatcccacagctgtaacgccgcggacgcggtcagctggttctcagatgccggatgcgccgcggcggcggcgtggccgaacaagaacgggccgtccagcctctggagctgctggtggtgatagcctgaaaagttagactgggaattggactgaagggtccccctattggcacccaagaaacccgaggacatggagaaattgaggctgtagtctccggcggaagcggaggacgccgccagagcgtcctggccgagcgagaagtgaggcatctcgacggaactggtgaagttgaagggctgcgccgggaccatgccgaacggaggcgcattgccgaacttgatgggggccgagaaggcgtgcgtcgacagcccgtgcgcacctttccccgggtgcgcaatgccgacgcagtcggcggcggccgccgcggagacgttgggttgctgctgctgccaggaatgcttgtgctcggcggcgctaatggtagccggtccgtaggtcctaccccggttgtaagtctaagtacttacggta

SEQ ID NO: 30386 - DNA, 412 bp, Setaria italica
  Peptide Sequence Number=SeqID_96360
gcaggagcatcatttgtgccatcaccagtaacagcaaacaacaatcgttgaatgttgtgcgcaaatgctttacaagtgtatgcttgtcgagtggtgatgacacaaatgatgctcctgcattgcatgaagcagatattggacttgcaatgggcatgtttgtcaagtggtgaagactcgggccagtacctgaatctttggaatcaactcaaggagttctttaggatttttctctctgaactcagcaccttcaatggcaagaccatcctcagtaagtataccgcattcacgagcaattgcctttgctgtatttatgttgtcaccagtaatcattcgaacctcaatgccagcagaccggcaggttgccacagactgcctgacgcccggacgaacaggatctttgataccaaacaaa

SEQ ID NO: 30387 - DNA, 580 bp, Setaria italica
  Peptide Sequence Number=SeqID_96361
tactaggtactaagtaaagtaacgaaatagaagttagaaaattaattagtagtttaagcacaacatcggtatcagagccttcaagcccaaaaaagtttttcccttgcgtctggaggtaccacataacgaaaaattggtagaaagacattcccaaaatgttcctccacattacatttgtaatgaatttccctgtccttcctacaggctctctcttcatcaggtcatcgttaggtggttccgtggccagtgcaagggcgccaagggtgtccatgatcatgttgacccaaagaagctgaacagctgtcagtggtgcatttcctgtaaagcaagctgaggagaagttaaccaatagtgccacaacattgacggtcagttgaaactgcacaaacttttgaatattgatgtaaacagagcgtccccacttggcaacagttacgattgtagagaagttgtcatccagaattataacatcagcactctcttttgcaacctcagtccccgcaatgcccattgcaagtccaatatctgcttctattgtctaattgtctaggtagtcttatttcttatttttgttttgtta

SEQ ID NO: 30388 - DNA, 554 bp, Setaria italica
  Peptide Sequence Number=SeqID_96362
taaattaaacatgtaaagttgctggaggccaatccattgttgatataaggctgtattgctgtaggttggtttaacttgcggctctactggctgtggttgcctttttttttccttttggctccttttaaccctgaaaaataaggtcttccatatcctccataatctgaataactagtgttggttaacattctaggagtctaggtttcagggcacaaacatttactcccagactcagtaaattactttacacaggtggcaaaagagagcgctgatgttgtgattctggacgataacttctccaccatcgtaacggttgcaaaatggggacgctctgtttatgtcaacatccaaaagtttgtgcagtttcagctgactgttaatgttgttgcattgctagttaacttctgttctgcgtgctttacaggagatgctccattgacagctgttcaacttctttgggttaacatgattatggataccctaggagcactcgcgcttgccactgaaccaccctgatgataacttaatgaaaaaagcaccggttggaagggcag

SEQ ID NO: 30389 - DNA, 587 bp, Setaria italica
  Peptide Sequence Number=SeqID_96363
cacaaaagtaatgtggaggaatattttaggtcagtcaatattccaatttgcggtcatgtggtatctacaaactcaagggaagtacctttttgggcttgaaggctcagacagtgatattgtcctcaatacaatcatattcaacacttttgtcttctgccaggtaaatcagccattaagaaatcctctcattttgttcagcatcctttagtataggacaggaagcagaaacaatagaattggaatctgtccaaattgtttttttttcgaacagtggaagaagatgtcccactgtccactgtccattatttctatgcatttgttcactttgccgaagtggaaccaatgaaaattgttaattctttatattatgttgcaatccaggagccaatggtaaactaactgctaactcgtctacatatgttttttactgaatctatgtatgcctctaggtgttcaatgagataagctcgagggacatggacgagatcaacgttctcaagggccttccagataactctattttcatggccatcctcgctggcaccgtcatcttccagttcatcattgtccagttcctaggagatttt

SEQ ID NO: 30390 - DNA, 395 bp, Setaria italica
  Peptide Sequence Number=SeqID_96364
gcactgaaggtactggcccgaatcttcaccacttgacaaacttacacttgtgaaacacttgcgcaccacatttaatgaggttgttgctgtgactggtgatggtacaaatgatgcgcctgcactacgcgaggcagatattggacttgccatgggaattgcagggactgaggtggcaaaagagagcgctgatgttgtgattctggacgataacttctccaccatcgtaacggttgcaaaatggggacgctctgtttatgtcaacatccaaaagtttgtgcagtttcagctgactgttaatgttgttgcattgctagttaacttctgttctgcgtgctttacaggtatattctatttagtcaattgtgttaacttatcatctccatcccaatgttaga

SEQ ID NO: 30391 - DNA, 4236 bp, Setaria italica
  Peptide Sequence Number=SeqID_96365
ctgcactacgcgaggcagatattggacttgccatgggaattgcagggactgaggtggcaaaagagagcgctgatgttgtgattctggacgataacttctccaccatcgtaacggttgcaaaatggggacgctctgtttatgtcaacatccaaaagtttgtgcagtttcagctgactgttaatgttgttgcattgctagttaacttctgttctgcgtgctttacaggagatgctccattgacagctgttcaacttctttgggttaacatgattatggataccctaggagcactcgcgcttgccactgaaccacctgatgataacttaatgaaaaaagcaccggttggaagggcagggaaattcatcacaaaagtaatgtggaggaatattttaggtcagtcaatattccaatttgcggtcatgtggtatctacaaactcaagggaagtacctttttgggcttgaaggctcagacagtgatattgtcctcaatacaatcatattcaacacttttgtcttctgccaggtgttcaatgagataagctcgagggacatggacgagatcaacgttctcaagggccttccagataactctattttcatggccatcctcgctggcaccgtcatcttccagttcatcattgtccagttcctaggagattttgccgacaccacgcctctcacccagcatcagtggcttgtcagcgttctctttggcctccttgggatgcccattgctgctgccatcaaactgattcccatagaaccgcgtgaagaagcgtaataatacaggttcaccatttcccaaatatggttagatgatccgcactcccagtgatatattcttcctggagctgatgcatgagaatagaagcactgacccaaggttgacagcaaattgcaaagaacatttggattgggtgcaacagatactgtgttcccttggtttttctccaccaggatgaggacccacgagtctagggctggtgctcaaacatatagcagaatttatgtttaatttaactgtacagttatttttccccttggaaatagttcctttgtatgctgctggccatttggtaatttgaaatggcatgtagtgtaggttacagtaatttgaaatgtacctgtgtcaattgtaagtcgattgtagattgaatggaacaatggttatatcactagcatagttcattacaatttcactactttgttctaacggtctaaagtcttttttctttatttcctacaaaacgaaccatatttccatccattgattcacataaatatcctggagtacgtctaaattccatttcaaaggctaagcaccaatcttacaattctgctacactaacagagctgaccctgaaccctagtgccaaaaacacaatgcttcttacaatacgatgcaatctaaccacaattgctggctacaaaacttttcagagtgcagcagctgttcccaagcttgctctccacatgcattccaaaagtttatgcgcggagagctcagctccacagaatatcatgcaatttggtcagtctcaatatatctgtgctttgtagataaggatcttcaatgatcatgacgagccaacaggaatcagcttgatggctacagctatgggcatccctgcaaggcccaggagcacgctggcaatccactggtgcaccgtgagaggcctcgtgttggcgaactcgcccaggaattgcaccatgatgaattggaacatgactgtgctggtgaggacggccatgaagacgtagttcttcatcatgcccttgagcacgttgattttttccatctcccgagagcttatctcgttgaacacctggcagaagacgaatgagttgaaaattattgtgtttagcacaacatcggtatcagagccttcaagcccaaaaaagtttttcccttgcgtctggaggtaccacataacgaaaaattggtagaaagacattcccaaaatgttcctccacattacatttgtaatgaatttccctgtccttcctacaggctctctcttcatcaggtcatcgttaggtggttccgtggccagtgcaagggcgccaagggtgtccatgatcatgttgacccaaagaagctgaacagctgtcagtggtgcatttcctgtaaagcaagctgaggagaagttaaccaatagtgccacaacattgacggtcagttgaaactgcacaaacttttgaatattgatgtaaacagagcgtccccacttggcaacagttacgattgtagagaagttgtcatccagaattataacatcagcactctcttttgcaacctcagtccccgcaatgcccattgcaagtccaatatctgcttcatgcaatgcaggagcatcatttgtgccatcaccagtaacagcaacaacatcgttgaatgttgtgcgcaaatgctttacaagtgtatgcttgtcgagtggtgatgatcgggccattacctggatttttggaaccagcttaaggagttcatctaggcttttctctctgaattctggtccttcaatagctatgccatcttcagtaagtataccgcattcacgagcaattgcctttgctgtatttatgttgtctcctgtgaccattctcaccataattccagcagcccggcaagtagcaacagactccctcacacctggacggacaggatctttgatacctactattccaatgcatgtgtagccttgtaatggtatatgctccatgatggaaaaaccttcttccatttccctataagcaaggcacaacgtcctaagagcttcaccagcaaaactatcaataacaccattgagcttgtcagcggttgcttgatccagaggatgaacactacctgtctcatctaggaacttatcacaggcagccaagactatttctgaagcacctttacagtgtgcacggtgtcctcctccaggaagctcaagaataacacccatcctctttttgttgaattaaaaggttccactttcacaatcttagtttcatcacgttttgccttaaaatctccacctagtgccaatgcaaactccaataaagcagtctctgtgggggtgcccaggatctgatatttcccatcctggttaaatacaacctcgccacctgtattgttaaatatagactccagaagagttttgacaacaatctctgggagttcggaacataactttgatgcgttctgagaaccgttaacttccttgatatttccacagatgcaggccttaacaacagtcatatgattggttgtcagcgttcctgtcttgtcgctgcagatggtagtagctgagcccatagtttcacaagcagccaagttacgaaccagtgccttgtcattcatcattttcttcatggcaaaagcaaggctcagcgtgactgctaatggcaaaccctcaggaacagcaacaacaacaatggtaactgcaatagcaaaatgctccagcaactctagtgcttcatctcctgaccagcttaaaagcagcccctcatggtatttcttgctgaatagcccttgggaaaggacaatgaaagttataacagcaaaaaatagtccaatctgaccaataatagtcgcaactccattaagtttgacctgcagtggggtttcgtcatccccaccttcacttagagtggccattagttttccccattgagtgcgcatgccaactgttgtgactagcatcttgcaagacccatcttgcactttggtccctgacaaaagaaaaggattatcttcacttacagcaacaggttcgctctcaccagttagactagattcattaatcaatagagagaatcctgaaatgaagagcccatctgcagggacctgatccccgattgctaaatggacaacatctccaggaagaagatcatatatcgatagcctttgcctaaagccattccttgtaacctgtacttggattttctttttctccttgtccaggtccttgaactgcagtgactgccgatagtcacttgttgcagtcacaaacacaaccaagaggatactggcaacaatcccaagaccgtcatgagcaccttttggccacccttccatcgcaatgccaacaaccagcgatacgaacgcgcagacagcaagaattataagagtggtatcttgaagagcttcccatacaaacacccagaaacttcggatctcactttccgtgaacttgtttatcccatatatgtcctgcctgcgcttaatgctgtcctcatctgtacttagc

SEQ ID NO: 30392 - DNA, 296 bp, Setaria italica
  Peptide Sequence Number=SeqID_96366
ggcctgaaaaacttagccgtccagcaggtacatgccggcggcgaggcgcacggcccagacgtccttgggcttccgcgccatgatccttccgacgtcgccggccttgacctggccgctgttgtgccggagcgacggcaccgacgccgcggttttcagcatcacgggcgcctccaggatgacgatcggcgagcccaccttgaggttcgatttcgtgtcgcttgctgatgcaacgtcgccgttcggcgcgcaccggacggcgacgccgcggtgacgccgtcgcacgggagaagcaggga

SEQ ID NO: 30393 - DNA, 582 bp, Setaria italica
  Peptide Sequence Number=SeqID_96367
actgtagtagttagtacacagttcgttttctattctgatcgagtaccagagtatatcacgtaccttccgacgtcgccggccttgacctggccgctgttgtgccggagcgacggcaccgacgccgcggttttcagcatcacgggcgcctccaggatgacgatcggcgagcccaccttgaggttcgatttcgtgtcgcttgctgatgcaacgtcgccgttcggcgcgcaccggacggcgacgccgcggtgacgccgtcgcacgggagaagcagggactcgtgctgtcgaggagacgtagggtgaagaaacagcagtagttgctgccgcgagcaatggatgtgccattcctacccactgaagcagatacagaggcagggaggtgctcgacagtctctatgcagctatctgctaatgcaattctagttcctgtgttgccaatcctccgttgttactccttgctgattcgtgagcgcgatgctggattgagggttctgctccaacgtttggcttcgacgggaatggcttgattggtggagtaatcgctggtttgagactgagctctccttgtagaaatggtgctgtg

SEQ ID NO: 30394 - DNA, 579 bp, Setaria italica
  Peptide Sequence Number=SeqID_96368
agtgttatcattaagtaagattcatcatcattgtcatcaccagatttctcaatgccaacatcgatgttatcatccgactcctcagcaccagaatgagcaccatcaataccagattcatcttcttcattcggatcagattcattatcactgttaacatcagagtcttcagcccagaatgttcaaaaaattcaccattatcatcagagtcctcagccccagaatattcaaaaaagtgattggattcattatcaaaaaattcaccattatcatcagagtcctcagccctagaatgtgcaaaaaagtcaccatcatgatcagattcatctttgtgatcgtccgcccatgtccaccaactatcactaggtatgcaggagtcatcgagtgcaataattgctgtgactagaaatttcatgttccagaagcaaggaacttgttgaaatggtctggtgcagcgcaaagagagaaggttcggaacattaacccatgacccaatagcgaatttgcagtcgatcatagtcaaacacctcaatgaggttgattgaatctttttgccaaccaccgaacaatcaataagctcta

SEQ ID NO: 30395 - DNA, 419 bp, Setaria italica
  Peptide Sequence Number=SeqID_96369
gtttcgttgtgctgagactgtgcggttgcttcttgaatttgattcaagaactaggccgatcctgcctgcgctgtggctgctgttcttcttctctaggtgtatgataggacggttgccgctagccaggaattggtgatggagcagagaaagcaagaccagcagaggagcctgcccggttgatgtgcgatgatgcgctaacggaggtcttccgtaggctgcccgcccgtgcactcgctgcttgcaggctggtgtgcaagtcctggatgtctgtgcttacggatccgcacttcatccacgagcaccttaggcgcggccagcagaagctgcttctctttgcgaacgaccgggtgattgacaggtcgctcgccatggtgctctcggacgacaacaagtccatgtaccagctgtcgaggcccgaa

SEQ ID NO: 30396 - DNA, 581 bp, Setaria italica
  Peptide Sequence Number=SeqID_96370
gtttgttacaatgtgctatctgaagcaaaagatttccttgtcggtactaacactcagcttatctcttccagaaggcgaactgaatttactctggatactcgaacaagtttggcactttttgggtcattcacttcaactgattatgtggcttctcaatgtataaggaggaggataatgcactatcacatggaagctttcaagaaggttgatgtcattgcaactcctacaactggcattactgcaccaaaaataccaccaagtgctctgaagtcaggagagtctgattatgttgtgtcagcttacctgatgcgattcgtcatagctgggaacttaattggtttgccagcgctaactgtgcctgttggtcatgacaagcagggccttccttaagtatcatccaactatccatgtaccatgagtgagtacatattgcgtcttcttgttacctgttgtggtctatactggaggctgatcataattaccactcggcatatataatgaactcttctggactattgagctgcctagcattagtttggtattattacctatttggtctattttgttttctttgttattta

SEQ ID NO: 30397 - DNA, 472 bp, Setaria italica
  Peptide Sequence Number=SeqID_96371
taaaaattaggtaaaaaaatcgaataggttttaggtttaaatactaagctcaaatgcagataaattgtctccagtgacatgttgctgtttgtcttgtcaggttggtcatgacaagcagggccttcctataggtttgcaactgataggtcgtccatggggcgaggctagcttactgagggtggcttctgcagtggaggaactatgtctgaagaagcggaaccggccctccgcattttacgacattctgaaggcctgaaatgccgctgtatttgtacataattcctctgttagtgatggcatgggtgacgaggggtcgctggtcgtgactgggatagaagattgtttctcaagttgtccgtaatcaccacgatggggatggctgcagagcgcagaccattattcctgctggtataataagcctgacgtagcaacaggtcaattcgcgtattttatttgacatggatgtgcacaa

SEQ ID NO: 30398 - DNA, 1293 bp, Setaria italica
  misc_feature (1286)..(1293): n is a, c, g, or t
  Peptide Sequence Number=SeqID_96372
cattagtatcatcaggattatgctcagtagcacttggaacagatggtggaggttcagttagaattccgtctgcactttgtggtattgttggtttcaagacaacatttgggcggaccgatatgactggggtactttgtgattctgggactgttgcagttgcttctcctcttgcatcatcagtagaggatgttatgctagtgtattctgcaatagcaggatcaagacccatggataagcttacacttagaccatcaccactgtgtgtcccaaatttgctttctcctgacaacagcaatatcatgggatcagttaaaataggaaaatatacagagtggtttcatgatgtttctgatcgtgagatatcgagtacatgtgaggatgcactcaaccttctttgtagcacttttggatgtcaaatagaagagataatattaccagagcttgaagagatgcgtactgcccatgtcgtttcgattggctcagaatcattatgtgacctgactcctcattacaaagcaggaaggcgaactgaatttactctggatactcgaacaagtttggcactttttgggtcattcacttcaactgattatgtggcttctcaatgtataaggaggaggataatgcactatcacatggaagctttcaagaaggttgatgtcattgcaactcctacaactggcattactgcaccaaaaataccaccaagtgctctgaagtcaggagagtctgattatgttgtgtcagcttacctgatgcgattcgtcatagctgggaacttaattggtttgccagcgctaactgtgcctgttggtcatgacaagcagggccttcctataggtttgcaactgataggtcgtccatggggcgaggctagcttactgagggtggcttctgcagtggaggaactatgtctgaagaagcggaaccggccctccgcattttacgacattctgaaggcctgaaatgccgctgtatttgtacataattcctctgttagtgatggcatgggtgacgaggggtcgctggtcgtgactgggatagaagattgtttctcaagttgtccgtaatcaccacgatggggatggctgcagagcgcagaccattattcctgctggtataataagcctgacgtagcaacaggtcaattcgcgattttattttgacatggatgtgcacaaggacgtgtgaggcaaatgttgatgtgcgtccctgcttcttgttttgcaagcaattcacagtcctctattatcgtacaccgccaaggaggggtcattttcggtagnnnnnnnn

SEQ ID NO: 30399 - DNA, 1101 bp, Setaria italica
  Peptide Sequence Number=SeqID_96373
cccgtccctctctatgggttggattcacgcagatgctgcagcagacggtgatccccgagcgccccatgtacttcccggagtacccaccgcaggacccggaaccgggagttgtgcttgtgggggatgataggcacccagtggaaagagttcatgaagcactgcagtactccccccgtatgatccgtcagtgcgttgggctactgaggagaagctccctttcctttactggaagatccgtgactttgcacatgcataccgctcagggatcacaaccccatcagttgttgctgagcatgtcatcgcgggggtggaagagtggaacaacaagaagcctccaatgccaatgttgatatattttaatgcagatgacctgaggaagcaagctgaggattccaccaggagatttgagcaaggaaacccgatatccattttagatggggtcttcgtcgccattaaggatgacattgactgtttcccgtatccaacaaagggtgccacaacattttttgaccaaacccatactgtggagaaagacgcagtctgtgttgctcggttgcggaaatgtggagtcatctttatcggcaaagcaaacatgcatgagctaggtcttggggtaactggaaacaatccaaattatggaacagcaagaaatccacattcggttgatagatatactggtggttcttcatctggtcctgctgcattagtatcatcaggattatgctcagtagcacttggaacagatggtggaggttcagttagaattccgtctgcactttgtggtattgttggtttcaagacaacatttgggcggaccgatatgactggggtactttgtgattctgggactgttgcagttgcttctcctcttgcatcatcagtagaggatgttatgctagtgtattctgcaatagcaggatcaagacccatggataagcttacacttagaccatcaccactgtgtgtcccaaatttgctttctagtaccaagaactctggcatgcttttcatgtcaactgtatgtggtcagattgtaccagtcagtcagcctcttaggcagtttgctttgaaatgatagcagatcaaacggttggtactgtt

SEQ ID NO: 30400 - DNA, 328 bp, Setaria italica
  misc_feature (284)..(284): n is a, c, g, or t
  Peptide Sequence Number=SeqID_96374
gtcgccgcggccgtgttcgtggccgcttccatgccggccgtcggccgtcccatggctgccaccagtgacgagttactagcatatcttgggccggacttcttcctggattcaaaggagctccaacaagagaatcctgagatcaagggcaaaccatttatctttgggcccaacttcatggcccaaaggctttaccaattgagcccaccagaggtaacatttatacttgatgcgacatcccaaattcgcatttggttttaattataagcattcttgcagaaaaaatnttatataaatgcgttacacaaaattgacttaagctttaagtttg

SEQ ID NO: 30401 - DNA, 270 bp, Setaria italica
  Peptide Sequence Number=SeqID_96375
gcgcctgctcgtccacggtcacgtcgcgccggaaatccaccgccaccgcctcgaaccccgccgcctccgccgcccgcagtacctcctgctcgttcatgatccggcggctgtgaccccggtggaccagcagcagccgcggccgcttctccggctcccggaccaggctcgccggcgcgtcgcgcgggagcgcgtagacctcgcgcatgaaccgggtgaagtcgtgcgtggagaggggtcctccggggcaccccattccggggaagatgctca

SEQ ID NO: 30402 - DNA, 716 bp, Setaria italica
  misc_feature (68)..(68): n is a, c, g, or t
  Peptide Sequence Number=SeqID_96376
gtggacagcatgggaactgtcctcctaggcagtgctaggagaaggtactccggtagggtgattaaggngtttttgccgtacatcaacaggggctatactcccattccgtagaccacatagcaccacatttcccgagtgcacaaattttagggatagaatggcacttttagagcgacacagccgtgagaatccccttgtttccaaatcgaccagaccagcaccatggtccgtaccaaaagctgcatgtttgctatcagaactacaatcagctgtccaaactgtatgatcaagtgaagcaactctagtccacgatcctattgtcgtttcaatagtatcagaaagatccataacatatacagagccgccggattctccagatccaagagtagccaccaatgcttgttgaactgatgaattgctggatgcatcaggtacatgagggccaaacttttgtatacaagttataccggatgacaagattgagaaggctgcttcagatgaccagatgctggggagtgcggctgacttgtgcttccccatgggagtccatgcaggctggggccaaaactccatctcattcccaaagttgttaagagcactccctaatccgtataaccgaatcgaaccattcatgctgcctgtcactagcatcctggacttcctcagcccttgcggtgtctgaacagtcgtgttcaattgtaccagcgccttatcag

SEQ ID NO: 30403 - DNA, 239 bp, Setaria italica
  Peptide Sequence Number=SeqID_96377
gggtgctctgcttgtgtccatggcaggggaggtggatgcccagagatttgagcgcgccatggatgatccgcaggagggaggtgcaggtgcaggccccggccccggaggggcgggagggggcttcatgtctcggtcacgaagctgctgggctttgctctgcttggtgctgttcccgatctgctccttggtcttgtcgatcaggccgccgctgtggcacgagtccgagaccatggtgaaga

SEQ ID NO: 30404 - DNA, 428 bp, Setaria italica
  Peptide Sequence Number=SeqID_96378
tggtgcagggtcacaagctcctgatcaaaccctgcataagcctacactttaaataaaataagctatgtacaaacaaaataccgaagtagcagttccaagcaaatccactccaagtcggagacgggccctagggcatcatttacaaggtgtactgaaagtcaaccacgtggggctgccatttgctgcttcttgatccggtccccagccttaaccatgctgatatcgtgaggggttataaatatccactgagaaccctgtgcaatagcaaaatctactagggtgtctaagcttattttgcggctcaccgcatcctgccaaattcagatgccatcaattacaaagttttgcctgtccttatctggacaaagaaaatggtaaaggtcgtgagtcctcaccatgaatacatcaaactcatccatggccctaaa

SEQ ID NO: 30405 - DNA, 305 bp, Setaria italica
  Peptide Sequence Number=SeqID_96379
tttttttgcacaggcagaagatagtgacagccgattgaactagattgaattaaatcaaacggaaccacagcagagcacagggctgctcctagaaacaatgcacagaatgatacatcctcacatccatggtttgcttgagatccagatacgagaggggtacatgataaagaagtttttgcatgcttggctggaaatctggttattcaatgtgctggcattagaagccatcaatttttgcatagcccatctgcagagttaaccaaattagaattcgtttgatatctttggttaaactgttcacccga

SEQ ID NO: 30406 - DNA, 257 bp, Setaria italica
  Peptide Sequence Number=SeqID_96380
gtgaatcgcttgaccccatgttttcccgtgtatacatggatatgatcaggccgggtacgaccaacggatagagcgcatccccgagctgccgtagctccagggaggacatgaacggcgtgccgcggccggtgttcaccaggcacaccggcgcccaccctcgcccacgcgacgaagatcgcctcgaacacgaagttcatcgtcgcatccgggtagacggtgtcccagtagttgggcccaggcgcaggtcgaaaagacag

SEQ ID NO: 30407 - DNA, 317 bp, Setaria italica
  misc_feature (305)..(305): n is a, c, g, or t
  Peptide Sequence Number=SeqID_96381
acaaataacatcaaactaatccaaaaataaataatcctgactaatccgatcctagcagccactttatgtaaggcgatctaagcctctccctccgatcggcggatcagcgcgacgatccgacgaggtggctctgcgcgtcgagcgggacgaacgcgagcgcgacgagcacggcgagcaggcccacgggcaccaccagcagcaggagcggcggcggggacagcggcggcaggaccagcggcaggaacgccagcgacacggccacgaacaggaacgccagcacgagctccgccgtgaagtaccccggnggcgtcacccgg

SEQ ID NO: 30408 - DNA, 1298 bp, Setaria italica
  Peptide Sequence Number=SeqID_96382
tggtaccgcctcttcagggatcaatggccatttgagaagattcgtggagctgtagggctcagagaactatacatccgtaggcacactgaagtacatcaaatgaaatttgatgaccctctatcagctattttttacctaaatccctgcggaaacatcaccgagccacctaatgcttgataagaactctgtctggttgtctcagggttcagttgccaaaaaacttagttttgattggccggtatctgaagtggtggagactcacagaaatcatagtgcaaggatcacttgtatgaggtcattttcactgattgataccccactgtttcgaagtgatacacaaaaaaatgaaaaagcattagtcacttcaagcacagacagaacaatccgtctttgttggaagggtcactcacgctgttacaagggccattcagcaccagtcaccgctctggttgataagttgcttgtggatggtgaatctaaagtacttgcaagtggaggggaagactgcaccattcgcctatggtctatgagtacgagggcgaaaaatcaccctctaatagcaacatttcatgggcatgaaaaagcattgtcatttttatctgttgctcggcataagtcctccctgttggtgagctgttccaaagattcaaaggttaaagtttgggatacagtggctgcttccagtggttcatcgtcatgtgtaggcagtactcacatcaactcaagcggtccaccaattgcactgaagtgccatgaatccctttgctacatggtcgctggatctgaagtgacagcgatcgacttgaggacaatgaagaaggcttctgttcttgcactccacaaccacggaatactttcttgtgagatgctgccttccgagtggttaatatgcaccggcacaaaagacaaggctctcctttgggatatccgcaagggtcaagaactcccaaatgcagtggcggaactgcattcagatggcccagtgactctgcttcacctggatccatataaggtggtgaccggggtgccatcagactgcgaggtccatgtctgggaaactcgaacaggtgaactgttgaacacattgagctgtggtgagcctgcagacttgggagggagaagcagattgtcagccatggctgtggacgggtgcaggatcgccatggcgggcagctctccagaagccagcgtgtttcactaccgggactttgtgaagtcttcagcccctgtatctttgcctggcaagggaggtttccaggttctggcggcccagttcggctacaacgatagcgatgata

SEQ ID NO: 30409 - DNA, 528 bp, Setaria italica
  Peptide Sequence Number=SeqID_96383
agcgagactgaagatgtaatgaaaccaaatgcatactctcctacacggggatgccttatgatgaccacttccttgaatgcttgtttgttctgatctgtacaaagcaaccagagttttttcagcgcttaagttaatctgattgaccactatgacgataagtttacctggtgatattgcagcacttatttgcttggatgcattgtagatatgacggacaagaggcatgcgcttaataatccactcgccaaggctaagaacagatgccccaacccaagatgacataaacactccaatcaagaatatgaaagtaacagatgtgacgaagccaagaccgaatatgttgattcccagttgagcatagattggagagaagaatccatcaacaaatgaatgaaccaccaggtgatgtagaatgtaattgcgatgggaaagagaattacacatccagtcatgaacttctttgatggattcttctctccaatctatgctcaactggaaagtaacagatgtgacgaagccaagaccgaa

SEQ ID NO: 30410 - DNA, 1238 bp, Setaria italica
  Peptide Sequence Number=SeqID_96384
tccccaattcaacgtcgacaaattgaaagcaacgcagctcttcagcagaattaaggaccacggggagggtaaggatgttacaacagttggatatcactgctgtgatgcgtctttcttgcatagggtgcagtacaaactccagccaacaatcaaaccatgtgagtcacctacatctacttaatatacagatacttgtgctcagaatctagtttgctgtactcgtatgaaaatgttactagtgcccaggaaaaagggcacacaaagagctcatatcagcttcagcttctgcttggtccggttctgtccccaaggatcacttgcgggtcaagggttgacagaatttgcggcattgacataccaccagatacaacaatctctatgccttcacgcacagaaagatttggccttatgacatcctttgaattcaccatgaagatatcaccaatataaagatggttggtagggacatagacgcagtaaagatcttcttgaccagaataactctgaagcgagactgaagatgtaatgaaaccaaatgcatactctcctacacggggatgccttatgatgaccacttccttgaatgcttgtttgttctgatctggtgatattgcagcacttatttgcttggatgcattgtagatatgacggacaagaggcatgcgcttaataatccactcgccaaggctaagaacagatgccccaacccaagatgacataaacactccaatcaagaatatgaaagtaacagatgtgacgaagccaagaccgaatatgttgattcccagttgagcatagattggagagaagaatccatcaacaaaatgaatgaaccaccaggtgatgtagaatgtaattgcgatgggaaagagaattacacatccagtcatgaacttctttgaagcccaactgcggacaaccttatggaatgcctctcgtccggaggaggagagcgccgcggaggaggaggaggaggaggccctgtcgccgttctccgccccgtcgccgggtgccgagccgccgccggagaccgggatgaggagctcacggtcccggtcgcggccgcccatcgggttcaggctcagcggagacttgttatcgcccatggggggctcctttgccggctcgccgcggcggcggtcacccttttcaggctcgggtcgtcgcgatcggtgcagggggacgggggatgccgggctcggcacggccgagggcgaggggccagggagacctttttc

SEQ ID NO: 30411 - DNA, 491 bp, Setaria italica
  Peptide Sequence Number=SeqID_96385
ttttcccatgaaaaataccaggttattggatcacctcaaaatcgtaaaaaacaaggcagaacagtgtatcaggtcaccccaactcacgaaacttcatgggctacttactaatcggctttggtgggggcattcttcacggccatgcgagcgcatgcctcaaatctcctgacagcttcagcacacttgagcgggtccttcgcattgctcttgtaacactcgaggcagcctgctctctcctcagtgcagggcatggggttctggtacggcagcttgaactccttgtcgtgcagctcctttgctctcttgctgagctcttggcgtgccccagcctcctgcttgtccagcttctccagaactgcctcactttctttaagaatggaacggatggtttccacctctggcattgtggctgggggcggtgggggagcaggggtcactggcagaaacatagggggaggctgcagaggccacccaggagcaggagcagggct

SEQ ID NO: 30412 - DNA, 255 bp, Setaria italica
  Peptide Sequence Number=SeqID_96386
ggggggccacgctggcgaggttaccggcgtcggtgatggagtcgcccaggctgaacagccgcttgtagcaggacgcgcccggcgggtcgtcgttccggccggccgacgcggcggggcacggccacacgacgaggaggagcagcaggagaagggggacgacacgcgccatggacgaagacgccatgggtgtctggctgtctgctaaccttaacaaattaagctgcgagcaaagaggaaacagatctaattttcgca

SEQ ID NO: 30413 - DNA, 662 bp, Setaria italica
  Peptide Sequence Number=SeqID_96387
cgctggcggaggacgaggtcgaggtctccttcggggagaacgtgctcgacttcgacgccatggaaaggagtaccagagagacgacaccttgcagtttgattaggaactcagagatgataagcaccccaggatccacaactaaaagcaaaaacagcaactcgatgacttcccgtcgcagaattgaagcctcgatctgccggttcataccgagttcactcgagatggaagagttctttgcagcggctgaacaacaggggcagcataccttcagggagaagtataacttctgtcctgtgaacgactgtcctctgccgggacggtatgagtgggcgaggctagactgctagattttcagcacaagagctccattgatctgatatgtctacaacaatgactagtgccgtggccgtggcgcaaccaactggactgcactagctttcttgtctcttgtaaaaattagagtagttagcccgtagctgaatgatcttgtgtaacgaacaggtgcagcgctgagttacacccggatccccaacctcactgtaacgttaactgctcgatgctcatgctgtaaccgaaccatctcatgtagtgtagtgttaggcctaatcatctgttcctagtccttgaattaatttaatgagttagagttagatttgcatggc

SEQ ID NO: 30414 - DNA, 460 bp, Setaria italica
  Peptide Sequence Number=SeqID_96388
gttatttacttaaaacttttagtttggttctttcttaacttacttgtattaaaccttgtcagccactaatttgtgtatcagttggatcttgacagatgttggtacattgcccttttcgttttgcaggccgtctcgtggtccaacttcaactatcttgacaaagcttggtagatcccacataacctttctgggaagatctctaagctccactgcatcacatgatgaatcggcctgacggcattgcggatgccatgcatgagaattgccatggaagaccatctgagtgcttccattgcaggagttgttatacttgcgaattagttgaatagtacaatacaagacttactagaccctaacgaataaagactacttaggacgaaggaagaaggacttaccaaagtactagttaaataactacaaactttaggacaaggtactaccgaagaaccaaagtaggaca

SEQ ID NO: 30415 - DNA, 588 bp, Setaria italica
  Peptide Sequence Number=SeqID_96389
ctgtgtatgatacgcaaaaaagaccaaaacaaactgaagtgacgcttctacgattctgcctaagtacgtgtgatgacaccagctgatacatgcatgtcttttgggagtgcctgaaatgatcttcagggactcaggtgcttgcgcagagcggcagcagtcttggatcccaccggccttcctagatgcctggagatgtaatcgccagcctccatgagcttgttgaggtcgacgttggtctctatccccaggccatggagcatgtacacgacgtcctccgtggcgacattgccagttgcgcctttggcatacgggcagccaccaaggcctgacaccgatgagtccactatgctgatccccatttgaagggagactaggatattggcaagggcctggccgtacgtatcgtggaaatgaacagcaatcttgtccaccggaacaaaggacatgacagcttcaagcatagcagctacactacctggtgtaccaacaccaattgtgtcgccaagtgaaatctccgagcaccccatgttataaagctccttagctacatatgccaccttcgatggatcgattgcaccttcaacaggc

SEQ ID NO: 30416 - DNA, 996 bp, Setaria italica
  Peptide Sequence Number=SeqID_96390
tttaggtttacctttttaggttttaccgtttttaacgttttaattttcgttttggttatttagaaagggaagaactaaggatattggcaagggcctggccgtacgtatcgtggaaatgaacagcaatcttgtccaccggaacaaaggacatgacagcttcaagcatagcagctacactacctggtgtaccaacaccaattgtgtcgccaagtgaaatctccgagcaccccatgttataaagctccttagctacatatgccaccttcgatggatcgattgcaccttcaacagggcaaccaattacacaggaaacatacccgcggataaggagtccatgtttcttggcagcagcagtaacatcacggtaccgaacaagactttcctcaatggtacagttaatgttcgacttagagaaggattcagaggcagatgcaaataccgcaatttcctttgcaccagctgcaacagcagcctcaaatcctctgaggttaggagttaacactggatgcctcacacctggcacctgctggatccctttgaggacttcctttgcatcagctaactgcggcacccattttggggatacaaaacttgtggcttcaactactgataaacctgcagccactaatttgtgtatcagttggatcttgacagatgttggtacattgcccttttcgttttgcaggccgtctcgtggtccaacttcaactatcttgacaaagcttggtagatcccacataacctttctgggaagatctctaagctccactgcatcacatgatgaatcggcctgacggcattgcggatgccatgcatgagaattgccatggaagaccatctgagtgcttccattgcaggagttgttatacttgcgattgttgatgtcatcagctgctgctgccctacgataagctcttggcgaggagaggcttccaagtctgttaatactaaactttggcaggtctccgagaccaagtggctcctcaaggcttgaca

SEQ ID NO: 30417 - DNA, 820 bp, Setaria italica
  Peptide Sequence Number=SeqID_96391
taactaaacgtaacctaaagtacagaaccaggccagccgccagccgcgccagcctcccaccctaatctaggttcctgcttggcggcggcggcgagccgacgatggcgcggaagcgcaagacggaggtggcgccgcgcctggacgaggccgaccgcacgctccactccaccttctgcagcgcagccaactccctctcccagctctactcccaggccatcgcccagcagaagcagtccttccacgccggcgagctccacgcactggacaagctctaccactggatcctaagaaagtacgaggaagagtcaagactgaccattgctgatataatggctcatatccagcatgagatggactacagatgcagtgatgcacttgttgcccaaggagtacaacagcagtatcctccgagtgcaaggcagcatcttggcaactcaagcagccaactctcagctacttctcatggttcggcatctggtcttgctcctcgggccatcaacactgaacagtcaaagaacagcatattctcaaatgctctttctagtcctgtccggcggagtcttcagagctaccacccaactcaagctcaagtacaaggaggaggcaatggaggccataacagcaggggatcagcaagccctggagcgcacaacagggagaccaactcagcaggctccaacgacaccgcaatggacatggtttcagatagtgcagcaaatgagtactactgagatgatggatggtgcatccatcatctcagtagtactcatttgctgcactatatcaggatctttaaattgtatcgttccatgcatcaagt

SEQ ID NO: 30418 - DNA, 1086 bp, Setaria italica
  misc_feature (1007)..(1086): n is a, c, g, or t
  Peptide Sequence Number=SeqID_96392
cgaaacccaaaccacgagtagacagacggagggggaaaaggggaaacaaattggaagcgcaaagcaatccgcaaaccctcttcttcccctcctcgattcgcccggcggcggcggcggcggcggcgatggcccggaagaggaagacggatgccgcgccgcggctggacgaggccgaccgcacgctctactccaccttctgcggcgccgccaactccctctcccagctctacacccaggccatggcccagcagaagctctccttccaggccggcgagcgccacgccttcgaaaagctctaccagtggatattgaggaagcatgaagaagaatccaggctcactgtagctgatataatgtctcatattcagcatgagatggactatggaggtactgatgcacatgtctccccaagagtacaccagcatcctcagattgcaaatccattcacaaattcagttgctccaccggcaactggtttatatgggcaaacagcagctgggtttgctcctagacccagcctcagtgatcagtcaaagaatacaatattctctaatgccctatcaagcccggtgcgcaggagtctccagaactatcacttagctcaaggtgctggcaatggaggccggaacacagaaccaaacttagcaggggcaaatagggagacaaactctgcaagctccaatgacacttccatggacatggtttcagatagcgctgggaatgaattctaccagtgatttgtggtgagatgtgtctgcaatcaggaagcatcgaataccagtgttgtctgttatttcctgccttcccttctttgatattttcctccaaagctcactatgtggcgatgttcccgcacatcaggtgatgctatttcctaagttattggtaacttttgttggtttattcccccagtgttcatgagttcgagactatgaatgtaaatgaaaaccacattgtgatattttcttatagaggaagtcgactaaacttcctagaaaaaaaaaaannnnnnnnnnnnnnnnnnnnnnnnnnnnnnnnnnnnnnnnnnnnnnnnnnnnnnnnnnnnnnnnnnnnnnnnnnnnnnnn

SEQ ID NO: 30419 - DNA, 499 bp, Setaria italica
  misc_feature (54)..(54): n is a, c, g, or t
  Peptide Sequence Number=SeqID_96393
gatgcaggaatgttctcaaagctaccaaatttaagagattcccaagtattgccnctgcaggagatccataacagttccatgggaacaccttcctgcagtatggatgcagcaagtgtgaaaccgataaaaccgcctgtccggacatatactaaggttcaaaagctgggatcagttggaagatctattgatgttacacggtttagagattaccatgagttgaggtcagccattgcgtgcatgtttgggctccaggggaaactggaacatcctggcagttcagactggaagcttgtttatgttgactacgagaacgatgttcttctcgttggagacgatccatgggaggaattcatcaactgtgtcagatgcatccggattttatcgccttcagaagtacagcagatgagcgagaatggcgtacatgtcctgaatgactgtattcaaatagctcttctagggctgctctgcagcctgcacaatgtaacgctgcagtgcgaga

SEQ ID NO: 30420 - DNA, 281 bp, Setaria italica
  Peptide Sequence Number=SeqID_96394
ccgcatcctgcccgtcgccgtcgcaatccccgccggcgctacctaggtcacgcctccctcctctccctcccccggctccgacgatgtcggcgccctccgaccccgccacggccgctggccaagcgcccgcccctgcggctgcgtccgccgcctccagcagcggcctcaccttcaagctccaccccctcgtcattgtgaacgtctcggaccaccacacccgcgtcaaggcccaggccgcctgctccggggacagctcctcctcgtccggggcggcggcgggg

SEQ ID NO: 30421 - DNA, 510 bp, Setaria italica
  Peptide Sequence Number=SeqID_96395
ggacggagtagaagttggcgatgatgaaacagaagcttggtctatctcaattgtacggtttccaataggacggccatggactctaactgaacaaacttgctcttctgcagagccaaatgtgacgttcatcttctttacatacttctgaggtggcttcaccccaggttgactgactgcctttcccttattaccacctgttgtaaactcagaatgaagcttattctgtggtcttaaatgctgagacatttgattataatgaccattagtaggacccagatcaagagttgcatttcttagcacccattccgtcgatgtgctaggtttctcaccagggacagatctgtttgtcgcttccatttgttgcgaatgagtagacaacacagatttatgagatggcaacttggacaaagtaggggtttcttgtggaactgaggtatccgcctttgcacatgccagtgagctacttgatgatgataatgacgaagcagggtctatctcactcaatgtgct

SEQ ID NO: 30422 - DNA, 324 bp, Setaria italica
  Peptide Sequence Number=SeqID_96396
gctcgccgcgcacggggacgcctcccgcgtcgtcctcgccggggacagcgccggcgcaaacatggcgcacaacgccgcgatacggctgcggaaggaacccatcgatgggtacggcgacacggtcagcggcgtcgcgctcctgcacccgtacttctgggggaaggagccgctgggcgcggagcccacggaccccggctaccgcgccatgttcgaccccacgtggggcttcatctgcggcgggaagttcggccccgaccacccgtacatcaacccgacggcggcgccggaggagtggaggcagctcgggtgcccccgcgtgctggt

SEQ ID NO: 30423 - DNA, 458 bp, Setaria italica
  Peptide Sequence Number=SeqID_96397
aggaaccccggactaaccgacgaccaatagttacgaaccccaacgtaggtgactcttcatctgcggcgggaagttcggccccgaccacccgtacatcaacccgacggcggcgccggaggagtggaggcagctcgggtgcccccgcgtgctggtgaccacggcggagcagtgctggttcgtggagagggcgcgggcgtacgcggaggggatcaagaagtgcgggtgggacggggagctcgagttctacgagagcaagggcgaggggcacgtcttcttcttgcccaagcacggcagcgacaacgcgctcaaggagctcgccgtggtggccgacttcgtcaggcgctgttgagattgatttgcttgttcgtccggcaccgggtgagtgatttagcagccaagatacacacagggcacagtttatgattctggttgagtttgttggtcagattgcaagattg

SEQ ID NO: 30424 - DNA, 1321 bp, Setaria italica
  Peptide Sequence Number=SeqID_96398
aattgccccaggtccatttgatgttttaattgtgttaatgatgaagaacttggggtgtatttgttgatgagatgaaatttatccaaagaacaaccttgaagttctttcttgtattccaattccaagtgactaaattgattccagacccattttcctgcatcatcacttggtatgacaacacgacatatttcatttactttggatgcttcaggttgttcattatatgtaaatggtaatttatctgaacaaaaatcattagctatctccacagaggcctcaaactgatgtgaaccattttcagcggctttgcctggagaagaaagagatgatcttacaccatgatattgataaacgggcaactcctgctctttgattattagtttatcagtaagctgagccttatccaaaaaatgtttatcggtacatgaatcatcaaagctgccagaagaacttatagttgcttcatttctttccatttcaatgtccttcactgacgatgcgtcttggatagcaatacttccagaattcttctgctcattctttactgtgctttcgtgaatagaattgtctaaagaaacggtattaactttagtgtactcgagaatatgaagcaaccgaagatcccaaatatagaatccaagaagaagttgctggtacagccagttcaaaccaaggatctcatgtggaaaactcttgggtattacaacttggttaaacgccttcagagaaacctcaacttcatgtttttctcgcataagcatcctagtcacatccaaaagtaatccctcatatactgaaacgttggtgtctttccccatggcttgagtagagtatcgtgatcttaagccttgtattacattttcaacttctgagaagagttgcttccatttaacaaggacattattcacttcgacctcaagccaatcctttttgttcgggttattgaactccaaagtcagtggaggcttacaagcagaatatatttcaacagatgagtatatgaacatagcaactctggatccaaatccaaagaaacgcaggcagtctctatgcagcaaatggccacatgttgatagcttcttcgcagcagaatgagttgagaagctgagttccaagaacttcccaaacgacaaattacatgcagaggaagatattataaccctattggttggcttagcattgcatctcaagcatctggtccacatccaaattcttccttgagcctcaccagaaagtgatgactccaagggaagtcttttcacaagaacagtgagggtaccattacggtgggtataagagtacatgtgagctactggagact

SEQ ID NO: 30425 - DNA, 484 bp, Setaria italica
  misc_feature (469)..(469): n is a, c, g, or t
  Peptide Sequence Number=SeqID_96399
ctggagcatcgccaacaccaacaatgaaggccactggggaagaagactacggagggatctagatggattatggatattgcattttcaggttccccgtttccaatttggggatgtagtgtgccaactcattaatctaatcccccttccttgaaaaatacgatgaagcattaattaaaaaactttgttatataagttttcttgaatttgtgcttggctgaggtctttgatataattttgggagattttgccgtactatttttttgtataattgcctggagaatatcactgcataggggagcctggagaagcagctgatccccggcattgtgtcctgaatcctgtgactcctggacgcactcaaaggagctgccgaatagcgataggtgtttttactcattaactcaatttgcagtgtctaggctgccattgctaataccatcaattgactgcagccctgttgaaattttgnggttgcttctctaag

SEQ ID NO: 30426 - DNA, 405 bp, Setaria italica
  misc_feature (20)..(20): n is a, c, g, or t
  Peptide Sequence Number=SeqID_96400
ctttcgctcacctatgcctntccctcactctatcggcgtgtctacatattcagatgcgtcacttgaaaaggttctttttagaaaacatagcagtttcgtcatttgaaagcgttccttttgtatatacttttgcccctcatttttccgtgaatcagtgtttaagtgaatgaattagccaaaaaaataaaataaaataaaaaggcctggttaatgagccattttaaaatgtctacttctccggtcctgcaaacatctataactatgtccatgacatggtttttttattcataagctactacttagcaataacacaactcattgcaaggactctaaagttctttatatattcatcattgacataccagcataacccacatgcatgcgcaaaaatggagtcttggcagc

SEQ ID NO: 30427 - DNA, 562 bp, Setaria italica
  Peptide Sequence Number=SeqID_96401
tgaagcccttcgactcatctttgaacatccttattgcggagaagtcgctggttgggtcggcttttttagtccacagcatcgacagcggaatgcattcggaggggttgtatggagcaagtttcacggggagagaaccatcggtcgacggcacaatggcctctgccgaaaacttgggaaagttgaacttgaagtttaccagcgcaaaaggcttgcggcatccgtcatcggcggccaatttcccgatggaaatgctgtcctgaatccacacctgtgacatgtcgtcgaactcggttttggcgaggacaacggtgccattgcgggcggccagactaaggttagggtcctgcttgctgattattctccatttgggaaaggtacgtagaaaatcagcaagcggactcccatctgttcttccaaagaaatcatcaaaaatggacccctttcctggcgtaaccccgacgccgaggacaacaagcacggctacccagactaagctcgcagtgagtcttgccattgcttgtgtgtatagagggggagagatcgcggatcgagctgctgtact

SEQ ID NO: 30428 - DNA, 290 bp, Setaria italica
  Peptide Sequence Number=SeqID_96402
gtatcccaccaaaagcaaatttccccatcaaatcaccacgcaaagccttgtccatcatgcacacagatccatggtatctgatcgcaactgctttgtgccaagcagatgtcactaagtttacagggtgcagacatctacagcagtttccgggcacaaaatacacctagaccaaatggtgaggccgcttatatggtccaaattaggccacaccttggcaggatcatgcaaagcataggttctgcttggtgactgagttttgggattggtggggctgggggtgagggtagggt

SEQ ID NO: 30429 - DNA, 1034 bp, Setaria italica
  Peptide Sequence Number=SeqID_96403
tttttttttttgtaaactagcagcagatgccgcagagggccatttttttggaatttgggaaggaaatatgatgcaaacgtttctgagtatactcatacagaacagagatgttttttcgaccagacaacactgggtctctgcaagtaacccaggagcttgtcaaggaacaaatcctggctcaacaacaaagtccgatgccacccggactacaaatagcgaagctacagttaagttacagattgtaggctacaaaattgactctgctgtaagaatccgtgtccccgtaggtgacggcagtctcttcagtgtggtttcggtacatagccgtctaccgcaaagttccttgtggctgcaggtagtgccagccgcatgccatcaagctcaggccttgcaatcacttggcagccaagacgtgatgtttctgtgagcccaaatgcaaggtcaagcatatcattttcttcatctgttgggtcttctaacttgttataatgatttacatccataactattacatgacaagtagaacaagccagtgagccttcacatgcaccttcaagctctatgtcattttcatgagcagcttctaacatggacattccaactggcacacggattgtcttttctgagccatccttgttgacaaatgtcacagagatttttgtcctgattgctttcatcctgatcaccacttgttgcagttgaaaagaggacattactcattgatttcactgtaggagtaaccaaaggggttgaatgctggctgacatgaccttgatataaactgcctcgactgctaagcaagtttccagctctcgtctcggccctagcctcgcgcaggagccgcgccccgagccgggagatcctggagaacatcgcgacagccggccctgctccctccgaacccgaggcgaactcagggcgaagctgaggggccgaaccgtccggaagcggcgggcgccagccgcggggagctcttctccacgacggcgggaaggaggagggcaagacgacgagtcgggtgaggccgtgcgccg

SEQ ID NO: 30430 - DNA, 232 bp, Setaria italica
  Peptide Sequence Number=SeqID_96404
ttttttttaaactgcatcatcacagggaaaattatcttcacttttggtatggtacatcgatcataggaagaatgcatgcatgccagtttaattatctgctgatgatcgaattcatccatcagccagagcaaagaatgaacaccctttcccaatccttccagatccttggtgttgcttgtaatgtatgaacacaagacgcaaatgctcatcgatcagttgctccatctatttg

SEQ ID NO: 30431 - DNA, 1532 bp, Setaria italica
  misc_feature (1482)..(1482): n is a, c, g, or t
  misc_feature (1489)..(1532): n is a, c, g, or t
  Peptide Sequence Number=SeqID_96405
agaggacagaggaggatgaccttaaagatcttgagctgctgctgaacaagaagacatatagagagaaacagaatacgaagactggagaggagctgctggatctcatccaccggcctacagcaaaggagacggctgtcgctgcaaagtttaaaacaaagggtggttcccagctaaaggaatattgtaccaatttaactaaggaagattgccgacgccaaacaggttcctttgtggcctgtgataaggtccactttcggcgtattattgctccacatactgatacaaacctaggagattgctctttcctggacacatgccgtcacacaaagacttgcaagtatgtccactatgagcttgatcaaacaccagatgtacctccaatgatggctggtgcccttgcgcctcctaggcaaataaagcctcagagagctgaatattgttcagaaatagaactaggagaatctcaatggataaactgtgacattcggaacttcagaatggacatcttaggacagtttggagtaattatggcagaccccccctgggatattcatatggagctgccgtatggcacaatggctgacgatgaaatgaggacgcttaatgttccagctttgcaaactgatggtttgattttcttatgggtcactggtcgtgcaatggaacttgggcgtgaatgtctggagctctggggttacaagcgcgttgaagaaattatctgggtgaagaccaatcaacttcaacgtatcatccgaactggccgcactggccattggttgaatcacagcaaagaacattgtcttgttggaattaaaggaaaccctttagtgaacaggaatatagatactgatgttattgttgctgaagtccgtgagactagcagaaaacctgatgagatgtatgccatgctagaacggataagcccaaggacaaggaagctggaactgtttgcgagaatgcataatacacaagctggatggctatctctgggtaaccagttaaatggagtaaggcttgtggatgaagggttgagagcaaggtacaaggctgcttaccctgatgtggatgtccagccgccatcacctcccaggacaagcgtgccagccgatgttgagcaaagtagttcacagaaggctgcgccgccagatggtggtgagaggcctgcctgatgctagcaaccttacttccaagtgcctggctgtacttcgtatagttttatctctgttaccgttacatttgttgtaaaattaggcagctcggttgtattttgttacagaaaaagaggccagaggattgtcatatgtgtcgacagatatcggatgaaaggagtacgtagcactctaacagccccagctttatcaccaccaatgtaatcaagggcttgttatcagccccatcttgttttccaaattcaaagtgcatgtgtatggcaaaaaaaaatttgaaggaaaatcttctcttttctgagggaaactaaaaagngaactgnnnnnnnnnnnnnnnnnnnnnnnnnnnnnnnnnnnnnnnnnnnn

SEQ ID NO: 30432 - DNA, 478 bp, Setaria italica
  Peptide Sequence Number=SeqID_96406
ggcgaggggtataggaaggtgtcactagccaggagctcatgatagtcaacggcagagtctgaaatgtcgacagaaattatttgttcctttctcttcattccaaatgtgctccactggtaactttccctttctaatctcaaaacattactagcttttctcatatcagcttacttcaaaactatgtaagggacctacgatttaagtgacttcgagacgtgctatgattaggctaggcctgtgctcgacaaaaccccccaaggcaagtatcatttaacaagcaagcgtactgctcttatgcaaagcacctggtgaacctgctggcattgtactctgcagtctcaagaagggttggttttattcattgcgttgtgttcctggcattttattcagatatggattagctgaatttgtgcaataccttgatgtctttcgctgtcatcaactaacccgtttgatgttttccatatcatctactaac

SEQ ID NO: 30433 - DNA, 298 bp, Setaria italica
  Peptide Sequence Number=SeqID_96407
acatcaaaggatgcagctgctgccacgtttgaagtcgctgcaacttgttaaatgtcccatgctgagagcgcttccacgacagcttggacaggtggccaccagcttgaaggagctccaattagcatacatggacaatattaaggtggtggagaacttcccatttctgtctgagacgcttttatttatgatatgtgaaggcctagagaatgtctcaaatattcccaaagtgagagagttgcgtgtacacctctgtcccaatttgaggcgtgttgaggtattggacagcttgcaccagctg

SEQ ID NO: 30434 - DNA, 910 bp, Setaria italica
  Peptide Sequence Number=SeqID_96408
ccccggcggcggcggcgatggcggccgtgaccaacgccgacgtggaggtggtcgacttcgacctcgacgacgacgacctcatggacgaggacgccggggcggagccctcgccggcccccgcccccacgtcccgcctccgctccaccatcgcgggcgacgacgcgccgcgtaagaccaagggccgtggcttccgcgacgaccccaactcctcgtccgccccccgcgactcgcgcttcggcgctgggggacgcggcgatttcgactccctcggctccggcggcggcccggcgcccatccgatcaattgaaggatggattgtgctggtcactggagttcacgaagaagcacaagaagatgaccttcacaatgctttccgagaatttgggcaggtcagaaacctgcatttgaacttggatcgtcgtactggatttgtcaaggggtatgctttgattgaatatgagaactttgaagaagctcaggctgcaataaaagaactggatggaactgagctttatgcccaaataataagtgttgattgggcatttagcagtggtcctgctaagcgcagaaacactcaaaagagaccaccaccaagatatcgttcaaggtcccccaggaggacacactgatctgtccccagcatgccatgaaattgctaggactaaatggagtagtgcaagaagtctagggattccagttgtttccttggtgtaccatctgagtttgatggttgttaggttgcctgctgttttcaatgtacgatactttgtaactcttcgtctggtcgatggaggttcgtttaacactatgtttggcatgccagtttgagatgattgtaaccgtggatcctttgcatctttgactagtggtgtgttggaattggatgatcatcttgatatgctttaaaaaa

SEQ ID NO: 30435 - DNA, 464 bp, Setaria italica
  Peptide Sequence Number=SeqID_96409
gcgtcatcttagttgtgcaagaaataaaactatattagacattcgagtgaaacggatatggttttctttcttttttttttttgtaacgcaggagctctgcctttcaattaataagaaaagagtttaaagaacagaagcaaacggcactcgtccgctgcagctgcacaggagtgccccgacacacgcctggagcgttatacaaaaatatggttttctttctgaattacctgtttaaccactttgactatattgtggtttagccatgtagtagtacatggctatgcacgatgaatacaatttgcttgttgattaactttgacaacgtcttgtctcatccctggggtcagcgctagccgagatgtgaacaaatatagtcagcaacgacgaagacaaaatgaatgagcgtaggttctgagaatgttctcgcgtttcgttgctgtctgtttcttcttgttgctatgcgc

SEQ ID NO: 30436 - DNA, 924 bp, Setaria italica
  Peptide Sequence Number=SeqID_96410
caaaaaatcagggataagacgtgcagtggagtcaaaaacttcggatgcaggcggaaaatgagcaaaggcgcaggcagttggaacgaacgtagtggacacccaggcacatccgatcatcagttgagttgctacaagaatcccaaagaagtaacacaaaacaagatagatgcaaaagcaaaatagatctgtattattatgccaaatacgaacaaatatattgtcctgcagaatagtttgtagcaatgaaccgattgatacaacaaagttcattcatttcctttactgttaacactagtggcaaatggagggaaccaggttcacgaaatccagctgcattgtgaccaaacaggtggatagtgtgtgccctccaactcatgcctctaaacctcctaaaaatttaccaccagtctatacctaaaagatcaaatgtgcaacagcttcaaaatacaaatttctaacagacaagtctttgggtccaaatcagggcataaaccggaaaaggaacttgagccagccaggtttcgaaaattataccaaaacattggtgaccccgaaattacaaaaccaatgaatccagagtttggcatgccaattgctaagttatcatggtaaccaaccacacaacttatcagtctttccagaaagtaacgaggggtagtgtagtcatcttaatgatttcttggtctttgtgcaagggaaaatatgccgaacagagggagtaaatctctggccaaatcatttgcaagcagctgatcaccaaattatgcatgcagcgaaagggaaagagtgggtccttctcaatagcttaatgatatccaaactaataacagctacaatcaagtgtagtatagagtagaagtaaaggtgttcagttgctctgagcaatacaatcatcttgctaataaccttaaagtctgattacac

SEQ ID NO: 30437 - DNA, 417 bp, Setaria italica
  Peptide Sequence Number=SeqID_96411
aaaaacaatagacaaaggtaaaaagaaaatacaataatattagctgcgtgctaataagatggtaaaaataatgcaagaagaagtactgtaaagtatacctcacgggcgctcgcggagcggaaggtgatcatgtgcgccagcgccgggatgatgtagacggtgaagctgacgaggagggagccgacggcggagttgatgggcccgaagaaggggaagacgatggcgaggaaccagatgggcacgacgacggggagtcgcgcggcggcgcgcttgcagaggctgcggcagtcgtggagtccgatgagcttctcccacacgaagtagagcggcgtgcatgcaaagccgaaggtgatgaactggtggacgagcatgagcacgacggcggcgtcgcggaacgccgtgcgcgggagcagggcg

SEQ ID NO: 30438 - DNA, 350 bp, Setaria italica
  Peptide Sequence Number=SeqID_96412
acagttctggagataatacctgcattttctttatatcgaggactatatgagcttggacaatatgctattacctcttcagaaacaggaagccatggcatgcaatggagtgatctgaatgaccacacgaacggaatgagagatgttttaattattattattttagaatggttggttttgcttcctattgcatattatttcgaccatgctgcttcagttgcagttggacacacatctagtcctctttctataatcaaacgtctcctcaagaagggccacgcttcgagaaggataactgttaatgaaatagctgataaggaggttcaagtagaaatggagaagctagacattat

SEQ ID NO: 30439 - DNA, 410 bp, Setaria italica
  Peptide Sequence Number=SeqID_96413
atggatgcggcaatatggaagatctacaagatcagtatgcgtatctattcccttatctttttttgttattttacaccagatatgtccagattatagtaggacggtgtgagttgtgtcatgtgtggggcggttcctctattatacaacacatgtgacgccaaatcactaaggattcggagagatttccatatccagtttggtgctagacatattcatttctatgcctccatacggaagaaaaggaactttaactctctaaaagttctctaatcatgaattaattttctaatatttttgttaaacggcaattttggtttcttgatttacttctacagttctactcagccactgattagtatatcttcacatttgagtttgatttgttcttcaaaaatcaggagacaatctga

SEQ ID NO: 30440 - DNA, 273 bp, Setaria italica
  Peptide Sequence Number=SeqID_96414
aataccattgttgaatatttgggttaggaaaagtcatcatcttactcagcgtcttgtttgattatctttctaaccagcacgagtgtatcctgggaatgatgtcatttgtgcccctggtgcttcgtattttgtttattttttttaccttaaccagtttggtaccagattatgaatacataatttgtaaatgtattaagttcatttacttgagtgacatggccagatttttacaagagaactactcgtgcatttactcagaggggtcggatcagg

SEQ ID NO: 30441 - DNA, 318 bp, Setaria italica
  Peptide Sequence Number=SeqID_96415
gcggcagcttcaacgcctccgcaatgaagtcaacaatgagcctgccatcgcagaagcgcccgttggggcggtggaagaaggtctcgccataggggaacgccatggcggggatgttaggggccacgatggcgaggttgccggcatcggtgatggagtcacccaagctgaacagcctcttatagcagcagggagcttgcctggccgacgcggcagcgtacgggcacacgacgaggaggaagaaggggaggacaagcataagggaagacgccatcgtcgatgccagctgatcttcctagctagatcaccaatggctacagg

SEQ ID NO: 30442 - DNA, 458 bp, Setaria italica
  Peptide Sequence Number=SeqID_96416
agggaagaagaagagcgtggctggccggattcgggagggagggcaggaggatgtctaggaggtcggtgaacccgagccggcgggtggcggacgggggcctgccgtccgtcggcggcctgctccaccccaagtcgcgctcgccgcccgtgctcaccattgccctcgtcgtcctgggtgtcattctcctcgtcgcctacttcaacagcggctcaggtcggttaaaggctctcggtgtaactgttacaaccagagaagctgttagcaggtctgaaggtacttgcacatcagaagttatgcgggcgcttccttatcttaaaaaggcatatggcaatgcgatgcaaaaggtcctccatgtaggcccagatagttgtacagtagtttctaacttgttgaaagaaggaaaggttgaaagcttggggagtggaagccttatgatttggaggacactgacagtagtt

SEQ ID NO: 30443 - DNA, 2012 bp, Setaria italica
  misc_feature (1919)..(2012): n is a, c, g, or t
  Peptide Sequence Number=SeqID_96417
ttcttttcggtagttagacacacaactaagatacatgcagaaagatgtagaaaaacaatggcagatcaaagattattctacatctttctgcatgtatcttagttgtgtgtctttcggtagttagattttctattctctttaccaaatggacacaataaaaagaaattcaaaggatgaaccttaaagacactatgtgtttatatctcaatgtagctaatttaaatccggtgctagtgcaacacaagatgacgctaagttgctaacatcttggagatcgaagtggtatatacttttaaggcttaatgctaggtctctagagcagtacatgatcgaactgttgggcacatgggttgggtactggagttggaactttgctgttcaaacagctctattctcattccttttgagtattagaacttttagaagtacaattcaaggttggcaacttgctagtgatgtccacttaggcccccgaaaaatgttttactcctgcagtatcctgtataatttattgaacatttaaaacatagcttttctggtatatggggtccgttcatgttttgctatggtggatagcataggttgtctgaaaaatgtttgtttcattccgcctcagatccgtccccaatccggcaaccctagcgccggattcctcccctccgcgtccccgcccgcccgccgccgccgccgccgccgccgccattgacagaggtgatcgaagggggagagagagcgtggctggccggattcgggagggagggcaggaggatgtctaggaggtcggtgaacccgagccggcgggtggcggacgggggcctgccgtccgtcggcggcctgctccaccccaagtcgcgctcgccgcccgtgctcaccattgccctcgtcgtcctgggtgtcattctcctcgtcgcctacttcaacagcggctcaggtgtaactgttacaaccagagaagctgttagcaggtctgaaggtacttgcacatcagaagttatgcgggcgcttccttatcttaaaaaggcatatggcaatgcgatgcaaaaggtcctccatgtaggcccagatagttgtacagtagtttctaacttgttgaaagaaggaaaggttgaagcttggggagtggagccttatgatttggaggacactgacagtagttgcaaaagccttgtgcgcaagggctttgtccgcatgtctgatattaagttcccccttccataccgcccagattcctttagtcttgttgttgtgtcagatgctttagattatctgaccccaaggtatctgaacaaaacacttccggatttagcaaaggtctccactgatggccttgtcatctttgctggcaatccaggtcagcagaaacctaaggtttcagaactgccaaaatttggaaggccggcaaaattgcggagttcttcatggtggactagatactttgtccagactggcttgacagagaatgaaggaccattgaagaagtttgaagaggctacatccaaggatgaatacaaaccagattgccagatcttccaccttagttcgtaggattgtgctcgtcaaggtgatgcctgtccacagcacctcggatcattgccgcaccagttttgtaagcaacatctttgcttaccccccgttcatcttttcactcggaggaaccagtcgcacagaagagccaaccttcagctataggtagattatgtagggagagagaggctttaccactcgatactagaaattcattctgggaattaagttatgtgttattgaggatcggaaattgaagtgcagaccgcatatgatatatacgtaagaacttcacactgttgtactctgttattattggtgtgttagttatctggactgattcaaatgtaagcttatgatccaagcaagtgaagcagtttgatactaaaaagttnnnnnnnnnnnnnnnnnnnnnnnnnnnnnnnnnnnnnnnnnnnnnnnnnnnnnnnnnnnnnnnnnnnnnnnnnnnnnnnnnnnnnnnnnnnnnn

SEQ ID NO: 30444 - DNA, 287 bp, Setaria italica
  misc_feature (230)..(230): n is a, c, g, or t
  Peptide Sequence Number=SeqID_96418
tacgccaaaaaaatacctgcaaggaaaaaaggggtaaatttctttttggttctcagactaatactacctccagtcacctttatttgatgtttcagacaacaattttggcttgcatataggtttcgttttgcttgtctgaaaaatcaactgaaactgaccagagggagtactactcatgagataaaatgatttaagaaagtccaaacttccaccaacaaaaaaaaaagagngaaaagaacaggacactgattgaaatcataaaggatggaaagccctagcagaataga

SEQ ID NO: 30445 - DNA, 244 bp, Setaria italica
  misc_feature (5)..(5): n is a, c, g, or t
  Peptide Sequence Number=SeqID_96419
gtaanaccttctctccttgcacgttgcttacgttttctagactcaataataaccatggccatcattgacaacaacatatatgcagcagcagtacaagtaacaaccttggtttgttgatccatctataacacaaaagaccaaagaattcaggactatataccaccaactactaccaggagaaccatgtgcaagcacatcacaaaaatccttgaatcctactgcacatatgcatgtaagcaatacc

SEQ ID NO: 30446 - DNA, 253 bp, Setaria italica
  misc_feature (178)..(178): n is a, c, g, or t
  misc_feature (248)..(248): n is a, c, g, or t
  Peptide Sequence Number=SeqID_96420
acgaaactttctttcacgactcactatttcatcaaggtctactcaaaatcaggtacacagacatccggaagtcttaacagtacgacgattaccttagtagttaactacgtaaagtaggtctttaacaatactatttgaaagacgatcctcgttatccttcactctcctcaaaaaagtnttgcactactcccatgctagtcagtctagcccggaacgacgatgatattgttgatggggatgaagatgancttgc

SEQ ID NO: 30447 - DNA, 265 bp, Setaria italica
  Peptide Sequence Number=SeqID_96421
taggcaaagtttttacacagggatttcagccgagctttgactacaatgagaggcaccattggatatcttgcaccactgttggccggcggcacgtcctaacgaggaccggtgcccaggtcgacgggatgacgggctccccaaccgccgggatccagggacggcgacggatcaggcagcaggcgcactggcgcggtaggcggcggcggcggacggcagcaggcgctgcgtctgacgcggaaggcggcaccggcggacgacagcagac

SEQ ID NO: 30448 - DNA, 450 bp, Setaria italica
  Peptide Sequence Number=SeqID_96422
ccgatcattgacaacaacatatatgcagcagcagtacaagtaacaaccttggtttgttgatccatcttggggaaaggaagtcaagatcctgttggaggccacgaacggggagggggacagcactagggttccttcttcctgtgagaatctagccggaaccgacgatgatattgttgatggggatgaagatgagcttgacgaagaagccgacgaagcccatgacgacgaacccgatcgccgtccgcgccgccaccttggtgaactccttgcggtcgggcttgtggcagcgcttgacgaggcggacgctgtccttggcgaagtcgcggaggggatccaccaccgagtcgatcgcgtccatggcggccgggcgagatctcgagacgaggacgcggggtgtggaaggaagccgccgcgaggatgcggttttgcctttgggaagttttgtttgcc

SEQ ID NO: 30449 - DNA, 979 bp, Setaria italica
  Peptide Sequence Number=SeqID_96423
ctctgcactttcaacaatcttggccctcttgttaggtcttgcattagatgttgccccttcctcaaaagcactactaggatcctcttctgtaccatttgcagccccatcttcagtatcaccatcttctgtaccaagaggagcacttgaatcctttgcaaacttgccagtagccatatccttcccaaagattgtttccatctcagcatagttctcaagaggcttgtttaaatactcggcatcagccttgtgatcctacaatgcaatagaaattagtatgaaaaatatgataagaacaagaccacaaaacaatagaaactagattacgtgcacatggccattgtagtgctcctcatcaagggtgatgatgtagttctcttcatcgaatccagatgcactcaagctcttgagtcgtgttatctttgcccactttctttgccatgtcttcagatggttcttaatctgctcaccattgagcgtagtgttgaatttttcattgacagctctagcacatgcattgaaatagacctttttgaagccctttcctgttttaacaccactggcaacgacattggcaagatttttcagcatgaaattggacattggcgctgtccaggcagccacaccagtacctctcccaagtccctcaacatgaccatccattgcctggcatgttacaaaaaaaacagctagcattggatgttaagttaacaagatttcagcaccaaatacaacaaggattgtatgtcatttaactggatttcagcagcaaataagtccttccaaatacaatatagcaacaataagtacatacaattgaaatatagcaacaatatgttcatacaactgaaatatagcaataaatatgtccatacaacacaaacacatctaggaaaatacttgcaaaactgaaatacatcaacaaactagtgggtactaactaatattgttctcttgatggtctgcccacatctgatcagca

SEQ ID NO: 30450 - DNA, 683 bp, Setaria italica
  Peptide Sequence Number=SeqID_96424
ttttttttttttttttttggtttaccgttccccatccccatcccgtcccgtccttgaaaccaaacgcatcctgctggtgccgtcgagattctttgagcgctaggcattctgatttcagatatgctgaaccataccactacatcacggttaccatcacaccgaagagctgtacagacagccaatgaactcagcttaatagaacaatatacgaaactttctttcacgactcactatttcatcaaggtctactcaaaatcaggtacacagacatccggaagtcttaacagtacgacgattactctagtaacacgaaagagaaaaactgtctttaacaatactatttgaaagacgatcctcgttatccttcactctcctcaaaaagtattgcactactcccatgctagtcagtctagccggaaccgacgatgatattgttgatggggatgaagatgagcttgacgaagaagccgacgaagcccatgacgacgaacccgatcgccgtccgcgccgccaccttggtgaactccttgcggtcgggcttgtggcagcgcttgacgaggcggacgctgtccttggcgaagtcgcggaggggatccaccaccgagtcgatcgcgtccatggcggccgggcgagatctcgagacgaggacgcggggtgtggaaggaagccgccgcgaggatgcg

SEQ ID NO: 30451 - DNA, 1513 bp, Setaria italica
  misc_feature (537)..(537): n is a, c, g, or t
  Peptide Sequence Number=SeqID_96425
cctgaaattaaccatctcgatatgctcatgtgcttgtccactgtatgttgtagcatggttataacttgaaaaaattattgtcttctatgaagaactcatcaattccatcttgtataacccaattgtgaatgatgcagcaagtcaaatatagcaacaatatgttcatacaactgaaatatagcaataaatatgtccatacaacacaaacacatctaggaaaatacttgccaaactgaaatacatcaacaaactagtgggtactaactaatattgttctcttgagtgtctcagtgcccacatctgatcagcaatactttgcctgaaattaaccatctcgatatgctcatgtgcttgtccactgtatgttgtagcatggttataacttgaaaaattattgtcttctatgaagaactcatcaattccatcttgtataacccaattgtgaatgatgcagcaagcaacaacaatgtctacttgagttgggaaaggaaagaaaggagtggcatcatcgagaattttgaatcttctctttagacncccaaatgcacgctctactgtgatacgaagagatgagtgcctaaggttgaatagctccttctcattttggacaggattattcccccactcattcaagtgataacgaacaccacgaaaagggggcaagaatcctggttttgctccatatccggcatcaactaggtagaattttcctaaaatgtgatggaaagtatatcatatttctattatattaatgattcatatggagaatctgatatggtattagtgtattaccttgtggtactcgaagtccattctcacgctccaaagcatctcttaacactagtgcatcatgtgctgtcccctcccaaccagccaatacataggtgaaccggagatcaaaatctacggcagccattacattttgagaggcatatgacttcctaccacgaaaggctaactccatatccttaggaacagaggctcttacatgtgtaccatcgatggctccaatacaatccttaaagtaaggatcccatctatggttcccttgtattttagtaggagtttccaatgatggaggcctaattaattcccctcgtagctcaccaacagcacgaagaaccctgttaaaataacgactgactgtttctccggatctatcaaaattagtcccaactactctgttcctaaggttgtgccccacggtatttagaaacattgccacttgctgctcaacacaacaatggatggtatcttcaagcaaaccacgatccctgaataggttgcaaaaccgaagaacttggctctatttagtcttagcatgttcacacaaactgtatcatccttccaaattttgttgttttaagttacttctaagtctcatcctatccctttcatcgataggtccataagtaataccttctctccttgcacgttgcttacgttttctagactcaataataaccatggccatcattgacaacaaaccaaggttgttacttgtactgctgca

SEQ ID NO: 30452 - DNA, 1974 bp, Setaria italica
  Peptide Sequence Number=SeqID_96426
aaggcccaactttctttgccatgtcttcagatggttcttaatctgctcaccattgagcgtagtgttgaatttttcattgacagctctagcacatgcattgaaatagacctttttgaagccctttcctgttttaacaccactggcaatgacattggcaagatttttcagcatgaaattggacattggcgctgtccaggcagccacaccagtacctctcccaagtccctcaacatgaccatccattgcctggcatgtaacaaaaaaaacagctagcattggatgttaagttaacaagatttcagcaccaaatacaacaaggattgtatgtcatttaactagatttcagcagcagataagtccttgcaaatacaatatagcaacaataagtacatacaactgaaatatagcaacaatatgttcatacaactgaaatatagcaataaatatgtccatacaacacaaacacatctaggaaaatacttgccaaactgaaatacatcaacaaactagtgggtactaactaatattgttctcttgatggtctgcccacatctgatcagcaatactttgcctgaaattaaccatctcgatatgctcatgtgcttgtccactgtatgttgtagcatggttataacttgaaaaattattgtcttctatgaagaactcatcaattccatcttgtataacccaattgtgaatgatgcagcaagcaacaacaatgtctacttgagttgggaaaggaaagaaaggagtggcatcatcgagaattttgaatcttctctttagacacccaaatgcacgctctactgtgatacgaagagatgagtgcctaaggttgaatagctccttctcattttggacaggattattcccccactcattcaagtgataacgaacaccacgaaaagggggcaagaatcctggttttgctccatatccggcatcaactaggtagaattttccttgtggtactcgaagtccattctcacgctccaaagcatctcttaacactagtgcatcatgtgctgtcccctcccaaccagccaatacataggtgaaccggagatcaaaatctacggcagccattacattttgagaggcatatgacttcctaccacgaaaggctaactccatatccttaggaacagaggctcttacatgtgtaccatcgatggctccaatacaatccttaaagtaaggatcccatctatggttcccttgtattttagtaggagtttccaatgatggaggcctaattaattcccctcgtagctcaccaacagcacgaagaaccctgttaaaataacgactgactgtttctccggatctatcaaaattagtcccaactactctgttcctaaggttgtgccccacggtatttagaaacattgccacttgctgctcaacacaacaatggatggtatcttcaagcaaaccacgatccctgaataggttgcaaaaccgaaagaacttggctctatttagtcttagcatgttcacacaaactgtatcatccttccaaattttgttgtttaagtactcaagtctcatcctatccctttcatcgataggtccataagtaataccttctctccttgcacgttgcttacgttttctagactcaataataaccatggccatcattgacaacaacatatatgcagcagcagtacaagtaacaaccttggtttgttgatccatcttggggaaaggaagtgaagatcctgttggaggacacgaacggggaaggggacagcactagggctccttcttccactgttggccggcggcacgtcctaacgaggaccggtgcccaggtcgacgggatgacgggctccccaaccgccgggatccagggacggcgacggatcaggcagcaggcgcactggcgcggtaggcggcggcggcggacggcagcaggcgctgcgtctgacgcggaaggcggcaccggcggacgacagcacgctacgtcgt

SEQ ID NO: 30453 - DNA, 436 bp, Setaria italica
  misc_feature (427)..(436): n is a, c, g, or t
  Peptide Sequence Number=SeqID_96427
tagtgaagtgatgtattttgtgacctcatatttagcattatataatgatttttaccaatgtctaattcctttgttaaaccatgatacattttgctattttactgttgactcctgcttaccaaacattattaggtaccggggaccaagatagaagtgttggctaccactgagagcttgtgagattggttacaatatccaagaaaccgaatgttctggtaccagtacactttcagatatttttaatttggtttcttaatttgggcaggattagaggcttcctcgtgaagcattctagtgttgttcactttttgtattcttagtctgtcaggtttgaaccatacattggtaacatacctgtccaaccattttctgtttcttttcttggcaataagcgaatgttagtgacgtgtaaaaaaaaaaaaaaaannnnnnnnnn

SEQ ID NO: 30454 - DNA, 1426 bp, Setaria italica
  Peptide Sequence Number=SeqID_96428
atcccgcggctgcgtccgcctttcgctccgcggggtcccctgcgcccctcgccgggccgtcgcctcgatggccgtttccacccccaggtccgccgccgccgcctcgttcctcgagcgccgcgagtccgggcgcgccctccactttgtcaagtaccagggcctgggaaacgacttcatcatggtggacaatagggattcgtcagtgccgaaggtgactccggaggaggcggcgaagctgtgcgaccggaactttggcattggcgctgatggcgtcatcttcgtcatgccggggagcaatggcgcggactacaccatgaggatcttcaactccgatggcagtgagccggagatgtgtggtaatggagtccgttgctttgctcggtttatagctgagcttgaaaacctgcagggaacacatagcttcacgattcatactggtgctggactgatcattcctgaaatacaaagtgatgggcaggtaaaggttgatatgggcgagcccatcctttctggaccagatatccccacaaaattgctagctaccaagaacaaagttgttgtccaagctgaattagaagttgagggcttaacatggcatgtaacatgtgttagcatgggcaaccctcactgtgtcacatttggtgcaaaagacttaaaggtcttgcaggtcgacgatctaaaacttagtgaaattgggcctaaatttgagcaccatgaaatgtttcctgctcgtaccaacacagaattcgtacaggttttgtctcgttcacacctaaaaatgcgagtttgggagcgtggtgctggagcaactcttgcttgtggtactggtgcttgtgcagttgttgttgctgctgttctagagggccgagctgagcggaaatgtgtagttgatttgcctggcggcccattggaaatagagtggagggaggatgacaatcatgtttacatgactggtccagcagaggctgtcttttatgggtctgttgttcactaggtaccggggaccaagatagaagtgttggctaccactgagagcttgtgagattggttacaatatccaagaaaccgaatgttctggtaccagtacactttcagatatttttaatttggtttcttaatttgggcaggattagaggcttcctcgtgaagcattctagtgttgttcactttttgtattcttagtctgtcaggtttgaaccatacattggtaacatacctgtccaaccattttctgtttcttttcttggcaataagcgaatgttagtgcgtaaagtttcagtagcctacagatctaccttgatatcctgcaacatgatttggcttgctagttatttgctgagatgaatgttgcctatttccagaaaatcgctatcttctaattgcaactttctagtactagccgaggacaattaattaggtaaaaaaa

SEQ ID NO: 30455 - DNA, 244 bp, Setaria italica
  Peptide Sequence Number=SeqID_96429
gcgcgtaggcgggggtgcccgggccgcatcgtcggtgcagcgactcgtaacggcggagcgcggagacgaggtaggaggagatggcgtgcattgacggccggcggtagagcagggcgcggtagcggctgtggcaggaggtttcatcgaagtccggcgagaggagtcctcccaggagccggtcgcggggatccggcaccgtcgccaatggaccggcagtgtcttggttgttggatacggctttcag

SEQ ID NO: 30456 - DNA, 528 bp, Setaria italica
  Peptide Sequence Number=SeqID_96430
gttcctcatcaactgctacccctacttcgcgtacaaggccgaccccaacaacgtgccgctggagtacgtgctgttccagcccaacgccggggtcaccgacaccaacaccaagctcaactacgacaacatgctgtacgcccaggtggactcggtgtacgcagcgatccaggcgctggggcacaccgacatcgacgttaagatctccgagaccgggtggccgtccagggggagaccccgacgaggccggcgccacgccggagtacgccgggacgtacatcgggaacctcctgcagaggatcgagatgaagcagggcacgccgctgaggccgtcggtgcccatcgacgtctacgtcttcgcgctgttcaacgagaacctgaagccggggccggcctccgagcggaactacggcttgttctaccccgacggcacgccggtttacaacgtcggcctgcggggctaccttccgcccatggaatattcagaaggcacgagaaaggtacgatacatcgctcttcagtctttctttg

SEQ ID NO: 30457 - DNA, 233 bp, Setaria italica
  Peptide Sequence Number=SeqID_96431
gcattgccataatatattgcttaagataacttgattttggtttcaacctgtgcactttgctctcttgtgcatatgtgcgtgcatgttcttatgtgtgaaactaatgctgcccattgtgaacactggcagtcaaagaaaatgaagccattttttggggtaataatctccttgtttatcatgcacagggggaggtatcgcaccagtataaaccggtatatcatgcatccaatgca

SEQ ID NO: 30458 - DNA, 416 bp, Setaria italica
  Peptide Sequence Number=SeqID_96432
ctcagaccactgcagcagaagaagatggccaggcttggcgtcctgatcttggctgcgctgctcggcgccgtcgctgcccaagcggcagggtcctacggcggcggcaattattctccgagcccaagcccgcccgcccagactcctccgccgcctcctgctcgtccgcggctcaggttcgggttctacaagcactcgtgccctcccgcggaggtcatagtcagggacgccgtccggaatgccctcctcgtcaaccccggcatcggcgccggcctcatccgcatggccttccacgactgcttcgtccagggctgcgacggctccgtgctgctcgacccgacgccggcgaacccgcgcccggagaagctcggcccgcccaacttcccgagcctgcgtggcttcgaggtcattgacgccgc

SEQ ID NO: 30459 - DNA, 249 bp, Setaria italica
  Peptide Sequence Number=SeqID_96433
catcatagcttgcgaattgcaaggcgttacacttttggggaaagtgctctaaacaagcacttgctaatgggaaaactaatcggtcagccaaagggaatttacagacaacactcaaggaaacaaatattctgagagagacaacaaaaaactgggagctccgctcatcaatggagctccatgaaatgttattgcaaacatcagctatccagcatcgctggagcaaactgcgtatcaggacggcaccatgtg

SEQ ID NO: 30460 - DNA, 475 bp, Setaria italica
  Peptide Sequence Number=SeqID_96434
agctatccaccccaatccgctgctccgcgtagggatccttgtagccgaacaggtaatccaacccccgtacacatttcctccagaagccgcgtccgcaccacccgcccctccgcaccttccctttcgtcgacgccccgtttggaaacacctccggggattcttgcaccggctcccgcggggcttcctcatcgccacgaggttcctccggctccggtgtgggcgaaggcggcgagggtacagtgggtacggaggcagcggcagaggaggagaccgggtagcaaatgttggcggaaggtggaagaggggtgccgaacgtggcggcgatgtcgtagccgccgcggtaggggtgaggattgtactcgacgaagaaatcgtcgtcgtcctcgtgtgggatgaagtctccggcgacggcgggggccatggctggcccccgccgtcgccggagacttcatcccacaacccgaactccaaccgg

SEQ ID NO: 30461 - DNA, 304 bp, Setaria italica
  Peptide Sequence Number=SeqID_96435
ccccatttacatgcaacggaagagcactataaattggacatcacgcacacagacaccatctcatcagctaatgccagcagtcgctactcgcaaggaattaagccctagctagctagcaaagactaaccagcagggaccttggctaagcttgcaacaatttgtgacacgccatggcttcgtccacgaccgggcattgcctgttcctcgtccttcttcttcgctcctccgctgcctacggccagctctcgacgtcgttctacgacacgagctgcccgtcactgcagtccatcgtgcgctccgtcgt

SEQ ID NO: 30462 - DNA, 650 bp, Setaria italica
  Peptide Sequence Number=SeqID_96436
tttggttccttaaatttagttatttcttagttcctagggtctagaagctatagcagcaacctttgcaaaccggaactccatgccacgcaacgcaattgaataaccattcttgaatgagtgcttgcatttttggtgaatgtatcttcatccaggaagactgttccatcatcgaaaaagtgctcctccatcacacatccccttgaggtttggtcactcaggtcttgtgttctcaagactctaatgtcttgcctgtacattatggcatcacccaaggaatcatgaacctcttggagaaatgaatttatgtcgagttcatcagaagcaatagcaggacaagaaacaagcccctccatgaatgattcgatgatagcatcaggtgctgcaccaagattaaaggcactatgcagggcagcaaagacaggatcatcatttcgagtgttttgttttcctcctgtacaaatttggtgacctttcccagtaggccaggacaaagttttcaaagctggactctgtttggccaaaaatactttccctgaccacatcaggctctaggcaggttggagaagcaagatcaattgaaagcctaaaaatagctttacaaatctcatattctctactttgaagttgattcttcccgttgttgcaatcag

SEQ ID NO: 30463 - DNA, 627 bp, Setaria italica
  Peptide Sequence Number=SeqID_96437
ttgtcctttggtctagttcttcttagtttgtttgtttttttttgttttttttttttttagagaactgcttcttcaatggattaaagagcaagcacttgttcctgcggatagactactacagaatcggattacagatgaccttgtccatagacgatcgagcacgcagcagcagctagcagtacaaccagtacaccacgcacttgttgaaggagggggacgaacaacagcgacggcatgcttctccgatccgatccgactcgacagatcgacagacctatccggtgtagatgtggacgtggagcgcgagcgtgaggatggtgaaggccgcgaagaagatgagggtgtggacgaagatggccttgccgttggtgtggaagccgccgaagtcgacgtggcggtgggtgcccgggagctcgcacagcaggcccggcgacagcagcacgaacagcaccacgcccaccaccacggggccccagtccgccatcgatccgccccctgccgatccgatccgagcaacagctagcaccgagaggggagagggaggtcggggagcggggcctgagttttgtgcgtgagtgctggtggaggagagtggagtgtctggtgtggagctttggggagaagaag

SEQ ID NO: 30464 - DNA, 339 bp, Setaria italica
  Peptide Sequence Number=SeqID_96438
cgcctcaccaacctaccggcccaccgcccgccgccgcatgacggtggcccgcggcccgcccggccgcccctcctccgcgctcctgggctgctggcgccgccgccagccgctgggcttcggcgccaaggtcggcatcgccatcgcgctcggcctctccttcgcaatcatctggacctccgtctccccgacctcctcctcccagcagatctccaccgagcgctcctccttcgccgccgaggtcgccgccccgccaaccgcctcccataaccgcaccagcaccagcatcgccggcgggcatgctcaccggaagccccgccccgtcccgcacagccacaagaa

SEQ ID NO: 30465 - DNA, 462 bp, Setaria italica
  Peptide Sequence Number=SeqID_96439
tatttgtatctggcatctcaaatgagaccattgagtcatttacattgttttttgctttcctgaaatgaaatacatgaatgtcacttgaaacattacaattccacaataaatcaataattcttcattttttcaggcaccacaattgtgcgtgatattgatgtctagtcgttacatagataactagcagagtttcttttaaaaaatatttgcgccatggccatatgtactatgaagtaagctctgctgaatttggaggtatgtgaacaagtggttgtttatactcctaggattgagaggtagtcatgtcttgcattgttgcataaaggttgttctatctatgtagcaacaccaccttttctttgttcaacatttttatatggtgttccataggtcatccgaagtgttatgatggctaattcctaattacttaaatgtagttggaaacagccacagttggttctt

SEQ ID NO: 30466 - DNA, 358 bp, Setaria italica
  Peptide Sequence Number=SeqID_96440
gattccggctcaacacccatgtccatggccacaaaccgcagcaagcaagacacaagctttgctgcctcagaggagtacgtatcaatggagtccctgaaagatggagggttgcgaggccagaacctcaggttcctcgaatcgctcggacggagcatgaggtagaacatgtctgcccagtccagtttctggttatcggaaacaacaaagtgctggccatacccttcaagattgcccggttccattgagtacaccttctttgcttccagtggctgcttgaagaattcattcatgtcattcctgaagttggagatcacttcatctggtataccatggttgatgagctgaaagaagccccatg

SEQ ID NO: 30467 - DNA, 103 bp, Setaria italica
  Peptide Sequence Number=SeqID_96441
agcatgaaatcgtttgcttgacgaacctgtctgagtcatgtctctgtgcacggagaattcgttccggcatgattgataatattaatgcttgagctgcccttta

SEQ ID NO: 30468 - DNA, 343 bp, Setaria italica
  Peptide Sequence Number=SeqID_96442
tgggagtgggagtagtagtggttgttgtgggtgtggtgggagggggaggagcgggagccggtggaggtggtgctgcgggacgtggagcgggagctgtagggggactggtggtggtggtggcgggacgaggacgacgaggagaagtcttcatccatgtagaagccgtggtcgttgccgcattcttcttggtacggcgccggcgctgctggctggtggtcgtagtagtagcctccgccacctccgcctccgcctcctcctccggcggggtcgcagtagtagtagctgccgctgctgttgctgctgttgtagtgggagtgggagtgggagtagtagtggttgttgt

SEQ ID NO: 30469 - DNA, 347 bp, Setaria italica
  misc_feature (339)..(339): n is a, c, g, or t
  Peptide Sequence Number=SeqID_96443
gttgatccggcgctcaagggcctttaccccgcaaaatccctctcccgttttgcagacgttgttgcactgtgtgtccagcctgagccggagttcagacctcccatgtctgaggtggtgcaagcgctggtccggctcgttcaaagggccaacatgaccaggagaatgctcgacggcgaggaggcttctcggcgaccggatgaccaggaccaggaattcgtctaacaagtgaaacaatacatacatcttgtgctgaacctgcataccatcttactgttgcgactgttaacttttggtcccccaacacaacacgtactgcaggaaaaagtagggggggggggngggggggc

SEQ ID NO: 30470 - DNA, 513 bp, Setaria italica
  Peptide Sequence Number=SeqID_96444
gaggatgagagaagatgacaagaagatgccatcattctggagtcctgagaattcagctcttgcttccgagccatatctgatgagcaaccaaaaggcttgtgtccaacatttcaaagttgcaccatcccaatctcagtgagcttgtgggctactgcatggagcatggacagcacttgctggttttttgatttccacaggaatggttcactgcatgatatgcttcatctctcagatgaatataacaagccactcagttggaattctcgtgttaagattgcattgggctctgcacgtgcactagagtatcttcatgaaatctgttctccatctataattcacaagaacttcaagtcatccaatattttactggacacagagctcaatcctcacatttctgatgctggactttcaagttttgttccagatgctgaattccaggcttctagtattctagggtttcttggtattattggttgttcccctttgttaggtttggttactttattttgttta

SEQ ID NO: 30471 - DNA, 325 bp, Setaria italica
  Peptide Sequence Number=SeqID_96445
aactctctaggccccggtcagagcaatcacttgtccggtgggcaactccccagctgtgaagaaactaaacagtacagcactgcctagccaatcatcagatgatttctatgagcttgtgtccaacatttcaaagttgcaccatcccaatctcagtgagcttgtgggctactgcatggagcatggacagcacttgctggtttttgatttccacaggaatggttcactgcatgatatgcttcatctctcagatgaatataacaagccactcagttgaagttcttgtgaattatagatggagaacagatttcatgaagatactctagtg

SEQ ID NO: 30472 - DNA, 1565 bp, Setaria italica
  misc_feature (1519)..(1565): n is a, c, g, or t
  Peptide Sequence Number=SeqID_96446
cgcttcttcccaagcaaggaggagccgaggaagaggaggaggaggagggggacgggcggctcctacccgcctcgcgtgctccgcggcccgcgcatcctgcctcgccgccttcctcgcccccggagccgtggctcgccgagggaatagcgaaaaggcgctatgagttcagcgagtggtgtgaccaatggtcatgggaaagaagcagcattatatgaggagcagaagtccaagatcggtaaagttaaaactgaactaggacagctatctggaaaatcagctctatattgctcagacgcttcaattgcaaggtacctgatagcaaggaactgggacgtgaggaaggccacaaaaatgctgaagaaaaccttgaaatggcgtttagagtataagccagatgagatccgctgggatgatatatctgatgaagctgtgactggaaaaatttaccgagctgattactttgacaagagtgggcggagtatccttgtcatgagacctggatgccagaataccaaggatgccaaagggcaagtcaagtacttggtgtactgtatggagaatgcaattctaaatctgccacatggtcaggatcagatggtttggctcattgattttgctggcttcaacttaggtaacctgtcaattaatgtgacaaagttgacggcagatgtccttcaaggtcattatcctgaaagattgggtgtggcaattctttacaatgccccaaagttttttgagcctttctggaagatggcaagccccattcttgagaggaagaccagaaacaaggtcaaatttgtatactcagataggcctgacaccatgaagatcattgaagatcttttcaacatggatgagttagaatgtgcttttggtggcaagaatccagctactttcaatataaatgattatgccgtgaggatgagagaagatgacaagaagatgccatcattctggagtcctgagaattcagctcttgcttccgagccatatctgatgagcaaccaaaagccccaagaaagcagctcctcgggtgtgaaggctgaagagactgaacctgaaaagagggaagaaacagatactgcacctgaaaagagggcagaatcggataccgaatctgaaaaggaggaagaaacacagactgaatcaagcacagttgagcagaaaagcttgccgggagaagatactgctccagcagataaaagtggcctttaatctgatctgtgagtatcaccatgaaacgtaaatggtaaatgttgataggagctctacaacagtgtgttctcattaatagatgaacatcaaaggcgatgagaaactcttttaacacatggcaggatcgttatgcctgacttgttttgtagtcagcgtcactctgtttctttcatccctcactatcccactccatttttctgccctcgtgattttatttgaagaaccctgttgtggcagaatgagatccaacagacggtaaagaactaatacaatattttgttaccctcagtttaaaaactaaaannnnnnnnnnnnnnnnnnnnnnnnnnnnnnnnnnnnnnnnnnnnnnn

SEQ ID NO: 30473 - DNA, 2302 bp, Setaria italica
  Peptide Sequence Number=SeqID_96447
ggaggaggagagtgatttatccaagcgagagagagagggagagggagagagcattgctgtggccctgtaggaggaggggcctgacggagagggagggaggcgaggtggtggagcaatggcgagagcggcctgggccgcatggcttctcgtcctcctgtgcttcggcgcttggaccccgcggcgaatcttggtctccgcggccaccgacgcgaatgatgttactgccctcaacacgctgtttaccagcatgtcttcaccgggacagctgcagggctggaaggcgagcggcggtgacccctgcagcgaatcatggcagggcatcacctgctctggatcctcagtcactgcaattaaattgccgggattgggactctctggaactctggcctacaacatgaacaccatggattcactcgttgagctagatttgagccaaaataatctcggtggtggtcaacagattccgtacaatcttccaaataagaagcttgaaagactcaatctggcagggaaccagttctctggagctgtgccatactcaatttccacgatgcctaaacttcagtatttaaacctcaatcataaccaactatcaggagatatcactgatatattttccaacctcccaagtttgacgacagtaagacctttcctccaattctctactggtaatctaccacaaagtttcacttcgttgtcaagcctgaaaacactgtatttgcagaacaatcaacttactggctcaatcaatgtacttgccaatcttccgcttgatgatttgaacgtagcaaataaccgcttcactggttggattcctaatgagctaaagaagataaatagcctacaaactgatggtaactcctggagcaccggcccagcaccaccaccaccaccatttactgctcctccacattcacgcagcaaccgtcggaaaagcccaggccagcactccaatggaagtaacaactcaggttctggtggaagctctggcataggtgctggagccatagcaggcatcatcatatctgttcttgttattggagcagttgttgcattcttcttgataaagaggaaacaacgaaaaggtgcaatgccagagcactatgaacagcgccagccgtttaattcattcccttcaaatgaagttaaagagatgaagcctattcaagaggctaccactgtagaggtggagtctttgccttctcctgctgcagttaacctgaaaccacctcccaagattgagcgaaaccagtcatttgatgatgatgatattgcaagcaagcctgttgcaaagaaaagtaatgcagcaccagtgaaggcaactgtttattcggttgctgacctacagatggcaacagatagcttcagcatggacaaccttattggagagggtacttttggacgtgtgtacagagcacaattcagtgatggaaaggttctagctgtgaagaaactaaacagtacagcactgcctagccaatcatcagatgatttctatgagcttgtgtccaacatttcaaagttgcaccatcccaatctcagtgagcttgtgggctactgcatggagcatggacagcacttgctggtttttgatttccacaggaatggttcactgcatgatatgcttcatctctcagatgaatataacaagccactcagttggaattctcgtgttaagattgcattgggctctgcacgtgcactagagtatcttcatgaaatctgttctccatctataattcacaagaacttcaagtcatccaatattttactggacacagagctcaatcctcacatttctgatgctggactttcaagttttgttccagatgctgaattccaggcttcagatcagggttctggatatggtgcccctgaggtggacatgactggccagtataccctcaaaagtgatgtctacagctttggagttgtcatgctggagctcttgacaggccgaaagccatttgacagctctaggccccggtcagagcaatcacttgtccggtgggcaactccccagctgcatgacatcgacgccttggaccggatggttgatccggcgctcaagggcctttaccccgcaaaatccctctcccgttttgcagacgttgttgcactgtgtgtccagcctgagccggagttcagacctcccatgtctgaggtggtgcaagcgctggtccggctcgttcaaagggccaacatgaccaggagaatgctcgacggcgaggaggcttcgcggcggtcgtaccggtattgccaggaagtacctaggtaatttcgtttctttaacttaagttta

SEQ ID NO: 30474 - DNA, 246 bp, Setaria italica
  Peptide Sequence Number=SeqID_96448
accaagtcaagtccctgagctccctaagtcatcagaaagtgttgtcagtttccaatggttttttctgaggaaacatcacgttgcaatatactcgtaggaagtgatggcgcttcagctgtctcacttgttggtggcttctcggaagtatcaccattgttctttgtatctttgctgaagagcaatatagatactgagaaaccatcagcaaacagtgtggttggtgtgaagccagcggaaaccagtaca

SEQ ID NO: 30475 - DNA, 1580 bp, Setaria italica
  Peptide Sequence Number=SeqID_96449
cattgttttctgatggctcaacacttgtctctcccacctccagtggcttctgaggagttacaatatcctctgaagacttggcactcacctcatcagcctccaattgtttctcaagagaagcattgtcttctgatggctctgcatctgccttgtcttcctccgatgacttctcggaagttacaccatcctccggtggcttgacactcacctcttcttcctcggatggcttctcaatagctatgctttcctctgatggtttgctggtggtttcttcgttgtgtgttgaatccccaacaactgtttcacttcctgatggtgtttctattggtgcattgctctgatgtgatgtttgatcagaaatgcctcccggtagaggttcagcagtagttatgttgtttggatggtctacaggcagtgtgtcagtagctgagctgctttctgacggtatgtcagaatcagcattactttcagttccaggtggcttctcaacagatgcatcatcatgaggcttcaatagctgatcagttaccttatcaggagcagcatcaaattgaggttctggtggtgccatggcaactgcatcagtttgaaactctgatggctttttgaaagatgcattgctctcaggctctgatggctgctctgatagtttatcagtggctgcattgctttgaagcccagaaggcttatcactggacgtactactttgatgtacttctggcttctcagttgattcattgctctgtggttctgatgactgctcagctaactgatctgcatcattttgtgattctgcaggcttttctgcagttatgtggctttcaggctctgatgactccttggcagttgcagcaccaacaagctctagtggattctcagaatctttttcatgttgaggttccagtggttgctccatagccacatccttctgatgttctgatggttgctcctttggactctcagcaggtgcaatgctcagagattctgatgagttctcagcatctgcatcattttctgcttctgtaatctgggcagctgccttctccgccacgacttgaggtactaatggctgctcagtgtttgaattgctttgggagtccagagaactcttgccagatgaaagaccttcatgttctgatggatccttgtttggcttgttgagagtggcatcactttcaggttctgtcgtcttctcatgagttacttcactccctgtcatgtctgcagcaacatcatcactttgatatggcttctcaacagcctctttattttgcagtggctgctcagacggttcactggtttgaactggctcctctgcaatatcttctatcaatggcttattggcgatcaaagtgcttggatgtggcttcttgacagccatggcactttccaatatgttctcagtcaccaactctctctccaagatcttctgatgggctgtatcactttgaggtgacttcaatacactttctaccttctcagtgataatactttgaggtatcttctcagcagcggtgtcactcggtgataacttctcggttttaacaacactttctgatgacttagggagtcttctaggg

SEQ ID NO: 30476 - DNA, 763 bp, Setaria italica
  Peptide Sequence Number=SeqID_96450
ttacaaaacaagaataaaccgttactgagtagtacaaccactgaaaagcgatcactgagcggtgctgccattgagaagccatcaccaaacaacggggttgatgtgaaacagtctgaaaacagcacagttgtcaaaaggtcatggcaacgaagtgtggctactgaaaatccaccagagagcattttaccatcggataagccatcagtgaccagtgcaaatgatgcaaagccatcagaaactagcaaagtggtcaaaaaaccatggcaacacattgtggctgctgagaagcagatacagaacagtgcacaaactgagaagtcacagaacagtgtacctactgagaagtcatcaccgacaactgagatgaagccattagataacaccacagaagtaaaaagtccatggggacgtagggtattcaatcataagccgctgaagagcaatatagatactgagaaaccatcagcaaacagtgtggttggtgtgaagccagcggaaaccagtacagtaacccctgtgccacagcaacacacagaaaacgtcgagaaaccttcagacactagtgcaaatgatgcaaagaatggagatgatacgaagcgtacagatgatgtaaagccatcagagaacactgcagcagtagttagaaagtcgtggcaacgcaacataggctctgagaagcaacccagagcagtgcagttgatgcaaagagtacagaaagtagtggaacaatcaaaaggctgtggcaacgcaatgtggcaactga

SEQ ID NO: 30477 - DNA, 1495 bp, Setaria italica
  misc_feature (1472)..(1472): n is a, c, g, or t
  misc_feature (1488)..(1488): n is a, c, g, or t
  Peptide Sequence Number=SeqID_96451
agatgcagagccatcagaagacaatgcttctcttgagaaacaattggaggctgatgaggtgagtgccaagtcttcagaggatattgtaactcctcagaagccactggaggtgggagagacaagtgttgagccatcagaaaacaatgcttctcccgggaagccatcggaggaaaatgaggagagtgccaagccatcggaggatgttgtaactccagagaagccattggaaggaaggtggggcaagcacagagccatcagaagacaatgcttctcttgaggaaccaaaagaagaggacaaggtgactcacaagccttctgaggacgacagtgtagcccttgagaagccattggaggctgatgaggtgagtgccaagtcttcagaggatattgtaactcctcagaagccactggaggtgggagagacaagtgttgagccatcagaaaacaatgcttctcccgggaagccatcggaggaaaatgaggagagtgccaagccatcggaggatgttgtaactccagagaagccattggaggaaggtggggcaagcacagagccatcagaagacaatgcttctcttgaggaaccaaaagaagaggacaaggtgactcacaagccttctgaggacgacagtgtagcccttgagaagccaccagaagaaggtgaggcgagttcagagccatcagaagacactgctgctcgtggagaaacaaaagagaaagatgaggtgattgcgaagtcatcggaggccagtgtggctcttgagaaaccattggaggaaagcgaggcaatcgcagagccgtcagaagacaatgctgctattgggaagccattggaggaagataaggcaaatgatgagccatcagacgacagtgtagctcttgggaagctacaggaggaaggggttgacagtgtcaaaccatcagaggaggacgtggctcctgagaaatcagctgctgacaagccatccgaagaagtggtcgacgagaagccgtcccacgacgatgctattgtcgagccgtcatctcaggacgacacggccactgagaagccatcagctacaactgacactgcagaaactgcatgagacagcagttagccggttacagttagttagcaacagccaacagtttttaacagtgtggatcgaatattattgttgtgggttttcggcgtgccttttgtttgttttttctctgtacattgcttgagttgtaaaatttgagggaaagaaactacaggtattgatttgatttgatttttttttcgcaagcaataatcccctcctccccatgttaggacttaggaggataccattgaggttttacatataggatttgcgtggggtttgatttctatttctgtacatcagatgatgtcttttgtaaatgatattgtgcaaacaattactgtgtttgcttattatttgattttctgcagtccatgtcaataacaaaaaaaaaaaaaaaaaaanaaaaaaaaaaaaaaanaaaaaaa

SEQ ID NO: 30478 - DNA, 744 bp, Setaria italica
  Peptide Sequence Number=SeqID_96452
aagaaccaaataaggaacaactttaccaaaataatatgttctcagtcaccaactctctctccaagatcttctgatgggctgtatcactttgaggtgacttcaatacactttctaccttctcagtgataatactttgaggtatcttctcagcagcggtgtcactcggtgataacttctcggttttaacaacactttctgatgacttagggagctcagggacttgacttggtgtcatggtaggtatgtcagtttccaatggtttttctgaggaaacatcacgttgcaatatactcgtaggaagtgatggcgcttcagctgtctcacttgttggtggcttctcggaagtatcaccattgttctttgtatctttgctgatttgcaatatgttttcagtggccaaaatgacttgctgtagttcctcagcaggtgcaatgctttgtgacgtttccttgacagctatcgtgctttccaggggactctctacaactgtcttgatttgcaatggcttactttgcagtggcttattgctagataaatcagtctctttctgtttttctggagccatgcttctttgccatggcctcttcgcggccgtgttactttggaaaggcttggagacagctacactgctctgtgatggtgccacaactgacgtaccactttgtgagggcttctcagttgccacattgcgttgccacagccttttgattgttccactactttctgtactctttgcatctaacg

SEQ ID NO: 30479 - DNA, 839 bp, Setaria italica
  Peptide Sequence Number=SeqID_96453
gctggcttctatatggagtaatgatccctattttcctagaggagaactccaacggatatcttttctttaaaaaagttaaagtatttcaagagctgcatcagcttcaaactcgttacagagtgactgtgtagcagcattccttccacaatgttcacgaccgtcagcaatatcaaagaacatgtatggaccaagataatcatgatcatggaatgaagctgatttctcagccatctcagcaccatcaagcagtttatttcgaggaaatgtaaagatggaaatctgctaatctctggatgcatgcgatactgtttagtcagcataatcactgggtaaccagctctttgtaggcgttcaaacatgctgcactcatagagaaacttgctagccaatccagacatcacagtagcaggtagctgcttgggatcaccaaccattatgcatttagttcctctcgacttcagaagctgtagtggaatcagtgttgcaggttcaagggcctgtgcagcttcatcaataacaacaacatcaaacagagcatgctccgaaaaagtcccatatttattagatgaagcagtttctgagcaaactccataaatgtcaccgccgcacccactcagtgtagtcacaataatttctgcttctccaagaattgacttccgtaccttgtgctttagaaacttgttttcatcagctttattttttcacgtgcgtgagcagtggcaagttctgcagaaactttcctttctgtgcatacaaaagttaagctttccaccaagcgcttcatcagaaacttcatcgacctcatcttcatcagctacaggagaaccatcttcacttta

SEQ ID NO: 30480 - DNA, 178 bp, Setaria italica
  Peptide Sequence Number=SeqID_96454
gagctaatagcagttaaggacttcaggacttgcatagaaaacatgtattgttccattaaatggaagctatactgaaacaagtcttgaataagaaggatatttcttctgtgaaccaccactaccaagaagatcacggatttgctcattgtagatctcaaccatttgctgagacacgcaa

SEQ ID NO: 30481 - DNA, 360 bp, Setaria italica
  Peptide Sequence Number=SeqID_96455
ttttgcgaaacagggtagattatattaatgaagcacggtacatctagtacatcccccttttacataaaggacccttaaagaagaagaaattacatagacgtcctcatcctcttctccgatgaactgctccgcctgggaaccagaccggagccaaatccacccatcaccatcgccggagactccaaacttttggtaagccgcaagatccagcgcctcagaccctctgggacgcatcttcatccactgaacgaacgtcggcgaacttcgcaccatggacgatggaggaaccgcacccgacgccaacacgccggagcaggagtccaggacggcctgagactaccaaggcacacaggggatagg

SEQ ID NO: 30482 - DNA, 836 bp, Setaria italica
  Peptide Sequence Number=SeqID_96456
atccattatagtattgatctggagcattgcacagaagaattacattgaaatcttgaactgaaacaccaactaaaatcttaaagaactagtacacattaatcgagacccggtttggcacagtttttttcttttttttgtcgaaacagggtagattatattaatgaagcacggtacatctagtacatcccccttttacataaaggacccttaaagaagaagaaattacatagacgtcctcatcctcttctccgatgaactgctccgcctgggaaccagaccggagccaaatccacccatcaccatcgccggagactccaaacttttggtaagccgcaagatccagcgcctcagaccctctgggacgcatcttcatccactgaacgaacgtcggcgaacttcgcaccatggacgatggaggaaccgcacccgacgccaacacgccggagcaggagtccaggacggccgacgacgaggccgccagccaaccagacaaagaccccaacaaggggaaagaccacaactctaccccgtacgctaaaaggtagaggtcaactaacctcgctccctgctcaccggggatgacgccgccgccgccgccgaagaggcacaggagaaagatgaccatagacgacgatccgcacgccatcgccggtaaatacgagctagtagacctacatctacagctatacagggccctcccgctaaggtgccgggctcccctacccgctccgccgcccagagggccgccggaggggaggaggcccggcggatcgacggggggaagacgaagccgccttcgaaatcgcctgtggctactgtagcttggggaaaactcg

SEQ ID NO: 30483 - DNA, 978 bp, Setaria italica
  Peptide Sequence Number=SeqID_96457
ggacaagtcagcaaccgagcgggcggcggaggaggaggaggagatgccggggaaggggcagcggcggagggagaagaactaccgggcggcgcacggcggggactcgcgcctgcccccgccgccgaagcagcgggagctcgaggccatcccgtccaagctccgccgtcttatcgccttccagaacaagcacgacgacaacgcgaacgcgttctcaggaggtgctcgtgctcccgggaagcaagatgatgggttagggaagaacaggccggctaaagacaagaaaactaagaagcagacaccagaggctccagctgaaagcaaagcatcagagatcaaaggtggccatggttcggctgccaatgagaatgtgaatgcagagggaagcaaggggaagcgaaagagggggaaggctgtggaccttcgtttcaaggaattggaggagaatgtctcaatttcgaagaagcaaaaaggaagaaacatctggatgagaagaaaaagaagcgcaagggtaataagacggagactcttccagattttcctgggcgtgagaaagtaaaatttggggaagttgttgaggctccaccaaagttgtcattcccgaaggtgaagagcgcttcagatgcttctcgtgagatgctaaggaaagaggcgattgagaattacagaaatatcaaaggctggacatcgaggcctggactccagcttccaacactagctgaaaatacattcttgtccccatagatattttatctgtttattatatcattaacaaacttgctctgtttgtatcagagaagtttagagtatactctcttgtaggaaattctcaaacaagcatttctgcttgggttccatgtttttgtttctgtttactttcaaatcttatcattgctgtgttcttgcaaatggttagtatgtgcttaagaaagtgtactgactgtttgatcagtggtttggattttggaaacatggtgccaa

SEQ ID NO: 30484 - DNA, 1031 bp, Setaria italica
  misc_feature (979)..(1031): n is a, c, g, or t
  Peptide Sequence Number=SeqID_96458
tcctacgccgccgtcgccgccgagaaccccgcgcccaacggcggcgtcgcgaaggaggaggagggggccgccggcacccacgccaccgccaagtcctacgccgccgtcgccgcccacgccgagatcgaggacctccgcgccgccaagctcgacctggaggggaagctcgccgaggcccagcgggagaacgaggcactcgccaaggaggcgcaccgcatggaggggatcttcacgcagtcccgggaggaggtcaccagcgccgagttcgccgccgactccgccgagaaggaggccgcctcgctccgcgccgaggtcgagcgcctccaggccgccctcaagatcgagaagggtgagcacgagctggacaagcgcaggcacgaggagctcgccaaggaggtggaggccgttcgccaggagaagctcaagctcgaggaggagatcaaggccctgaaggcttccgccgccaccaccactacgaaggagagggaggctgctccgtcggctgaggccccgaaggaagtggagggcgtgtggcaggctatggcggtggccgcggctattggcgctgccggcacggctgccgtcgtgctgatcggtctccgcctcatcaagaggtaatctggtgctcggttccgcaggaagttttgctcggttgcgcaggaagtttttgcggtgatgctgctcgaactgaactgggagtgatgtgacttctatgggtagttgcttattagcctacagaaacatagggatctggagactggttatgtttcactgctgtttttcttctactagtatcattctacatgcttttggtggtgacataaaagatgttcgtgcgactgagtaacactgtatggttgtttatcttcacgtttatgttactgctgcggagcagccccttatctctgtttcgatctaatagtttgtgctctgctggtgagtgtgcttaattgaaattattggcttggtgatgaacgtnnnnnnnnnnnnnnnnnnnnnnnnnnnnnnnnnnnnnnnnnnnnnnnnnnnnn

SEQ ID NO: 30485 - DNA, 270 bp, Setaria italica
  Peptide Sequence Number=SeqID_96459
atagatatccctcccaattatgatttctctgcttgttgctcctccttgtcggcctcttcttcatccacttgtttgttatctgtacaacatgccaacgcatccttcttctttccccacagcaaaaggtaaagcccaaatatcatcagcaccgaacctagaatgctgccaagatagatctgctcgtggaggaagaagaaatcgatgatggctaccatgatctgaatgatggggatgaaggctgcagtgaaaactggaccactctttgttgta

SEQ ID NO: 30486 - DNA, 186 bp, Setaria italica
  Peptide Sequence Number=SeqID_96460
caagatcgcatctctcaatgatgtcattgaaaacgcatctaacgaaaacgccaacatccaaaagaagaccaagaagtatgaggatgatctcgaagaattgagagagagactcgaggagttgacagaggacagaaatgaactcgaaaatgctcgttccaaactcgaatctgagatttctgaattcgg

SEQ ID NO: 30487 - DNA, 550 bp, Setaria italica
  Peptide Sequence Number=SeqID_96461
cacgaggttcgacatgtgtcagacaacatccagatcttggtcgtattgtgcttgaagttgctaagaataggctggaccaaatgctgtatgtaggactcacagaggatcatgaagaatctgcgaggttgtttgctcatatggtaggagcacaggtgctttcacaatctgggacattgaactttgatctgaaggaagatctacccagtgaaaatgactctcacccatccatggtggagccagaggatgaagaaacaaacaaacatctgaatagcacccatggttggcaaactaatgaagccctgaactccaccgacgatgaacaaggaaaaggaaatatgactgttggtaaactgatggaagcttatgaaacttgcattgctaaactgcggaagtctcaatctaaccgtcgtaaaatatccctaaagaaagttgaggaagcaaacttttcaaaagaggcacggaagctggtaccagagacaattgtgaagcaaattatctctttgaacagccttgacatggaactttatgatcacgctaagaaatttttacc

SEQ ID NO: 30488 - DNA, 677 bp, Setaria italica
  Peptide Sequence Number=SeqID_96462
taccaaccgaagaaacaaacaaacatctgaatagcacccatggttggcaaactaatgaagccctgaactccaccgacgatgaacaaggaaaaggaaatatgactgttggtaaactgatggaagcttatgaaacttgcattgctaaactgcggaagtctcaatctaaccgtcgtaaaatatccctaaagaaagttgaggaagcaaacttttcaaaagaggcacggaagctggtaccagagacaattgtgaagcaaattatctctttgaacagccttgacatggaactttatgatcacgctaagaaaatttttacccaggaacatctgatgctaaaagcacaacaatccatgggctggacagacatcatatgcagcgacggggtttgctctccttggatggtggtcgtgcttggcctagggatcacagtgatcatagctttagtctcatttgctgtaacgacgagaagaagaacgtcaaaacttaaggtttaacaatgattcatgaggcagtctctagatttttgatgtacagtctgatgatgcccctagacgttacccttggcattctttcgggcaaagacggtagcatccacagattcatcgtatatactcccatcggtgttaactgtttaacatgcctcgttgattggatggcttatcaggtccacagccgtgata

SEQ ID NO: 30489 - DNA, 1684 bp, Setaria italica
  Peptide Sequence Number=SeqID_96463
ctctctcccaccccgcttttaacgcccgcctccgtcctccctctctccctctcctcttcgatcgccgctgcggtctcgtgccgtgcccgcccccgcgtcctcctctcgtcctcgttcccaaccgcagcgctctcgcccgctggatctgggcgcggggcgctgctccctaacggattgatggcgcgggcggcgctcggattgggcgcggccgcccgcgcgctcgcgctcctcgccgtcgcctcagtggcgctgcttccactcgtcagctccgacgacgggtacaggcactgcgagggggtcgtcaggggctgggcgtattcctctacggggcgcgacaaggatggggacaagatgagcctcaaggatttgctcttcttcctccacattcctcggaccggaggccgcacctacttccactgcttcctgaagaagctgtacacaaacgcgcaggaatgcccgcggtcttacgataagctgcggtttgacccaagccatcctgactgcaagctggttgtcagtcatgatgactatagcttaacttccaagctgccaagggagagaacttccgttgtaacaatactgagaaatccagttgatcgtgtatttagcacatatgagttctcagttgaagttgcagctagattccttgtgcacccgaacctaacttctgcaaagttaatgactacccgtgtgttaacaaagtctcgtgctgtaagtactttggacatctggccttggaagtacttggttccatggatgagagaagatctgtttgccaggagagatgccagggggattgacaaagtgcatagtagcaagaaggttaatgcatatgatgtggaggatatggttatgccgttacaccagtacatcaatgatccagttgcccatgaaatcattcataatggcgctacctttcagattactgggctaacaaacaattcatactttgatggagcacacgaggttcgacattgtgtcagacaacatccagatcttggtcgtattgtgcttgaagttgctaagaataggctggaccaaatgctgtatgtaggactcacagaggatcatgaagaatctgcgaggttgtttgctcatatggtaggagcacaggtgctttcacaatctgggacattgaactttgatctgaaggaagatctacccagtgaaaatgactctcacccatccatggtggagccagaggatgaagaaacaaaccatctgaatagcacccatggttggtggtaatagtacgttacgatctggtgtttctaacttataattttatcttcagtagttgtatttatgttactttagatcaaaggtcaacaaatcctcagctttatcatttattgaaactgatagtatgacctttttggttcaaacattccctaacagattaccaatagctgaaattctcgaatcccaagcatagaatcatactgcaatacagaggcacagtatgcgcatccctcatgtgaaaatcaattaatctgaaccagcataactttcagcaaagttcaaactataatgaatctgctgatcgactactaaatgcataagcaggtggctggtgtagctgaagtggcaaactgttgttttgtgcatgatttgcttcacattaataacatgagggcaggaaagtgacatgcctggaaaaaggtgtcttgaaaaaataactaca

SEQ ID NO: 30490 - DNA, 408 bp, Setaria italica
  Peptide Sequence Number=SeqID_96464
taggtttacttgtcttgtctaattcgttctagtctttactactaccttgtcttattgacatgtgggctgttggtggaaacataatcagtgtaaggaggattggaagatacttctcttgccaaaccaaagtcagcaattttgacaataccatttgtcaccaacaaattctcaggtttcaaatcacggtggaaatatccattattatgcatatatgcaagaccttgcagtatttggaccataaaattccgtatatccccttcagagaaagcaacttgcctttctcttatgacatcatacaaattacactccatgtgttcaaagatgaagaacagctcatgattttccatcgtcacctccttcagcttcacttctcgcagactaacacattcttcccattggaagaacttt

SEQ ID NO: 30491 - DNA, 2116 bp, Setaria italica
  misc_feature (1)..(39): n is a, c, g, or t
  Peptide Sequence Number=SeqID_96465
nnnnnnnnnnnnnnnnnnnnnnnnnnnnnnnnnnnnnnnaaccttttagtcatcacaactaccagcatggatactcttctgatgctcactcaggaactcaacacccatctgtatcatcactagaacatggtcacatacaaaactgtttttgtttgggagatgatcttgttgttatttacataaatatggatggagtaacaaaaggaagaaaagaaagggagagctacaaataatatatacatttcctctactgccgccacttattttcgagtctagtgtatacagcaagaagctgcaagtatcaagaacgcaagaatcgtatgaatgctcagtctgttaatcgcgcctccgtcagaagaaattgacctgccggataggcgctagcgaatggtggtggttctccatcaggctcggctgtaaggacagcccgaatggggtaccagaaaagcctggcaatgaggcccggctgtcgaccatgtatgcctgttgccaggatggcatggctggaacatcaccaatgggacgatctgatggcaccagtggccaaaagccaggcttcaccggggtattctcaaatcccgagtatagtagaatttcctcttctgtacgttgtggaacatggttagcaaggtctgttccgggaaaacttggctttagactgagagttaaatcaaggaaacagtcatcaggttctgtgctgaaatcccacaggttcagttccaaccttggatgtgctttaggttcatttgcttttgtatgggaagcatcatgaacaggtcttggtacccagttgcacacattaaagaagggatgttgtaatgcttgctcagcagttggtctcctttgtggatcccatgaacaaagtcgctggatcaagtcaattgcttccaaagaagcattaggaataagctcccacaagtttcttggaggaatctgaaaaaacttaaaggtacttgaacgaggcaggttcattccctctggccagacagtacaatctggggtcccgagcacagtgcatattttgtaaagctggtctgtctcactttcaccagggaaaagtggggacaatgtaaacagctcagccaaaatcgcaccaacagcccacatgtcaatagcaggtgtgtaagctgacgattgcagcagaacctccggagctcgataccatctggtggaaacataatcagtgtaaggaggattggaagatacttctcttgccaaaccaaagtcagcaattttgacaataccatttgtcaccaacaaattctcaggtttcaaatcacggtggaaatatccattattatgcatatatgcaagaccttgcagtatttggaccataaaattccgtatatccccttcagagaaagcaacttgcctttctcttatgacatcatacaaattacactccatgtgttcaaagatgaagaacagctcatgattttccatcgtcacctccttcagcttcacaatgttagggtgaattagtttctgaagagccttcacttctcgcagactaacacattcttcccattggaagaactttctcttcatttttttaacagcaacaatttcatttgtttccacattataagccatgaaaacattcccacaggtcccatcacctatctcccttattactttgtacctttccatgattgttaacttcaccaaagcgcgttgccaagaatcactgaaaataaatagaacctcgcagcatagatccctcaccaccttcaaaactcatcgcagtcacctcagcagtaggtccacctttacacggttgcatcagaagaaggaagttccactcgagggtatcgcagcatgaatgattaagcatcattatgtgcacaaccatcatgcttaatgcagctgcagcaagcttcagcggcacatcgtcatcattgatatttgttggctgagaccatctttggccagaaaaaagagcagataggtttcagaccaaagcatttttagcctaacgtgcatggaaaaatcagcgagcgtagaccccgatcccagcccggacggaggatctccactgcccgccggcgaggggaggagggaggagaaagaggagaggtggtggggatcgtgggcgataatttggacgggacgccac

SEQ ID NO: 30492 - DNA, 345 bp, Setaria italica
  Peptide Sequence Number=SeqID_96466
gcccccgcctccgcctccacctccacctccaccgctccacgcacgggcgcgcgcgcgcgtgcacatgggcgggccgtgaagacgatacgcgagcgagcgagagaaggcgagggcacgacacgacggccgaagcagctcgctgttcggtgggtgcggataagagcgacgcgggaccggatcgagtcccatccgtaccgcaccacgccccggtcaccctgcaccgtccgatgggcttgtcacctagcagaaggccccggcaacggacggccccgatccggtcgtcggccctgtgcagaacagcccacagcaaatccagcgatgatgggatcgaaagggaatccgtac

SEQ ID NO: 30493 - DNA, 255 bp, Setaria italica
  Peptide Sequence Number=SeqID_96467
caattagatatctcttgttttccaattgctgccgcaacatgcttgcaattactcccacatcccatgtttccatgcccttgagcatgccttctctggatgcttcaccagcttcagttgatgcacgatggccttgtcgatggactggttgaataatttgtagaagaatgtctcttatcagcaccttgacatcaaacctctgcgacacagttacaaaagcttggcactggaaacttccacttgttgcagatagacttt

SEQ ID NO: 30494 - DNA, 358 bp, Setaria italica
  Peptide Sequence Number=SeqID_96468
catttgctgcctcttcctctcgtccctctgagcctcgtcttccgaagctctgcagaagttaccaagcacaaggccaagaacaagcaagcaagcatgtcgaagcttcttgcgccagcaccgctccccgtgctcttgcttctcgtgctgtccgcgtgcacgacgcccgcgcgcggcggcgacgactacacggcgttcgtgtacgccgggtgctcgcaggcgcgctacgaccccgggtcgcagtacgcggcggacgtggacaccaccctgtcctccctcgtcaacagcgccggctacaccgcctacgccaactacacctcaccgtcggccgccacgggcctggccggcgtgtaccagtgcc

SEQ ID NO: 30495 - DNA, 352 bp, Setaria italica
  Peptide Sequence Number=SeqID_96469
cgacggaggtcgccaccacgagctccagcgccgggaagcctgtcgatgagctcggcggtcaccaccttaagccctggcacgagaagcacccgcgcctcggcggccgcggccgcgtcggcgtccgcggccaggacgaagcggtaccggccttccagcgccgccgcgaagtgcgggaacagcggctgcgccagtagcaccagcggcttgtcgtccgcgaccgagtccgccgcgttggtcgccggcggcggcatccttgggggttccccttggatcgctgagagcacggaatctggttgggggcgaaggggaagaagcgacaacctcaagtcgtccttggatggtgtggtgggtg

SEQ ID NO: 30496 - DNA, 181 bp, Setaria italica
  Peptide Sequence Number=SeqID_96470
aaaagagctgtgcagggggctgagccgagccatggatcaaaggagccgaacgaccgaaagcaaaggagacgagcacagccacagcttgcagggcagggaaaaagatctgtgcaaggcggaagcaaaggagacgaggcattggatcttctcgacagacacgcggcgcatatcggggataggg

SEQ ID NO: 30497 - DNA, 341 bp, Setaria italica
  Peptide Sequence Number=SeqID_96471
cggagacatacacagaactagcctaactagctagatctatccagaggcatacattatcgatctcgacatgtcgcaggttcgaagcaaaggaatggatggtgcggcggtggtggcggcggtcatggcggccgccgttgctctgctgtgcttccagctgccggcggtggcccaaggccagctgcaggtggggttctacaacacgagctgccccaacgccgagtccctggtgcggcaggcggtggccaacgccttcgccaacgactccggcatcgccgccggcctcatccggctccatttccacgactgcttcgtcaggggctgcgacgcgtcggtgctgctga

SEQ ID NO: 30498 - DNA, 197 bp, Setaria italica
  Peptide Sequence Number=SeqID_96472
ggtgccattgcacaactcacaagcaagccgtgctggccgcccctggtactaccgctgctgccgtgccggtaccactacgtgctcgatcgtctgaatcttccccatctcccggcaacatcactgcgacggggctcgtgcgtgacactgcatgatggatgtgcatatcggttaatgcgtgcaggacaagcctttatgag

SEQ ID NO: 30499 - DNA, 648 bp, Setaria italica
  misc_feature (610)..(648): n is a, c, g, or t
  Peptide Sequence Number=SeqID_96473
acgtaactaacaagtaaaaacgaaaacaaaaactaaaagtaaactaaagaaagtaagggaaacaaagaaaagggatagacgacccagaaagaatagtacgaaggtttgtatattgtacttccaaagctggatacggttcctgaagatgtcgaatcgctctgcagaagctgcgtctgttgcaccttcacgaggacttcaaagctgagtgggacagaaagggaatgcaccagaagatgtcatatgttctggagcttcgcatctaatttgttctgcaataatattcctgcgtttgctcagaacaacatcacacatcaagtccatcatgaaccaagatctttgtgtaatttagctgcatttcaaacaagattgtatacatattcatctccatccactaaatgtatatgatcgcttgattttatattcttatataacttgtgctgcaatgctacttagcactgcaccactgtgtacactatcaggagaagagagaagctctacaatgttcctttacaaccaggaaagcaggatcaagtgcctgtgtgtgaaccaattatcaaaaaaggttttggtggattgaattccattggaatatataatatttagaattttnnnnnnnnnnnnnnnnnnnnnnnnnnnnnnnnnnnnnnn

SEQ ID NO: 30500 - DNA, 797 bp, Setaria italica
  Peptide Sequence Number=SeqID_96474
cctccctctggcgccgccgtcccggcccgtgcccgcgcccggccaagcccaagctgctcatcttcatccgcaagcagaaccgggtgctgctcaacctcccgcacgtcgtgacggcatgccgccgggccgggttcgcgccgcacgtgatgaacctgcggcgccagaccccgctgccggtcatccacgccgcgctggcctcggcagacgccatggttgccgtgcacggcgcggcggtcacccacttcctcttcatgcgcccggggtccgtgctcctccagatcgtgcccgtggggctcgactgggcggccgacgccttctacggcaagcccgcgcagcagctggggctcgagtatctcgagtacaaggtggcgcccgaggagagctcgctggccgccgagtacgggctcaacagcaccgtggtgcgggacccctccgtgatcagcagccgcgggtggtgggagatgaagaaggtgtacatggacaggcagaacgtcaccgtcaacatcaagcggttcggcgagctgctcaaggcggcgcggacgcacctcaagaacgccacggcgtgcgccaagggcgccggcgccgccgcggcactgaggtagaagaagatgctaattgagctttttcttaggtgttaattacgtagtcacacttgtcaatttcttttgtggtttttatttttctttttggttggggggagagaggggggaggagggatataaaggagatgagatcctgtaaatatgattgggttggttcttggttgagagagggtggtaggggatcagtcgcctccg

SEQ ID NO: 30501 - DNA, 444 bp, Setaria italica
  Peptide Sequence Number=SeqID_96475
aacatcatgctgctcagtcagtcctgaagcttgaagatgagattaaaaaggtatgtactttgtaggtgtacagaaacttccttctagctaacgagtatcaatcgtcaaagttgtgtgaagctcgcttttctgagtgtgaagataagatggatcaccttcaagtcttgaaacttccttcgatggcaaaattcaatgcaggctttactcactgcaatcgaagttttgtaagggaatgcgttggacctgcaaaagaaagctatgaacgtagaatgtcaaaggtttgcctccttttgaagatagtttacatgttaatcatcgaggatttgagtgttgtagcatttgccatatgtttttgttttatgcgtatatttaacagccaacctgtacctttttttcctacttagttttagtcgatgtcatctgacatttcattacatctggctg

SEQ ID NO: 30502 - DNA, 1140 bp, Setaria italica
  Peptide Sequence Number=SeqID_96476
ttatactttgataagcagcacttggtaacatcatgctgctcagtcagtcctgaagcttgaagatgagattaaagtggtagtaaggtagtaacaagaaaacttaccttctagctaacgagtatcaatcgtcaaagttgtgtgaagctcgcttttctgagtgtgaagataagatggatcaccttcaagtcttgaaacttccttcgatggcaaaattcaatgcaggctttactcactgcaatcgaagttttgtaagggaatgcgttggacctgcaaaagaaagctatgaacgtagaatgtcaaagatgcttgtcaagtctcgtgctcttttcatcaaagagtacaataacaagcttttcaattggttggtgaccttctccttggtcatggtggtcattgggcgctttgtcatcaagttcttcttacttgaaattgttgcctgggtgatgtttattttcctggagacctacacgagaatgttctggtcagcagagtcgctgtactacaatccagcttggcacatcattgtttcttcgtgggaaaccattgtgtacagccctattcttgatctggacaggtgggccatccccattgtcataatgctttcatttgggattctttattggagatgctttggtggtagaaggaaacggggcaggggttcgctcctgccactatacaagaactcgtacaaaaactcaagtcggccaagatcagactagtgatgtctattgattatgttttcctttttgaagaatggtacaaaatatcaattatagaagagaaagcaaacagcccattgtggatcaactgtccatgctgttgcttgggcttgttttgagggtgccctgccaatgcatctccgattctttttggtcgacgaagagaggcagtgaaactactggctttggggcacttgcgcatgcctctgttgtaatattcgtgccaggatattgaatccatgttttgtagctaggctgttcttacaagatacgacctcaattcattgattattgtttacatacaccgcaaattttacaagaatctagttcttaacaaatcatataccaaattgtaagagcatgtactatgatagtcttaatgagttgacagtgttgatatgtgggatttaggaaaaaaaaa

SEQ ID NO: 30503 - DNA, 491 bp, Setaria italica
  Peptide Sequence Number=SeqID_96477
aggttatttaggtttgaaaatacaaacgttggaagctcctaaaacgttgcgtaaacataaaaaaggataactctaaggggaaaatggaataaaaagaaatattgtactgagaatgtaacagacagtgatgcgaaacctgaccagccaactaatggattcatatgttcactccagtgatacgcatcagccacacacactttagtcatgatcttgatgtcttgttcgccacagctacagcagtatggccccggcagccggcacatcgttttgtctgctgaaaattaagctacctttattcaagtgcatgtacagtccatgtcgtaatcacgttcactgccgtcagcctttttatcttccattgctagattagatagcatcaaaatttgttcctgacacgtacacgtacgtgtggtccctctatcctccatcattcaggtacatcaactcgccggaggagggctacgtcggcggctttcgtaagaaaggtacga

SEQ ID NO: 30504 - DNA, 557 bp, Setaria italica
  Peptide Sequence Number=SeqID_96478
ttagctctctttctggagctaactaaagatgcaattaaagaaggcactaaagctgacagcaaggatatcgcagggcttttctttgagttatctgacaacaagaaaactgtggttctcgagaatatcaatggtatataaccaaagctatgatccccagtactagagtcattgtcctgtgcccgtggacacttaacatgaaagcagcaactgcttgtaactttgttattttgcaaccaggtaaacaaacaatactcggttacagaaatcaggaatctaacagtcaagataaataatataacggtatgtagtgtctcaccttggcaatatgaggcagactttcaagtctgtaacagacacttagtccttttgataaaaggagagaactaggtctgtatgtactgagaacaattgtgtgtccacaaaaagcttcataaacggcctatcgcggctcgggaaagaaccaataaagctctctcttaaaagtaaggaaaccttgtcattgttagactgcacattggtaattgtatgagatctcaaattcgagcacagtgtatcaa

SEQ ID NO: 30505 - DNA, 2699 bp, Setaria italica
  Peptide Sequence Number=SeqID_96479
ttttttttttattaaacaaaaaataacctaaataaataactattattatagatcgtacaacacacattgtatcacatgtaagaaaatggggtacaagctgcactttgacactgatgcttaggagaaaaaataccacacgttaacttacagctcaagcaaaaagagctacaagccccagtttggaactgtatgtgtcttggattcttgacattcttcagattacagcaagttcttggatgacacgttgcaggcttgattactcgccaaacgaatacattcgcctctggacatttgctgcaggcatggctccattacagtttacagcacaggcattgtaggttcagtagaaggcttcttatggcacctcctagtactgcctacaaaatcttagatggcgggtcaccacactagactaatttacaacagctacaggggcattcttcttcaatatccataactggatcctgataatctaccattttctggacagtatatgagttgtccattgcagctcttaacccatctctgagctgccaaagtgatgaaggcagctcattctttctaaaccgatatgtacagttgagctcagcgcctaaaggcttggcaatatgaggcagactttcaagtctgtaacagacacttagtccttttgataaaaggagagaactaggtctgtatgtactgagaacaattgtgtgtccacaaaaagcttcataaacggcctatcgcggctcgggaaagaaccaataaagctctctcttaaaagtaaggaaaccttgtcattgttagactgcacattggtaattgtatgagatctcaaattcgagcacagtgtatcaaggtagtctctaagcactgccaaaaaacctttggccgcttccacctgggaatccgtgcattcgtaaacgggacgctttcttgcaagataactttctccaacaagtatggaatgatatggacgcaaggaagcaagcaactctctgtgctgcggtagttgtgggactgaagaagacttgatctgattcctgttggcatcaatgactacagcatttgctagcctgttgagcacatcagatgccttgttctgtacaccaactatgtagggaactggtgcgtccagaaaatccatcatgtcaatcggcaaaaccggtatgagcagactctgccactgatacgggcgtattaaaggtatgatggacaaaactgaagccgatagcattcccaggttagaacagacaataacaatctgtttctccaggagtgcagcagcaaaaagtgtcattacatgttccaatctgaggcatccacatatggatgccactgcccatgtggataaagcagtcgattcctcctcggcaaatagtgcattgcgcatctcagcaacctctaggcttgtatcccgtgacctaagctcaatagtagaaccagcaatatgaagaactgtttcacctggccggtgaaaactcaaaggatgcaaatgctccaagggatgaaaagtaagtgatgaacccctggcaggacactgtagctggtagtactgacagacaacttgcagagaaccatatttttttgccttagcccactgcagtatgttgttgtgtctaactaagtctccgtgaccaatggaagatggctcctccgaatcagagtcctgggtgtcacatctgagatttctgccttcagaaggagaatcctgtgaacttggagatgattcacaatcttcacacaggcgagaacgcataagtggtaaaatagtatctgtaataaagagatccagctgctcatcaccctcatttccctgtggcgaatcatcacaattcttccttgcaccagaatcaagttcatgaggcttaacttcagactgatccgatgatgtatcttctggaacacaatgatcagacactttgggggtatcacaatgaatggcagtttccgtttcaagatcactctgttctttaacacaagaattatcttgctgttccccttcgttagaaacaaagtcaagttgggtgtccttacacccagaactgctgtcagtatcagaaagctccttcgacgaaactcccgtgcttgattcagatgatttatccatatcagttgtgttagcatctaagtactgtttcgctgtaacttcggttccttcacagatatcattctcctcacaggcttcctcaagtgataaggaagttaggatgctaacaccatctgtgagccattcaagccgttcttccataagaatactctgcaacaccccaaaatgcagttcaaaaatggaagcctggacaggatgcaataacaccggttcgtagttatcatgtagcgactccggcgtggaaagacaggtttttcattcatgagcatcgataccagctttgatggtctctgtacgatctcttcaactagtacacagcatccatataatgtagagtcatcagcaacctgtaagcggaacacaaatgattggttgctttctttaagctgttcctgccccaggagaatttcattcaactcactgaatgaaggagtccgttcgacagcatgaacctgtacacctccgggaaggcagaaagagagggtatccttgtacttgagtggaagaggcttctcgggagggtatgcaaaaagaacctgtggttccaaatttgatattgcatgaacttggtggtggctattgcctttatttatttcttgatctcttt

SEQ ID NO: 30506 - DNA, 955 bp, Setaria italica
  Peptide Sequence Number=SeqID_96480
ggtactgtaacaggttttctagaagaacacgaataaaaagtctcgatacgagttcaagtactgatcaactaaaccatagtctgcttagacgacttgtcaagacgaagaacccaacctaaataatttgatctagagcactgcgtagatggtccgatatcgaatcactcgtcgtcagaatcatcttcttcgtcatcctcgtcctcattgtagctctcgtcatcctcatcctcatcctcatcctccagctcgtcctcttcatcatgcaccaactcgttatctatggtggttcggagaaagatctcagttcctccagccttgggcacgatgcagaagaagtcctctggcatcccatcagacagggaggagcttctcacagcatccagcgttgagagctggtggtggcccgtgaagcacgagaaggccaccgagcacccgaacctggagtccatggcctccggctggacgcagacgagggagatggcgtgccccaggggctccacgggcttcaagttcatgaggaaaattttgctgtccggggcttggagcacgcgtgggcctcgctggagggagaggctgaactgctcaaagtacttgaacttcatgaacggccacttgtggcgggtgatgagatggttcgccagcgccaccgctggcccagtgaagccgcagccaggttccgggcagaagcacggcccataccggcatgccttctcgtgctttttcttgttgaagtaggtgatcttcttggtgcatccgttctttgcaaagcaacaaggaacctcaacagtttcgacaacgcgctccatgccaaagcagcgctcaaaggcagttcttgtacatagggggcacttcttgagcctcttgcagcatgacttgcagaccaaatgccccacaccacactggtaaatcggaggctcaaggggctcgtagcagacagggcagtccaagggaccca

SEQ ID NO: 30507 - DNA, 325 bp, Setaria italica
  Peptide Sequence Number=SeqID_96481
tgaaactgctgcctcttccaatcgtgctactgttttcttgaaacttttgtagttctgagcacccatgcggtcgtggaggatgtccgccacggcctggccggcgtggtgcgcgacggcgtcggcgtatcccttgacggcgcgggcgacgccgctgcggccgccgacctccaccgcccggctcaccgcgctgcgcagccacgacgacatctccggtgacccggcgggaaggggctacaggtggggggctagggtttttggatttggacggcaccgaccacggcgacacggagggcgaagaccagcggagtggagaatgcggcgaaag

SEQ ID NO: 30508 - DNA, 232 bp, Setaria italica
  Peptide Sequence Number=SeqID_96482
gacgattgcttcaagatgttcaatcctgttgacaagacaacatttgatgtagggaaatctagcatccctgttcctacaatattcttagtggtgttatttctgtttgataaccatcgtttctgtcaacagagagtcatcaacaagtggtgcatggcatttctcatactttttgaggaaggcttgcgaaacctgcaagattcccagatagtatcacaaggcacacaggggataa

SEQ ID NO: 30509 - DNA, 1420 bp, Setaria italica
  Peptide Sequence Number=SeqID_96483
ttctgagctttgggcagcacggcagagaacttattacctctgaagttgcattacgccttctctatattttaacggagaagcataagattgccggtgtggatctttcatcctttgagaaagtgctagacaaccttgtgatcaaagtggtgccaatggaaaatttgaatggtcgtagacgcgttgaagaaggggagctttgtgataggagaaatggaagaggagttgatcttaataggaattggagtgttgactggggaaagaaagaaaaggactatgacccatatgaggaaaatcctggcatagctccttttagtgaacctgagacccagatcatgagggaactatccaggtcatttaaacctcatgtttgggtgaatgtgcattctggaatggaggccttatttatgccatatgatcacaagaataccacaccaaatggagcatctgctcatttgatgcggtcagttttggagaatttgaaccatcgccatttccaagatagctgcctagttgggtcaggtggtggatctgttggatatcttgcacatgggaccacgactgattacatgcatgatattgcaaaggtgccaatgccgttcacctttgagatatatggagatgagaaagcatccactgacgattgcttcaagatgttcaatcctgttgacaagacaacatttgatagagtcatcaacaagtggtgcatggcatttctcatactttttgaggaaggcttgcgaaacctgcaagattcccagatagtatcacaaggcgcactggacaactgggtcccaattggaggagacgttgagagaaatgtggagcggaagagttcccgtgagaggaggaagctggaagggcttgaccttggaatgcaggagctaagaacgtactttcggctatttatggtatcaacattcttgttgatgttcatgttctgcacaaggatatcaaagaacagaaacagagactcaggtaacgcctttgatccttgaataccaagaaactgatgattggagctcgctgcccaaatgagtttcagttccaagagtgatagccatctgttgcctcagatgaacaaagcgcgtgaaacattcaacgttgcaatgcaacgttggaatgcaattctgcgccctgccatttggagttggagacgaggctgctaggatcagaatggtatcaggcagttcctgtttaggttacagtagacgccagatggtttggttaatcattaacagattgtacctgtaagttgtaaaattgtccatatcagctttcgcaatgcataggttttcttacatttctgaaagtcagtgcacccaacactggatttgaaggctaaattttgtgccatgaattgattagtatctcactgcttgagtgatttgtgatgggtcgggtgtgaaactgtgatggaacg

SEQ ID NO: 30510 - DNA, 320 bp, Setaria italica
  Peptide Sequence Number=SeqID_96484
cacaccttgagggtggtgacaaaggtaagtgtggagagcagttttggctttgtcgctttttttttttaacgcacagttaatatgacatacacttgatattgtattgttgttgtcgaatgcagtaataatgccaccatctgcccttgatcgcctggcttcccttcacatcgagtacccaatgctatttgagctgcacaatgatgcaactcaacggatttcacactgtggtgttttggagtttgtggcagaagaaggcatgatcatcatgccctactggatgatgcaaaacatgcttcttcaagagggtgacactgtccgta

SEQ ID NO: 30511 - DNA, 482 bp, Setaria italica
  misc_feature (173)..(173): n is a, c, g, or t
  misc_feature (219)..(219): n is a, c, g, or t
  Peptide Sequence Number=SeqID_96485
ggtgtatatgtctttatcagtctgatcacttttgattagatgactacaagttaaaccaagaaggatcaagccagcccaaaatcgaacttcatatgaacacattatatagcacgcaaagttccttgtgttacagtactgtttcattcttagcttcgaacttctattttttttanatattaagtgacgtggatagaagtctagttcatagcatggttaagntcatcttgagatttagactattgaacatattccaatgatgcaaacattatttttatttattcttcatgtgttatctttggcttccctggctctattatggatgtggttaatgcatatatcaacatgattccttttattcctgcagttttacgggggatatgcataccatggcagtacgtttgagcaaacgtaccgttgttatccagcatccttctttgataagccacaccttgagggtggtgacaaagtaataatgccaccat

SEQ ID NO: 30512 - DNA, 1292 bp, Setaria italica
  Peptide Sequence Number=SeqID_96486
cccttctctgtctctcctctcttggtattcctttcctggcggcgacgactgggcgagcggcggcgccgtcttcgcttgccggcgacctgcacccaccaggtttgagataacttgaagcaaaggttcaaagcaaaatgttttacgggggatatgcataccatggcagtacgtttgagcaaacgtaccgttgttatccagcatccttctttgataagccacaccttgagggtggtgacaaagtaataatgccaccatctgcccttgatcgcctggcttcccttcacatcgagtacccaatgctatttgagctgcacaatgatgcaactcaacggatttcacactgtggtgttttggagtttgtggcagaagaaggcatgatcatcatgccctactggatgatgcaaaacatgcttcttcaagagggtgacactgtccgtgtgaaaaatgccacgcttcccaagggtacatatgtgaagttgcaacctcacacaactgattttctggacatctcaaatccaaaagccatcctggagaaaactctcagaaatttctcctgcttaactacgggagatagcatcatggttgcttacaacaacaaacagtattatattgacattgttgaaacaaagcctgcttcagctgttagcatcattgagacagactgtgaagtggactttgcacctccccttgactataaagaacctgagaaaccacagcagcctacaattcccacaagcaaggctgctgctgaagttggagacactgtagttgaagatgaacccaaattcaaaccatttactggatccggaaagcggttggatggtagagcctcaaaactacaggcatctgaggttccatccactgcacattctgttcctttggattcaaacaaaagagcaaatcagcaaacatcatctgcgcctgcaactacttctggagctagcaattccactcgtcagaaaacaggaaagcttgtttttggttcaagtgcaagcaacaataaagaaccacaaaaggctcctgctaaagaggaggaacccccgaagaaggatgagctgaagttccaagcttttagtgggaagagctactccttgaaacgttagctgcccattactagatttagccttacaaatcatgttcagtggcagctgtagacaactgtgtcttaagtatccaccagcatgtagatattatttgaattatgtaaatgtttatcttcatggaaatatggccatctttctatttaattacaaatattctaataacgatctaatgcgcgttatccttcgcaa

SEQ ID NO: 30513 - DNA, 379 bp, Setaria italica
  Peptide Sequence Number=SeqID_96487
aatcgctttcgatccgcacctcctgtctccgccgccgcttcatcccgctgcggccctccaccgccgcttcatcccgccgcggccctcctccgccgccgcccccagcgacgacgctgctaagtgggcggttcgtgcagaggcggcgacttcggctgccggtattctctgcaaccactccgtccctcggtctcaccgctctgccgccccttcctctccactgctccgctgcctcccggtggacggatctggagtcggcggatagctagtactgctcctaccctggcctccaggtggcggcaccacttccccggcgggaaccccaataagtttactgctgccatcaagctaagcgaggaattgcctgtctcctagaacttct

SEQ ID NO: 30514 - DNA, 354 bp, Setaria italica
  Peptide Sequence Number=SeqID_96488
ttatgaggtaggctgttgcagtgccactgggatatgtcagcttgtagtcgacgatcataacctttctcagtggcacaagcccaaagagcccaatgaagctgacaaggaacaagaaaccaattatccatccaagttgtggattttttatattttgagcatcgtttgcctcagttgacatggcagcaattttatcactcatggccaataggtagctaccaaagcccccgctaaaggcgaggccgtaggaggcgacaacgcaggtctgaatgacggtgttctcctggcgcgtgaagggctgcttgagcaagcccacgctctcgatggccttggtccagaggcggacgaagaagaatc

SEQ ID NO: 30515 - DNA, 787 bp, Setaria italica
  Peptide Sequence Number=SeqID_96489
tggggattttgatcttttcaggaacagctcggtgcggcgttcgtcgtcgaatgaaacagattcagtgatggggctgctatcgtttgaaactggaagggtgctgtctttcttcatcatggatataaagccggcagtggtgcgaatgagcaccttcacgaagttgtacaggccgtctccaagaattatagcgatggaaatgaaaaccctgtaaccctgcagtccatgaagactgctttcttgtagagaggcaggataccaactccccttcttgttgcgtattagaggccacattattccccaggaaaggatgcctcccagtagaacagacacgttcacaatgtgtgggcaaatcatcccaactccaacataggtaggagagggaaaaaagtaaaacctgttcttataagcttggaggcctaatgtagggaagttctgaaacccgcaactgtctccaccagtgtagaaccactggaaaaagccccaaaggaagctaaacaagaagaattttcctagtgctttcacttgtttctttgcaagcttggcaccctctggcgtgtggaaaccattgatgaggtaggctgtcgctgtgccactgggatatgtcagcttgtagaaaacgacgatcaccgctaaaggcgaggccgtaggaggcgacaacgcaggtctgaatgacggtgttctcctggcgcgtgaagggctgcttgagcaagcccacgctctcgatggccttggtccagaggcggacgaagaagaatccgaggagccccgcggagatgttgagcgaggg

SEQ ID NO: 30516 - DNA, 1640 bp, Setaria italica
  Peptide Sequence Number=SeqID_96490
cgcagagggtgaggcagttcttcggcagcgagccgaagccgtcgacgccgaggatggccatgttgcggtacacgatggcgtagggcgccgggtactccgtcccgctctcgccgatgtcgccgaacgccttgtagaacagccagaagatgcagggcgcgatgacgcaccccatcccggttccgatcacctggctgatgaacatagacctcggcgacgccagcgtcaggtacccggtcttgaagtcctgcatcaggtcggaggccgtggacacgatgctcatcatgacaccgcacgccgcgaggccgacgagcacgccgccctgagcgaggccggcccatgcgccgaacacgaagatggcgagcttgccgtaggtggaggcgagagaccagtcggtgaggccacttccgtaggcgttgcagaaggccagcacaggtgccacgacataggcaaccaaaatgtagtaccacttgagctgcgggaagatctgaggaagggtgccgatcgatacagcggcaactgcggcatagcctccatatgcaactgacttgggaatttgatctttcaggaaaagctcagtgcgacgttcttcatcgaaggatacagcttcagcagtggacatggaactgccatggtctgaaacgggaagcatgctttttgaattttgctgaaccattgatatgaagcccgcgattgtgcggatcagcaccttaatgaagttgtataaaccatccccaagaatcaaagcaatggaaataaaaaccctgtaagcctgcagtccatgtagacttgagtctccaacgtcagctgggtaccaactccccttcttcttggcaatgagaggccacattacaccccaagagaggataccgcccagcagaacagacacattcacaatgtatgggcagatcatgccaactccaacatatgtaggagagaagtcaaagaagaacctgttgttataagcttcaagacccaacgttgggaaatttttgaatccacagtcatcccctgctgtgtagaaccactgaaaaaagccccagaaaaagctaaagacgaagtacttgcccagtgtctttacttgcttctttgcaagcttggcgccctcaggtgtgtgaaaaccattgatgagatatgcagtggctgtgccgcttggataggtcagcttgtagtcaacaatcataatctttcttaggggcacaagtgccaatagcccaatgaaactgacaaggaataagaaccctatcatccatccaaggtgtggattctttatattttgagcatcgttagcctctgttgcttggttagcgattttttcactcattccaaataggtaagtgccgaacccaccgctgaaggcgatgtcgtaggcggcgacgacgcaggtctggatgacggtgttctcctggcgcgtgaagggctgcctgagcaagcccatgctctcgatggccttggtccagaggcggacgaagaagaagccgaggagccccgcggagatgttgagcgaggggatgatccccgtggtgaggttgagcttcatgacgatgatgctgaacaggacggcgaggaagaagctgaccacgaaggcgcgcaccgtcagctgctcccgccacgacggcacgggctggcccgcgaacgcgcgc

SEQ ID NO: 30517 - DNA, 1115 bp, Setaria italica
  Peptide Sequence Number=SeqID_96491
tttttttttccttgcaaaagcttagcactccaaacgaggcctaaaatgtgattatatacaagcctattgttttttttccttttcaagaaaaacgtgaaatacaccaagtcatgaatgagctcaaaaggcgttgccgcatagggatgtggagtacaagctcttaacatttgagactgcacggaccagctgcgatcactccacatcaaaacatttcttgcttttctgcaaagcagtcgcctggcaaaacatcttgcgccgataattacaggatgaagcgcgctacttgccgtagctctccctgtaatcacgacaatccgaggaagctgtccaccttggcattggttgctctcgacaaaaacttcatgcaaatcgggggcttcaccttggccagagccaggatagactgcggcagtgtccagatcccgtctccgcagatcagccccgacgcgaccgcggggccgaacgcgtccgccttcgccttgttcagccgctcccacacgaagaggatcgcgcagcccaggaacatgtcgatggcgaagtaggacccgatgtagaaggggatcgccatcgccatcggcagcgggatgaacctcgacaccctgttcggggtcaggtccctcaccaggttgatggcgatcgccgccgcgaagaagatgtagcagagggtgaggcagttcttcggcagcgagccgaagccgtcgacgccgaggatggccatgttgcggtacacgatggcgtagggcgccgggtactccgtcccgctctcgccgatgtcgccgaacgccttgtagaacagccagaagatgcagggcgcgatgacgcaccccatcccggttccgatcacctggctgatgaacatagacctcggcgacgccagcgtcaggtacccggtcttgaagtcctgcatcaggtcggaggccgtggacacgatgctcatcatgacaccgcacgccgcgaggccgacgagcacgccgccctgagcgaggccggcccatgcgccgaacacgaagatggcgaagacttagaccgtaaggtaggaacgacgaagggaaccaagtacggtagaaggaccggtacccgtaaggacgttagacaagaaaggaccaagacaacca

SEQ ID NO: 30518 - DNA, 297 bp, Setaria italica
  Peptide Sequence Number=SeqID_96492
ggcggcagtgaggagcagcacgaccatgaacgggtggggctcgtaggtgaaggccgccagcaggtgggtgaggccgcagagcacgatgaaggcgccgaactggaccagcacccaccggaacgggagcaggtggcggaggccggcgacgaagtagaggagctcgagggggatggagaagtaggccgcggcgatgagcaggtcgctgaccttctgccacttgaagatgttgtccaggctccagaatccgccgccgccgccgccgcctccgccgtcgcaggcgcaatgcgtgtaccccat

SEQ ID NO: 30519 - DNA, 1135 bp, Setaria italica
  Peptide Sequence Number=SeqID_96493
aaccctccgaacgatcgaactcaactcatcatcctcaacgcctccaatgatcttcagttgttgcataagcgagctgtgcttacgaagctgatcgtctctcttttgcccaaaaaccaaaccagttctagaattagccacgggtttttcgtcattgtcatctcacgttgcagcactgggcgctcccggactgcagcttcctccacaggcagatcatgtgctggcggggactggtagtgcgccgtgaagtagccgttgtagcagcctgactggtagaaccggacgtcgtgcctgatctccaccggccgccgcgtgttgttgaacttctccacccacatgcccatgctcacatcctccatcttgaacagccgaagcgtctgattgtcaaattcagatacaatgtatcgtgcaatatctgatgaaatcacgtagccaggtccattagcataattcggatatacttcttccggccattcctcgtaagtaacggcccacttgccagacctcaatggtcgatggaagtagttgatactacctacatacacacttctatcacttcgagctttcttcacttgatccagaactgaatcgattctgacgaatgtatcgtcatcacatttcatgacatactttgcagggacgacacgcaccccatactcagcaatcgcaacagtcttcaaaacaacgaggtcatagctatcaacgaaaggcactataacaatgtcacggaagaactccgcctccttcttcagctctgcattgacctccttttttccattctgtgccacttcttaattcggtcagagcttgcaagcatgcaaatgaatagtaaaagaatgagtcaaggaggtaggagttaccagagccacaaagaaccgagctacaacattggatgatttccttgtatacatcatccatgacttccttacagccatacgctcagcaaaatggctggctgctgaaagaatgccaatgaagagctcaacaggttcagttggcagtggtggggccctccactgctcagacatctcaaggtatctctccggtgcgaaactagggtgcgaattgggtagagaactagcaaaaattgactcaatatcaatgtctccatttagggacaatgcagttgcatcctacg

SEQ ID NO: 30520 - DNA, 248 bp, Setaria italica
  Peptide Sequence Number=SeqID_96494
gccggctggtgggagtggatgcagggtactctttgctgagcttggcctgcaggatgagccagatggcgtagaagaagcagctgctgatgcacagcagcgaccccatgacgcggttggtggcctcggcgacgacctccagctgctgccggtgttggtgtgcgacgaggttgacgctgctgtgccatggcgtgacgtcggcgcccttgtagaaggtgagcagcatcggccccgctacgccgagcagggtc

SEQ ID NO: 30521 - DNA, 315 bp, Setaria italica
  Peptide Sequence Number=SeqID_96495
atgaccagtaatgcaaggaatcaagaggaacaagcagccccaaaggtccaaactttgcaaggtcaggatggagctccgccactaattcgggaggaaaatcagcaaggccagtaaccgcagagccaagaaaccagcgagcaagaagcaacctgtctacccccggcacctcaaaagtcaatcaaagcctccacgcccaaccagctcagctcctctcctgcgagctgaccaaccgagcgcccctagcaagaaccccaagccttgttcagatcgaaccccgcccacggactcacccactcctcacgggacgggacgaaa

SEQ ID NO: 30522 - DNA, 538 bp, Setaria italica
  Peptide Sequence Number=SeqID_96496
ctttgcaaggtagataattttctctttaagattgccgcatctctttttgggagatgatggaattttcccattttttcttctgctcttaagtctctaaattgagaaagtctagttttggtaatcgaccaattcgttaacataccactgaaccactttttattcacataatgacaacgagatcttattgcagctgatgctactaaatccgctgctctttttttggtaccaacaattaagaagctttttccctgacttgctgcatcaaaaactaaatcacaagcttctgataaaaaacgagctgttctagcgagatttataatatgagtacctttacgctttgccgagatgtaaggggccattttaggattccatttcttaataccatgaccaaaatgaactcccgcttctatcatctctttcaaattgatgttccaatatcttcttgtcattttttccacacttcctttttattttttctttttttcgtcttaccattacggaattaatttctttttgaagattaagaaagagaatattg

SEQ ID NO: 30523 - DNA, 508 bp, Setaria italica
  Peptide Sequence Number=SeqID_96497
ctcaatcatctgtacagagatatcataattgattgtcccatttctctgttcttgaagactaaataagtcatttagtgctctatagttaacacctaggcttctccgttagaactttaggtccactcattgtatatgtcttccctgatcctgtttggccatatgcaaatatgcagacattgaaaccatcaagaactgaacgtatcaatggttgcatatccgaaaagacctcatcttgagtggctgctgggccaaagaccttgttgaaagtgaaagatttgcttccatcttttgcatattttgcagccgtgcttattgtgatggttctttcttcaattccagcaacactgcttgaggaacttatttgcccaggtaggaaaggcctcacacgacaataaactctaatatttcctttaagatcctgtatctggttgtatagtttgcggttttcctcaagaactttttcttgcagtttccaagttgaagggtcatggctgagaagacctagctt

SEQ ID NO: 30524 - DNA, 1341 bp, Setaria italica
  Peptide Sequence Number=SeqID_96498
gcagcacacgcttccccctcctccttcctcatcagcaagctagcctcgctcttgggttgggcgaactccggccaccagcttcgcttcgagatggcgtccagggcggccgtcgtggtcctgctgctctcggcgttcgcggcggcggcggcgtcggcgcagctggacgagaagttctacagccagtcgtgccccagcgtggaggacgtcgtccggaaggagatggtgcgcgcgctctccgccgcacccagcctcgccgggccgctcctccgcatgcacttccacgactgcttcgtcagggggtgcgacggctcggtgctcctggactccaccgcgaacaccacggcggagaaggacgcgaagccgaacctgacgctgcgcggcttcggcttcatcgagagggtcaaggccgccgtggagaaggcgtgcccggacaccgtctcctgcgccgacgtgctggcactcatggccagggacgccgtgtggctgagcaagggcccattctgggcggtgcccctcggccggcgcgacggcagggtgtccatctccaacgagaccgaccagcttccgcctcccacgggcaacttcacggagctgacccagatcttcgcgaccaagaacctcgacgccaaggacctcgtcgtcctctccgccggccacaccctcggcacctcccactgcttctccttctcggaccggctctacaacttcactggcatggacaacgcccacgacaccgacccgacgctggaccccatgtacatggcgcgcctccgcggcaagtgcccgagcctcgacgacaacacgacgctggtggagatggaccccggcagcttcaagaccttcgacctgagctacttcggccacgtggccaagcgcaggggcctcttccactccgacggcgcgctgctcaccgaccccttcacccgcgcctacgtgctccgccacgccaccggcgcctacagggaggagttcttcgccgacttcgccgcgtccatggtcaagatgggctccgtcgaggtgctcaccggcagccagggcgagatcaggaagaagtgcagcgtcgtgaattaattgaactgactgactgaccagaaagcagagatcgattgccagccagccagtatgatgggttcaggcttttggtttgagagatgcatgtacaagtttttacctccgttcttttccaatcctttttttactgtgtatcgattgattatttcgttacagccatccatgtatgtaatctccctcctcttcaggatcaggatctggtgacaatacaataaacctttttgagttgtccaggcctgtgtcagccgagatgaccaaaaaaaaaaaaaa

SEQ ID NO: 30525 - DNA, 190 bp, Setaria italica
  Peptide Sequence Number=SeqID_96499
tgttggtgctgttgaggttggcgaacacgccgaagtagagcctgctcggcgtcggcgagaggtaggacgtcaggcagtaggagaacctggacgggccgagctggctcaccagcgacagcggcccgcggccgaagccgaccatgccggagctgttggcgaggtcgccggcgttgatgctgccgcacccgaa

SEQ ID NO: 30526 - DNA, 670 bp, Setaria italica
  Peptide Sequence Number=SeqID_96500
atcgtagtacagagttaggacgcggcgaggacgttgatgacgaccttggcggcgagcgggacggccaccagcatctcgacgatggggaggacgttgcccaggaacaccacgcacgccgccgcgtccttgtcgcgccggcgcctgcagagcggccccgccacccgccccaggctggacacgacggcggcgagcaaggtgaacaccagcgccttggtgtacacgtcgtactccggcgtcccgagcagcgccgcgtacgccgcgcccagcatgccgaagccgaacgtcgccaccacggcggtcggctgtatctccaacttgtgctccgcggcggcgtcgcgctggccctgccctgcggtctcgtcggtgagcaggctcacggcgtagtacatggcggccacggcgatctccgggaagagcgcgagcacggtgtcgccgccgaggaactccttggcgatagtcaccgcggtgaccgcaagcaaggcgatgacggcgtccttgaggtacctcaccagggacagaaccttgtccctcgcggcctcgctcctgtacccgagcggcatgcaggtggccacgacgaggagcacgctgagcgccgacgccagaaaggacacggagaggtcgaaccggaagctcatcgcccggaagcgggagttgttgaggtagccgaaca

SEQ ID NO: 30527 - DNA, 290 bp, Setaria italica
  Peptide Sequence Number=SeqID_96501
gtcggtggcgggcgacgcgagcgatgaggcgagccgcagcgcgaggggctccgggtgggaggcccggaggcggtggaaggcggcctcggcggcggagcggtcggtgttggaggacgacatgagggtcgacagcagcccgtcgaacgccgccgggtcgcccccagcagcgcggcggccgcggcctggtcctcggcggacgccatcggatcggggtcgaatccggggcgcgcggcggcggctagggtttgaggggggataggggtcgagccggtggtggcggcggcggcggg

SEQ ID NO: 30528 - DNA, 479 bp, Setaria italica
  Peptide Sequence Number=SeqID_96502
tcacaatctctaatagcgtgacaccatatccaaagatatctgtcttaactgatggccttcctgtctttatgtactcaggagctatgtggcccatagtaccacggagccccgttgtgactgtattcctccctatgtccatcatcttcgctaggccaaaatctcctaccactgcttcaaagtttccatcaagcaggacattggcagccttcacatcacggtggatgatcttgggattgcagtgctcgtgaaggtactccaaaccacgtgcagcaccaagagctatttgcattcttgtagaccaatctaatgctggttcattcagttttaatctgcacaagcgttactaaatatttgacaagatggatggtaaacaggaatcggtacgtctatacagaaattataatagtactttgtattctttgggtatttgtctagttgtcttcgtttgttaaggtttactttccttaaaccttacgttt

SEQ ID NO: 30529 - DNA, 776 bp, Setaria italica
  Peptide Sequence Number=SeqID_96503
agctggaaagacaaatttacaattactaagtatattgtacagtagcacacatgaaatttgtttatgtaatatgctatggtgcagatatgacatacttgtattgaggcacccgaagtagatattgtggtatttcactgctaagattattatatgcaagattactgcaaaataaagtgacttatgatatatgattgccgaactgttattgacttcctttattaaacaaatggcagcagtaaatataacaaatatttttcaggttttacatcatgaagttaaaaacttacatattattcaatgattgaagatttatgaaagagcttgggatactcccacttaaatgattttggcttagatccctgtccaagttatcattgttagggcctttttatcaaccttgataacatgagtcatggctgacttacataatttcgagtttaggaaggcggccaagagtgtccggtatcgagccatttaaattattttttccaaggtctagagttttcaagcttgataggtttccaaactcctgaggaatcactccagttatgctgttgccatgcaatatcctgaaaccatagtatgtagcaaacagcaagtttatccctgtattagacataattttatttatgattggactcatgtttgtgaggacaaaatgttgcacaggcaaaagggaacttacagctcttgtaaagttgttatctttgcaatgctgggtgacagggttcctgttaacccagatgaggacaaacttctgcagacttagaaatgag

SEQ ID NO: 30530 - DNA, 730 bp, Setaria italica
  Peptide Sequence Number=SeqID_96504
ctgacaattctgagtgaagaacaatctaataaacaaagccatagactattataaataaagatatatagtataatgcaaaagagatggtcttagcttagttgtacctcttaaacgggaagcaacactcagattctccatgaaagggtaaactaagagcctctctgttggtgtcgtacagaaccctatcaaccttagtatgtttttatggacagcgatgcttattaattcaacttctctgaggaaagccatttccccttcaggactctgcacgtcaaacagtcgtttcactgcaatctttatactgtctggacctggaagaactcctttgtacaccttaccaaaaccacccttgccaagaacattctgttcactgaaattgttggttgcaatctggagctctcgccataagaaccgctttatttgcccaaactctagcctgtgatcattctgacctggaattgttgaacattttcttcttgtatcagttaaaagaagtttggtactttctttcagaatgctaatttatctaaccatttcagtctatgggaaaatgtttctgcttttaaaaatcaccattatggtcactatggaaaaacattgttatgcacttatgctgctagacaaacctgagacgtcaatgaagatttcaggtcggtaacgcattctttgtccaccataacacaaacagaactccaaggacaagtagtgtgactgctccagcaatgcttcc

SEQ ID NO: 30531 - DNA, 291 bp, Setaria italica
  Peptide Sequence Number=SeqID_96505
ccagctgccactcctgccatcgctctgctgggaccaattctccttccagcatctgcaccacttcggacattgcagggcgatgatcaggttccatgtcggtgcagaggagtgctatctggataatcttctccagctcttcaaggttgtatagatcacctagattgcgatccacaatggcttctagttgcccttcttccatcattagtttgaccttcacattcacaatcatttgaatcaacttgtgaatttaacaatttgttttttttaagtgaggtcaactatgtgaacata

SEQ ID NO: 30532 - DNA, 1196 bp, Setaria italica
  Peptide Sequence Number=SeqID_96506
acaatttggatgctgctagtcttttccttaaaaatgttctggagaagcattacactgttgaccatctaacttatacaagcttcatcaattcatgctataacagcaatagatatgccctagcttctgaaatatctgaaaagatctcgaagaggatctctaactttcatgaaaaggatgccacagccattgcttgattaacaagagtaatctgaatttagtctaccgatgcagcagagaagttaacagtagtgctcaatgctcctgttcagcagagctgctatgtcaatcaattggccataaatggtgatggtctagatgatcagatattcatcaatgacctgggttagaactgtttgaggatggcatggaattttctattgcataaactatgtgagaagattgcttttgcatacaatatgtgagaagaaacaaggttaacaattttttcttaaaatgctttgaatatgttcagtgttataaaattcatctgatttgtgtatgatgaatttaagacgtaattcttgatatgtgaacctgttcagggtggctgccttcagtggtttgaactcctatgacttttctagctcatcttccagtcgacagctcaatggcttcctgaatgtttagagactcttcgctgaagctgaatggtttgcattgctgcctcatttcatactgttgtcgtcggttgagctcagccagctgccactcctgccatcgctctgctgggaccaattctccttccagcatctgcaccacttcggacattgcagggcgatgatcaggttccatgtcggtgcagaggagtgctatctggataatcttctccagctcttcaaggagctatgtggcccatagtaccacggagccccgttgtgactgtattcctccctatgtccatcatcttcgcctgagactgccaaaatctcctaccactgcttcaaagtttccatcaagcaggacattggcagccttcacatcacggtggatgatcttgggattgcagtgctcgtgaaggtactccaaaccacgtgcagcaccaagagctatttgcattcttgtagaccaatctaatgctggttcattcagttttatatctgcattttcaagtttcgttactaaatatttgacaagatggatggtaaacaggaattattacggtacgtctatacttttatgaaattataatagtatcc

SEQ ID NO: 30533 - DNA, 607 bp, Setaria italica
  Peptide Sequence Number=SeqID_96507
aagttagattatataatctaggagccaaacaaacagtgcttaagttttctttgttggttgtatctttattgatgggaggttcaatacattggtcctgctaaactaagaattgaataatatttttggttaaaactgttagaaggcacactttaggcaggtctttttagctcaatgatgaggttttggttttctaggcaaatttttcttttcaagtttaacgtttggggatttctaacaagcaaatgatacacacacgataatgtcataatatgtagcaaacagcaagtttatccgttttgtattagacataattttatttatgattggactcatttgtgaggacaaaatgttggacaggcaaaagaatggaacttacagctactcacactgtgatgtgcaatagcttagctttccaatgctgggtgacaaggttcctgttaacccagatgaggacaaacttctgcagactcagaaacgagaaactaagcaaatagtcatgtagacaaagtatatggtattacaaattaggatagtgaaactagataagagtgaagcataaaatattctatccaaatagaaaatgttcctcctttatgaacagttggaa

SEQ ID NO: 30534 - DNA, 584 bp, Setaria italica
  misc_feature (19)..(19): n is a, c, g, or t
  misc_feature (59)..(59): n is a, c, g, or t
  Peptide Sequence Number=SeqID_96508
ttgtcctgacaagtaacanggttccaatagcagggctcatttgattatccttccagtcnttaagcacaccactgttatcgatgagttgttgcctcatttcatacagtgcttcaactgcagaactgcagacaaaacagagttttatttctggagtctgagttctaaaaaaaaagtggttaaatcctccttattgaatctattcagtgtctcacttgcaacctggattctgtagctctttactgttagggcgtcatagagtatattttgataatctgaagctgtctatttgaactaaggaaaattaactgtgctcaatttaattgcttttatgctccctggaaactacaaagaatattgcaccggcactagcatgctgaaaggggtcaagaatttcactgctccactccactggtacgcgttacagcgttagatctatcgtgtaatttccacctaaagtttctcattcaaacatttgactggtgacatggatggggagccaaaatttctaagatccacttctgtggtctttagagatagtctagtcaatagcactataatttccatgtcacttatgacagcttgtc

SEQ ID NO: 30535 - DNA, 2651 bp, Setaria italica
  Peptide Sequence Number=SeqID_96509
ttttctaggctaaatgttttttttcaagtttcacgtttgaggatttgtaacaagcaaatgatacacacacgataatgtcatttgcaagatttatgcaccgatagttatccactgatacagaatgcaaataaaatgtagaacagtctatagtctatagtatacacatggtctgcactagatgtaatccaattgttatattcatggacatggatgcacttgcccatgccagctatggcatcaggaccctatagactattcctagcagtcaacattcatagagcgtacttctggagtttccttgcaccatttctactgaaggaacaagtgaaaatcatgtcactttttgatgatcttgcagctcatcttccagtcgacagctcaatggcttcctgaatgtttagagactcttcgctgaagctgaatggtttgcattgctgcctcatttcatactgttgtcgtcggttgagctcagccagctgccactcctgccatcgctctgctgggaccaattctccttccagcatctgcaccacttcggacattgcagggcgatgatcaggttccatgtcggtgcagaggagtgctatctggataatcttctccagctcttcaaggttgtatagatcacctagattgcgatccacaatggcttctagttgcccttcttccatcattagtttgacccgatcaattagcatgatctcgcctgcttcaggatagaatgcaattaccctttctcctgtcacaatctctaatagcgtgacaccatatccaaagatatctgtcttaactgatggccttcctgtctttatgtactcaggagctatgtggcccatagtaccacggagccccgttgtgactgtattcctccctatgtccatcatcttcgctaggccaaaatctcctaccactgcttcaaagtttccatcaagcaggacattggcagccttcacatcacggtggatgatcttgggattgcagtgctcgtgaaggtactccaaaccacgtgcagcaccaagagctatttgcattcttgtagaccaatctaatgctggttcattcagttttatatctcttaaacgggaagcaacactcagattctccatgaaagggtaaactaagagcctctctgttggtgtcgtacagaaccctatcaaccttagtatgtttttatggacagcgatgcttattaattcaacttctctgaggaaagccatttccccttcaggactctgcacgtcaaacagtcgtttcactgcaatctttatactgtctggacctggaagaactcctttgtacaccttaccaaaaccacccttgccaagaacattctgttcactgaaattgttggttgcaatctggagctctcgccataagaaccgctttatttgcccaaactctagcctgtgatcattctgacctgagacgtcaatgaagatttcaggtcggtaacgcattctttgccaccataacacaaacagaactccaaggacaagtagtgtgactgctccagcaatgcttccaaggaccacatttaacttggagttttttgatccacctgtctttgtgctgcctccttcacatggaaataaatgttgaccacaattcaaatgattgcctgtatagttgtattgaggcacccgaagtagatattgtggtatttcactgctaagattattatatgcaagattaatattattcaatgattgaagatttatgaaagagcttgggatactcccacttaaatgattttggcttagatccataatttcgagtttaggaaggcggccaagagtgtccggtatcgagccatttaaattattttttccaaggtctagagttttcaagcttgataggtttccaaactcctgaggaatcactccagttatgctgttgccatgcaatatcagctcttgtaaagttgttatctttgcaatgctgggtgacagggttcctgttaacccagatgaggacaaacttattgttgtaactttgttgtcctgacaagtaacatggtcccaatagcaggggctcatttgattatccttccagtcattaagcacaccactgttatcgatgagttgttgcctcatttcatacagtgcttcgacttggaactcagcagcagcagaaacttctgcagacttagaaatgagaaactaagcaaatagtcatgtagacaaagtacatggtattacaaatttagaatagtgaaaccagataagagtgaagcataagaatattctatccaaatgaaaatgttcctcctttatgaacagttgggaacttgggatcagttacttcacacatagttagctaatagaataagaaaattccttatattcgaaaaccatattgtgaatttggttaaaccttagctgccttggtcagtaatggaattcaaacttcaatataaacttacatttttgtaactttgttgtcctgacaagtaacatggtcccaatagcaggggctcatttgattatccttccagtcattaagcacaccactgttatcgatgagttgttgcctcatttcatacagtgcttcgactgcagacaaaacagagtcttatttctggggccttgatgtaactcgagttactaaaaaaagtggttaaatccttcttattgaatctattcagtgtctca

SEQ ID NO: 30536 - DNA, 1308 bp, Setaria italica
  Peptide Sequence Number=SeqID_96510
actaataaacttggcaagaaatgactgatgcagagcgtgatacgtgcaattctgatgccaatgtgatacagactgtagttcccactagaattatacactggtcactgggcccaaaccaaagaaaacagctcatattatgaacaagttgacaccaaaaagggatatagataccaatcaaaaggctcttctcttctatgggtggcctgccacaggcacctgatacatccaaagaatgcttcgagcatttctgaacctctgctcgccccggttcatacaagagatctaaaatgctactacttcagaaagtatgtatccaaatctgccattagttctgtcacgatatttttcttgtactcgggattctagctgtcagccttaaccaaagtacaagcttagaaagtatcttgtcggattgaaccctattagtatcataagtggagacaggatgatgacaagaccaatcgggtacaggaagaatgttgttctgtccagaaatggaagaacatcatatcctagaaagttcaggtagtgataataagaaattgccaccacaaagagtagattcgataaaagagctggaaagaagccatgcgcgaccaatagaggtgacagaaaatattgaagcacatataggatgacaaatgcaggaaagaacgagttacagtgaacatcaaatgcatagagccactccacacgttgctcaacaacatggctgttaggttcctctctcaagtaagaatttgtaagaaaccagcaaagtgtggccaaaactatcccagcaaacaagaaatggaagaacacaactgaagtgattgtcagagcagcatgtgaggcactctctccatacgctgcacagtaagctgatgttgcaaacatgaggaaaagaatcagaatgacaatgaatgctggatcatcccgagcccattggttctttgtttgcttgtgatatttggtgtgttgatagactacttttggtgaagtacagagatgaaccatttgccaaaatgtgtattcaatatccatttgttgccacttgacgatgcggcggaggtaggggccgaagagcggcggggcggagcgggcggccccccgccccttggacgcggtcgtcggcagcatcttcgccgcctccttggctactcgtcctcttcctcctactcagctctgctctcgggatctgctgcctcttctgctccggttgattgctggagctccggcgcctggtccgatctggtgacggtggctgcctcacagccacggcgggtacgcgagatctggctcgctgcctttggcgtcgcgtttggacta

SEQ ID NO: 30537 - DNA, 407 bp, Setaria italica
  Peptide Sequence Number=SeqID_96511
tcaatggtgatttttttctggccaaaggaactcccctgtgccacctttttatagaagggtctaccacatatttgtgatgcagaacattacaagttcatactggcagttgcacatagcaatgcacaggtccctaaaccctgaaacacatacggacaaaataaaccgtggcaatgcagcttggaggttgcagaatcaaaaaggaatgtaaagtgaaacaacaataaagacaaacaatttgaacttcccttgaaattgaaactcagctagattaatgacacactagaatcaaatactaagatcatctgacatcttattaccaatggtgaatgcttgtgataaagataaaatggcaagtaatttcattagagagatttaacctcagtagacatagagaggtttgttgtgcc

SEQ ID NO: 30538 - DNA, 220 bp, Setaria italica
  Peptide Sequence Number=SeqID_96512
ggcgttgtggctgacgtccagcaagatgagctgctccggcagctccacgccggagaggtcgaagctcaggtcgttgcgcgacaggtccatctgctgcgccggctttgccctcccgaacaaggtcgacgcgtcgccggtgaagccgttgcgcgacaggtcgatctgcgcgaagttcacggcggcgaactcggcgggcacggtgccggtgaggttgttgtgc

SEQ ID NO: 30539 - DNA, 1044 bp, Setaria italica
  Peptide Sequence Number=SeqID_96513
ccaggtggcaacttagctttgtaagctatcttgcacttccttttttgcaagggcatcacctagtgccatgatgccacctctaccatagtcatcatcaacatatatggcgatgacttgtttccatcgataatagctaatgatgctagcgatagcacccatttggtagtaatcactttgtgtagccctcacaaaataagggtattcaagggaagaaagggtaggatcagtggctgagaaagagacaagagggacatggagttcattgacagcatggcaaatgacatgagcaacagctgaggattgtggacctaatacagcgactacatctttagccagaagctgcaatgcttctatggtgccaacaaatccactgcatttagtgtcctgcataagaacactcagtttcgtccccccggagtatgctaggatcggcattgacatgcgcaacagcaagctcaatagcgggcctcaccgccttcccgataaccgagtcaaacgtgaacagcgcaccgatgcgcacctcagccggccttgtgggaacaccggtgccattctggttacctgccgtggttccactggcgaacatgcaggcacacagaagcagagcggcaaggtgagaatagcccatctccgagaaccaagaagagagtatcgcgttcctgacgacctttgatctctacagggcctcttcaattaaactctgcaaagaatgaaatgggggagcagagctggcgtccagaaacccagagagctatttggttggttccttgactccgaattcagcaattgcaactggacgagcaatgaactgcttgagcgcgagaagctagacacatcagtggcctccaactccaagaatcaagaaaccccgttctgcccgcccatttcgcctggcgctcctgctgctccggtggccgcacaccaactgttcgacgaagtgttcctacgggacgaaacgaaatggcgagcagagctgagctgactaacccctcgtcatctgctcggcgatgccacggttgggtaacttgggtaagtcctaaacta

SEQ ID NO: 30540 - DNA, 731 bp, Setaria italica
  Peptide Sequence Number=SeqID_96514
caaaaggaggagaagcagaggcacgaacccggaacccagcccgcgccgccgccctctccgatcgcctctcccccgccgatctgttcccaagagggcccgcgtcccagccggagtagatccatggcgcttgcgtcgaggctggcgcagctgcaggcgaaggcgtgcgaggcgacgcggttcgtggcgaagcacgggtgcgcgtaccagcggtcgctcgtggagaagaacaagaagtacgtcgtggagccccccaccatcgagaagtgccaggagctctccaagcagctcttctacacccgcctcgccagcattcctggtcgctacgaagcgttctggaaagagcttgatcaagtgaagcagctgtggaagaacaggaacgacctcaaagttgagcacgctggcgtcgcggcactcttcggcatcgagttgtacgcgtggctctgcgccggggagatcgttggcagaggatttactctcacaggataccacgtctgagtgctaggcaacgaaatcagtcccctttttttgctgatgaagatttcttaggaagcctatttttttgtgaccagatgcgcagttctgttttcgagatattcttgatgctgtatgggatgagcggatctcggtgaaaccggcttggtgagatacaataatctgctacatcgtggttcaagtctacggcacatttttgtaatgttattgatgaacccttaaaaaaaaaaaaaaaaaaa

SEQ ID NO: 30541 - DNA, 392 bp, Setaria italica
  Peptide Sequence Number=SeqID_96515
cctgccaaaagaatgcaccaataaattcatctcaagtttatgtacaccagccaactgatcatcactaagtttgtgtaggtccatctagcatcttaacggctcctttcttcataaatttcttatttacaactcctctagagcacaattcaccaagcaattctcttgcctcctttgccaagccttcataagccaatccttcaatcaatatggtgtaagtcgattcatttggcatgcagccattcgatatcatgtaagaaaacaggttaatagcattgtatgtttcacgccttttgcagagcccaagaagatagcattatacagcactgcattgggccttatgcccatatcttgcactttgcaaaatgttgtgatcgcctcctcaattctatctt

SEQ ID NO: 30542 - DNA, 291 bp, Setaria italica
  Peptide Sequence Number=SeqID_96516
gtcgactacgtggcggcgctgcagatgcaggtcagcaccatgcgcgcgctcgccgacgcgctggcggcggcgcagctgtccgacgacgcaggggcggcggagaggtgattggttgggcttggcttggcttggccccatgacatgattgattagattgatcaccaaccataccataccatcctgcaatgcaaccagctgatgtgattgcattattatactctatttactggaatcgtgagtaatcattgacgattaaatcgatggtgggatggtcatgatccaatcaatgat

SEQ ID NO: 30543 - DNA, 494 bp, Setaria italica
  misc_feature (491)..(491): n is a, c, g, or t
  Peptide Sequence Number=SeqID_96517
gcgactactgtgagcaatgaacaaaacagaaaggtgcccccgtcagccgctggaagactggctgaatccggcatgaggagcaatctgaaaggtggtccatccctgactaagaagaagccaaggcaagagaggccacaatggcgatgatggtgctgccgagacacacccaccgttggctcatgtacacgtgatgatcaatccgggccaggaagaagcctgaaacaactccttggcctattccattgctgccagtagcaatcaacagaggcgtttcctgagcccagtacatatagcaagaaggaacatgccttgtcttgtagctgtagcctgtaggtcgtcagacaggtactgtggttggctggttgctgtgactgtgatacgcaaatcttgggcagcgatctcggaaagcgttgacacctgctgtaacccaatccactcaagaacgcgacggatttttttttaccaaaaaaaaaaacaaaaaaaactaaaanaga

SEQ ID NO: 30544 - DNA, 272 bp, Setaria italica
  Peptide Sequence Number=SeqID_96518
caaagcgaacaatgtttctggagaggggcttcacattggttttgtctgctgtaataggtgatgcagtaggctgtccaataatttgtcccacgtcaaatatagcaactttatcaccttctccaacagcaagcttacctctagtgctgatactgagcaataatttagcaagcgaaccattagcaagatgtgacttaagctccctagagtttggataatcggcttttatcttcaggtcaagtgatccacttttaaaagctttctttagttggaag

SEQ ID NO: 30545 - DNA, 902 bp, Setaria italica
  misc_feature (1)..(1): n is a, c, g, or t
  Peptide Sequence Number=SeqID_96519
nttttttttttttctgagcagtgtaacaagtggctaatttttcttcttttttttagtttttaactgaagcgagtggctatgcggcaatcagaagcgaccaacaactctacaccaaaaatttctaggtacttcagtagctacaataaatctgattcgatcattttacaattttacagtcacaaattcggcattgcaccctcctcatggtcgcccctgtggagattgtgcaggatgtagagagaagccgacgacaggaagatgcagaccgagtagctgaggaggtccagccctgtggttatctttaccatcttgctcctctcgaacatcttaaccagcagaatcatcacaatgacatgcccaacttttgtcttgagctcgtcgagggacgtgatcttcatccactttggccgttccttcatagcgaacatcccgaacaacgatgatcccctgagggggtccgattctgaaggcacatcggtggaggcattgctgatgaacagcccgtaaagacccatgccaaatatcagcatgactgttccagcaagatacacatcgatggcctcgacgactttgaggaccatctgccccgtatgaactcccttgacacagctcgaccaataaacttggtatgcctctttgatgaagacacagccgttgaggaagcacagcacagagccagccagcgacccggcgatcgcgaggagggccatgaaccggaaatcgaagatcaccctctcgacggtggtctcgatggcggtggccttggcggtggccttggcggtggtcgggacggggccgttgcttccgctcccgcccacgacccgttgtcgtggggttgcgacgccgccgccgccgccgccgccgccacctccccggacggcgcggaggaagccgccgccgag

SEQ ID NO: 30546 - DNA, 691 bp, Setaria italica
  Peptide Sequence Number=SeqID_96520
aattaagttacaacatcagtacagactacatggacaccacagttacattgtacagaaaccaaagccaaaataatggtttctaagttatggaatgcctatagcaaagcctggtacaccttcagctccagtgctgctcactccatgctagactccagttcatataatttgcttgtttaggttttgtggcttgcaggttatcagtgtctggagggcaaaaacgagccaaaaatcaaaagccaaaatgaattaattttcccaacaaattataaatgagttaccactttttatcaattccaaaccaaactttcatgccagttcaattcagtctcttatttggcttgccctgattcttcacatgcctaatttgttgaatataccattacgatgaacatttctggactataagaagctcaagaaatattttccacttcatgtgtcttagtacaggaaattatgttctgcatagcaagtagcaacgtaaacatgttcataaaataatactgcatgttcaggctcgtgcactactataaccagtgagtagcaaaaggaagatgatcaataggaaaatccatatgaccatgagaggctcattttattgtactccctcaatttttttatatttcggatggtttagatgcatggttgcacatgggaaatgctttgaattgtctaactaagtttgtagttacta

SEQ ID NO: 30547 - DNA, 1141 bp, Setaria italica
  Peptide Sequence Number=SeqID_96521
gtttgaaactttgaaattactgaaccacactacaacttggttcaagtttcctgttatataagcaccaacaaatttcaatctgtaaccaaatctatctctatcatcaacattatgctctcttaaagagcaattctggtaaaaagcatctttatggtctcaatttcagtttacaagaagaggcttctccatttacaaatgctcaattcaaacatttttaagagcatttgacagaaaaacaaaccaaatattttacttttcatgtttaacagttcgacaaagtatataccagcagtaatgtccacatccatggatggcagagccacctgatcacaagtgcagctggccctgaggtgactcatggccacgcacaaacatgggtctgaaagatagcaatgcctgggtgataacaagatgtcacaaaaggtagatagcaccgctcgcagtagatcaaggcatctagcacaaacaaaacaggagaaataactcaaaagtgtagatatggttagggtgtacaagtggtgctacataacctgcctatccaggatgtagggtgttgagcttgatgccatgtgaagtttcctggaactgatttacttgatttctgattgctccaatcaacatgtcttggcatccaactgcatggacattcttcaaatttgggcactgaagaaccagacgttctggatgtagatttgtgcaagagttgagattgagatcattcaattctggacaatttacatacagagcatcaatcgctgaacaaccccacagactgagtttcttcaaattaccatgctttataataagcttttggtgaataggttgatttttgtaggcacataattttcgtaatgattctaatgcatccattgatgtcaccaacgtcccttcttccattgtttcaaattagcgcataggctcatcccacagtccatgagttgaagatgtggcaactgtgctgtagctaactgaatcccacctagaaaatcacataaggaatggttgatacattggcttagtggatagttattttcaatggggcgggactaatagaccgtggaaagaaattggagccctacgtgtagtcacattcgggcaaagagcaagaagcagccttgataaagtatgagggaacgccttg

SEQ ID NO: 30548 - DNA, 970 bp, Setaria italica
  Peptide Sequence Number=SeqID_96522
aatgcaacaattacacaaagaattaataatgtcatgcggttcatgatccacataattgggtgtgtacaattgttcagttaactggctctggtgatgtgaagatgcacggtgcactgggtccggctcgactcaaacaatttgtcatcctccggcggctgatgttgttggaactggggaagttgaacccgttttgagccgtctgctagcagcttgcatggaagagatgattcagctgcggtgaactcattcagaaccagcagtaatgtccacatccatggatggcagagccacctgatcacaagtgcagctggccctgaggtgactcatggccacgcacaaacatgggtctgaaagatagcaatgcctgggtgataacaagatgtcacaaaaggtagatagcaccgctcgcagtagatcaaggcatctagcacaaacaaaacaggagaaataactcaaaagtgtagatatggttagggtgtacaagtggtgctacataacctgcctatccaggatgtagggtgttgagcttgatgccatgtgaagtttcctggaactgaaccaatgaggtctatcaatgtgtttttctatggggagcagaatggctgcttccagtgtgttgaaagaattaagttacaacatcagtacagactacatgggacaccacagttacattgtacagaaaccaaagccaaaataatggtttctaagttatggaatgcctatagcaaagcctggtacaccttcagctccagtgctgctcactccatgctagactccagttcatataatttgcttgtttaggttttgtggcttgcaggttatcagtgtctgatttacttgatttctgattgctccaatcaacatgtcttggcatccaactgcatggacattcttcaaatttgggcactgaagaaccagacgttctggatgtagatttgtgcaagagttgagattgagatcattcaattct

SEQ ID NO: 30549 - DNA, 568 bp, Setaria italica
  misc_feature (1)..(20): n is a, c, g, or t
  Peptide Sequence Number=SeqID_96523
nnnnnnnnnnnnnnnnnnnnagttttaggtatctagggaccaggatcattattattcccaagagaatacaagctcatcgttacaaattattgctctacaatataaacacaaaaaggatggaattcatagaagtccgtggcagtaaatagcaacttatacaacaagcactataggttctgaggcaatgcaacaattacacaaagaattaataatgtcatgcggttcatgatccacataattgggtgtgtacaattgttcagttaactggctctggtgatgtgaagatgcacggtgcactgggtccggctcgactcaaacaatttgtcatcctccggcggctgatgttgttggaactggggaagttgaacccgttttgagccgtctgctagcagcttgcatggaagagatgattcagctgcggtgaactcattcagaacctggcgaaaatttggcaatatattggaaaaaacggagacagagggcccagtctatgctggtaatgaaatatagctcacgtgaagactagacgaagcaaattggttaagtttcataactgtcagttgatttt

SEQ ID NO: 30550 - DNA, 1591 bp, Setaria italica
  Peptide Sequence Number=SeqID_96524
ttttttgaggatctagggaccaggatcattattattcccaagagaatacaagctcatcgttacaaattattgctctacaatataaacacaaaaggatggaattcatagaagtccgtggcagcaaatagcaacttatacaacaagcactataggttctgaggcaatgcaacaattacacaaagaattaataatgtcatgcggttcatgatccacataattgggtgtgtacaattgttcagttaactggctctggtgatgtgaagatgcacggtgcactgggtccggctcgactcaaacaatttgtcatcctccggcggctgatgttgttggaactggggaagttgaacccgttttgagccgtctgctagcagcttgcatggaagagatgattcagctgcggtgaactcattcagaaccttgtttaggttttgtggcttgcaggttatcagtgtctgatttacttgatttctgattgctccaatcaacatgtcttggcatccaactgcatggacattcttcaaatttgggcactgaagaaccagacgttctggatgtagatttgtgcaagagttgagattgagatcattcaattctggacaatttacatacagagcatcaatcgctgaacaaccccacagactgagtttcttcaaattaccatgctttataataagcttttggtgaataggttgattttttgaggcacataattttcgaatgattctaatgcctccattgatgtcaccaaacattggtcccttttcattgttcaaattagcgcataggctcatcccacagtccatgagttgaagatgtggcaactgtgctgtagctaactgaatcccacgtgtagtcacattcgggcaaagagcaagaagcagccttgataaagtatgagggaacgccttgcagatcattccaacaccattatcactgatgctcgatccacttaaatcaagcaactccaagcttgtgcacaatcgaacaatagatgcaacagctgcatcagttatttttgaacctaggatcaaggatagcatacacagtcccctgagattagcactctctagagcaaatacagcttcattggataattgatttgatgatatgtgcattttgtttaagttagggcatgtacgacccatggcatccatcaaactaaccatatcggtacaatcattactttgttgtgcaaagcacagtgagagctcactcatattaggacagttcatgaccgattttgaaagggaacaaagctctgacagccaaagaactgaaagacttgaagagcatagattaataaaatccaaattagagcaaccaccaattttgaggactgacagagaagacttctccgaaacaaaacgacttagatcctctccagtcatcctgttgattgcattggcagccatcgtaatctcgagagtttttaaacttgggcaggaaaatgcaagacatgccagcgtagtggcatcaacatccctttccatccggaggtcgaggcgcgagagcgcggggcaccgcgggagcagcgcgccgaaggaaggaccggacgacccgttagtacttaggtacgtaaggtaacgtacta

SEQ ID NO: 30551 - DNA, 1387 bp, Setaria italica
  Peptide Sequence Number=SeqID_96525
ttagactaggacctgtgcctgatcgccgtggagccgctgcccctggtgctagtggacaagctaaaagactattacaggatagcagcaggatcgatgacctggcactacgatcggctgacactgcagcacctcaccacctcttcaaagcgggtccatttcgattggcaccaagttggccctgcaggtcttccatgaaagcgtgcttataagttttgttgtccagcataaattccttgaggctccggagcaatggtagcccggaaaacatccctgtgttggtttcttcaagcttgccacgaaaatccagccgctcaagccgaagcattgccccttcttcaaactccaccgatttcaggccatctatgtcatttagctctagcactatcagactcgggaatgcctccggatggaaggtgaaacggaggtcgtcaacctggaacgacttcgcccacagacgtaagctgaccaagtttggaagcttcccaagaacttggagtgcaggttcgtgttccagtattctagagctccttagaaccaacttcacaagattcttgagcccctcgacccatcctggcaatttgagcagattgccgtatatcttgaggctttgcaggtttttcggagcggaggccaagccctccaaacagccatgcaaacctggcatcccacatgcctgcactagcaaagattccagacagctgagattggcaacgactgaacagaactcctggctgttttccttgttgatgcaagtcacagctaacttgcgcaactgggtcagtctttttatgtcgagtagatttgccttgtcccatgcgagattcacaacacccaatgtgcgcagggattttagtttccctatccctcttggcatccaagttggaccttctttcgccatcagaatagggagcatgacgcagcaacactgagtgcatacatcacacctattcatgtcaccatccacatccataacctctttaagaagttgaggtgcgcaacatgccacgcaaaatcctagcaaccaacccatacaaaagcatggcctgttattcactacttttggcagttcttcaagcacatctaatgaatcatcattatttccaacagatccagcacgaagatattgtagcttcttgagcttggtgatggtcttgggcagctttaaaatcggtgtcgctgaaatatctagtgtttctagttgctttagattacccaacgaatctgataggtgaaaaatataatcacatccccttagagaaaggtatctgaggtgaagaagcttcccaatatgctctaggtgatgactaaccagaccctgacgtgccttccaagtccagcacacgcaagaacctcatcttctcagaaatgaaaaaggacctccacttcc

SEQ ID NO: 30552 - DNA, 142 bp, Setaria italica
  Peptide Sequence Number=SeqID_96526
ttgctaaatgccgcagagcctcatcatcaatgcggcaatcagtgaggtcaatctccttaagatgggagcagagtgtcccgattcgctctagtcccttctcatttataaaagggcaggattccaaccggagggcttcaaccat

SEQ ID NO: 30553 - DNA, 440 bp, Setaria italica
  Peptide Sequence Number=SeqID_96527
aagcatttatataaacactgaagtgactgaattgtcaaatttggactgataggatgaaagatattggccattaatgtcgccattaccatcatatgggtatggaagagagcacaagggacctcgatacggaagccttatacacggtcaagaccttaaggatgtgactattacaggcaataacggtaccataaatggacaaggtcaaagctggtgggtaaaatttcggagaaaacagcttaatcacacaaggggtcctctagtccagctcatgcgatcaagtaacattatcatttcgaatatcactcttcgtgattctcccttctggactcttcacacatacgactgcaagaatgttacaatctcagaagctacaatattggctccaattgctggagctccaaatactgatgggatagatccagattcttgtgaaaatgtgg

SEQ ID NO: 30554 - DNA, 1026 bp, Setaria italica
  Peptide Sequence Number=SeqID_96528
tttttcgtaaattattctacttctttcgttgtatttcttccctttcttggtagactcttcacacatacgactgcaagaatgttacaatctcagaagctacaatattggctccaattgctggagctccaaatactgatgggatagatccagattcttgtgaaaatgtggtcataaaaaattgctatatttctgttggtgatgatgggatagctataaagagtggttgggatcaatatggaattgcgtatgggcgtccatctgctaatattattattcagaatgttgtaatccgctccatggtcagtgccggtgtatcgataggaagcgagatgtctggtggtgtctcaaatgttttggtagagaatgttcatgtttgggattcacggcggggtgtgaggataaagactgcccctggaagaggggcctatgtaagcaacatttcgtatcggaacataagcttagagcatgtccgtgtcggtattgtcataaagacagactacaatgagcatccagatgaaggcttcaaccctaaggccatgcccatcatcgagaacatttcttacacttcaatccacgggcagggtgtgcgcgtacctgtcaggatacagggaagcgcagagatccccgtgaagaatgttacgttccaagacatgtcagtcggtatagtagacaggaagcaccatgtgttccagtgctccttcgtccaggggcaggtcattggctatgttttccccgtgccttgcaagaacctggacgtgtacaacgagcggcgtgagttggtcaaacaatcgacgtttcagaacatttctgatatcgactacagtttttgacaagggcatttgatcccaatgtactattgctgtaggagtattcacagctctcgtagtcctttcaacacgtttagaagcaaaatttttggtagtttgttacaactcacacctctcaggcatgtatttaaggaggttcgaattgtctatactgtctcatagaaagacaccaggattgttacccttttaaaaaaaaaaa

SEQ ID NO: 30555 - DNA, 750 bp, Setaria italica
  Peptide Sequence Number=SeqID_96529
aaacaaagaacaagactacaaggaatttagacaaaaaatggaaatgcaaccgtcaatcacaacacaggatgctcgacttaacagaactgatctgtctggtatgccagtgacacgaagcacaaccatcctgcagagtgtagaaccttcatcggatccacatgcagaacaagcaggtagtgtgggtatgctgtcagctccagatttgcagcatgaagtgcaaccatcacctcaaatgcaggatcaacctgcagaaatggaaggagcaggtacatcgggtaccattgcggctcagaatttgcagcctgaaacacaatcatcaacctcagttcagcatattccgcctgagagaacacaccctgatgagaggattcaaataggtcttcagccaagctcgacatcgggtcctgaacactaccaactctttacagtgccacctgcagcagttaataatttgtcacatagttccgaaccactgataaatgagtatgaaaaactgaaactcttcaaggctgcagttagtaaacaatatgatcagcagaaatcaaaacttcaaacagagtgcaaccaagaaatggagaagatagtgaagaaatatgagttgttacttcaaaaggaagagcacacgtatcatcgatcgaacaaactggcagatgatatgtacatgaagctttttttgcaacaatcactggctgagaattttcaggagaaattcatgaaatcaattccagctcaagtgagaaagtagaagaa

SEQ ID NO: 30556 - DNA, 1096 bp, Setaria italica
  misc_feature (1080)..(1096): n is a, c, g, or t
  Peptide Sequence Number=SeqID_96530
actctccgactcagtcgcactagtcctgctgatcatattgtttactccttacttcagattgcatattctaatcgtgaaacttttcatgccttccttctgtgtgtaactatttgtggatagaaatcaaaacttcaaacagagtgcaaccaagaaatggagaagatagtgaagaaatatgagttgttacttcaaaaggaagagcacacgtatcatcgatcgaacaaactggcagatgatatgtacatgaagctttttttgcaacaatcactggctgagaattttcaggagaaattcatgaaatcaattccagctcaagtgagatctatgagccccacaatacagcaggcacctcaatcttttcagccagcactgtctaggatgtcagtggctcaaacaacgtcattacctgtcgcctcaccaccatggttgaactcttcgcattcaacgggacctttcctccaagtccaaccttcacaggtggctcggccatcagcatctgaggctgtccaaccacaaccagtcatcttacctggaagtctttatagagcaacaccgccacctgctagttcaatgcctctgcgaaacggaagctacggacgaggacctgctcctcatctccagcagcagaggatgctggcagcatctgcactggccctcagagatcagcagcaacttgctgctatgagtccaggggttacgtcatcgagacagtctgccccaggttcggctacagagttgatggcaaactttcttcaatctccaccaagcacaaccccagttccaatggcagcccagcaagcatcgggcctgattccaggtttgcaccacatgcctggtggtccaccaaatggcgcagcaggaattcggcaatctggaggtcacctagcagttatgaatcaggctgctcctgagcccagtccagaggcgatgctgctcttccaaaggcggtggaggacccaccccatagcaccaccaagctcagttcaccgaacagtggcatcggcatcaaacccacataccaaggtaacttaagaacggaaacaaaagaaacggaaacgttcctcaacgaaccgttattannnnnnnnnnnnnnnnn

SEQ ID NO: 30557 - DNA, 398 bp, Setaria italica
  Peptide Sequence Number=SeqID_96531
ttggtacaatacctggatcttgagatgaggtaaggaagagcagtaacagtacataaattgtaaggcctatggtgacagcaagaattgcatagcctgcattatatgcaggaaatatgtgtatgagatgcctggccacaaagacgcagaagacggcaacagggatggcaattagagagaaagatatcagagtggccttggcatctggtccaaagatcaaccttccaccacacaagattatgttgttgcctctccaggcttggtacacccggcgctgcttgtgcttggccatggccatggccggcggcgtcggaagagtccaagcggcggcgctcttcttccagtcccggtttccctttctttttggatcggcaagatgtcctcctctcctctcctcttct

SEQ ID NO: 30558 - DNA, 635 bp, Setaria italica
  Peptide Sequence Number=SeqID_96532
cgtgatgaattgatgataattggttgtttaaggtatgctaaagtatgaagtagattatcatctgtttaaagcatgattaaatatattggtttgtttaaagtatgaagtagatataatctgtgcttcttttgcaggtaattgtcatctgtgcttggctgttggttatcatgctaaacttagatgctaactctgggttgtgcacatgattcctgaatccctgcatgtttggtcctgcgctaaatctgttgcgtcttgtgtaggaatgtcatccatggaagtgactccgtggagaatggaaccaaagagcaatctctttggttccctgaaggcctggcagagtggaggagcaaccttcacccatggatctatgaggcttaagcttcgagatactggaagcttggtttcctctaaaattgagttttgccttaagagttatctgttggctctggctatggagtcatggcctctagcgccttgtggtatgtaacagctaaatgtgcctgaacttatgaggcattcgtgtttttgccttttgcgccgggtttaatgtactgtgcttgcaaaaccaaactagaaggtagaatactagaaataaaaatagtagtagaacccaagtaaatttaagttaaaaaaaa

SEQ ID NO: 30559 - DNA, 243 bp, Setaria italica
  Peptide Sequence Number=SeqID_96533
tagggtaggctaaacgccacagctgtctcaaggcatcttgatgttcaatacgggagccatcaaaagggatttgcaatctgcgtctcagagtattcagccgttcttcctggaaaagaaatgtcactaagtactcaactaattgatgcaacaccatgctatacatttcctctagaccttacccaaccattgtgcccattgtgcaatcagatttgagaaaagaaatgaccagtgcagttgctcctt

SEQ ID NO: 30560 - DNA, 1412 bp, Setaria italica
  Peptide Sequence Number=SeqID_96534
tttttttgtaggaccagcaaaggctccattgatttttttttaaaatttataaagcagatatgtattaaattgattgttcatttcctccaactagcacgtccaaaaggaacagaaataatttcaaatatgtactacaactacaaaggaagcatagataaggcctcaaacacgcctctcgatatagaatagtcaattctccggcatccaaatgcaacatctggtttttaacttatttgtccagcatagtgtacgacggcaggtccttcaccgcctgcacgtcctctagaaccagttcgcgctccaactgacttcttgtagttttcatgacttcattgaattccatatatgaggcacgtttcacaagccactgagcatcaagcagccgaaaggccacacagtacaagtgatcaaatgcattctcatcccgttcaagcagttcaaggaatcgaattccagacttcgaggatggaacggttgactgaagatccaacatctggatcagcatgaatgaagtattgataccggcaacagcaaaagggtactcccaatctgatctctgcccttgcactttgttcagaagcatttgaaaagatttagcgtagttccttgcgaaaaagataaggttctccaatgatatgagtccaccacccctgaaatctgtagatggatcagtgccttgccaacccatctccttccataattctgatttcagaggaggaatctcgcgagtagggtaggctaaacgccacagctgtctcaaggcatcttgatgttcaatacgggagccatcaaaagggatttgcaatctgcgtctcagagtattcagccgttcttcctgcaaagggctaagatatactggattactttggttatccaaggagaagggaaataacctgccaaaaattgatcctgagcctacaataatatttgccaaccattgtgcccattgtgcaatcagatttgagaaaagaaatgaccagtgcagttgctccttctttctatcatcatcccacaagtcctgccttctaggatcataaacctctgatccaccgttgtcatggctggagccaagtagaggttcgttgagagcatcagcactggatatgtcaacgtgctcattttccttccatcgacatctccatgatggagccgcctcctcagattgcttattgacatgaagtagtactacccgctcaaactagaattcggggtccccgtttccggaggtactctactgcggcaaggaaggccgcgcggaggagggccacgacgaggagtagaagctgtcctgcggtgggggaaattcggtgcgtgcggagagacgactttggttggagttcggagggcgattcggcctcggagcttttaaacgtcgtaggtagtaaagtagaaaactggagaggagacggaca

SEQ ID NO: 30561 - DNA, 298 bp, Setaria italica
  Peptide Sequence Number=SeqID_96535
ccccacgttacagcaccctccccgtcgcccgcttcgcggccgagaacgtcgagcaccccgccgcccgcctcgccgtgaaagcgaacgatccgtcggccgcggggacgccgccgtcgagctccggcagcgggcggatgccgccgccgcggaggacggtctccacagccgcctggcagaggtgccagctcccggcaccgagcagacccacggcgccgctcaccgggttgatcgtccgccccgccgcctcgtacagcagggactggaacaccgctgcatccacaagcacgggggacggcgg

SEQ ID NO: 30562 - DNA, 488 bp, Setaria italica
  misc_feature (475)..(475): n is a, c, g, or t
  Peptide Sequence Number=SeqID_96536
cagaagagccaattttcttgctggggggcgtttgtttactagcagcctgctgctttgaaacaattgaggttcccttggaagactctattgcgataaaccaataatagagtccagccacagtcaaaaccgtctccaagctgtttgatagagtccgtgtgatgcaaaaaacatgaaccaattaaccaactgggagaataatgtccactgggcaacctgactgttgaaaataagtttggaaagtttatacaagtaaagatctccaaaagctgcaaagacagattgaaggaggcgtggagccatcaccataaaccatggagtatccaggtggagtagcgccagaatcttgtagagagcagcaaagatcaacgggtggaggtaacttcgaaggccccgcttccactcccaagtgagatggccatacccgaaggcgatgcggtgggcaacctcgaggcactgccagtgctcgtcggggttnaagtaggtgcgca

SEQ ID NO: 30563 - DNA, 260 bp, Setaria italica
  Peptide Sequence Number=SeqID_96537
cgtatctggtttcctcctgcggcccggacgtgacggcggcggcagcggcagcggcgctgtctccatcctgatgagctgctcgaggcttggcctcctcctcgcctcccggcgctccaccacggccccggccgccgtcttcttgctcggctgctcgacgcttgggctgatggcgtcagtatccgcgcacgtcgtcatccggaggacggcggcgaagggcgagcatatgagcctcatgacggcgtgcctcggcgtcctcgtcg

SEQ ID NO: 30564 - DNA, 223 bp, Setaria italica
  Peptide Sequence Number=SeqID_96538
atgatcagtcttccctagtgctgttcttgatccactccagatacttgctgttaccaccagttatgggcagagcaataacttcaggaacactgcatggatgaggagctagtaaccaagggcaatgatgcatacagcatagtgtacaagaaatcagtagaccgtatgaagcttactcatattcatggttggctttgacgtgctcagtcaaggcatctagaagtga

SEQ ID NO: 30565 - DNA, 610 bp, Setaria italica
  Peptide Sequence Number=SeqID_96539
tttttttcggtcccaaatagtgatcacaattcacaagagcaacaatatacatgattgaatatgatttggtttgacttacacgggtcaatctgtcaacagagcgatgcatgaatttgcgtacccacacaagacaccagatcatttgtcacgacaggatggtaaacgttgatttggcaccggaatgtaactgagatatacaggtcaacggaggaaactccattgtgcaagcccactggatgatcagtcttccctagtgctgttcttgatccactccagatacttgctgttaccaccagttatgggcagagcaataacttcaggaacatcatattcatggttggctttgacgtgctcagtcaaggcatctagaagtgattccctggtctttatgatcagcaattcttcagcatcagattgcacctttccctcccaccagtaaacagattcaatgccaggtactatattgacacaagcagcaagcttcttgctgatgatgctctgtgacagcttcttgcctgcttccctgtttggaacggtaacatacacaacaatggatggcacggtggtggaagcggactccattcgagcagagctgtgtagtaccttctta

SEQ ID NO: 30566 - DNA, 908 bp, Setaria italica
  Peptide Sequence Number=SeqID_96540
caacaataattgtagtcctttctaacattaccctattcaatgcctcttgaactaccctctcagattccatatccaatgcgctggttgcttcatcaagcaacaatatcctagggttctttacgattgctctagcaattgctattctttgtttttgccctccagacagttgagttccatgttccccaaccattgtgtcaagaccatctggcaacttatcaacaaatttagcagcatttgcaagcttgattgctctcatgatctcgtcaggtgttagattttccatcccataggcaatgttttccctgattgtagttgagaacaacactggttcttggctaacgagactaatttttcctcttatccatccaagcttcattcttctgatgtcaacaccatcaatcagaacttctccagcctttggatcatagaacctctccaccaaactgatcacagtcgacttcccactgccgctctctccaactagggccatagttgttccacttggtacttgcaatgagaatccatcaaataccaaatgttcagacctggtaggatagctgaagtacacatccttcagttcaacatcacccttgatgtcctccaatataatacctgtggtgtcatatatatcgatatctggtttccgttcaattgtcttgaacattctatatgctgctccttgaccttctgcaaaaagctgtcactgatggtgttgcctgacccaaggacattgcacccatcatgacagccattatgacagaaataatcatgccaccattgtatcctcgctcaactatcaatctagatccataccaaactgccaatccataactgcaaaataagactgtcattattgaacccaattcctaagttcctttgttacttagttcttaccttttcttttgttt

SEQ ID NO: 30567 - DNA, 389 bp, Setaria italica
  misc_feature (296)..(296): n is a, c, g, or t
  Peptide Sequence Number=SeqID_96541
cctgcgccaaatatgctgttcgtgatattcactatataccaatgcatctcctttgtcaattgtcgctatgaaagtctgactttaataaaaagagagtgcagttatacacacaagaatggcatatggcagacgtcaacccagaggtgtagcattttattcaaatttcatttccaactttttgaaccgtcaaatattaactcattctttccttctagcaaaagaatcgaccttttaatgtaacagtaggagaggtccctactggattttcttgtatttatatatgtgtaaaaaggggntaagcacaagcttacaaggtcataggcccaaagagaccctaatcagaagttggtaatgaaaattacgtagccaagtttctagtaaagttgcaa

SEQ ID NO: 30568 - DNA, 460 bp, Setaria italica
  Peptide Sequence Number=SeqID_96542
atcttcagaactgactccacttcagatcaaccagcacgacacgctacaattagacgcacgcatacagtttcgcattgcgccaccgcccaccgagatggcctgccattgattcaattagaccatagattcatgaacaggtcctgctaccattgctgctgtttggagcacaagcagcactaatattgcattacatgaccctaataccgtcatggctttgttccctccctctcatatactagtacccactactattagcagcaacacagaaagacatcaaaaaaaggccagaggccgagaggcaggcaggccaggccaatcctccacttgggattgtgacttctctacaagctggtgatcaggtgatgcgtggagcagagcatggttcagctgttcggcagtcggctgcagccctcttcctgcccccgcctgctctcagcgacgaggccggcaggtcggagct

SEQ ID NO: 30569 - DNA, 284 bp, Setaria italica
  Peptide Sequence Number=SeqID_96543
tggcggtgccggagcacgagaggacgtggaagaacgtggtgaagctcgcgccgggtttcgtgacgacggtggtggtgaagttcctgatggtcgacaccggcagggcgtacccgttcgacgccgcggccgagccaggatacgtctaccattgccacattttggatcatgaggacaacgccatgattcggccgctgaaactgatcagatgatgttccgtccactaattcttggggcacatgatttcatatatagcaagtagctcctcatttcaagaaaagaaataa

SEQ ID NO: 30570 - DNA, 431 bp, Setaria italica
  Peptide Sequence Number=SeqID_96544
agtaaaatggtagtcaaattcgcaagttatccatttttgttccacatttcggattagaaatgcattcacctcaccagatgaatatccaggagctcatgccatgtttagtaaggcagcaaatgactagtgtgccagcattttaccagtaatctctgcaggaacactgtccatcttcaaaccggtggaatcttgccctgtcccggatgattatcacccgaccatagactttagagataagttttgccaccacatgacagtctccacatattcggagagtttttattcactcgaatagtctccccaggtggtgtagaaattaacccgaatgcaatggccagcttttcgctatggtagcacaagcatactgcttctcctcctccccaatgtcatgttagcacattgctcgtttctggctcatatcccagttcact

SEQ ID NO: 30571 - DNA, 464 bp, Setaria italica
  Peptide Sequence Number=SeqID_96545
atttctcacgagcacaagaggacggcggcgctgctccgtcgccccgtccctgttcctggagctccccgccgctgccagtcaacccccttgcgtgccaagcccagcagctcaccgccgtggaggagctcggccacggcaaggacggtgagtgctccggcggaggagcccaaggtccccggcgccgtccccacctttctctcttctctcccacatcttcttctctcgctcctgccctgccgccagcgaatttggccgtgagctcgaggtgctggcggggggattttccctgctctgccctctttcccctccgcctcctcccacggcagctggcaggaagggccgctatcgtcgtctggcaggcgaggaaggggcgtcctggccggatctggcccttgcggcttccagcttctcctccgactcccatgcgcatggcgcaacgttaggaagttaactaaagtacggta

SEQ ID NO: 30572 - DNA, 347 bp, Setaria italica
  Peptide Sequence Number=SeqID_96546
gagtgatcattcgcctgctcgacgtccgtaagcgaggagcgagcgcgacttctcgtccccaccggcagcggcatccttgccgtcgccggctccggtgagctgcctcgagcgcttggcctcgctggcccagtccgtccggccgatgaccagcatcatgcgcaccatgcaggtggcctgcgccgccaggaggccgagccacaggcccttgaagtcgtagtggaaccagaacgccagcccgagcgccacgggcgtgcccacgaggtagaaggaccggaggttgatgctggcggcgtccttgggcctggcgcttcctcggagcacgccgcagcccgtcgtctgcgggcagt

SEQ ID NO: 30573 - DNA, 516 bp, Setaria italica
  Peptide Sequence Number=SeqID_96547
gacctattgacatgccagaaaaaatggtgaatctattgctatggagtggattcaatagacgttgaaactcaaaaggtagtccgtttcatctcgaaagtaacattgcttgcatctggaggagctggtcatatatatcccacaacaaccaatccaccggtagctactggggatggaattgcaatgtcccatcgtgctcaggctgtaatttccaatatggagtttgttcagttccatccaactgcactttcagacgagggcctcccaataaagccaagcataagaagggaaaatgcatttctcataacagaggccgtcagaggagacgggggaatcctctacaaccagtccatggagagattcatgccgctgtacgatgatcgcgctgagctagcaccgagagacgtagtcgcgaggagcatagacgaccagctgaagaagcgcggcgagagctacgtcctcctggacatcagccacaggccgagagacaaggttcttgcgcatttccccaatatcgcc

SEQ ID NO: 30574 - DNA, 612 bp, Setaria italica
  Peptide Sequence Number=SeqID_96548
gaacaaatgaagcaaaatttgattactgaaatgctcctagagctctagagtaagtggagctaaatcctaattgcgttatgtacatgtcgagaactcgagatttttcccggctaaggctaaagctgacgacggatcagtgagctctgcttcgtcacatgacggagcaggcgttagggttctcgtcgctgaagagctgcggcgccggcgccatgtcgaagcggtaggggtacggcgggtacgcctgctgctggctgccgtcgggctggtgctggtagccggggtgggggtagtaggtggcggcgctggggttggcgtgacccatgccatcggcattgccgtagtaggggtacggcggatagtagctggcggggggcggcgggccctgctggtacgccacgtacccatgcggcggcgccacgtgatacgtgctcggccccgccggcgccgccatgaacgccgcggcggccgccgtggacgggcccgcagccgccacctcgatgcccttgcccttggacttcgtgtcgtcgccgaccggggccgcagccgcgcccttgttcttttcgccctcgccggctttgtccttcttgtcgtccttgccctcaccgccgccgt

SEQ ID NO: 30575 - DNA, 955 bp, Setaria italica
  Peptide Sequence Number=SeqID_96549
taataatgatgatgctttacagtaagataaaatttaagatgcctcttttgatggtaaatatgatcctgatgcgtatattacttggaaaattgctgttgatccaaagtttgcatgtcatgagtttcctgaaaatgcacgtgttagggctgctactagtgagttcactgattttgcttctgtttggtggatagaacatggcaagaaaaatcctaataacatgccacaaacatgggatgctttgaaacgggtcatgcgagctagatttgttccttcttactatgcacgtgatcttttaaatatgttgcaacaattgagacagggtgctaaaagtgtagaagaatattatcaggagttacaaatgggtatgctgcgttgtaaattagaggagggtgaggaacctgctatggctagatttttgggtggtttaaaccgtgaaattcaggacatccttgcttataaagattatactaacgtaacccgtttgtttcatcttgcttgtaaagctgaaagggaagtgcagggatgacgtgctagtatcaagactaatatttctgcaggaaaatctacattatggtagccgcgcacgactatttctttgaccggacgtgcacctccacccgctcactctccgagtcggccggcaccaccatctctgtccagcgacaagcaacgtgctcctcccacaaattcagcaaccaagactgcccagaaaccagccactagtaccacttcggttgcatccacgggtagaacaagagatgttcagtgccaccgatgcaagagctttggacacgtgcagcgtgactgtccttgcaagcgtgttttggtggtcaaagaagatggtgggtattcctctgctagtgattttgatgaagatacacttagtttgcttgctgttgaccatgcaggtagtgagaaacaaccagaagaagagattggtgcaaaggatgcagat

SEQ ID NO: 30576 - DNA, 363 bp, Setaria italica
  Peptide Sequence Number=SeqID_96550
tcgccggcctcccagcaggttggggagggtctcactgctccggttttgtttctctctctagctcatgcttcagtacactacacactagccagaaatcaaagcaggaacaagaggatggtggccgttacgctccctgccatcctcacagtgctcgctttgctcggttccgtcgcatgccaaggcggctacggagacggcaacccagcgccagcgccacaaccgcacgcttacccgccggccagaccacaaccgcctccttcccctccgaccacctcacggccaccttcatatcctacgacgagtctaaatccaccaccaccacctaagatcccacaaccactcacttatcctccgacgaattcg

SEQ ID NO: 30577 - DNA, 168 bp, Setaria italica
  Peptide Sequence Number=SeqID_96551
cttcgagagccccccggccggccggccagccagccagcacggagcgggtagctagcggcgccgcctccaagatcgccggagagaccaagcggggcagacggcagatcgagctcgctcgcaggctcgctcacggcatgctcggcgctgaggtttgggggagggaagggg

SEQ ID NO: 30578 - DNA, 542 bp, Setaria italica
  misc_feature (1)..(9): n is a, c, g, or t
  Peptide Sequence Number=SeqID_96552
nnnnnnnnnaaggaatacgagaaatgccctgttattttggattttggagtgatatttatgagatcttccaaattcggaagaacggcatgggctcacagagcacagcatagttgcgtggattaattcaacgactatttagtctacacctggggcaggtctatgaatccagttcatcctagttcacaggttagtgccagtcttctctccccacctcagttacaagcatgacggtgaagagttatcttgagtttccactgtaaaccaattagacgggtatcgacgcgtttggccattcccagagaagctcataaggctgatcctgatctgtattcagacacattgtttccagatcgcgcgccattcttctgaaaacagcaatctgggaagcgtagccaggttcctcacctgagccgccgacgccacagaactccacactgtagttatgcttcaccgcgaggtcagtagcccagcactggaactgcgccctggtccactcgaacttgtggtcgtggttccggaacttgcaggggccagcgttttcg

SEQ ID NO: 30579 - DNA, 216 bp, Setaria italica
  Peptide Sequence Number=SeqID_96553
ggagcacatacactggaagtgatgattatgtgctagagtatttccttccactgatgtgcaaaggttgtgatgaacagcagcgcttacttgatgacattgcagagactatgcagagagcgtgcaagagtctgagaactgtttcgaattctgaactgatggcagataccacagtaaagccatcaaacaagaagggatgtagaataagattcccatcat

SEQ ID NO: 30580 - DNA, 381 bp, Setaria italica
  Peptide Sequence Number=SeqID_96554
gactcgggctgcacgctgtagtaccgggcgccgatgagcttcttgttgcagctgctcttgttgaagtcggggccttccatgcacacgccgcgccaccgcgccggcacctcccgcatcccggcgtcgtcgaagctcggcgactccggccagacacccgtatcgatgatgccgatgatgacatcgccggacgcgcggcggccgaggcggccggagcggagcccggactgcacctcgaggaagtcccaggagcgcgtcgtgtgcagctgcagcgcgcggtccttgaacaccgacaccacccgctcgtgcccggagagcgcggcggcctcctcctcagtgagcgcggcggcgaagccctcgaacgcgtggtggtagctctgcgtc

SEQ ID NO: 30581 - DNA, 245 bp, Setaria italica
  Peptide Sequence Number=SeqID_96555
ccttgagacagaagtcccattgttggtctacgagttcgttccaaatgggacactttacgaccaccttcatgttgacaaccctcaaagaccactgacatggaaagatcggctgcgtatcgcctctgaagttgccagttctctggcctatcttcactcagctgcttcgacatcggtggtgcacagggacatcaagacatccaacatactacttgatgatcgattgacagccaaggtttcggactttc

SEQ ID NO: 30582 - DNA, 310 bp, Setaria italica
  Peptide Sequence Number=SeqID_96556
caacattttacctgttgcttcccatcaaacagaaattctatggtgataaattattattgattggccagcagtaaagcggtgcttatcatcacctgtatttcaagatccaacgagtttatctctgcatgactcatatttgccaaatgagtctttgaagcttcttgacggaacatacagtaaagctgatgtgattggcagtttggtcttcactccccacaacaacctgtttttcttcgttgatgacattctggatgaaataaatggtaaaagtgaattcaacggtgcaacttatgcagcacattttgaaggg

SEQ ID NO: 30583 - DNA, 717 bp, Setaria italica
  Peptide Sequence Number=SeqID_96557
ggtattatatgattgctcgtttgttcatcttatgcagctgtcctcttatagatagataacggttcacaattgtgtggacaaaccttgtatcggattttgtgcaccaatgtccttctttataaaataaacacatcaagctttttcatgtttgcaaaatcctgtagtagtgtctgtattattgtatttgtgcctgtgacataactaaaattagtttctaaatatgttcttgttataacttgtttgtcaggtaatatgtaatgtgtgcaatgttaaccattcagttgattgatattgattccacattgtcatgtgcttctacgtgtgcctcttcatttgtctgatcatgagtacatttttttggttgacattttcataaattgcatttgtgaactagtctaatactgacatgagtagtccattgcataaatcatgttgatgtaataaagtgtccaaaactactcaagtcgatctacgttttatatatgttttatgcttgctttacatggtttgtgttacaattgtagcccccctgaagaatgcacttgactgggcatctagaggaaagaactgttgggcagacaaacctgctgcgattgtcagtgcaggaggtggctttggaggagggagatcacagtaccatctccgtcaggttggtgtattcttggaccttcatttcatcaacaagccagaactgtgcgtccaagcatttcagcagcc

SEQ ID NO: 30584 - DNA, 1222 bp, Setaria italica
  Peptide Sequence Number=SeqID_96558
gacagagccgagtggtcggctccgtatttattgggacgggggttcccttccccttccgtcctcgcaagccatccggacgatccccgatccccgagcacactcgacgtcgactcctcgactcccaactcccaagtccatggaagctgcggcggcgaagcccgtcctccgcgtggccgccatctgcggctccctccgcaagacctccttcaaccgcggcctcctccgcgccgccgcggaggtgtgcgaggactccatcccggggctgcgcgtcgaccagctcgacatctccgacctccccatcatcaacaccgacctcgagaccgacggcggcttcccgcccgcagtcgaggccttccgcgccaaggtctgccaggccgactgcttcctcttcggcgcgcccgagtacaactactccatcgcaacccccctgaagaatgcacttgactgggcatctagaggaaagaactgttgggcagacaaacctgctgcgattgtcagtgcaggaggtggctttggaggagggagatcacagtaccatctccgtcaggttggggtattcttggaccttcatttcatcaacaagccagaactgtgcgtccaagcatttcagcagccaccaaagtttgacaatgatggaaatctgattgacgatcaaatcagggagaggctgaagcaagtgctcttatcccttcaagccttcacactcaggctccagaaggactgaatcaactcaggacccttgcagtctgtgcttcccttaagaagtgtttatgacttcagtgtatcacataccatgcttgggattgggacctgtaatgcattgtggacagcctgaaaattgtaataaacccctggagaaatattctccttttatgcagattattgaagattggaccacatctgaacattctaaatattgtgtttaaccttcccagagacttgacaccttccctttagtgcagcaattttacattgcttaccatattggtcatgcacacttctatgttctttgttatgggcagtcggttgggctgactgggccttttgggctgcttcaatgtgcaaattttgtaatttttaatattttttagctaacattacttttcaatagccacttggtaaatttggcgttttttatgattaaacagctgaagttaggctaaatttcgttattatacaaccacagttatgtaaatctcatctgaatgggtactgcaaatca

SEQ ID NO: 30585 - DNA, 150 bp, Setaria italica
  Peptide Sequence Number=SeqID_96559
agccagcatggttcgacaacagcgtctcccagatgtcctgcagagatgatttatactgtgtgcttgaatcaactgaaaagtcacttcgggccacatcgtttcttactccaacacaaagcaattgtgtactcgtcgaggaatggacatgca

SEQ ID NO: 30586 - DNA, 547 bp, Setaria italica
  Peptide Sequence Number=SeqID_96560
gctgggataaataatgaaggccacaaagactagcccctctacctttatctgtaccttaaagatgtatttgatgaaagattgctgtcctatcatagcacagcaatctttcatcaaatacatctttaaggtacagataaaggtgtatttgatgaaagattgctgtgctatgataggacattttagtttgacatatttttaggccaatggtggtacagcttgaggatacagtgcgcttgtcaggttagatacattgcactgtttatctcgccatttgtggctcttagcaactataaaattgagccttgtattgtactgctactatattttatatttggcaagagccacaaatgtagtagcagtacaatacaaggctcaatttggcagtcacacactgtgttgagctagataaacagtgcaatgtatctaacctgacaagcgcactgtatcctcaagctgtaccaccattggcctaaaaatatgtcaaactaaaatgtcctatcatagcacagcaatctttcatcaaatacatctttaaggtacagataaa

SEQ ID NO: 30587 - DNA, 501 bp, Setaria italica
  misc_feature (5)..(5): n is a, c, g, or t
  Peptide Sequence Number=SeqID_96561
cccgnggagatccacgactcctacacactacctgttgatcatgctgcaattcttttatgctgcagccaaaagatgcatgatgcaccaaagttaaacgggaacagttaggtttgttttagattttcaacaacacggcattaactatagttatatttgaatctaggcttgtttaccattatttttttgaaataatgttgatcattaatttgttatgcgtattacacatgtgtgtatactgaagaaatatcagaaattaaatagtatcttcttcctttgggataagcaccacacgagtattgcatctgtatgcttattattatgtgataacaagttataagataaagtatatctcatattcagttaggtggtacgttactgtgcgtacgaaatcacgacacgttaaaataaattcgacacgtatgcacacgacagcagagatcagttgacaggtaaaaagacttctccgatgctatcttatattaacgtgacacatgcactaag

SEQ ID NO: 30588 - DNA, 242 bp, Setaria italica
  Peptide Sequence Number=SeqID_96562
ggcaatcaaggccaaagcaaatgttgcatctttggaagagaaaatagactcacctcgagcttccaagctccgcttagcggtttctgggcagagcagcatcagtgatgggagccggcactctttatccgcaacctcacctgaggagaccacggttactccaataaagccagttgacttgctcgacggggtgaagccgcaaggatcacgagacattgttgcaatgcagagctcctctaccgatt

SEQ ID NO: 30589 - DNA, 521 bp, Setaria italica
  Peptide Sequence Number=SeqID_96563
ctattcttgccccatcctttggccactaaaaaccaaccagaatgacatgaaggagcttccacggcctatccatggcctccctgtagcaagagccaccacgaatcggcgccacaccagccttcctcatccccttcttcccttcttcgtcgattcgcgggaggagcttctacaacctgcctcccctcaccaatgtcacgggcaccctcctctttggctttactgctctagggcctcagtagccgctcctcccgcgcaactttcctctctatggtcttaattccattgggaacgtctcaaccttgacagtggtgcaaacttctgctaagtcaccatgatagagatagccgtgcggaggtacatcagcgagcatggcacggtggattgaatctgggtttgagatgttgcaattgtgtttttgtatgttacaatagttgattcgctagtcggtcaaggtgagacacgtcccatgttgcaactgatattttgatgatgcaatatctatttttggatgttcaccgtcg

SEQ ID NO: 30590 - DNA, 300 bp, Setaria italica
  Peptide Sequence Number=SeqID_96564
gccgttgtaggtgagcacgagcttgtcgcagtagctctcgtcggagtggcggcagtggtcgcagtcgaggcaggcctcgacgatgcaacccacgccgacgcggtccccggccttgaagccggaaacgttggcgccgaccgatgtcacgacgccggtgatctcgtggccggggacgacggggtacatggtgatgtcccagtggttcttcatgaagtggaggtcggtgtggcacatgccgcagtacagcaccttgatcgtcacgtcgtccacaccgttttcccttctcttgaagacgaaggg

SEQ ID NO: 30591 - DNA, 1986 bp, Setaria italica
  misc_feature (1955)..(1986): n is a, c, g, or t
  Peptide Sequence Number=SeqID_96565
cccccgcccccgccaaaccctagcggcccgaatccggccgcccccatggcgccgttccggcgctgggcggacctgccgccggatctcctctgccgcatcggcgaccgcctcgacctcaagtggtacgccagcgcgcggggcgcctgcacggcctggcgctgcgcgctcgccccgccctccccggcgctcctcgtcgtcgccgacgacgcacgctggtgcccgcacgccgcatcccttcccacccggcggtccttcgagctcaccgccatcgtctcggggagccgctgcgtcggctccagcaacggctggctcgcgctctccgtcgcgctcttcacaggccagaccgccttcgtcctcctcaaccccatcgccgccgtcgagatcctgctcccgcccctgatctacgagagccgatgggtctccaaggtcgtcttcaccccgagccccgccaaggacgacttcgccgccgccgccatctgcgacatcgacaggatcgcctacgtcaccgcgggggccaggaggtgggccgtcctggagcccgtccgcctcaccagcggggaccagctcacggatgtcgtgtacacggacaaaggtaaggtctactgcctcaccaagtgcggggatgtccacgtgctccgcctccccgagcgccgccgccgcaagcccgccaacgccgacgaggcgggaccctcggagccggagttctccgtgctccagccgcccgccgagcgctccattaatttccgcccgatgcggtggcagcagcagcgcaattttcgcttggtgcgctatgagcaggcgcggacaggaaatctggaacccattcccttgaggctgacgctctgcgcggagtcgttctcgtacaagagagttccacctgaatctcaagggccggacctcaacgcgccagccacggttgagcccctcctgtccgaggccaacctcccgttcaaccctgccactgtctttgcgccgccctatgacactgtgtccgcgttcactagtgccaagaacttggtgttctgtgagggtaatctgtaccaagtctggaggaacgcgagctgcaccgttactctgcagctgcccgcaggcggtcagcgccgcgtcgcagaaaatgagatattggttctgaggtactatccccggcgccagccttgctgggatgtggtgaaggacttgggaggctactcgctctttgtgggaaggaacaatgcagtgtccatgtatgcagagggcgtgccaggactaaaaggcaactgtgtgtactggatcggtgggcgtggcagggatcagggaatggtctttgacatggaatctgggaggtccacgccatgccgggctcctcaggttggcattttacctgggcatcctcatagcacgatctgctggtacttcttgagcgatttagtgagcaacaacagcaactgcatcaccaccaccaccaccgttgccagcagtagcagcaatggaggaagaaaagtttatcagacccgagcaagagcccgggccgatcttgcacaggacgtggaagaatgatgcgtcgccgtactgattggcgacatagcgagcaccaccaagcaccttggtggaagttgagttcatcaccaggctttgcaaaccgcttgcggtctttgagaggcagagctccatctcaacgtgaagcaaaatcttgcagagaagcgacgaggaaccgcttcatgtgtagctgatagtagatttcaattcctgtttcctataataattttcagtctgtttgcctgtctgtagcctctgcaatatttgtatgttcatgtcatgtaaccgaataattatcttcttctttgtatgcttaattttcatgaagttgtgttaaaataattcaatggattatgtagtagttctgaattgtagtatcagcttacgtaatgcctgctgttaccttcctagtctaaatctgtgttagaggttacaagaannnnnnnnnnnnnnnnnnnnnnnnnnnnnnnn

SEQ ID NO: 30592 - DNA, 684 bp, Setaria italica
  Peptide Sequence Number=SeqID_96566
aaagactaccggtaatagtaaaagactacgaaaggtgaggtaaaaagcgcaaaagacctgtacagctcctcaaatgtttgttgcaggtaattactccagtcaagaatgggaggcagcatgaacacggcaccgaggatggcttaggacgcctctctctcagtgctcctttcacctgggggtatttgctgggaatctgaatgggaaatcctccgcgaccttcccgagccgctgtcaggtgatacttctggatgcgatggtacatgtgccagcatacgccgagaagttgggacctcgccagttggtgatgaagcatggccgaacatgacggttcctaatggatgatcgaatttgcaatttggaccgaacttgcacatgccatagcgagaatagaaactgcaaatgggctctcccgggcgcaggggtaggcccaatgaactcagcgcacaattgggagtaggaattattcgctccctgggatgatggaacttgcatacagcaccaaacttacagtctccagtcttcatatagaactggcattcaggttggtcaggtctctctggaaacacattctccctctgtactgcataaagtccaacaggaactgaaccagcttggtatgatgaaaacattccttgatcacccatgccaggtgttccactctggcgtgaacccgtatagtattgg

SEQ ID NO: 30593 - DNA, 538 bp, Setaria italica
  Peptide Sequence Number=SeqID_96567
taagaaattagttagttttaccaagaagagacctgaccaacaggttggtcaggtctctctggaaacacattctccctctgtactgcataaagtccaacaggaactgaaccagcttggtatgatgaaaacattccttgatcacccatgccaggtgttccactctggcgtgaacccgtatagtattgggcagctccgggtgtctgttgttggtcatctgaggatgaagaaccaatctgcgcagtgtaaggactccaccctgggacctgaacaagccctggaggaacaatcacttgtgcatagcttgaatgacctggccaccttgggcttgcaatgaaagaagcagatcttgacaaaggccagcttgttacagccccttggtaagcatgttggccaggagaagttgcagactgtccaggtgaataaccagagccacgtactgcaaccatcatggtagatggttgtggatggtgaaacttacatgtgcttccaaacttgcactgccctgttcttaaataataagcacatttccttttcattt

SEQ ID NO: 30594 - DNA, 404 bp, Setaria italica
  Peptide Sequence Number=SeqID_96568
ctcttcctggccaatccattatgcatatgacaattgccacatatcagcgcatatgactgcgatggatcctccccaacaagcagagcagcaatcttcgcaatccagccaccatcacttgttcctgagccttcataatgccccacgacttttgaaggtggcatagcttccatgccaccacctgtatgagcagctgcggtgctgctgtagctgctgccttttgcctttgtttccctcctgtttcgcagaccatctttgggaactacctcaacctcgttgcttctagcttgtgttgaaccagactttgcttcatctcccatatgtaacttaaggccggtttctgcacccattttagaggccagaactgaagctgctgctgcctttgctgcaggatcaaggtcgtattt

SEQ ID NO: 30595 - DNA, 582 bp, Setaria italica
  Peptide Sequence Number=SeqID_96569
cccgcgcagtatctggttggagatgggggcaggtacccgctgctgccctggctcatggtgccgttcccggggccggtggtgcctggctccccagaagcagcgttcaacgctgcgcacagggcaatgtgctgcccggtgaggcgtgccgtccggagcctaatggggtggggagccattgctcggctccacgaggaggagagccctcgtgccgctgtggcgtgcattgggacgtgcgcgatgcttcacaatgtgttgctgactagggaggattactctgcattggcacctgatgaggcggaggcagagagtgaaagggaagtgcagagccagggagttggcactggtgctggatcagaaggagtcgaggttgacgggcgtgcattggtgttgcgaagtgcattggcagcaacaatgaaggacctgcgtgcgcctgactagcaatggtgattgttcacaatttctgtcattgtcgattctttttaatcgtatagtttgtgtagtggtgaatatttcgattccatttggttcgtcactcttcattttgttgcttgctcaataaatcaataaagaaattagactatc

SEQ ID NO: 30596 - DNA, 730 bp, Setaria italica
  Peptide Sequence Number=SeqID_96570
tgccactggagggagcccatcctgctcatgagttcgaacacactggagcaggggaggagaaaccctgtcctgctcaagagttcgagtccattggggcaggtgaggaggaagagttgaacctcctgagatctatgggctgggatgagaacgaagtagttcaacctcttcagcaagaggagattgctgattgtctaaggcagaacgtgaggctgcaacagaagcttcaggagtgcaggggctgatctccgaatctgtggatctgtggagcaacgtaactgtatggccaccatgccgagaacatgtggctgtggaagccgtggcatgccaagttttggtaacttcctcagtcaactgatgagggaatgattgtctagcttagcaaatgaagagttttgtttttgccaatgcttgttcggtggggggaggtttcatgggtagcgcgataattcccccccgcttaaaagaggttttagggtttttcttcctcattttcccagaaggaatacaccaaatgtaagtcttgtctggcgttggaggcacataggtgtgcgttgctccgaaagaagaataggctgtctttttttttttacttcatcgcttatcttttgtttttcagtaaaaaaggtgggaaaaaaagaatggtcgcgcttaacatgaaaaaggtgcacaggaattatcttggtcttgaattttgcttgccttagcgtcttttttatggtttcgttcttgc

SEQ ID NO: 30597 - DNA, 244 bp, Setaria italica
  Peptide Sequence Number=SeqID_96571
agatggcctcaagaggaagaggaccaggagggaatgcgaaccgaggcgcaggcagaaagggaaagccagccgactcaaagtctgcacaaccaagttctccagaacagcagttagtggcgttcgttcaagaactcgtaggcaagaccatgaaagaggacgaggcacgtcagttctgcaaggagcgtaatttcgaccaagaccggattcaagcagatctagcgaatcgtctcgacaaacacgaaga

SEQ ID NO: 30598 - DNA, 388 bp, Setaria italica
  Peptide Sequence Number=SeqID_96572
tttgaagatgacttggaatcaaatagagcaatgagagatcaaggagggggctcaccgcagctggagcaagatataaatcgcctggagaagatcgtcgagattctaacacaggacaaattttgttatgaagctcagatactacgagtatgatcacaatcctagatctgttttctcggcctattaatgcaaatcttctttgatcaaaatttgggactgtataacttatttctagtacttttcctgttatatcatgagcacttaagagggtttgttcaactatgcaatatgcacccctttactctttttagttactatttacaattatctcttgatcaaggtcagtatcattacaagaaattttattctgttctttgtgccaaaacgaaat

SEQ ID NO: 30599 - DNA, 2998 bp, Setaria italica
  Peptide Sequence Number=SeqID_96573
cccgccgagctcctcgtcttcctactcgccgaggtagccgccgacccgctcgttgccctcacgcccccggccggcgcccagcccccccgggcttcatcgacgagttcttcggcggtgcggactacgagtccatcgagccggccatgggggagctgtacgagcgcctcaggcagagcgttgagaaggtctcggcgctcggcgatttccagcgcccgctgcgggtgcttaggcgcctcgtggggatccccaactgcgccaagtctctggtgaaccatcccaagtggatacccaaaaatcagatcatgctcatcggggaaggaagggttatggagctctccagcgtgcttggggccttcttgcacgttagcgccatccgtgaccgagagtttgccagcaagcccgacgtcgggcaacagtgtttctcggaggcatcttcacggcggccagctgatttgttgtcatctttcacaacaatcaagagtgttatgaatggcttgtatgacggccttaaggatgttcttctaatcctcctaaaaaatttggatactcgagaaaaggttcttgagtatatagcagaagtgataaataaaaatgcatccagatctggcatgcaggtagaccctttaaaatgtgcgagttcaggtatgtttgtgaatcttagtgctgtgatgctccgcctatgtgaaccttttttggataacatggagtcaaagaaggacaaaattgatgtcaattacctcttctgcaacaatagaattgatttcaaagatttgacagctataaatgcttcatcagatgaagtctcatcttggatagagagtgtaaacagtgagtgtgatcaaaataattccagtggagaggctcgttttgtggaatcacaggaagccacaagctctggcaaaaatagcacagctttagttaggtgctcaaagaaggagaatttctcatttatttgcgaatgtttcttcatgactgcaagggtacttaatctggggttgatgaaagctatatcggactttaaacatatttctcagcaactttcaaggtttgaagatgacttggaatcaaatagagcaatgagagatcaaggagggggctcaccgcagctggagcaagatataaatcgcctggagaagatcgtcgagattctaacacaggacaaattttgttatgaagctcagatactacgagatggtgcattccttcaacgtgcattatctttctacagattgatgatactgtggtcagtagacctagttggcggattcaagatgcctttgccatcacaatgccccaaggaattttcttgcattccagagcattttcttgatgatgcaatggatttacttgttctgacctctagaattccaaaagcgttggaaagctttgtattggatgactttctcagtttcatcattatgtttatgggaagcacatcttacattaagaatccttacctaagagcaaagatggttgaagttttgaattgctggatgccacaaagaagtggcttgagttctacagcctcgctatttgaggggcaccaactatgtcttgattaccttgtcagaaatcttctaaagctttatgtggatattgagttcactggctcccatacgcaattttttgacaagtttaacattcgacataatattgccgagcttttggagtacttatgggatgttcccagtcatcggaatgcatggagacaaatagctaaagaggaggagaagggtgtatacttaaattttctgaacttccttatcaatgatagcatctatcttcttgatgagagcttgaacaaaattctcgaactgaaagaaatagaggctgaaatggctaacaccgttgagtgggaccgcaggcctgctcaagaaagagaggagcggctgcgtgtttttcatcagtgggagaatattgttcgctttgacatgaaactggccaatgaggatgtagggatgcttgcgttcacttcagaacaaattccagcacctttccttctccctgaaatggtcgaaagggttgcgagcatgcttaattacttcctcttgcaacttgctggtccccagaggaaatctttgactgtaaaggatccagagaagtatgagttcaagccgaagcagctattgaaacagattgccaccatctatgtccatatctcaaggggggataaggaagctgtcttcccagctgcaatctcaaaagatggtagagcatacaatgaccagttgtttgctagcgcagctaatattctgtggaggattggaggtgatccccaaattataaatgagtttatgcaacttgctggtaaggcaaaagctgctgcttctgaggctatggatgctgaggccatccttggggacataccagatgaatttctcgatccgattcagtatactctgatgaaagatcctgtgatactgccatcatcaaaggtcacaatagatcggccggttattatcaggcatctgctgagtgattctacggatccatttaaccgatcccacctcactcaagacatgctgataccaaatacagagctgaagttgcagatcgaagagtttgtccggtcccagcagtcgagaaagcgaacagctgctgaatcggagattggcgaagcggatggcgctgctgatatggttgaatgaagtttgccaggagcaggggatggacattttttttgtggggaaaaggagggtgattaatttacacgatatttcatcggtccacatctagttgatttgccagcttgtgcccccattgtctcgattctttgtaaatgttgtaagtgcacactgcaagtctaagttgatccatacagatctaattatacagcgagcccgctctccaaaattgtacactatctccagatggtatgggcatggcctttcataacgctgctagaatagatcgatgttgatttttcgtctgattatttcaacaaggacctgcccggtatgcggcattaccaccaaaagtaaaaaaaaaaaaaaaaaaa

SEQ ID NO: 30600 - DNA, 330 bp, Setaria italica
  Peptide Sequence Number=SeqID_96574
caaaaactaccccaacgctcccgccagaaaccctaaccctagatcccccaccatggatctcctccagtcctcgtacgcgccggacgacgcctcctcgccagaggagtcggcggccgcttcctcgccggactcctccccgctccgcctcccctccaagtccgccgcccccgccgtcgacgacaccgcgctctcgctctccgccgccgcctcggcctcccgcccgctcgacccctctctccacctcgtcgccttcaaccccaccgccgaccagctctgggcgccaatcgttgggcctcagcacccccacgcccccatctcctccgcctccgg

SEQ ID NO: 30601 - DNA, 553 bp, Setaria italica
  Peptide Sequence Number=SeqID_96575
ccctgaatttcttggactgccacaaggagcctgggttcaagaaggcggtccgcaattcgctggtcagggtgttgtcgttggcctcattgacacaggaatagatccaacccaccctagcttcgcagatgatctgtcaactgatagttatccagtccctgctcactactctggcatttgtgaggttacaaatgattttccatcgggatcctgcaacagaaagcttgtaggtgctcggcattttgcagcatctgcaataactagaggagtcttcaatgcttcccaagatcttgcttcaccagctgatagtgatggccatgggacgcatacagcatccattgctgctggtaatcacggaattcctgttgttgtggctgggcatcaatttggaaatgcaagtggcatggctcctcgtgcacacattgctgtctataaagctctttacaaaagctttggaggttttgctgctgatgtagtggctgcaatagatcaggcagctgaagataatgttgacataatcagcttatccattactccttatcggaggcctcccggc

SEQ ID NO: 30602 - DNA, 527 bp, Setaria italica
  Peptide Sequence Number=SeqID_96576
gctccctgtcgaggccctcgccgtacgcagcgcacgcctcggcgaacttgccggccttgaagaggtcgttgccgcgcagccgcgccgcggccgccgccttggccctcctctgaacgatcgtgacctcccgattgctcgggtccagctggaacgccgtctgcgccgtcgccacggcgtcctcgaaccttcctgcagccatgtcgacctgagctcgcacgatgaggacgtaggcgtggccgaaggtgccgaagaacttggtcgactcgtcgacgccgaacctcggcgcgccggctccggcgagcaccgcgtccgcctcgtcgtgccgttggagcctcagcagcgcctcggcttgcaacgccatcacctgtggagcgcagtcggcgccgtcggacacggcggcctgcgcttcctggagcactgtgatccagtccttgagcctgcgcgcgtcgctgctcttggcgatgcggctcttcaccgattgagcacgagaaacgtcggcgaccgtggattccttggacgattgcttg

SEQ ID NO: 30603 - DNA, 592 bp, Setaria italica
  Peptide Sequence Number=SeqID_96577
tagtagtactaagtatttattacctactattgtcttgttcttcatggttcactggggaggctgctcaagatgatgactttgaaggccttatagatggtgatgaggatgatgatgaagacgacgaggacgatgaagatgaagaggatgaggaaagtgaagatgattatgatgccaagaagacccagggagctgctggaggggaagggcagcagggtgaacgacccgcggagtgcaagcagcagtgaggtgaacgacctgtggagtgcaagcagcagtgaggtgctgtgcatcgaatgcttgcagacagcggttctggaatgatggaagtttggttctgcttgatgcaatgtcattgagttggttttgtggagcccttgggggggcgcgtgttggttttgtggaattggtggggggatttttccgggacatggtatcatatgttggtagttttgtcacttgctgtattgggtttcagatatcctagggctgtcagatgtgggaggtactggggaatagtggagcactgtggaataaggatggcagtggcagcgctagctgaaagagcaaggagcacaaggagggtacatatctt

SEQ ID NO: 30604 - DNA, 1689 bp, Setaria italica
  Peptide Sequence Number=SeqID_96578
cctccctctccccctcaacccaagcgccccctcccgccgccgctagggtttctcctcccctcgccgcctccctcccccaaatctacccaccgaagcttctagggcctcgcgacgcccctccgcagcagccatgagcgacggcaaggactccctcgacctctccggcctcggagccgccctccccaacgcgaccgagctcagcgcggaggacaaggctaaccttgttgcgtcgatcaagaacacgcttgagggattggcgtcgcggcatatcgacgtgcttgagagcctcgagcccaaggtcaggaagcgcgtcgagaagctcagggagatccagggccaacatgatgaacttgaggcaaagtttttcgaggagagagctgcacttgaagctaagtatcagaagttgtatgagccactttactcaaagcgttatgaaattgtcaatggtgtgatcgaggttgagggtgtcaaagaagaaagtgcagctgaaacccctgcagagcaaaagagtggagatgaaaagcctgccgagcaaaaagaagaaaaaggtgtgcctgctttctggctcaatgcaatgaagaatcatgaaatcctggctgaggagatccaggagagggatgaggaagctctcaagtacctcaaggacatcaagtggtacaggatcagcgaacctaagggttttaagcttgaatttcactttgatacaaatccattcttcaagaattcagtgcttacgaaaacatatcacatgattgatgaggatgaaccaattctagagaaagccattggtactgaaattgaatggcaccctgggaagtgcttgacacaaaaggttcttaaaaagaagccaaggaaggggtcaaagaacactaaacctatcacaaaaactgaagattgtgagagcttcttcaacttcttcagtccacctcaagtacctgatgatgatgaggaaattgatgaggatacagctgaacagttgcagaaccaaatggagcaagattatgatattggatctaccatcagagacaagattataccacatgctgtctcatggttcactggggaggctgctcaagatgatgactttgaaggccttatagatggtgatgaggatgatgatgaagacgacgaggacgatgaagatgaagaggatgaggaaagtgaagatgattatgatgccaagaagacccagggagctgctggaggggaagggcagcagggtgaacgacccgcggagtgcaagcagcagtgaggtgaacgacctgtggagtgcaagcagcagtgaggtgctgtgcatcgaatgcttgcagacagcggttctggaatgatggaagtttggttctgcttgatgcaatgtcattgagttggttttgtggagcccttgggggggcgcgtgttggttttgtggaattggtggggggatttttccgggacatggtatcatatgttggtagttttgtcacttgctgtattgggtttcagatattatgtgctctgcttatgctttgagtgatcattgtcgccagtctggtatcttattgcacatacctctggcatagcgtgctgtacttcataaagcgtgttgcggagaaattttgctctagggatttaggctagcattttgcccgaaaaaatttgtgaatttcatcttacgcagcgtcttacaatttagagcttatatgttactct

SEQ ID NO: 30605 - DNA, 308 bp, Setaria italica
  Peptide Sequence Number=SeqID_96579
aatttgttgagcattcattatatatagatacacctgacagttcctccaaaaactgcatattcctaactccatccagtaattgcgaaccgttaaccaatagaaaaatcaaccggcgcaatttaacaatacttgccggtaattttcttatccatgtactacgcagatccagtgtttccaaaaattgtagctctcctatttcttccggaaggcgtgtgatgctacttgctgcaatccgtaggtacctcagctgaaatagatcgccaatgttctgaagataacagtttttcaatttcacactactctctaga

SEQ ID NO: 30606 - DNA, 608 bp, Setaria italica
  Peptide Sequence Number=SeqID_96580
tagtacgtactaaattttaaactaaattaactttagtaccggttaaattttttactttaattacctaattgtactacgcagatccagtgtttccaaaaattgtagctctcctatttcttccggaaggcgtgtgatgctacttgctgcaatccgtaggtacctcagctgaaatagatcgccaatgttctgaagataacagtttttcaatttcacactactctctagatccaacactcttagagcctgaaagtttgaaaaggaaagcatcttttcagaatatccaaatatgctaagagatcgagaatgtgaaaagatcaaggatgagtcagaaatcactgcatctggagcacggtagtcaattgagagtcggcgaactttttcttgggaaaccagtgtttgcgttgggtcaccaatgggagtgataaaattttcttcgactgccttggacacaatgagatcaagaatcatatcatgcacacgacatgctgttgcttgaccatcaagttcaatatttactggttggatcaaacttctgttgataagttcattaaaatagcatttcccttcgtctactaaatttctcccacttttgaccttaacaaatcctt

SEQ ID NO: 30607 - DNA, 573 bp, Setaria italica
  Peptide Sequence Number=SeqID_96581
ttttgtgcagggctcttccttcgctacctccagcagcagatgttggtgatgagttgtttggcaacaacagaaatgcaagggcaatgaagcctctcggggtcgatgtaaggagacccaagagaaaagtgaatggcagcctaatcgctattgctgttttgtctacttgtgttgtggacgccttcattgggaagtactacagcagaaagaagaaggtgccaacagcctctagtggctgattatgagtcatatttatccatagttatcagtttgttaggctagagatatagatggatgagttggttaggataattgcttagggatcaagttggtcgtctctataaaagagacgcctgtgtatcatctggaggcaagcagaagtagaatcaattgtccagagcctcctagggagggcgaactagatctgctgctgcaccattatcatcaataaacagccagttctctagccttatcaacttgctgtctggctgcatggtttctgatactcaatttcaggggtccaggtgacatggttcaaggatttccacatattgtacttccaaaaattttctatgt

SEQ ID NO: 30608 - DNA, 329 bp, Setaria italica
  Peptide Sequence Number=SeqID_96582
tgcccgggacttgccggtgctccccggcggcgagcccgcggcgaagtggtagctgctgctctgcttgttgatgagacagaggaagaggagccatcaaggggttggagatgatggctgccgttgcttcacttgccattgttggtggcttttccagcatgtatctcaccttggaacgaactcaacaactagatagacttgtatgatatatcgatcgatctcgtgtgtctttcgtctctaacaacaaaaagacatgaacgaactaatttgctacctctctctcttgtttaactgcttggggacaaaataaagggtaacttttcttcttaacg

SEQ ID NO: 30609 - DNA, 464 bp, Setaria italica
  Peptide Sequence Number=SeqID_96583
aaactgcattcccgtctgattttacaatctcacaaccacattaatggtttgtaattttttccttttgtagtgatagttgataaaccaaacactgctcttgtggacatagcagtcaaggattctccaggtcaaatgtagttttttttatacattttttaaattgaaatcaacattacctccggtttgaactttgaaagagatttcaactaatgtagcctcatttcttttccttttttggttgctatagaggaaaggcaactgcttaatgttcaagtaactgatgtggttaaggaatcttctggccaaactcggaatgttgatgtaagaatgactgatgagatcaagataacatcaggtacaatataatcttatactcctcattcacattttttactgaaagtgaccattaagtggaggattttttcaggcaccgcagatcagccagattctgcaaatagtgagca

SEQ ID NO: 30610 - DNA, 1541 bp, Setaria italica
  misc_feature (1481)..(1541): n is a, c, g, or t
  Peptide Sequence Number=SeqID_96584
gtattcgacaggacgggctgcagtccagccttacatcaggtgaccgtgttcatggtaatcggtccggtcgacctaggaattctgctaacaagatgaagaattctgacaaccaagcatcctatcatagcagtgctctgcaagataattcaggcaaggatgatgttcttggcaagcattttgttggcaagctgacaaagaaaattcctggattttccctcattacggtaaaagtgaaggacaatcaggtgctcaaaggttgggttccagatgaaaataatctccgccaaataacacctaaggatgaccttgccccagagctccccatgcttcgaccaagtcaggttcgaaagcgagcatcagcaatccacatgcaagcagctcctcctgtgccaatccacttggaggatgttacacttgcaaagcctctgcaaatgaggcggcctgctgagaaaattattgctaagcacactgcccctcttcctccaaggccgtacatcggttctgctgttttagcagcaattcctgtatcaatttcacccagtaatcctgaaatgagaactttggccaagcatgatactgaacttgtgatcccacaatcatcagttgctgcggtgccaattaaatccgctcgtcctgtattggtaccatgcaaacaagtggaaaatgaacttgctggaaagaattctgtaaatgagtttcagaaagattctgaatcttcaaatgaaactaaggattcatcagtgatagttgataaaccaaacactgctcttgtggacatagcagtcaaggattctccagaggaaaggcaactgcttaatgttcaagtaactgatgtggttaaggaatcttctggccaaactcggaatgttgatgtaagaatgactgatgagatcaagataacatcaggcaccgcagatcagccagattctgcaaatagtgagcagcagagttctaaggagccatcagacattacagaacaatctgagcagctgaagacagagaccgttgtcctgaaaggagttgatggcttaaagtcaggcacctcagatgacgttcaccccgcgcatgatgaacacgaaatgaaggttgacagcaactgaaagcagagatgaagattcaagaaatgcaacacagttcctgttgtttggtggaagcttgcagtctgcaatctcaatgggggtggggagctgaagttttagcgaatggctcaatgctttaggtgtagactcctattacaatttagttttgttgctctccagttataggtgagagattgagtagagatgcaaaccaaagaaaatattcaatagagttgctattaggaaaaaatactcgatagacttagcatatttaggaaagttaaacgtcagaatcttcagttttttaatgtacacattatcttgtatcatggcttatgacatttaagcattatcctcaggcatcaggaatactgattataaagacaattggaaagtgaaccnnnnnnnnnnnnnnnnnnnnnnnnnnnnnnnnnnnnnnnnnnnnnnnnnnnnnnnnnnnnn

SEQ ID NO: 30611 - DNA, 478 bp, Setaria italica
  Peptide Sequence Number=SeqID_96585
ggggtgacactccaagtctatgaaacaactattttagatatacctattgcaatatgcaaacactagagaggggaaactgttagagctaggcataataatgcttcaaattgtcagttcatgatcttctatactctgcaacctgctcttcggtcaatttctgccattcccaaatcctcatcaccccattctactttccttccatacttgcaagggcagatcttcaggaaataatgcatgcccaatatatccaacagagagccattgccacacacactagtggtgcgccaagcaccacaaccaccctggcagacgccaccagtgcatacagccaccaataatcccctagtgttcataacagttgaagttgagaaaccacaaattaaagtaccagttttactagttggaggttgatatcccttgatgaaagttgaaacctacggttaaatattcaaactttactcttaatgtttaaaatctt

SEQ ID NO: 30612 - DNA, 530 bp, Setaria italica
  Peptide Sequence Number=SeqID_96586
gggttcagtggaagccacacgcaaacaatgtggtactgggattactgtgtcatttgagtccgtagatgaacaacaggaaatacaagaaatgggctcagtgaaaaccacaagcaaacaacgtggtactggggttactgtgtcgttggagtcctcagttgaacaggaaatacaagaattgggctcagtggaagccacaagcaaacaacatagtagtgggattacggtgttgttggagtcctcagataaacaacaagaaatgggctcagcggaagccacaaccaaagaacttgataccgggtacgtatttaaaaaaaaaactcgactagggggagaggcgttatatggctttctttttattattgttcaatatctcctagtatctcccatatcatttatgcccatgcttaggtagagagtgatttgactaaatccccttgttttagcatggttattactttatttttccttccaatcaatagggattgaacctaagtccccctcttgattgtgaacaaagacttcgtttgtta

SEQ ID NO: 30613 - DNA, 452 bp, Setaria italica
  Peptide Sequence Number=SeqID_96587
agcaccccgtgccgccgacgacggcgagctccctcacgtccgccgcgatgtcgtcgcggcccatcaccgcgacggtgctgccgttgtagccccccgccgtcagcagcaggttggcgcacaccgtcagcacggcgccccccgactgcgacgtcatcatgtagaagccctgcacgcggccgacggcggcggaggaggacgagggatcctcggtgagggcatcgtcgatgacggtcgtgtccccgaacgccaggcccgggacggcggaggggcccttgatcacctgcaccgccgtcgggttgcttcccgtcaggatgtcgtgcatgaacaagtgcaggtgcgtggtggtgccgccgtcagccgccaggacggccgccggcgacgacatcggagcgaggaggaagaggaggacggcggcagcgagggagggagccattaggttgcttcttgtcctt

SEQ ID NO: 30614 - DNA, 319 bp, Setaria italica
  Peptide Sequence Number=SeqID_96588
cttgaaaagctcaagagaacaactgatcaaagtcctctgctccggctactaggccaaagctgagtggcagggcgtgccggcctgcagggagaagagaagcagctacctctaacagagaggcagggggagcaacgatggggttcggcgtggtgtccctgctcaacgccgtgttccgccgcatgttcacctcggcgggcctccgccccggctccgccaccgtcgacgccgacgacaccaccatccacttctgggcccacccctccctcctccacgccccccctcctcggagcagcagcagccgccgcggccggtggtggtg

SEQ ID NO: 30615 - DNA, 318 bp, Setaria italica
  Peptide Sequence Number=SeqID_96589
acgcgctgtccagcactcctgggcgcactcgccaaagcacacgccaatctttcggggaggaaatggagggcgccggcgcagcggcaccaacgatcaccgccgccgcgacggggcggcggccggtggtgctgtacccgtcgccggggatgggccacctggtctccatgatcgagctcggcaagatcctcggcgcgcgggggctggccgtcaccatcgtcgtcatcgacccgccctacaacacgggggccacgggccccttcctcgcgggcgtctccgcggccaacccgtccatctccttccaccgcctgcccaaggtcg

SEQ ID NO: 30616 - DNA, 601 bp, Setaria italica
  Peptide Sequence Number=SeqID_96590
aagaagatatggataacttacgtattcttgatagtcaaaacttcttccaatatttttggtgtgcttatattgttcactttttagtcatcctaacaagttcatattgaactttttgatcatgtatattgcctgtctatctttgttcaatttttagcaaactcctgcacttgctgcttgtgtgttcctttgcaaacatcattttgttctttataatgtgatagcagtgtgagaatgttgggggtttgtatcagagaagactttgttcactactgattgtcgtgggttcatggctccctttgtggatggccgttcaatacactggttttattttgtcaatacctttctaattgtataaaaaatatccagttgattgcatgatgaatgtaaccttaatgatgtcacattccggtctgtaagttgctacaagcatggcctttcttcatttgccaggtataaccatttcagtgttttttgcccttgttttttggagttgcgggtctgtgatatgatgtgttagtttgtattcaccgactcgaacaagctcatgacactacaaactaacacatcatatcacagacccgcaactccaaaaaacaagggc

SEQ ID NO: 30617 - DNA, 489 bp, Setaria italica
  misc_feature (54)..(54): n is a, c, g, or t
  Peptide Sequence Number=SeqID_96591
ttcgttccgtttcggtacgttacgtttcctacgtttttttttagtttttttttntttttttttttcgttttaaacactcctctgtgaattagatgctaactgatggtcacattgtacaggaaagggagtatataaattccattttgttttctgaggtttacaacaagaaacatgatgtgtgtgtccttttgtgagtttgacaaaattttgccggaaggaacccaattttcctccatgctcagagacacagactggtgcctcagcttgggtcgtcatcaccttccaacagaggctcgacccgccactcgctgccgtagtaggagtttggcaggccgagccagaacttgaaggcctcggcggcgcgcttgcgctcccggcggcggtcctgccgcgcctgcgacgcgtgcttgctggtgaacattctcgagtgcatctcgatgtacatcttcctgtatctcgtcttgttgggcgcgatgcccttctcctcca

SEQ ID NO: 30618 - DNA, 354 bp, Setaria italica
  Peptide Sequence Number=SeqID_96592
gattctattcttcaggcaatacgagatgaatcaatgtatgatccacgggaaagaattgagatggcacagcgtcagtccctctaccggccatctcttcttggcctacctaaaggagacgccaaggcttagatatgcagtacgcatttgctgtgagcttgcaggaggtgtttgctggtctcaagatccttcttggcgtgccctccagaacgtgtgttgtgtgtacactatagagttcgacggtggtatatttagcatgccaggataaagtttattggccaagtctgtacatacaaccagttgtgattaaaattttatttgtttattttagtacttaggtaatttaaaaaaaaaaaa

SEQ ID NO: 30619 - DNA, 315 bp, Setaria italica
  Peptide Sequence Number=SeqID_96593
ggccggtgtaccagcagacggcggccacggcggccagcagcgccaggctcagccagcccccttccgacagcgcgtagggcaccgatagcaggccgacacctgtcaaggcgttgaggccgttgaggcaagtctgcacgaagctggcgtcgccgtcggcggcggcggccgtcttctccagccgcacggcctcgttgtagcgcccgaggagcggctcgtcgtcatagcccataggtacggcgtgttctgatggacagaccgattgcgcacgcgtaacggccgccatggcgtatttctgcaggcctaatcatatatgcg

SEQ ID NO: 30620 - DNA, 274 bp, Setaria italica
  Peptide Sequence Number=SeqID_96594
tagtaacgggtaattacaatccatgctttgattgaatacataattaagcagtccgactgcacctctctctctgaccaagcttcaccaaagattacatattaccacaactgttagtacactagagaaacaaatattatagtttatagctatgattttgccccacatatttgtctccataaattagagaatggctgcaaaacagcgtcgcctatgaaccttggagcatgcaacccagtattgaagtgttacgcgagaagaagctacctaagttgga

SEQ ID NO: 30621 - DNA, 637 bp, Setaria italica
  Peptide Sequence Number=SeqID_96595
tgataattggaaactagatttgcaaatcaatttcaattttggtattatttcggtaacccatttaatcctgttcttttttcgagaggaggctccaaccccatttccattcatcaacggaaataccagtagttcgacacagaagacacaaggataccggtatttcttctcttgattttgaaagaggaagccaggaaggaaagcgtcgcctatgaaccttggagcatgcaacccagtattgaagtgttacgcgagaagaagctacctaagttggatgagcaccttcatttcccttctgctaccacccaagtaatggataaagcagagatgatgaaggagacagaggcagtcaaagataacagtgtcacagccaccgatggtatatgcactgcgtcaatccttaagaatagcagccaccgtgatggtgctatatataagggaaattgggaagaatgttatcttattgatattgctgaccgtaaagagagcaagggatccaaatatctttcctgttcttattcattattcttaggacatttgcaaactatgtcatcaattgatatgtatgggttgtatatgggcgttggatacgccattggcaagctgacaatatgtggggcaaaatcatagctataaacta

SEQ ID NO: 30622 - DNA, 524 bp, Setaria italica
  Peptide Sequence Number=SeqID_96596
taggtcttcctaaccctattttcctatttctattctaacggtcggttataccagtagttcgacacagaagacacaaggataccggtatttcttctcttgatttttgaaagaggaagccaggaaggaaaggatcggaaactaaaactaggggatgtttggcaggcatgtagatcctatttgtctccataaattagagaatggctgcaaaacagcgtcgcctatgaaccttggagcatgcaacccagtattgaagtgttacgcgagaagaagctacctaagttggatgagcaccttcatttcccttctgctaccacccaagtaatggataaagcagagatgatgaaggagacagaggcagtcaaagataacagtgtcacagccaccgatggtatatgcactgcgtcaatcctaagaataatgaataagaacaggaaagatatttggatcccttgctctctttacggtcagcaatatcaataagataacattcttcccaatttcccttatatatagcaccatcacgg

SEQ ID NO: 30623 - DNA, 432 bp, Setaria italica
  Peptide Sequence Number=SeqID_96597
agtttttttttttttcttaccaaagattacatattaccacaactgttagtacactagagaaacaaatattatagtttatagctatgattttgccccacatatttgtcagcttgccaatgggcgtatccaacgcccatatacaaacccatacatatcaattgatgacatagtttgcaaatgtcctaagaataatgaataagaacaggaaagatatttggatcccttgctctctttacggtcagcaatatcaataagataacattcttcccaatttcccttatatatagcaccatcacggtggctgctattcttaaggattgacgcagtgcatataccatcggtggctgtgacactgttatctttgactgcctctgtctccttcatcatctctgctttatccattacttgggtggtagcagaagggaaatgaag

SEQ ID NO: 30624 - DNA, 985 bp, Setaria italica
  Peptide Sequence Number=SeqID_96598
gagcttctccactccgagaactgatccccctttctttcccactctttctagatcccccatcctccatccccccaccctcaaggcgagtagggaagggagtaccgaggcggatcagatgcaacaatcaaggcggattcttcgattctgccgatgccctagcatcgcctctgatgcgcctcgccgttggtcaccagagtctgggggacgcaatgttccaagcacggcggcggcggcgtcaaccctacccgatgaacttctgggtcggctttcccggtgtgttcacttgcctctcgttgcttcctaccgaaaatatatttttcctaataacgcttgggataaatctttcgatctggattatgaccaaaaaataaatattattcggagaatgcttataagctccaaacgaagcccaacgccgcatgcccccgcgcctacgctcgcccgatacacgctcacacacacaaaaaaaaacgagcttgatatatgttgggtacttttttagaatgataattggaaactagatttgcaaatcaatttcaattttggtattatttcggtaacccatttaatcctgttcttttttcgagaggaggctccaaccccatttccattcatcaacggaaataccagtagttcgacacagaagacacaaggataccggtatttcttctcttgatttttgaaagaggaagccaggaaggaaaggcatgtagatcctatttgtctccataaattagagaatggctgcaaaacagcgtcgcctatgaaccttggagcatgcaacccagtattgaagtgttacgcgagaagaagctacctaagttggatgagcaccttcatttcccttctgctaccacccaagtaatggataaagcagagatgatgaaggagacagaggcagtcaaagataacagtgtcacagccaccgatgcttggtcagagagagaggtgcagtcggactgcttaattatgttttcaatcatag

SEQ ID NO: 30625 - DNA, 805 bp, Setaria italica
  Peptide Sequence Number=SeqID_96599
ttaacgttctttcttaacttaacttacttaactaaaaaaaaacgtagtctttgtattatatgttgggtacttttttagaatgataattggaaactagatttgcaaatcaatttcaattttggtattatttcggtaacccatttaatcctgttcttttttcgagaggaggctccaaccccatttccattcatcaacggaaataccagtagttcgacacagaagacacaaggataccggtatttcttctcttgatttttgaaagaggaagccaggaaggaaaggatcggaaactaaaactaggggatgtttggcaggcatgtagatcctatttgtctccataaattagagaatggctgcaaaacagcgtcgcctatgaaccttggagcatgcaacccagtattgaagtgttacgcgagaagaagctacctaagttggatgagcaccttcatttcccttctgctaccacccaagtaatggataaagcagagatgatgaaggagacagaggcagtcaaagataacagtgtcacagccaccgatggtatatgcactgcgtcaatccttaagaatagcagccaccgtgatggtgctatatataagggaaattgggaagaatgttatcttattgatattgctgaccgtaaagagagcaagggatccaaatatctttcctgttcttattcattattcttaggacatttgcaaactatgtcatcaattgatatgtatgggtttgtatatgggcgttggatacgcccattggcaagctgacaaatatgtggggcaaaatcatagctataaactat

SEQ ID NO: 30626 - DNA, 614 bp, Setaria italica
  Peptide Sequence Number=SeqID_96600
ctgaaactcactcacttctcacctggagaaaccctttggcctaagacttaaaactcactaatgcagggagaattatctggtgtagaatccaatgttatgagagaagtagcaagatggaagaaattggggtggaaaagggaagtttttcaagccctatacaattatccagtagagacaccaagcaggtgcaggagaggagatctcaccagtcaccattcaccaagcattgcagacgaagggtttcggcagtctgtgccaccacaattcacaagaaccgatcgaaacaggatgaaatctgcggactcttggtgttggcaccttgatcttcaccgaaagcacacgcacacaaaaaagtatcgatgtcatgtatcctagtcagaagaagaaccaccgagaatccatggcctcacattggaagaactgaatcctttcccctgccactcctgctgctgaagcatgacctccccaccgacggcaatctcttcgctgcatccggcaatgcgcggccgctgcggccgccgccgccgtccttgttgctgtgctccccgtggcaccgtcttgacgatcccgaggagcctgccagaaggccgctctcccgggccatcatcagctcg

SEQ ID NO: 30627 - DNA, 399 bp, Setaria italica
  Peptide Sequence Number=SeqID_96601
atgaagcagctgacgttgcagctgcaggagcaaaaggcggcagcaaacaatgagaacgtggaggtggtcgtggagagaagcttgcggaacctgtcgagcggcagggacctggtggacgggctggaggcgctccgggaccggtgggccacgggcatggaggagatgatctacctgggctggatcacagcgtggctgcagcacgacctcatgctcatcgacgacgacgacgatggcagcacggtgctcggtggcagcacctacgacggcggtgaagacgtcggcgccgtactcggtggcagcgcctacgacgacgacgatgaccggaagcggaaaggtgtgcacccgccggaggatgagaagaagaagggggagacgatggtggccgcggcggcgccgagc

SEQ ID NO: 30628 - DNA, 147 bp, Setaria italica
  Peptide Sequence Number=SeqID_96602
gtgtcactaacctggacatccacgctgaggaatcattaaaaagaacatattgtcacaatgagtcacctagtagaagaagttgtaatatgaagtatctggtcttgcacatggtcagatgtcttttaaattttcagtgacttgcttgtt

SEQ ID NO: 30629 - DNA, 547 bp, Setaria italica
  Peptide Sequence Number=SeqID_96603
atgtagattttaaatagatgatgttctaatgttttgatgtaataaaattagtgatagagctttcccaaagccaaattcagattttggaaacaaacagagccttagtactatgaagctcccacaatggcaaccacaagagcaatactcaaatgtccagtggtccaactccaacctacattactcaacataaccttagtgttatatttgtagaaccaaatttggtacctggggatgggagtatgatatttgttcaccattgttcatgctcaggcttcaaatgatgatagcatgcaaaactttattaaagactggaatgctttccagacactgtagcattttactaaaaccgcaaacagtgcagctagccacctacacacaatatagtttgtccaatactaatctgtcactatgagagtggcaaggatcagctacacgagttccagatgagatcattaatgtttacgtaaaaaccattgatgaaattactttctattgtgtagagaactgcaactgccagcatcatatacctatgaggctatgacttcaa

SEQ ID NO: 30630 - DNA, 1167 bp, Setaria italica
  misc_feature (12)..(12): n is a, c, g, or t
  Peptide Sequence Number=SeqID_96604
atggccaccgtntcccccaccactcccaccccaacggcacccttcccatccctccccctcgccttccgcctccgcccccaaccgctcctcctctccgcctcccgccgcctcctcctcctccccgtccccaaggtctcctcctgggacgaatccgcccccggggaggaaggcgaggcagaggattccgaggaatccggcgccgcggccggggacgaagacgaggacgaggaggacgagaagccgcggccggagccggtgtcctccgccgagttccagttcgcggcgccccccgagggctacgtggagcccgcggcgttcgacgagctcccgccggagtcccccgaggacgtggccgcggcgtacgagtcgctctacgggccggcattcagcggcgagaccgtgctggggaacaacgtcttcgaggtcaaggtggtcgaccccgtcgacatggaccgggagcagcgccccaacgacgagttcagcgagcgcgtagtgcaggtcaaccgcgtcaccaaggtcgtcaagggaggcaggcagctctcctaccgcgccattgtcgtcgtgggcgacatgaaggggcacgtcggggtcggcgtgggcaaggccaaggaggtcagtgaggccatcaccaaggctgccatgaacggccgccgcaatctcgtcacagtgccgctcaccaagtactcaacattccctcacagagctgatgcggactttggagcagccagagttatgctgaggcctgcttgccctggatctggtgtcattgctggtggagctgtgagggtcgtgctggagatggctggggttgaaaatgctcttgggaagcagctgcggagcaagaaccctctgaacaacgcaagagctaccatcaaggcgacgcagatgatgaggcagttcaaagacgtcgcagatgaacgtgggatcccaatggaggagctatggaaatgatagaaacacattcacactgaaaacccgtttgtagcattctttctccttttgctgtatgtttcttgagttcattctctctgctgtaatctatcaatgggatggggataatcccggctcacgatttcgtttcgcaaatcccatctggaatctgtgagtagtgcatgccaacaattagacccaagcttcagagatggaattgaatcgatagaaaaaaaa

SEQ ID NO: 30631 - DNA, 645 bp, Setaria italica
  misc_feature (275)..(275): n is a, c, g, or t
  Peptide Sequence Number=SeqID_96605
atcactgcaacatgttgctgaactgataattgcaagtgctgattttgagacagatcttgactcctggcaagtgagtaaggagcattcacgaacacggttgaacggatgctagatgtgctacactgctgagttaaagacattctcaagtcatgggcagcatatctaaccataagaagtacaagcttgtcagcaatacacaagctaaccagaatacgaggctcatgagaatccttgaagaaacaagagaggctgatggtgaaagtgacaatacgagngaggatgcaggctgtctgccttcagatatcggactgcatccacaatctgcacgagatcctggactatatctttgcattggagatgcaaaagctgctgggcaacgatcctccaggacaaggacctggatccaccagtgatcaacgaccgctccatcctttgcaaaggcgtgtggcaagtgttggaagtgttggggggactgaattaacgcgggttgcttcagcaaaaggctagttttggtgttggtgttggtgttggttgtgtttattttttgttgttcagattatatacggtttcagacgaccaattctttctgttcatagtgtggtgttgattgttcagaaagaataaacaaagacacaagttgtcact

SEQ ID NO: 30632 - DNA, 239 bp, Setaria italica
  Peptide Sequence Number=SeqID_96606
acaatggcggcaagatcgtggctgctgcttctctgcctcgccgccgtcgccactgccggcgtgctccaagctcgcgcccagcccgacagcatcggtttcatcagcatcgactgcgggctctcgggcacggcgagctacgtggacgacaccaacacgctgtcgtacgccccggacgccgccttcgtcgacgccggctccaaccacaacatctcggccgagtacatcacgcccaagctcgg

SEQ ID NO: 30633 - DNA, 242 bp, Setaria italica
  Peptide Sequence Number=SeqID_96607
ccaatcctcatagaactccagatctcgaattgatttgcgtacatctttctccccgttgtacacaacaacattgatggatgctgccaagcgactgaacttagtctcccacaacgagagagaagcagaagtagagacaatgagaagtggtcggcagatgtaaggcagtatggacgtcacaaaaagaatggtcttaattactcgctcctgatcgtcgatgaaaacagcaccacgagaattgtgcc

SEQ ID NO: 30634 - DNA, 345 bp, Setaria italica
  Peptide Sequence Number=SeqID_96608
accgtacaaatagtacttctgaacctgaagtttatggttaagaggtcggtgataaggaggttggaggtggacttacaagctttagaggtccatatttctggggaactgacagcttaagctcttcattccaaacgggattcagattacgtttaatcacggaagtctttgctttctgttgtccaagggtgagtacgacataggggtcactacttatcaggtcccttacagctaatttggtccctcttattactttaacttttagtattcctataaactcaaccataccagcctgaaaaatatataaaccaaaggatgctaaaaaagaaaagcatgtgattaaaggta

SEQ ID NO: 30635 - DNA, 746 bp, Setaria italica
  Peptide Sequence Number=SeqID_96609
aaatagcaagtcatggtcgaacacttcaagctttagaggtccatatttctggggaactgacagcttaagctcttcattccaaacgggattcagattacgtttaatcacggaagtctttgctttctgcagagaataatgatattgccaattaacatcatctgaatgagacacgagtcaacaatcaggaacccatcgacttgtaggattatggagttttgtgaaacgtaatacctgttgtccaagggtgagtacgacataggggtcactacttatcaggtcccttacagctaatttggtccctcttattactttaacttttagtattcctataaactcaaccataccagcctgaaaaatatataaaccaaaggatgctaaaaagaaaagcatgtgattaaaggtaaaaatggcaatcttgtacagttaaatttgtaattccagaacaagtcagacttacctcactgttgaaacttgcagaatgtgaagcattgctgtccatatgttttcgagaatcgatagcctctaaagagctcttattagaaactatccttagacttggcttcataaattcttgcgattcatactttgacctgataaaatcagctctctcttcctggctagaatctggatgcggtttgtgatagccctctggaagaaatgcttcatatatagcattggcataagagtttccaccgacttctatcattgagttaatttcatcatcagtccattgatctagagtgact

SEQ ID NO: 30636 - DNA, 755 bp, Setaria italica
  Peptide Sequence Number=SeqID_96610
cttccccggtacctccacgttctgcagcttcaacgagacctcctgcttcaccttcgccaccgacgacgtttacagcactgtccctggccagcgcgttgtccggggatttgagccatttgccaatctgcatgtccgcgagaaggtcagggtcgccgaaagccgtcgccgcactgatcattggctgcaggtcaatctcggcctcacccattttgtcgtcccttgatagcaagtcatggtcgaacacttcaagcttaggtaccccttatttctggggaactgacagcttaagctcttcattccaaacgggattcagattacgtttaatcacggaagtctttgctttctgttgtccaagggtgagtacgacataggggtcactacttatcaggtcccttacagctaatttggtccctcttattactttaacttttagtattcctataaactcaaccataccagcctcactgttgaaacttgcagaatgtgaagcattgctgtccatatgttttcgagaatcgatagcctctaaagagctcttattagaaactatccttagacttggcttcataaattcttgcgattcatactttgacctgataaaatcagctctctcttcctggctagaatctggatgcggtttgtgatagccctctggaagaaatgcttcatatatagcattggcataagagtttccaccgacttctatcattgagttaatttcatcatcagtccattgatctagagtgactgacagt

SEQ ID NO: 30637 - DNA, 2114 bp, Setaria italica
  Peptide Sequence Number=SeqID_96611
gaaggcggcgcgccggcgccaggcggccggggtggatgccggggagccggcggcggccctcggggagcctggaggctaactccaaggtggccaagatgatggccatgatggggtacaagaaaggaatgggccttggcaagaacaagcaggggatcaccgcgccggtggagaccactttgcggcccaagaatgccggcctggggagcgttgaggggttcaaggaacccaagcccatgatggctaaggagaacttgccggccccggctcctccgccgacatcagggaagaaggagaagcgttggtccaagaaggctagcacaaagaaagctccggtcatgacgaagaatgagctcctggccatgcgtgccgagcaggagcaggaggagcagcccacggttgtccagaaggtgattgacatgcgagggccgcaggcgcgggtgctgacggacttgaaggggctcaatgaagaacaagagatggaggcgaatgatgtgccgatgccggagctgcagtacaatgtgcgcctgcttgttgatgaggctaaggctgatgttctgaggttggatgggcagctgcgaagggagcaggagaaggtggctagcttgatgcgggagaaggaaaaggtggccaagcaggaggcagcacagaaacgccagctgcaggtgatggagataattgcagggacactagagcaggtccgcgtggatgatacagctggcatgctcactctggatggattgcttcagacattccatggcttgaaggtgcaatttgaggaggagttcaagatgtgcagcattgcatggattgcttgcagatatgctcacccactgctaatccggatcttccagggatggcaaccccttcaggatccgaagtttgggttagatgtcatgaaaaagtggaaggacttgctgcagggggaccaaccatttgacttctcagatggttctgcatcaatgacaccatatgtgcagcttgttagtgaagtcatcctgccggctgtgaggatatcaggaactaattcatgggaggctagggaaccggaaccaatgctcaactttcttgagttatgggataataagaagttgctacctcctgttttgcttcaatcaatactagagcatgtcataatgccaaagctctcagctgctgtggattcatgggaccctcgcagggagagtgtgccgatccatgtctgggtacacccatggttgccaatgctaagggaaaggatagagaccttgtgccattctattcgatacaagttgagcactgtcctccatgtgtggcaagcacatgatgcttccgcgtacgctgtgttgtctccgtggaaggatgtgtttgattcggccagctgggaagacctgattgtgcggtatatcattcctaaactgagattggcactgcaagaatttcagatcaacccagcaaaccagaaacttgatcagttcaactgggtgatgctgtgggcatctgcaatcccagtacacctcatggtccacatgttggaagttgacttcttcagcaagtggcagcaggtcctataccattggttgtgctcaccaaatcctgatttcaatgagataatgaactggtataagggctggaagggccttttcccaccagagttacttgccaatgagcgcatacggatgcttctaactgctggtcttgacatgatgaaccaagctgctgaaggacttgaggtggtgcagcctggggctagggaaaatgtgggctacttgagagcaactgagaagcgacaatttgatgcagcacagcaggcttacaatgctgtgccaggggcagccatggcggatttgagcttcaaggagtctatccaggcatatgcaatggagcaaggtgtgctgtttatgcctagagttggcaagttctacaatggcatgccggtgtatgagttcggcaccgttagtatttgcatagactctgtgaagcgactactgtatgcgcaacttcaagagggaattgagcgatggagtgctgtaactcttacacaattgatggaaatgaaccgaatgggaagatcacgctaataaatcacctaggcttggagtttcattttcaaattttgtccctgttgtgtaaactct

SEQ ID NO: 30638 - DNA, 1297 bp, Setaria italica
  Peptide Sequence Number=SeqID_96612
ctatgatgatgaactgacgagtgtgcatttcttcacgtccacccaatccacgctgacagccttgggagtgagattggctgcccatttcaggattcaacacacacatctactcaaggtatgttgacctaaatttctagtagtgccatgggcggccatgtaatctagctcactggcaccttccagaaggcatggttaatgctcataaatatcccttgttaatttgttcttccagttcatcaaagttccaagcatcattgactttgtattcacctgcaaagtaagcgttacaaaccttcacagggaacaagttttcacttcattagaactattgaacactgtagacagtagcaaagatacacggcatcaaaaattaccgattgagtctctccgcaaggcagttaaatgagcacagctgccaagtgctttccctaagtctgcacagagggaccgaatatatgttccttttgagcaagtaactcgaaatatcaaattctgtctgtcttccaaactgcgctcaatgtcaaactggtatattgatatacgtcttggtgaaagctctactgtttcacccctccttgctttgtcatacatctttcaccgccaaccttaatggcagaaaacatcggaggaacttgccatatctcacccttgaatgatgccgctgcctttctaatatctccatctttgatgtgttcccatggttccctctggataacctgatcatagaaggataataggcaagcagaattgcagaaacacagataatttgaacaaaagttgatataaaaaaattaagtaagcagaatcagatttgcgaaagcacaaatggatttagataatcatttcatggaaaggttgagattgcacacaatcaactagtgagatctaaaaatagagtttgtaatttctgacatttataaagaacaaaagataggattcaataaatttttgcaccggttaagtcgccaactaaatgatatgtagattatacatgaatataagatgataaacttcttttcaggataggatatttcaatatactttttcagtaacatcaaacagaagcataattaactgtgaacctaataagttggtatttggggttgcttccccatattccatagtccatacaataattttagatccatttgcaatccctgaatagaagaatgttcaacagatcatcatagagatgctaggatacatactggtgaatctgcatcccaggttgatgtggcttctccaagtcggaaaacaccgctataacctttaaccattccttggtagcttcaaggaa

SEQ ID NO: 30639 - DNA, 1474 bp, Setaria italica
  misc_feature (1)..(48): n is a, c, g, or t
  Peptide Sequence Number=SeqID_96613
nnnnnnnnnnnnnnnnnnnnnnnnnnnnnnnnnnnnnnnnnnnnnnnntttttttttttttttttcaaagtcatctttgtaatacatataacccaaccttttcatgaaaatgtgtacatatcatatcaaatcaaaccgtcatgtaagacctattgttcaatctttttttcatgaaaaaactgagagaagcaacataaacaagtaaacaaaaactgtctctccatcccttgaatagtcagctgactcagctccgaggtaagactctggtgcccccctcaattgagaattggggtttggtttggaaagccaacggttgagataaatgcaaagaagcttctgtatctgtgacaatttcgtgttcctcctctatgatgatgaactgaacgagtgtgcatttcttcacgtccacccaatccacgctgacagccttgggagtgagatggctgcccatttcaggattcaacacacacatctactcaaggtatgttgacctaaatttctagtagtgccatgggcggccatgtaatctagctcactggcaccttccagaaggcatggttaatgctcataaatatcccttgttaatttgttcttccagttcatcaaagttccaagcatcattgactttgtattcaccgattgagtctctccgcaaggcagttaaatgagcacagctgccaagtgctttccctaagtctgcacagagggaccgaatatatgttccttttgagcaagtaactcgaaatatcaaattctgtctgtcttccaaactgcgctcaatgtcaaactggtatattgatatacgtcttggtgaaagctctactgtttcacccctccttgctttgtcatacatcttttcaccgccaaccttaatggcagaaaacatcggaggaacttgccatatctcacccttgaatgatgccgctgcctttctaatatctccatctttgatgtgttcccatggttccctctggataactggtgaatctgcatcccaggttgatgtggcttctccaagtcggaaaacaccgctataacctttaaccattccttggtagcaatcgactattttggttgcttttcctacacaaacaatcaacaatccagttgccatggggtccagagtaccagcatgtccaacctttttcactttgactaagcgccgcaactttccacaaacagtaaacgaagtccatcctttgggcttgtcgatgagcacgacggtcccgcccggcccgtcccatctcggtggcagctccgtcgtcctggtcacgagatatggctgcggccgttcctcctcccttggcacctcgcgcttcacctgccgcggctccgctcgcgctgccgccggtctcttggccttcgcctcggcttcgccgggcccttcctcagagacctgaagaagtcttccaccttcctctccagcacctcccctttgtcgttgtcgccgtccttcttatcgataaacgaaaac

SEQ ID NO: 30640 - DNA, 575 bp, Setaria italica
  Peptide Sequence Number=SeqID_96614
tttgtctgtagttcctgcctgtaggacatcccttctttgtagtacttgagcagtttcaagtgaagcaagtggggagaagcgtctactgtcagccttcccactagatgttgctctgtgtaagaggatggatagtgaaagatagatcaatagacgatgaggaagggaggtgaggctgctagtttattctgcctcacctgtgcacattgttgcagcctatgagcatgaacatttgcaaattcttgtgatcatatcacgcccatttctgaagatgtgagtgtaaatgttgtttcacgagtacatttaacaatataggctagactgattcgtgcatgtgaatgttaagagttcagattaatttgtgtctagtgtgatacagaaattatctttgatctttcctttatttcaagtttatgccagatacatacagtttcgagttcttgtcagaacattttgtcgatgggcctgtttgttttacttcccagggagtcgagctaaaatttgtgttgggggcatgaatcaagcaggtcacaaatttggggttggctatacatcttacctttgtttctgagtaaaag

SEQ ID NO: 30641 - DNA, 249 bp, Setaria italica
  Peptide Sequence Number=SeqID_96615
cgccgcgcgcttccccgtcgactacgtcgagttcgacgtccaggtaaagacgcccgcttcccccattgaattgcttttcttcctcgcacacccaaaacgagagagagaagcacttgcggatgcggattgccctcccgtcagtccgtcacgttaattagttttaggggtcgcgattatcgaggcaatcagcggtcggaatagcattactgggcgctaggaactcgcgacgctgctggtgttgtttgcagg

SEQ ID NO: 30642 - DNA, 1035 bp, Setaria italica
  Peptide Sequence Number=SeqID_96616
ctcggccgacgaggggggaccaagaagggacgacggtggcgaagcggagggtcgtggcggtggagtcacagcaagcgcggtcgaggaagacgcggaccccggcgcaggaagggacccgggctggatgccctgagtaagctcctccatgacaaggtcatcacggacctggaggaaggtggggaaaggtcgctgccgggtgatccaggtgcggaggtgggcgtagcgctcgttgaggccgcgaagaacgttgagaaccaagatccggtcctccacggcccagccaaggtcaccgagggagtccgccatggtcttcatcttccggcagaactcaccaacggagaggtcgccctggacgaaggtgcggaagctcgcatcgagacgaagggcccgggcttcggcgttgcccaggaactgaccctcgagcgccagccaggcccggcgggcggtggtgtcgggggtgccgcggacgagatcgtggaggtcgagggagatggtccccaggatccacgacaggacgatgctgtcgaggcgaacccacgcagctgtccgggccgcagggaaggtgtcggtgaggacgtggtcgtcgagggcgtaacggcggagaatgagcaggaccatgtcccgccagcgggcgtaggagggcgactcagggtcgaggacgacggggaccaagctcttgatgttctggacacccccggcctggtagtggagctgtgcgacaagtggatcggccggatcggtccaggccaccacaggcggacggggagcaccggagccggaggaggtggccgtgctgtcgtgggacatcgtgaggagctgctccgcctcggcgatctgacgggccaagatgtcggccgcatcccgctcccgctcccaggccagggctgccgcgcgcaggcgcgcctgtccctcggcagcggcagcccgggcagcgacgagggctgtcgcgaggttcccatccggaggtggtagaggaggcggggcagggaaaggtaggcgagcagcccctccccccacaggagcagctgccacccc

SEQ ID NO: 30643 - DNA, 188 bp, Setaria italica
  Peptide Sequence Number=SeqID_96617
tgggtacgattcctcatcttgtggagagtacccaaaggccggtactcagtctaccttctgacttggagttccagagggccattgatgttttccggggcttccaggtagatatccctgttgatgttgttgcatgacacgagttgctgtgaggcttaaggccctgtttgtgtacgcttttctggaactcg

SEQ ID NO: 30644 - DNA, 374 bp, Setaria italica
  Peptide Sequence Number=SeqID_96618
aagacgttaagcaaaatgtctgaggctgcctgtgtttccccagtattaatccattgaacatcaccaaaaaagaacctggtgcatgtatttcttctccagacagaagcgataaatcttccacaccaagacttttacacagattcatcagcgggccttcctcttgatctgttgtaacgtgagtcaatagagccaaatttttcgtcaatccacaagcttctccttcaggagtatcacatgggcaaagcataccccactgactaggttgcaaagcacgtggcccacttgttttccgtgtcttctcaaactgtggtgttatccgtgttcatgtagcctaatgatgccatgtacgatagcctaagaaagacctgtgacac

SEQ ID NO: 30645 - DNA, 575 bp, Setaria italica
  Peptide Sequence Number=SeqID_96619
cagctttgatgtaacccatgcgtgtagtatttctggtgataggtgtctgtgtttttggacgaaatgaaggcttgattgtattccggagatggcttagccattcagtttatccttttaagaatgggcatttgtttctgtatgtatatgtatgtatatgtatgtatacgatgttcaaatatgtattattgaattttgtgctactggtcacttctgatgtattggcccctaattttgtagattcaaacctgttgttaagtaacgagtcaacttttgggaccttgtttcattcaaatagtgttcattagactcttttgtagtgattttagtgatgaacctgagatgaattccttcatttttggccgctttatggtgagtacaggttgctatgctaggcttgattgagtgtagtgttgtcataccatttaggatgcatttatgcctaggcttccaacatttggtttaccagagtattgcttatcagcatgttgacatttaactccacttatgcgatttcttttcttaggagtagaaatgatggagttgtctgcatgatgctccgaactaatttactctgt

SEQ ID NO: 30646 - DNA, 490 bp, Setaria italica
  misc_feature (444)..(444): n is a, c, g, or t
  Peptide Sequence Number=SeqID_96620
taacaaagcggtaaccgttttaaagtgataactgataagcattgccgcagtacttaaagggcgaagttcggtgtcctgagatactgtcatgtgatttttcctcgatcactgaaaatccgataaattatgctcgtgtgcgaaggaccagggcctctgtctcagtgcagcgcaacatggccggatgatcttttcctctgctagagcaggggaccagcgcgcgtggcgccttgctaacgcagagcgtggtcgcttcgttgcttcccaggttccccccaaagcacgatgcgcccatggccaaggcggccaggggcgtagccaggaattcggtttttcattgttagggggctaacagtgctaatttatctaaaaatttgattgaatttaaaattttcagtggaaaattgcaaaccacggggtactggtccctgccagaccccctcctcngccatggagcggcggccagtactagggtctgttgttagtatggctc

SEQ ID NO: 30647 - DNA, 387 bp, Setaria italica
  Peptide Sequence Number=SeqID_96621
gtgaccaagtatcaaataatacatctaaaatgatatgtactcagcaattcaatctagagcctaaccagagacattaaatgatgtaaattaaaatctccatcttatgaagtagcagtataatccctaaattcaagactcatgttgtaacagaaatcacacgtctaaagcgataaacactactctcaaaatcttcacactgcagtaccagaaaatggatgaaaaaaacatttacagtcacatgatatacacagagatgggaagatagtcatcttctgtattgcgtgatccctgatctaacttcatcagggagatgtggtaataacataggatactttctcaaactttgggacctaacagaattcttattggaattcttaaaaactaact

SEQ ID NO: 30648 - DNA, 429 bp, Setaria italica
  Peptide Sequence Number=SeqID_96622
gggagcttgacgatcgaacaggtggatgcgcaaggaatactccactgtcctgtgaaggcaacactagtgcagccggcatggcagataagttctaccctatgtcttctgtgcaacttcctgctgatgcccaaaatgttgggacagctacaagtgcaggagaatgctcacttgcttgcctgggaagctgctcctgcactgcatattcctacgatcaaggtggttgctccatttggcatgataagctgctcaatgtacggcaacaaggtaacagtgttcttctccttcgcctcgctgcaaaagaattacaaagtagtaaaggtagtaatagaatgggagtgatcattggtgctgctgttggtgcaagtactgctactttggttttaatctttctactgattatttggatgaggaaaaggggggcggtatggt

SEQ ID NO: 30649 - DNA, 269 bp, Setaria italica
  Peptide Sequence Number=SeqID_96623
atgcatgccttttgttccaccccctattttgagccatttgccatccctttgcttctcgataagctttcttcctctcttcccttagcaaagattgaatctttaaaatatctggacaattgcattcgcttctatggaactgatagaatggttagacatgcatcggctgtgtggtttaagttgaaagaagtgatttttagctcttctccagaggaatttttattaacatcagggtctccaaaggatgcagagaagaataagaatcaaatggt

SEQ ID NO: 30650 - DNA, 644 bp, Setaria italica
  Peptide Sequence Number=SeqID_96624
ttgctgccgaaagcataggctccaagaacgcccaccatgccggtcctcacccccatggcctcgtacattgctttgacgaggtgagttgtggtagtgacgccatccgtgccagtgacacctatcacagccatgtccgtggacggccgcctgtagaggcaggcagggagcacgcggagcgcggccgcaatgtcgtccacaatgaccagcgcgcggcaggcaagggtgccctcaatgttgacgtcctgatcggctacgacggcaacggcccctcgtttgtcggcctcggtcaggcccgcgagcccctcctctcccacgcacacaaagaggtcacccgcggccacgaggctggcgtcgtgctgcaccccgcaagcgcgacatcctggtcgcccgtcaccgccaccgggacgagcttgctctcatcgaggagctcggcaagcgtcatgcggaaagctggctgccgaatcctggccccctcgaggccgagctcctcggtcacatcaaagccttcctcatcctcgtcgagcggcaagccatcgtctccatcctcgtcctcggccccctccgcctcctcgtcctcctcatccgccacggacacaacactgagtccctgcagcttccgaatctcgtcgaggtcgatcacctcc

SEQ ID NO: 30651 - DNA, 439 bp, Setaria italica
  Peptide Sequence Number=SeqID_96625
cctgtcgccgccacacggcccctgccggttgcgcgggcacggatagatcgccgccgggacgtgcgcagcagggcccgctgcctcagatccggataaggaggagccgaatccggacgtgcccataccggatcgagcaccgccgggtcggagcaggcctcccaggcggctcatctgtgtagccatcgacggatcctgcggggaagaaaaatagagagacggaaggggaaaagaagaggaaggcctcgccgccaccgtcctcgccgccgcacggacttccgacggcatgctctgacggcggcacggccgggaagagggtgggaggtgctcgggctgcattggcgtcgttccgcccatgctgcccgagaggggcgacgcggggcgctcccagccaaagaatgacttgctaatgatttgttgaagcacggcgcttatgatttgt

SEQ ID NO: 30652 - DNA, 373 bp, Setaria italica
  Peptide Sequence Number=SeqID_96626
agatgtactacctcgaggacgaggtccagggcgccgacgacgccttcttcgatgcgatgcaggagttctacttctgtcgttaggttgcgccggtgggcgtggccgcattgccagcaggaagagtagggagatcgatgtgaagctttttgcgtctctggagtgtgtctgaatctggatgtgttttttgggatgtgaatatgtgttgcttcggtgaataaactacgctttgttgtcaggaggttaattgtttgggatctcgattgtaattcagaatcggaaatcaatcttgatctcccaagtccaaattgtaaagttgaaatttcggccatgtgagctttactgttttgaatcctgatcgttttgaaaaagaata

SEQ ID NO: 30653 - DNA, 993 bp, Setaria italica
  Peptide Sequence Number=SeqID_96627
gcggcggcgtggcggccttctccgcgctcacgggcgagccgcgccaccgcttccgcgtcgcgcacggccgccagccaaggtccttcaccgccggcgcgctggccttcgacgacggcgaagggtgccgcgtcttcgcgagctgcaagggccggctcaacgagtacggcgtcgccgtctgggacgtgaacacgggcgagcaggccggcttcttctacgagccgcctggctgcgcgctgggagacgccgacaggctccagtggctcgacggcaccggcacgctcatggcggccacgatgttcccgcgtgccgactcgtccttcatcagcctgctcgacttccgggacaagagcgtcgtctggtcgtggtccgacgccggcacgcctgcgtcgctcgaggacaagcacgcggtgcacgccgtcgcgatggaggacggcaggtcggtgtgcgtgatcaaccagtaccacgacctgggcttcctcgacctccggaaaaatgcggccggcgtgcgctggaggtcgcggagcaagctgacggcgagcgggaagacgaagacgtggggcgaggagacctgctacccgaagctcgccactcacggcggccagctgttcgcgtcgacgggcgacgccatctcggtgttcagcgggcccgaccacgtgctgacgtcgacgctgcgcggcggcaacggcggcgccatctgcgacctctccatcggcggcgaccgcctcttcgccctccacagcgaggagaacgtgttcgacgtctgggagacgccgccgccggcgatcatctgactgtcacgtgattagtctcgttaccatcggatcactagaaaaggaattactgacacgggtttcgacagagaaaaaaacacacacactgtaacttgctcatcattgggagttgtggcaacactcgttctgtttctagaaaggaatatgaatgaaagtcagtggagcactgtcattcaccaattaaactaaactaaaacaaaaa

SEQ ID NO: 30654 - DNA, 475 bp, Setaria italica
  Peptide Sequence Number=SeqID_96628
tggctgggctctggagcggcggcatgtcggcgaggagctgcacctgcagcttggactccgctgccaagctgttgttgtggtcgtgatgaagcagcgccggagctgcagcgccggcaccgctcatgtagtagtagctggggtatccgccggccggatatccggcggcggcggcggcggcgtagcaggcgtgcctctgctgctggttgggcatgggcttctggaaggcgcggcagacgacccatccttcctcctgcgccggcgcgtgctcattgttctggaggcggtactcgtggatgatccagtcggtcttcctgccgttgggcgcgcggccgcggtagaagacgagcgtcttcctcatgcctatgacgccgacgccgccgagggatgacgacctggaggaggaggagctaagcacgggcttgtccctgccggtggccttccagaagccggcggcggtggcgcggttggtgcgggt

SEQ ID NO: 30655 - DNA, 1836 bp, Setaria italica
  Peptide Sequence Number=SeqID_96629
ggtaggtaggcggtcgcaggcgggtggctggctgcggcgcgcagcgggcgatccggggcaggatctcgggggcgcggatctgcgcgcgcggccggcgatggaggacgcagatgctgccgccgccgccgccgcggcggtggagaatggcgcggtggaagcggcggagggctacgtcgtcgtcacggcggcggctgacggggagcccgccggcgatcgggaggatctctccgccgtgcaagaggcggcggagggcggatctgaggccgccagcgcggcggtaccgctggccgaggatgcggcgccggcaacggccaaggcgccggccaagaaggctggatccggggacgccgccgtgccgcggaaggggaagctgcccaacggcagggtgcccgccgccgcggccaaggggaagaagcccggggtcctctcgcagagtgcctcgttcccggcgcgggggccgagcggcggcgccaagaaggccgcggccgcagcggcggtggctaccacgcccaagcaagccaaggctgccgtggccaacggatcagaggcggcgtcaggacgggcagcggagaagaaggcgaattcggcacgaacgcctgttgtcgctcgccgggcgatgcccgtcaagtctggatcagtggatgcggccgcgccaaatgatgcaactcctgcagtccaagagtcacatgagaacaccgccaaaccattgaaacaagtgcagccaggaaaaacagaggacgatgtgcgctccaccacatcaagtaccaatactccccgtgcagcagctcgcaagattgccgccgctgccttcagtttcagattggagcagcgtgctgagaagcgaaaggagttcttccaaaagcttgaagaaaaaatccatgcaaaggagcttgaacaaacaaatttgcaggaaaaatctaaggagagtcaagaagctgagatcaaactgctgaggaagagcctgacatttaaagcgacacctatgccaagcttttacaaggagcagccacctaaagttgagctgaaaaagattcccccaacacgtgcgaggtcaccaaagcttgggcggcacaagccaaccaattctgctactgctgcttctgcagatggttctgtatcatgtgagagtccacggagcactgcaaattctgccagggtaaatgaagttgcggaaaacaacaaacctcgggctcctgctagaaaacctgtccagagatcagtcacaaaaactacatcccaagtgtctgggactgcaaaggctgaaccaagacctatggttacaaaaccaaaaacctcaaactcgaaatctaaggtttcaagggcaaaggctgcgcaagtgcaagacaacccagttgaagtcccccctacacaaccttctgctccagaagagctcactgttgaacatggcgttggagaagcaacaggacctgatctggctgccccattggtcgcttcgaatgaagtcccagtccatggttgatcgggtcgtgcattttgcctatttatttccttcttgcagttctgtgaatagtcagggtgtgtgcttcattgaaagttgaatctctcaaagtgtcgagtcatggggttatcgtttcctgagtagacatccatttttttcagcttgtcattgagcatgccatgtatattgcttgatattttgttcatgtttacatttcccaatcttgtgtatatttgatttgtatgtcgttggatatcctaggattgttgcaatacattaatgcaacttgtagattcattttgtggtatgaggtcgtattacttggaattgtttgcccttttttctgtaataattttgttggcctcttgttggttttt

SEQ ID NO: 30656 - DNA, 441 bp, Setaria italica
  Peptide Sequence Number=SeqID_96630
tagaactacaagtgtgagtagtaacatttcagtatgcaagggttttttttttttggaaaccacattggtaacaaacaatcaaaatcacaaaactagatggttgagccaacgggcttacaacctatgtaatcagagccacattttcaggaatgttctagtaaagaaatgctatataattcgtacattcaatcaagaggatatgtttggctcatgggcaatgagttaacaaatgtagcagcagagcatgctggagaacaccctcgaaaaatattcacaacttgagcttcttcgggtagaatggagccgaacaattgcctgaattaattgttgcagtgagctagttcattggtgatagaaattgcagcaacaacagtaaacattttcttaggaaaaagaagtctgattcttatggttttattaaccagcagcttcactctggct

SEQ ID NO: 30657 - DNA, 369 bp, Setaria italica
  misc_feature (38)..(38): n is a, c, g, or t
  misc_feature (360)..(360): n is a, c, g, or t
  misc_feature (364)..(364): n is a, c, g, or t
  Peptide Sequence Number=SeqID_96631
ccggcaccgatggcgtcgacatggtagctcgtgccatnttcccctgccatcatctcccttaggccagcgaggacggtggtggggatcgccggcatattggccccggagactagcttgcgggagaaactggagtagctgagcccgtagccgaacttgtagacggtgttgccctggtagaagcggtagctccggccggggtagcctgtggccgggtcggctcgcatccgcatgtctgtcatggggatcttggtgaactcctccgggtaccacgtcaccggcagcctcccgctggggttgtggtcgccgaagaggattctggcaatggcgagcccgccggcctggccggggtagcctgcccanaagnttgca

SEQ ID NO: 30658 - DNA, 466 bp, Setaria italica
  Peptide Sequence Number=SeqID_96632
aaactgctactgtagccaaaaaggttcacggttctaacttttcccaacacgtatcaccaaaagaagacattatgatcaggcccggtcgtgctttgttactgtcgtttcaactggcatttccgaactcatggtcaggacatccctgttgatacgttcttctgtgtcacaaattcaacatccctgttgaactcggctgcaacctaaaactagcagctgcataagaaaataatgcttagtacagcaagaggagacagtccaaactgcttgaaagacccaacttgcatcttttccgcatttggggttcttcaatcaactaagatggttttgttttaagatttagagatggctccttattgccggatcaatcattgatctaacctttacttatcaaatattatcatggtggtgaagatcaatatacctgcacacaccaggtgtggtttaaaatgtcttttggcgagacgct

SEQ ID NO: 30659 - DNA, 1515 bp, Setaria italica
  Peptide Sequence Number=SeqID_96633
ataggctatccatcttttttacagagtactactagtggtaatctagcgttaaaacaggcgaagttaacgagcaacactggaacttctgcaggttcacaaccagcaaactgctactgtgccaaaaaggttcacggttctaacttttcccaacacgtatcaccaaaagaagacattatgatcaggccccggtgtgctttgttactgtcgtttcaactggcatttccgaactcatggtcaggacatccctgttgatacgttcttctgtgtcacaaattcaacatccctgttgaactcggctgcaacctaaaactagcagctgcacacaccaggtgtggtttaaaatgtcttttggcgagacgctcatttgcttccaggaaggatgtcatacaggcaatgttctcagcaactgaatagcactagtccagtgtggagcttcggcaagaataatccgcttcaaaagaggcaccgctccagcagcaattattgctgggtgattttctggatccatgctcagattatacaagatagctaatgtagcttccaatgcatccccgtcaccctcttcaagcattttcaccagtggaaatatacccccagtatcagccaatgcccttgtatattccagcacaccacttgatattatcttgtttagctctatgacggcacttcttttattttcaaaagaaaatgaggtcatcattcgctcaactagccttggaatagtctgataaatagttatctccatatctatactactcacaccatgattgcctgataagccagcccttgattctagcttaacaaggcatgctgcaagccaatcctttgactgaagcggaaaactggatttgagcattcttcttagcagggaagtaaatttctcagtatttatgctgcggacgaaaagatcaaagttcaataactttgtgagtaacctcacagctgcagacactgcctgactgacttcttcagtggctacactagaacggttatcaaagtcttcagaatcagctctggtcccatgaataaccccaatttccagaatagtttcgattacagaaccagtgcaagtagcagtcattgaagtggcatgttgctccgaagctgctaaatgctccagtacacaacaaacttttgcttgcagacttggggacgcttccttcagaacttttgttaagcgtgaaatagcatcaaaatccaagatcatctcactggccatctcttggtttacaaatgtatgggaaattccactgtttccactagctgtatcaccttgaatattcctctcagcactcattgcattctcacgagcatagctctccggcgcagcaaccatactaatccccatgtcaaacattcgcgaaagtacagatattatcttctcaagttgttttactggggtatgtggatccttcactgtatttacgagcagttcaagtccaccttctgctttgattttctgacagatggtggaactgacactttaatttttccaatgcataagcagcagtcttt

SEQ ID NO: 30660 - DNA, 1080 bp, Setaria italica
  Peptide Sequence Number=SeqID_96634
atccaacaagagcagacagtaatatagtccacaaaaccatatttattgtattccatctctcaagcttccttatcctggattgcatatcatcaagaacacttattcttgttagtaagtaaattttcttcgtctattaggtgaagatgaatctgaactgaagctcccttccctttgactggatgaactcaaccagctcctgcagccttgcagcttgctgattgtgaataccaacagaaacattatcatcagctggtaagctctccaaaatgatttgaagatagctctgcatagcagcaaggaaccatgaaactgaataaatacaggaaataagttatgtatatgcctatgcttctcatggattgactcaggactcccaagtcctaaccaaacctttgttgtgtatgaaccatccaagcttagtgcagaaccagcagaggaaactatgtctttatttgtccctttaattgtagatatggagttgccacaccttgtagatggtcaacttctattaaaatcttcaatggagtgaaaaatgcatcagaatatacttggtacttaaaccaatgtaatttgaacagatacaactgatcctgcttccatcataatatttcacataatgctatataaaaaggcctgcacggctcttgtctcgctgtattcttgtgataaggtgtgaatgaactccaccaacaactgcaatccacaatccagcaattccttatagcaggatgtaaagtatagacaccttcaaagattaccactccactttcctcagagacttgaagctccttgaaccctttctgctgaagttttcaaagtcaaagcaaggaacttccgccttatgactatttctgatttccataatggtttataatctctcacttgttcaggcttgtaataactttccaagcttacaacttcacagccaattatatttgccatcttctgagctaaacttgtctttcccgatccactaggaccaccaatcccaacaatcacaggataacctttgttctccaacaatgcctgaattgcttgaactgatagaagaagtaacatccagctagctcctcttccaga

SEQ ID NO: 30661 - DNA, 1876 bp, Setaria italica
  Peptide Sequence Number=SeqID_96635
caaagatgaatatgaaagaaggcacacagcaaaacattcagcatgagggttttccttctccagccgttatttcagacatttgggacggcgcgcagggtggccatcacctcacatgtctgaggtctgtatttacaattatggatggataacaaatgctgttatttgttttaggacttacacctaagctactttgtgccagtggtgtgcatgatttccgtcagttctgcaaacaccatgaattatatgtcctaccctatcagtaaaactgtcaaaggatctgtatcatcagcacagaaatatcatcacagcatttcgcaaaaagaccctttaggatcactgcctaaagcaaaatcaagcactgttcagttgaggtcaaccatatcacttaatcagtgacgtcttttttggtaaaatgaatatccaacaagagcagacagtaatatagtccacaaaaccatatttattgtattccatctctcaagcttccttatcctggattgcatatcatcaagaacactatctgtagaagaaatttctcgcataggtgaagatgaatctgaactgaagctccctccctgtgactggatgaactcaaccagctcctgcagccttgcagcttgctgattgtgaataccaacagaaacattatcatcagctggtaagctctccaaaatgatttgaagatagctctttgttgtgtatgaaccatccaagcttagtgcagaaccagcagaggaaactatgtctttatttgtccctttaatttgtagatatggagttgccacaccttgtagatggtcaacttctattaaaatctttccatcttggtaaatgacagctgaagcttcaatatatgcaacagcttggtaaccaagcttaagaagccctgcaacagtgctggcactgatatcaaaatcaacctttggctgaataataaaatttccttcccttataggctctcgtattaacaatgcaaatcttccttcacaaattctaacccggatacactcgccttccgtgagctgtccatttgatggtacgccaggaagccttaagtacacatcagtaaagttctggacagagctgcagactttagtagcatctagtaccttcaatatgtcttggtaggacacctgttttttacttttaacacaaaaagtgagctttcaggagagagcacgggatcaaaatcattttgaatcttaagatgagcatggacaagatgcggttcaatgtattgctgaaacagtggaaacacagtggtcatgatttcagtctgggaaatagaaaggcctgcacggctcttgtctcgctgtattcttgtgataaggtgtgaatgaactccaccaacctaatgcaaggggatatgttaacctcaaaacaaatatttatggtgaagtaggaaaaggatggaaacagactagaaatcattgaagatttgaaaagaaggatcttacaactgcaatccacaaatccagcaatttccttatagcaggatgtaaagtatagacaccttcaaagattaccactccacttcctcagagacttgaagctccttgaacccctttctgctgaagttttcaaagtcaaagcaaggaacttccgccttatgactatttctgatttccataatggtcttagtcagcaaagctatatccaatgagctataatcatcatacttataatctctcacttgttcaggcttgtaataactttccaagcttacaacttcacagccaattatatttgccatcttctgagctaaacttgtctttcccgatccactaggaccaccaatcccaacaatcacaggataacctttgttctccaacaatgcctgaattgctttgtaaacttagtaattaagtaaagtaaa

SEQ ID NO: 30662 - DNA, 1801 bp, Setaria italica
  Peptide Sequence Number=SeqID_96636
cggagcgcggcggggttgctgtgggaggccgggcggcggggggcggagatggagccgaggcggatctcggcgagcccgcgcccgtgcagtgggcggcgggtggtggcgaggaagaggccgcggcaggagtcggtcgtgagcagcgtgcggaagctgcagcggcgggagatcagttcccgccgcgaccgcgcctgcgccatgaccgccgcccaggagcgcttccgcaacataacgctgcaggaagagtttgacactcatgaccctaaggagaactgcttgctactcccttacttgaggaaaaggtcaaaaatcattgagattgttgcagcacgtgatatagtctttgctctttcacagtcaggagtatgtgctgcttttagtagagagacaaatcagagaatatgctttctgaatggaagtcctgatgaagttatccgcagtttattttacaacaagaataatgattcactcattactgtgtcagtgtatggttctgaaaatttcagtgctctgcgatgcagaacaactcgaatagagtacattcgacgtggacaaccagatgctggtttctctctttttgagactgagtccttgaaatggcctggatttgtggagtttgatgatgtcaatgggaaggttttgacttactctgctcaagacagcacttacaaggtgttcgatttgaaaaactacacattgctgtattcggtatctgataagaatgttcaagaaataaagatcagcccaggaataatgctattgatttatacaagaacaagcagctctgttcctctgaagattctttccattgaggatggtacagtcttgaagtccttcagccaccttctccatcgtaacaagaaggtggatttcattgaacagttcaatgaaaagcttctggtcaagcaggaaggagagaatcttcaaattcttgatgtaaggaactttcaattgacagaagtgagcaggactgagtttatgactccatctgccttcatttttctgtatgagctgcaacttttcttgactttccggaatcgatcagtagcagtttggaactttcgaggtgaactggtcacatcatttgaagatcacctgttgtggcaccctgactgcaacacaaacaacatatacataacaagtgatcaagatcttattatttcatactgcaaggctgattccactgattcatcttcagaagaaaatgctggctctataaacataagcagcatactgacggggaaatgcttggcaaaagtaaattccggaaacggaaattcgtgcaagcaaaagaaagcatggaagttccagaatacagtctcagaggcccttgaggacatcacagctctgtactatgatgaagagcgtgatgagatctacactggcaaccggcatggccttgtccatgtgtggtcgaactgaaagctgaaaccacggctttcacctacaccatggtgatcttcacctgtatgtgtattaacagctagtaccccatgtggtggggggctacgaagaggacccccagcctccggggccaaggtacctgtgagatgcttcattttttgaggcgattcgtatttatccctgcctgccaatagttctccatccccgagatttgttgtagaattgacattcgtcatgtgttttcaccgtaggctgtagcttttggaaatgttgattatgtctctcgactcagtctcagagtgggttcaagtgtaacggatctactttgctcagctgctcgtaatgaaatttattcgttgatgagttctcattccgttagaaaaaaagaaaaaaaaaa

SEQ ID NO: 30663 - DNA, 419 bp, Setaria italica
  Peptide Sequence Number=SeqID_96637
aaatatggatgattcatgtacttcacaaactcattatccataaaccaaggaaaatcaattgcgctgtagaaccactcatatgtacaccatctgcgaagaaattcagatgacaaacagtgcagtaattttcttgcctgaaaatagtcagatttaggactccatgcgggcactaaatgtttctgtaacattaatgaactatggcatacactctacctctacattatctgaacctttattgcacatcacatacttcttttttctatgcattttgtttttcattttccttctccttgacatacttatttcagggttgatttcccttggtacagtggggtacacttcacagaaaatatttgcagttgattccggtaaatcctctaatcctcttgcagagtcagaatttgaggaaccctcagagt

SEQ ID NO: 30664 - DNA, 417 bp, Setaria italica
  Peptide Sequence Number=SeqID_96638
actcggatctagccaaccgtgaaatatgcctcaaatatggatgattcatgtacttcacaaactcattatccataaaccaaggaaaatcaattgcgctgtagaaccactcatatgtacaccatctctacattatctgaacctttattgcacatcacatagaagtatgtgatgtgcattttgtttttcattttccttctccttgacatacttatttcagggttgatttcccttggtacagtggggtacacttcacagaaaatatttgcagttgattccggtaaatcctctaatcctcttgcagagtcagaatttgaggaaccctcagtgatatcaatagcatgctattgcttcagcgggcaccttggtatgccttttccgcttggtcttggaagcactgcattcagtaattggcttccc

SEQ ID NO: 30665 - DNA, 1088 bp, Setaria italica
  Peptide Sequence Number=SeqID_96639
gtgagtcggcaaggcgcttgattgcaagaaccgtggcagtgcagttcataatcaggtttgatggaagctgggaatcacaagtaacagccccaagatcagggcttatacaattagttgcttgattaactgcgcctgctccttcatcttgagaactgttacctccagatgttgcctgcataacttcgtctaccatctccctagcttgtgattgcatgcttcggacgaatgcagaacagtacgactctaattgatcgtaatgatcatcattgttgtttgggaaatctgtagattgtacaataccatcagaagtactctctttttgtgtcctttcactgtctacagagtattcgacctcaagctgttcatctgatgtaatgtccacactaataggcagttcaggtatagaaacttcattaatggtatgatctctgttaccacttggtgtaaccttgaaacgtgctccatctccagtatgttgtgaacatcatgtgactccaatgtgctcctgacattatcaggaagattatctagccaattcacaggcatacaatcaacgtcctgtactagatcaagaccaagttcagggttatcaaactgaaccttgcagcaatcctgatccaccatcaccactttaccatcacaaagttccctagaacttgggtggcgaacaatgacctgctgaccaattgaaaatggccgagctacgtctgctggtagagaatctagcgaaccatcacttagttgagcatagtatgtcctaacttctttgcgataatcctcgagttgttttctttccatcaccagaaaattatcagaaaagcgccggggcttgccacgatagcttcgtattatgctccactcggatctagccaaccgtgaaatatgcctcaaatatggatgattcatgtacttcacaaactcattatccataaaccaaggaaaatcaattgcgctgtagaaccactcatatgtacaccatctgcgaagaaattcagatgacaaacagtgcagtaattttcttgcctctacattatctgaacctttattgcacatcacatactttcttttttcatgctatttttgttttt

SEQ ID NO: 30666 - DNA, 278 bp, Setaria italica
  Peptide Sequence Number=SeqID_96640
acgaacaggacgcaggaatctatcttagcttcctctgatggcaagatagtgatggctgacagatgtcttaacatgtctatgcatgcagggaagaagaattcagagacacactactcgcaattgttgcacatggatgctaactttagtatagttatctcggcatgcataaagccataagccagtgaattatggaaaagtctatcctttgatctctctaaaggaaaataaaaagaaaggtttatccaagaatggagaaatgatgcatcttttctttttta

SEQ ID NO: 30667 - DNA, 258 bp, Setaria italica
  Peptide Sequence Number=SeqID_96641
ggcgcgcgagaacacgaagggcgcgcccgtggcgaggtcgtagcagggaacgaggagcggggccacggtgtccctgagcgtcgcgtcgccgaatacgcgccggaacacctgctcgccgctccgggagcggcggaacagcttcgcccaccgcccgcgcctgccgccccagtccttttttccaacactgccggccacgaacgcgagcgcctcctgggccgagtaccgcggccgcccatcggggcccctcaggaacagcat

SEQ ID NO: 30668 - DNA, 1454 bp, Setaria italica
  misc_feature (29)..(29): n is a, c, g, or t
  Peptide Sequence Number=SeqID_96642
caatcaagaccacttcattctgaactccncccgtgccttgtccggagcccttgctaagtctcttgatggctacttccttggtaccatccaagaatcccttgtaaactttgccaaaacctcccttgccaagcatatttgaatcagagaaattgtccgttgccacaacgaggtctttgaagctaatataagggagttctacattgttgtcgccatcttcatcagtagaccttacgtattctagcattattctctttcgggcttccttcttgtgctgtttgcctgctctgtatttgcatctccaaacaagggctgcgcatgagagtagcagcacacatgctataaccgggggtaaaatcttttctatattgctcttatttcgaacatgagaccggccagcaagccgaaggtacaagtcagaaccaaagataccaactttccccgtgtcgatgagatccccagtccaaaccaggcacctcgatgtggaggccaaagttccagcactgctcatgctgacataagcgtacgccgtgcaagagcagttcttcctgcattccgccgcgcactggtcggagcttgtgttctcgatatgcaagaacttgccgggaaccttcatcccaggcaaaggcacgaaacgatccttcgttccacatcccagtgcctcgtttctccggcatcctctagacatgtcaaggccgtcgatgggttcgaacccgtcgaggcactggcaagctgggacagccatcgtgttgtcgcagtagccgaacgagccacacgacgcgtagaggtcacaactagagctggggcgctcgaaaccggctgcccacgatgatgtgctgttgttccaggcccggaccctgaccttgccggtgtactcgagcaaaaagcgcgtgtacgatgagccgtcggggaccgtgtacatgtaggacaactcgtcccctgtagccgtcctctggtacacgatggaggaagaggtggtgccgccgcccccgaacaacgaggtgtcgccgaaaaaattgatgcgcaagtaggtccgggtcccataccagacgaagaactgaaggtttgagctgggatcgatgctagcggagaaggccccggtggatgggtcagcagggcccttccaagcaatgaagcgcgtcgccacatgtcccttgtagctgagcaaaaccttcatcgttgggagcattgtgtccgtcgggtgatcgaagctttgccacatgtccgtgccgttcgccgaccggaggatgaagtttccagagccgagtagcacggcgacagctccagcacctccggtggtggcggtggcggtgctgctccccctcgccgtcgtccatagggtgcggccctcgtcgtcggacagggctagctcctggttgtcggtgatggcgagcttcgctgacggagtggtgattgggctgtcacgattggcgacccacacaacggtgtgattgggg

SEQ ID NO: 30669 - DNA, 531 bp, Setaria italica
  Peptide Sequence Number=SeqID_96643
cgaagaaatatacgccttcgtgatgacgaggttgagatcgacaaggacttggactgcctccagtaaaatgccatgcttcttgaccctatcaacccggatgacggttgcgttgttgcacgagtcattgtctatcacaactctcggtgggttcatcctccggaccaacttggcgtactcgtcgtcgtcctcctcctccgccaccatctccacgcacctaaccatggccgcagagcagaacacgccgcgcgcctcccttgatagagtcgataccctgaccaccgcgaggcttccaagccaaccacccgctttatctgcaggtgaaggcgaatagccgaggacttcgagtcgtagggaagaagagacctcgcgagaggaggagggggcagcgggcggaaaggaaacgccgcgccgtttccattaacagcggcgcggggggaggccggcggccgaggagaggagaggacagagcgcgagggacacggcgcgggagtaaaggcagtctgccgccaagttgcctttgggggagtgacc

SEQ ID NO: 30670 - DNA, 536 bp, Setaria italica
  Peptide Sequence Number=SeqID_96644
tgatgaaccaaatcttttcttactgagacttccaagcatcggtcacgctcaccatttccatcttgcctcttcttcgccggcgcccgcccccgcatcgccgaacctcgcccgctttatttctttccatcgaagcacggcggcagaccccctcgtagtcgcagactcgcagtcgccattcgtcgccgtagtcctcctcctcctcctccggccccattctactgattcgattaccgcggggtggagaatcagtccagacgttggagtgagcgagtccttttcctgtaaggagcgagcacttcctggtatggcggggttcgggatggagagtcggttccaaggtgcagagatggggtcggagctgcctccggggcttctcttctcatgcaattccgtcccagctagagaatgtcggattcataggactcgggaatatgggatcccatatggcaaggaaccttattacagctggatataaagtgactgttcatgatataaatgaaaattcgatgaagaaattctcagacgatggaatcccc

SEQ ID NO: 30671 - DNA, 1217 bp, Setaria italica
  Peptide Sequence Number=SeqID_96645
ccaaaagggcaattagaagacggacagtagcccaagctcttgttaatcaaagctgggtggcgacatcaaaggcacacttacagttcaggttttattggaatatctccagatttgggaccatgttgagggagttgtcctacagcaagatgttcagatcagctcagatggaaacacacacagaatggtgtatacagcagtaagtcggcctatgctgccttctttgttggaaccattaaatttgctccctagaggagaatttagaagagtcgggcaccccttcgttgcaaattcttcatttggttagccatcaacaatagatgttggacaacagaccatcttgccaaacgaggattgcctcaccctgaggtctgtcctttttgtgatcaagaggaggaaaccatccagcatctgttagttggctgtgtatttacaaggcagatttggaccttgatcctccaaccctacaactgacagccctgataccctcaccttctgaagctcgtttttcttgtaggtggaggcattgcgctcaatacctaaggagataaggaaagggcttaactcactaattatcctggtttcctgggaagtttggaaacacaggaattcatgtgtttttgagaatgctaggccaagcacctctttgctgctccagacagtggctgatgagagtagcgtttggggcatggctggggcaaaaaaaaaacctccaggaactcctagtgaggtcgctggcccaatcagtctaggtcagggggtctttggtcgaggtcatgcttggtgttgtggcgtgcctgtaagcttcgctgtgtaggtgtgtgggggtgccctcagtgcttgggttttggtccttaaccggactcgttgtactctctttcctctcttaatgaaatgacacgtagctctcctacgtcgttcgagaaggaaaaaaaacctagagcttatcagattcaactgggttcatggattgcatccttctgcaggctaaagatttggatttggccatggcctctgcatctggagtcggcttcaaatgtcccttgggctctgaggcacttgaaatttaccgaaagctcagcaaggatggctgcgaactcaaggacttctcatgcgcattccgccattactatgctggcaaggatgaagagtgatcttgtagctgctctagcaattgtgccgcatgttcaccaaatggaataaaaacaaattaaagttat

SEQ ID NO: 30672 - DNA, 718 bp, Setaria italica
  misc_feature (1)..(1): n is a, c, g, or t
  misc_feature (685)..(718): n is a, c, g, or t
  Peptide Sequence Number=SeqID_96646
ntcaatgggaaaagggcaatctactgcggtggggctggaaatggctcggctgcaaagatctgtaacaacatggcaatggcgatcagcatgctcggggtctcggaggcctttgctcttggtcagaatcttggcatcaaagcaagtactcttacagacattttcaattgctcaagtgctcgctgctggagtagtgacacatataacccagttcctggagttatggagggtgtgccatcatcaaggaattatgacggtggtttcacctccaaattgatggctaaagatttggatttggccatggcctctgcatctggagtcggcttcaaatgtcccttgggctctgaggcacttgaaatttaccgaaagctcagcaaggatggctgcgaactcaaggacttctcatgcgcattccgccattactatgctggcaaggatgaagagtgatcttgtagctgctctagcaattgtgccgcatgttcaccaaatggataaaacaaataaagttatcggaactgttccggtgtaaactgtgtggtgttgtactgagacatggacacatggtgagatgatcacctttgtaaactgttgttggtttgctctcggcaatcggcaatagactgttccgagacttcttttaacaaagatccaataaacggccagtctcaagtcaaaatactaaaaaaannnnnnnnnnnnnnnnnnnnnnnnnnnnnnnnnn

SEQ ID NO: 30673 - DNA, 1281 bp, Setaria italica
  Peptide Sequence Number=SeqID_96647
tttttccctcacttcatccggtctgcgacagcaatgttggttttcatgagttgctggtgcttttcagaatgtcggattcataggactcgggaatatgggatcccatatggcaaggaaccttattacagctggatataaagtgactgttcatgatataaatgaaaattcgatgaagaaattctcagacgatggaatccccacaaagcagtctccacttgaagtttcagagtcgagtgatgtcgtgattaccatgcttccttcctcttcccatgttctagaggtatacaatggaactaatggcttgcttggtgctggtagccgccttggaccatggttatacatagattcatctacagttgatccgcaaacatcaagaaagatatcggcagccatctcaagatgccatttaaaagaaataaaggctacgctgaaaaccctatgattctggatgctccggtgtctggaggtgttcctgctgcagaagctgggaagctaactttcatggtgggtggtctagaggaagcatatttagcagccaagccccttcttctctcaatggggaaaagggcaatctactgcggtggggctggaaatggctcggctgcaaagatctgtaacaacatggcaatggcgatcagcatgctcggggtctcggaggcctttgctcttggtcagaatcttggcatcaaagcaagtactcttacagacattttcaattgctcaagtgctcgctgctggagtagtgacacatataacccagttcctggagttatggagggtgtgccatcatcaaggaattatgacggtggtttcacctccaaattgatggctaaagatttggatttggccatggcctctgcatctgggtttcacctccaaattgatggtattgtgacaataaattccctgcttgatcgaaaccttctgtagaataccaagtacatgcttaatagttggttcacctaaagacaagctggtgtgcctgatgtcaattgcttgcctactactaattcttattcatgtcttgctctgataaatgctgcttcaaaggtttccctcagaaaccctttcaagaaaatttcaagaaaagaagaaataagtttcccttacaaaaaaactaagagctctatgctgccttctttgttggaaccattaaatttgctccctagaggaggatttggaagagttgggcaccccttcgttcaaattcttcatttggttagtcatcaacaatagatgttggactgcagaccgtcttgccaaacgaggattgcctcaccc

SEQ ID NO: 30674 - DNA, 443 bp, Setaria italica
  Peptide Sequence Number=SeqID_96648
ttttttttttttttaagtaactaattttcttacttgtcttaaatttttaaggggtattctaaataaccaaaacaaatagtaaaacaaaataccaaacaacaaagaaattaaataaggacgcctaaggcacgccgctagcacacaaactttaactacacacactcctctctcggacaaaggtgttacaaaaccgtagggtaggtacaactagtgtcgcgcagctacagcgaatgcagttagactctcctgcctgattatagcccaattaaactgcctgatatagcccaattaaacctagtgcgagatctgcaggcacaccttttacaagtcaggaacgaatgaacccatctatcttccaccgcgatgtcagcagagaactccactcccggtcagtgtgcaactctgactggacgtttcaggttcaggatccagaggcggtcgtc

SEQ ID NO: 30675 - DNA, 257 bp, Setaria italica
  Peptide Sequence Number=SeqID_96649
gcttgttggggaaccaccaatccaccatgggaagcaaagctggactccactaatctagctctctggtcgttagatggtgtctgctagatagtcattgtctttgtcataagctcctggggggaatggataaattgagcattgccagaagcatgggtccaacactccattccccagagacgctaatccttacactggactgaattggataattatactccaaataaaataatgtttagaatgttccttccacacaacgg

SEQ ID NO: 30676 - DNA, 703 bp, Setaria italica
  Peptide Sequence Number=SeqID_96650
tcgtcgtcgtcctccgctcggctggactggcggtttgatttccgcggctttaccggtttaccatcctcgatctcccatttgttttttgattaaaaaccattgggtttgggatggcatcacctggacaaatgatggcgagcaatctgttacgcaccgaaggctttcctggaaatatgggaaaaaaatctggtttaattgctgcaagaagtcttggatcaaggagattgcgaatgactcgacactgctttcatcaacagcatctttgttggccacgtgcactgagagttgcggttcataatatccgattgtcgtcatgtcctggtgccgtggtatcgaaggggtttgatagtccattagttgagaattctgatactgcattggatgttggaattattcatctctaccgtataccatttctccaagaaagtgaaaccatggagctgcttaggaaagtgaaggcgaaggtttctgctaatattgttgatataatgaccgagcagtgcttcaacgttcaattggacaatccacttactcctgagaagctttcaactcttcactggctcttagcagaaacttatgaacctgagaaattgcaaacgaggagctttctggaggaggaagtttctggaagttcttgtactgtcattgttgaggttggtcccagaatggcattttcaacagcattctcttccaacctaattgt

SEQ ID NO: 30677 - DNA, 259 bp, Setaria italica
  Peptide Sequence Number=SeqID_96651
tggcatgcagattgagaagaccaaacccgtgtttccagctgtgcttgccatcaacttctgagcccctaacctcaccggctcgcacatcaggtccaagtttccccagaagttgatcttacagttcatcttgtggatcacactttggttgtccaatagctcattgatcttttcctccattaactccatcaataactgcacctcaattgggtctcttttgaagttgtcaatgctaaatgcatagaccgtgatatacttcacg

SEQ ID NO: 30678 - DNA, 635 bp, Setaria italica
  Peptide Sequence Number=SeqID_96652
agaacgaaagaaaatcaaaggtcggggttggcgcgactgggagcatttcagatgagctctggacgtggatccaccagctctcggtcgccatgcactcctcaatccattggagtacggaggtcgcctttgtggaccgtctgaacaggccctcctgctgcttcatggaatctagctccctgatcacaatccttggtacgaacaggtgagttccttttatgccttttaacagcataatagacttcctagattcatcatcaagaaggctgtcggtgttagccaccatggtccaggatttcatccgttgtccagccctacctgattcttgcttatgaagtgcaagattgttaagtttatcttccaacttgatcgccaagtcaccagcagcgatgtcagctgtcctaggaacaacacagttacaatcaagcgagctaactggccccaaaggagaattcgaaagaagggtctggaaggggagcctatcagcaacccttttctttgtgattgcactttctactcgtgcacggttttcagacatatcccttgttttccgagctgcagaagattgtggtgtcatgttctccttgtcagagcagaatgcttcctggtcttgatctgcatcaactatgagattcttg

SEQ ID NO: 30679 - DNA, 1109 bp, Setaria italica
  Peptide Sequence Number=SeqID_96653
aaaggaaaggaaaggaaagaaccaaagtaagaccgaccgaataccaaataggacaaaatccctttgtagtagcttttgttgtgttgcccacagcatctaggacgtctgtgatttccctcacgctttcaggctgttggctcatctcaacaataccaccagcattgtcagctataggaccaaacatgtccatagtgagaacataccctgctgtgctaagcattcccattgttgctacggctgtcccaaaaagccaccagttgggttgccagagtcgtccaccaagccagaggtctgccccagccagtatgctgatataatggctacacttatcactagaactggtagagctgttgattccattcccaaacttactccagcaataatattagttccaatgtcctgtagaacttgaaagagctaaaaggcggactggctcgtgtttataatctgtgtaatactttgaaatccaaacaaaagcatatgccgtaatgatccccaccaagccacacagcgcaaaatttagccatgctgaaggtgcttgttccgtatacaggagccaacgagtagactggaaatttaacacagaatgattataaagcaacttctggccaaaaaacaaggttcagttttacttggtataaagtgaagacacatgacacaaacacagcctctgttcactgtgagttggaagacttacataaaagcgttatcccgacacaaataaactgcagacttataacaaaccttaacaagaactgttcatggtttataatatgtttctgttatcagtccaaatatcttcggattacatcctatggctatggatttgattataataactgctagattgaggtcatcttctccccttttggataatttctggaatctcttcttccaataacatttaaccataattgctgtttcagcgactcattcaaagttctccttatattatattcgatcatgatgagaagcctatatgaaagatattcaacaatgctgtagaccacttttgcatattgcacttacaaagtgatttctgcacccagcctcgggaacaaatggagtgatggcataacagtgtaatactacaaatactgcaagcagca

SEQ ID NO: 30680 - DNA, 3186 bp, Setaria italica
  misc_feature (3180)..(3180): n is a, c, g, or t
  Peptide Sequence Number=SeqID_96654
ctgatctcgttggaaaagttgagcagggaataccagaagatgatcctcgcaatcctgctgtcattgctgacttggttggtgacaatgttggagattgtgctgcgcgaggcgctgcaagtaacttttcacaacacattcgggcgacattttcagttatctccgtcacaaatacatgtattctctgacgtttgcaccatccgtacaatatccgtgaaatgtcgggagggcggcactggttctttctctgggtacaacatttagtgatgctaaatgagtccggtaaatacatctcagagggtaagcttggtgagtgagtgattggttaatcacaaaaatatcggggccatgaccaatgtgattgttgcgagcatcttgataagaacatggattgaaggccccgctgtgtctttgaatgggtccccaaccgtatcaccagtaaccgcagccttgtgagactcactgcctttgccaccaagagcaccagtctcaatgtacttcttagcattatcccaggcgcccccagcagtgttcaagaagagtgccatgagaataccagaaactgttgcgaacataagcattgaggccacaactttagctccaagaagaggttggccagtgtagtaacccaaaatccggaagataacgccaacggccatgggtgatataattgctaaagccccaggtcttatcatttctctcaaggatgcagatgccacaattgcaacacaacgtccataatcaggcttctctttgtagtccataataccaggcctctcaataaattgtctcctgacctcattaacaacttcctgtgcagttttgccaactgctgaacaagcccatgcactgaacaggaatataagcattgagcctaataaaccaccaacaaaaatctctgggactgctatgtcaacctctttgaatggcaattgagcaaaagaagctacttcatccatatacgcactgaacaggaggaaggaagccagtgccgccgatccaatggcaaatccctttgtagtagcttttgttgtgttgcccacagcatctaggacgtctgtgatttccctcacgctttcaggctgttggctcatctcaacaataccaccagcattgtcagctataggaccaaacatgtccatagtgagaacataccctgctgtgctaagcattcccattgttgctacggctgtcccaaaaagaccaccagttgggttgccagagtcgtccaccaagccagaggtctgccccagccagtatgctgatataatggctacacttatcactagaactggtagagctgttgattccattcccaaacttactccagcaataatattagttccatgtcctgtagaacttgaaagagctaaaaggcggactggctcgtgtttataatctgtgtaatactttgaaatccaaacaaaagcatatgccgtaatgatccccaccaagccacacagcgcaaaatttagccatgctgaaggtgcttgttccgtatacaggagccaacgagtagacactccaaatgtaagaacagcaagcatgatagtgatagaatagcctttttgcataattgacatgggatcttcgataggggagatgagtccagaatcacgtgtccctctgattgagagaattccaacagatgaaaccaccaaatcaaatgaatggacaacaagaggaaacagaataaagccagagggatcctcaattttgcagcgctgtgccattgttcctccaagtatcattgcactgataatttcagctgctatgctctcaaaaagatcagcgcctcgcgcagcacaatctccaacattgtcaccaaccaagtcagcaatgacagcaggattgcgaggatcatcttctggtattccctgctcaacttttccaacgagatcagctccaacatcagcagctttggtgtatattccaccacccaactgagcaaaaagggcaacaaaagaggcaccaaatccatatcccacaaggagaagaggcaagtcggtaaccttcattgaaccaggtgaatctactccaagccaaacataaaatgttgagtatagtattgccacaccaaatacagccatgcaaacaaccacaatggctgagaaaccaccagcacggacagcaatctgcaatgcttccctcgcagagcgccgagcggcacttgaaactcgaacgtttgcacgtacagagacccacatcccaacgaagccagctattccagaacataaagctccaaggagaaacgaagcaactgtaatatatgcagatgttgtccttcctatgccagatgcctcctgctgcggggtggtagtgcgaaagagataaatgacaaggatgacaaagcccagaatacatgccattttagaaatagttccatattgtgtcctaaaaaatccttcagcgccatctcttatggcatcagatatctcagacatttctggaggtccttcatccttagcaagaacccactttgtgaggtagagagagaagaataaactgagagtacatatacagaacacaaagaccaaaattggcgatgtactggctcccacatatagaacaccactgaagaccaaaagagagagaataatcagagcacggggatttatcctcatcaacaaacggaagaccagtggtacagatgatttacttcggactgtagaaaaagttcttggtctttcctgatacgaccttccattttccatgtcctcttccatcatgatggaatacgagtttgccctccttgtaactggaaaaggaaactccccaccctggggtaggtcgctccctgatccctggcgctgaattttggatagtctacgtcagacacctcccaaaaatagtgagccttacaagtcaagcacatccagattttcttcagcctcagccacaaacttctctccaattgaaatgtttttttctgtcaaaatctttcacggcctggaggagtacgggtgcggcagcggctttgctgtggtcgggcgagcctggaggggggagtcagcctaccctggcggaggggcgtcgcccgagggtggaggagaggcgcgcggtcggcggctccctgcagcagtcccgcggtgcggcgtgctcggcggcgctagtttccagtcggccgacgcgaaccaggaggtgtggactcggtgcgggtgcagtcgactagaagaaaaccgnggtgga

SEQ ID NO: 30681 - DNA, 352 bp, Setaria italica
  Peptide Sequence Number=SeqID_96655
ctaaatttgcactaatataagtcagccttggtttggtaccatcgcctaagtctatcatctctaatgaatcggccgacgtgaacccgtgccctagcttcccatcttcttgggcgaactgatccatttaatctgagtcttcggagccgactgctcggatcggctgtagaccaaaatcggtcaccttcaggaaatcggtctcgcatactctgccggatatgcatctgacggtttcgcagctccactgctgcgtgtcggctgccgcaatgctgtatgcggaatcggcgttgaccacctcgatgttgtcgctgacccattttacaagatattgatgcattgttgacgggatgcagca

SEQ ID NO: 30682 - DNA, 176 bp, Setaria italica
  Peptide Sequence Number=SeqID_96656
taccgaacctcagcctgcgaggctttggcacgatcgaccgcgtcaaggcgaagctggagaaggcctgccctggagtggtgtcctgtgctgatatcctggctctggtagcaagggatgtcgttgtactgacgaaagggcctcattgggatgtcccaactgggcgtagagattgggga

SEQ ID NO: 30683 - DNA, 344 bp, Setaria italica
  Peptide Sequence Number=SeqID_96657
tcggaccccaccaacctacaggagatcttccaccggatgcgcaccgagggcctcaccgactacgccatcaagatgttcgacggattgtccaaggacgggctcacccacgaggctctcgcgctcttcgctgtcatcaaggacaagggcgccatgcccgacgtcgtcgcccataccgccgttctcgaggcctacgtcaacgccggccccgcgcactggcgcgacgccgtgcgcacctacgaccgcatgctcgcgtcgggcgtcaagcccaacgcatacacgctggccgtgctcgtcagggggctctcggccagcgaccggtgctcagaggccgggaggtacctggt

SEQ ID NO: 30684 - DNA, 490 bp, Setaria italica
  Peptide Sequence Number=SeqID_96658
gatggaactcgtgcccagccagttggtgacgccgttggcggcggccttgctgcccacgtgcaaccggtccttgaggtagttcaccaggttcgtcgacacggcgaagtaggccgtgtactggaagcagttgttcgcgaggatgaagatgcaggcccagaaaacccggcgatccctcttggacgtccggcgatcggcggcgccgcgcaaggcgttcgattccacggcctccacctccatggttttcagcggctcagctgagatacttccacaggtgcaaatcgagatggctcgctaatttgcctcgggccgaccgacgaccgagaatgcgcctgtttccagcctcgctcagccaacgttcttgatatttcagcccagcgcgcagctcctatccacgagtttcttttgctctgcaagcgatggaatgactggcggctggcgctgtgaagcaacttgagagtgagactgggactggtgcgagcgagcgcaatgg

SEQ ID NO: 30685 - DNA, 2258 bp, Setaria italica
  Peptide Sequence Number=SeqID_96659
aataagcttttggcaaagaatggagtctgttgagtatgcatgtgatattgatggtagtgcattttcttcttctcccgatgaccaacttgggagaagcaaatggaacttgaagagattctcacggttgcctaactccacactccgtcttctcagagcagcagttccaggaataacagatccaatgttgtatattggaatgctctttagtatgtttgcctggcatgtggaagaccattacttgtacagcattaactatcaccactgtggggcctcaaaacatggtatggtattccaggcagtgctgcttctgattttgagaaagtggtacgtgagcatgtatatgatcacgaaattttatcaggtgaaggtgaaaatgcagcatttgatgttcttttgggaaagactacaatcttccctccaaatattttgctgcatcatcatgttcctgtctatagagccgtacaaaaacctggagaatttgttgtaacatttccccgagcttatcattctggtttcagccatggtttcaattgtggtgaggcagtaaattttgctatgggtgaatggtttcctctgggagcagttgctagtcaacgttatgcacttctgaagaggataccagtattaccatatgaggagcttctttgtaaagaaacagcacttgttgctgatgagtttcccatgtctgatcatcaagatataacattaactggagatgcacatacacagagctgtatgaaggccccttttgtgcagttgatgcggttccaacaccgtgttcgttggttgcttgtgaaaatgggtgctcgcacgcactataaagcagacattgatgcaacagttctctgtgggatatgcaaacgtgactgttacgtagctcacattatgtgtaactgcagagctgatgcaatttgcctttgccatgaggatgaaattaggaagtgcccttgcagctgtgatcgtgttatatttgtgaggaaagacatctttgaattggaggcgctatcaaagaagtttgaggaggaagttggaatactggatgaagtaggaagccgaatgtctcaaagtgatggctctagcacacattcttacttgttcgacggcattgaccacaatgctaaatacttcccgtattgcaagatccaaatagatgcatcccctgaaattcataccttttcagagagagatgttcttggatatgatttgaataagccatatcctacagcatcaacaataacttttgcgcatggaccccacgactattctacacaaagtgatgagtgtactagttctaacccaagaaccttctctagctcatatcctgagaatggaacaattaatgcttatcctttatctatccctgatcaagcattctcatctgacaagttggcagcacaagatagtgatgattctgactatgaggtatttagagttaagagacggtctggcatagttctggagaaaagatgttcagaagatgtaacaacaaatttaactgagaatcaggttttgagacggttgaagaaagcccgttcagatggcagacaagagaagagggcaacagaagtatcctgtggtacaagaagtgacagtatgcgtattgaatcacattgtgttgactccgtttctggtaatagagaaagcctcatcaatggaaccaaattgaagatgatacatcagttagatgtaactattgtggaagatgatgttggtttcagccagaaatctaattattgcagttacctatctccatctgtagatcttgggccaaaacgcttgaaaattcgtggcccatccttccccagtacaatttctgaagtggaaatatcttacagattccaggaggacagtgatttggctagtcatcacactcaatgaggtatgctgctattggtgctaactgctaacaccacgtaagttaacatcaatcgtaacttctggaagatgaaggctcctttttcactggatggttcagatctgattctttctacaggcctccaatagaggcactgttatggttggattcatgattctactgccaggtgacctacgtggcatgggacatgaaaaagctataggcagacaatttttctgatcctccttagctgtacattttcacttatttccttttcttgtaggttttccactgtgaagaggttagtctacttttaacgatttctttcattctttttccacctcagatacacctgtacctagaatgcttaaatacatcgacatactaaatggatattgtacaa

SEQ ID NO: 30686 - DNA, 626 bp, Setaria italica
  Peptide Sequence Number=SeqID_96660
cgcacacacatctgccttcttccagctccagttcacctccgagctcagcagcagcccaccgagagtgagatggcgagcgtgaaggttttcgggtcaccgacctcggcggaggtggcccgcgtgctcatgtgcctgttcgagaaggacgtggaattccagctgatccgcgtggacgcctaccgcgggcccaagcgcatgccccagtacctgaagctccagccccatggcgaggcgctcaccttcgaggacgagaacaccaccctctccgagtcccgtgggatcctgcgccacatctcgcacaagtacgcgaagcaggggaacccggacctgatcggcacgggtgcgctggagcgcgcgtccatcgagcagtggctgcagacggaggcgcagagcttcgacgcgcccagcgccgagatggtctacagcctcgccctcctgccgcccaacctgcccaagcagcagaacgacaacggcagcggcttcaacaacggcagcggcagcggcttcaacaacagcggcagggagagggacgtggggaacgcgtccgccggcagcaagcagcgctccccggccgggtggccggcggcgaaccagaaccagaaccagcagcaggcgaagcatcagaa

SEQ ID NO: 30687 - DNA, 397 bp, Setaria italica
  Peptide Sequence Number=SeqID_96661
cactccactctctcccccctccctcccgcccgcccccgattcccaccgccgaacaaccgacgggtgccgccgctgctacctgctacgaacgcgcacgtaccaccaacctcgatcgaccgatagattgatcgatcctactgcctacgtgcactgctccgacgagccagcggtctcgccgtcccggccgggcactgcagccgccggccggatcggaggctgaccgacagtgcatgccaagttctgccgggtgggcacagcagtaacattctcgaggcacggagatgaggatcgcgaggaccggcgccacggcggcggggctgtggctccggccggggcggctcgcggaggttcttctcgccgtggtggtcctcttcgcgtcggcggcgctgtccatggc

SEQ ID NO: 30688 - DNA, 945 bp, Setaria italica
  Peptide Sequence Number=SeqID_96662
aaaccagttcccctcgaaatttgcagtctccatctcaagaacgccctgcgtatgacgcccgccgtagacgtacagtctcacgtcatgcgttcggcgctggggatttccacctgaccggccgtgccctcctcctcgtcgtcgctgctcctcccgtccaccttgccgctcccgtagcggctcgcgcacacgaggtacaccgcgaagtccgcgacggcgataatggcgagcaggaagtagaacctgtcgaggtggccctcgttcaggtctgccgggatccaccccgcccggccgcgcgtcgtggtgaccctggtcaccgcgctcacgatgacgtcgctgaagtagttgccgagcgacatggacatcatgcagagcgcgctcccgaaactcttgagcccgtcgggcatctggtcgttgaagaactcgagctgcccgacgtacatcatcacctccgacactccgatcagagagtactgcggcacctgccacatgatgtgcaggtcgctgctcatcgccgcggtggccccggccttcctgaagtgctcgaccgtcccggccgtggccatggcgagggcgcccacgaccaggccgaggcccatcctctgcagctcggtggggccggacgggcgcccagtgagccgcgccaggaacgggcagatggcgcggcggtacaggaagatggtggccgcgacggtgaggatgtcgaaggccgacatgctggagggcgggacggagaagccggcgaacggggtggtgcggcgcatcgcggcgccctgcacgacaaagagcgaggccatctgggtgaagacgacggagtagaggatggtgcagagccagatggggaggagccgcaggatgctcttgacctcctccacctgcgtcaccgtgcacagcttccaggggtcgcgcttgccgagcttggagtccgtgtccgcgcgcgccgcgcgg

SEQ ID NO: 30689 - DNA, 350 bp, Setaria italica
  Peptide Sequence Number=SeqID_96663
cgccgtgtccgaccgattgaggctgggccaggccgcccctatcgcaacacccccgtaacctagccgccgctcgcctcctctgagccgtccagacccttctcgctcgccggcgcaatggatgactcggagaacaacgccccctcgacgccggggtcccccgggttcagcaccgaccggctgccgcccaacaccaccaccagccgcggcgccaccgacccgtcgtcctactccgacgacgacggcgaggcggaggttgacccccacgtgctccccgaggacgacgaccccgccgccgccgcgccggccgacgaggaggacgaggagggggaggacctcttcaacgacaacta

SEQ ID NO: 30690 - DNA, 154 bp, Setaria italica
  Peptide Sequence Number=SeqID_96664
cgccggcagtctaccactatccaccagagttggacgagcacgaattcaaggagaggaagagagagcggttgagctcggacggagaaggcgcggctgtggctgtggctgtggctgtggagaggagtccgcgactggtggcgccgccgcctcgccg

SEQ ID NO: 30691 - DNA, 248 bp, Setaria italica
  Peptide Sequence Number=SeqID_96665
aactcaatcttaatgagattgagtgtgttcgtttgcttgttgatgctaacagagagtgggttttatacggccgagagcctttggaaatatatagacttgcagctggcctttggtacatggagagaagggatcttataacctctctgtacattctgttgcgatctgttgcactggatcaaggtcttgatgctgatctgatgtctgaaattgaagagcaaatgcaacctttatttaatgatggtctccgg

SEQ ID NO: 30692 - DNA, 534 bp, Setaria italica
  Peptide Sequence Number=SeqID_96666
atctcatcaggccagccttgttattgcaatttctgcctcagtctcttgttcgacttgcgccgctgtcattgctctatcttcaaattttctccggttcctatctttccagatattccatgctgtgtacatgagcacagctgctttgcgccttcgaatttgtttcggtaagttggtcgggttcttgcattgttccagcaatcttctgctgacaggtcctgtaccagcactcgaacgagattgtcagaccacactctaattcgttcccaaactttccttgcaaacgagcactgaagaatgaaatggctcaacgagacatgcatgtctgccaataacaaatgacaggtttccagacgatcgagtctttagagaactaaagcaagctgaatgtaatcttgagtgccaatcaaatgtcttctgcagttctgctcacaccgtcaatgttcaaacttaccaagaagtgagtgaaagcttaacggctgaaacgatctgaaatcgacttgggtatgaggctggttgtgcttgattgtttctcca

SEQ ID NO: 30693 - DNA, 669 bp, Setaria italica
  misc_feature (92)..(92): n is a, c, g, or t
  Peptide Sequence Number=SeqID_96667
ccgggtggtcgtacagcaccgtgggcgccggccgcgcgctgaggagccggtggtcgaagcatggcggcaggggcgcggcgtccccgccgccncgggcgatgtcgcccacgtctcgacgaagtgcgcggcgctcctggcgtcgacgacggagtggtgcagggcgaggccaagcacgacgccgccgcagcgcaggcgggtgagctgcgcgaacagcagcgggcacggcgggttcggagcgggggtgggcggcacgaacagcgcccgcatctcgtcgcacggcacgaactcgctgagcaggtcgtccagcgcggtgtccgccgaccgcgccgacacgaacaccgcgccctcgcccgtgcagtcgatctggacgcgcccggtggcggcgtcggcgccgaggcggccggcgagagggtagaacgcgacgagcgccctcgcgaggctgtcccggacggcgccggcctcgaagaactccggcctgccgttggcccggtagaagtagaccgtgggcgtgtacccgcgccgcgcggcgaggtcgaggttggacagccacacggcgcccgccggcgtctcctccgccgggacgaccagctccgtcgtcagccgctccaccgtggccatcgttgcgacggcggggttcgcggttcgccctagctagctgtgtcgtgccgg

SEQ ID NO: 30694 - DNA, 426 bp, Setaria italica
  Peptide Sequence Number=SeqID_96668
aaatcaaagatagtaatgaattgagggtccttccacagaaattgccatcccatctgaagaagttggttatcataaactgtgagaaggtgattagactaccggctgttccatgcctcactcacttagtcttgaagggcaacattgatgaagagaccttaagttgtctccattttccactcctcaggacattaaaagtttgtttcttgagaaaagcagaggaggtcaaacttgaaaacttgccaaagcttgagggactagctatcactggatgcaaacggctgttctctatagatggattgtgtagcgttgaatccctcggtattctgaatataaaagattgcccaaacttgcaacttcctttaaaaccactcccacagaaggttcaacaatctactgtcacaaattgtcctcaattgcaggaatggg

SEQ ID NO: 30695 - DNA, 691 bp, Setaria italica
  Peptide Sequence Number=SeqID_96669
ttgttcgttcgttcttagttacgtttcggttcgttaggttaggtttgtcgtttcccggtagtcgttcgtcgtcagtggacgaggccctggagacggcggcgcgagacggttagaaatcacctcttgcgctctcgatggcggccaccgcccaccaaaattgttgaagccaaggcagtaagctacgcccttgatcgtctccgcgacgtcggaggccgccgccgcagcttcctcgtcctcctcgtcgtcggaattgtcgcctccgtggaagcagttgcagtaccgcccgccgtggcctggcttctcggcgcccgcgccgacgccgtcctccaagaagcttcgaaccatgccgtccaggcacacggagctcggctccgcctcatccttctctcccgctgccgcagctgacggtagccgctccgctggcgagatccgcaggagttggcgatcgaacagccgcttcagcatcgacctcgccggtgccggcgcaggcgccgtggacggatcggtcggagcggccctcatatcgactcgaagaaatgaacggcgctggctgtatcagcaggggaagcgatcttgggccgcggcggtcgcctgaggcatggccgcgggctgcgacccttggatgaatgattcgatcggagcggttagggttttttggtcttttgggttcgattttttttggtgcgaattt

SEQ ID NO: 30696 - DNA, 424 bp, Setaria italica
  Peptide Sequence Number=SeqID_96670
gactacttccttcagaggatggagggcgaccaggccggcggggacctcaccgacatcgtccgcgccggcggggccatgccgggcagcgccgaggtgccgtccacggccgccgagtggcagctccagggggagccgacgatgctcttcccgccgccgccgtcgtcatcggacggctgcgccgggggtgccggcggcggcgccgacgtcttcggcgaccctttcgccggcctcggggacccgttcagcagcgactacgcatcgggcgccgacttcctggacgccatgcccgacgcgatggccaaggtcggcttcgacacggctgtcggcggcagcggaggagggggaggaggcggaggccaactgatggacatgagccggaagcctttcttgccgcgggggttgcagcagatgccggcggtcggcg

SEQ ID NO: 30697 - DNA, 1735 bp, Setaria italica
  misc_feature (1730)..(1730): n is a, c, g, or t
  Peptide Sequence Number=SeqID_96671
ctcatctgctcccccctccccgaccgacctcgcgcgagaggagaaagcccagcgcgagccacatggccggagcagcagccgccgccgtggcgtccgggatctcggcccggccgtccgccccaaggagggccctggccgggcaccgcgctcggccgtcggtggtgcgggccgcgatatccgtcgagaagggcgagaaggcgtacacggtgcagaagtccgaggagatcttcaacgccgccaaggagttgatgcccggaggcgttaattcgccagtccgtgccttcaaatctgttggtgggcagcctattgtttttgactctgtaaagggttctcgtatgtgggatgtggatgggaatgaatatattgattatgttggttcctggggtcctgcaatcattggtcatgcagatgataaggtgaatgctgcattgattgaaactctaaagaaaggaactagctttggtgctccatgtctgctggagaatgtattggctgagatggtcatcgctgccgtaccaagtgtcgaaatggtccgctttgtcaattcagggacagaagcctgcatgggagcactccgccttgtgcgtgcgttcactgggcgggagaagattatcaagtttgaaggctgctaccatggccatgctgattccttccttgtcaaagctggcagtggtgttgctacccttggtctcccagactcccctggagtccccaagggagccacctgtgagactttaacagcagcatacaatgatgctgaggcagtgaagaaattgttcgaggacaacaaaggggagattgctgccgttttccttgagccagttgttggcaatgctggcttcattccgccacagcctggttttctcaatgccctccgtgacttgaccaaacagaatggtgcactcctggtctttgatgaagtgatgaccggtttccgtttggcttatggtggggctcaagagtactttgggatcacccctgacgtgacaaccatgggtaaggttatcggtggtggtctccctgttggtgcttatggtgggaggagggaaatcatggagatggtcgccccagcagggccaatgtaccaggcaggaactctcagtggaaacccacttgccatgactgctggaattcacacgctcaagcgtctgatggagcccggcacttacgaatacttggacaagatcactggtgacctcgtccgtgggatactggatgccggtgccaaaacagggcacgaaatgtgtggaggacacatcagaggaatgtttggtgtattcttcactggcggaccagttcacaactttgcggacgccaagaagagtgacaccgagaagttcgggaggttctaccggggcatgctggaagagggcgtgtacctggcgccctcccagttcgaggcgggtttcaccagcctggcgcacacctcccaggatatcgagaaaaccatcgaggctgctgagaaggttctgaaacggatatagggttcagccacgcgctaggttccagcggattcgctacttcatcgtgatgtactttgagtttcacgcccctgagttttgtattgtgcagcagtagcagcagggtaccgtcttatgtagctcctctcctttctgaatttagcgtatcgtgtttttgcagtgataataaaaccgtggttgactattaccggttgctatagtgatgttcagatacaactgcttaaaaaaaaaaaggaaaaaaaaacaaangacac

SEQ ID NO: 30698 - DNA, 497 bp, Setaria italica
  Peptide Sequence Number=SeqID_96672
gcacgagcctctggcagatgacgcgcaggtcggtctccccggatcccaactgttcgtgtacaaaatcaaccacaccctgagatgtcatatataaccatacaccacaatttgctatgacaagaaactcgacatcatcagttatctccatagagtgaatatctggattgcatatcaccaattgttcttcaggaggcaaattcttgttctgcttgaatacaaaactaccaatcgctctggaggtggctaagattcctcgatatgccctgtagccaggccctcgtaatgcttccaccgcaacgtacttatccaattctaacgttcctcctgctctttgaattctccgtctttcaccccgattccttggtatgtgatcggtggatagctgaattgcctgaccattccttgaggctacacaacgacaacttccaacatttccaacagtcactcggctgcctctagcaacagctacagttgctgagcatcctaaatttgtggtg

SEQ ID NO: 30699 - DNA, 691 bp, Setaria italica
  Peptide Sequence Number=SeqID_96673
gttcagatgatcaaacatggcgacgaacagccgatccacaacatcgcacacctcggagtaatggtccctgagcgccatctcgacgtcgaggccgacgaactcgcagaggtggcggtgggtgtcggagctctcggccctgaacacgggtcccacctcgaagacgcgctcgaagccgccgcacaccgccatctgcttgtgcagctgcggcgactgcgccaggcacgccggctgcccgttgtagtccagcttgaacaccgccgcgccgccctcgctcgacccgccgatcagcttcggcgtgtggatgccaacgaacccttccgacagcagcacctgcctgaacacgttttcgacttggcattggacgcggaagatggcctggtttgcggcggtgcggaggtcgatcacccggtagtccagccgcttgtcctgcccgacatgaacaagctgctccccggcagctttggctcttgcgacatcttccttgctccgcgcggcggcagcgacgctgatcgggaggttggggacggccctgctgatgcagtggagcttctccacctggatctccacgagctgctgggtggtgccgcggacgggctcccgtggcagcgacacgacgccagccacgtccaccaccgactcccggctcagcccggccgcgaaccgcgccatcccaccatcgccgccggacacc

SEQ ID NO: 30700 - DNA, 313 bp, Setaria italica
  Peptide Sequence Number=SeqID_96674
tacttagaagcagatcggccgccggccacactccactcccatccgcgcccgcctcccctcctccgtccgccggagcgcggcacgccgtccgcacagagggagtccctctcctcctgcaggcgtcctcgtggctgtgctcttcctcgccctcggtcgcgctgtcctggggtggagatccgcgcggatttcactgataccctttctgctcgatttctccaaagtatgagctgtgaactagtgttacaggaagtcacgaaggaaatagtgacataaaacttgatttgtacaaaaaagatcaattggtgacttgaaa

SEQ ID NO: 30701 - DNA, 320 bp, Setaria italica
  Peptide Sequence Number=SeqID_96675
cgcggctggacgaggtgtacgcgtcgggcgcgctcacgcgggcgcgggcgctggtggtgccacgccccggcgccggcgccacccgcgatgacgtgcggttctacgtgcgggacctcttcgccaggctccgggccggcggcgccgagatgcggagggaggccgccgccgcgctcggcgaggctctgcgcgacgacgagaagtgcgtccgcgtcgtggcctccgacgtcccggacggcgtcggggtccttgtctcgctgctcgagtgccccgacccgcgcgtccaggaggaggccctggaggcggtctcggtgatcgccggg

SEQ ID NO: 30702 - DNA, 272 bp, Setaria italica
  Peptide Sequence Number=SeqID_96676
ccgaccttattacttgcacacacaattgaggactctcaaagtccttgtacacacaagcaattgcatattcaaaacagtgcacaaatatacactagtgtgtcttcacatgacaaggagttcataaaaaacccattgtagacctgtagtggagatgcaccaacgatgaaccaaacccaggtacaggtacagcttcatcttgccaatggatgaaatgtggacaccatagcttctatatcactccctcggcttgccctgatgctactgtccttctc

SEQ ID NO: 30703 - DNA, 1523 bp, Setaria italica
  Peptide Sequence Number=SeqID_96677
gggaataaatccgaaatctattaggcagaagcagatacggccgtgccgctcgccgtgccggaacaggtaagacgagacgacaatggcgggtgccggtgcggcggggttcccccggcagctgctggttgaggccatcgagtgcttagcggatgaggggttttgggatgcgctccgccgcctcaagctcgaggtgctcggcattgacgacttcctaatcccaatcaccggttattatgctccatgccagtttcaccaagcaagcttgttcaacctacgttcagaatcattggtgccaccttcacacaatccagttggcgacaggaacagttgcccaatcctagggacccttataaacactaataacatgaggggattccaagacctagatagggaacttcttctgaaaacagaagcgaagaagatcttgcatgacattgtgtctggtaaagtagaagaggatcctgcactgctgcttaggttccttgtgatatcatttgctgatctaaagaattggaagatctattacaatgttgcattcccctcattggttttcaactcgaccctgctcagcctgcaagtcgcctcagaagtgctcagcaacgaagaggtagaatccttgaaaatagcattgcaagagtggcgcgcttctactgaaacaacagttataccattctttctggttactatatcctcggattcctctgcctctataagacaacttaaggactggaaaacttgccaggggaagtatcaaaagctgctatttggattttatgatcacggacgtcgcccagattgccctggctgggctattagaaactacattgcattcctgagtatccggtggaagattgagaaggttcagttcttctgctaccgtgaatttcagggaaaccctgatctagtacaatccctcattggcgaagcatcatttccatcaccttctggctgggatgaccctgatcatgtacctgatgcttttggatgggaaggagtaaagccaggaaagggaacaaaagacatgaaaccaaaagaattagatattcaatcatcaaatccagcaagtcaggatgaagaaaaacaactgatgcacttaaagcttatggggtggcgccactttcctgtgaatatagataagttatctcaggttcgagttcttgtcctgggtgctggaactcttggatgtgaagttgctcgcctacttatgacctggggtgtacggaaattaactgtggttgacagtggtagtgttgccatgtctgaccttgtcaagcaatcactctacatagataaggactgtggagtcccaagagcaactgcaatagttccacatctaaaatcaagatgtcctgcagtggaggttgaaggcatccaaatggaaataccggtgcctgggcatccttattctcccagcaaaatggcaggtgtgcttgatgactgcaagcatctgcaaacattagtggctgccaatgatgctagttttcttgttaactgattctggtactttgggtagtagttctagt

SEQ ID NO: 30704 - DNA, 779 bp, Setaria italica
  misc_feature (3)..(3): n is a, c, g, or t
  Peptide Sequence Number=SeqID_96678
gtntctcctgttaccgtgcttattggccttgcccatgtcgtcgcctttgccgccggctttgatcgtcatcgccggctgagcgaacgccttcttgacaggcgcgtcgaactgttgcgccggcttgaagatcggttcctgcttgttgttggcaccggcgccgtcggacgagctccggaacaggaggaggtcgctgagccgccacctcctccacccggtgctcctcgacgcgggacgcgtggcaagtttcttgggcggcgagcctggggcgacgccgccgttggcttctttgccgccgagcggggagggcgccttcgtcgcctccagcagcgcggcggcgaacgggtcgaagtccacaccggagccgactctgctccgccgccgcggggaccgcatgccgcccctcgccatcggcgaccgcggcgatgacgcgacgctcccgccgtcgagcagccccggcggcggcttcagtgggcgaaccttgggctcctcggccgtcttgagccgcggcttcagaggcctgattttcccctcctcgaagagctcgtcggccgtcgtcagcgtctccgccggcgcggccttgtcggcgatcgtgccgaactcgaagtccgtgtcccacgccgcctcgttcgcggccgcgccaccgccgagccccctcttcggcgtccccggcctctcctcccagtcgaacggcacggacgagccgcccgtggcgtacgacccgcgcggctggaactcctcgtcgccgtcgtcgtcttcctcgccatccccaccgttcccct

SEQ ID NO: 30705 - DNA, 443 bp, Setaria italica
  Peptide Sequence Number=SeqID_96679
caaatgatgcatgatttggtctagcgcctcgcgaggactcagtcgcacagtaatatcagcaggatcagcagaaccatggctccgaatgaaccaatgagggatccagagatacgctcgcagaatgagtcaaactgctggcaaatagcaagccagtttgccctgacattgcccttgtgtgctaagtacacaatggccgctgctgcagatgctcccgcagtcaccagtgctagcattgccgcgtcaagaaagatcaagagcagcctgctgaatttggccctgctcctaatgatgtgcactattgataatggaagtgagaggatgagataggcacagacaatagaatttgcaatgacgaagaacgtgagagtagggagatcactgtactgtgccttgaaccggatgaactgtgtgaagaaggcagtgtctcgttggtggtgcccatt

SEQ ID NO: 30706 - DNA, 345 bp, Setaria italica
  Peptide Sequence Number=SeqID_96680
tttgggttcggggagaaggccggagagcagcaccaggagctcgaaggaccaccactccatgcagaccatgacagcggacggcacggcgagcttcaggaactcggtgacgccgcggaacgcctcggcggagaaccccgtccaggtggccttgcacgacggcgagagccggacgtacagcgccaggaaggtcaggttggcgaggtaggagacgccattggccagcgcggcgccgttgcggcccaggccgaggccgcgcaccagcagccagcagacggccgggtggcacagcgcggtggcgccggagctgagcatcaccggcacgacgaggttctgcgtctgcaggaa

SEQ ID NO: 30707 - DNA, 930 bp, Setaria italica
  Peptide Sequence Number=SeqID_96681
tttttttttttttttttttgtcagtaaaatctggctttctattgaaggcaagaggatacatgtactttcctagattatagcctaatggaccatttttggcccactaactacatgtttacaaatttgacagtgtaaaccatgctccaagcaagcatgctctgcagcaactatctcttcttacaaaactatgcacaatccaccagctttctttacatcacctcttccttccggagacggtcttcttgacagcaccaaccgaaaccatgagacactccagtgacgaaagcgtcttcatgtcatcaggagggaagtagctggctgccttccccatgaacgacgcgaagagcagggagaggccaggcgctggggcaggacggtcggggaggaactcgtcaaggaatgcaaaggcggccaggaagtctgatcggctcacgttgatcggggctgcaaagtggcaggggattatccttcggaattgccagtctgcagcgatcctgtcaacccagtccctcaccttctctggaactttgctgaaaacgagggtcttgacaattggtgagacgatcaatttttgtgacatttgagcaaaacttgcatttggctcaagaagatttgaggggccaagaaacagtatctgaagcaccattctctcccatcctttctgacggttcagcttattgtccacaactggttcatctggaacctctttccctttgctcaatatcttcactgccaatccgttcttggcagaagccaacagtgattctttgctgatacactccggaggctgtcgaggaacaaagatgacagcatctgtcaccagcaatgtctttgaaggcttatggtagaaagccacctccacatatggcccaatcccgacttccggcgagctgagcaccttctgctcaatctcgggaggcccagtggggt

SEQ ID NO: 30708 - DNA, 1575 bp, Setaria italica
  Peptide Sequence Number=SeqID_96682
atcatatattgttgatttgtattaaatccgaaagaaatttatttgctttttttttatctcaagcaaccttaaagataaagatagaactaatcgtattatacaatacaacctgattcattggatcattatcctatatactctaatagtaaaacaaacatgatatgattttaggattatgatttatgacgacatgtttcaacacgtcatattatattcttcgcagaatcagaaaatcaatgcacaattctaactttacaaactcatcgtcgcattgttcatctatgccatttatatttagaagaattagaggtacgtgaagtatcatgtgtcggcgaagaagcggtagatcctggcattgttgaagatcaaacgaactgcggaggcggtggtagcgacgcagagaagcgtggagaaaacgatgacgccccaatgccaaagcctgctccatctcccaccactcttccccttgatcttgaggatgaccatgctggggaacatgaaggtgagcgggacgagggagaaggagccgacgaggttgacgaagtcccccatgaacgggaacagcgcggtgacgaagacgttgaagccgaagatgagcccccgcgcgaagaagcggcgcgtcaggttgtaccgggagaacatgccctcgtccagccgctgcagctgcgtgtccatcgcctcgtggatcggcaccacgaacaggtgttgggagacgacgctctgcaggaaggcggcggcgttgatgagcacgacggcccaccgcggcccgccgagctggttggggaggtactcggacaccgccgacccgtacgcccagtaccccgccacgctgatgccgtagtacccggcggcgccggcggtgtactgcagcagcagcgcccgccgcatcccgcgcaccgacggctcccgcaccgtcgactgtatctccgggagcaagccggaggtgttgcagacgaggatggcggcgacggcgcccagcgcgttgaacaccttctcggatgggctgccatggacgctgaaatccttctggttgttgttggatttaccatctctgattaggatggcgagcagagcgacgtcgtatgctaacgtcagcgccgccgacgtggcgagccagttcctcatggcagaaatcgtcggcacgaagtaggcgaaggcgaagtagatgatcccggtcgcggtgatgaaccactggagcctggcaggggagtgggtgaactccacgttgattgccttgagtgctcttgcacctagtaaaatgaagcccatgttgcagagaagcagagtggcgaactgcaggaaataagtgatgtagtacattttcctcccgaagacgaagcccatgaggtccctgtaccggatgaacctctggccgtcgacgaaatggaggccggcgaggagccagttggcgtaccaggcggcggcgccgacgagcagcaggcaggcgacgccccagccccagcccagcggcgccatcatgaggttggagaagctcagcacgtaggcgcaattgaagccgatcaccagcagcagccccacctgctgccacgagtctgtcaccaaacaacaacgcca

SEQ ID NO: 30709 - DNA, 381 bp, Setaria italica
  Peptide Sequence Number=SeqID_96683
aagttttttgaaaaaaagacttcagcattgaagtttaaggataacgagaagcagaagagatatgagacaatctcatttacagaaatacaagatgaagttcaagaacttaaggtaccttgaacttgaagttgacaatgtaccatgtgatattttgtgcctagtccactttattcttcttaaaatcatcttctctgattttccatatttggccaaatgattatttaaattcattgtagttgatccttctctggtacagtggtaacatccatgtagcatagtgatgaagttaaagactggttgttgcgggtgaggggttttagctcactcaaggagttaaaatcaatgatagcagttcctcctgcttattatctgttattacct

SEQ ID NO: 30710 - DNA, 372 bp, Setaria italica
  misc_feature (4)..(4): n is a, c, g, or t
  Peptide Sequence Number=SeqID_96684
cctncgggcgcgcgcgtacgccgccatctcgcgcgtgcgcaccacgacggtgccggcagtggcgtcctggctgcacctcaggaacacccacggcgtcctcctgatggtcgtcctcttcgcgctcttcctgaggaagctctccggcgcgcggtcgcgggcggcgctggcgcgccggcgtagcctgtgcgagaaggccatgcgtcatgccggcacgtacgaggagtgggtgcgcgccgccaaggtgctcgacaagatgtctgagcaggtacatgaggcggatttctacgacgaggagctcatcaggagtaggcttgaagagctccgcaggcggagggaggataggtcgctccgggatggtggtgttctgtatgc

SEQ ID NO: 30711 - DNA, 278 bp, Setaria italica
  Peptide Sequence Number=SeqID_96685
gttcgctgcacaccacaccaccaccgtgcgtgacgacaccgagccgccgccgtagcagcctcccgcctgggggcggcccgccgcctagcttctgaccggtcgacgcgaattcgtccgctgaggttcaccgccctgcttgaacgacgagtagcggaggccggagggagatgtcggcccccctcgatcggcttgccaggccatgttttgagggtccatctagccatgatgaacgtaaagaacggaaatcggatgtgggaaactctgaggaagatagaaag

SEQ ID NO: 30712 - DNA, 1425 bp, Setaria italica
  Peptide Sequence Number=SeqID_96686
ggttaggctggacacggaaggtgggttcgccaggttcgcgatcggggacacggacagtgcgaagcagaaagggaagcagaggcagcagccgctgaagaagaagaagatgtcgaggaaagccaaggtcaaccagctcaagtggtaccgtctcaaggccaaaaagaagatgaagtcgcccaatcccgaagttaggatcaggtacaagcttgaaaaggcaaagagaaaggaggaatggctgattgagaagctgaggaagtatgatctcccaaggacaccagagccagttcatgaccctgagattttgactgaggaggagaaattttacctcaagcgaacgggagagaggaagaagaactatgttcctgtagggaggaggggggtttttggtggtgtggttctcaatatgcacctgcattggaagaagcatgagaccgtgaaggtggtttgcaagccctgtcgacctggccaagtgtacgagtatgccgaggaactaacaaggctcagcaaaggcacagtcattgatatcaaacccgataataccatcatattttatcgagggaaaaactatgtgcagccaaaggtcatgtcacctcctgatactctttcgaagcagaaggccttggagaaatatagatatgaacaatctcttgaacataccagccagtttattgagaagctggagaaggagcttgaagactaccagaagcatgttgctctatttaagaaccgtgagggagctacccctgttgatgaagagaccactgttgatgaccctacaagtacttcatattctgaatgatccaactctttaatatgctggatccatttaggaaacatgagagagctgctctggaaaagacagtgaagggttttcactcctcaagcatggtacatagagaacaatgaaatgctaatttgggagctggaagagtgctggagttccttctaagaaatcaagttatatttattgtgattacaaaggttttcagtctgcattgccacactctactcatttaatcattcttacacctgtggcggatgtcagaagtgcacaagattatttgtgcctcacagtggagcttcctcgcatgatcattgaattgcgctgaggacttgaaaagggtccaaatatgaaaaaaaaggtaacttcattctggtggctcagttggacaaagatagtattacaacctgccaaaggtttagtcctagacaatatggattaacacaaggatcatatgatggatcatgaagcttctgtcggtttaagcattgggtcctttgctattatttgaattattacagtgatcagctaacttttcgtaccattggagtatttggtattgtggtcattgctatacaacatcaattactgaaaggaaagaattagacttgtttgatcactgattttggacgtaatgatggaat

SEQ ID NO: 30713 - DNA, 470 bp, Setaria italica
  Peptide Sequence Number=SeqID_96687
ttttactaattggtttggtaatccactaactgatgattactacgactcaaaggggctggctgaatatgcttggagtcactcagtagtgtcagatgaagtttacgaacgcatcaagaaggtgtgcgacttcaggatctcaaactggaccgatgattgtgataaagccatgagcaccgtcttcagccagtaccacgaaatcgacatttacaacatctatgcacccagatgcaaccttcctcagtcatcagcagcagttgctggtgatcaagaactcgcagttaacgatcaggaacatttcaggaggaggataaggatgttttcgggatatgacgcatgctattcttcatatgcagagaagtacttcaataaggcagatgtgcagagagcattccatgcaaatgtcactggaactcgaaaatggcaagtttgcagtgactcaattttaaggcatactaatttttcggtacttt

SEQ ID NO: 30714 - DNA, 289 bp, Setaria italica
  Peptide Sequence Number=SeqID_96688
ctggagcagcggcgccctccccgtcgccggcctggccgtcctggtcgtcctggccctcgcccttctgcccctgtccccgctgcgcgcgcttcatgtgaccgaggttgagctccagcttctgcaggtacccatgcttgaacgagtcccggatccggagcgacggccacaggtgcattttcttcgacggcgcgagagggggccggtcgggctcggggcgttgacggcgccggggcgaggacgacggcgaggagaagcgtgaactcttgggaattcggatcgtcgcgggttt

SEQ ID NO: 30715 - DNA, 426 bp, Setaria italica
  Peptide Sequence Number=SeqID_96689
caacatcgggctttgcagccagctctttgcagtttgcagcagtcacagagcctgtaggaagaagagcacaaattaatcatgtaccaaaaagatttagcagctggtgcacatttgtaaggcaactgctcaagaagtgtatacctccgtagatgatcctggtagattcggacacctcagggctgacgttgatctttagccaatctctcagggatgcgtgcacttcctgagcctgatcaggggtggcaactttaccagttccaatggcccagactggctcgtaggcaacaaccacgttgctccagtccttgatcttctctgtaaaacaacaagcattacatcctttcagcctgaatttccacatggcaccaatatttttaacttggcaaattgaagataaggcacaaagttaacatagaaataaacaat

SEQ ID NO: 30716 - DNA, 557 bp, Setaria italica
  Peptide Sequence Number=SeqID_96690
taaaaaacctattattgatatgtccagaggtagtaaacattattagcaagctcaagctgtggcctcagaaaaagactacatagcacagaaaacaattctgttcctgttcagcggatctccgcgtcaggggtggaagggtcggggacacatcttaggcggacttcacggtggccgagttgatgatgtcgatgaactcaggcttcaaagaagcaccaccgacgaggaaaccgtcaacatcgggctttgcagccagctctttgcagtttgcagcagtcacagagcctccgtagatgatcctggtagattcggacacctcagggctgacgttgatctttagccaatctctcagggatgcgtgcacttcctgagcctgatcgaggggtggcaactttaccagttccaatggcccagactggctcgtaggcaacaaccacgttgctccagtccttgatcttctcagcaattgcttttgtttgtgcagcaacaacatccatggtcgatccagcttccctctgctcaaggtctcaccacacatgcaatgacctttagtccctgag

SEQ ID NO: 30717 - DNA, 1230 bp, Setaria italica
  Peptide Sequence Number=SeqID_96691
ggctggatagccggcatccactcaacaacattaggataatgcaatcaaaacaagcctaacgattcagcaacctaaaggtccatgtaggaaaacagcatcgaatctggtgtaatgtgactcaccacaaaaaggagctaacaaaaaaaaaccattattgatatgtccagaggtagtaaacattattagcaagctcaagctgtggcctcagaaaaagctacatagcacagaaaacaattctgttcctgttcagcggatctccgcgtcaggggtggaagggtcggggacacatcttaggcggacttcacggtggccgagttgatgatgtcgatgaactcaggcttcaaagaagcaccaccgacgaggaaaccgtcaacatcgggctttgcagccagctctttgcagtttgcagcagtcacagagcctccgtagatgatcctggtagattcggacacctcagggctgacgttgatctttagccaatctctcagggatgcgtgcacttcctgagcctgatcaggggtggcaactttaccagttccaatggcccagactggctcgtaggcaacaaccacgttgctccagtccttgatcttctcagcaattgcttttgtttgtgcagcaacaacatccatggtcgatccagcttccctctgctcaagggtctcaccaacacatgcaatgacctttagtccctgagagagtgcataggcgactttgtctccaacaaactcatttgattctcccaacagagctctcctttcagagtgtccaagaatgacccagggaacgccaaggttgacaagcatctcagcactgacttcaccagtgaaagcacctcccttcttcacccagcagttctgagcagcaacttggaactctgggcggagctgactcttgaccacaggaaggaacacataaggagggctgacaacaacctcaacaacatctggaggggggaacctgcccttcattcagagttttgacaatcttgtcaacctgatcggcggttccattgcatttccagttgccaccgacgaagaacttgcggcccatctcgacgaggtgttgggttcggaaggaagaggatggctggatggggacttggggagcttctaggttggattttgcttcttgtggagtcagtgctgagatgcttgtcaaccttggcgttccctgggtcattcttggacactctgaaaggagagctctgttgggagaatcaaatgagtt

SEQ ID NO: 30718 - DNA, 328 bp, Setaria italica
  Peptide Sequence Number=SeqID_96692
caccaagatgactccacagctccagacaaaccaacgccttgctcttgcgagatcgtctcaatgtagcgaagagatcagcatctttagtcgagccactggctcagctatatatacaacccaccagagagcccagtgatcttcacaagctagcaacacctacacaacagctcagagtacagaagcacctcatcagtcagctgaaggccgagtgagaggactagagatcgccatgaaggggagcaaggtccacgagcacgagaccgacctccccgcctccgatctgtgggcgatctacggcacgctccgcgccgccgagctgctgccggag

SEQ ID NO: 30719 - DNA, 752 bp, Setaria italica
  misc_feature (14)..(14): n is a, c, g, or t
  Peptide Sequence Number=SeqID_96693
tttttttttttttnttttttttttttttttttaagtagaaattctaattaatttttattaaatcacaaatgatgaaaattaggatgttacaaattctgctgcttgcgagttgcgacaaagcgaaagaggcaaaacatagtaggctttgactcgtcctgtcctggcacacatcgcaacgcaacgagcgtccgccgaacgcgctcaaaagcgtcaggacaagtcacccacccaacaacaacccaccacgtccgcgcacccacgcggaggcgtctcgtgctctcgacggcagccgcgggccgcggccagagagaggtgggcgggcgggggtggaaactatctgtcaactaactgctgaccggtcttattcctcgcacgtcttggtatgggcaagtgcgataacgaccgaagatagaatcagagatcaatagtactactagcatagcaatagcatgtccttccatcgccttggtgtgtccgcctacgacgggcgcacgggctgctgctgcgtgatgcagtggacgttcccgcctcccagcgcgatctcccgcccgccctcgaccatcaccacctcgcgatcaggaaacgccttctgaagaaccttgtacgcctcctcgtcccacttgtcgccgaaagacggcgctacgatgccgccattcgcgatgtagaagttcacgtacgaggcggccagcctcgtgcccggctccctcgccacggcgttgcccttgtttgtagtagtaaacgtccgttccgtc

SEQ ID NO: 30720 - DNA, 333 bp, Setaria italica
  Peptide Sequence Number=SeqID_96694
tgtgcggaggcccttttgctagcttttgggtgatgttggggtattacgtgtttactattactaattggagccttcttttgaagcttctatgtgaagtcacctaaaatttcaggtggatattttagaaaaaagagagaaattttagaagttttcacaaacagaaaaacatatagccatgatcggtagactcaaatcatcattgccattggatctattatatttttttaaaaattacccacctatatcattgtgaaaatgcctaaaataacccctaaatctatatataaattacacacctctaccattatataaaataaactaaagtaaccccgt

SEQ ID NO: 30721 - DNA, 407 bp, Setaria italica
  Peptide Sequence Number=SeqID_96695
cggcgccgttctgcgccggaacgggcagggcgctcgggcggcgcacgagggaggagtcgtgggggacggcggcggccttccggtgcgccgggttcgcctgcgcggccggagccgctgcctcggcctcggtggcattgatccggtggagggaggtcatggaggcggaccggcggcggcggaacatgccgctgtagatgccgaacatggcgcagccggtcggcgggtcgcgcgactccgtcatggcgacggtggcggcgtcgtctcgcggccgcgcacccccgcggtcgtctgcgtcgtgcgcgcgcgtagggaaggcgagggagggggcaaggccaaagatgggaggggcaggggagtggtgggctggtggccgttggctcctggctggcaacgaacgaacgacgacg

SEQ ID NO: 30722 - DNA, 340 bp, Setaria italica
  Peptide Sequence Number=SeqID_96696
gctacaacagcagtagccttctcaaatagtataagttaccaagaacaaacggaattcaaagacccaaaggattgttctcgacttgcataaataattttttctggctcatgaagattctgttggaacttggaacccaaaccatctatagttgattcatgttcaagtaacctgaattctataatgtaaatactctacaaatacaaacttgcctattctaggactgcctgaaattcctaatatgtctttattagctcctccatgaaagtgacgaagtgttgccgtgccatgaatccagaattaagaaacccaattcaattatttttccatgcagacctgcaaa

SEQ ID NO: 30723 - DNA, 311 bp, Setaria italica
  Peptide Sequence Number=SeqID_96697
gtccttgcctctcgagtcgattataacactcgagaacacacagaagacttggcagaggaagaactaaccaaggatggccgctaagctcgccgttctcaccgtactcgcgctgctcggctccgtgtcgtgccaatccggctacggcggctacggctatggcgacggcaaccccaccccgccgccgccacccacttatcctccgacgccgagccccacccacttatcctccgacaccgagcccacccacctatcctccgacaccgagcccacccacctatcctccgacaccgacgcccctaccccctttattt

SEQ ID NO: 30724 - DNA, 232 bp, Setaria italica
  Peptide Sequence Number=SeqID_96698
taaaagtaaacgaaaaatgtaaaagtcgacatggacaacatcggtcactattatacaggtcatttccagagcttgacaaatctatcatggcttactgaggcaaccttccctgttgcactgcatgctgcaagggctgcaatcaaaccctcatgcgcattgttgagggtcatggtgttcttcaaccaacatttctataaggagttacaagttacaactacaagcttcagtagca

SEQ ID NO: 30725 - DNA, 630 bp, Setaria italica
  misc_feature (601)..(601): n is a, c, g, or t
  Peptide Sequence Number=SeqID_96699
tccaaacccgcacagtttgtcaaaggaggatgtagcaaggcgtgacatgcttgggctaaatctaacatcagtgatcagaaacgagtgctcttccagttgagatttagactttaggggttctgtacaccacaaaaaacctttttatcatgaccaccagtagcaagcagtttgccatcagatgagaagtggcaacaaacaactttggttgaacttgcacgtgcttttgcaacctcagaaaaaccaaatcctttactagcatccatgcagcgccccaagttgtctctaggatccatgtcatcctgtgatagaaaggattcaacattatcatccaaggagccatcttccagcaaacggtccacatcatccaaggggtttgcaggagatgtcaagctcccagtgccatcagagccaaacattaccatgggtttagctgaaccaccattctgctgcagctgctgcacagacattgcatctcctggtgtatgagtggaaggtgtcgagggtgcagaacttggagaggggccagcgggtattgctgttcctgaactgttagctctgccagaggatgaacctggcttcttctcttctttgctgttgttcngtctccccaaagtgttggcatgccccgtc

SEQ ID NO: 30726 - DNA, 1885 bp, Setaria italica
  Peptide Sequence Number=SeqID_96700
ggttttttttttggtttttcaaactaacccttaatgaggttatctataaagcccccacaagtccacacaatgttaggattcaacaaggacaacatacagagggaaaaatgcactacaactgcatacaaggcagattaaaaaaaacagtttgtaacttgtactgggtacaaattcgaagtcttcaaccaacatttctataaggagttacaagttacaactacaagcttcagtagcatattgaacagcatacaacgacaaccacaaaacaaaacaaagttagttcttgagcccaagtggctcaagagtcttgttagctacccttttcgtcatgtggtcatctgaggcagaaaaccgtcttgtttgtctatcatctaacaaacagaatgtaaaagtcgacatggacaacatcggtcactattatacaggtcatttccagagcttgacaaatctatcatggcttactgaggcaaccttccctgttgcactgcatgctgcaagggctgcaatcaaaccctcatgcgcattgttgagggtcatggtgttcttctcccttatgtcccaaagttccaaagactcataacaaccaattactagcaatgatggataagttgggtggaaaacacatgagtggaatttgttcccgctgcaattcaactcattcacaaaatcaccatcatgtccgggagtgaatgaccaaattctgacagagtcttcactgacagaagccagatagtcaccagtagaatcccaacaaagggattgaatattcttattgtgcccctgcaagggacttctacaagaatgttgtgtctccccatcaagtatgtagatagtcttctcagaggcagctgctagatattttcccttgcaaggttgaaatctcatctgagtagcaccacccttaaacaccttaacacaggtcagacagctaccattatttatgctccagctgcgcacttccccatcactatcacaggagcatatcatatcttctttatttggatgaaaatcaagtgacataacagatgctgaatgtcccgtgaaagtgcggagcgaatagtcagtattatcagcatcccaaacccgcacagttttgtcaaaggaggatgtagcaaggcgtgacatgcttgggctaaatctaacatcagtgatcagaaacgagtgctcttccagttgagatttagactttaggggttctgtacaccacaaaaaaacctttttatcatgaccaccagtagcaagcagtttgccatcagatgagaagtggcaacaaacaactttggttgaacttgcacgtgcttttgcaacctcagaaaaaccaaatcctggaacaaacagatcttcaggtatgcactggatgctttactagcatccatgcagcgccccaagttgtctctaggatccatgtcatcctgtgatagaaaggattcaacattatcatccaaggagccatcttccagcaaacggtccacatcatccaaggggtttgcaggagatgtcaagctcccagtgccatcagagccaaacattaccatgggtttagctgaaccaccattctgctgcagctgctgcacagacattgcatctcctggtgtatgagtggaaggtgtcgagggtgcagaacttggagaggggccagcggtatttgctgttcctgaactgttagctctgccagaggatgaacctggcttctttctcttctttgctgtttgttcagctcccccaaaagtgtttggcatgcccccgtcaacaggcatacttccaattcctgacttttcttgttgaagaagttgatttgagctttgggattgctggctagagacagcaggttgctgaagctgatgttgctgcggctgctgctggctattgtgttgctgcggctgct

SEQ ID NO: 30727 - DNA, 260 bp, Setaria italica
  Peptide Sequence Number=SeqID_96701
ggcgtgcgtgggcaacgacgggaggagccgtccggggatggcggaggtgtcggccatcctcagcgacgtggaagccgcgtaccggcgccgcgacggcgcaccggcgggtgaggacgacgaacccgacgacggcggcgaggggcgtctcagtggatgccttcttggccccagcaggagcgtccacaaggcggacatgctgctccggcctcccgtgtgaatgaaaaccccatagacgttgaattctctggggaagtgaccaa

SEQ ID NO: 30728 - DNA, 911 bp, Setaria italica
  Peptide Sequence Number=SeqID_96702
tacaaagaataagacgtaaagcaaagttacgaagaagatgtctagcccggattgagggtacaagccagaatggggtgataactcaagacgagattgtgcaagcacttgctctattcaagcccgaagatcagaacagcaagtcatttcaatttttgcattgctggaatctcttaagaacccatctgaagtggattggtaggtcatctccggttgcacctcagaactcgtctcagaaaaacagaagacaactcccagtccaagtccgagatcatctgctccatgtattctcgaggacagtgaggctgcaattcaagaatgtgaggtgccaatacagccaatgggtaggaatatggagaaagaaaatttacagcaaggtggagatagtttgtccctagaaaatttacaaggtggagatagtttgtccttagaggcgatagataatctgtgcgcagagaagaatgaggcggatgtggagaaagagcgcaaggaaaatgagagagcatatgcactagaacaagagagggttgcgcttgaacaattgagggctgcgaacgaggccaaaagtcttgaaacaaggagcaaagaattagatttgaagagcaaagagctagatttgaagataatgctagaagaagagagaattatggctttggacattagtgccatgtccgggccacaacaacaatactacaagagcctacagaatgacatcatcactcgacggttcaatcgctcaggttgagcttgtatgaacaactcctgttagtattagctattatgttaggtgaactttattaagttgcagggaccgttatggtatgcgaaccttgctgaatggactattatgtgcaaggagtcgttgaaatggactttatttgcattgcaaaatttgcaatggacctgttgaaacc

SEQ ID NO: 30729 - DNA, 215 bp, Setaria italica
  Peptide Sequence Number=SeqID_96703
gggttcagctccatcggccggcgccgcgcgctgaggcggacgtggctccccgcggatcgccagggcctgcaacgattggaggaagctactggtctggcattccggttcgtgattgggaaaagcaactcaaagaacaagatggctgttcttaacagagaagttgaagaatatgatgattttgtgcttttagatcttgaggaggagtatagcaggct

SEQ ID NO: 30730 - DNA, 448 bp, Setaria italica
  Peptide Sequence Number=SeqID_96704
tccatgggttacttttaaaaggtaaaaacaatctctttgttcatcacatatactctgtaggtgagatggtaaggaaggctcgcgtgaggcttgaggtcctgagtttgaatcccaatattgcgtacgcgcatatttcgcatcaaaatcactttttagcgcaaagtcatttagtatcagttggtgttaacaatcgatattaaatgacgtatttagtaccggttaagctacgtggtacttaaatgcattgtattttgtagttggtgttaacaatcgatattaaatgacgcatttagtaccggttaagctacgcggtacttaaatgcattgtattttgtatttagtacggaaaaatcggtaccggtcggtcgggtgcccgcaaggatttcccgaccggttaattaattaattctaattcgttcctagtttagtttgttcttaccggttccgt

SEQ ID NO: 30731 - DNA, 289 bp, Setaria italica
  Peptide Sequence Number=SeqID_96705
gttgcttattgcatcatgggttgagctgacgcctgacggcatccttttcttcaggttcactgaaatgggaacactatcagattcctagagattacgagcaggacgggggcaggcactctgaatcaactaatcacaggctgtatgcgatcgccaaatcacgcacgatataatcatgctcatttaaataagcctatcttctaacaatgctctagagcccggattgacaaactgcaactttgttttagactagtctcaccgtgcactagtattgacaagatttaatattgga

SEQ ID NO: 30732 - DNA, 455 bp, Setaria italica
  Peptide Sequence Number=SeqID_96706
agtttgtcgggtccacatctgtcctagtaaagaactagttttcacggttcccttacaccatccactatatttacaaccctgctcacagattcacatctatcacaggaactacataaacaattcattactggtcatataaaaattacattcttctcagaaatgtagatagaatagaagaaggttgaaaataagtaccctaattttgttaacatggaaatgacaagtcaaagaactgtgacactaaagcagattccagtgaaccctattccatattcgcttaccaccaagtatgctagtgctgtccagagaaatgctaggacatcctatggaataaaacaactatttttccagatgtccctcctcccacacccgagctatcactgctatacactttggatgaagtaaccatactactaaaagtaaccatactactaatctttcctaatttcttttta

SEQ ID NO: 30733 - DNA, 400 bp, Setaria italica
  Peptide Sequence Number=SeqID_96707
tacggcgtcgtcgaggaaggcgcgtcggcgagcggcaacaggtacgcggtggcgcggaaccggacgcggccgtaccagagcgtcagccagaaggtgtacctgcagaacgacacgcactacacactgtccgcttggttgcaggtcagtaatggcagcgccgatatcagagcagtcgtgaagaccaacggcgacttcatccacgccggcggcgtcgaggcgcggtccggatgctggtccattctcaaaggcggcctcactgccgccgccgccgggccggccgaactctacttcgagagcaacgcgacggtggaggtgtgggtggacaacgtctcgctgcagcccttctcccaggaagagtgggcggcgcaccaccataccgccatcaagtcggcgcgcaaga

SEQ ID NO: 30734 - DNA, 284 bp, Setaria italica
  Peptide Sequence Number=SeqID_96708
aggagtggtcccaggggagctcctccagcgtgacccgtcgcggggcggtcccggtgggtggcagtgcctccgcggcagtggggtgggacctaggggtggtggtgtgacggaaccgtccaaattaacatagctaaagcacacttaagtcgcttaacacgcgaccatgtactttaaacaagtcaacttggtcgtccgtcggatttcatccgataaaccacttaactccggatcgagaaagcaagactcgctcgaaggcgagtggttacagagattacagcagtcca

SEQ ID NO: 30735 - DNA, 256 bp, Setaria italica
  Peptide Sequence Number=SeqID_96709
gcgagcgcgagggtgagcttgtggcaccggcgctggtagcggaagccgttgaggcagcggaggtggtgcgcgacggcggcgtagaaggcgaggtgcgcgagggagagcagccccgcgggcgcccagaggtggcggcactggaggcgcgcgggcggcgagccggcgacggcggagaggacgagcgccaggaagaggaagaatgcgaggaagaggcgccagagctcctgcttctgcgcgtcggcggcgcgcttcttct

SEQ ID NO: 30736 - DNA, 351 bp, Setaria italica
  Peptide Sequence Number=SeqID_96710
gcgcagtattgtaaggttgtgatttcggaaccaatgcatggataccatcctctcgagaaatccaagaagtgttatttgcactgatataggagcagcaacccatatagtccagtccaagagaacgtgttcgaccatatcagcatttgacaagactatgaattcagaactctggccagctaagtcagcattctccagctcagacaagtggctaaatgaatccttttgaggtgaaaattcatctagatccccatgtgatccaccggacgacacatcatcgccaaacttgggtaaggtaagatcatcaaggctggcatctggggacatccagatgcattagtctttgtcttgtta

SEQ ID NO: 30737 - DNA, 618 bp, Setaria italica
  Peptide Sequence Number=SeqID_96711
tatcagtgcaaataacacttcttggatttctcgagaggatggtatccatgcattggttccgaaatcacaaccttacaataagtgttatttgcactgatataggagcagcaacccatatagtccagtccaagagaacgtgttcgaccatatcagcatttgacaagactatgaattcagaactctggccagctaagtcagcattctccagctcagacaagtggctaaatgaatccttttgaggtgaaaattcatctagatccccatgtgatccaccggacgacacatcatcgccaaacttgggtaaggtaagatcatcaaggctggcatctggggacatcccagatgcatagcttgctgtccgatttatctttgatttctttggctcaggaaaggaagcttcacaggcagcaatacggaagaagatatcgagagattgcatatcaaatagtgacattctcctatgcagaaaaaagtgcaagaagatgataacccctcaaggcctgcatgttttttacatttttgatggctctgctgaagagataatgcaagcagctccagcgccatatgcagcatatccctagtttcagtcagcttcaaacaagagcaagcacaacaggc

SEQ ID NO: 30738 - DNA, 298 bp, Setaria italica
  Peptide Sequence Number=SeqID_96712
agacttaccctacttttactcaataagtactgaacaacaggcaagcttcgaagggttgatggtgctaaatccgctgatgaggtttttgaggacgtgaaggccatattcgtgcaactcaacacccaggtaaaccaaggtagcagtgtgagcagagcacagagcaatccactgaagcggtttgttgacctgttctgcggttgctttgggacgcaggaggagacaaactaactacatatgtacaaaagattcagaaaacacttgctgtggctgatgaagtgtgtgtgtgtgtgtgtgtgta

SEQ ID NO: 30739 - DNA, 1030 bp, Setaria italica
  Peptide Sequence Number=SeqID_96713
gcattgcccttgaacccctatgctatgcatggtcctgacccctgaccgagaactttctcagctttctgttcccgtgtacgtattccgtagcgggggttaccaacttccgatggggacgtgccgacttgcctaggccccacgcttatccctcccgccgtgccatgccgcggtgttacgcccagaaagctacaggaaacgccgcaaccaatcgcttgcaatcaagcctgaggtgacacgagagttgaatgcctcgccaccaccccaaccgtaccgtacgcgtgtacacgcagctgggaacatacgtacgtggccaaccaacggtcgtgcagacgtacagacatgtctgccctcaggaaatgaagtgcggacgagaggaggacaaccaaaacaagagtgtgtactgaactgaaagccatgttcagaattgacgccgcgactgcatactgtcctaactttcaggcctcatttgcaaccgcaattttttgttttctaaatccatgtggtaattagactgtttttctgtgaaattcatgcagtttgtgctagaaagtttttgcaagatgatgtgaagtacgtacacgattttgcatggatgcacggaaactttcttcacatgctcaattatgcctctgttgtatttgttgcaggtgccgcgggtgggaagagcgcgagctcgtcgccgacgggcggggccggcgccgggagccagcccagcgcggtcatcgtctacctcgcgtcggcgctgcttgccttcgtctctgtcctcgcgtgatggacgcggcgcattcatacccggcagggggagatactatacgccgatcggagtagaagaagagggataaagagatgaacaattgaacagcagaagacacgcgcactctttttttttattctactagttttgtgtgagatgtcgagttgtgctgactgtgcaccggcgactcagctcgtactcccgggctgttgggactgttgccttcagcctggaattttaatgtgtggcagagactgtcgagctgtctgtctgaat

SEQ ID NO: 30740 - DNA, 912 bp, Setaria italica
  Peptide Sequence Number=SeqID_96714
ttgatgggcctggcgacgtgcctgacgttcgtgcaggacaaggcgacggcgcgggcgccgacgcccgactgctgcgcggggctcaagcaggtggtgtccgccagcaagaagtgcatgtgcgtgctggtcaaggaccgcgacgagccggcgctgggattcaagatcaacgtcacccgcgccatggacctgccagacatctgcaactaccccgccaccttctccgactgccccaagattctggggatgtcgcccgacgcccccgaggcggagatcttcaaggagtacgcgaagaagcacgagtcccagaacggcactacccagacggccgctgccaccggtgccgcgggtgggaagagcgcgagctcgtcgccgacgggcggggccggcgccgggagccagcccagcgcggtcatcgtctacctcgcgtcggcgctgcttgccttcgtctctgtcctcgcgtgatggacgcggcgcattcatacccggcaggggagatactatacgccgatcggagtagaagaagagggataaagagatgaacaattgaacagcagaagacacgcgcactccttttttttttattctactagttttgtgtgagatgtcgagttgtgctgactgtgcaccggcgactcagctcgtactcccgggctgttgggactgttgccttccagcctggaattttaaatgtggtgggcagagactgtcgagctgtctgtctgaatctgatcgactggcaggttgcgagtttggtttttcaactttttgcttatcttctagtttcaaggtttcgagtcatattgtgtacaagcaatatttagggtgtgtagaagaaattacacatggattgcttatgcttaaaaaaacttctaaattttgttctaaaaataggttagtacttacttaaaaaaa

SEQ ID NO: 30741 - DNA, 865 bp, Setaria italica
  Peptide Sequence Number=SeqID_96715
gtccgccacttcttccgatcctctcgtttcctctctagctacctagctagctctctcgcacacaagcacacacgtgcgcctccacaaacgtgccgggcaccatggccttcgcgcacggcggcggtaggggctcgtcgtcgtctccggcggcggcggtggcggtgatggtggtgatgacgatggtgctggcgggcgtggcgaggggtgacttcgcggcggaccgcgcggagtgcgcgaaccagctgatgggcctggcgacgtgcctgacgttcgtgcaggacaaggcgacggcgcgggcgccgacgcccgactgctgcgcggggctcaagcaggtggtgtccgccagcaagaagtgcatgtgcgtgctggtcaaggaccgcgacgagccggcgctgggattcaagatcaacgtcacccgcgccatggacctgccagacatctgcaactaccccgccaccttctccgactgccccaagattctggggatgtcgcccgacgcccccgaggcggagatcttcaaggagtacgcgaagaagcacgagtcccagaacggcactacccaggtacgtaacgttccacacctcgatctccagtagtccagtccccaggagtagctctagactctagtgagcccctgggccgccttgcaccggcggcacaagcgtccaaactaaactagccgtgcaggagcaggacgtcctacaccgtacgctgcttcttggtcctgccggcgctaccaggggccaacagcattagtgctgatgcacctgcagctgcaggggattttgatgcgctggaccagttacatatgcgcaccggccaccaaagtaggtgttgtccgtgcacacagcacgtacaacacagt

SEQ ID NO: 30742 - DNA, 384 bp, Setaria italica
  Peptide Sequence Number=SeqID_96716
ggtgaacgatgaagatgtgaagccgttgaacagcacgctcttcgggtagcagacgccttggccctcaagcttgtaggagaagccgacgcacaagcacgtctccaagcagattttcttgcagtactcgaaggtgacggattggtagaaccacagatcgtagccgtagaagtcggtgtgcggcatcttgacgaacttataccgctgctccggcgacggagacggcgacgcctgcaggctgcagttggtgacggtgaacatgggcttgcagcctttccgcgagtcctgccggtcgaccatctcgtaccccggcgcgcacgagcatctgaggctcggctcgtattcgcagatcgcgttccggccgcacagcccgtggacgtagcacgg

SEQ ID NO: 30743 - DNA, 601 bp, Setaria italica
  misc_feature (31)..(31): n is a, c, g, or t
  Peptide Sequence Number=SeqID_96717
aggaaaaaatatgcacccaaattcgaactanaggggactcgaatctttttcgatggttagagtgcacgattataccttccaccctaacgagttgagctaggctcaattgctcgcgggatacaaaggaacctggaagagttcacggagatttagatttacagttggaagagcttgcttgtgtacactcttttttcgctaaaaggcatctatacatctccagcactgtacaaaaatgtgtgtgaagtagcctctatcagattcgaaagaggccaatgggaatagtagaaggcagaagtaactgttcagttctgcagtgcccccatcgatttccagggtcacagctgaagctggtacactgctgtttacacatttcgccgttttccccagatattcacagtaagcatgaaatctggcttggaaaaaatacgccaatgcctatttcttcgatcctcacatcatcatgagccaagccaatgcctatttttttcgatcctcacatcatcatgagctgcctgcaggcgctactctgaatcaatcctagatctttgtagcccaacgtgttcacttgagctgcctgttgacagtcccctctctttattat

SEQ ID NO: 30744 - DNA, 428 bp, Setaria italica
  Peptide Sequence Number=SeqID_96718
gagagggcgggaagaaatagaagaaaaaaaaaaaaactaccgatggccctgcgtgtgagcatcacttgtgtagctgtgtgctatcgagaagattcatccatgccgcatatacacgtctcagttaagagtttgtcatgagccgatcttgtcgaggttgtcggcgacggccttcatcctcggccggagctcgggatcgacctccgtgcacgcgagcgcgacgtggaacgccgccaccacctccttcttgggcagcgcgggcccccggagaagcgccgggtccaccatctccgccacgggccgcgtgtcctcctcgaacccgcgccgcacccaccgcaccacctccggcacggcgccgccgccgtgctcgccgctcccggaccggtccgtggccgtcgaccccgacacgggcgccgagaacgacgccgacg

SEQ ID NO: 30745 - DNA, 526 bp, Setaria italica
  Peptide Sequence Number=SeqID_96719
accccccggcatgcctgtctgtgaccaagcgcaggaaaaagccccccacttgctgttatcctttgtttttaccaaacaaatatggtctttggtcttctcacatctgaatctggtagttgatgtgccggtaaactcttctagcttctcagcttggtggggcaaagtcattagagctgctcctaatcagtggcgaaagggtttaaattcgctcatcattttggtggcatgggagatttggaaacatagaaattcatgtgtgtttgaaggcgttctccctaactcccaggtgctcctgcaggctataacaaatgaaagcaccctgtggtgcttggctggagcttctaagctcaaacagttgcttgctggtcgcttgtagcaccatcttaggcttggtgctctctggtcggtctttccttgttttgggtgtgtagtgttttgtgagtgttggggtgtgttcggtacttagtctgggggctctcccctctctatgtactttcttttctatcttaatgaaatgacatgcagc

SEQ ID NO: 30746 - DNA, 424 bp, Setaria italica
  Peptide Sequence Number=SeqID_96720
aacgaaccttagggacaagactagacctttccgtcttgtttcttgccaaatttctgttcttaagatcacgaggaccatgcacaagttgaaggtatgccagttcctcgcttgtgttatcctttgcaactccagttctcctttgatttccatggaggaaaactgtaggggggtatgagtgacggtgggcgagaagtaagcgaaaactagcatcttgaacctcctttgatcctgcgcattgatcgttttcccccctatctatcccaagtaattttgtttgtttttcctagcaagttttgttcttgtttcatggagcaacaatttaagatgacgagcaagaaccctaccaaaaccccgccgctcctggccacccttctcctcctgctcgccttcctcgccctgtgcgcgcccgccgcctcccacgccg

SEQ ID NO: 30747 - DNA, 402 bp, Setaria italica
  Peptide Sequence Number=SeqID_96721
ttaattttaatttatttttttagtaagttgaattagtttttaattaaaaataatatttttcattgggggggaaaaaccaaacagtacgtcaaaaaaaaaaccaatatgcatgctatagaactgacgaggcaggtcatcgtttagcaggacctggacgatcatgttagagaagaaagaattcacgtacctcgcatagcattcctgacaagcccaagaacgccgccgccattatcggtgatcaagttcatccagtactcgatcaccctcccgcatgcggccatgggcctcttgatccagagcagcagcatctgcgcgacgagggagacgaagatggcccacctcctccatcgctcggcgacctcggtgccgatggggcagtcgacggcgtcgttgcggcgacct

SEQ ID NO: 30748 - DNA, 264 bp, Setaria italica
  Peptide Sequence Number=SeqID_96722
aggcggcgtcgaccaccgacggcaacccgctagccgctagggcgtcgtccgcctcggcgccaccaccggaaggtagggaagtcgccagcggcgtgcgcgtgagcagcggccgaatcactgctgccatccgctcccggcggcccgtcgtcgccgggtgccggtccctcccgacggcccgacgcagcagccaggagaagcccaccggcggcctccactcctctctccctcctcgtggtgtcgctgcaggctgcagcagttggccag

SEQ ID NO: 30749 - DNA, 405 bp, Setaria italica
  misc_feature (377)..(377): n is a, c, g, or t
  Peptide Sequence Number=SeqID_96723
cagttgcagccagaggcgccgtgttcaccatggcttcaagctccgggtgcgcgtcatcgatctcgtactcgatagtcgaccttatcactgacgaatcgggcccctttgcgatgatctcgaaccgtatcatgtaggaaaggaaccccagcttcagaatgtcgccatcaattgtctgtgcttccttgatatagttctcgttgtccactttgatgaacttctccttgtaactctccagaccaggaatcccaggggggaatgttagctgcaagatggtgccgacgccgccatcgccgctgacgagctcgaccttggccaggacgtgcgggagcagctccggcagcagctcggcggcgcggagcgtgccgtagatcgcccanagatcggaggcggggagtcggtctcgtg

SEQ ID NO: 30750 - DNA, 1200 bp, Setaria italica
  Peptide Sequence Number=SeqID_96724
tccgtcgtccgtccgtcttgtccgccgtctcccgcgccggtggtggtggctgccggcggcgagctggtgcggctcgggaggccgctgatgctccttgtcgatgcgtcctccctgtcggacgggaccgcggagaggctctccagtgcctggtttattttcacgttcattggagttggtgttgtactcttcatcacttcgatctttggttgtgctggagctaggaatggatgctgcttgtctatttattcattcctcattattttgttcatactggtagagcttgctacaggaggcttcattttcttcaaccatagttggaaagaggttattccagttgataaaactggtaactttgacatgatgtatagctttttgaaagaaaattggagaattgcaaaatgggttgcacttggagctgttatatttgaggggcactgctgttcactgtagctatcatagtgcagtcaggcaatcaagctgattatgacagtgatgacgagtacatcgtcccaaggtctggaataaggcagccattagtgaaccaacagcaaggtgctgctgatcctagggtgcccaatcttgactaccgcccaatccggaacgatgcttggagccaaagaatgagagaaaagtatggggtggatagcttcgatccgaacaggtttcaacaggccacgatatcacccgcagaacaaagaaaccgatgtacaattctctgaggcatggttgatatcagccagtagtggttccaagtttatatccaactgtgcaattacatcgactcctggatgatgtgtgcctggtttatccgatgttgcccttttgtgtagaacatggagagtttcgctgtcacctgcctgcttccgctggattgcatggtcagaactccatacttctactggtgtaggcattgcatccttcagggttttgtaataagtactgaacctaattttgtgttttagataatgttctaatgtgcataaaaccttttgtccgtgaagtgattttcaccgtatgcaccatgtttgaacgagacatgtttgttacgccaaaacttcaagagaaggtttgggtttaggggttggtgtttgttcaggttaggcgtcgtgctcgggctgtctgttcctcaaccgctgctactgtacctgtcctgttgactcgactgaacaccacttatgagcctgtgacactgcttttatc

SEQ ID NO: 30751 - DNA, 258 bp, Setaria italica
  Peptide Sequence Number=SeqID_96725
gttttaacccctcacggaaaatttcccgtctccccgtctcgtctcgcttcgcccccaacctcccctgcgcagcccccagatccggcaccgcccgctcctcgatccccgcgccccacgcccgtaggtgagcccaccgatccgccctcgccccgccccgccgtccgtcgccggccgccattccctcgggtcgctcaccggcgcggcgttcctcgtttgccctctgcgtgcaggtcgggggttgcgttgcgccccgggcag

SEQ ID NO: 30752 - DNA, 1188 bp, Setaria italica
  Peptide Sequence Number=SeqID_96726
ttttttttttttttgtactacaaaattagccgcacataaaaatttacaactcaaatcatagacacggaaatttgtgtacgtaatgactccccatcacatgcgtgggttgaaaaaaagtatagaataggtcttatcgacataattttattagatgcatgaagctcaaatagtgaacatgggagcaacgataaacaagcactgaagccaaatctgcaaacaacccagaaattgcacgagtagacagtgtaaaatatagatgtctttatacagtcaagcttgtctccgactcgaatggtctgcctcatactatagcaaccgattgctcagtgtcaatttcagcaattgccaatccaccataatgtaagatagcaatccttcttgaccccttcaaacttgttatagccactacattgcggaggccacagtttagtacacccagaagactgaaagtactagagttccatagacgaattgttccgtcgattgatcctgtcacgagtactggaagttcaggatgggaaaataccacactaacatcagctaaatgctctttcagcgttgaaacacacttcatgttttggcaatcccatatcgtgggcttcctcctattggactggtcggcaaaaatcatgtgcggtgcgccatctcgtgaaaagaaatccaaacgtgtcggatgagtccgacgtaattcggatacagaatctggagaacagatattccagacctttaccccaccagaaatagtagcaaacatatttaggtccattgggttaaatttgatttgatatgtatacttttctgtgttgaatgtgcaaatcaatttccagccgttctcccagtcccacatctttatcttgtccattgggttgtcccacatgggcgcagaatgtccctcatcttcaactgccgatagcacataaggcccagttcgatggagttccaaagagcttatgccaccatattcatgagctttaaagctctttatttcagaaaataaagcctgcttgcaatatttgtacacttttatgtaaccaaatgaacatccgactactatccaattcttttgtgcaataaactttgcaactaaaggtgtgattgaaccaccaaatctgccgtcctacacctgtttttgttctctgcgaggtgggaggtgtgtccattacttaccttaactaaactaaaaaaaaa

SEQ ID NO: 30753 - DNA, 204 bp, Setaria italica
  Peptide Sequence Number=SeqID_96727
caaggagggagctcgccagctcgggcaccaccgggaccagtcgtggctggcacgtcgtgccggcgggcgttaaactagattagatcggagccagctcagtttgtggctagctgccaatgctgctgcaacgaatcatcagttcgttcgcggcaaccacttcaccgccatggccggcaacctttccctgagacacgcaacggagga

SEQ ID NO: 30754 - DNA, 783 bp, Setaria italica
  Peptide Sequence Number=SeqID_96728
ctggagtgttagcttggatctttgtacatcgttgactttgccatcctgtccatctccatcgcttcaaaaacaaactatcttctctgcttggactcgagaattattgacagacagcatctgacaaatcatgaaacctacatagttgttcatccaaaaattattgaagatgaataggtggcaccctggtcagtagaggtcctgtcagactataaacataccataatttgggttttattgctaatcttgtttactttacagaccgcacgccaacagttctgactttaaacttatattgcggcaactcgtcttcttcgtcatcatcctcatcttcactcgaatcatcttcaacactgtcccattttgagtaatcaagtcctgaatggccttttggttttggaatggcctcccagccctggggttttgaaggcagagtaggaggaacatcaaccttctgaggttcagttccaggttttctttcgagaatatgtccatttgaaggtttgttctcaagaaccagtttagtttcaggttggtcagacttagtgatagaagtctcaatcttctgatctccttttggaagaagttcatcctttcttcttcaagatacagggactcctcttcacactcaggaattgggcaagtgatagctgtgtcttcaatcgtgcctggaggttccgatatacttcagatgatggatttatctcaatgagcctgttgacatcgaatagagctgactgataatctttcagagtaacgagagtctgggcacgcaacatcagagct

SEQ ID NO: 30755 - DNA, 821 bp, Setaria italica
  Peptide Sequence Number=SeqID_96729
gaggtcgtaattacttggaaagtaactacaataaataatcacgcggagacaaactattgtatccaacttgactttcatgcagatgcctacttggttgacatcatgagtgctcagcgtaagacaagccgcaaagcagagaccagtccaacaaaaatatgatatgacgcaacagtttctttctcgaatcattgcaacattatactcaatggccaataatatgcctaaatccagttccccaaacccgttgactgccaaatatttgtaccacgatcccacaaaacgaaaacaaaaccaaatatccatgatgaatgcagcaacagtcattcagattttggagcagggtccatggtgaactggaagagtcaatccatgttctacagcccagttagaggatagaaaagttacgagtcttgagtatagtttggttgcattcgtgccaaagcaggaggcttagggttggattaattaagaggatggcattgtgctttgtgtgaattgagcaataaaaaacccctctagcttctctcgatgaaccactataccagcacctgccacgtgagcccctcctgtgaatcgcgtctaaaacatcccaacaagaatcagaactgccaacgacatcagaggcaaagcatatacgtatttgtatttcacaagtaaatacaccccaagatatgatgctatgtattagaaaccagttactccagctgttcttattcatttgatgttctggacttgtgctattagagtagtctctttctaacttgttcatgcagaacctaaaaaagcatatagttttcagttatttcgtagataattacgtt

SEQ ID NO: 30756 - DNA, 513 bp, Setaria italica
  Peptide Sequence Number=SeqID_96730
aattactagtagtttacttaacaaataggtaggaatactttacttacaaccaaatatcttctaatccttgactgagacactggtagatcatcgtaatatgatgaaggatcatggcctgagttgtatctactgctcctgcaagtaaaatggagatcactattcgagcttgactaccacatgaaccatttacagtaaggcctgtcagagcaggcatgtgagtgcaagcctacccgggtgccatgtaatcataatcttcatgtgtgtatcgcttgccatgcatttcagaatttctcggcaaataagtagtatcgtgtaatgagtagccaaaggcttcagcctggtgcttagcaatcaatgaagcaaaataatcgcctttattgcgttatctccacctcttattaaggacagcaacagcagatgactcaggaagctcattgaggcttttttacaccaatggacatcaatgtcatatcgagattatctaattatgtggctgatgcctctgacccctat

SEQ ID NO: 30757 - DNA, 349 bp, Setaria italica
  Peptide Sequence Number=SeqID_96731
ggtagagtggatggatgatcttgatatttccttagtgcctgcttcagaaatagttcttccaggcagtgcaattaacccctgtgtgcatggagggtggctttctgtctacacaactgctgatccaggatcgcaatacaaccaagagagtgcaagacatcaggtgttgaatgaggtcaaaaggatacaggatttgtacaagaacgaggagacaagcatcaccataacaggtcacagccttggggcagcacttgccaccatcaatgccattgacatcgtctctaatggctacaacaagagctgccctgtgtccgcaattttagttacttttaggaaagaacccttaaagaaa

SEQ ID NO: 30758 - DNA, 257 bp, Setaria italica
  Peptide Sequence Number=SeqID_96732
gtgtgcatcccttggcttcctcgagttctttttgttcgtcgtgccggctccagatggagttggcgcggatcacgacgtagctcgggagcttggtcgggcggctctccgtgcgctgcccgctgcggccacggcgaccttctttttgagcatgctgctgataatcgtcgggcacatccgcgccggcggcgaaggaggcggcggcgccgtcgccggagacggaccgatcggggcgcccgctgggctcctcgccaagatgt

SEQ ID NO: 30759 - DNA, 260 bp, Setaria italica
  misc_feature (258)..(258): n is a, c, g, or t
  Peptide Sequence Number=SeqID_96733
tcccaggttccaactgacgccgcctcccggtcgctctcgctgccattggccattgctggggtagagaccaggttggccgccccctgctcccgctccctctgcgtatctccatgggccaaggccagagtcagtccgcccctccggcggaggagccttctccgcccgccgtggagccgtcctcgccgtctcctgctcctgccccggcgtcctcctccctcgaggcgctcgccgcagaggcaatgtcatttgatgagggtnac

SEQ ID NO: 30760 - DNA, 181 bp, Setaria italica
  Peptide Sequence Number=SeqID_96734
ttttttgatctttagttatttttttattaaaatagaactgtttcatgcaacttgcaaaagtacaagtcttcaaagtccaatcagtgtgacacattcatcttagctactgcactctactttttcgctcgccctgactttgttccgcccttgaatcaccacaattaaaagttccattaaatgg

SEQ ID NO: 30761 - DNA, 375 bp, Setaria italica
  Peptide Sequence Number=SeqID_96735
catttttttttgaaaccatcacaatgtccatgctccttgatgataaattgcaaaatcataacagtcaacatggccccaaaaatggacatttgcctcagtatgaatggaacaaggttagaattacaacatgccatgatcttaacaatggcattgtatagcctaattgcctaacacataagcatgatttcattctagagagctgagcttctggctttagtcattcagtgtgacaaagttcaaactcccgatccccaaatccttgaaatttaatcttaccctcaaatgccttaacaacatcaggcacatccttagcatacctccacacaaacctcgccgagaagaccttcaaatttgtcttgtagtctaattgtccgt

SEQ ID NO: 30762 - DNA, 354 bp, Setaria italica
  Peptide Sequence Number=SeqID_96736
cctcccgggcgttggcagggcaaccccccaggctcgccagcgcctgcgccgccacctcgcgcgccccgctcgacttcgcctccagcagccgcaccagcagcggcacgcacccgtgctcgccgaccgcgcgcttcatctcggcggtgctggagatccggcagatcgccgccgccgccgcctgctgcgcgccgactggcccgaccctgagcacgtggaccagccggggcagcacgcccagcgacaccaggctgtcgggcgagacggcccccacgaggttccggagagcgcccaccgcgggctccggcggcagcgggccgtcgaggtagagcagcaggctgcgcagcccgccctccg

SEQ ID NO: 30763 - DNA, 318 bp, Setaria italica
  Peptide Sequence Number=SeqID_96737
gcaacctccacggcgctcgacctctcccacaaccacctcaccggaatcataccaccggggctcttcctcctccgcaacctcaccaagctgctcctcctctccaacgacctctccggcccgctgccgctggagatcggcaaggcggcgagccttgtgcggctgcggctcggcggcaaccgcatcgcggggtcgatcccggcgtccgtgtcgggcatgaagagcatcaacttcctcgacctcggaagcaaccggctcgccgggccggtgccggccgagctcggcaactgctcacagctccagatgcttgacctcagcaac

SEQ ID NO: 30764 - DNA, 367 bp, Setaria italica
  Peptide Sequence Number=SeqID_96738
ccccgcgcgacctccctctccctttagcccgcacgcgcctgggccagctcgcctcctccctcgacgcgaggacgcactgggcgaggagcggcctcgacctgcggggaagccgttcgtgcggggcggcgcatgggccggcgcacacggccatctccgacctgcggggacgccgcggtagctgtgctctggagccgccggcgctcctccttctctccggtacctccctctccctccgtacgggggcgcactgggcggcgggagggaggccggaggcgggggccgggccggaggccggcggcgacagcggcgggaggaagggcaataaatgaggttgaggggcagggtgtcccaaacctaaacctttctg

SEQ ID NO: 30765 - DNA, 448 bp, Setaria italica
  Peptide Sequence Number=SeqID_96739
tcttctctaacatcatcgttatgtatcttgtaagtgagtcaaagctctcacgtcgcagaagcaagctgcagaaggctggtgatgacactgctgcaagagatgaggatatgatacaagatagtcagaaacaggaagaggttgtgctggcagaggtcttgcttccgacgatcattggagagagcaagcaagaacaagaaaataagatggcaatggtagtatacgatgaaaagggtgctctactaggaaatggagatgtgccgatgttagtcgtgatggatgaagaaagggaaacctctgcagtaaatgatagtttgaggatgaatcaaattgttctacataacgccgatgaagtgcacgaagaaattgaagagggggattttgagttggaacaaggagatgagatgagtgaagatgtggaacaacagttcgcagtggaggacgagttggg

SEQ ID NO: 30766 - DNA, 631 bp, Setaria italica
  Peptide Sequence Number=SeqID_96740
cgcaccatcttcttcatccgctccttcttcttctggccgccgccgccggacgaacacgtggagtccggggaccccccggcgccgccgcaccccggggtgcggccggtgctccgcacgtcgtcctcgtcctcgccgtcctccgtgctcatcagtgcgtcgatctcgtccgtgtcctccttctgccggaccgaggcagtgccgccgccgtcgccgtaataggcgcccttgccggcgtagttctggtcgtagccgtagcagccgtggtcgtggccgtacccgcctccggaggagcccaagttgttggccagggaggggtggaacatgacccggctccggtcgtacgtctggtcgaagatgacgtagttcttggggcaggtgtccgtcgcctggaactccaggcccgtgagcggcgccgggaagtcgtgctgcctccggccggcgagcgggtcctcgtaggtggccggcgcggcggggtactgatcgttcgccgtgtggtacgcgccaccgcctccgtaggaggccatgtcatagttataaccgccggcgccggcggtgtagccgtatccgtagccaccgtacccgtacccggggtctccctgcatcgggccgcttggtatctgcttggttcgtt

SEQ ID NO: 30767 - DNA, 402 bp, Setaria italica
  Peptide Sequence Number=SeqID_96741
tttttcagataaatttatttgctctgatccgcgacttggactgcatgagttatttgaagaggagcttgctagaagagtcgaagaagctataaggaaaaatgtcgaggaacgtctgaactctgacgaggtgaaacttgacataaaacgccgaattgaggagggtattagaaagttatttgatgaggttgatgctcagctacaaaaagaaaagaagcagctctttatgaagccaggcagaaagcagagcaagaaagaagagagagagaggagctggatagaatgcttgaagagaacaggcgtaaagtggaggcggctcaaagaaaagaagctcttgagcagcagcagaaagagttggagcgatatttggagctggaaaggataacaaaagcaaagagaagaagc

SEQ ID NO: 30768 - DNA, 1280 bp, Setaria italica
  Peptide Sequence Number=SeqID_96742
gcacaccagagccggttggccgaaggtcgtctactctgtccccgactccccgccgaccgccgtgaccgaggaattggagggacgccgccgcgagttggtctcggtagtcggtacgacggtaccacagccttgacgccgctggctttcatacgtgaggggaggtcggccttcagtctcccgttcgcctcctcgacccgcgctgtccacctagccaaggccattccagcccggagaatagggcaggtcggatgcctcgcacggtgtccaggtcgcctccgcccttccgccggcggcgctccccttctccgcggtacaccagccggagaaaccgacgagatcgcagccgctccccctactcctcccggcgaaaaactcggtctccttctccactatgggataggagcaactcaccaactccgagaaggcatagaagcccaccgtctccaaggagacacataagacggagaagtcggagcactacaagttcatttgtaaataactcatgcagtccaagtcgcggatcagagcaaataaatttatctgaaaaaacacaagatggaagtggaagaaaagaaaggcgtcataaagaagctgaatttaagttattggaagaggagcttgctagaagagtcgaagaagctataaggaaaaatgtcgaggaacgtctgaactctgacgaggtgaaacttgacataaaacgccgaattgaggagggtattagaaagttatttgatgaggttgatgctcagctacaaaaagaaaagaaagcagctctttatgaagccaggcagaaagcagagcaagaaagaagagagagagaggagctggatagaatgcttgaagagaacaggcgtaaagtggaggcggctcaaagaaaagaagctcttgagcagcagcagaaagagttggagcgatatttggagctggaaaggatacaaaagcaaagagaagaagctttacgcagaaagaaaatggaggaggaagaagagagagctaatgagctgagattactaggaaagagccgacgttgacctggtgccatcatcttaggtcaaaaccgactttggtggctgattatgtcaaaactcaaattcaatggcaacttaggtcgtgttcaataattccttaggttgtgactagagtgggacataatcttttttctaatggtgtactgtgtttgctatatgttggattggtatttctgagaaactgatttttcttatgaaaatgtgatagtggttgcccatttatgatggatccaattatcaccagaacaaaaa

SEQ ID NO: 30769 - DNA, 485 bp, Setaria italica
  Peptide Sequence Number=SeqID_96743
tcctttcaaatctttaccatttagatcatccgccgtgcacaggcctccgttttcaagacttctgaaaatgctcctggatgagttcttcccttggtagtagagcgattgtcccacaatcttttgcttgtttcccagggtgatcaccgtcggaaacgaccgatccattttgctcgccgcgacggtgatgacccagggagacgtgttctcaacagtctgcggactaggcccgtcgttcccggccgcgtagacgacagtgatccccttctgaaccgcgtggagggctccgaacgaattgtcgctgaaaccaccaactgacagtgatagaacgtccactccgtcgtgtatcgcatcgtcgatggccgcgagcagggcggcgtcgtttcctccggcgtctcctcccccataagattttatagacggcaatgcgagcgtggggcgcgccgcctcgtgcaacacccgcggcgaggccatggaagctcggcccc

SEQ ID NO: 30770 - DNA, 334 bp, Setaria italica
  Peptide Sequence Number=SeqID_96744
cctactccctccctcccccgtagtgccgtcccgtcccgtctcagccgccgccgcagccgtcctcgggggaggcttccgcgagcacccgccgcgctccccgccggcccggccccgcggctcgcggcgagcattccgagctccgggtctccgggggccgcgcggatctggggctgccgtggcggaattcgggcgaatggttggcagctggagctggagttgggtcgagttggtttggcgagtttaggcggagggaggaagttttggggggggaaggaggaagagctggtttggttgctgggtggccgcgtgtggtacatgcgccccgaggcccctg

SEQ ID NO: 30771 - DNA, 481 bp, Setaria italica
  Peptide Sequence Number=SeqID_96745
ttaacggattattatagccctcctttgagaaatagcccttgtaacactagcttatattaattatcacactatttccaaacacagcgaaaaaattcatgccattctaattattcgaacaaagaatgatggaggatacaaaaatcataccatgctcagtgctaggtacaaatctcgagagatcagataaatacacaactctggctctcctcccaaataagaagcctaaacaaatatacccctctccatgcataacgtgaacagagaataccaagctcactaattcacgacacaaaacattacaagctcaaaaaatccattcacaaaacaaattcttactggcaggggcacaaattctagccccgatgatacaaatggtttgccgacatcaccatcaattatcttccaaaccagttgcgcagctcgggcatcttcatctccatcctctggctttcccttcctacctaagttacgggtaattctt

SEQ ID NO: 30772 - DNA, 247 bp, Setaria italica
  Peptide Sequence Number=SeqID_96746
tgatggaaatttttctgggagtggagctgccttgaatactcaggacatcttgatttcaatgtctagccaacatatcaagaacaaagctgtttgcgatcagaatcacctttcccggataacttattatgggtattttgatacatctcttggacgacatttgcaagataatttacttaatgagaaacagagctgcttatcatgtggtgagtctccagaagcccacatgtactcttatacccaccataat

SEQ ID NO: 30773 - DNA, 842 bp, Setaria italica
  Peptide Sequence Number=SeqID_96747
cggatagcagcaataggagcaattgaacactgcctctggcacaccctcaatcttcagtctctttacaaccaacgtggagttatccaactcggccttgtatgtgcttgcatatttacctttcccaagaacctcggcagatgatctcaacagctcttccaattcttgctcttgcaatgaactaaagctgtgataccttgggctcccttctctcattgctgtgatattgtgcacatttatatctacttcaccagctttctgtgcttgtacctcttcaatgagaacttgatccattttgtctgtaggaaccatattttgcggtgcttgtttgcttctccatacccagccaaacaaagctatgttttctcgtgactcatactgagcctttctaagcttccgaaggtgttctgcaacatctttcatttctggacgtttctctatgtccattgctaagcattttgctgctactttcgcaatcccatcaagaatcctcaaattgttgtcatgtgaaactttcacatcataaaagtcgcgtatcttctttctttttgctagagcttgagtaaagttttcagtgaggctaattttaccttcatcgacagcctttcttctagtaatgagttccaagagaacaactccaaaactataaacatcactcttcgaggtgagacgtccgcttcgagcaaacaaaggatccatataccctatactccctattacatgagtagtgtataaggtattatcggttgaaagtaactttgatatcccaaagtctgatatttttgcgttaagattttcatcgagaagtatgttggcaggcttaatgtctccatggatgacttggc

SEQ ID NO: 30774 - DNA, 1412 bp, Setaria italica
  misc_feature (1390)..(1390): n is a, c, g, or t
  Peptide Sequence Number=SeqID_96748
atcgagaatggcgagggcgcacgccgtggtggtgccctacccgggctccggcaacatcaacccggcgctgcagctcgccaaactgctccaccgccacggcgtctacatcaccttcgtcaacaccgagcacaaccaccgccgcgtgcaggacaccgagggcgccggcgccgtgcgggggcgcgagggcttccgcttcgaggcgatccccgacggcctgtccgaggccgaccgcggcaagcaggactacggccgcggcctgtccgtgtccatgagcacgcgctgcgcggcgccgcttagggacctcatcgcgcggctcaacggcacgcccggcgtgccgccggtctcgtgcgtgctgcccacgatgctgatgagcttcgcgctgggcgtggcgcgggagctcgggatcccgaccctggcgttctggactggaagcgccgccgcgctgatgacccacatgaggctccgggagctcgaggaacgaggatacgtgccactcaaggatcagagcttcttgacgaacggctacctcgagaagacggtcatcgactggatccccggcatgccgccgatccgcctcggtgacttctccagcttcctccgcaccaccgacccgaacgatttcggcctccgcttcaacgaatcagaggccaacaagtgcacccaggccggcgccctcatcctcaacaccttcgacggcctcgaggccgacgtcctcgccgcgctccgagccgagtacccgcgcatctacaccatcgggcctctaggctccatgctccggcgtggtgccactgccgccgccggtgaagacgatggcgaatcgaccgggctaagcctgtggaagcaggacaccgagtgcctggcgtggctggacacgcaggagccgcgctccgtcgtgtacgtcaacttcggcagccacactgtgctgacgccggagcagctggccgagttcgcgtggggcctcgcggcgagcggccacgtgatcctatggtgcatcagggacaaccttctccgcggcggcggcggcggcatggccgtgctgccgccggagttcacggccgagacggcgggtaggtgccgcgtgaccccgtggtgcccgcaggagcaggtgctgcggcacccggccgtggggtgcttcctgacgcacagcgggtggaactcgacgtgcgagaccgtggccgccggcgtgccgatggtgtgctggccggggttctcggaccagtacaccaactgcaagtactcctgcgaggtgtggggtgtcggcgtccggctggacgccgaggtcaggagggagcaggtcgccatgcacgtcagggaggtgatggggagcgaggagatgcagaggaacgcggccaagtggaaggaggaggcggaggcggcgaccggccccggngggtcgtcgttgagaatctact

SEQ ID NO: 30775 - DNA, 526 bp, Setaria italica
  Peptide Sequence Number=SeqID_96749
gcttcgaggatgctgctgatgtcaggaacctctcccttgtctacacgcttgctggagtggattgcattgattgtgcagcagatgcatctgtggtgggtgcagtaaatgagggtattgacgtagcagcctcaatcataccagcagttcaaaggccatgggtgatggttagtgttaacgatgattgcagggaccttcatttccgtaaagctgaatttgatcctgaggattgcccaccggattgctcaaagccatgtgagaaagtttgtcctgctgatgcaatttcacttgagagcatcatggttggaggagagcacactcgatctgatcccttacatggtaaacttaagggtggtgttcttacagagcggtgctatggatgtggacgatgcttaccagtttgcccttatgacagaataaatgatgcaagctttgcctgaaatcatttcaggagctgtgtcctatgttcgagatccgattaccacttctgaactgttgaaaaggatgatgttgatgcaatagagataca

SEQ ID NO: 30776 - DNA, 1245 bp, Setaria italica
  Peptide Sequence Number=SeqID_96750
gccatgtgagaaagtttgtcctgctgatgcaatttcacttgagagcatcatggttggaggagagcacactcgatctgatcccttacatggtaaacttaagggtggtgttcttacagagcggtgctatggatgtggattccatccaagttcttgccccatcgccagactaggagctgtgtcctatgttcgagatccgattaccacttctgaactgttgaaaaggaatgatgttgatgcaatagagatacataccactggaaagggaactgatacattcgatgccctctggaacagctttagtgagtcaatcaataatgtgaagctggtagcagttagcctgcctgatattggtgaatcaactgttgatttcatgaatgtgctatacgcaataatggagcctcattttcaagggtataatctttggcagttggatggccgacccatgagtggtgacattggtcgtggtgcaacaagggaaacagtttcttttgctattcatatggcttcagtgccagaaagaccacctggcttctatcagctggccggtggcaccaactcatacactattgattgcttaaagaaagctggtcttttccagtccatgacttttcctgggacaacaacctctgaaacaatcagttctcaacaagctttgatcggagggattgcttatggcggctatgctcgcaagatcattggaagaactctacgcaaaataccagcacagtttggtcgtgtgcacatcgaggatcatccagatcatctgttggaggcattacaagatgccctgtcattagtaggtcccgtgaagggttatccagccctttcaagcatgaaatgagttctccctctgtcccataataagtgcatttctagagttcaaaatttgtccaaaataagtgcgcatctaggaatgggaccacgcaactctaatggtttttctactttctcggtgcaatgattataactttacagggtatatatgtaattttcactaacatcaatctcttcacccaaactctaaaagtgtccttattttgggacagagggagtagattgacaataggaagtagatggataccttttgaacctagtttttaagtctaataccaatttaccatccagaaagtgaagaaaagaatgcggcgtgttcgaccgcaatgttaattagacgcgcgcgctgcagcgcttcgcggcgcaagcacccggtgggtcccacgcggccccgtgttttccttttcaatt

SEQ ID NO: 30777 - DNA, 563 bp, Setaria italica
  Peptide Sequence Number=SeqID_96751
taggaggttatacacatctgacagtcacctagtcacatcagctcctctgaacaatttaagcttggatgggttcctttataaatgcatagctttctatgttaatgtaaccaaccatgctctattgatgttggtcatacatgcatactaggacgtgaaacaaaccaagaggccttgcagcctaataatttacagaaactatttcaaaactcataaatatcagtacatcactgatttcagtttccctcatgttcgcttgaaatgttctcgtataaatctctcaccatgagacggatacttttctcggatgtatgcacggaggcacttctggtatgagaaatcaatccaaacaccatcggtgcgaacaacgaaaaggcatcttgacttcctgaactcagggtgcctatcaaccattatagcgtcaagcccacagccaatcttatcctgcgcgcgtggatggaacgcgaggagcttctgcacgacgacattttcgtcgttcgggcagaggcattcgccgtctccgtatctgtcggagtggaggatatccttgatgagctgcacgacgg

SEQ ID NO: 30778 - DNA, 341 bp, Setaria italica
  Peptide Sequence Number=SeqID_96752
tttgtgccaactgcaaagtgctattggtgttcttatagttcgtcttgaacaggcccatgtgatggctagcttgtgtgtctagtcttggtaaacttttactttgcaggtaaattgtttgaacctacagaactgtcttctctacctcatagttttgctagtaacagtaaactgcaggcagtgtttttacacagttcatcttcactgcctaaaaaaaactgagttggtggtggatctggcagtagtggttggtggtaccttggaggatctccttaactaatctttacatgcatgtgtaatacataaatttatttgctttatgatattggggtttttgtggcttt

SEQ ID NO: 30779 - DNA, 920 bp, Setaria italica
  Peptide Sequence Number=SeqID_96753
caaaatgactcgaaccagattcagttgttttctcactaatcaaaggttttctccggattattcttaatatgtttttttttgcacttccccaacagtggagccatcacctgtcaatttcttgcctctcttcaactgcttattagaacataagtcggtaaattcagaagggtcattcctaccacaatgcctagtgcggtgagcaacaggtgtaccacagtacttgttttcatcgataaatttctttgaaactttgctcttcaatggtacagacttcgtctgcttatgttttattttcactatacgttctgaattttcttgcatctttctttctgagggttggtgttggacgcagttacttttcttcttttggaatgtgttgtgacaccttggatgctgctagttctcttttgaggagaatcattctttgaatgacttttagctattctagacttctcagctctagtatctctatccgacagaggttgacctttagcgggtgaacattgtaccagtgcttccatagcttcaacagccatttgagtatctggaccaacatcatgcaaagctacatcagccttttcctgttcttcttccaaaggtttgccattagatagatcatccaggtccttgaaaaggtttttcttagtcctgtttccagaagcccgcttactcttcacatcacttttgagtagtcttgaatctgacaaaggaagagtttcagacctcccaggtagtttgagacttcttttgttcttggattcccctattttattttctccgggtgaattttttgaggacatctttgccctggtagaatggctcctttgttttcctctgccagctggtttctgcaacaatatgtctttgtttttactgaaaaaatcacctcctccatcatcttcacggtcttattcctacct

SEQ ID NO: 30780 - DNA, 535 bp, Setaria italica
  misc_feature (481)..(481): n is a, c, g, or t
  Peptide Sequence Number=SeqID_96754
tccctgtctcaggttccgctaagcaaaatgacatattgagctttctgcagaacaggaagtgaagcaatcgttctcttcgcttggccattcttcagaaaatgtgattcatcagctataacaatcttgaaatccaaatccagaagtgtgctttgtattttgggaactacatcgtaagatatcacattgaaaaccccatccaagcgaaaatctcctttagtgtttgagtaaaccaatctgaatccagccttatgtgatcctccagtttgtggcaataccaccaagatatcttccatggggatgttaagccaactctgaatcatagatgcccactgcaatcgcaaggaagatggagcgattacaagaactggccaggcatcatgaaggcaagaagcaacagcaattgcctgtaatgtctttccaagacccatttcatctgcaatcagggctctgccaccgtgctgtaaaacaacctgatgccttnacgctgaaatggcataagctttgactcaacttcagggggaatcctgtcatagaa

SEQ ID NO: 30781 - DNA, 364 bp, Setaria italica
  Peptide Sequence Number=SeqID_96755
catggctgacggtggcttctgcctagctggctaggtagctggcgagtgttgcacggtgtcgcaccacgctgtacatgaggatggggtggcatggcgcttcaatttgcaggctcaccggtgctcatcgagctggcgggggaggaaagggcagcagcaagggcagggccataccataatttgctgtgaattccctctacctctttattttaagtaaaattccctctactctttagcttccaggttgtaccttgatgaaatttgctggccctggtgaccagaatcatggtggttatctgatctgaacgaagaggcgcaaggggaattggcatgttggcccaccaaaccaggctgcactctcctccaa

SEQ ID NO: 30782 - DNA, 415 bp, Setaria italica
  Peptide Sequence Number=SeqID_96756
ttctcgccttcggagagctcctcggcggcctcccggcggccaagctcctgctctagccgccgccgtgccagctgccgcgagtactcccattctacctgcttcttcttcctggcgacgttccagatcctccagcacaggttctccagccggttgttccgctcctggctgttgcgcatcgccaccaccttggtccacgtcttgtggaggtcccggtcgtcgaagcggctgacgacctcctccacgaagtagcgcgtggggctgtacgccgctgcctccgccagcgccggcgcctgcagcagcctaggcgtcagtgccagcgcctgatgcggccccgcgccgccgccctgctcgccgcgcagcctcaggcccgcgtccaggatcgcctccaggtacccgttgatccactcgttccccg

SEQ ID NO: 30783 - DNA, 260 bp, Setaria italica
  Peptide Sequence Number=SeqID_96757
tcgtcaagaagatgttccgtgtgtccgacatggccacggagttcgccgtctcggcgctctggcggctctgccgcgcgggcgacgccggcgccaacgcgtgccgcgccgaggcgctgcgcgtgggcgcgttccagaagctgctgctgctgctccaggtcggatgcggcggcgtcaccaaggaacgcgccagcgagctgctcaagatgctcaacggctccaggggcagcgtcgagtgcattgagaccgtcgacttcaagggg

SEQ ID NO: 30784 - DNA, 401 bp, Setaria italica
  Peptide Sequence Number=SeqID_96758
tgaggaatcttgaatccaagtttttcaggctatttttctggcacatggcagcgaacatggcaccatggatctcaaacttgcggagcttggggtggctattgaagaagtcgaccaaatcaacctccgggaatggctggagcgcgtccaagtcgccgcagaactcgatcttcatcaccaggtgcttcacctcgctcgcgcactgcagcaccgagctcactgcagcccagttccactgaacaccgcgcagcgagaggtgttccagatctgggagcttcccagtgtccaccatgtgcaccctcccggtgctcttggcgattgagaggcgacggaggctgtgtccacgcagagtaatccaggtgaatccgtggacctcgagcgactcgaggcgaggcgcggtaatc

SEQ ID NO: 30785 - DNA, 486 bp, Setaria italica
  Peptide Sequence Number=SeqID_96759
aggacaatacctacaaagacgcatgctcctcgccgtcaatgctactgcgctccaccttctctccggggcattcctcgccgtctccgccagctggcccctctacccggccgcggccgctgcctccgataggacgaccaacatccaggccgacgtcccatcaccggaggcctggcgcatgtgcaactggcgcaggaccacctcgtcgtcgtgctcgcagcccacctcacccagggcatcctcgcgccgatgtcccgcgcagtgtgcctcggcggcgcgtaggaggcattcgcgatacgtgagttgagggtggtcggcgtcgtcgctgtcgagaagatgggatctccgtatgcaacatttgatgactgggactcgttaccctccaatgttccctttaatttccacccggagagcaccaaggcaacggcgcgaggggatttccacgcttaggcactggcttgaggacaagatgtccgcttggtggtgtgt

SEQ ID NO: 30786 - DNA, 233 bp, Setaria italica
  Peptide Sequence Number=SeqID_96760
gcagcgatggaggtttccgcacttttgttgcctgctcaaatgaataagctatctcaataagctttggctctgatcctttcaacccgccaaagcatatggcgaaaggaacaccatttgaagcatacccagctggaacagtaatagctggataaccgccaatggcaagcaggctgtgagcagatgcaccaggagctacaatagcatccagtttattatcttgcattactttctcg

SEQ ID NO: 30787 - DNA, 283 bp, Setaria italica
  Peptide Sequence Number=SeqID_96761
cggcggcggctcgtgcgcggcgcctcaaggcaccggatgcagcggcaacagctcttgtgccgacgcgcccagcggcgccaaaggctatgtctgcagttgcttgacattttacgaaggcaacccgtacatccctaatggatgccaagacgtcaatgagtgctccgatcatagtttgaatggttgcgaccacactacgatctgcgtgaacagagagggtggctatgattgtaaatgcaaacccggaatgacacgccgtgggactgaaggaccctgtaccgagaaa

SEQ ID NO: 30788 - DNA, 300 bp, Setaria italica
  Peptide Sequence Number=SeqID_96762
tagaacagcattctgcaatagaacagatcaatgcgtcatttaacagctcaagatacattacaagaatcagcaaaacatttgagggggaagacctacattgcggatagcaggaaaccagaaatgaacatcgagatgctcccaatccagctcttcttctcattgaatggcagcttcactgagccataccttctcccaacaatgtcagcaaagcctgccaagttaaggcccaagcagatgcagatacttagcagaatcaaccaaatgcaatgacgatgtcctaacaaaagatgtacaatgaat

SEQ ID NO: 30789 - DNA, 310 bp, Setaria italica
  Peptide Sequence Number=SeqID_96763
cccgtgtcacggattttactagagcttcgtcggtggaaagacgtagtccgtaagtcagaagcctcattgagttcaagaacggaacaactgcagcgaaatatcgtgcttctgtcgaattactgcagatagagcacccttttcttaagctgtgtcattccaaatgtgaacattctgatgcttcatgcggtggaagggcatacctgaatagtggccaggatgacatgaacagaacgccggatagcacatgcacaatcttcctgctcaaactctgcctttattctattgtacttatttgtttaattttcttttt

SEQ ID NO: 30790 - DNA, 718 bp, Setaria italica
  Peptide Sequence Number=SeqID_96764
tggtagccaaaggtacagagatattgtcatctacaacatcaatcacaggaatacactccactacggtggctgccaatgcaacaagagccagtttaccaaatgcctcctcccagctaacatgaatgtaaccaaggctggagaagtagaacagcattattgcggatagcaggaaaccagaaatgaacatcgagatgctcccaatccagctcttcttctcattgaatggcagcttcactgagccataccttctcccaacaatgtcagcaaagccatcgccgccactcatcatcgacaaggaaacaatcccaattgcggactcccgccagaagactaaaacactgaagagtagaaccaagacataatagagaggacctctcagcaattcctctggttttccttcccgtgtcacggattttactagagcttcgtcggtggaaagacgtagtccgtaagtcagaagcctcattgagttcaagaacggaacaactgcagcgaaatatcgtgcttctgtcgaattactgaatagtggccaggatgacatgaacagaacgccggatagcacatgcacaatcttcctgctcaaactcttctcgacgagccgccgctcggtgagcacgtcgaaggtgcgcaccagggcgtaggcgcccgcggtaacgaacagtgtggccgccccatcccgcagcaccgccggcggcgccgcggccgccagcgccgccac

SEQ ID NO: 30791 - DNA, 223 bp, Setaria italica
  Peptide Sequence Number=SeqID_96765
aacatgttcaaaagtttctgtttgcatgatggcacttggcaaagtttgcagcagctatggcagatggtgcggtggtagcagctcagccttgagcactgatcggatcagatgaagattcggaacatgttcagttcacttcatcattcaaattactgtcaaaatctagttatttcatcactcggtgtatatatccaggagataggtgtgctatttcagaggatag

SEQ ID NO: 30792 - DNA, 328 bp, Setaria italica
  Peptide Sequence Number=SeqID_96766
ctagatttgcaatcaagtttggaggcatcaacctctaccacactgctgctgcttcctgagaatatggccatgcactcctcgcagcgcccacatggctggttcccacctggagaacggcagttcagcgctgctgcaaatatcctagctgcggacgtcttgcctatgccgtgcggaccatggaagagatagataggagcaagctttccttttaaaacagcactggaaagcgactgagcaataacatcatgcccaacaagctcggagaaagatttaggccggtacttctggagcaaacttctcgagctttcctggaatgttgtcttggtcc

SEQ ID NO: 30793 - DNA, 363 bp, Setaria italica
  Peptide Sequence Number=SeqID_96767
aacggaaacgaaatacaacgctaacggtaatggatggatcaaatctctaattttgtttggttcaacactgtaaacgcaaataaataccagagctatagttgaagaggaaggcaagttgcaagaacctggatgtgatccgtttacagcggttgtgcagcggtaacatttttgaatgggctgtaatctgattacggggtaatggattacaggccatgctgaaacaaacacatgtaacgtaatctgttaccttctgtaacctatttacgttacaaaacagtaaaccaaacgttatctaagagtttgagggctagaaaaaaaaagttcactagattttgtagggaatttgtcctctagaaatcaggg

SEQ ID NO: 30794 - DNA, 499 bp, Setaria italica
  Peptide Sequence Number=SeqID_96768
atgtacagactagtcaaccaagcatcacctacactggcctgatcattttttctctagccccgagccatcgccaagaaacgccctggacgggtgcgcgatcacacggacgggaagaacttgttgaggttgaagggcagggagtagaactcctcgctgcggctgtcggtcttgaagctccggaacttgtcccaccagtggtatcccctgtccctccgcaccgccgtgtcgcgccgctggatcgtgttgtccaggaagaaggccaccagcaccgccacgaaaggcttcgacgagaagggcacgttgatcatgtcgttgaaccatcgggcgccagtgtgcaccgggccatagccggccacagatgtgtactcgttgaagtactgggggactgacaagcccatgaacaaggagaaccccaagatgaacttggtcctgaagctgttcaggttgcagaactgaaggaagctgagaccacaggcgccgatatatgcgaagaatatgc

SEQ ID NO: 30795 - DNA, 493 bp, Setaria italica
  Peptide Sequence Number=SeqID_96769
gagcgccagcagccacgctgacgacgacgcacgcgtcctagtaatatctcggcgtctcgcagctagccctgcaggcagcggcggccgtcctagccgaggccgctcgtgtaaaaccgcagacggcgcggcgcggccgcgagaggatctagacagccaggaacaagcccggccgctcgtcccggtccacgcgcagatcgcacgagagcggcattggccgtcgtcgctggcagggctcggcatcgattcggttcctctcgtcgccttgccggtggtttagcgcgcgacgagaccccgagagcgagagaccatcatggcgctggcgagcacggagaaggtggtgctggggtgcatcgctttcggcatcttctgggtgctggccgtgttcccctcggtgcccttcatgcccgtgggccgcaccgcgggctccctcctgggcgccatgctcatggtgctcttccgcgtcatgacccccgagccaggcctacgccgccat

SEQ ID NO: 30796 - DNA, 2658 bp, Setaria italica
  Peptide Sequence Number=SeqID_96770
cgcggtggccggccggcgagagcgccacgtcgttccagtccagacagtcgatcaagcagccgattatattagctagcacgccgcagtagactttcctgctcctattctctccacacagaaataatccgtataaaaaaacttccacatccagattagcgaagacactctgcaggctccgtgcagtgcgtgcttgttctctgaagcagcttctccgacgcacatggacgcatgtagctgatcttcttcaatccgcagctgacctcgatctccacacgcggcggcaggcgacagaggtggtggttgcgggcatggcgtcaatgggtacctagtttctggccgggtgatgtgatagcaatgatctagacagccaggaacaagcccggccgctcgtcccggtccacgcgcagatcgcacgagagcggcatttggccgtcgtcgctggcagggctcggcatcgattcggttcctctcgtcgccttgccggtggtttagcgcgcgacgagaccccgagagcgagagaccatcatggcgctggcgagcacggagaaggtggtgctggggtgcatcgctttcggcatcttctgggtgctggccgtgttcccctcggtgcccttcatgcccgtgggccgcaccgcgggctccctcctgggcgccatgctcatggtgctcttccgcgtcatgacccccgagcaggcctacgccgccatcgacctccccatcctcggcctgctcttcggcaccatggtcgtcagcatcttcctcgagcgcgccgacatgttcaagtacctcggcgccgcgctcgcctggcggagccgggggagcaaggacctcctcttccgcgtctgcctcgtctccgccgtcgccagcgcgctcttcaccaacgacacctgctgcgtcgtgctcactgagttcatcctcaagctcgcgcgccagaacaacctcccgccgcagccgttcctcctcgcgctcgcctccagctccaacatcggctccgccgccacgcccatcggcaacccgcagaacctcgtcatcgccgtccagagcggcatcaccttcggacagttcctcatcggggtcttcccggccatgatcgtcggcgtcatcaccaacacctgcatcctgctctgctacttctggaagtacctctccgtgccggagaaggaccaggaggggggcggcggcgccgccgcggggcccgaggtcgtcgccgacgacgaggtcacctcgcaccgcttcacgccggcgaggatgtcgcacgcatcctccgtcaacggcgtcgacgcagactgcatcagcgagcccatccgccggagcgacagcctcaacagggccgacacgcacagcatgaggagccggagctacaactccgagggcgacatccaggtcgccatcaggtccatgcgcgcctccaccatgtcgcaggagatggtcgaggtgtccaccatctgcgacaggcgcgacgacgccgtgggaccaaggaagatcaccaggacaaccagccaccaacgcagcgtcatcatcgaggacgcgcctgaggccgatgccaaggacggcgagaagggcaaggacggcgacgaggtcaaggagaagaggtggaaggtgctcgtgtggaagagtgcggtgtacctcacgacccttggcatgctcatcgccctgctcatggggctcaacatgtcctggtccgccatcactgctgctctcgtactcctggcacttgatttcactgacgcacaggcttgcctggagaaggtgtcatactcattgctaatcttcttctgtgggatgttcataacggtcgaaggcttcaacaggaccggcattccgaacgcgctctgggagctggtcgagccgtattcgagaatcgacagcgccaaaggcactgcgcttctcgcaattgtgattcttgttctgtcaaatgtggcctcaaatgttccaacagtcctgctgctcggctcaagagtggcagcatcagcagctgcgatctcccctgcttcacagaagaaagcctggctcattctagcctgggtcagcacggtggctggcaacctgactctcctgggctcagccgcgaacctgatcgtgtgtgagcaggcacggcgtgcgcagttctatgggtacaacctcaccttctggagccacctccgcttcggcgtgccatcgaccatcatcgtcaccgcgattggtctcctcatcgtcgccagttactgaaaccagcacaagggtctagcaccagcagcagtagccagcaagaatgctgcaggaaacaagtggactgagtaactgagagagtaaggaaacagcagtgcagatgggaatgtacctgggaaagagatgttgtactgataggtatctgttgtaacgttgtaattgttctatgtttgtgtaatgttcacgcaagcgaagcgcgcgaaggcgtcggatggcccatctgctaaggcaaataatgggcaaaggtttgtagtagatgaatgcacgacgaagtggtcggcacccctgttctaaggcgaaaacgttcggtctagttcaggtaggatggctggtatcgtaagttaaggcttctcaggttttggtgttgtcaggagccttttgtgtacttgtgtttggaacttctcccggtgaaaaatatgacaaacagtttggcttacaataaaaaaaaaa

SEQ ID NO: 30797 - DNA, 441 bp, Setaria italica
  Peptide Sequence Number=SeqID_96771
gcagagtttcggtgcaaccgacggcgacgcccacgcccacgacaatgccaccctccaggttctaccgtccacccctgatttaacctcccctgcatctacaagaggcatcgctgatcttttctccaatccggaccagggactcctcccaaacccaccgcctgcaccagggaggaagcgccggcgcctcaagaagaccatggtggcgatctccagtctgcggcgtagcaaacgtcaagcctgcagaaggatcaaacatctctcggcggaagaaagggtgaatcacgttctctgtcgccgcttgggctacatcaaggacgatttcacgccggcagaggaagcgatcagggacttcatcgccaccttccagggccctatgccccagttcatcatcaaggccatgacggcgctgttccaactggacgacgacgacctctgcaaggc

SEQ ID NO: 30798 - DNA, 435 bp, Setaria italica
  Peptide Sequence Number=SeqID_96772
tttttaaggaaaagaaaactaaaagaaactaatttttgcatttctccttgaaagtcgttgaacaggtcggttacaaaaggcatatactgtacatcattggctgcgatacaacagcaaaaaaataggaaggacatctcattcgtcgagcaactgtgccggatatcaactcaccagtcgtcatcccatcgtaccccatgtttagcagcgaggtagtaagcgttgataggccctctacccccagcctcgtagagctcaggagcaactatgttctgatcgatctcatggattatcggggtcagcacgttccatgcagcagccagttcatcgctgcgcatgaatagatgactgtctccatctagcacatccaggagaagatgctcatatgaatctggaacctccgtattgtacttatcacggtaaaagaggttgagttct

SEQ ID NO: 30799 - DNA, 398 bp, Setaria italica
  Peptide Sequence Number=SeqID_96773
atttgtcttcactagcatcatcagaaacaatatcatctacagaagtttcgtcttcagtatggtactcatccgaacattcttctaaatcactgtgattagccttagaactcgcacaactaggcttttgaggagcctcgggggatagtatttgacaaggaagggatcaaaccagacaaatctttaagaaaagaaccgacaaacatagataaaagagagttagcattggtacagaagttattaaccactcgacacaattcatccttgacagaaggagcacaatcagctgccagatgagaagatacaaattgctcaacagttagtcctcctcctatgactggaggaattttgagtccagagtttatccagtggctgttggcaatagcttttactggaaggtt

SEQ ID NO: 30800 - DNA, 531 bp, Setaria italica
  misc_feature (334)..(334): n is a, c, g, or t
  Peptide Sequence Number=SeqID_96774
caaaaaggaaaggtcaagtgggatactaaatcgttaagccctcaattgctaggaacactctttttaggggaattgctaggaagacttttttagtcaagagagactagctgaatagattagaaatggaacaggaagtaatcctaacaagtaacaaacaaatacaatagctaaaatactgaaattatgttaaatcaaatgcacagaagtatcacactcagtgtttaattactcatcgctactaacaaatgcacactcttaaaagggactaattgattacgttaaaaatggaagagaagtaatcataacacacaaaatagttaaaggatgaaattangttaaaccaagacgcacagaaggagcacaatcagctgccagatgagaagatacaaattgctcaacagttagtcctcctcctatgactggaggaattttgagtccagagtttatccagtggctgttggcaatagcttttactggaaggttgccatagacaccatcattcttgagatatcgtgtccattgttcacaact

SEQ ID NO: 30801 - DNA, 918 bp, Setaria italica
  Peptide Sequence Number=SeqID_96775
gcggcagggccatgggctcgagccggggcagtatcctcaattccttccatgagctcgagtcattctacatagacaagtggaaccgtgagatgccgctcaacaagatgtggccggtcggtccgctctgccttgccggcgaaccggtccggaccttggattcagatatagccgcctggcttgactcaaggctcgcgatgaaccgcccggttctatacgtggcattcggttcgcaggctgacctgagccggtcacaacttgaggagatggcaattggcttggaccggtcggatctggacttcatatgggtggttcgatcgaagtggttcggtcaagacgagccattccaaggcaggttcggtgacagaggtaaagtggtgaaatattttatcaaccagctcggtgttttgagccataaagctatcaaaggctttttcagtcattgcgggtggaactcggtgatggagagcatcagcatgggtgtccccatcctcgcgtatccaatggcggcagagcagaagctaaacgcaaaattcgttgtcgatgtgctcaaagtcggaatcagaatttggccgtcgaaaatgggggacggtggccctggaagcgagctggttccgagcgaagatgtgcaaacgttggctagagagttgatcctgggagagggagggaaatgtgcggccgccaaagcgagtgagctcgcaacctcggctagagccgctatggagacgggcgggtcgtcgtttgaaagcctagagctgatgctccgtgaggtgtgtgagattggaaggccggaggctaaagagtgatcagcagctatcgtcttcagtgctaagacggtgtttggttcgtagtatggtaatgtaaatgcaaatgaaatggatcgtagtcctttcaactatgaaatgtgcgactaaactcttt

SEQ ID NO: 30802 - DNA, 380 bp, Setaria italica
  Peptide Sequence Number=SeqID_96776
ctgctgttactagaataatgggtttgcttaggaatggttctgagggagtggcagctgaaggttctggacttgtagctatgctaattggtggtggtcctggtgatgcatccatgttaatggatacaaggggagaatcccatgctacctacatgcatgcaaagtctgtactgttctcacacccaatgtatgttccgatccttgttaacaggttgaagcctatatcagtttcaccattgttatctctgtccgttgtggaagtccttgaagctatgctttgtgaaccccatggtgaaacaacccagcatgctacatttgttgagctactgcgtcaagttgctggtttgcgtcgtcgtttgtttgcatgttttgttttgtctatt

SEQ ID NO: 30803 - DNA, 284 bp, Setaria italica
  Peptide Sequence Number=SeqID_96777
tcacgagcagctcgatggtgatctcggagaggacccccatgaccaggatcgagacgagcccgacggcgacgccgagcaccttcatggtggccgggagcgccataatgccggccccgatgatggaggtcgcgaggttgaacaccgcggcggtcacactagacccctccggcggcccggcggggccgtcgccaatgagcggcagctcgtcatgctccccgccaccgccgccgccgccgtcctcgagctcgcccaagaatgaatcttgcttggagatcttggcgtgg

SEQ ID NO: 30804 - DNA, 249 bp, Setaria italica
  Peptide Sequence Number=SeqID_96778
gcgcgggcagagggtcagggcgggcgcatacttctgggacgtgtccaagccggtggagatggaggagatcgacagcatggacaagctcgacgacgcgctcaggtggtccgtcgagaacaaccacgccgtcgtcatcgactggtacgaaaactgctaccatgctgcctgacctaacgattctttggcttcttaaattactcaactccatggacctgtctggtgtgtggccaatgattagatactgatttg

SEQ ID NO: 30805 - DNA, 626 bp, Setaria italica
  Peptide Sequence Number=SeqID_96779
gcggcggcatcgccgcacccgcactcgtcagccgcttgctcgaccgtcggcggcggggcggccgggcgggtcctgtggctgtggaacggcgtcgggagggagagggggaggagggagcgcgggcagagggtcagggcgggcgcatacttctgggacgtgtccaagccggtggagatggaggagatcgacagcatggacaagctcgacgacgcgctcaggtggtccgtcgagaacaaccacgccgtcgtcatcgactggatggctagttggtgccggaaatgcatttacctgaagcccaggctggagaagatagcaggggaatatccaggagtcaggttttactttgttgatgtcaaccaagttccacaaacggtggtaaaaagagggaatataactaaaatgccaactattcagttatggaaggatggagaatggaaagcagaagtaataggaggccataaagcttggcttgtgatggatgaagttagagaaatgatccaggcgaacaaatgactaaacacctaagccctgcaactgatattgtactgcaaaatgtatatagagagattcggatgatctcttcatatactaagtcacaaccaaatcaataaagctatatttcagct

SEQ ID NO: 30806 - DNA, 1324 bp, Setaria italica
  misc_feature (1270)..(1324): n is a, c, g, or t
  Peptide Sequence Number=SeqID_96780
gcaggggaatatccagggttggtgtaaattcactgcacctctgtggattggcacaatttccagttctgtcatattgatctgttatcctgtaaactgttcccaagctctgaatatatgcataccatattgtggaatgtgttaatgatttgttggattaaatattccttcaaatttctgttgcagagtcaggttttactttgttgatgtcaaccaagttccacaaacggtggtaaaaagagggaatataactgtaagtcagcaaattctagagtttattcacaagattgttattgatttagagtgactaaattttttattccttgatttaaaatgactctgaaagcatctgatttacctttctctgtgctttgcatactgcttttccatttgtctgtacatataccttcagaaaatgccaactattcaggtaccaccacattctcccatcatttaattcccatccctatatcattcgaaaactcgaattgttgatcctaaactacacatcctatacagttatggaaggatggagaatggaaagcagaagtaataggaggccataaagcttggcttgtgatggatgaagttagagaaatgatccaggcgaacaaatgactaaacacctaagccctgcaactgatattgtactgcaaaatgtatatagagagattcggatgatctcttcatatactaagtcacaaccaaatcaataaagctatatttcagctccttatcacagctggatgggcggcgatggcgtcttcgacgtcgtgtcctccttggaggcgttgccttggaggtcctctggcccagcattcattatttaggcggagtctgttttcatggtttctgcacaacaaggtttggcgagcaatagaagacaaattttgtaacaggatgggtccaacattaagtttctaagcagacaagagatgtgatggattgttactgcataaagacaacacaaggttgaaacatggacgaaaaaagaagattgaagtttagtcttctaatggtctttctttgtcttaagagttttctttcttgtgtttttgagctcctcttttttttttggattagagtctaagaactctttataaccctttagctgtatatatccaccatatggatatagtaggcttgattttatcctttatctaaaaaaaaacagagcagagctggttaataatactgtttcgatattccgaatggattccaaaaatggtacagatgttctgcttataacacggaagccaacagctatattctnnnnnnnnnnnnnnnnnnnnnnnnnnnnnnnnnnnnnnnnnnnnnnnnnnnnnnn

SEQ ID NO: 30807 - DNA, 259 bp, Setaria italica
  Peptide Sequence Number=SeqID_96781
tacactcattaatcaccagctcctcaaccttgggaaatatcggctcttctccttgtacctcatgtgcctcccaccatgcctcaaattttgccatttctaacaagataagcacattcagttttggaaatgtgacaggtgtagtaccaccgctgcacaaacaatgtaaactattcaaacgccacaggcgaagaatttgcagagctggtagctcccagagtgcaggaagctcttcgagctttttgcaaccgaataattcgag

SEQ ID NO: 30808 - DNA, 549 bp, Setaria italica
  Peptide Sequence Number=SeqID_96782
tttgtatgcagaagtttcaggaatgatgtggaaattagtttcctctgcttcactatgggtcaaaggcatcatcattaattaaaccttttcatacatgcaaatccaacagaaacagtaagaataaagattgacaacacgaccgtcgtgtgtaaatgcagcttctatacctgcagatattgaccaccttaataaaaaacagaaaagtgatattctatgcaacactgtcgttaaggctttaaacatgatccacaacggacatgaaaagtcaaaatataccaaataacaaaaaagatactttcttttagaaccagatgcaagtctccactacactataaccaccaggccaatatcaaacgaaacaatcattttaaaggagcatgagcaaaatttagaataacagcaaccgccccaagaaaataggattacagccaaacaacccaacaatgactaggatcacagaatttagtgacgtagcagtggagccttcatgcaccaaagattaaagatacaaaaaaaaacgcattttttgggggaatctaattttgatta

SEQ ID NO: 30809 - DNA, 422 bp, Setaria italica
  Peptide Sequence Number=SeqID_96783
ctcagtgggcgacgccttcggccgcgcccggcgccgccgtgctcaacgtctgcatcgcctccaccaccaccggcacgctcgtcgtctacctcatcatcatcggggatgtgatgtccgggagcgtcggcggaggagacgagcacgccggggtgctgcgggagctgttcggcgcgcggtggtggacggggagggagttcgtgctgctcgtcaccgccgtcttcgttctgctgccgctcgtgctccgccgccgtgtcggtgagttcacattccagttgcgccgtacattctagttgaatatttaatatcagagcaataattttggttgagattggttgctaaaaactgtactagtttgacattacaatttagattggttgagattggttgagcaataatattttagttgagctgctaaaaaaaaa

SEQ ID NO: 30810 - DNA, 1819 bp, Setaria italica
  Peptide Sequence Number=SeqID_96784
cgccccgcgaaaatgacgccgccggcgagcaagggcaagagcgccggcgggctggacgacgagccgctgcttccggagttcttcccgggcgacggcggcggcggcggggcgtcggtctccggcgcggtgttcaacgtgtcgacgagcatcgtgggcgccggcatcatgtcgatcccggcggcgatgcgggtgctcggggtggcccccgcgctgctcctcatcgccgccgtggccgcgctcgccgacgtctcggtggagttcatgctgcggtacacgaggtgggcggcggccaagcaggccaccacgtacgcggggctcatgggcgacgccttcggccgcgccggcgccgccgtgctcaacgtctgcatcgcctccaccaccaccggcacgctcgtcgtctacctcatcatcatcggggatgtgatgtccgggagcgtcggcggaggagacgagcacgccggggtgctgcgggagctgttcggcgcgcggtggtggacggggagggagttcgtgctgctcgtcaccgccgtcttcgttctgctgccgctcgtgctccgccgccgtgtcgattcgctgaggttcacgtcggccatctccatcatgctagcggtggtgttcatgctcatcagcctgggcatcgcggtgtacgcgctcctcaagggcaccgcgaccatgccgaggatgctcccggacttctccaggctctcctccccgttcgagctcttcaccgccgtccccgtcatcgtcgtcgccttcaccttccacttcaacgtccacccgatccgcgcggagctgagcaagacgtcggacatgaaggcggcggtgcgcatctccctcgtgctctgcgccgccatctacgccgccgtgggcttcttcggcttcctcctcttcggggacgccaccatggccgacgtgctcgccaatttcgaccgcagctcgggggccggcgtcccgcaggcgctcaacgacgcggcgcgcctcagctacgcgctccacctcgtgctcgtcttcccgctcctcttcttctcgctccgggtcaacgtcgacgagctcctcttcccgggccgccggccgctcgccacggacacgcgccggttcgtgtccctcacggccgtgctcatggcggtgctctacgcgctcgccatcgccatccccagcatctggacgctcttcgagtactccggatccacgttcgctgtcaccatctcgttgatcttccctggcgccattgttctcagggatgttcatggaatagcaaagcggaaggacaaggctttggcggcgacgatgatcattctggctgtggtcacgagcagcattgccattgcctcaaacatcatgagctccatcagcgacaaagtcagagaaggtcatgactcatgaagctagcagatgatagttcagataaatcgagatgctgttactgtttgcaggtcaacagagcgaagatcgtcgggcgtgtaaccttgctagcttttgatctcatagagaatgaggtactctgctacggttcgtgagatgcaagcttagcccgtgcccagtcatgctgtagatgtgtgtatggaaatacctgccggccattgttgtatacttgtactgatgagtggcgatacatgtactgtgtatgatagcaacgaatggtatagatttataggatttaaattcactcaaaaggatttaccatcactgatccttagccttataccttactcagtggttggttagtggtatactcatcagaatttgtccatgataagtactgaactaggctcattgagaacgaacagatgtgcagattcagattgctaaccataaacaa

SEQ ID NO: 30811 - DNA, 372 bp, Setaria italica
  misc_feature (47)..(47): n is a, c, g, or t
  Peptide Sequence Number=SeqID_96785
caatgcagttatgaatttccaatcgttgggttctttggcttcaagcntagtttcctgaaagctctagaagttttaaatgttttaagcctccaatctctggaggaatgatgccgcttaaggggttagcaccaagctgaaccaaccatagactggaagcgttagcaattgatgcagggatactgccacggaactggttgtgatcggttccctataatctgcagattgggaaaagaattgaatgcatttggaggaagacttccacttaaataatttttgttgtacagtgaatgcttgtagagaggaaatattccaaatagaattggggatcagaccagtaaaattgttaaagcctaaagttagcctagataaatt

SEQ ID NO: 30812 - DNA, 1983 bp, Setaria italica
  misc_feature (1)..(69): n is a, c, g, or t
  Peptide Sequence Number=SeqID_96786
nnnnnnnnnnnnnnnnnnnnnnnnnnnnnnnnnnnnnnnnnnnnnnnnnnnnnnnnnnnnnnnnnnnnnaatttttttatatagtagataaatagaaccagcaaaaagatgtgcacggacatccaaatcgtttcgaaagtacaaaggatctaaaattaaggtggggctcaaattcagacaaaaaaataatcttctccaagaaaaaaagaataaaaaaatatcagattcagaagaagggtaaatgggaatttattccccaataaaccccttgccctcgtaaacttgtcaagtcccgtgcccctccttccgacgcggcggagatcgaatcgagcgcccgccacggcgatggcgactcgagtcctgccgccggcgttgcttcctctcctcctgctgctgctcccgctctcagcccgcgccaccgccgccgcgggcgaggagttctcgcgcgacgggcgggtgatcgacctggacgagagcaacttcgaggccgcgctgggcgccatcgacttcctcttcgtcgacttctacgccccgtggtgcggccactgcaagcgcctcgcgcccgagttagatgaagctgcgccggtattggcagggttgagtgaacccattgtagttgccaaagtaaatgctgacaaatacaggaaacttggatcaaaatatggagtagatgggttccctaccctgatgctttttatccatggtgtcccaattgaatacactggttcgcggaaagctgaccagcttgtccgcaatctgaagaaatttgtttcgccagatgtttctatccttgagtcagacactgcgataaagaactttgttgagaatgctggtacaagctttcctatcttccttggttttggggtgaatgagtcgctgattgctgaatatggaaagaaatacaagaaaagagcttggtttgctgttgcaaaagatttctccgaggacatcatggtaacctatgagtttgataaggtcccggcactagttgcaatccatccacagtataaggaacaaagtttattctatggcccatttgaaggaaatttcttggaagattttgtacgacaatccctgctccctttggttgtcccaatcaatactgagacactaaaaatgctgaatgatgatgagaggaaagttgttctcactattctggaggatgattcagatgaaaattctacacaactagtgcaagttttgagatctgctgctactgcgaaccgtgatttggtgtttggatatgttggaatcaagcaatgggatgaatttgtggagacttttgacgtttccaagagttcgcagcttccaaagctactggtgtgggatagaaacgaggagtatgaactagtggatggttcagagagattagaagaaggtgacctagcatcccaaataagccaattccttgagggatacagagcaggaagaacaacaaagaagaaagtcactggcccttctttcatgggtttcctgaactctcttgtcagcctgaactcgctgtatatccttatatttgtcattgcccttcttgttgtcatggtgtatttcgctggacaagatgatactcctcagccaagacgagttcatgaagagtgatggaagcttggggagctttttgcatctaagctagcaaatctaccaggagacaattcagaggttagatctcaagttttcaactgacgtggttcctgaagagtgtggttttagaaattgatgttgacattcttcaatctcaattggcaatcatcaacttctacattttgcctgtttgcggttctactttgtgtccttcaatttgtttgttgtttagagcttagaaactagcctctgcttgtgtattctagaaactgccatttcagagttcaccatgtgcattaaacattttctgtgaaaatatatttgccatcatactctgctactcaacttttgtacaagtaatacaggatatatatatatatataaagtttgtgactaaaaaaa

SEQ ID NO: 30813 - DNA, 299 bp, Setaria italica
  Peptide Sequence Number=SeqID_96787
gatcgctggactagattgctgcagctgctgctggacaccgctgcaagggtagaagttgtgaggcgccgggaactgggtgcaagggaccatgactttggttcccgcgggatgattggcaccctcgtcgaagcacgctggctgcgtggacgccgccggcatgatctgttgctgccctgcgcagggcgccctctcctgctgtgctttctgcagtttcatctcagctaacagttgcgcgtacactcgctgctggcgcatcatcatgtcctccatctgctgctgctgtggtggcggtggtcggg

SEQ ID NO: 30814 - DNA, 744 bp, Setaria italica
  Peptide Sequence Number=SeqID_96788
cgtccacaccgacgtgtgcttcatggccggagacgtgcgcacagacgccgcgtccctgtcgctcctgctcttcccgccgcacgaccagcagaagcaagcgccgaacggctcgtcgtcgacggcgacggaggaggagagggtgcggccctacccgcgcaagtgggagcgcttcatcatggagaagatcccggaggtgcgtctccgggtggcgcggccgccggatgagcgcaggtgcgacgtccgtcacgacgcgcctctcctggtcatgtcggcggggggctacacggggaacctgttccacgcgttcaacgacgggatccttccgtcgtggctgacggtgcagcacctccgccgccgcgtcgtgctgggggtcctctcgtacaacccgtggtgggcgggcacgttcggcgagatcatctccgggctctcggaccaccacgtggtggacctgctccacgacaagcggacgcattgcttccccggcgccatcgtggggacccgcttccacggcatcctcgtcgtcgaccccggcaggctccgggacaacaagaccatcgccgacttccacgacctcctggccgacgcgtacgagaagcccaagatgacgccggagaagacgcaggccgcaccggcggagacacggcggccaaggctcgggatcgtgtcgcgcaaggggacgcgcgtgatcgagaaccaggcggccgtggcggcgctggcgtcgtcggtggggttcgacgtagaggt

SEQ ID NO: 30815 - DNA, 259 bp, Setaria italica
  Peptide Sequence Number=SeqID_96789
cgatggtggaggagtacaccttcaccttcctggccatggccgtgggattcctggtggtggtgtacttgtacgagccgtactggaaggtgcggcacgtgccggggcccgtgccgctgccgctcatcggccacctccacctgctcgcgaagcacggccccgacgtcttccctgtgctcgccaagaagcacggcccggtcttcaggtttcacgtgggaaggcagccattgaccatcgtggccgatgcagagctttgcaagga

SEQ ID NO: 30816 - DNA, 427 bp, Setaria italica
  misc_feature (1)..(54): n is a, c, g, or t
  Peptide Sequence Number=SeqID_96790
nnnnnnnnnnnnnnnnnnnnnnnnnnnnnnnnnnnnnnnnnnnnnnnnnnnnnnttttttttttttagtattgttataagaccggcaacctcattgtctggttttaaaatactccaagagttgaataatttcaactgcagaaggtcttaatattttaagccaggtattctaccagaacttctgatggtcattgccataaaaatggaaccaccttgcattactgcactacattttacaagttcgatggcatcaaccatttgctgcaagaaccaaattctaccaggtattcctaggtgacaactctttctccgatggtagctgcagcagctcacggataccttcacataccaacttgatctgtgcttttatgcttgcgatgagatgtgtgtattcatctatttgcctgcaagcattcaacatttccaac

SEQ ID NO: 30817 - DNA, 769 bp, Setaria italica
  Peptide Sequence Number=SeqID_96791
ggtttttttgtagacaatggtagcggatggaatccaatgctcagcgagcacgcacaacactgtgatcgatgggctgttcaagaatgggagggcagaagcagcatgtcggctgttttatgagctaagaaggaaagggcaactgttagatggaattgcttatagtatcatggtgagggagttctgcaaggagggggtgggggaccaagttgcagaggccctagacttggtgaaggagatggagcagcggggcttcgttgttgatttggttaccataacatcattgctaataggtttcaacaagagtaaacgttgggacctggaagaacaaatagtaaagtttataagggacggctctgtattgccggatgccattcggtggaaatcaaacatgatggtcgccctgagaggccctcaggacagagggaaagatgggacaccaatgttttcctttgatggtaatatggatgatgtgatgagtttggttaaccctgcgggacacactgatactgatgaaggacccacaaataatgatcccaaggatgattggtcattgtcaccacacttggatcatattgctaaacgtgctgacagtttgaacaactctgttatatttacaatgcacagagggcagagggtgcaaggtatggggggccaaactttcgatgctgacatgatcaatacatacttgtctaatttttttagccaaagggaagttgagtgtagcctgcaagttatttgagatctttacaaatctaggaaacaaagggac

SEQ ID NO: 30818 - DNA, 365 bp, Setaria italica
  Peptide Sequence Number=SeqID_96792
cgcggctgctgcattccggcaacctggtcgtcctccgccaccggaacagcagcgccgtcctgtggcagtcgttcgaccatccgtcgaacaccttgctgcccggcatgaagaccggcaagaatctgtggaccggagccgagtggtacctcacgtcgtggcggtcggccaacgacccggcccccgggccataccggcgagggacacagacggccgggcttccggagaacgtcgtgtggcacggcggcgcgaagaagtaccgtacgggcccttggaacgccctttggttcaacggcgtgcccgagatgcggtcgtacgcaggggcggatccagggcccgggctgcccgggctgcagcccggggcgaga

SEQ ID NO: 30819 - DNA, 783 bp, Setaria italica
  Peptide Sequence Number=SeqID_96793
tttacgttcgttttccttacgttacgcgtccacgagcttgctgtagttcttgtctttcagatgctcagaagcccagctgcacatgggtttgtgatcatccggttcaggaaccctcccggatatgatctctatcataagcgccccaaatccatagacgttgccttggagatctggaggacattcacagcggctgctgccgtcctcctttccagcctttgctttggcggcgagttcgtcccatacactaacatctgcaaccttggcagcataatcatctgaaatgaaggttgagtcagatcgcacatcgtgtattgcaacgggtggatccagctcatggtgcatgtattggaggcagtaagcaacacccatgatgactctcatcctcgcagcccagtccagatcctcaaattctttgactgcaaaaacagtgcattcaagttgcaggcaaacacaagcatatgagctaggaggttatgcaaaagtaaaatcacttacggtgaagatgctgtgagagactgccatgtggagaaaactcaaacaccatcattctcatgaaaggttcattttctaggcaatagccaaggagattggtaaagttcttgtgattgactcgtgacattgtatctatctacatggaggggaggataataaaggaagaattagtattgaaagatcttcttttattgtcagattgtttgggttgataacaagatgctactagtcataaacctctttcttgaagcacatttctgcactccttagaccagttcttttgcttcgatt

SEQ ID NO: 30820 - DNA, 686 bp, Setaria italica
  misc_feature (29)..(29): n is a, c, g, or t
  Peptide Sequence Number=SeqID_96794
ttttttaacctatgaaatttttagatttntcgttatatgttattttctccatctatggtagcgatgaaaactttgatgtccaccatgctcaacgtattcttgatgaagatcactatggttagcccgatgcaaagaaagaatattggaattcatagcagttggaaagttgagaggaagttcacaaggcaagattatatgcctttctgggccacctggagttggtaaactagcattggacgttccattgcacgtgcattaaaccggaagttctacagattctctgttggaggcttggctgatgtagcagaaatcaagggtcatcggcggacgtatgttggagcaatgccagggaagatggtgcaatgtttgaaatcagtcgggacagcaaatcctctagttctgatagatgaaattgacaagctagggagagggcattcaggtgatccagccagtgcactattggaacttcttgatcctgaacagaatgctaactttcttgatcactatcttgatgtccctattgacctatccaaggatggagataatttctattgccggttatatcactgacgagaagatgcatattgctagggattacctggaaaagaacaacaagggaggcttctggcatcaagcctgagcaggttgaggtcacagatgatgctcttcttgctctaattgaaact

SEQ ID NO: 30821 - DNA, 2433 bp, Setaria italica
  misc_feature (2396)..(2433): n is a, c, g, or t
  Peptide Sequence Number=SeqID_96795
acaacctttataaataaaatttatgctacttgtattcttagttgcgacaactacatagtttttgtcttgtctcaccattgatgaaaaattctaagttcaggtccttgctggaaatgtatgttctacatttgagcatttttcaacagttttgccattttttagttaattgtttctttgaaaagccaattaagaaaagttagcactttgtacccaaatgctatatgtatgtgccatgtcagagaatttggagctcaaggcatctgtattactcccctgattccttttaattcgagatcaaatttgtaggtagcctggttcttgaattttcttctcatctgtcgtttactgcaggcaagattatatgcctttctgggccacctggagttggtaaaactagcattggacgttccattgcacgtgcattaaaccggaagttctacagattctctgttggaggcttggctgatgtagcagaaatcaaggagcagaaatcaagggtcatcggcggacgtatgttggagcaatgccagggaagatggtgcaatgtttgaaatcagtcgggacagcaaatcctctagttctgatagatgaaattgacaagctagggagagggcattcaggtgatccagccagtgcactattggaacttcttgatcctgaacagaatgctaactttcttgatcactatcttgatgtccctattgacctatccaaggttctgtttgtttgcactgcaaatgtcatagagatgatacccagtcctctactggacaggatggagataatttctattgccggttatatcactgacgagaagatgcatattgctagggattacctggaaaagaacacaagggaggcttctggcatcaagcctgagcaggttgaggtcacagatgatgctcttcttgctctaattgaaaactattgccgggaagctggtgtgcggaaccttaaaaaacatattgaaaagatttaccggaagatagctttgaagcttgttcgtcaagggttatcaaatgaaccacctcgagatatcacaatagtggaagcaaatgaagagccagctagttttgatgttgcaacaaaagtagaagatgagaattccaagaaatctcttgccaaagatgcttcagtggatgtgcacccaactgattcttctcttgagaatattaatgtagttcctttaacaacagaatcagcagttggccacaatgagcattcaaatgaagctccaacagaaaaaattttagaagagacagctaaagtatttaatacttctagcacaccagaggccaacgaaagcgtacagagaactacggaggcacttatagacatacctgtggagaaaattattgtcaatgcatcaaatctgggtgatttcgttggcaagcctgtgttccaagcagagcgtctatacgatcagactcctgttggagttgtaatgggtttagcttggaattccatgggtggttcgaccttgtatattgagacagcaaaagtaggggaaagtgaaggcaagggcgcacttgtggtgacaggccaacttggagatgtcatgaaagagagtgctcaaattgcgcatacagtttgcagagctgtattactagagaaagaaccaaataattccttttttgcaaagtcaaagctgcatttgcacgttcctgcaggggcaaccccaaaggatgggccaagcgctggatgcacgatggttacatcgatgttgtccttagccatggggaagtctgtcaagaaagacttagcgatgaccggtgaagtcactctgactggacgagttctgccaatcggtggggtgaaggagaaaactatcgctgccaggagaagtggggtaaagacaatcatattcccatcagcaaacagaagggacttcgacgagcttgcttccaatgtaaaagaaggtcttgaagtccactttgttgacaaatacaacgaaatatacgatatagcttttacgagtgatgccgagagcccgagacacaagaaagctagtggttgatggttcagactcattttgcatttcaattcttggagacaagaaatgctcaagcattcagttttcatcaagatcggataatggctgaccttagagaaatgtttatatcccttacaattctttttacacatctggcgacatgggaatgaaagagaattctggcaagagcgaactactgacaagatagtttgacaagttgtaaaaaaaattatgtgtcctccctgtaaattaactattatgcacaagttcagaaagacaaacaatgagaatgcagaagtgtagtcatcctctgacttgtattgtagcggaattccctgggctggtgcatacataaactggtcattcctttacggaaaaccatggcattagctgacatttattnnnnnnnnnnnnnnnnnnnnnnnnnnnnnnnnnnnnnn

SEQ ID NO: 30822 - DNA, 301 bp, Setaria italica
  Peptide Sequence Number=SeqID_96796
acccgttcctctgtttcctcctctcgctttggccgcgagtgagcgcgagcggccgcgtcgtcgtcttcctcgtcgcgatcaccgatcaaatccacagaaaaccaattcgttacagccgggcttcgattcaccgccacccctcctcatctcctgctgccgccttttatcctcaggccggaaagccctagcggggagcagtgccgaccacccgcggagggcgggggataactgagagcccggggttgctgaagcggccgctccggctccttccaatggcgcggatccagcctgttctggatag

SEQ ID NO: 30823 - DNA, 349 bp, Setaria italica
  Peptide Sequence Number=SeqID_96797
atccgcggggacgcgaacagggcgttgttgcgggagaagaagatctccacggaccccgtcgcccaccggagcacctggtggaggcggtcggtgaggttgattggcgccgtgccgcggaacgcgtcgcgccgcgtcacgcagtacacggaacgccacccacggttgtgcatccggtagccggtgaccacgtcctcggtgacggagccgtagatccagccgatgcgccggccccactccgtcttgtcctcgtagaagcaagagatgacgctgatggcctcggcgacggtggcagcgtccagcggctcgcggggcacggccagggcgccggcggggcggccttggtgcgcgg

SEQ ID NO: 30824 - DNA, 302 bp, Setaria italica
  misc_feature (1)..(65): n is a, c, g, or t
  Peptide Sequence Number=SeqID_96798
nnnnnnnnnnnnnnnnnnnnnnnnnnnnnnnnnnnnnnnnnnnnnnnnnnnnnnnnnnnnnnnnncttatccttcgctcagtgacaatcagcagcgagcaattgctgcataatcgaaccaagtccacatgacattctgttacaatttcgtaacattgatggaatcttaacacaaaagaatggtacagcacccgccggagcacacagggatcgaccccatccgtgctccctaccgtgcaacaacacaagaacaacgaataccatccgcgaggatcatccagcgaatgaacttgaactcactca

SEQ ID NO: 30825 - DNA, 1516 bp, Setaria italica
  Peptide Sequence Number=SeqID_96799
taaaacaattcggtgttgcccatttgggccatttccatcgagtagatggaagatgtcatttacctaaaaagtacagtcaagtgcccaaaacccaaatggcacttgcaacctctgtaagactttgtgttgtatggtgctgactgctggcagtcgattcatcaccctatctccaatttccacaactccacgaaggagagaaattggaatctatcaaaattgtccgcaacttatgtacaaaggaagggtgaggcctcagtcaggcaatgctccatctgggcacagcattgttggcctgagaccaccaccaggtgttcaatgtagttggttcttggagttccctgtaaccttcctctaactttccattcttgatcaggccacgggcagcaaaccccatgagctccgaaggatccacgtgacgctggaaccagtttggaacagcaacatcactgggggctggagaaacgctttgttccacttccaggcgcagttcaggctcagcttcctttgattgctcctggacagctgaaggttctgatgataacatggagttccctatgccaaatccttcccaatcaacctgctgccacagacggtatccatcatcactcacattgtgtatgttatgattttggagttcagattgctgctctgctgcaagtctgtcaacttcaaccttcagttcttgcaatcgctgcccaattctttgtgttgctttgtcatacaggatccctctagaggtatgttgagtgtcatcgctgttgtcaatgatcagatcatcgaaattgattgggtcacccacaactacaatcacccttttccctgctcttgggatacgctttccaacaggcattatatcctgcatcccagtatggacaaagggtattacaactggaaggctgtcagtgtccatcaccaaccttccaacacctctcttggcaggagcaattgttttccctccatcccttgaacggcttccttctggaaatatatgaacccatccaccactgttcagctttgaaagagccatatccattcccttttggtagattccatcaccgcgagaaacaggtaacaccttaacagacctgaagaatgtagacaggactggatttgtaaagcaacgatcagtcgcacaaagtgtccatctcagcttttgtgcttccaacataatagatggtgggagaagggaggcaattacaaaggggtcatccattgctgccacatgattgctgaccgttagaagaggcttgcctttaggtctctcttgtaatgcctgatgaagcttctcggcaccataaatctggacagagttaaggccatgcataaaaacatagcaggcgttgccaataagaggaacagccaatgcttgaagtgaacggaaaataacagagtcttcaataccatcaacttctttgcccactttcttccggtagaatctcaaagcactggacgaaggcttcgccgtcgccccagtagacgtccccgtcgaggtggagctctgatccgctccccggta

SEQ ID NO: 30826 - DNA, 285 bp, Setaria italica
  misc_feature (250)..(250): n is a, c, g, or t
  Peptide Sequence Number=SeqID_96800
ggacggccggagcatcgtcaccaaccggtgccggtgcctgagcggcggcagcagcagatgcgacccggagagccagtggttcaagctggtgagcagcacgaggaaggtggcgagcggcaacagcgtactcgcgcagctgcttctccccgtgcttaaaaccttcaagatttggttgttcaacctcttttgatcagtatcgatccgagacaatattttatctgtgagtggtcaaactcaataccatttttcncctatgatgaaatggagcagtgtttcttgaacggt

SEQ ID NO: 30827 - DNA, 468 bp, Setaria italica
  Peptide Sequence Number=SeqID_96801
gcaggatggagaactggagatggtaaagtcgaaggaggaacgcagagcgaagcgccagatattcaaagcgaagctaaagaattttaccagacatgcctgcaaggtgactgcgtgtaccatgactggcgctaagatcggcgccctgattcttgatcctgtagtttgcacacttcttgggttttcgtacggtgtgatttcagtactcaaggacgacgtcaccggggacgtcggcccaacagttttggacgtggtgctccccagcggtcagaattagacgatacatcacgtagcgacctttgcattcgtggattccttcgttcttgcaattctagttatgtgcacgggtgtgcgtatttgtgtgaggggaatttctggcccgattagagaaattacccctatttatgttctattatattcaaggagtgaatactatcgatgtataatgcaaacattgggctgtttcatttt

SEQ ID NO: 30828 - DNA, 242 bp, Setaria italica
  Peptide Sequence Number=SeqID_96802
tccctcccattcctccctccctctcattctaccagcaacattcctcccggctctcatatctctctccaccccaaatccgcgtgtcgaatcgagcgcacgctccagcaggggaagctagttaagaggggcaagttgtttgcgccgccatggaagttgtcctcgctccggcccagcccgacggcctgctcgcggcgttcgggcccaaggagccctgcggctttggagatcgacgcttcacctcg

SEQ ID NO: 30829 - DNA, 249 bp, Setaria italica
  Peptide Sequence Number=SeqID_96803
agcgtgctagctgcacccatagctatcgaccgcctcccgcctacatccccggcactgcgaccgcaaatttgaagacggggatatggaggcgccgtgtcttgcattgctcctgttcttcggcacgttgctagtgttgccacagtcgtcgcacggcgcgaccagatactacacgttcaatgtgacgctgcagaaggtgacgcggctgtgcaccacccgcgccatccccaggtgaacggcaagttcccccgg

SEQ ID NO: 30830 - DNA, 682 bp, Setaria italica
  Peptide Sequence Number=SeqID_96804
cacagcatggcaaaaacaaccaaccgctcggcatacagggcacttggcatccagaggtgcagacttgacaccctggaagatgtagacagaagcagcaccacatgcacaggctttgcagaacagatgcccacagctaagtgcataagggttgaacaaagtgtccaagcaaattggacaagttaggctgtactcatacttcagagtttcagaaatggtcatcgttaacaatggctgtgctccagacaggtcacaggaaaaattcttgaagaatccgttcttgaagaaccctccacctccaagttcatcagcatctaaatcgtcacagttgagatggaaagcgccaagctctatcagccaaggcgattgcaacagttcgatatgcgcagtttgcatcttgctcttgaagtctctgccacttacagaaccatgtatcttgtcatatttcttgagaattttgcgaatagcaatagcattcatggtcacatagttgagaagcattctgccttcttgaaccattatttgttgatcatctatgaagcactgtctaaaacgccatatatagcgttgtattcctgaaggaatatgaaggtggaggagacgttgtactctagatctgaaacagcctgctatttccgatgcctccttgttgagttctgttaaagaacattcttctattcacaca

SEQ ID NO: 30831 - DNA, 263 bp, Setaria italica
  Peptide Sequence Number=SeqID_96805
ggctgttggggttgacccagaggtacctcgtgttgctgctgggcctgctgccattcgggctggaatcagagggaggcgccgggtcttgttggggaggcgggtcctggacggagacgtgagcggcgacaggggaggaggggttcttggggtggaaggaggcggagattggccggtgaggccatgaggggaggagggaggacggcgagcggcacagaggcagggaagccatgggttgctgcctgcaggcgccccctgccctgcgg

SEQ ID NO: 30832 - DNA, 896 bp, Setaria italica
  Peptide Sequence Number=SeqID_96806
ggagcactggtatccaaatctgcattctcaattagaacaaaagatcttcaatagggcaatctatcttgatcctatcaccatggccagatgttagaaattgggcacagtacttttggtcactcaggaaagggcactaggatatctggacttagagatcagcgtatgcagctccatcgatctgcggttcattgccttcgctgctcccaatctttttcttccttcatttgtctagcaatggaaggaagccatttctctcctctaaccttcttcagctcctgcaccctttcttcctccctcttcgcttttgccttcgctgcagtttctctcgcttctaatctagccaaagatctctgggatgcattctttgcggaaacaagaatgtcactgccatcaacaacaacagaccggagcatatgcctgaacttctttgatttctcatcaatctcttccccaggcacaattcttggcctcttgagttgcacatgcaatttatctgtagaatccattttaatacctggtggtgcttttttaaataactttattcctccttctgtttccgtagggtcagttaagttcaagcaaggagctttgactatttcaagatttttctctaaaatatcatccaacatatttcttaccttgatctggtacagcttaagtttaggagcctgtggcttcccctcatgcggctgctccagctccgcgtcgctgtccgcctcgccgctgccgccagagaccgccttcgccacgccgttggacgacgggacgccgaaccccacagcagcgatggagttaatggccgccttccacgcggcgtccccgtcatcctcgctgctgctcccgctgccgctcgccgccgggctcccgccgccgccgccgccgccgccccccattct

SEQ ID NO: 30833 - DNA, 236 bp, Setaria italica
  Peptide Sequence Number=SeqID_96807
gaggtacctcaagggttacagcgggaaggggaggaagaaggtgtggatcacggcggcgccgcagtgcccgttcccggacaggatgctggggcaggcgctccagacggggctcttcgaccgcatccacgtccagttctacaacaaccccgtctgcagctaccgggccggcaacgtggaggcgttcacacgcgcgtggcagaagtggacccggagcttcccccggagctcggtgtacc

SEQ ID NO: 30834 - DNA, 439 bp, Setaria italica
  Peptide Sequence Number=SeqID_96808
cgtcgctgcgagtccggccgccctcgtcgccaccgggccgccgtcccgtcgagagccgtcgccgctcccttccctcaacggctgccgccgcgcgaagctcttctcgacgaccgtcgctgctctcttccctcgacagctgacgccgctctgagctcccatccccgtccttgccgccgccgtccttccgtccagggccggccgcctagccctcctcggcagacatcgccgcgcccctaccctcgacgggacgctcgcgcgccgctgctccaagccgccccgcccccctcccggcggcgccgcccttccgaaagcaaaccggagaagctcccccaaacaggcagcgctagcttgtcggcctgctgccgtcttctgcgttggggcgtcgccatggcaccggcgcgggacgctgaggacgagctggagatgaaggtggagaagt

SEQ ID NO: 30835 - DNA, 255 bp, Setaria italica
  Peptide Sequence Number=SeqID_96809
ccctcgcgttcgcgcgtgttcagttcccactccctcctcctctaacgcaggcgagcacccacggcgccgtcgcgcatgcagggagcagcggccgagccgggccgccggctggcgcagcagcagttcgcgggggtcgacctccgccggcccaaggggtacgcggtgccggcgcccgcggagggggacccgtgcccgcggtgcgagtcgcgggataccaagttctgctactacaacaactacaacacctcccagccg

SEQ ID NO: 30836 - DNA, 1465 bp, Setaria italica
  Peptide Sequence Number=SeqID_96810
cgacaagggattcgatggcgtcgcgcagctcaagcagctctacagggataagtctttggcaagtctaacgagaagatggttgagttcttgcaaaattcagttggcatcatccacaagaaccatgctgagagtataaccttgttcattaaagagagtgttgatgaagagctgaaaggcactgatacatctaagcttcctaaaaataggaggctgaccttttgtgttgaagggaatatcagtgttggaaaaactacctttcttcaaagaatagccaatgaaactattgaactacgtgaccttgtagaaatagtacctgaacctattgcaaagtggcaggatgttggccctgaacacttcaatatacttgatgctttctatgctgagccagagaggtatgcatacaccttccagaattacgtatttgtgacgcgggtcatgcaagagaaggaatctgcatgtggaatgaaacctctccgactgatggaaagaagtgttttcagtgatcgaatggtttttgttcgtgctgtccatgaagcaaactggatgaatgagatggagatcagcatctatgactcctggtttgaccctgttgtgtcatcactcccaggtcttatccctgatggttttatttatctaagagctagtcctgacacttgccacaaaagaatgatggtgcggaaaagatcagaggaaggtggtgttactcttgattaccttcgaggtttgcatgagaaacatgagagctggctgcttccttccaagggaggagcttctggtgttttgtcagtcagtcagcttccagttcatttggagggttccctgcctgcggatatacgggatcgggtattctacttggaaggagatcacatgcattctagtatccagaaggttcctgctctggtcttggattgtgagcatgacattgattttaacaaggatattgaagccaaaagacaatacgctcggcaagttgcggagttctttgaatttgtgaagaaaaagaaggaatcttcaacagcagagacgattgatggtgataagagtataaacaagcagattatgcttccccagagtggtggtttgtgggtacctggaagcagccgtttgccagaatcagctctgaagtcctttgatttcaggaggacaatgtcttccttcctctcaacttagggtttgttaacaccttacgtgccatactaccctcagtttctgcccacgacctgaattcacgtggtccatcaacacatctcgattgcagaacatataggatcttttaactgacgaccttgtaaatgtgtaaagattacttgcaaatttagggttttagctagtgctagcgtgcaatgtatagttggtattcaactctgcctgtaaatgtgatcgaactgctttcgtaacagtacttggtagtactttatttggggtggcttcacaattcacatctgccgaaactttgtgctttaaa

SEQ ID NO: 30837 - DNA, 473 bp, Setaria italica
  Peptide Sequence Number=SeqID_96811
caaacttggttatgaggacactgcatcttgctcggtggcgaattctctcatgacgttctattctgattttgggctgccagatgctgcggagaaggtctttgcaagcacttcaaacaggaattcggtatcatggaatgctatgatcaaagggctggttaacaatggaagagtaaacggagcccttactgtttttcgggaaatgaggttggagaaccagccagatgttgccactttggtgaccataatttcatgttgtggtgatcaaggcctagtttctgaaggaagagcaattcatggatacataatgagaaaaggacttcttcatgaggagccgtctgtaggaaatagcttacttgatttgtatttgaaatgcgacgaatcatctactgcgagcctgttgtttaggacaatgccaagaagagaccttatatcatggaacacaatgatttctggttactcaagaaatgattcac

SEQ ID NO: 30838 - DNA, 312 bp, Setaria italica
  Peptide Sequence Number=SeqID_96812
ccttccgcatttcttcatccacagctgaagagatgcagggagtcatatcacattcagctcacaagggcattgagttcacaagatcatccagcgatgggtatgaagcatcaggaggggaagatagtgactgcatcccatcaagaatcgtgcacagatcgtcaaattgggacaatgtcattctgaatgctggtcagggaggccctgcagttgatctgcacatgcaatcatctgaagggtttgtactaacttgaagtgaagctagcttccaggccgtctctgatttgcgaatcatatgaaactgctggtgttgac

SEQ ID NO: 30839 - DNA, 624 bp, Setaria italica
  Peptide Sequence Number=SeqID_96813
aaagaaacatcctcgttgatgtacttgtgcaaaacatgcttgtttattgatatgtaggttgccaagtcttttgaaatagcatacaattgaccagtggcatgtcgaaaatatttgttacccacttcaccaaatttccagtgctcaggttcgtagtacctgacatccttgtcagataagacagggccagacttcatgcatccaatgtataccctgggcttcgaaatatgtttggataagatatttccaagcgtcgctatattaacatggacatcgtcgtcaaccttcacatagaagttagcatcccataaagcaacagctgtcgcaaagtatgttcttgttttgcctgaaagttcaaggtatccttcaacatgatcaagcctcatgaaatccccatgtttcttatcctctgcttgaatagctctgtcgacgattccacctgaaatagcactgtgaccaataacaaaacgaattatgatccccttctcttcctccagctttttcctcatttctccttgaggcatccaagtgttgcggatagaatcccttctcttgcggctgctaaaagcagtattgatgcctatcaccataaggtatttgcgcctaccggtagactcagaagccttg

SEQ ID NO: 30840 - DNA, 923 bp, Setaria italica
  Peptide Sequence Number=SeqID_96814
tacggtcgtaagtacttagacaagctgatcaaggagaggttctcgaagcttcttctgggcgaggacatgtccgggagcggcaagggggtctcgacctccgtcgccatctccaacgccatcaccaacctctatgccaccgtttttgggagctgccacaggctggagcccctgccggcggagaagaagtccatgtggcggcgagaaatggactgcctgctctctgtctgcgattacatcgtcgagttcttcccttccaaggagatgctgcccgacggcaccacccgggaggtgatggcgaccaggccgaggcccgacatctacgtcaacctccccgccctcaagaaactcgacgacatgttgcttgagattctggacagcttccagaagactgaattctggtacgtcaatgacaagggccagaaagacgattccgtcgcgacgccgtgccgtccggcgagccagcgcggcgatgggaagtggtggctgcccgtgccgtgcgtcaccaagccggggctgacggagacagcgcggcgggacctgcagcagaagcgtgactgcgcgagccagatccacaaggcggccatggccatcaacaacggcgttctcgccgagattcggatccctgacctgtacaagcaagcacttcccaagtgcgggcgggcgagcgttggggacctgatctaccggcacatgtcgttcccgggcaagttctcgccggagtacctcctggactgcctggagatctcgtcggagcacgaggccctggaggcggcggaccgcgtggaggcggcgatacacgtgtggcggcggaaggcgagccagagccactcgaggtccccatggagcgctgtcaaggacctcatggagtccgacaagaacgtgatgctggcgagccgcgccgaggacgtcctgctctgcctcaa

SEQ ID NO: 30841 - DNA, 482 bp, Setaria italica
  Peptide Sequence Number=SeqID_96815
ccccacccaaatgagatgaaattcatgtatccaggttctctgtttcaggggggtggaaaatgcaatcagttgtcacagactagttgtctatcatacactgagaaaaggaaggctcaatgtgatgacagcattatatccgtcaaccgtcgtgctgttgccgtcgtcgacacgagtgctgctgccgctgtctccatgagtacgtatggaaatgaagaaaacctgctggatggggcccgcagcgttgtcttcctctgggcgtggcggccggcggaacagcggtggcgatgttctgctggtcgggttcctggcgactgtctttagaggcgaaagaggcagcagatggcgacttgcggctgaggcagcgggcgagcaccggcaagcggctgcgggtgcagatggcgaggagggggcggaggcagcgggggaggggccgcagctcggccagccccaggagcgagctccggcaaacggagggggctaaa

SEQ ID NO: 30842 - DNA, 355 bp, Setaria italica
  Peptide Sequence Number=SeqID_96816
caccaatcgtccccttctctccgcacctcgccgtcccctccgcccgtcttcttttgcaagctcgagccgatgggggggccttcgccccgtggccgccgcgccacgaccagcctcgcgctcctcctgctcctcgcgggcgtcgccgcctgccccatcccggctgtgcgcgcccaggccacggtgttcaccggggacgtcaacggcagcggcagggagatcaccagcttctccttccccgggttcgggaatgagctgcagaagctcaacaacctgacgttcacgggcaacaccagcctcacccagcgctcgctgcagatcactccggacacgggcaacaaccccgggagcttcctcg

SEQ ID NO: 30843 - DNA, 375 bp, Setaria italica
  Peptide Sequence Number=SeqID_96817
gcaccacgaccaagctcctcatccgcctacagaatggggagtctgtagaagcagtaatcatgcgatatgacacaacactggggaaatatgatggaaagcctcgctctggaggagtgcggtcaactctttgtgtgtcatcacaggttggatgcaagatgggctgcagattctgtgctactggaacaatgggcttcaaaagcaatctgtcttctggagaaattgtagagcagttggtccatgcatcgcgctattctcagattcgaaatgttgttttcatgggaatgggggagccaatgaacaactataatgctttggttgaggcaattggagtgtttacgggatcttccttttcagctttcgcctaagagaatcact

SEQ ID NO: 30844 - DNA, 337 bp, Setaria italica
  Peptide Sequence Number=SeqID_96818
cgagaggcctcctctctctggcgtctccgctgccgccccacagtgaccactcgctcgcgcgcccatggcggcgacctcgccgacggccacgaggccggcagccgccgcacttatacgagtcccgagtccagggatcaatcgcgtctccttgccctgctgccaccgccgccaccgcccccggccgcacaactccttggtggagacccccgcgatgcagccgtaaagggaagccggtcgtcacggacgtcgtcgaggaggaggcaccaaggggcccggagactaagagggaggatgacgaagaggcggaggccggctcgctgagtggggcgctggggtg

SEQ ID NO: 30845 - DNA, 1139 bp, Setaria italica
  Peptide Sequence Number=SeqID_96819
tttggtcagtgacagccagatgtttgcacacaaaagattgctcatacctctaccaggaatgcccatgccagcttctgtgagattgagcagttctggccaaagaatgaaaaggtagataacatgggctccaaatcatcagcatgacagagacatcactgattcactagattcagcaaattctgctcagaagggggcgtcacctgcaatgagtaccttgcagagatactatggcctatcatctcagaaaggaaataccacggattgcagtactgaaatgtctatgtactgtaagggcagcttccagagtagcctcggtgaaacattgctcagttgttccgcagctccaggcactgacagaagctgggagtatggaagaggcagttaacggcttttcatcagcgaatggtgccaatgggaacaagagccatggggtacccaaacccaagcaagatgtttctatgcggcggcggcagaaagtggaagcagaatctaacgcaaccgatacccaggatgattttctagcagacccaattaaggcgatcaagagtttgttgccgcggccaatttctagtatccgtctaagcatgggtacaggcagcccagattccagccagaagagcaacatttcgttccttaacgggttcaaatctgtgaggaagtcgcccagcgcgccgaactttgcagatgcagaaaatgcggtctctatgtggtctagctcaaaatggacattcaaccatgagtccttcacacggccgttacttgatggcctgccaaaaccggtatcggctaggaggatgaaaactgccctggactgaacttgaagtcagcattgcagatttttcctttgtgatccagcttgtgtgaaccgtgcggtgactactggatggtggcaattggtggctgagcatatctgctgtggcagtgccccctttggatcatggttacaatgcaagattacaggctgtggtaaaagtgtagagcgcattacagtgccatggaagcgatggttgtccatcattttttctgtaccttgttgtgtagctttggtagcacatattataatttgacaaaagagtacgtatcctgcatgtacgtgtgttagtagtcgtctatttactagttgttccttatttggttaa

SEQ ID NO: 30846 - DNA, 341 bp, Setaria italica
  Peptide Sequence Number=SeqID_96820
aggcaaactcacgatattaagcacaccctatcttgattttgacacatttccgagaaaacataatttagctgatggctacatcgttttaacgatctgaagtacgaaacactcacattgcttccgccaactgctggatccattgatgtatacatcacttctgcgtgcccaatgagtgtctaactgtgtcatgctccaagcacctcagattattagagaacagaagggatttctcaaccacgcaaaggggttttccttaacgcatccaacttcaaagccatctcttgtgccaaactaattcttcctccttcaacaagagctttcctttctagtatttacttgta

SEQ ID NO: 30847 - DNA, 464 bp, Setaria italica
  Peptide Sequence Number=SeqID_96821
accggcctttcccctcgggccgtctccttcgtccttcctcctcacctcgccatggcgttcttctctcaccaccatctccagcagccgcacccgcagcaggcgccgccgccgccgcaacatcagcagcagcaggtgcttccttccttcaggaacgcgctgccagtgccggtggatggccagatcccggcgcccctggccttcttcaacccgccgcctgccttcccggagcagcccgcgcaagcaccgctggtggatgcggtggggctgacggcggccgcggggcttgggtggaggcagccgagggagcaggagctgcttggggagaactctcagatgtcgtccatcgatttcctgcagacaggctcggcagtgtcgacggggctggcgttgtctctggaggaccggcgccacggcggcgggggcggcggggctgggaactcctcgggcgattccccgctgctcct

SEQ ID NO: 30848 - DNA, 1182 bp, Setaria italica
  misc_feature (1167)..(1167): n is a, c, g, or t
  Peptide Sequence Number=SeqID_96822
tactaaacggttaggttgtccgttctaattttgtctaacttgtattgtccgtaaggtagaaacaaggtcaggccttcttcaacccgccgcctgccttcccggagcagcccgcgcaagcaccgctggtggatgcggtggggctgacggcggccgcggggcttgggtggaggcagccgagggagcaggagctgcttggggagaactctcagatgtcgtccatcgatttcctgcagacaggctcggcagtgtcgacggggctggcgttgtctctggaggaccggcgccacggcggcgggggcggcggggctgggaactcctcgggcgattccccgctgctcctgctgcccatgctggacgatgacatctcccgtgaggtccagcggcttgatgctgatatggaccggtttattaaagctcagagtgaacggctgaggcaatctatattggagaaagttcaggcaaagcaatttgaggcactggcctctgttgaggacaagatactacgaaaaatacgggataaagaggcggaagtggagaccattaacaaaaggaactctgaacttgaggaccagattaagcagttggcagtggaagttggtgcttggcagcaaagggccaagtacaatgagagcatgatcaatgcactcaagtacaacctggaacaggtatgtgcccatcagagcaaggatttcaaggaaggctgtggcgatagcgaggtagatgacacggcatcctgttgcaacggtggtgccgtcaatttgcaactgatgccgaaggagaacaggcaaccgaaggatttgacggcctgcagggtctgtaaatcaagtgaggcatgcatgctgttgctgccttgtcggcatctttgcctttgcaaggagtgcgaaagcaagctgagcttctgccccttgtgccagtcctcgaagatacttggcatggagatatacatgtagagtagaatttatgtaccgcatgagtatcttatgaggtatcttgcgagatactgtgttaatatgtcaatctattccaaactctagaacctgtgtatcactatgatttgtcactggatcgaaaagactgccgtttatggtagatttgccgctgcaaatttctatcagaagttcatgcttgatttgtaataaacttctcggtagagtttatttttaaagngactgccaacggacg

SEQ ID NO: 30849 - DNA, 363 bp, Setaria italica
  Peptide Sequence Number=SeqID_96823
gtcatcagcatctcgacggagaccggcgagatacgcgtcgtcacctggccttcgtacatgtgctacaacttgaactcgtcaagcatcttcacttcctacgcggggccgttgtgggaccttgagaatccgttcgtgatctcgtcgaggagcaacgagttcacggccatcgggtgcaacacggtggccatcctggagagcaagagctactacaccggctgcgtcacctactgcgagagcatagagggcgcggctaccaacggctcccagtgcacggggctcggctgctgccagacgcccatctcgggaaacctcaccacgataaagaattactggaacaacaacagcaacggcacctacgaaaat

SEQ ID NO: 30850 - DNA, 568 bp, Setaria italica
  Peptide Sequence Number=SeqID_96824
cgttccaaactgtaggtcgttttgactttttaggttcatagatattattatacacctagacacacactatatctagatgcataataatatctataaatctaaaaaagttaaaatgatctacaatttgaaaacggatggagttgtatatattttgatggatctctcgtaacttcgtacagcagttttcagtgcactaccgcactcttgcgcaatttggtgaccgcacaaacagaacaacgtcaaggccacatcatgacacatgcttgggaccaaagacaactttgctaacacaatagatgcacgcgaaatccgaaaaggattcctcatcaactcctcactcactcatcaggttcacaagcttgttgaagttctcgtacgatgacccccattcgctgacgcaccagcgagccgcgtccttgaacagccgcgccctctccttgatctcggcgtcgctgacgacctcctccaccttgctcctcagctcctccttggttatgatcccgtccgcgcccggcgccaccgccaggccggtcctccacacgttggtcacgtagctccggttcaggta

SEQ ID NO: 30851 - DNA, 276 bp, Setaria italica
  Peptide Sequence Number=SeqID_96825
ttgccaactgtgctggcccatgcagaggatgcctaccagttgcaatgcctaacaatggcttgcctgctatgctgaatttcagcataagacacaacctgtgtagaagagcaacgctgctaacctggtgttgctatgattctatacgttactggtttcatcctcatgcttccaattgcaggtaccccatatatagaattcctacagggccaacattgaaggatcttgatgccttgttttttgacgttccattgtctagcaacaccttgcaaggattgt

SEQ ID NO: 30852 - DNA, 294 bp, Setaria italica
  Peptide Sequence Number=SeqID_96826
ccacctcctgcccgcccccgcatccgtagccatgttggatccaccgccccaccaccggtagctgcggcggcgggcgcggcggagggatgaagaacttcctcaggaagctgcacatcggcgactcggccggcggcgacggcgcctcggtacatcccccgccgccaacgaagaagggcggcggcggccgcggcggcgagcacatgcacgcctcggggttgtcgggctggctcagctccgtgaccgggcggccgcacgcgccgcctccgccgccgtccttgccggaacctgctgctt

SEQ ID NO: 30853 - DNA, 295 bp, Setaria italica
  Peptide Sequence Number=SeqID_96827
acattctctatgatgaggtgatgcggtataaccccaagaacccctactggtttaaccgagaccgtttcgttctctctgctggccatgggtgcgtgcttcagtatgcccttctctacctagctggctatgacagcatcagtgaacatgaattgaagcaactcggtcaatggggaagcaggactccaggccatcctgaaagctttcttactgctggagttgaagttaccactggcccacttggtcagggaatcgccaatgcagttggctggcacttgcggagaaaagacaacctagg

SEQ ID NO: 30854 - DNA, 773 bp, Setaria italica
  Peptide Sequence Number=SeqID_96828
aagtcaccgagaaaacgactagaatcagcaagattagagataattatgccttttccattatcagcagtgtaactaccactgtagtttcctgtgacagattttgaaactgcattctgaggatagcaagcctttagtcctcttgccttgtcaaaagcaacccttaaaaggaaccttttcttgctttatgaagacagctctgaagattctcaattactgattggaggaggttgtagtcatgctccttcatctcaatttcatcagaataattaccacatagcacctccgacatactcttgatggccttcagaattcctgatatgttcaatccagatgaggaacaggaacctgtaacattgctggtatttgatttcctaactgagaagggaataaaatcaggagcagcagagtttaggccagatcgttttatgagatcatctatcacttctgaacactgcttctctgaattgcattttgctgcaccatgtttcacaaactcgagctccttcccatgggaatcttgtatcaggtttgtaccaatgtctccaggtgctttggacagacccgattcaacatggggttgggaatgattttgcttactcttgctagtgacaaaattctgaagataatcaatgctagagctttgtcctgccctgcatcagaagccactgattcttgtttcacagattgggcaactaatgtttgatgaatgtcaaaaggagagagacgagaagctgtccctgccagcacggtgaatccacagagcactctgatgg

SEQ ID NO: 30855 - DNA, 432 bp, Setaria italica
  Peptide Sequence Number=SeqID_96829
ttactacatgggaaaaaatttgctgatgattcagcaggctgggtgctatcaacctcgttatccacaggaccctcagcactagccatcccagacactgcaaaaccttgtccagaggctatacctcctatttttcgtggcatacttcccaaacgccaacttatagtagcaaacttgtgatgggatagtatatcagactttacatttagtatatggcttcttgttggttgtctgcactgcgactgtcgccctaaactgtcaaaacaagctgtagtttgcagatgagatgaatttatgttcttcttaactgaacctatcctggcatgatgcctcaaggcttgtgagcgatgaagtattccataaatccactctttgagtcaaccttcctggtaactggctagactcagaatacatgttccacaaagtacagcatcg

SEQ ID NO: 30856 - DNA, 238 bp, Setaria italica
  Peptide Sequence Number=SeqID_96830
tacccgggggtcaggaggcagttgaacagagctagtatgtaaggcacgcatgagaactcctctacattgcccttctttaccacccttctgaatgtcaatattggtgctgcatagaggagcatagaagcagcatttccaagaattccaactgctacacggactgtgttaggaaccattcttgccgtgcagagatggtttcagtcttcaggtggacagatggtatatctgacaaagactg

SEQ ID NO: 30857 - DNA, 355 bp, Setaria italica
  Peptide Sequence Number=SeqID_96831
acacggaccatcttctcacagattgaggattgaactaacccttctgagacgtcctgatttgatcctagcccaagaagcgtgatgcattcgtcttggaactctttatcgttggacgacaagatcagcccagcaattgattctgcaaggtcaggaacatattcacgaaccctctgaccatgacaactgagaaaatctccagcatgatctgctttcaagtgagataatgcagacttgagtgccttccttacaaggtgtctatcttgttgagatccctggcattcttgcatagcagtggctagagcaagtcaaggacaaccagggaaaaagtcccaaccttccatatataaattgaggc

SEQ ID NO: 30858 - DNA, 823 bp, Setaria italica
  Peptide Sequence Number=SeqID_96832
agtccctagtcaattgattctgcaaggtcaggaacatattcctaatatgtcctagtatctctactacggtactatttcgttttaacttttttttaaactttcatttcgtttaattccacattacaattcctgaatcttgtatacacgaaggagcagcggctgtaaatttctgcttgaactgcctctagagtagccagccggtgtactggagtgtggagtactacagctacaagactgatgaaacaatgctagaaatcgaaaatcatatcttcatccccatcttcttcgtccagctgactatcttcatccagcttctcgcactcgaacagatatggtgcattgtcctctgcattctccttggtgtcattcagctctatgacacggaccatcttctcacagattgaggattgaactaacccttctgagacgtcctgatttgatcctagcccaagaagcgtgatgcattcgtcttggaactctttatcgttggacgacaagatcagcccagcaattgattctaacaattcccatatttaaggcccaaagttgcaaatgattcagctcaatacacatgtttaaggccataaccagttgaaaaccagccggaattcatgtgtccttgtgatagagaatacctctgaccatgacaactgagaaaatctccagcatgatctgctttcaagtgagataatgcagacttgagtgccttccttacaaggtgtctatcttgttgagatccctggttgtccttgacttgctctagccactgctatgcaagaatgccagggatctcaacaagattagactacctttgttaaaggta

SEQ ID NO: 30859 - DNA, 583 bp, Setaria italica
  misc_feature (537)..(537): n is a, c, g, or t
  misc_feature (554)..(554): n is a, c, g, or t
  misc_feature (556)..(583): n is a, c, g, or t
  Peptide Sequence Number=SeqID_96833
agagtctaggagagtacagggacaagatcccagcagaggttgcatctgagatcgaggcagccatcgctgacctccgccaggagatggcctcagacgacattgagaagatcaaggccaagcttgaggctgccaacaaggctgtctcaaagatcgggcagcacatgtctggcggtggctcaggcggatcgcagtcgggatctggacctcagagtggtggcgatcaggctccggaggcggagtacgaggaggtcaagaagtgagttggaagggaacgaacagtagcatcccttagaagtagctactccttttttgggaacacaagatagtcagatgtgatgtaacctgttctgtaataatcctttggatttgcccccacttgttcctcctcagcagtgatgtgagatcacacaacattgtctgctaggtcatatggctttgttgcacatgatgccttgttcgggcctgatccacgcgcacagtgaaccattggcgagtttttgctaatgtacgaaggtatatttgtttcagatttttacngttggtgatgctttggngnnnnnnnnnnnnnnnnnnnnnnnnnnnn

SEQ ID NO: 30860 - DNA, 318 bp, Setaria italica
  Peptide Sequence Number=SeqID_96834
gtgtcgttcctgcggcggcgggccaccccaccaccaccctgctcctccggggcggccacggtgacccacccgctgccatcctccgcgatggcgttgtacggccgcgccgcgcgtatcgcctccaggcgccgcatccgcttgacctcgatgtcctcgtccaccagaggcctgtcgtcacctgacgacgcgggctcgtcgtcctccacctgcacgggcttctgccagacagggtcctcgtcgacgatgagcaccccgccgcctcccccggtggcggcgggcttgggcttcttcttcgtcttcttcttcgccttcttctgg

SEQ ID NO: 30861 - DNA, 372 bp, Setaria italica
  Peptide Sequence Number=SeqID_96835
ggctttaacaagagcatgcaacgcaacactgtagagatcactcttctgataaggatttatgttccataagaccttttcagctacattcaggtacctcagcatttcctctatcatcccctcatctccaaaagctcgtattaagttcttcatagacacaaaactgtgttggatttcgttatttagcatgtccatctcaatgatgcttatccttttggaaacatcaacatgagagagaacatttccttcttcataaggaacattgacattgccaaacagagaaaacaaaaagctcatatgtcctgagagttgccttcatgttcacacgtttcattttagctagtatgcgcacagctctttctggttcattcatta

SEQ ID NO: 30862 - DNA, 588 bp, Setaria italica
  Peptide Sequence Number=SeqID_96836
tgccggtggggtaccgtgaagcacccgctgttcgtggcgctcctcaaggcggcggaggaggagtacggcttcgagcagaagggcgccatcaccatcccctgcggcgtcgaccacttccgccgcgtccagggcatcatccaccaccagaagcaccacgtctccggcggcggacaccatggccaccacaacaacaaccaccaccacttccacatcgcggggtgcttccgcgcctgatcgatgcgggaaagggagatccgtgcatggccatggatggatggatcttgcagccgtgccagactgccagctccagcctgcaggtggttctcgtccatctcgagcggatggatcgaagaacaataatagcacctattttattagggtttttaatttttcttgattattaggacttagagatgcaggccgcggatgatcgaaggatcatggttggttgcttgagctagcgtaatcgtggatctgcaggtttggacatatggatcgatgggtcgtcgttagagtttttctctaggtttctgatgatgatgatgaaaaggaaatcaaagaatcgtgcaggtttcagtgcttggactt

SEQ ID NO: 30863 - DNA, 491 bp, Setaria italica
  Peptide Sequence Number=SeqID_96837
ctgctgaacaaaactaatctaaccatagataagactagcatcactcaatgttgccatgaacaggaacttcatcctggaatctaatttcttccgacaggacccagtaaagtgtaaaactaggcagctgcattattaacctgtatttaacaaagtgtctgcattcagctctactacttggaaaaaccagcgatgtatttaacaatgcattcatatctactacttaaaaaattgtatttaatgatatactgagatagatttagcatgtgcatagccataacattcctattcttaacaggttttactctatagtgagtagtagtgatagtcaatggagatatcttacaagaatcgcagctttaataggttccccaatgaatctggtataggaccagtgaagttgttcaagtacaaatctaaactgaccaagtttgtgagattcccaagttcactaggtatcgtgccactgatgctattactgtagagctccaggt

SEQ ID NO: 30864 - DNA, 409 bp, Setaria italica
  Peptide Sequence Number=SeqID_96838
tttggatggatgtcgcaagatctatgctgagcctgggtggactgtaaacttccctaaactacatcccaaatctctacaaacctgtgacgaacagattcaacgcttaattacagaaagccaagtgtgtcctagtcacaatgaagtagagatcagtgaggagctgaatttgcctgtgcatgacaaatctgaggaagcaatggcaagtcaatcatgggaacaaactggtaactttgaatgtaccactaaggaaatctttaaggattcctctgcgcgtacaagtcataacgttcctcagcatcacactacccctaccgatattgatatcgcagctggacctgctgattgaagcttttgaggctggcgagctcctccagtgtgatagccatgaggctcatgtagattgttagta

SEQ ID NO: 30865 - DNA, 1061 bp, Setaria italica
  Peptide Sequence Number=SeqID_96839
tttttttttactaacaatcagggctaatatttaatatacaaggttaaaaaaccttgccaaccataacaagtccaagtacagacccatataggcacagctatatcatcccagcctttcaaaggaggggcgatacaaaatgattcccaccagttccaaacttacacttgatttgacacaaaatagttagacgtcaattgtcagtacaattaatttatcgcagacccagaagatagccgaagcacctcagctcaccctaccctgtttacaaagacgtgagcaccggtgcattcagcaactgcacatgacgagctcctcgagctccgctaccctcggcataacatgtccatggcgacccatcagcaatacaagtcaacagcatgtcgtggctgaccatatctttgcccaccggttggtatgaacaaatggggattcggctaggatgattgatacacatcgctattacccttacaaaatacaagaattagcagcaggtcatgagtgtgtgctgccatcacctcggccctgacagctcgaccgcgtggaggttgtcggtcgagtcgagaatccactctgaagttcgatgagggcctagctcgacctcctgccgtactacttctaccttctgccactcctcccatctctcagcgaggccgtcgccttcgagcatcctcaccacctccgacatcttgggacgttccatgggggagctctgtgtgcagaggagggcaacctggatgagggattccacctcaacatcaatgtagttgtgctgtagatcttcatcaaccagactctccagtctcttctccttgagcaaccccttgacccaatcaagcagcatgacatcatcatcattggcaaggcgagcaagatcaaaggcacgctgtccagtactaagctcctaaagagtactaataaaacaatatactaccaataaaccaaaataacaatacaagttttactacaagaaggaattttacctagttaggaatattgtaactaaattggggtattcggtcttaggtattgtatttgttatttacttacttatttcgtttctt

SEQ ID NO: 30866 - DNA, 1821 bp, Setaria italica
  Peptide Sequence Number=SeqID_96840
aagtaaactaaacttaactaaccttaactaagaccaactacctacccaatactactatcagcgaggccgtcgccttcgagcatcctcaccacctccgacatcttgggacgttccatgggggagctctgtgtgcagaggagggcaacctggatgagggattccacctcaacatcaatgtagttgtgctgtagatcttcatcaaccagactctccagtctcttctccttgagcaaccccttgacccaatcaagcagcatgacatcatcatcattggcaaggcgagcaagatcaaaggcacgctgtccagtaataagctccaaaagcataattccataaccaaatacatcagttttctcagaggattttcctgttgaaagatattcaggtgcgatatggccaatggttccacgaactgcagtagttacatgggtatccttgtaatccattagtttggccaaaccaaaatctcccactacagcttcaaagtcttcatctaacaaaatattggcagctttgacatcacgatggataatcttcggatcacaatgatcatgtaaataggacaggcccctggcagaacccaatgcaatcctcctccttgtttgccaatctaatggaggttcagattccggccgttctcttaaacgtgacgcgacacttccattggccatgtatggatacacaagcaacctttccgttggtgtcatgcagaatccacgaagacgcaaaaggtttctatgtacagccatactaatcatctcaacttctgtttgaaactgtagttccccaccaggtgttctctcctcctttagtctcttgacagctactaatgtaccatctgctagccttcctttgtagactttgccaaatccacctcttccaagaatgttcttattgctgaagccatctgttgcaacctgtagttctcgtagtgaaaatcttttaagctggccaagatgcacctctggatcttcctcagcaggtacatcaaagaaatgctcttgtggtttcctgcgccgccaatatgcaaaaccaattgcaggaacagcaaatagcaaggccgcaccagcagccactccaccagcaatggctccagtactggaggaactacttcctgcttgcacaggagttggcgggttgtatggaggaggtggagaaaagggaggagcaccgggacaaggttttgtggtgccaggaccacataagttagggttgtttgcaaaactaataggtgtgaataatgaaaaggaaccagttgatggaacttctccagacaaattattatttgacagatccagaacttggagggcagtgatagcagttaatgattttggaattgaaccggaaaggctgttgttgttaagacgcaagaatcgcagctttaataggttccccaatgaatctggtataggaccagtgaagttgttcaagtacaaatctaaactgaccaagtttgtgagattcccaagttcactaggtatcgtgccactgatgctattactgtagagctccaggtactgcaagtttttgagctggccaagttgcgggaccaaggttcctgacagtgcagcatttccaagatcaactctgataacactgttgtcgttattgcaggtaacatgaaaccaagtgcatgggttgaccagagttggatcccaactttgtagaacattatttggatcatttaagttagtccttaagctatgcagcgcatcaccttccgtgttggcgagcacccgcgcggccgggtggagcagtagacgcagcagcaggagcgcccacacggcccacctccgccgcgtcgcccccgcagccgccgac

SEQ ID NO: 30867 - DNA, 227 bp, Setaria italica
  Peptide Sequence Number=SeqID_96841
tggccggcgcgctcttcgtcatcggctggaacgtggtcgtcacgtcggtcatctgcgtcgccatcaacgccgtcgtcccgctgcgcatgcccgaggagaagctcgaggtcggggacgacgccgtgcacggcgaggaggcctacgcgctctggggcgacggcgagctctacgacatcaccaagcacggcgccgacgagaccgagcacggcggacgcgccgccgtcgcg

SEQ ID NO: 30868 - DNA, 220 bp, Setaria italica
  Peptide Sequence Number=SeqID_96842
gccgtcgcaggagcagatggatcaataggtggaggaggagtggaggagagaagcaaggccgtctccaacaaccccaagggcgccgtgctgaggtcgaggctccatggccggggcggcggcggcggcctcaagaagggcgccgtgcgggtgaaggtggtgctgaccaaggaggaggccgcgcggctgctgtcgctgaccgtcggcggccagaagaccgccg

SEQ ID NO: 30869 - DNA, 307 bp, Setaria italica
  Peptide Sequence Number=SeqID_96843
ctgctcccgttgccgccgccgccgccgcagcttaggttggtgttccggacacacccgccggaccagtcccgctggccccactggtccggcgaccgcggcacgaaccccgggaggcagccgcacaccggggtgcggtcggggtcgcagtacccgaacgccccgcacttggcgtagtagtcgcactggtccgtcgggtagtaccagaagctgctccacgcgccgttgttgagggagaagcgcttcagctgcgtcgcggcgccgtcgacgacgagccgcgacagcagcgacgcgtcgcggatgaagtatc

SEQ ID NO: 30870 - DNA, 477 bp, Setaria italica
  Peptide Sequence Number=SeqID_96844
ccagcaagggaacaagcgccagagggttgtacattgcctctactcaaaatagggggagaagggtccagcttcaggcaaataggagtcccaaggaaccaacttttacctgcccgatatgttggaataagatggaggagcctgccacaacaccttgtggccatatcttctgcaacacgtgcattaagcaagccatcaaggttcagaagagatgtcctacgtgcaggaagggcctgagagcaactagcgtccatcgtatttatcttccaagcaccgctagttaaggtgaacccttttatctatctgatggcttatagtaattttgagggcaatcagctgaactccatcttcgtccaatacaggtcaattggctgtatcagaaacttctgatacaataaggatgtgcaattaggatcagaagttctctctcagtgtgaacaatagatggatatttcacccagtcttgtaatacaatagtaa

SEQ ID NO: 30871 - DNA, 627 bp, Setaria italica
  Peptide Sequence Number=SeqID_96845
cgagtatatttcaagaatttcagttgaaaggctgagctttgtttgaattttgcatactaattgtttctacattacgctttgcattgaactctgactatgaatttctcctgacaggcaaataaggaggtccccaaggaaccaacttttacctgcccgatatgttggaataagatggaggagcctgccacaacaccttgtggccatatcttctgcaacacgtgcattaagcaagccatcaaggttcagaagagatgtcctacgtgcaggaagggcctgagagcaactagcgtccatcgtatttatcttccaagcaccgctagttaaggtcaattggctgtatcagaaacttctgatacaataaggatgtgcaattaggatcagaagttctctctcagtgtgaacaatagatggatatttcacccagtctgtatcatgtaactgcgtcaccaggagctcatcggctcattgcgacaacttcctgagaagggaagtggatagcttcagttttactcatcacttgttgcacctacaacttcagaatattattgtgttgtatgtattaggtaattggcttagttgattagtgtaactggtatttgcttcaatctgaaatgataatagtgagtt

SEQ ID NO: 30872 - DNA, 1197 bp, Setaria italica
  Peptide Sequence Number=SeqID_96846
gtcgcgccgtcgcggactcgcggtttcccccctcctcaccaactcctccgtttgattcggttcggcgactacgtgcggatttcttgaccctcccgatgcgtacgattccgtatctgatcggggtcgtgtggatttatattggttgtcggtcttgattcggcgaggcaatcgcagcgatggagggtgggactattgattcgatcgccgcgcagccgactcccgcactctaggttcactgtggagttgaggtgagtatcttcatctaagatagcatgagcactgtcagcagcacaaggcgtgccccgaggagactgtcgcaagatgggtctgctgataaagtagtggtgaacttggaagcaagctccccagtggtgggaagttcactgagcttcccagtggcaggaagccgtcggggagtatcagccactgttgctggcgcacaaaactcacctattgatgtggaagccattgaagatgaagtgcaggcaatatcgccatcacgagtaccccctccaagaaacatgagaaccaggaggcaacctgtaacggtggttgacttggaggtagagggtagccagcaagggaacaagcgccaaagggttgtacattgcctctctcaaaataggggagaagggtccagctttcaggcaaataaggaggtccccaaggaaccaacttttacctgcccgatatgttggaataagatgtgggagcccgccacaacaccttgtggccatatcttctgcaacacgtgcattaagcaagccatcaagattcagaagaaatgtcctacgtgcaggaagggcctgagagcaactagcgtccatcgtatttatcttccaagcaccgctagttaaggtcaattggctgtatcagaaacttctgatacaataaggatgtgcaattaggatcagaagtgaacaatagatggatatttcacccagtctgtatcatgtgtaaaaaaatcaaataaaaatttataataactgcgtcaccaggagctcatcagctcattgcgacaacttcctgacaagggaagtggatagcttcagttatactcatctcttgttgcacctacaacttcagaatattgttgtgttgtatgtattaggtaattggcatacttgattagtgtaactggtatttgcttcaatctgaaatgataatagtgagttgcagtttgtctaaaaaataaaa

SEQ ID NO: 30873 - DNA, 376 bp, Setaria italica
  Peptide Sequence Number=SeqID_96847
cgccagcttggaccggaggccgacggcggacagcgcaaagaagacgatgccctccagcatgacgacggcgagcgccgtgctgtaggtgatgggacccgagccgtggaacccgaccatgttgtaggcgaagtacgcgttggcgcccatgccgggggccagcgcgagcgggaggttggcgaacaggcccatggcgaaggagccggccatggcggccaccgccgtggccacgatcaggtcgctcttcgtacgcgccaggcactgctcgtaccccgggttaggcccaaccgtgcactccggcccgggcgcggccgtcgacttcgcgccgcccaccgccgtgcagtcccgcaccgtgcacggcccgccggagtcggtcagg

SEQ ID NO: 30874 - DNA, 466 bp, Setaria italica
  Peptide Sequence Number=SeqID_96848
cctacaccgacgaccgtcgtctggcctcgactttttgttcaattggagctaggccgacaagatcatcgagtgatcgacggcgacgtgagctgcgcatggttgccgtgtgcttttttaagggagaccaactgataagcccgggcccagcaccagggtgcggacgttattggcttactgccgacctgcatcttcggttctggacttctggctctcgagagtaaaaaactgataaaataaggtgatggactgatggaagaagctgctggtaaaaagctgatgtaagaataatacgaagtacatggtgccagcatggaaatgacacaatcattcaccaaaaggaccaactactaaattactaaggtgtctatgagccaatcaaaggtaaaagtgaatcttagtgtcctctcctgacatattttatctctaatgtacagagtaagggaaatcagatttgctttattgagat

SEQ ID NO: 30875 - DNA, 715 bp, Setaria italica
  Peptide Sequence Number=SeqID_96849
aattgagctgaatgctggatctctcaagctccccgaagaagctctcctgagattggtccgcctcataaagagtagcggtctgagggcaaagcccctgttctcagtgaattttgacagttctgatattcctgcatccggtgatagggcgtttggggcgtatatagctccagtcaaggagcagagctcagaaagagttgaagatgttgacctgctgattaggagggcggagagatgcttggaagcaggcgcagatatgatcatgatcgacgccgatgacatttgccagcgtgccgactccctgagagcagacatcgttgcaaagattgtgggccggcttgggctcgagaagaccatgttcgaagcttccaacgccagcacctccgagtggttcgtcaaacgatacggcccaagggtgaatctcttcgtagatcactccgacgtgatgaatctggagcgcctgcgggggttcaacatgcgcagaagcaacccggcctcccgtttaacctcaccgttcttcctgatgtaaggaacttttcctgaacccggagttgagacggtttccagtgcccatggagatctagctctgcttcttcagtcgccagcttgttatggcctcaatataactaccagcgaggtttatcaaaaaaaaaaaactaccggacgagcaatgcgacagtatctgttgcgttatcaacaactgctgtaataataggtt

SEQ ID NO: 30876 - DNA, 247 bp, Setaria italica
  Peptide Sequence Number=SeqID_96850
gaacggtattacaagggcactctcagagacgggagggtcgtggcaatcaagcggtgcaacaagctcgtctacgacgagcgacaacagcgagagtttggaaaggaaatgctcatcctatcccaggtcaatcacaggaacattgttaagctctacgggtgctgccttgaggtggaagtgccgatgttggtgtaccagttcatccccaatggcaccctgtaccagctcatccatggtgatgccaccccat

SEQ ID NO: 30877 - DNA, 646 bp, Setaria italica
  Peptide Sequence Number=SeqID_96851
gttggaagctgcagccatcacctaatgcgcagcaaactatatctgagattctggattttcttatggatgcaaatatccgcttgagtgaagaggttgttaggaaaacgcaatccttcgacaagttgaaacaagaagctgacaagtgcttgcaacaaagtgaaagatttaataatgagaaggctgaatttgaacaggccaccttttcaaagtttgtggctgtcttgaattcgaagaaaaccaagctcagacagctcagggacaaagttgctgaactcgaatcagctgacaagcttccaaaggaggaggaagaggagaactcgacagaccgaacagagcagttcgagggaggaagcgacaaagaggcaagcgtcaacgatgaaccctccgagactggcagcggcgatcatcatagctctcctgagaaatctgcagccactcccaaggaagggggagaggtcgcaagagagcaaaaaaaactagaatgaatagctagcgctaactgctaaagtgctggactaacaatagtgggacctacttggaaaaacgttgagcattgtgtatctttcatatattctcatttgcttcatttcctcgagcatgtgtctgtcatgtaccttgtgaagtccatctggaggactggagctga

SEQ ID NO: 30878 - DNA, 295 bp, Setaria italica
  Peptide Sequence Number=SeqID_96852
ggcggggtccaggccgaaggagaggtctcgccgcgggggaggcgggcccggcggtcgaacggaacggtcggagcgcgggcgcacggccgcgattggggccgggccggcgctgcacgcggcaccagcagggtgcctgttggaaacttgggaaggccgaaggcacggcatggcggcagtgccatggcaccagcttgctgtggcggctgccgaggccgccaatggaggcccgcggccgccgcccggtgccgggttggctcgcacggctggatcggggacgaggcgggcggcaaggttg

SEQ ID NO: 30879 - DNA, 896 bp, Setaria italica
  misc_feature (1)..(40): n is a, c, g, or t
  Peptide Sequence Number=SeqID_96853
nnnnnnnnnnnnnnnnnnnnnnnnnnnnnnnnnnnnnnnnaaaaagcgcaatcaatttgaccaaatcattggaataattcatagtaggaagtccaaatttatacatcagatcatagatgagtctgacattggtacagactcatgataaagttccccgtcccaaaataagccataatggataacatagccgtcagtggatacattagcctacgcggattacattagcctacgcggattgtccaacattacacggtgggaagttgtcaatgtcccatcggattgcatctgactgagcaccaaaaagagcagccgtttgctgtactgctaaagggcaacaaattttgtgaatccaacctcagtttgacacggcattcttcatataaaatctagaatcttctctcccttaacgctcacggtttgttgtggtctcaagcttcttgcaaggaaggaaacatccagacagagcagcagttctcgttgcctgccaaatttaactcttcgaactcatcttgcataccgaaccttctatgcccagatgatgttgcggcaaatggaaggtaaggatggaaggagaacccgtttacagtatcagctgctgcttggaagcctgttacccattgaccaccttgaaggtcatagacatggaccatgccatcctgcccaccagtggctagatgtctaccgcagggctcaatgtcaaaatatattctttgattagtactatcagctgctctatacaacttgtatacaatgtccacagtattgcgaatatcccaacataatatgtacggatccttgcgccctccagtatacaaatagttcccatctttcgagaaaagcacctgtgtaacaccaccaagctggccatgtaagacatacaaaggctccatattact

SEQ ID NO: 30880 - DNA, 319 bp, Setaria italica
  Peptide Sequence Number=SeqID_96854
cgtgtctcaggagaatctgatcatgaatccatcactagagatgcttgtgggaggaatacagagtgtcacacttggtgatgaagaagctaaccggaggaggggtccagaaaactgtcctagagcgcaagggcccatcaacatttacatgtgctgcagagatcgtctccaaaactgaattacgtgtccatcgtagtttggaagccacagtagatgctctacttgcaggcaagccacctaatgttgaaattcggaagttgggtccaaagggattggtgcaggaagtttccgtgcaaaaggaacaatcgcatattggtcttta

SEQ ID NO: 30881 - DNA, 401 bp, Setaria italica
  Peptide Sequence Number=SeqID_96855
ctctgctcgccgcaggggactcatgaccgacagtactgccccgccggtgtccgcggccggcggccagctaccttcttgcacgttccccgaggcgcccgttagtagtgaaggcaatcaaggcctcagctatggcggcgctgatgttgacgtgttctcgttccacggcggtggttcgctgccgcccctggccgacctctccgacgccgcgaactacccttcagccgacggatgcagcgccacggcgtcgtccagcttcggtggcggcgcgaccagcccgctcccttggccggagttcttccccgacgaccccttcatcactgatttcctatgacgtaataaccacgcttcatacttatatatatacatgtataccaaagaaccttctatatcatatactacgc

SEQ ID NO: 30882 - DNA, 399 bp, Setaria italica
  Peptide Sequence Number=SeqID_96856
ttttttttgtttatatattgcactacagtattacatactgtagtttgttagattttctaacttaaatgtgatagaaactgttaaattactttttttagtcttgaggtgatgtaggtagaggtgcatgctaaattatgcagtttaaatgaagtattcactttaacctgtgaagtttgagaatagctaacaattgtggctctgggcagcatggatatatcattgatccaagctataatgtgcaaacttggatttaccagagcagatgttatagtcatgtacactaaactcattatgaaggtgcattgtccctagcattgaccatcttcgcatcatttgatgagaatttcagtgtaatgatgcctctatagtatcccagcctccagcctgtcccttgttatt

SEQ ID NO: 30883 - DNA, 296 bp, Setaria italica
  Peptide Sequence Number=SeqID_96857
tgctgctcctccactgctccccgcgcgttcatctccaccgcctctcaccaactcgccgcctccccctcgcctcttctttccctcttccccgccgccgcctccgccgctccaccgctatccacgccgagcctgatgcgccgccgccgccgccttcctccgcagcggagccagagccccccgactccggcgccgtcgacgccgaaggcgagggccccgtggagctccgcgccccgacgctcttctccaccgacgacaatcccaccccgctccagaccgccacaagcctcctcctcacc

SEQ ID NO: 30884 - DNA, 477 bp, Setaria italica
  Peptide Sequence Number=SeqID_96858
cgagcgcgcgcgcgccgcatgtgcaactcatgtagagtagtcatgtgctctggaagtctggatcgagtcgagtggctgtccactagcctgagccggcccgagctcccaactcgcgcgtgtacctgtaggcggcagctgcaggctgcagcctgtggcccgcgcgctccggccgtctgactcggaggcgccagcggcccggcgcgcgcgtgtataaatatctcctccgtctcccctgcccccgacggccaccccgcgcgctccccgcacgcccgcgtcgccttacctcagcaggagggcgccccccgagcttgctctccgctgcgcgcgatggacttctcgagtaccaaggagacgcctccggccggggcctggtggtcgagggagacggtggccgtggtgacgggcgcgaaccggggcatcgggcacgcgctggcggcgcgcctggccgagcacgggctcaccgtggtgctcaccgcg

SEQ ID NO: 30885 - DNA, 970 bp, Setaria italica
  misc_feature (1)..(38): n is a, c, g, or t
  Peptide Sequence Number=SeqID_96859
nnnnnnnnnnnnnnnnnnnnnnnnnnnnnnnnnnnnnntttctaatttgtttccaaactggcaaaaactaaactagataattatcgtaacagtttacacgacttattgtatgactgaaaagatgaggatccaatgctcacatgataactaaatatataggtcatcgattaccaaatagtagcatacctccatcacttcatgagaaattattgggttccggatataaaaggtagttccacacaaaaataaatatatgcaaactggtcagatctacgacgaaacagttggttctgactgtagatgcggcgcaaagtgtttcagtgcttcctcgtatacaggttttttgaaatcaactgccttttcaataacttcctggggcgtcatccatgtccattcaccaaactctggcttctcagatccatcaccattgaggttgatctcatcatcatttccagtaaatctaaacaaaaaccatttctgagcctggcctttccaatttgttccccacctagcattcagttttgctctcacatccggtgggaaatcatatgtcaaccaattaggagcctcagccacgatctctgcggatgtgacgccagtctcttctctcaactccctaacagcagctgctcttggttcttcccctgcatctataccgccctggggcatctgccacgcgctaggaatgtcgatcctagaagccgagaaaatcttggtgagggaggggttggcgaggcagatgccgacgttggtgcggtagccctccggcggcgcgtccatggatgcaacggtgacgagcggcgacgcggaggtcgagcaggagcgcgaggaggaggaggagagtggcggcctggttcgtcgcgggaggcggagcgcggacgcggcggggcggctgtggtggacgatggggtttgcaagcaggcagcagcgtgcagatgcggcggccaccatcgcagagaaagcgaatata

SEQ ID NO: 30886 - DNA, 239 bp, Setaria italica
  Peptide Sequence Number=SeqID_96860
tcatcatcagttcattccgaactaaaagtcaattagaactgaggaagcatgtgatggttgaggccgcccagcacggacgtcgtcgtcgcgggcaagccgcccgccggctgcggcgcgtcgaagcacgacccgttgagcctcttggccgtcgccggcgggtggatcatcgcggcgcactcgtcgtccgggctcaacatggccttgcgcttcccgcggcggcctgggtcgacggcgagtag

SEQ ID NO: 30887 - DNA, 332 bp, Setaria italica
  Peptide Sequence Number=SeqID_96861
aaaacaaagaaagaatttttccctacatattctgactgctcaccacccggttctcgccgccgccgccgccgcttcccccggcctcgccggaaccctaggacccaggcgccgtcgccggacgcgcggctgccgccatgaccgggacaacttggataattgatggccaaagatttgccaccaaaataaaaaatgcttctgggccttcagatcccagtaaacagaaatggatgagtaacccaagtaaagagtgcccgaagtgcagccatgtcattgataacagcgatgttgttcaccagtggcccggtttgcctaaaggtgtaaaatttgatccg

SEQ ID NO: 30888 - DNA, 602 bp, Setaria italica
  Peptide Sequence Number=SeqID_96862
ccagagttgaatccagaatggtattgcttcgttggtagtgtcagaacgaattcacctggcttctgaacagcacgataaacagaaaactccttctgattttagaacagatggagataactgcgtgaccagctcatgaagtagatcaggctgttcttcaaacagtttcggtaagttatttctcatagattcttccagctttactgcttcaccaccaggaacaccataccaaacttttggttcaccaaaatgcatgtaattcagagaatagagaaaatggtcttcaacatgccagcaaaatgaagagaagcacattcctacataaagccatggaactacaacaccagatatatcctcgttttcaaatgagataacagagccaggcagccgtggtagattattcaagttccaacaagaggcactatatggatcctgcttatttgcatctgaagataatttagcaaacccactaccaaatgttgcagtgtccaaatcggcaccataatccacctcaacttcatcagtagaccctacgactatccgccaattattcttcccttctaatttcctttcgtttacttttgttttttattttttggtttttt

SEQ ID NO: 30889 - DNA, 988 bp, Setaria italica
  Peptide Sequence Number=SeqID_96863
ctgtgcttttacctgagtccatctttctcttctgcacattaccagatgggcaaactaaacctaggtggtcctgtccccaaagacacactgcagtctgatcaccctccaaagctgctacaagagtattaagctcatccatgctatatcgaaagaatgcgattttcctctccatttcacatgagcaaagaatgtttgtatggtttaagcaagcgaagcggtttggtgagcactggcaactgatagcagacatgtggagatcataaaagcatgaaaagcactcccggtcagtggaatcataatccttgtccatcttcttacttttcaaattaccattcacctcccttgctgcaccctccattgtaactcttgtcttaactgcacttgtcaagacaccatcttttccacatgtgttcagccatctgtatttcccctcatcaatattgcaattgaaaaggttcatccatagttgtttgacagcttcttttgcagtcttcagtagtaacttgtcatgtgatattgatgtcttgcgatgctgctctctatagagctcaacagcgtactgtccatggggcagccaatccacaggagcaatatttactgcctccgcacagttgaaaccagagttgaatccagaatggtatgctcgtggtagtgtcagaacgaattcacctggcttctgaacagcacgataaacagaaactccttctgattttagaacagatggagataactgcgtgaccagctcatgaagtagatcaggctgttcttcaaacagtttcggtaagttatttctcatagattcttccagctttactgcttcaccaccaggaacaccataccaaacttttggttcaccaaaatgcatgtaattcagagaatagagaaaatggtcttcaacatgccagcaaaatgaagagaagcacattccttacattaaagtcctattggtaacttactaactacctagttatttattatttcctttctt

SEQ ID NO: 30890 - DNA, 368 bp, Setaria italica
  Peptide Sequence Number=SeqID_96864
cgccatcagcgccgccatgttcacctacagggtggacggcatcaccaactacaagccgctcagctggaaatgcaggtgtggaggcaccatcctggatccatgaagatgatgaagaacaacacatcccaaagcatgatgcacactactcgccgttgctgtgcagaaaaatgtaaaaaaccacttctttcttccctcatgttcatcctcctcttctcttctggtttcctttggttcattccccaacagcaatggctccttaaatttgttccagtgaggttgatgatgtggggaagattcagatttatttggagctagcaaatcaaatcaaatcaatcaaatgaaatttgtgtatagttaattgagcactt

SEQ ID NO: 30891 - DNA, 848 bp, Setaria italica
  misc_feature (1)..(75): n is a, c, g, or t
  Peptide Sequence Number=SeqID_96865
nnnnnnnnnnnnnnnnnnnnnnnnnnnnnnnnnnnnnnnnnnnnnnnnnnnnnnnnnnnnnnnnnnnnnnnnnnntccttggcagtttatttttttttttttttttttttataatcaaacgtacggatgaagaagcattttattcccgaagtctcggttacaaagtcaagtgcaaaacacgtacatgcataccacgtagaaaacgacgtagagaaatgcacatgcagacacaccaacgcactctggcagcatgcaccacagcatcggcatgcagccacatcagcaaccacagtcacacgacacacacacacggacacacggagccgtacgcgcgaaattaaactcccggctcttcaatttattcccctgctgcatgcaaagcatactgctggcactgctgcaggagcgtcgtcgatcagctagccgaagaagtggtgcttcttcttcccctcgccgcggccgtcctcctcctcctcggcgtcctccgcggcctccttggcctcctttttgccgtggtgctcgtggaacgcgtacccgccgctgcccagcgccgccgccgccgccacgccctcctcgatcttgtgccggtgcgcgttctccgggtccttcttcgcctggtgcttctcgtacaaggcgaaggcgccggcggcgagggcgcccatctcgccgaggtgctccttgtgcttgtgctccttctcctccttcctgtacgtctccgagtcgtccctggaggagcccgtactcatcgtcgccggactttttgttgtactcgtcgtcgccggacttttgttgtactcgtcgtcgccggaggacctgttgtacccgccgccgccgctgttgtagtcgtc

SEQ ID NO: 30892 - DNA, 296 bp, Setaria italica
  Peptide Sequence Number=SeqID_96866
ggaggaagttggagaggagcgcgggcgggaggaggaggtcgaggagcacgacgaggagcggcggcgcgcagacgaggagcagcgaggcgagcatggcgacgatgaagaaggccgtcttggcccaccgccacggccgcgcccagagccgctcgccgtgcaccagcggcagcggcagctgcagcttcgtcttctccatggcccgccgatcaacgccgcgtccgctgaaaccagtgcgaagaaagaaatccggatggtgcgcaggcgggagcgcggcggagtggttttgtttggtggcg

SEQ ID NO: 30893 - DNA, 1416 bp, Setaria italica
  Peptide Sequence Number=SeqID_96867
ttgggctgcaagatttggcagggaagaaatggtggtggctcttcttactgccgatgctgcagctggtgcactttcacatccaacatcagaagaccccgctgccaaaacacctgcttcaatagctttggcatatggtttcaagggcctttctgcattcctttcagaagcacaattaacaactcaccttgattctattgaatccaaagaaaatggaaagtgcaaaggcaatgctagtggaggcggaatacgtaatgctgtggacagaatatcggacaaaagcacccatgtgcatggtgggactgacgatcagcttgcgctcaaggataccctaggagctgtccgaaatgctgttcaagctgcagcacgcatacaagctgcgtaccgagtgttctcctttaagaaaaagaaagaggcagctcttcagaatagctgcttgtcggttcatgagacagttccagtttcacatggtatgctggagaaagctgcattatctatccagaagaacttcaggtgctggaaaaaacgtaaagaattcctgaagttgcggaaaaatgtcatcaagatacaggcacgggtgagagctcatcaaggaagaaagaagtacagggaattacttcgaagtgtgggtgtccttgagaaggtgatgctaagatggcaccgaaaaggggttggtttgcgaggattcaattctggggcaatgccaattgatgaagaggtggaagaagacgttgccaaagttttccggaagctaagagtggaaacagccattgatgaagctgtttcaagggtatcatgcatcattggtagtcctaaagcaatgcagcagtaccgaaggatgcttcagaggtaccaagaagcaaaggtgaatatacagaaggatgcttcagaggttccagcaagcaaagggtgaccatgaaaagtagtgcttgtgttaagcctacagtgacggagcaaagcgcaagccacccactattctcctctctccattgctgaaggatctgaacaacagtttgccttggtgaagagtaaagccgtggtgactgaaaggacacggtggatcccgaacaaaaaactgaacgtgattcagtaccggctccaattcaaggtgaacgctgttcgagtgtacatagtaacgtcatgtgcaatagctgacttttggctgaaacttgagaaaagtgaagtgctttgtccataaagaagcttcaaaggcctcgatagcaaggtagttgaagcccacctcattcgatgtatataccgtatgtaccatcttgacgcagtaggtttgcagtaactttgtactatatggtagtaaatatgggcatagctgctgcagcataatgaatcctgtaaggaatcttaattgccatttgctaatgtgtaatgcttcttcttattttcttttttcgtttaacatgg

SEQ ID NO: 30894 - DNA, 833 bp, Setaria italica
  Peptide Sequence Number=SeqID_96868
gcaacttcaccgtcgaggaggaggagaccatcataaggctgcacggcatgctcgggaacaagtggtctaagatcgcggcgtgcctgccggggaggacggacaacgagatcaagaacgtgtggaacacgcacctgaagaagaaggtggcgctgcgggaagacagcaaaaggctggcgcggccagtaacggcggagcggcgagcggtaacgacgccggcacgccagtcaccgcttcgtcttcggcgtcctcctcgacgacgaccaacaacagctccgggggcagcgactccggcgaccagtgcggcacgagcaaggagcccgacgcggtcgacgtgccccccctccaactagaggacatcgacgtctccgacatgctggcggacgcgcccacggcggcgcagccaatgctgtcgtcgtcgtgctcctcgtcgtccctgacgacgtgcatcggccgcggcgtggaggagctgatcgagctgccggtgatcgacatcgagccggatatctggagcatcatcgacggcgagtgcgccgacgcctcgggcgcgcgccatggcgatgcaacagccccatgtacgggcgccgccatcagcaccaccagcgtagcaggggaggaggccgcgaacgacgattggtggttggagaatttggagaaggagctaggcctgtggggcccagtagggggtcctcaggaccatacgggcttgggcccactggtcgactctgagagggaccccagtgtccacctacttccagaccgggccctccaatgctgaactgaattgctagatgtggaactcgagccatcatctgcagttctgctatgagcatcag

SEQ ID NO: 30895 - DNA, 282 bp, Setaria italica
  Peptide Sequence Number=SeqID_96869
gatggggacgcctttgccggcgacgccttggtcggcgaggaggccgctgttggggaagaagactccctgagctcttgcagtgtgcagttcttgttcgagctgagctagcctgatcctgctggactccagctgctggatgtaagccttcttccttagcctgcttttccttgctgcctccctgttctgggccagccttctcagtgtcattactttcgggtcgcgttcagcagtcgatgcacccctcctgtgatccttcttggccagcggcttcacatccttaga

SEQ ID NO: 30896 - DNA, 475 bp, Setaria italica
  Peptide Sequence Number=SeqID_96870
gcatcaacatactacagaacacacactaatcaaccagcaaatcagtagctccttcttgctaagttagctcttcactagctaggccgcggggcttgcgaccacgacgatgatggcagtgacggtggagatcacgcgccgcgcggtgctgaggcccccgccagcgacctgcagagggggcggcagcaagtccccgctcacggccttcgaccgcgcctccaccgacggatacatcccggccgtcttcgcctggaacgcgccggcgccagacaacgccgcgctcgtggacggcctcctcgccgccgtcgccaggtacccgcacctagccggccgcttcggcgtcgacgacagcggcaggaagtgcttccacctcaacgacgccggggtgctcgtcgtcgaggcccaggccgacgccgacctcgccgacgcgctggcgcacgacgtggccgcgcacatcaacgacctctaccccaaggct

SEQ ID NO: 30897 - DNA, 315 bp, Setaria italica
  Peptide Sequence Number=SeqID_96871
cagcgtgtttatccccgtcacgaacagcagcgtctgcaccacccgcaccctgtccccatcgtcgccacccatcatgggaaccaacaccgccgggatcatcaccgccgtgccaagcgccagtatgtagtgctggaaggcaagtatgatcgcctccccccagggagggttggagtctatgcagtactcaaacccctggagctgctccatgggcggatggctgatctcctccggcttcgcctccgccattgcccctcgacgagctctgcctcttcgaccaaaagaacccggaaacaggacagatagagagctctgtct

SEQ ID NO: 30898 - DNA, 228 bp, Setaria italica
  Peptide Sequence Number=SeqID_96872
gcctcctcgatgccaatgagctctgccgtatttgtttttttctttggacgcacaggagagctctatcgccttcattttttccttcaaaaacgcgtcgtgaaagatcagctataatacggatcgaatgacggggatgattgggatgcatgtcagcttcatgcatcagcgcagccttggcttgctctgcctcctccttgccagcaccatcacatcgcaggtcagccttga

SEQ ID NO: 30899 - DNA, 374 bp, Setaria italica
  Peptide Sequence Number=SeqID_96873
gcagtataaagaagcactcttggcatatgctatgctgctctgcagaaacaagtatcaggtattgcatgcttttctcttggcaccttgactcgtagccgttgtgttactggtactctttaacttttgtatgcaggtgtcatctcgagcaagcatcagagatacttgcgagcaattcatgtatgagaaattcaaggcgaagattgagatgccgattgacaaggctatggagacacttgtgaggttggggctggtgattgagcttccaaccaatggtgggtcaagcgtgattggtctcccgtgttcagaggcatacgatatcctgaggagccggtgggatagcttgttggaacacaggacagagcaaggtgacatgg

SEQ ID NO: 30900 - DNA, 2318 bp, Setaria italica
  Peptide Sequence Number=SeqID_96874
aacgaggaagcggggccggaaagtgatgggaagggcatccctggcatctacgtcccgcgccagcgctacatcgccatccccaaggccgccctcctcgacgccgtcctctcccagttcccctccgacgccgacgccgcagacttcaagcgctgcaccagatgcttggacgccatccttcacgccgagcacaaggggatgctcgaggagatgcgcacctcttacacgctcacgcagcgccaccaggaggaggatcagactgacacctccgatgtccaagcgatcttcaacggcaaagcctcctctggcctttctggcatcacccaagaggacgggacattgttcctcaccagaagcttgggcttgagaactctgctcggattgacaccagaccctgattccaacaccagagctgcttttgcaactcagttccagcgctccttcatgaaccttctacgcaatgctcagtttgaagagctctctgtgcaagatctgctcttgacatacgccctaaacagtgactacctcttgaccttgcccatttacgtcgactggaaaaaggcagctcaatccaatgccataatattcaggcgtgggtatgcaactgagaggcagaaggggctcctattagttgagaaactcgattacctgcaatcaaaactcttgcagagtatcttcttcagcctctccaaacccttgaaaaggccagggaaatggcttaatgagttcatggcaggctttgaaaagatcaacagggaaccagggatttcagatctggatcgacaagttaagactctggcttaaagagcaaacttacgccgataattcactgttgttgatagaaagttcttcatgggagaagcttagttctgatcagttgcccgatgatgatgttcctatttggatagctgcacaaagggcggtgtctcgttacgaagggattctatcacctgttggtcctcgtggcagattgttaaggagattgcttacatggaccggattaataccttctctgcctgaagcaacgataaaaagtgatgatgaaactaaacatcttgaaggacatgtgaggccaaattttctaccaaggattacccttgcaaatatatgggagcctgcaagcagagaatcttgcaagaacaatatttgggagatagtgaaaacttcttttcgtatcttatttgggaggtccactcttcaggaaccggcattccaagagttgatcctactatatacggatgaaaatgatcaaagtgaaaagaaggataaatctgagatgctgccgctacaactaaaaatttatgagaagattcctatcccagatctgccagtggtttttccccacaagaagttgtccttccgcatcctagatacagtaaggttggacattgctactgtaataggtctgttggcttacgttgtcaactacaaatttgagagtttagcatcatctccgtaagtcagcttttcttcttgatatagttgctattagtgcactattgatacttgtgttccgtgtgggactaggctataagcagactcgggatagataccagcttctggtgaataagacactgtatgagaagacattagcaagtgggttcggttcagtttactttcttctggatgcttctgagcaacaacagtataaagaagcactcttggcatatgctatgctgctctgcagaaacaagtatcaggtgtcatctcgagcaagcatcagagatacttgcgagcaattcatgtatgagaaattcaaggcgaagattgagatgccgattgacaaggctatggagacacttgtgaggttggggctggtgattgagcttccaaccaatggtgggtcaagcgtgattggtctcccgtgttcagaggcatacgatatcctgaggagccggtgggatagcttgttggaacacaggacagagcaaggtgacatggtatgatgaagttatctgtgtgctgtgtagcctgatggagtggagcagggatggatcacagtggagtccaactccaacattacagtacactgctggaactgcgtggttgacatggcggcaacctcttgtattgtatcctatagcgacacaaactacacactggtggagtagtggttgtacataacagatggctggctataattcacgatgctgttagtagttgctagtaaggaggagtacatgtgttgtgtgtacatgattgattgactcgtgatcagcattattgtgatcggttcatatgtatcgtctgctcattatattactatatacatatatgtaagcagtatatacagtcagttacaaaaactaaaaaaaaaaaaa

SEQ ID NO: 30901 - DNA, 521 bp, Setaria italica
  Peptide Sequence Number=SeqID_96875
tggagccggcaacggcaatgctcacagtcggcttcagcattttcatcttctcctccacctcacccccatctttcatctgcttctgcttcttcttctcatggggtgcaccttccttggctattgcggcaccacagtggtcatctgtggcatcgttccgcttcttccttttctgtttcttgtccttgtgccgtgccttccccacggcggctgtctcgttgtcagcaggcttcatagcagcggccggggaggaatatggataggccctgtttggaattgcttttctgagacccgctttttctaagaagcagctgtctggcacctgaacctaactaatgtcttgtcttcctgactgtgtaactaagagcaattccaaccgttctctcaaatctaagcccctactcctcgctatgagcttcctggcaagctcgtggaggcgcctggctcggagacctccgtggacgcggggggcggcgggcagtcgcaggattgacggcggccggcggtcggcgtcaaaggtttaa

SEQ ID NO: 30902 - DNA, 726 bp, Setaria italica
  Peptide Sequence Number=SeqID_96876
cttgcttaatcccacatcaacaagggtccctttgagcgatcaccctccaatgttacaccttcacgaaactcagaccattcgtgcttgcgcacatggtgtggcgcatcgagtggtggaagcaatcccacaaactttaggttcttgtgcatggggaaaagacgccggcgcaagtactgtggagtctccagatactccagtatccgaacaaggaaacgcgcgccactctcttcaccgtcacctgtgtcaccattctctgaagtgggagtgctgtcgaagacgacgacctcgtctatgcggaagactgttgcagcacgggcgatctggccagctagcagggtagcgagctcgagggactgggcgttgtcgatgatggagccggcaacggcaatgctcacagtcggcttcagcattttcatcttctcctccacctcacccccatctttcatctgcttctgcttcttcttctcatggggtgcaccttccttggctattgcggcaccacagtggtcatctgtggcatcgttccgcttcttccttttctgtttcttgtccttgtgccgtgccttccccacggcggctgtctcgttgtcagcaggcttcatagcagcggccggggaggaatatggataggccctgtttggaattgcttttctgagacccgcttttctaagaagcagctgtctggcacctgaacctggcaagctcgtggaggcgcctggctcggag

SEQ ID NO: 30903 - DNA, 332 bp, Setaria italica
  Peptide Sequence Number=SeqID_96877
aagaaaaggaagagggtgtgacctttcagctcttttgctactgagattttgttgcatgttccccaccggtaaagaaaccgtcatcggggtcggaagcctcctcctcagactcgagcacatcttcctcctcatagtcgtcgtctacgccagccgcatcgtcaacgaactgctggactccggcgcggcggcggcgcttcgccgcggaggacgacgagggccccgccctagcgtagccgtagccgttccgccgcttcccgccggacccggatgcgctgccggcgtcagggccaggggggtcgccgccacctgcttgcccttccccttcaccgcca

SEQ ID NO: 30904 - DNA, 493 bp, Setaria italica
  Peptide Sequence Number=SeqID_96878
ctaagaaaggtctgtacatactaaaattgttcaaggactagaaatctcggcgcggctttgccgcgccctttgagtattgggccagtatcgcttgattgtgggatataaaggatgtgaaacctgaaatttcgaaagtagagaaatcgtaacacttctaaaataggatacattcagtttgagtttgagtgtataagtagagggaatgtattaacgtgtattaatgttcattgcatgttcagaaacgtggaactactgccattgaaatttattgttttataaacggttggtcactaagatttagattttcatttgttatactgataccaagcaaaattgcaaaaggttgagtcttgtttgattataatactccctgtaatatcttcttcacaaagaaagattctatatagttacaatctgaaaaattatcttaaattggcacctcaatatgctgatctgtcacttgacttgagatgagacaaattaaaaacggtat

SEQ ID NO: 30905 - DNA, 386 bp, Setaria italica
  Peptide Sequence Number=SeqID_96879
gttcttgacttgtctcgagggttttggcagcggcggccggagatgggggagcgggcgaaggaatggctcctcgccgctggcgccggcgccgccgtcggcgcgctgtcagccgccgcggtcatgaatcttctatcgagatccaagcggagagagggctacgtgcggcaactgctggaatcgaatggcgtcacggctggcaacgctcgatccagcaggcatctgggtgccactggtagctccgatcttctctcagatgaagtggtctctgaacagcttacaaggaatacacaattttttggcatggactctcagaagaaagtgactgaatcctatgttgtagtcattggtcttggaggggttggcagtcatgcagcttctatgctcct

SEQ ID NO: 30906 - DNA, 548 bp, Setaria italica
  Peptide Sequence Number=SeqID_96880
tactaatcttcaactgactgcatagaccataagcaaatacatcaagcatcaataggggggctttgttcccgtcttaccacaacagagaaccaaaaggcaactgaccgttagcttgacttgtcatcctaaaaacatgttaacagtgggtggtctacttgatgtacacagttcatgatcatttcaaggtaaactgcagaatcatacttctcacactctttcgagctcagtgatgtgcttccccagctgctccttcagttctttccgccacccttcaatcagcttcttgtgcttggcaataagctcagacttggtcttcagttcttcctccattgtagtaatctccttccgaagcacatcttctgctgttggttggtcctcgcgctgcaggctaatgaagtaagactggagcttcttggcagcctccatgaagtccctggcgtgcctctcaacatcaatctggtgggaggactggagggagcggtcgaccgcctggagctcgcgcgcggggaggcagggcagcagcgcccgtcccttcctagtcgtcccgt

SEQ ID NO: 30907 - DNA, 311 bp, Setaria italica
  Peptide Sequence Number=SeqID_96881
gcttgcgttctccctatagctgatggaacctgataagaactcccccgttcagcgggccccttcagttagcaattctccagccacaccggccattacacctccagcccctccaggcagcagcaatcccccgtctactcctggagcaggaggtgatcctccggcagttcaacctgtcacacctccggcagttccagatccagctgatccagatagtgagaatcgccatgaccctaaagcatttcttcgtgatccatgatgttgtgaactgagctaaaatcaataccagtcttggggtccatcaaccacgataa

SEQ ID NO: 30908 - DNA, 585 bp, Setaria italica
  Peptide Sequence Number=SeqID_96882
gccatgatgagcccaggatcgacttgagctcgtccagattggcggcgggcgtctcgtcgttgccgcgcgcggcgaggatggatgctacggcgatggtggatggctggtactccaccgagctcatctctttgatcgcggcgaagacgcactccacggcgcggaagacgatcggccggcgctcgtcctgctggaaccgcgccgcgaagcagctgatgtaggggaacggggtggcggcgatcatccgccactggagcgtgcccaggacgaggagctccatccgcaggatggacgcggtgtcgaactcgtacgcgtccacccggagctccgacaggcgcggcgcgtggtgctcctccaccttgctcgccagcgacaggcacgccaccgcgagaagctgcaatgcccactcctggcccctattgactcgccgttgcgccaagaagcgatcgaggtaagtcaccgcgacgtacgccgtcttcccactgaaccggaacatcgccgttgcttgataatccagcggacgcacccggagcgcgcggccttcatccactcctccatttcctccgccagggtgccgacgccggcggc

SEQ ID NO: 30909 - DNA, 208 bp, Setaria italica
  Peptide Sequence Number=SeqID_96883
tcgaccagcattttccggccggtgacgatcaccatctcccggctatcgccggtctcgcaacagccgtgcgagatggcggacaggaggagcacggcgcaggccagcagcttcagcgtattcgagctggacgccattggtgtcgtcgtcgatcgaggtcttcgtggaatcctaggatgtgcagtggctatctatcgtctagctttgcgtg

SEQ ID NO: 30910 - DNA, 476 bp, Setaria italica
  Peptide Sequence Number=SeqID_96884
gaggaaaaaatacgcgcgcgtaagcagatagggttcatcaagaggagtagaggacttttgactaagagcctaaaccgactacactagcttgctggccatctttcctcaatattccttctctctcccagatctccgacatgattctccaatatcacacctcccgaacgctagcgcacaccatgtccgccaccaagatcgacctggagtcgagctcagccgacaactccaccgcggccggagacggcgagaggcatcctcctgctaccacaggactccatcggctcagtcgagaagtgtacgcggaagatctgggtttgcgagggcagtaggcagttcaatgacgcaccgcgtgctcacctacgtaccaggcctctacaagatcttcgatgagatcctcacctacgctgccgacaacaagcagcgcgacccgagcatggactccctccgcgtggaggtcgacgtcgacctagttgtct

SEQ ID NO: 30911 - DNA, 639 bp, Setaria italica
  misc_feature (600)..(639): n is a, c, g, or t
  Peptide Sequence Number=SeqID_96885
ccgccgcccgccgcaaactcgtccctcctcaccgccgacatggtcgaccggtacgcgcgcctcttcctgccgcccggggcgaccagggaccacccggtgatcaacctggccgggccggaggcgccgcggctggaggtggcggcgatggctccagtgctcgtggtcgcggcggagcgcgacgtgctccgggaccggcacgcgcagtacgcgcggcggatgaaggaggagtggggcaaggaggtggagtacgcggagctcgccggggtcgggcacgggttctcggaggccgacgacccgtggacgcggcccgccgacgagctcgtccgcctcgtccggcggttcgtcgtcgcgcacatggacgcggagtaggttcccttcctaccacggatagctgcttctagctggatcactaatggcgtgcgtaggtggcacggcatggatggaccatggacctgctgcttcttggttgaggaattccggtggctgatttgatttctggattaggaagggctgatttttttgattgcttcttgttcatctttgcttccaaacaaagttccgcctgacgaaagctcaaaaaaaaattcagatgtaccctannnnnnnnnnnnnnnnnnnnnnnnnnnnnnnnnnnnnnnn

SEQ ID NO: 30912 - DNA, 1222 bp, Setaria italica
  Peptide Sequence Number=SeqID_96886
ctcagacgtagtacacacagctcaaccgaagggcaagcaaaatactaccttcaagccctgatcaccgtgctgcgtcgcgctgccttttgaaagaccgtcgcgttgaactcccaggtccagaattgcggaaagaacgctgggattggtcaaacctaccagtgggagccctagatggcccagtatgtactgaagcaccacctggatggttatatgagttctgaaaatttggtggctgatgtggcttatcagccaacaaggacacgaggaaaccaccaggtggaatataaccagctcttcttccctgggagaagctgctagcttccgctgaattctggcctgaacctcggtttgctggaagatcattggatggaaccatagcaggcaagccatcgtatgagaggatgcatgcgatggcatacatcgacgctccaagggcttgtgggagaacatcttgaggatatttgactttgaaaagaatagctgatgctagacgttctcttaagcagtaaatttgagcaacatccagagccgtagcatcaaatcggagccaccgatcaacaactactgaaacagtgttatcaggagaagacataatctcttctttgtgctgtaccaaagtgcttttctcagcttcatcctcgctggaatcttcctcttcatcactatcatcatcaggtggagcaacaaccatttctgtagcgagcagaagcaaaggatgtgacccaacaactgagcaattttttatatacattccaccatcacctcgagtgatctcatcgtatatcagcagtggattcccagaagatttactaaatgataggttaaaattgcacgaatgtggatgtagacgaactttggcaccacttgctgtttccacaactgcttttctagcatttttgcgaggagggagcaacctccctaccattgggtaggcaccggccataagaacagcacgcatgatacctggatcttttgagtttaggctgcaggcagatgtatctgcaggaacgaaccctctttgagacagttcattctgaagctgtttcctcatgtttgatagcatatacatgatgtttgaagagacaaagtactttgtacaaaattgagattcttggcctctatctttggcacgcctccagcagtcgaatgccgccacaacagcaagctggtcactgaacccaccatacaacgaagcaagctcaactttcgctgcagctgctta

SEQ ID NO: 30913 - DNA, 300 bp, Setaria italica
  Peptide Sequence Number=SeqID_96887
tggcggaacttccacgcggccccgtgcacgtccttggcgacgacggtctgcacaggcgggtcggcggcgtagtcgagccgcgggaagatggtctccgcgcagtacctcggcacggagaagccgccgccgttgttggtgtcggactgcgtcagcgtcttggcgaacgacgccggcttctcctgctcgtcgtccgcggcggggtcgtcctcgaggccggcgtccgcctccctggcgcggagcgggacgaggcggatcctggcgaagacctcgtcggtgtcctggtcggccatgtatcgcacg

SEQ ID NO: 30914 - DNA, 289 bp, Setaria italica
  Peptide Sequence Number=SeqID_96888
ccactccagagacgccattccaaatccccatctccttccctggccgggccccggcgtcacacaacactcctctgcagcttgtgctttgctctctgctctgcctgccaatcgagttccaggtggattggtttggattggaggtctcctccatccccaatccccatgtccagcagcagcgccgccgccgacccggacgagatcagggcgcgcgtcgtcgtcctcggcgccccccatgccgacgccgccgacgagtgggcgcgcccggagctcgaggccttccacctcccgt

SEQ ID NO: 30915 - DNA, 458 bp, Setaria italica
  Peptide Sequence Number=SeqID_96889
tattcttccttcgtcggccaacccggacttcaccgaccgcacgctgccatccctcgacgcccgcgtggacatcgcctccgccgccgtcccggagctagccgcggccgcggccgcaaaggccatcaccgaatggggccgcccggccaccgagatcacccacctcatcttcagcacctactccggcgctcgcgccccgagcgccgaccgccgcctggcgtcgctcctgggcctcagccccacggtctcccgaaccatgctcaacctccacggctgctacggcgggggcaggtcgctccagctcgccaaggagctcgccgagaacaaccgcggcgcgcgcgtcctcgtggcgtgctccgagatcacgctcatcgccttctacggcccggagggaggctgcccggacaacatccttggccagtctctgttcggtgacggcgccggcgccgtcatcatcggcg

SEQ ID NO: 30916 - DNA, 275 bp, Setaria italica
  Peptide Sequence Number=SeqID_96890
gttctgcacaagaggctcagttcatccggaatttccccagtgaagttgttcccagccaatgcaagttgcttcaactgttggaaaactgccgagaacactggtattgtaccagaaagaagcttgtttccagacatgtcaagtgtctccaagcggctgcagttagcaagactctgtggcaaccccatgccactcaatctattgtatgaccaatcaagcattttaaggtttgtgcaaccaccaaaatcatacctggagatgtccccagagatgttatt

SEQ ID NO: 30917 - DNA, 406 bp, Setaria italica
  Peptide Sequence Number=SeqID_96891
gcatctgctatcacacgtcctgtgcttattagaatcaagaaggtttgcattagagccttgaaagtaatgtggtgtttagccatgagaatgctaccataccaaaaggtcagagcccatacacatctcaaaaggctcatggaagtaccaaggccgagaccagcaagccatgactgccggatgctttcactgaaagagccattctgtgcttgttcaaagaggcacatgatgtggtcctgggatgagaaagcagttacagtgcgaagatttgatacagcctcgacggctagcttgctacattctgattgtgcccgtattgatttattggacatattctgtagtaagacacggcgagtataaaagcttgcgatgataagaggctgcactgctatcatcacaagagccaagc

SEQ ID NO: 30918 - DNA, 199 bp, Setaria italica
  Peptide Sequence Number=SeqID_96892
gatgagtccataacactgcatgacttgtccatgaactgcaaaagtgcagaagagctaaattagggaaggaatcaccaatgtaacattgtaacttcttgacataggcaataataacaaggtgagaatcaagattcatttttcacaggaagacagtaactaccatctgacgttgcaactgtctccttgggtatgaatttga

SEQ ID NO: 30919 - DNA, 354 bp, Setaria italica
  Peptide Sequence Number=SeqID_96893
gcaaaataacatgaagttgatccggagccaatgagcaattctttcacagttaaaccctctttcatctccaactcatctcgtaggaatttgatgaagccacttgtgccgatgaacaactcctatgttcctcatctttacagtgagaactttgaaattgaagaatgtacatttgctccagttccttccccagcttctgctaggccattcattgtgacagatgggagaaggataattagtaaatcatgctatgagccagtacctgtaccctttaatactggatttgaggaggaggaggagaaagagacggaggggaggcatgatggcggccgccggtctttgtcttcttcttttccc

SEQ ID NO: 30920 - DNA, 1087 bp, Setaria italica
  Peptide Sequence Number=SeqID_96894
ttcgatgaggagaatgtgccttgcaatacaccaagaaactctgttcactccacatttggtcgctcatcaggcagggctgttgcttctactagcggcagccacaacactgattcagtgagcccaggcgagtacctgaatgatcctggatccatactgagtttgcaaccttggatctttaagagaagcggctcacagaacagtgaggaaaggatgcatgctagtggcagcagggcattcggttcaggcaaaaatctggcaaattgctttcgagatgctcaagctgtcgaagtctgtgcaaggagccctggtgttggttctggacctggaaggggttgtggagctcttaggagcagaagatctcgtaggaatttgatgaagccacttgtgccgatgaacaactcctatgttcctcatctttacagtgagaactttgaaattgaagaatgtacatttgctccagttccttccccagcttctgctaggccattcattgtgacagatgggagaaggataattagtaaatcatgctatgagccagtacctgtaccctttaatactggatttgaggaggaggaatgtagaggcaccttagtgatgccaggaagtgtgattgggatcgcttctctacctgagctgaagaaattgaaagaggagggcacagattcacacgctgcaaggcttggtctgtctagttctcagagaagtagtaaatcatacggacaagcaggtttacgtgatcgattgctcctattctctactgggttgagcatcggtattctatcgtcttctctgtcaaacaagaaggaatttgatacgttgaagggcacactgaagcaaatggagaacttggttcaggatttacaagatgagttggagatgaaagagggtttaactgtgaaagaattgcctaatgaaagttctggcgaacatgatgatgataatagcaaaatacatgaagttgatccggagccaatgagcaaaatcgaagctgagcttgaagccgaacttgcgagactggaactaaatatcacctcgaaacgtttggaagaagaaacatctgacttcaatgaggttgaccaggagttca

SEQ ID NO: 30921 - DNA, 1348 bp, Setaria italica
  misc_feature (1312)..(1348): n is a, c, g, or t
  Peptide Sequence Number=SeqID_96895
tccatctattgcgcccaacaactccccatccgccgcccatccccagatctagatctgaacctcccgtgactgccggatgatggccgccggggcgcacgaggactccgacgagccgccgcggcggtcggcgctgaagaagagcgcgccggcgcagccgtggtcggacccggagaccctgcacctcatcgacgcctacgacgagcgctggacggctctgggccgcggccagctcaaggcgcagcagtgggaggaggtggcggcggacaccgccgcgcgctgcgccgccacgccgggcctcgccgtccagcgcaagacggggacccagtgccgccacaagctcgagaagctccgcaagcgctaccgcaccgaggccgcccgccccgtcacctcgctctggaccttcttccgccgcatggatcagctcgagcgcggccccaacgccgcctcctccgcctatccggccgcgggtggctccccgcctgccgccgcctccgacgaggaagaagaggaggaagaagacgaagaggaaaaccaggaggatgaggaggaggaggaagaagagctcatcccccggaacaacaccaggagcatcaacggcatcatccgggaattcggcagcggcctcgccccgcgccacccgcagctgcagctccagcagcagcagcagccgccgccgccgccttcaatcacgccgtccaccgcacctccacggaagagagtggcctacgaggcgttccaggctaaggccgcagccgccgccgcggctgcggttgcggctgacaaggccaaggaagaggaggtggagctggtccgccgccgcccctccgggcctgggggagccagcgcccagctctcggcggtgctgagggacttcagcgatggggtcatgcggctggagcggcggcgcatggagatgcagtgggagatcgagcgcgggtggcaggagacggaggcccgccacgcccagatgctccaggacgcgcagcgccagctccgcgacgccatcgccgccgcctgctccctgccgccgaagaaggccaggagggactacggcagcagcggagactcctagcaactgatggccttatgatctgatggtgatggtagggatcccagctgttcctccccttgttcaggattgtagtcgtagttcgtatatggtagtactgatttgcagtagcatttttaactatctctgttatgcgcgtccgttatggtgaatgacgatgcttttggacgataaaggctagtgcagttgctgatttctatctagtacatgcagctgtaagctgtgattgtgtgttgcaaaaannnnnnnnnnnnnnnnnnnnnnnnnnnnnnnnnnnnn

SEQ ID NO: 30922 - DNA, 874 bp, Setaria italica
  Peptide Sequence Number=SeqID_96896
cccgtcgcatgccgaaccgccgccgcacgcaggccggggcccggagtactaccgctcgcgctacgccggccggtacaggactagcttattacagccgagtccgtacgaccaattgcagcgctccgtctctgacgagacgtacacgaggcagtcgagcggtcggttccgacaataccccgatggtcggcgggagaactatggctttggtcaggggagtcgccatcacagcacttgccaatgcgcgcagtgccttccggtacagcgggtggtggcgcccgaggagaacattccgatggccaggtacttcgcagggcagcaggggtcctttcgtttcgataggtctcaaccattctcatcggagcttgaccggagatctgtggcttcatctctgtactcggacccttccatgtcaaagaggagggtggagtatttcaggaagaaagcagagaatttttgtcggccattgaggggtgctgcaccttttgttgtttgcagctcctgttcccatcttctgcagatgcctcaggggaaattcacaggctgcaagaagaatcaggttcagtgtggttcatgttcagagattattaatctcaagcctaaggaagcaaaagtccatccggtgatcccccaatcgtctttcccagtaccaaaaagtgtcagaagttccaatcaccgggaccccaagagttccgggtggtatcaacatcaggatgatgacaattttaatttctataagttgcaagcacatgatagccaccgacagaaggaggatttttctgacaatatgtcaccatcttctaccgggagttatgatagaacagacagtgagcgtgggtcaagcaggagcattcagttaaaatcagtgcctgcaagc

SEQ ID NO: 30923 - DNA, 388 bp, Setaria italica
  Peptide Sequence Number=SeqID_96897
ctccttccctgacaaggattgattctttggtatctgaagcacttcgtagcaattgtagcatatggtgaaaggggcaccacctgcaaccggttcacaactctgtgcaggcttcttgcttacattggccctcgggtgattctgagacaagatattggtgcctcttgtgcagtgtctttgctgaccaaacaagggactgtccacaggataaaccccgtaactgttcagaagatatggagccctttgatcattgaagcccaggtggtttccctgtacaggcatgaattcttggtggcaacaatgcatgcaagacaagcagcttggtgatagaagccatcatgacggcaagagaggagaggatcaggatcaatgctgtgcaaagaaataattt

SEQ ID NO: 30924 - DNA, 300 bp, Setaria italica
  Peptide Sequence Number=SeqID_96898
cgaagctgccggcgccgccgtagccgcccatcatctccgcactggcggcttcggcctcggcgggcggggagtaaaaccctagcttgctgggccgctcgaaactccccgccgctgccatgaagtttgcaccggccgcggagctgagctgttgctcggcggcttcgacgactgccgcaccggcgccgacgccggcgaggctctgttcgaccagatgctgctggggcgatgctgcacgctgactgtcgtcgcgacggcgtccgtcggcagcgaccccgggagcagcttgttcgcctgcagcag

SEQ ID NO: 30925 - DNA, 1291 bp, Setaria italica
  Peptide Sequence Number=SeqID_96899
tttttttttttttttttttttttttttagtttcaagcagatcaataaaccatcttttatttaacgagcactgctatatatgcaggctgggtcacaaacttattattgttcagaaacataaccatgcgttcagcactttttatggagcttcatgcacccatcaagtaaggaggtacatacgagatggtgctgagacaccctcctcactctgctcctaggagcgcgaggataatatcctcatagtctctggtcgtatctttagcaacagcacgctccagcgtcacgctgttcctcttctggtaggcctcctttatcagcttcaggtcgacctcagcgcgggtagttatgaccctggtgagatcatcctcatctgtgcccatgcctccaagagctagtcgaaggattttctcaaagtacctgtcagggcaagtgaagcatcggatgatcgcccgcagcgttgcaaggaactcatccttgggatcagctttcagatccttgttgattggatgatcaaactgatccttgtagctattgaatgttgcaagtagctgagctttgctccgtgtggttagaatcctgatgatctcctcgtcactataagccttcttatgaatcttctcatgaagtattttggcttcagagtgggccaatgaagtgttcacctctgggccatcatagcggtatgcacttacaagaggcaccaaaagcttgcggaagtcgccggtgatgtgcgcggcgacgtcctcctcgagcgagcgcttgaagcggtcgtggtaagcctgcttggcggcgaagagctgcgcgggcgtgcgtgcgcacgcgatctccaccagcacgcggccgccggggtgccacttcttagcctcctcgttcgccagcacggcatccctctcggcggggtccagcgtccacaggatcaccgccctctcgaacttgccgtggatctcgtcgccgagggcgcggagcagctccttcccgtaggcctcggcgtaggcgcggcggatcgcgcggcggtgcgcggcgtcccggtgcgccaggatggagatgatcagcttctcgttcgtgccccaaccttcgaaggccttgtggagctgctcgcagtcctcggcgacgggcgggacggcggcggggacggtgagtgtcgccattgcgtcggtcggtccgggtggcgggggtgggtgggcgcgagcgcgatctctccccgtgctgcgcccgtgggatctgggaaatggctgggggaacttgggggcttgggggggcttgtgtagcagtagccgcgcggatgccgcggt

SEQ ID NO: 30926 - DNA, 254 bp, Setaria italica
  Peptide Sequence Number=SeqID_96900
gtttgtttgcttttagtttaggctagacatatcagtaaacaagcagtattgataactttgttggtttatttctcaattctgtcgtaaatttagcgcttccttgatttcaatggtaagcttgtgctttgataattagtttgtggttttgattgtcacagttgacagtggcatacctcaaggagaagtcttctagccaggggtcccagccatcaacaccaagctccagcagtgggatgcgatctgcggcagcaagg

SEQ ID NO: 30927 - DNA, 771 bp, Setaria italica
  Peptide Sequence Number=SeqID_96901
gagcctggaggaatgtggtcggtacttggaaactatcaaagtgtatgaaaacaagccagctgacagtattcgtgagcacacggatagtgactatctatcaaggttgacacatgcacttacatccattcggcatgttaataaaacagatgttgtcacactcggttcatcttttgggtcactctcacaagttatgaatgcttctatggaggaactggctcgttgcccaggaattggtgagcggaaggtaaaacaactttatgatactttccacgagccattcaaacgggtttctgctcgcccaaaccttgtagtgcctgatactcccgacagggagaaagcatcaggccaacctccatcgacgaatgatagctcagaaaatacagcagagaaatcagagacatccaagaagaagaaaggttccgacgtaaggtcggcccttaccactgcctttgccaagtattcggagaagatccgcagccagaatggtgacgccgcaaacgaggctggtgaaggtgctagcagctcaaacatggaagatggcaagaccaaagactagatcagcagtaggattctaacagcagtgtactattgctagtctgctcttcatgccaggcagtttattgttgttgtaattgcaaaaattttcgctgtatgttttcccctgtgctaaccgtcagacaacattcgtgccttactacaactccctttagtaaacctaacaatgtagatgagctttcacctgttgcataacccttgtctttctgaatgagg

SEQ ID NO: 30928 - DNA, 1017 bp, Setaria italica
  Peptide Sequence Number=SeqID_96902
caacacaacaaattaggacaaaaaaaaaaaaataacaagggtaagaagtaacatcgaagcccatgaagtgcagtcacgttaatcaagctttcagtcgcttcacaatgaatgatcatccatgaacaggaacctaggcacctgactgatagcatcgacaacggaaaggggctcctactgcacatgaggagtctgaaggaagagaaactcaaaggacttccctgatctctcgtactcgagcatactgagagctacttcacagctctgcgagactatgggctcaggatccttcgcaaactcctccaaaagcgcaatgctttcttgatctgcaattgagccaagggcttcagcagcttcatgcctgaccattggatgctcacagacatccttcaggaccatggaaagtgcatctgaagcggctttattttgcagctgacctaacacataagctacctcatgccgtagaagagcacttttgacgcccagagctgcaacaatagcagaaacagcagcatctccaccatcattcctaagtgcaaaaagagctgcataacgttcgtacatgctttcttgctcattgagaagaagatcccttaattggtctaccgaaagtccatgttttgcaggcagtgctggatcaactgagagaaagggtgaattggttgtattctcagccccattaactttcttctgctcttctatccgtcttagtgccagttcgcaagtttcttgtacctccacagcaggatcagctgttaaactttcctccaacaggggaatgctcttttcaaggccaatagctccaagagcttcggcagcctcatggcgtacaattggatgtagagaaagatctttgagaactgcaactaatgcaggaatagcatcagcatcctgcatttgcccaagtgcaaatgcagcctcatgggccagcaagttagaaggatcccttgcagcttggaggagggcgctgcgcggggcgtccccgcggaggttgcggagggagaagagcgcccggaagcg

SEQ ID NO: 30929 - DNA, 556 bp, Setaria italica
  Peptide Sequence Number=SeqID_96903
ataatacagtcatatgtcaaagcctacctggtgcggaaagcttcaaagcaagaagttgctcatataagatctagactgcagaagtcttctgcactagttgatgatattatgcgcctgatcaacagactggtggctgcactgtcgcagctccgtcactctaggagcacacgcagcattagacaaacttgcacagcattgagtactgctacagagtattccaagaaatgctgcgagacactagtcactgatggagccgtagacatattgctgaagcaaatccacttcctgaaccgtgggattcctgaccaggaagtcttgaagcaagtgttccttactctcaggaacattgcacgctatccgcatcttaggcaggtgttagtcaacattccagaatcagctgaaatcatcttccaggaattactgaggaacaaagcagccgtgttcttcatagcgtctgacattctgaagaaattatgtgaatccaaggaaggccatgaaaccgcccgggcactgcatcaccacatcaaaaggctgcgaagtctggtgcaagacctaa

SEQ ID NO: 30930 - DNA, 272 bp, Setaria italica
  Peptide Sequence Number=SeqID_96904
cgatcggcgacagggagagaaaaagtgagcggctttcttatccgggtcttcgccggccgtgcgcgctctgcagagtacgggaacggggactgggggctctgatctgttgttctagttgtagttagctagagacatgggcagcgagtgcaaggagcaccttcagctccacgccggcttcggcgccggcgggggagggttgtcgccgccgcagcagcagctgcaggccggcgccatcgcgccgttcgtggccaagacgttccacatggtgagcg

SEQ ID NO: 30931 - DNA, 412 bp, Setaria italica
  Peptide Sequence Number=SeqID_96905
gctggcgttgacagttttgatgaagcctctccgtgggaacaacagtttagcatatgttggactgcttctcaactgactgaatacatactaaagtcagaaggggaaaaatgggataacgaattgacaaaactgataaactctcttgatattaagcacttcactatgccgatgtactctaccattcgatgtttctatgctctgtactctactgatattatctacatatgtcgaaacaacgaccacaccaccccaaggattcaacggtccgattgatgtgaagaaggctattcagaagtgcagtgaatagaacttgaactggtaactaagctggcattgagatattataacggctacgcagaccatcaatagctttctccacagattttgtcatctcagggatagtcaccttgca

SEQ ID NO: 30932 - DNA, 269 bp, Setaria italica
  Peptide Sequence Number=SeqID_96906
caaccgccgccgcctcacattttttctttccttcctccaaccacgagagcaccggcggcagcggattcctcccgaccgagaagaggaagaagaagatgggcgggttcgatctgcaggtgaaggagcggaccaaggagctgaagcacctcaaggccgcggcgatgaggggcatcaaggcggccggcgagtcgtgcaagaaggcgtggagcaaagtcaggagcagcatcaggcgctagggcgtcgagttcgcgaggcacacaggggatagg

SEQ ID NO: 30933 - DNA, 332 bp, Setaria italica
  Peptide Sequence Number=SeqID_96907
atgtaccacctagcttgtttaataaagatggagatgactgaaagcaaattacattagaaatgtctttgctgttgtttataagccattcaacagcatcctgatttgtaactgcaacattgagtagcatgtcacatcgtgataactctttcctaatatcattgttctcaattgagttatctgtgaagacaagcatctcaaattcctcatcgacccacttgagcctatcagccgtgtggcgcatgacctcttcccatggcgtatccttaatcgggcttatggtaccttctccaaccaccgcgacaattcgtacggtgccttccggcgacgtggcc

SEQ ID NO: 30934 - DNA, 381 bp, Setaria italica
  Peptide Sequence Number=SeqID_96908
ttatcttccagttataggtgagaagctgcatacattggccttgcgtattctttcaaaatctaaattgattcaaggttagcaaatgagattttgcttatctttgtttactacagttgagggcaggtggttattgcaaccttcctgcctgtaattttcagttcctgcaatcaggacaattaatttgattttaaattttaaatatctcttctgtaaaacctaactaatgcagtgtctgtattatggcacgtcactttgtagttataaccattggatcaaactcagtttaagcctccgcatctgaaacaagttcaaatggtggatgctcataaatttatgtgttaagaagacacctttctgttgcatccttagaaactgtatatg

SEQ ID NO: 30935 - DNA, 260 bp, Setaria italica
  Peptide Sequence Number=SeqID_96909
gcgggaagaaggagcggtacaggtcctccgtcacgatcgatgccacgtggctgtggctgtggctcgggaagtcgccgtcgtggccgtggtcgccgtagccgccgtggccgtggttgccgtagccgccgcggccgttgttggggaacaggcagtcccacctccaccccgaccaccacgccgcctccgcggcaccggcgttggagacgaccagcacgacggccagcaagatggcagggaggaacaggcgcgccattgttggc

SEQ ID NO: 30936 - DNA, 389 bp, Setaria italica
  Peptide Sequence Number=SeqID_96910
ttcagctcggagtaaaacgcgcgatggagaaggggagcaggggttgtccggccgcgccgccgtctgcggcatcgtcgcgctcctcagcgcccccgccttctcctgctccctcgcagccgaattccgcaaggtcaaggagaaggacgtgaagctggacggcagcctctgctcgctgcccaggagctccgccttcgagctgggagtggccgccatcgccttcctcttcgtggcgcagcttgtgggcaccaccgcagccgtgaccaccgcgtacgccgccaagcccaagaagagcgccgccggcagaggccgcgccacgttcgtcgccctcctggtcctctcgtggttgagcttcgcggtggccgtggtcctgctggcgacggcggcgagca

SEQ ID NO: 30937 - DNA, 252 bp, Setaria italica
  Peptide Sequence Number=SeqID_96911
acagggaatgctccactgttcacttcaggcgatctacatgaatggcttgagggcttgggcaagctagctatggactccaccgaacaacctgaactctttgactttgaccatgtatatcctcgtgcaaatgttaccgctccaattgctatattttatggggctgtcgggacaaaatgcttcaaagagctgcatgttcaactagcagaagcatcaaagcagggaaaagtcaggtatgctttgcgccctgtccta

SEQ ID NO: 30938 - DNA, 510 bp, Setaria italica
  Peptide Sequence Number=SeqID_96912
gccgggctccgccggtggcgccgtatcccgcgcgagcagcagcaccacgaggggtccccggcgagccccggggctgtgggggccggcgtaggtgctggcgcgaacgcggctgaggacttggcggcgcagctccacaagcgccgtctcttccccaccgccgacgcgcccaaggggaaggaggacgcggccgtcgaggaggtggagagctcggtcgcgtccgtggagtccagcttcgtgccgctggtggcgtccccgccgccggcgccgactaggctcgacccgaatctcggccacctgatcgccaccgccgggttctcgctgggcgcgggcggcgccgactcggacaacagcgacgaccggaccagcaagttctctactgccgccagcgcgccgcgccatgacttctcgtccggcggcttcggccgggaccgcgacaggccacgatcccgagcccccggaggcgctgcccatgagcagcgcctccgggctgcgcgcgggcgaggcgccagt

SEQ ID NO: 30939 - DNA, 397 bp, Setaria italica
  Peptide Sequence Number=SeqID_96913
gcagcgagtactgaggtggttgtgagaaacgtcgatgaacgacagcgacgtcgacagcgcgaggtcgccggggagctccccggacaggtcgttgccggcgagctcgagccgctgaagcgacggcagcttgccgaacccgatcgggatcgtgccggtcagccggttgctctgcatgcgcacgcggacgagagacgcgcacgacgcgagccccgccgggatcccgccggtgaagccgttgttgaacatgatcagcttggcgagcgacttgccgtcgcagatcccagccggcactggcccggagaaggagttcgacgacacgtccacccactgcaacggcgagctcttgccgagcgacgccggtagctgccccgtcaaggagttgttccacagctcgaac

SEQ ID NO: 30940 - DNA, 619 bp, Setaria italica
  Peptide Sequence Number=SeqID_96914
agaatcagcagcaaacactacaacattcaggcgacatcttcagttttgtgaaaagaggcatatttgtagagttggacgatatctgttttagttggacaacttgtactttattattcacaaaataagaactgctgttattcttattatttgatgactgttaagaagtttacatattctgttgttgccagttaacactagaatgttagtctttggtttgccatgccgaacagcagatttttagaacatgtggcaagcatgatttcatattttggataaagagctggaagtgccaagtcctgtttcctgtgagtgttgggtcgtttagtaaacactgagctgcgcttcagtcctttcgaaataagaaagaaaaaatctccctgtgaagtcatgttagtttacttggcagcactgtgcaagccctgaagttacttcctccgtcccaaattctattcgttttggctttttctaaatacatagctttttgctacgtatctaggcatacatacatctagatccatatcaaaagttttgtatctagaaaagtcaaaacgattgtaatttgggacggagggaatatttcagtattattccattgtgctttcttgactttcggttcaat

SEQ ID NO: 30941 - DNA, 244 bp, Setaria italica
  Peptide Sequence Number=SeqID_96915
gtgaagaaggtggcgactgcagttagcatcccatggggaggcgggatcgaactgtgcctgtgcagcagcttgagcggcgtcgaaggcacccggcggcgactcgctgaggaaggggggcagaacggcggcgctgatccccacgcagaggccgctgaacgcgatgggcgccgaagctgcggggggcatggtccctgtttgctcgcagctcgctttagaagatgggggtgggcttgggcgagctggg

SEQ ID NO: 30942 - DNA, 282 bp, Setaria italica
  Peptide Sequence Number=SeqID_96916
cttgacgacgacacggacgccatccttgggttcgcaagagaatccttcccaggtagacggggaacacgggtctccattccatgactcgagcatctcattctctcggttcctctctgacagctcctccttcaaccgcttcgcaacatcctcttgggcgaggccttgggatgccgcggcggtggcgagggcgaggagcagcgcatagaggaggaggaagcgggcggccataccatgggggttgcccgctgccgctgccggccggcggaacgcagggagcttgcg

SEQ ID NO: 30943 - DNA, 310 bp, Setaria italica
  Peptide Sequence Number=SeqID_96917
tgtgggtgtcggtggacacggggctcgtcgtcgtcgccggcacgaacctcgacgcgtcgctcctcaggtggcgggtccagtccatgatcagaaagaagcaccgcgtcgacatcgtcagcgacggcgccgcggaggagcagccgcagtacgccctgccgccacctgggtacccgtacccctaccactaccagtacccgtacaacagcggcggcggcggcgggatggtgccgcacctgggccctcctcctgcctacgcccagccgccggcgccctacccgtacgcggccgcggccgcggccctcggctgggt

SEQ ID NO: 30944 - DNA, 284 bp, Setaria italica
  Peptide Sequence Number=SeqID_96918
cctgagactggtggatgaaaccatcgtccttgttgtcaggaacaggtatgctccggcgtaatttcccccgagtgtccaccacagctatagcaggatcataggtcagataatgttgacatccattcagaaagacactcactgaaaaaggaagcacaacggccaattattctattgtcccattcagtctcctcaccaactgtttgtcctgtctcggatgaatatacctgcactccggcgaccaagttacgatagtcttcaaagagctgaaacacgtagaaggtggg

SEQ ID NO: 30945 - DNA, 385 bp, Setaria italica
  Peptide Sequence Number=SeqID_96919
gaaggagcgataccggaagatttccctgagggggtgtacatcagaaatggttccaatccactatttggtgctctccattccacggcatcaatcttcggaaaatccaggggagatatgggttgagggtgagggcatgctccatgccctctacttcaccaaaacacttcaggctcctggtcagtccgctatgccaatcgctatgtgcaatccaagacactcagactagaaagagcccggcagaaaccatgcttcctccctgccattgaaggtgactctgcagccatcatcgccgcctacattttcaattatatgaggtttggcaaggtgaacaaggacatcagcaacaccaacgtgtttgagcatgccggcagggttgtttgcttgg

SEQ ID NO: 30946 - DNA, 464 bp, Setaria italica
  Peptide Sequence Number=SeqID_96920
ccacagttggtgctcgaactgctccaaaatcaggctctatcctccttttctaaccagctgctaagacacgggtagatgcgactgagtacaagttcagcacaaaggacggtgagagagaaaacgaacacatgaatgccattgctactgcagtcatgaaactagaacagtggttctccgagcatatgttcagatcgttgtcgatcaagacggtgattcctgccgcagcgcatgctccagagaatgttactccgcatgtgatcgtatctccaatggcaaagagagtaacaagccgacggtttcttaaacaacgtttaacaagcagtgcatatatgtccacaatggctactgacaggctccaaacacattgcaaaatagctgctgcaataaggtagcagaaggcggagacggatgcgaagtcgctggtggacgacattgtacggtcgtagtcgtacttacggttcgtt

SEQ ID NO: 30947 - DNA, 463 bp, Setaria italica
  Peptide Sequence Number=SeqID_96921
tgatgttggtttggctactgtagcaaatgtttgtagtaatctacgggcagttgatattagtcgctgtgaaaaaattactaatgctggtgtttccaagattgtaagccattgcctatccttggagatattgagatgtggaggctgtccaagaagtgaattcactgcaaggaggtgcttgaatctcttgaaacccaaactgaatactcttgaagaggactcgtgggaggaacttgacacattagatattggaggcggtgcagagtctttaagatggcttgtttggcccaagatagatgataactcaaaggaaactctagctgctgaatgccctcgggttacgataaacccacagccatcactttatgacctctctgggtcgaaagtcccagttgaagcactggcaagcgtaccactagaccattccatagttgaggatgttgatcccaaaaacatgggcagtttc

SEQ ID NO: 30948 - DNA, 293 bp, Setaria italica
  Peptide Sequence Number=SeqID_96922
gctaagccatgagcagcagctttctatagatgccttgtacgtagcaagctttgcatgctagggtacgtatatacataatacatgcactatatgtgtatatgcttgtgctatatctttggatgttatcactccgatttctgtacttgtgctgtttacatgacgttcatacgcataatgttggagtttcatatgtatactgaataaataaaagaatgttttgttccccgtttaattttcaaaaattttgaaggtatagtatatatgtacatttggtggatttctagataaaaaaa

SEQ ID NO: 30949 - DNA, 283 bp, Setaria italica
  Peptide Sequence Number=SeqID_96923
tcggcgtggaatcggtggccgcaccgtgggagcatgcgcgccgagtcgccgtcgcggagctccacgatgcaaactgcgcactcgtccacctgtagcttccctccgtcgtcgccggcgccggggctggagtagatgtacacgggcagggctgacgccacgtcttccagcggcagcgcaccgaggctgtcgtcctcgtgccgccaacgggacgcccacggggaggccacgggcagcgagtcgtcctcgtcgtcgccggcgtcggcgccggcggagttggatggtt

SEQ ID NO: 30950 - DNA, 249 bp, Setaria italica
  Peptide Sequence Number=SeqID_96924
gtgacccccgatcccgatcgcgaaatctccgcacccgccggcaagggaccgaagcaagcctctctcccgaccgtcgcatcaagatgcagatatttgtgaagacactcacaggcaagaccatcaccctcgaggttgaatcctcggatacaattgacaatgtcaaggcgaagatccaggacaaggaggggatcccgccggaccagcagcgcctgatctttgctggcaagcagctcgaggacgggcgcacta

SEQ ID NO: 30951 - DNA, 261 bp, Setaria italica
  Peptide Sequence Number=SeqID_96925
acgcggtcgtcctgctcaccatcggcccggcggtgctcgggttcgcgccgtcgtcggagacggaggcacaagctgaaggctcgacggcgtactggacggggttcttggagtgcatgtcctcggccgcgctaattgggctcgtgctgccgctggtcgaggtcgccatgtcgaggtacgggcgccgggacggcggccccgccgccgcgagagcgccgcctccgtcgtacgcgacggtcatgcagatccaggccgtgatgggcg

SEQ ID NO: 30952 - DNA, 543 bp, Setaria italica
  Peptide Sequence Number=SeqID_96926
tttttttttttaaagttaagatgtaaaatacaggcagatggtttagataatctaacagtaaactccaaatgagtaatgaatttaaggcatgttgcaaagttctctactgatacactaagcattgttcagatagaatttcagaagaactcaattgcttaaaacaggatcccgatgctacccatcagttcagtcgctgcctcttctgtggagcacccttggacgacggctcattaggacgatcgagacttggcctttgctttcaccctcctatgctgcctctcgtcctcgctgtccgactcgctgccgatctctgcgttggcgtcccttgccttgcgctccatctcatcccatgactcaccaccgtcatcttcatctgagccgccatcatcatcaccagaattaaccactgattcgctgtcgctgccctcattatctgattcagacccagtctccatatcagaaggctcatactggtcatcttctgtctccgaactctctgaatcagagtcgctggcatctggattcaagaattcccacctattg

SEQ ID NO: 30953 - DNA, 270 bp, Setaria italica
  Peptide Sequence Number=SeqID_96927
gccgtagtagcggttgtcgaagacctcaggcgtatgcacgtcgagcgacgccgtcttgccgacgacgccgttcgggcatcttgctttctgctgctttgggtcggcgaattggcattgtgcctggccgatggtgtgcgcgccggagagcgccaccagctcgcgcgcgttgaagctcttgttgtggaacttaccgatgagctcgtcgaggttggagttcggccccgggagggcgttgttcgcttcggtcatgttcgccgtcgtcgagtcgcg

SEQ ID NO: 30954 - DNA, 557 bp, Setaria italica
  misc_feature (546)..(546): n is a, c, g, or t
  Peptide Sequence Number=SeqID_96928
taagtaggtaaaactagttgaaagtcagaaacagtgagttccatttccccacccccaactaatcatccttcaggtagcgaacatcatgattatattacagtttccaacttcttattgattttgctcgggaagatagggcaggtgagcaatcacacatgcaaatatgcaatgtttaatatggaggtgttccagataatataatcatgatgttcggcaaaaaatattcacatgataaaagtagacaggatagggaatgccaacatatacggaacaatttatttacctgctcacaacggaggaagaacagcctgttctccttagaaagaatagtatccggacttttgcacccattgcatatgacatattcatctaaagagtgcaattgcaaaaaaaatgaaactttagttagtctagaaaaaaggcaaaccattttgattctccacacaggaaaagaacaacagtaactaatgcctctatcctaaatgcaagtgctaactttctgttcatcttaagcttccctagcatctgctcttagaaaaaaaagtntagtagttaat

SEQ ID NO: 30955 - DNA, 1206 bp, Setaria italica
  misc_feature (1)..(65): n is a, c, g, or t
  Peptide Sequence Number=SeqID_96929
nnnnnnnnnnnnnnnnnnnnnnnnnnnnnnnnnnnnnnnnnnnnnnnnnnnnnnnnnnnnnnnnntttttttttttttttaatttttttttggagccgcaagcataaatcctctcatataaattaaaattcacagcagcaatccaagtatagtgaacagaagaaatccagtaaacggtgtaggcacaacggaaagtggaacgataattgtcgacggacaaactagttttcattgtgctgttggggcagagagtggtatgcaataacttaggctccagccttacgacggccaacttgggcgacgaatccagccttgatgggagcaactgacctcgacgaaccacactgctcacaacggaggaagaacagcctgttctccttagaaagaatagtatccggacttttgcacccattgcatatgacatattcattgatatatctcctgagtatggcttcgaaattttttggtgcaaatcttcctttgataaccaacctttgttgcccatcgagggatccacttgttcccatctcagcaagcaagaacatcatcacatgttctggttgcctatgcattgttttgcacaagtccatgaagttcacaaaaacagtcttctttgttccttccctgaggacttgtgggggcctcataacagttcttcttctatcaccggcaagatccgggttgttctcacgcagaatattgaatactctgccaagcagctcttcgtacttataatctctgtcagttccttcccaagggtatccggtggcaacagcaccaccaagcacgatcccttctccttcttcatcatctttaacttgatcgtcttcagcgtcatcaccatctccaacttcggtaagagaaggatcaagttccacatgtttcttcttcttctttttcatgccagcaaagcttggctcgctagactcagcgactgctaaactctctgtcttctctgccaacttatccacttcatcagatggctcttggatcacaaccttcttcttcttctttttctttgtcggatcaaaaggagcaagctcggcgacctcctccttcctctccgcctgctcgtcgtccgccatggcgactccctcccctcttctcagcgcaggcggctggaaacctagacggcacgcgcgggagggatcagagtcagggttcggcgtcggagtaggggaaattggcgtggcgattagaaagtgg

SEQ ID NO: 30956 - DNA, 338 bp, Setaria italica
  Peptide Sequence Number=SeqID_96930
tgcgccacaatgcaccggagcgtgctgcacggccggtgcgtgcccggcggcgacgcctgggacttgagcttggagatgaactcccggctgaagtggaccttgtgcaccgccacctcgtcgtcggcgccatcgtcgtcggcgctgatcgcgtactccttcacgcgcgcgggctgcttctgcttgtactcgacgccgcggtgctcgaactccacctgcggcgggtcccggggcgcgaagaaggacgcgcggtcgtgcacgggggccgggtcgacggcggcgcctcgcgtggcctggctccacgccacgaagaagttgctggtggcgcggccgtcggagac

SEQ ID NO: 30957 - DNA, 497 bp, Setaria italica
  Peptide Sequence Number=SeqID_96931
atatgagctggtggatgtggtaatgacacagcgtgcttgacaagcaccgtagtacatgaagcaggggaatggcctaggaactttagttaaccaaaagcagaaaggccaatactgaggacaactgaaggatattttttttttctaaaaatctcttctatccaccttcgggacaaaatcgaggttcatagctggaagacggtttgaaggaaccgctgtactagctaaatttgttgagtgcaaactatatttttattaacacacaaaggtaatctgtgaacatctgagtcgatttctgtcatggacggtagtattattggtggatatatagtgcgcataagcagtagcaagtctaggcacatctgtgttattttgtatcctcttttaacaaattatttcaagctgttatataccttgatttcaaagtttatactctaaacatatttaggacttgtttggaggtttgaccttgaacctaagaaagactttaaactaaatta

SEQ ID NO: 30958 - DNA, 1464 bp, Setaria italica
  Peptide Sequence Number=SeqID_96932
tctcagtctacacgcgcacaccggaccccgctcagttgcgcacgcgtgcacgcgatgatgcccttcctgctcacgccgggcgccgcccgcatcgcctcggcgccctgcccctcgccgtcaacgctctcgcgcctactcctcccgctccacctacaaattaatggccggcacaaccaccaccaccgtcaccacgtccacgcctcctccaccccctcgcctctcgtctaccctcgcctccgcaaccgccgcggccgattcttcgcgtcctcccagatggcggcgccagccgatgcccccggcggatcggctgatgcgtttgaggtgatccgcgctcaccaggcaaaagctgctcggcttcctccagttgaggaaatacggacaattctcgatcaaagtgtcagaggcgttcttgccacccattctcaggagcatgatggttatccttctggttcaatggttgattttgcatgtgatcaggatggttcccccatattagcagtgagtagtttagcagttcattcaaagaatctctccggaaatcctaaatgctcacttcttgttgccaaagaccctgaggacagaacagatactgtaatcactgtatatggtgatgctgtccctgtttctgatgaacaaaaagattcagtgagaagtgcttacctacgaagacatcctaatgccttttgggttgattttggtgacttcagtttcctgcgcattaaaccgaaagctgtgcgctatgtatctggtgttgcaactgctctccttggctctggagaattcagtgctgctgagtacagggaagcaaaagttgacccaatatctcaattctcgactcctattacaagccacatgaataaggatcatgctgatgatacaaagctcattgtgcaacactcaaccaatgttaaggtggattttgcttttatgctggatgtggatagccttgggttcaatgtgaaggccggttatgatggaagtgttctgaagttgcgtattcccttccctaggcaggcgcaagacaggaaggatgtcaagacactaattgtggaaatgctccaagctgcaaaagccgcatcctcacatgccgattgatgtctagttctggaaggtgatggatctcacgaatgtaaatgaaagatagctagatcaaagagctcaggcttacattcagccgttctatcagttgaagatggagctacaaaaaatgtgcattgctttgctgtatgtagcaaacaacaacacgcgaagcactcccagataaaccaacggaaagcagcttgtatcattgtatgcaactctttcgaactgcctgttcagcaaacaaacaactgtcttactggaatgctattgatgtagaaggcttaaccgccggccaactcgagtggcttaacgatatacaaggtcctattaactacgttatgaactactgttcttgtgattcgatcatgtgttctgccaaaa

SEQ ID NO: 30959 - DNA, 275 bp, Setaria italica
  Peptide Sequence Number=SeqID_96933
tagaagttccatgccatccaactctttctttcatgccaagacaaaattttttttgtaaagcacaggaggggcaagcccctactggatatatatattaaaagtagataaagaacagatttacaggctacaagattttgcccaagacaattgctaacccacttggccatctccatcagtaccttgcctacaagattttacccctaggaccttctcgccctcatctttatctttggaaacaaaatgatggcaaaaacttcatcttctcgcaaagagag

SEQ ID NO: 30960 - DNA, 446 bp, Setaria italica
  misc_feature (51)..(51): n is a, c, g, or t
  Peptide Sequence Number=SeqID_96934
gcccagccggcaccttcttccccgtcacggtgatcccaccaagacacgcanaggggggaagaaaacgtgcgctctctccgtctcctcccaatgcggcgcctcgctctcctcctcctgccgctgctcctcgccgccggcgccgcggcggcggcgacccctcccccatcccctcccactccaactcccactccgccgccgccgcacaagaacgcgaccctcgccgagctcctcccgctgtacggcctgcccccgggcgtcttcccgtcgaccgtcaccgccttctcgctcgctgacaacggcagcctcgccgtcgacctcgcggggccctgctacgtccacttcgggtacctcacctacttccagccccgcgtcacgggggtgctccgctacggctccctctccggcctcgagggcgtccaggtccgccgcttcctctttcttggtta

SEQ ID NO: 30961 - DNA, 512 bp, Setaria italica
  Peptide Sequence Number=SeqID_96935
tttgatttcttctgcaggaaaaggaaaaccaccagcgtgcaaactcccagttccaaccttctcttatctcttgggtctgtggattgcattgcttatgaacccaggtcacagttccagctcacgaatatcataatgcaaatataaaaaggcagtggtgtgccgtgacaagcaactctttccatattacatatattcatcagcgtgctgattcctcggattaatcatatcggggcaagtcataacagaactcaaatcaagtagtgagctgatcacaacagggcacgaagcagagactgcgatacagtacttcagcaacagcaagtgcagacttgtcagtgataaaatgaatcttacctgccactcttcccaggttttaaggctgtgaccttcaccttgctagcctattgcataccgcaactcttcatcatcaccagactggctcaacaagggtgacaatgcgtggcagatgatatctgcgaccctcgtgggcctgcagagcatgccagggctgg

SEQ ID NO: 30962 - DNA, 691 bp, Setaria italica
  Peptide Sequence Number=SeqID_96936
actgtttcaaaccatacaaggatctcttcaacttgcacacatatttctccttgccaggcactgtgaagccttctggttggtccatgtatatgtcctcctcgagctctccatgcaaaaacgcagtcttcacatctaactgctcaagctcaagatcatgtgaagcaacaacacttaggaaagtgcggattgaactgtgttttaccactggagagaaaacatcattgtagtcaacacccggaatttggctgtagcctttagcaactaaccttgccttatactttggaggctcacttggagataaaccctcctttcgtttgaagatccatttgcagcggatggccttcttattcttaggcaaaggtacaagttcccatgtactgttcttctcaagagatttcatctcctcatgcatagccaaaatccagtttgcagtatcatcacaatgaatagcctctttataggttgctggctcatgaacattctccacctgttcagcacaactcaaagcatggtaagacaaattacattcttcaatgagacgggtaggaggagcaactgtccttttggacttgcggtgagcaatgggtagatcctcctctggagtttgctggacatcatcatgagcatcagccgacccgagactgaggggtctggcgcatcagcaacagcccgaccccggagccaagggtct

SEQ ID NO: 30963 - DNA, 412 bp, Setaria italica
  Peptide Sequence Number=SeqID_96937
gagcgcgaagaagctggccttccaggtgaccttctccggcgggcacgacgcggcggccaagaagggcgccatgtctggctccattacatggtcggatggaaagcacttggttcgcagcccgtttgtggtgaccagctgaaacaccatggcgcagcgtgacgtcgaccggacgcactcagccactcaagcccaaacaaggcagtaggatcaagcaatgctgtcatcgatataaatgatatgatgttgacagcaactagtaatagtggcaactatcaaagattctgaaactgggtcagtctcagacatgataccatggttaagcatgtgaatgagcgagggccgtcctatagtgaaagtcttaagtcctagtcttagttttactttttgtttaaaactttaaaaaaaaaaaaaa

SEQ ID NO: 30964 - DNA, 243 bp, Setaria italica
  Peptide Sequence Number=SeqID_96938
gtatggacaaaataggataggatagcttgtgctcatgccaccaactaagtatgttgaagtcatcatcatagcaagtaatagtatcactgttcaagtaggatgacagctcagaagcaggagatataggaggtgtagatgaaagaacaggagaaccacatgaaccaggaccaccaaagatcttaccccatgctgttcttttcttaccagtagcagctgaaggttgagcaggtctttacgatcgaa

SEQ ID NO: 30965 - DNA, 1476 bp, Setaria italica
  Peptide Sequence Number=SeqID_96939
tttctaccaaaattatggagcgcaagactgatttaagctaggaaaaatcttggtattccgcatttcacaagctatcctcgtgtaattttgtaacagctttcttcacaaagtgccagagctcaaaaagccaccgatttcaacatccttcacacatactgtggtccgtggagatgtatattttctgctatacaatacaactacaggcaacaatttcccagattcttgaaaggctgctaagttagcttaatgtctgataacccatcagtcctcggaaatcatcagggcttgatggtttatttccaggcttaggtagccatggaaataatttggtgaggccttgccttttcagagtcattggtttcttgtctgccgttgaccccatatttctccctctcgattgcatccataatatcctcccgggaaacagtattaccacctcttcgtgcagctaggagagcagcctcattaacaatgtttgctagatccgctccaaccagtcctggggttaaattagcaaccagatcacaaattatttcaggatcctcttccaaaggaatgtcccttagatgaacagccaaaatctttttgcggccctccacatcaggcacaccaacaacaacctttctggagaagcgaccaggccgacaaagagcagcatccagtgcttttggcctgttagtagcagccatgacaataactttcatgtccgagtcaaaaccatccatttcagtaagcagctgatttagagtttggtccctctcatcgttaaaacttctacctctacttccacccacggcatcaagttcatcaataaaaatgattgatggagcagcttctttggcttccttgaacaaatccctgacccgggcagcacctcttccaacaaaaacttcaacaaactcactagcagaaacagagaaaaatggaattccagcctctcctgcaacagcccttgctagcagagtctttccagttcctggagggccaacaagcaggacacccctgggcaattttgctccaagcttcttgtagttcagtgaaccatgcaaacagcttactatctcaacaagctcctccttcgcttcatctacaccctgaacgtcgtcaaaccccaccctctgcttcctcggcttgcgtcgcttgtcagcactgcccccaccagacagctgccgctgtaggaaccacatcatcggcagcagcgagacccagagcgtgagcagcgtgctcagcatgtccaccaccagtctccccgcaggccgcggcgccgaccggtagtccaccccgccctcccgcataagcccgagcaggaacccctcgtcgtgcggcaccctccgcgcgtagtacggccacttcggcgccgcctccggggcgctctcggtctcaccggcctcgctcgcttcgtcgccgtcgtcgccgtcctcggccctcttgctgaagtatatgcggcgcgagtcctcctcgaacgcggcggcggtt

SEQ ID NO: 30966 - DNA, 577 bp, Setaria italica
  Peptide Sequence Number=SeqID_96940
tttctgattgggttgaaaattccaaccattttctggtagtttgcaaatgcaactttctgagttctaatatcaaaattccttgaaaaatgaatgggtgcctctggaaacagccatttttttgcttattcgaaaattgctaatgctcgatattccagcatgccactgctactcttctacagtggcttaagtgaactgaattcgacagtgtgattgttgactatccaagcaaaatatagtatagtatggcactggacgttgttaacatatttgatgccatgatcaccgttgcaagctcgctgatacaagatctctgcctctatactgtactgcctactgctatagctgtcaccaactctggcatcgcctccttgatatgtttggccattcaaatcacccatctgctcttccatccctgaaatgtaaatgtctgaactctgcaatccttgaagcctcatctccacataccgcatcgtcggcctgtcttctcccttcaacctcaagcacattgctgctatggcggccacttgtttgggcttctcttctccttcttccatgatctgctcatctagtatctcac

SEQ ID NO: 30967 - DNA, 1109 bp, Setaria italica
  Peptide Sequence Number=SeqID_96941
aagtcttcagaatctggactcgcagcagcaatggcaagatctaccatctaaatcagacaaggaacaaggccctcattccaggtggaagcaccgaagacctatgcttcgatccgcatgttccaggtcatggtgaagctcttccccagcggcagtgccagcccgccgacctccaccgacacgctcctcttgctgtcctccaagccgtcttccccttgcagcttggcgttgccaccggccgcgaagtaagggatcgacgtcgcgacggcggtggcgtccgcgccgtccacctggatggcgaggtccttgccggtgccctccagccccagcaccgacaccttctcgatgaccaggcccttgtgcaggctgaagctccccatctgcacctccgacctcaccgtcacggccttgccgcgcacgctcgcgtggaagcgcacgtacgtcgcctgcccctccgcgagcaccatctccggccgctcgtcgtcgtccacgtacacggcgccctccgcgtccgcctgcgtggcgccgtaggggaacgcgaccaccagcgtgaacggcgtcgcccgggcgtccttggagatcaccccgccgcgctgcatcggcaagaccgtgccctggtacacgtgcacgttgatctcgttcagcggcgcgtcgagcctcaccggggcgccgctcttggacaccaccaccttcgtcgtgtcgaacaggttgtaccaggtgcccggcgggaacatggcgctcaccaaggtggcgccctcctcgagcaccggggacaccatgacgctcgagccgagcaggaactgcgtgctcagcccgtagcacggcgtgaagtccgggaaggagaagaacactggccgtgccaccggggcaccggtcaggtgcgcttggtagttgagcgtgtacaggtacgggagcagcttgtaccgcatgccgagcgcgttccgcgcggacttcgccacggactcccagacgtagagctcctgtctcggcgaggcgaagttggcatggtccctggagaacgggtagaaggccccgagttcgatccaccggttgcagagctcctcggtcggcgaggggtagaagccacagatgtccgagccaaccatgggcat

SEQ ID NO: 30968 - DNA, 485 bp, Setaria italica
  Peptide Sequence Number=SeqID_96942
catcagatggaggatgaagacgtggaagtgaaactactattgaggggaccccaggatgaatcgcatctaccggcagtgtttggttatcctctctcttttttccattgatttctttatatttgtaccaaatgaatttagttggcttgatttacaaagcctctcttgcaggtgtgccacttgatcatgcatatgatatacatcaggtatgattgtttgatctatcaaagccatgttcagatattttacatctagcggctttccatgtaaatctgatttgactcaatgtaatatattagtagtacacataaatcatcccatccaattgatagtcttgctaggaaaatattgtgtagtttttggtacaataagtgtcacagtaagttgcacccgatgttgctaagctcatgccttcattcatgtacacgcaccactaatacataaaacatttgtaggggcgatgaaaacaacattgtagcaacggtcta

SEQ ID NO: 30969 - DNA, 1259 bp, Setaria italica
  Peptide Sequence Number=SeqID_96943
cccaggtcaagatccaccagcttcttctaaagtcaagattcagaacattcaacaaggatcaagcaaatcttttctttgttccgagttatgtcaagtgtgttcgcatgacaggggcactcaatgacaaggaaatcaatcagacctatgtcaaggttctgagtcagatgccatatttccgtagatcaagtgggcgtgaccacatttttgttttcccaagtggtgctggagctcatctatttcgctcatgggcaacatttctgaatcgatctattatccttactccagagggtgaccgtacagacaaacgaggcacaagtgcatttaatacatggaaagatattattatacctggtaatgttgatgactctatggtgaagtctgatgctcgtgctgtacaaccaattccgttgacgaaaaggaagtacttagccaacttccttggacgcgcccaggggaaagcagggcgccttcaactggtgaagcttgcaaagcagtatcctgacaagctggaatctccagaactgaagttgtctggccctaacaaattgggaaggctcgattacttcaagcacctgaggaatgcaaagttctgtttggctcctcgtggcgaatcgtcatggacacttcgattctatgagtccttttttgtggaatgtgtgccagtaattttgtcagatgaagctgagcttcctttccagaatgtgatcgactacagagaaatctcgattaagtggccgtcgtctaggattgggcctgaactacttgagtaccttgaatcaataccagatgaaagggtagaggaaatgattggtcatgggcgtgacatgagatgcttgtgggtgtatgcagcggattcggagccttgctctgccatgagcggtatcctgtcagagctacagaggaaggtgcgacggttccatcaatcgccagagacgttctggctgcacaacaggtcgattgtgaacagagatctggttgagttccacagctggaggacgcccgttccattgccatgacccataaattctgattgaaactagtcggcagctgttctgtatctttctttttgaaaagcagctgttctgtatcatgtagaccttttggaatgagacgctgttgttgtcgttctgctaatcttgagaagaaacacgcataccttaccttaaggattaacactatagaagaagtttacttgttttttcatttcattgtatcgagggcacctgtcttcactcgagccaaacaaattagatgtgatt

SEQ ID NO: 30970 - DNA, 291 bp, Setaria italica
  Peptide Sequence Number=SeqID_96944
agatgcgaggagatacctcttgcttaattaccttgaatctatatgctaagatgcctaagcatgtatgcattactgccagttgtacatctcaagcatttaaatatatttttcatgtcgatacatataagatctaccataatatgcctagtacttttagatgattgcagaatccttgctaatgattcacagaattcattattttccgttagctgattagggtatcaaagatagaaaagtgaactttgattattagtgtttaatttccgaaagtctttttagaagagttactgt

SEQ ID NO: 30971 - DNA, 867 bp, Setaria italica
  Peptide Sequence Number=SeqID_96945
ccacgcccaccagcaccaacggcgggccgacggcccacgacgggatcgacgccagcagcggcgtgatgaagagcgccgccgcgaagtagaccgccgcggtgagcgccgtcagccccgtccggccgccctcccggatacccgtcgacgactcaatgaacgccgtcacgggggacgtgccgaggagggagccgaacacgatggccgacgcgtccgacatgaaggcgaagtactgcccctcgaagtcgcccgtggcgtcgtcgacgaatccagcgaaccgcgccatggagtagagcccgccggtggtgtcgaggatgtcgacgtacaggaaggtgaagagagcctcccagaagtagccgtggccaatgccgcggaagtcgagcgcgccggctgtggagcggatccggtggacgtcgaacaccttcttgaagtagtggaagctgtcgtcgccggcgggcgtgtccgggaacgcggttacggcggtgccgcgcggccaggacacgaaggtcacgaacaagatgccgtagatcatggcgcccctgacgttcttgataaggcagaaggcgatgatgaggaagcccacgacggcgagccagaacgtcggcgaggtcatgcgccccgagaggcagagtatcccgccggagactgtgccgcccggcatcagcgccaccgtgccgttggggaacgtcaccactggtgccacggacgcgcgctgcgacgccgggcacgcgccgagcgtcaccagcgtcgacgagctgaaccccacgagccccacgccctcgttgctctgcagcccgatgaaggcgaggaacagcccgatccccgcggacgccgagatccgcacgggcttggggatgaactgggcgagct

SEQ ID NO: 30972 - DNA, 295 bp, Setaria italica
  Peptide Sequence Number=SeqID_96946
cctgaaccaaacaagagagacctcattgaaacaaagaatgaaggcgatcctacttcagttccacagaaaccaaagctctctaaagcagagagacgtgctatccaggaagctcagcgtgccgccaaagctgctgcaaaggaggcaggtttaaaatcaacagccaaggagtcagatgtgaacaccaaaatatcaaagcaacctaaggcaggaaaggcatctctaaagaaagacgtgacccaagttaaccctccagttgcttctgataaaaagacggatgaacgcccacctgacaaag

SEQ ID NO: 30973 - DNA, 388 bp, Setaria italica
  Peptide Sequence Number=SeqID_96947
ggcttacaaatttcgtcgttattatttttgggtaaatcagattacatatatgtacatgcacgatcgttgatgccacgctcactcacgaagttacaaagggaagacggagataaaaacaaagctacaaagctctctctacgcagactatgttacacgaacgccgggacctcacgcgcgcacggtgggagctcacttgccggcggcgatggcggcgccgtaggaccggctcctcctgacctcctccggcggtatgaaggcgtccgggccgagccccgggacgttgaacgccacgtcgtcgattgtccacgactcctccatccgcgtcaccacccgcgcggcgcggacgccgacgccgaaccgggcgaggtgcgccgtcgacgtgccggcg

SEQ ID NO: 30974 - DNA, 286 bp, Setaria italica
  Peptide Sequence Number=SeqID_96948
aaggccgccgtggaggccctcccgactgtggtggtcgcggaggccgacgcggcccgcggcgacgcgcagtgcgcggtgtgcaaggacggcgtcgaggccggggagcgcgcccggaggctgccgtgcgcgcacctctaccacgacgcctgcatcctgccgtggctcgccatccgcaacacgtgcccgctctgccgccacgagctgcccaccgatgaccccgagtacgagaagtggaaggcgaggcgggccgccggcgacgcagacccccgcggcgcggcgacaggta

SEQ ID NO: 30975 - DNA, 611 bp, Setaria italica
  Peptide Sequence Number=SeqID_96949
tagtacttactaagttgactaagtgcactattactgaactgatcagcatcagtagttccagaagacttggtttctcctgtgctgcttcctgaggtagacgccgagcagcttgtagtacgtccaccgccgcttccctgcggtggcttccagcagcgcctcggagctcgcgtggaagccgcccttgccgaacgcctcgaagacgatgccgtccgtggccacgacgggctccgcgttgccgtccagcctgtcgaacgcgaaggtgaggttccgcgcgaggcggcgctcgaggtaggcgtcgacgaagcagccatgcgtgacgaggtccggcgcgacgccgtcgcggcgcatgtgctcggcagtgaggtggaggtcccagaacatgcacatcttggagaaggcggcggcgcggatgttgaaggtggtaaggtccggccggaaccctgcggccgccatctccaggaacgcgcgctgcagggacttcatcttgaagttgcccgcgaaggagaggaggtacaggttccagagcaggttgccggcgtcgcggcggtggaggccggcgtcggccacgaacgcgccgagcttgtagtacttctgccgggagatgtacgcgg

SEQ ID NO: 30976 - DNA, 265 bp, Setaria italica
  Peptide Sequence Number=SeqID_96950
tgaatatatcatgcatgtaatagacttgtgttgcccatgttaaatcttttatttttttaataacgtagggaaattggtcagactatccggaaactttttagaaactttaggaccttttgtagagcacaattatccagcttccagcaatttgcttactattaatttgttggttttaagccaaatcatcttctatagcgaacaatagtaataagctagttgtgcaaaattgccaatcaagtcatatatacttgacctggatattgga

SEQ ID NO: 30977 - DNA, 836 bp, Setaria italica
  Peptide Sequence Number=SeqID_96951
atgctgaaagcagactctgaggcaactgaagaaactggaatggtaaggagatcccgagccatgcttgctagttctggataagtcacagatgaggccttccaaaactccaatatgtccaaatcgacttttgggtctcttgttggttgttgcctgttgcttgttctaaatacaaatccaattgagatttctgagtctgtggtgcgacagtggtcacgtaatcagcataatcatcaaataagtcatcctgatgactgtgtccaaccagatttcttggactagtaatagacggattggaattttgggccctgtacgcttcaaataattcataaagcttggttacagctttattgacttgttcttcggcagctgactcattagcacatagcttcttgtagcagaacctaaggagattaatcttataccgaggatcaagaatagcagcacacgacagaatcaggctgtaatcagaccaatatttatcgaacttagctctcatttcttacaccatacttgacatgaaattttgtggctctttggctgcttccagcaactgagagtgaatcctaaacacacatttgaagtacagattagcagtagggtattttgtgccagagaaagagcatgtgacttcatggaaggacttaaaaagtgtagtcatgatatctaccctcttccactcaagttcagaaagatcaaaatgagacatgaaggttccatctctcgatgcatactgtttcagagcacccttgttaaatattgcattttcaagcattctgtaagttgaattccatcgcacatgcatgtcaacacatagcttcctcttggtatccagatag

SEQ ID NO: 30978 - DNA, 210 bp, Setaria italica
  Peptide Sequence Number=SeqID_96952
gcggtgaaggtggggcgcgattgcccccacccgtcgccggcgacgagaaggagcgccggagccggcggcgcgagcacgcggcgccacgccgcgcaggcacccctcgcgctggtgtagcacttgaggccgaggcggtcggcgatgcgggcgagcaggtccggcggcaggtccgcccacggcgccatgggcggcgactggttaaggttgggg

SEQ ID NO: 30979 - DNA, 392 bp, Setaria italica
  Peptide Sequence Number=SeqID_96953
cactgcgacgcgcgctggatgaggtcgtcgaagagcgcgtggagcgcgtcgagctcgatgagccgcgtggcgtcgcgcttctgctcccggcagtggaaggcggcgagagcgcggtgcatctcgagggcgacgccgaagagctcgtcgggcacggcgggcggcctgcgcaggtgcgatacggcgtcgaggcgcgcccgctcctcccggtccgcggcgcgcgccagcgcctccgcggcctccacctcctccagcgacgggcgcggcggcagcgagcggtgcagccgcatgacctccccaccaccccatccaccgacccgaaggccgccgcatccaccacggtccccattcctcgacgacccttcctgctcctctgcctccctcctctcgctccg

SEQ ID NO: 30980 - DNA, 247 bp, Setaria italica
  Peptide Sequence Number=SeqID_96954
tggaagaaccaggggaccgtgcttcatctgcagcctttgcaagaacttcctcagttctcatccctggagctccttgagtctctattacaatctttttgcaaccatccataagttctctcgcataaagtccagcattgatccctgagatgaaaattccatcaacaattataagtgtcacacattatgagatgaaaaatcaaattcataggtgcttcgaactaatggacctaaagataaggaacactaa

SEQ ID NO: 30981 - DNA, 372 bp, Setaria italica
  Peptide Sequence Number=SeqID_96955
cccagcccggcggcgtgggggcggggggcggccgccggccggatccggcattgtcgcgctgggaggggaacagaaccggcagccccctcaagaaaaccaaaaaaaagcgatcttgattgctccccggccccggtaacccgttcttgattcgccttgctctgggtcctgggcgcgacgaatcccgcgcccggatcaagaaacccccggcggctggctggtcagattcctcgcccgatttcttgctctccctcgggcgggcgggcgggcagggaagaagagcgagcggatcgcgcgggaggaacgggaacgggaatggggcgggggggaaggggttttgatctggggttctcggcggtgaggttccgggattgg

SEQ ID NO: 30982 - DNA, 245 bp, Setaria italica
  Peptide Sequence Number=SeqID_96956
ggggaattagcgaggggcggaaggaaggcttctattggggatgctcttgaacttcttgatgcccacctccttgcaaagctctgcatcggccacgatggtcaatggctgccttcccacgtgaaacctgcaggcagatcgaatcaaaacctaacatcataaccgattgttgatctaacaaaatctttacaaaattagcatcccgatggaagtaaccgtttgactttaacatcacatctacactccca

SEQ ID NO: 30983 - DNA, 267 bp, Setaria italica
  Peptide Sequence Number=SeqID_96957
ctcttgatgaagaatggtgaaagttctttttctcatatcgtagtccacagttaagtctggaatctgaggcacacaaatttaaagatttataggaacaaacttaattaacctgcaaataagtactgcacgatacgttggttaatcaaatagtaagcagatggtttaatatgacggaaaactattgtttaactttacagttttatgaaatacattcaattctatggtcagtgaagacgtacagcactttcagtggtacaatggaatttg

SEQ ID NO: 30984 - DNA, 865 bp, Setaria italica
  Peptide Sequence Number=SeqID_96958
cctatctttttctagcatctgattccgctgatcattctattccctgaagcgcagatccctgtgtgggagttgatctatatccccacagctatcattctcgctgaattcatttggactccgagatctatccatctgattttactgtgggtcctatttgagaatgcaatggcattgcatcgatttaaagccattttgataggatttttcgaagctgacagggccaatgaatggattgtcacacagaagctggggaatttgcagaagctaaagtccattgccagtgttacagggaacggtcgtttcaaagacaggttccattgtcttgagatatttatcggactgttccttctggtgtctgcttgctttgactacatatacagagatgactatttatacctcttcgttcttcctcaatccatcatgtattttgcaatcggttttcagttcattggtctcagtctctccgaagactgaccaattcaggacggaatcgaagaaattggttgcatgttatggctctgttcaaaattgaggtcttgggggttgatctccaaggacagcttggcagctcctgtgttgtgcaatgaagtagagatctcacatactatagtagtacttcaagataggataagcacatgaggggtcgagataagttatagtagtgattaagagactaatgtaccatctattaatcccattggtgcagcaaaatgcatctaaaaacctctcgatgtatctgaaacacaaccgatgtatttagagaagagttgtgttcacatgatcacatcttggtggcacttcgaaatgcagtgaagattttaaacattccagattttgtttgggtcctgaattataagacgaacga

SEQ ID NO: 30985 - DNA, 554 bp, Setaria italica
  Peptide Sequence Number=SeqID_96959
tagtattgtctagatgcatgtagctgtagtttctaacacaggacttgcagtttttattaaaaaaaaaagttgaactgggaaatgtgtttttgccgtgcttagcctcctttctatgtttggtaatgtcttgtcgagtttctacatgactggtgctaaagacgtcaccagcagaatcacctgactgtgattaaattcagtcacagttctgagaaaatccacccccccatgacagtacaaggatcacacatcacgctaatgtactcaataaccttctctaccctatttctccgcaataacttcaacggggaagcaatattgtcacctgacttctgagcaaaggcattgcatttagcaggcaaggcatcgagtcaacatttagaatgaggcatcactcagacttttgatcaaggacgttgcatcttggagagaatgcacccgacgtcaaatccaggtcctgccgatggcgcatctccctcttcactatcactgtggtcgatcctgcggtatagcttccatgtacctccatgaccacgtatccgctgactcccgcggca

SEQ ID NO: 30986 - DNA, 394 bp, Setaria italica
  Peptide Sequence Number=SeqID_96960
gtttggttagcttcaaaatagtgtaacttccatatactgtagcaaggatatatgtgacgcttttcattcgatcatctgaacatattagcatataagatgaataccttgagtcacccaccttgccttgtttgtctcggtacaccggtacgcagcttagttttttaaaatccaaacccctctgtaagttgcctgtggctttccattcattttcatttattgacgcccattagcgaaggtcagtacctaaccttttttgggcaagcccaagtcccaagaaagtggtggtttcatgtggagttatggtgctattgatcgtttcatgttagaaaaaatattcaatttgttccttacatggtctgatatagatgtgtcatagtacttggggacagcaaaa

SEQ ID NO: 30987 - DNA, 484 bp, Setaria italica
  Peptide Sequence Number=SeqID_96961
ttttttagttttttaacttttaagttttagttaataggttaaaatttaggtttagacttacagtggggatggtctgtagattgcacccagttcaaattagtagttgaatccgtagagaaaaatggatgttatttttccccttattaaggggaaatctagtttgacatgtacagtgactaactcttggcaaaagctagccaaatataatgtacatgggaactcattctttacacttggttgtcagcaggtctgtaccctcaacagcaattgaggcagtttgccctcaccaataagtttgattttgatcatctatacagtaatctagacaaacgggaagttacttcatgcacagcctgttgttaagtccattacaaagagtagcttttggcccatttgtcacccgagtgataaccacgccttgtcctagacaactatgcttgctcagatatgcttatcatttggtagtcaatctgggcatagtggt

SEQ ID NO: 30988 - DNA, 238 bp, Setaria italica
  Peptide Sequence Number=SeqID_96962
acatctgccagggatgctgaaatggctgcagaggctggtgctaaacttattgggatgattctttggcccaactccaaacgctcagtcccattatccgaggccaaggagatatccagagtagccaaatcttatggggctgaaccagttggtgtgtttgtcgatgatgatgaagggaccatcttgagagcatccagttcatgtgaccttgaacttatccagcttcatggagatagctccc

SEQ ID NO: 30989 - DNA, 479 bp, Setaria italica
  Peptide Sequence Number=SeqID_96963
cgaagaagcggcggcggaggaccgggtcggggccggcggcgaggatggacgccgacggcgccgacgaggacgagcagcagcacgcctccatcgctcgaatccgcccctgcccccgatcggttgggtggatgattggatgcttcttcaattataggctcctcccacctgccgcgcggcgtggctgtaaagttggcgcggaatcgaatagagaattggcagcggttagtggttccgccgtggcgccgcctgcccgggatcggggaatcgagtgagtgggaggtgagctgaggaagtggggaagcggcagcggcacgcaaggaaggaggggagggcaggggaaccggcgccgcggggggcggatgatcggagacgcgatgcggtgtggcagtggggaagaaagggattttttttttccttctctcgcctctcggcctcgattccaccgcgcggatcgcacgccaccgcgcgggggtgttctt

SEQ ID NO: 30990 - DNA, 599 bp, Setaria italica
  Peptide Sequence Number=SeqID_96964
atttaccaatacgttaatagctttgccgactggacttggcaaaacttttattgctgccgtagtgatgtacaactactatcgatggtttcctgaagggaaaataatatttgctgccccttcacgtcctcttgttgctcagcaaattgaggcatgtctcaatacagtgggaataccacaggagtggacaatagatttgagagggaataaaaacccttccagtcgatcagttcactggaagtcaaagagagtgttctttgtcactccacaaattcttcagaatgatataaaatctggtatatgcatggtaaaagcaaatagtttgcttggtgatagatgaagcccatcgtgcctcaggaaattatgcttactgcattgctattcgagagttgctagcagctcgtgttcctttaaggattttagctctaactgctacaccaggatccaagcatgcaggtattcaaagtgttataaacaatttatgcatttcggagttgatttattgcgatgaagaggattctttagtgaaggaatatgttaacacacgcaaagttcgagttgtgaagtataggtcccttttggaagcgatgcaactcaagtcg

SEQ ID NO: 30991 - DNA, 257 bp, Setaria italica
  Peptide Sequence Number=SeqID_96965
catcttgtcggaatttataacctcgccgccgaagcgcagcgcgaggtcgatggcgaggcgcgacttgccggtgcccgtggcgccgagcaccacgacggccttgtgcttcgccgcgacgcgctgcctgccgacgaccgagagcggcggcggcaccgggaccgcggcgtccgggagcgtgatgatcggcggcggcagcggcatcgtcagcctcgggaaagcgggcgcggctgccatcgcgggggccgccatggacagtg

SEQ ID NO: 30992 - DNA, 441 bp, Setaria italica
  Peptide Sequence Number=SeqID_96966
ggcgggatccgcgtcaggctcggtgcccgcggaggcgtcggcgccaggcggcgcggcggcgatctcggcgacgcggtgctggtagtaggcgtggtaggggtcggagggctggaggaagttgaacttggcgttgccctggttgtgggagatgatgcggcgctcgaactcgggcccgttcttggcgacgaaggtggccgtcttctcgatgataacgcggatatcgggcggagggtggatgatgccgatggtgcgcgtgtgggttgctaccgtcgccggggggccgccttcgcgccgggagggggagacggaggcggcgcctgctgctgctggtcggcgtcgccgccgtcgccctccggcgcggggagggtcaggatggggttgcccatggcggcggtggggggattagggtttcggcgggtttagatcggcaggggatcccga

SEQ ID NO: 30993 - DNA, 363 bp, Setaria italica
  Peptide Sequence Number=SeqID_96967
cttgtggtgcttcagttgaatctgaatgttccttttgcttctgtacatggttagttgctttcttatttgtcctgaagcaaaaggaacattcagattcaactgaagcaccacaagacgtcagactttgttcccaacatcagcagaactcaacaactgcttaaatgtcgtttctccctcttctgcggttaccatctcaatccattatctgcctaaataacttgacaatctaaggaactcatccgtggcataccccaaggtaataagttaattattgagggggtatgccacgattacggagcacacataagaaaacctaaactaatgactaacattacagccctaactcttagaatattcttctac

SEQ ID NO: 30994 - DNA, 701 bp, Setaria italica
  Peptide Sequence Number=SeqID_96968
ttcccccgtcaatatagtcctccctaccataacatttgcattgcatctttttttccatggtggagggggagcttcttttcctctttatccatgtttttcaacttttttgttgataaattctttcccgtcatctcttcttttacgcttctttgctgtctgaaatgcctcagcattactcccattcatttcaccgctgcttttaacgttggagaactgggccttactatccagttgccccaatttcgtcttgcggggtcttcctctcttcttcccagaatcactgcttttaggccttcctctcttcttccccgaatcactgcttttaggcctctggatgacttgatcatccgtagtttcctcatcgtcctcggtatcggtgtcgcgctcgtagaatgcgttggtcgccggccttctctccctgagcaccctaggccccgccgccaccccgtgccctagatctccggggcttatcgccggcgacgccaaggcatggtcgccggtgcggcggctccccttggtccgcgctttcggcttgggcgtcttcttcttcttcatcttgaggctacctttgggcctccccctcttccgctttgtctcctcgccgcctacggccgcgggaacctcttccatagtccccgcgtcaacctcgatcccctccgtatcctccgccatggattggtcgtatttggtttcgttagttt

SEQ ID NO: 30995 - DNA, 453 bp, Setaria italica
  Peptide Sequence Number=SeqID_96969
cggtgatgttgttgccggagaggcccaggaacttgagcttgatcaggctccggtacgccgccgggatgtcgccgccgaaaaagctgccccgcaggtcgatggtctcgagggaggtggcattggcgaggtccgcagggagggcgccgacgaagttgttgccggaggcgttgacgatggcgaggtcggcgcaggagctgaggccggccgggaacgcgccctcgaaggagttctggctcacgtcgaacacctggagcttggacagcgcggcgaacgacttgggcagtgcgacggcgaacgcgttggaggagaggttgaggacggtgagcgacggcagccggagcacgtcatcggtgaccttgccgctcaggttcttccctgagaggttgaggcgatcgacgaggccggcggcgttgcagccgacggcggtccagctgcagtgcgacgagcccttcc

SEQ ID NO: 30996 - DNA, 454 bp, Setaria italica
  Peptide Sequence Number=SeqID_96970
tatgattggactctaaggagcaaaagggtcgttgagttcaatcatacaggcaacattaccctctcattgcttttatatactcacctccatgatcccctaatcatttttcatggcaagtacaagctcgagggtgacaatgcgttccactcccatctatgctatccttttgtttctttcttgttcattcagctcaatacttctgtgtgcatccagcgaccaccttgtccctggcaagccgctcacaccaggcaacacacttgtgtctgacgatggcaccttcaccctgggcttcttctctctgtccaatcccacggaaaaacattattatgttggcatatggtacaacaacatctcgcagcgcactgttgtgtggatcgccaaccgtgatgtgcctattaccaatatttcctcagcaatgctcgccttgaccagtagctcacacattgtcctgtct

SEQ ID NO: 30997 - DNA, 1407 bp, Setaria italica
  misc_feature (1321)..(1407): n is a, c, g, or t
  Peptide Sequence Number=SeqID_96971
gtagcagcagagcaattgaagaaaagacaagcaccagggagaaagaaccattggagaaagcaagcatcaagaagccaaaatatatcgaagaggataattccgaagcattagaaagtgctggaaaaagcctctgcaggaaagagtaactgcagaacaagtgtagaaaagatgggcaagaggaagaaagaacttgcggagaaagcaaatactaagaagctaaaacatactgaagaggacaattccaaggcactgacaggtgcttcagaagcctctccccctttaccatctgggatggtagtccgtagcagctccagaattgccaataggaaaaacatgctgaaatcaaagatggaagaagaggataatggtccagctagccatccaaaggcaaaggttgaagaggatagtaatgatcctgctatctgttcaagtgctagatcgctaaggcagaacataaatgtgaagaaacaaacaaagaaaagtagagcagaaaagcgaaaggctccaagctcagctgctctgaaggatgaagagcaaatatcggatgtcaagggattttctgtcacgaaacagcagctgtcttcacataagcagaagaacaaagtagaagaaacgcagcaaatgaagaaaactagagaaaggaaaggagcgcctccaagttctccaaagcatggagaagagtatgcatgcgacattgaaggctgttccatgagtttcggcacaaaacaggagctgtctctgcataagcgtgacatctgcccagtgcagggctgtcgcaggaagttcttctcacacaagtatctgctgcagcaccgcaaggttcacaacgatgaccggccactgaaatgctcatggaagggctgcgacatggcgttcaagtggccatgggctaggacagagcacatgagggtgcatacaggcgacaggccctatgtttgccccgagccagagtgtgggcagacatttaggttcgtctctgatttcagccgccacaagcgcaggaccggccatgcagcgaaggtgaaagcaaagaagtgaggcaaagcatcggtagcttacagtagtcgtggaaggaataggagaaagtttgtacattccgttagcacccagagcccatggtggtctctgttcacagttcaattagttgctaattaaagggattctgatggaaccacaattagcgtggtcccttgtcggtaatttggttatcattgacaagttcccatagtctgccttagccccttttgatgtttgttgtgtccgcacttgggctcacttgaaatccatggttaaggtaacaagcatccctatctctctaacnnnnnnnnnnnnnnnnnnnnnnnnnnnnnnnnnnnnnnnnnnnnnnnnnnnnnnnnnnnnnnnnnnnnnnnnnnnnnnnnnnnnnnn

SEQ ID NO: 30998 - DNA, 234 bp, Setaria italica
  Peptide Sequence Number=SeqID_96972
ttcctagggggggagacgtccccccctgaattagtcttagcccatcgaagcaggccgggcgggaacttcaaccagcgctgcttcatggcagcatgggacccttccacaccgttgcacaggagatgggcgcagtgatctgcggcaccagggttcgatcccgggcgggcgccgtctcaacgtacgggcataccatcacgctatgagcacgtccgcaacatatattgatctcatgtg

SEQ ID NO: 30999 - DNA, 294 bp, Setaria italica
  misc_feature (260)..(294): n is a, c, g, or t
  Peptide Sequence Number=SeqID_96973
ctgtggcaaaccacagatgcctgtgtacttacaggaaagcagttgctgactgaccgatcgtctccgacggaccctctacctgggtcgactgtgactttgttccttttctttttctttttgtgcctgtaaatgcccccgtccgttgtatataaatgtttttgctacggggcattatcgtctccagttttgacgttgctatgtaggtgaacatatatttgagtgagcacaacttaaaatcagtgacgtgtattcgatttacnnnnnnnnnnnnnnnnnnnnnnnnnnnnnnnnnnn

SEQ ID NO: 31000 - DNA, 211 bp, Setaria italica
  Peptide Sequence Number=SeqID_96974
acaaaatgacttatatatgaaggggatgtcaaacttcaagtgacttacggggaagtttatgcaattttacagagtgcaaatctatatatattgtgtagcttatcactatggatgtactcatatggtagggttgcaactatatattcctagaggtgagtgtggttgcgtatatgtgaacatcaatgtttgtgttgtggttcgaaaaaaattg

SEQ ID NO: 31001 - DNA, 363 bp, Setaria italica
  Peptide Sequence Number=SeqID_96975
cgggccagagcagaggcccggggattggttgggggtgtggagccccaccaggtagaggccgtccgggcagaggaagaagaagaagaaagaggggtcgaactcctgcggcgcgtcccacagcgcaggatcacggccaatagaccacacattgacgaacacgttggtgccggcggggatgtcgtagccgtccacggaggtgtcctcgcgggcaaggtggggcgccagcaccggcgcaaccgggtgcaaacgcaaggtctctttgaggacagcctccatgtaggggaggtgggagaagtctctctccgtgactaggcattcgcggccaacgacgcggtctagcgcctccgtggccttggctaacga

SEQ ID NO: 31002 - DNA, 502 bp, Setaria italica
  Peptide Sequence Number=SeqID_96976
atttctggttgatgtacacctaatatgctctgagactattgtttttactcattggccctctttgctctgatatttacaatgctaacttgtaagattgctattattcaagattcgaagtttcagtgttcaccatattgttattgtttttgtgttggaagttacactaaaatcaggttataggattagaaagcagaactaagaactttggcagttaccaactgaaatataaatagttccctgccagtcaccatgtgcaaccagaaatttgaactcaaagttgaaatgcaaaagatcaactggttttctaaatgccggttccaaccagcatttctgggagccaccagttgcttatgcgacatcgaaacctgggagagaaaagcgattataattcatccagtacttgctccctttaatttcacttttaaactactaattatcatatctaccttgttgcacttgttttggtaatttgtagatccactgtggaattagaggtagtctt

SEQ ID NO: 31003 - DNA, 370 bp, Setaria italica
  misc_feature (318)..(318): n is a, c, g, or t
  misc_feature (343)..(343): n is a, c, g, or t
  Peptide Sequence Number=SeqID_96977
ctggaagtcgagagctctgacacaattgacaatgtgaaggcaaagatccaggacaaggagggcatcccaccggaccagcagcgactcatctttgctggaaagcagctggaggacgggcgcacattggccgattacaatatccagaaagagtctactcttcacttggtcctccgcctccgaggagggatgcagatttttgtcaagaccctcactggaaagaccatcacacttgaagttgagagctctgacacaattgacaatgttaaggccaagatccaggacaaggagggccatcccaccagaccagcagcggcttancttggctggaagcagctggaggagngggccgtctacgattggcgactataac

SEQ ID NO: 31004 - DNA, 1510 bp, Setaria italica
  Peptide Sequence Number=SeqID_96978
ctgctgccgttcgtggggaggacggtggtcgacatggtggacaagtggcgcgacatggccgcggcggggtccggcgaggtcgagatcgacgtgtccgagtggttccaggtggtgacggaggacgccatcacccgcacggccttcggccggagctacgaggacggcaaggccgtcttcaagctccagacccagctcatggccttcgcctccgaggcattccgcaaggtcttcatccctggatacaggttcttgccaaccaggaagaacacgagctcgtggaagctggacaaggagatcaggaagaaccttgtgacgctcattagccggcgacaggaagccgcagacgacgagaagctcagcgggtgtgccaaggacctcctcgggctcatgatcaacgcgagcagcaacggcggcaaggtgagccccatcaccgtgaacgacatcgtggaggagtgcaagacgttcttcttcgccggcaagcagacgacgtcgaacctcctgacgtggaccaccgtcgtgctcgcaatgcaccccgagtggcaggagctcgcccggcaggaggtcctcgacgtctgcggcgctcatgacatcccctcccgcgagcagctcgtcaagctcaagacactcgggatgatcctgaacgagacgctgcggctgtacccgccggcggtggcgacggtgcgccgtgccaaggccgacgtggagctcggcgggtgcctgatcccacgtgacacggagctgctgattccgatcatggccctgcaccacgacgcccggctgtggggccctgatgccacgcagttcaacccggcgcggttcgccaggggcgtggcgcaggccgccgcgcacccgacggcgttcatcccgttcgggctcggcgcccggatgtgcatcggccagaacctggcgctcctggaggccaagctcaccgtggccatcatcctccagcggttcgacttccggctatctcccagctacctccacgcgccgacggtcctgatgctcctccacccgcagtacggggcgccggtcatcttccggcctcgatcatccgagccgtccgatcataatcggggcatgtgagaatatgatgaagctactaaccaaccttgtcagtgtcgattgcacctggcagaatgaccaataaccttcctcaggctcaagatgagcttactgctttgtcctcaagacgagcacaaagaagcaccccactgtactgtactaacatatatatactgctgaagacggcagcagcagcagcagattagattagtagagaagaagcgagtaggagcgtagaaggcttgacctgtgcctcccaatttttcagtcgttttggttgatgatttccttcttccatcttggatgaggttttgccgggtgtggttggtgtgtgaaggattgcaaaactgtacacatgtcgtgtcccgtctgttcttgatacatgaatgaaggaaggaaaaaaaaggtgaaaccaaagggaaaaaaaaaaaaaaaactaaaagagaac

SEQ ID NO: 31005 - DNA, 762 bp, Setaria italica
  Peptide Sequence Number=SeqID_96979
ttttgtattcttcccagaaactgtttctagctttatccagtcaaggggacgtgcccggatgagtaaatctaaatacattttcctcctggagaggggaaaccaatctcaggagaagttgcttggtgattatattactggcgaaagtattatggataaagaggttaacttgagaacttcaaatgatatgttcgattcccttgaggagaacatctatcgagtgaacaacactggtgcttccattagcactgcttgcagtgtatctctattacattgctattgtgacaaccttccaagagataggttttttttccttctccatcattcttctatgttgatgatgttgaaggaatagtctgcagactaattctcccaccaaatgctgcttttcgtcaagtgaacagtcaaccctgtccatcaaaagatgaagctaagagagatgcatgcttgaaagcatgcataaggcttcacgaactgggtgctttgacagattttcttctgccgggccaaggctctagaaagactaaggtatcaacaacagatatattagaaagcaacaaagctgaggatgaaagttttagggaagaacttcatgagatgttggttcctgcagttctgagatcttcaagatacaaactggactgtttgttgaacttgcatttctactacatagaatttattcccaaaccagcagatagacgatatcagatgtttggtctttttgtgatcgatgcccttccaaaggaagctgaaaagttggatgtt

SEQ ID NO: 31006 - DNA, 258 bp, Setaria italica
  Peptide Sequence Number=SeqID_96980
gtccgttcctcaccaggcgggagaggttccgcagcgagttcctgcgccgcgtcgtgccgtgggagaaagggacactctcgtggcagaatttcccgtactacgtcaatgagaacgcgaggcagctgctgagtgagtgtgtggcatcccacctacggcacaaaggtgtcacgtcagagtatggctcgcggctggaatcctcaggagggaggatattgctccagagctcgccaggaactgagctttacagggagagatttg

SEQ ID NO: 31007 - DNA, 904 bp, Setaria italica
  misc_feature (1)..(28): n is a, c, g, or t
  Peptide Sequence Number=SeqID_96981
nnnnnnnnnnnnnnnnnnnnnnnnnnnnttttttttggttgtgacttaaaaacaaagcattttgattgcattccaagacagttatcggttctccctatgctcaaacacagaatgagctgaatttcatcttgaaaaccccatagggccaaactgatggaaaaagagaacagtacaagtactcgctacttaatggtaccactagaccagattcaaagcttgttaaattctccattgatgatgttcaggtaagcaacaaacactacactgtactttctagactcttaacatcaatcatattcaagttcatcaggtgtgattggcctcttgagtggtatgatggacttcttctcaacgtcttgcgataatgctttcctcatatcaaggccatcttcttcccctgagtagtatcgaagcaccctccggtaaaccacataaccaagcttttcatacatccttatcgctggcatgttagatgcccttacaaagagatccacaaagtaggccttatccatcttatcgctgatttcctccagcaagttcataagcttcttggctaatttctgtctccgaaattctgaggcaacagacactgccgtgacatgtccatgccacgattcaccttgcccttcaaccttacccatgatgtaacccatgacgcggccgccagggttgacggcggcgtggaagtagtcgggccagcgcgccaggtacgtcatgtagaacgacatgttgaacgtctcggtgaggtggtcgaggttgacggaggcgaagcggaggaggtcgtcgcagcagaaccggcggatcgtcgtcatgcttccctctctcctcgcctttctctcgggtcggtgcggtggcggcgccggagccgagtttcgtcgccgggcaggatgggttgggtgggtgg

SEQ ID NO: 31008 - DNA, 478 bp, Setaria italica
  Peptide Sequence Number=SeqID_96982
taggggcacaatggcatattattcactggaactgggtactgactgaaggtcttcgaggaggcagcatcacggtcattttatgtgggaatcataagcagtgaagatgacgtctgggacaatcaggcagcttgcttatgtacatgaacagccgtctgaggttctcactcgacaccgtctccatgtcaaccacgtcttggtcctcaacatagatccacaggtcaccaggacaggtcttcttcaggttgtcacggcagaatgggcatgactgcgatcttgaattcctgcgagaaagcaatgttatgtcaaagcatagtatctggaacacgaaaaatatcaattctaacagtagtcactatggtgaaaaccttggagcatggaattcagtgactcaaaaaccagacacgctaattgaaaaggtgcattggctaaaagatacagacaaactacaattatcatagtcataggaacacctagtaca

SEQ ID NO: 31009 - DNA, 1243 bp, Setaria italica
  Peptide Sequence Number=SeqID_96983
ctagttctcttttagtttttttttttccctaacgctcagacctttatgttgcttcactaacggaaacatgagatggtcacaaacaagcctgcctccatttggggcaagcacagagttctctattaacagagccaagtcagatatgtacagagtggctggatatgatttaggatgcatgcaggcactaaataagttctaaagcacgaccagacggcttgcggctccaaagcaattcaggcacttccaaaagctcgagtaaagcatggaagtggataacaggggcataaaattcactggaactgggtactgactgaaggtcttcgaggaggcagcatcacggtcattttatgtgggaatcataagcagtgaagatgacgtctgggacaatcagaggcagcttgcttatgtacatgaacagccgtctgaggttctcactcgacaccgtctccatgtcaaccacgtcttggtcctcaacatagatccacaggtcaccaggacaggtcttcttcaggttgtcacggcagaatgggcatgactgcgatcttgaattccagtcctggtaacatctgaggcacatagcatgggtgcagttgggcaacacaactttgctgttcatctccatgcagatcccacactcttcttccctctcaacatcaatatcagataagctgcttcgttcgtcctcatctttctttctgtacctctccatgcacacagccttctgcttcttgtcctccacatcagtgatccccctttgcagttgcagcaaagaaggaaatatcacagcatagaattctttgatgctggctttcctctcatgagtcgacatggttgtcgtgccatcgacataaaccttgtatatgagaatcctcagcagaccaagcgccccggcaaggctgcagtcagtccactgcaccaggaagaggaatatatgcgcggcggagctgtaagacagccgcatctgcaggcacgcaccatcgcagtctcggggaaattcagaggccagggtgttggcgtgctggatgtcagcttcgagcaccttgatggagtccctgtacgccttccgcatcctcctccgccgccgccggtgctgcccttctcatccaagtgccgcccggtcccggcaaaccccccgcctctctctcgcacctggctgcgctggtggcgtcggattgggaggagggaggtgaggcgagagggtctgggggtctcgggcgccgcgcggtggggggtggggtggggt

SEQ ID NO: 31010 - DNA, 292 bp, Setaria italica
  Peptide Sequence Number=SeqID_96984
cggggagggcgggagggggagctccggggaggcgctacttccagcctcactggcctgaggggaccgtggaggaggccgtcaagagagggtatgcgttcgtggggaagttccgggtgaatgcgcacaacagaaatgaggcgtactgcacaattgatggcatcccggtggatattctcattacagggttggcgcaaaaccgagcggttgaaggtgatcttgttgctatcacactggatcctgttgttcactggactagaatgaaaggaccgaacgttgcatgcaaccctgcgat

SEQ ID NO: 31011 - DNA, 301 bp, Setaria italica
  Peptide Sequence Number=SeqID_96985
tttgtgggaggagtgggtggcctggtgccctggtgatagcgtatgggcatgcaagcgatggaaaacaggcacgtgggccagaaaacgggcagtacattctaagggaaacgacatcaggtagatttgacaaggacaaatcgatcggtacggagattccgaacaattttacgcagttttacgaaaaaagttacggagtttccgcgagtctcgcggaaaaaagaaaacttcggagaatctgcaaaaatcttcggatactccgcaaaaacctacgaaaattccacaaaactttgcaaaaactccg

SEQ ID NO: 31012 - DNA, 503 bp, Setaria italica
  Peptide Sequence Number=SeqID_96986
caagctcaacatattccattagaccctgttgtggatttctgccagcaatcagttcaatagcaaaacaccgtagctgtacacatcactcttctttgtgaatgatcgtgtggatacatactctggatcaagatatccataagttcctcgaatgttggctccatttcgagtaaccatttcctctcttgataatccaaagtctgcaaccctagcctgcatggactgatccagcaaaatgtttggcgatttgatgtcacggtgaactacaggaggaacagccccatcatgcaagtactccaaacccctagcaacatccagagctatgtttactctcaaatcccacttcagcggtgcactgttttcaccatataagtgtgatgcaaggctcccattaggcatgtatgcatacaataacatatgttgccctttatcagcacaatagccaaccaaattcactagattcctgtggtgcaatcgcccaagaagtaagacctcattatgattgt

SEQ ID NO: 31013 - DNA, 466 bp, Setaria italica
  Peptide Sequence Number=SeqID_96987
atggaccttccgaaatggtttctcaaggctgttgataaagaaggcgagggttcctttggaagggataagaacaggcaaatggggggtaactgtctggtggcttgggaaaaagtagagcgatcacttgaatatggaggactcgggattcataacctcgaacttcttggctgggcactaaggatccgctggttatgggcgcaaaagacagaccctgggaggccatgggctggtcttccagtctgtccctcgcaaggcccaggcgctctttgacgtagtagtggatgccgtcgttggaaatggggaggaaatctggttttggacagataggtggctggatggccataccatggctgagattgctcctaactagttcaaaccagtcacgaaacaaacagccaagaggcggactgtggcccaagcattgcaaaacagaagatgggtggtggatatcaaaggggctcttaca

SEQ ID NO: 31014 - DNA, 549 bp, Setaria italica
  Peptide Sequence Number=SeqID_96988
gttatacttggtaaccacagagatgcatggacctatggagcagttgaccctaacagtgggacagcttcacttcttgacattgctcggcgtcttggaataatgctgcagtcaggatggaaaccacggaggtccatcatcctttgtagctgggatgctgagaatttgggatgattggatctactgaatgggttgagaaaacctcgcagatctgcattccaaagctgtagcttacttgaatgttgattgtgctgtgcaaggtgtggggttttttgctggctccactcctcaattggacaaactcttggttgatgttacaagacaggtcaaggatcctgatgtcatgggaaagatggttcatgatacatggaatgaaatggatggcggcatcagtatagagagacttgccagaactgattccgacttcgctccatttctacatcatgctggaattccctctgtagacttgtactatggaaaagaatttcctggttaccatactgctctcgactcttataattggatggaaaagtttggggatccattgtttct

SEQ ID NO: 31015 - DNA, 388 bp, Setaria italica
  Peptide Sequence Number=SeqID_96989
tcctttctcgagcaacttgaggacctcgtcctggttgttgagcttggcgacatcgatgggcgtcttcccatccatgttttggagcgtgacagcagcaccatgctttaagagaagatcgacacactccttgcgcccatagccagcagcatagtgcagaggggtgttcttgttcttgtccaaagcatccactgcagcaccggcctcaagaaggacttgggcacacttcaactgaaatccaaaacaaaagtcaccaaattccttatcattactatcaatgctgatatcaaacaaggaaacaaatctaggttcctactttccaaatgcatttttaccacctcacattctagatcgtattatgcctatgaaatcgcgacaaaaaggcataagg

SEQ ID NO: 31016 - DNA, 579 bp, Setaria italica
  Peptide Sequence Number=SeqID_96990
ctaaaggtttccagcatactggacatagcaggatcctgcataagagcattccccagacgctcagccattgtcataaactgggggttttccatgaccttttgcattgtttccatgtattgttgagggtccaatggaggcattccctgttctcctgtactctgagcacctttctgtagctgctcagccatctggttgaatgcaggatcccttgcaatttgatctgccatctccttgatagatggatcatttagcaaactttgcatagaagcaaaatcgaaaggattcgaaaagcctgctggaggaagcccttgatgttcgttggatgacccttctggttttggacttttcttctcatcagcagatccaggcggatccccactcgacgccatcccggtagagcggagggcgagggagcctagtgctagcagagaggaatccgaggcgtctaggcaccggcggaagctgggctggcgggcgtgcccggcctcggcggagtggaggcggcttgggcggcgctagtcggcggcggtggcgtgcgctagagtactctgaggagaggaaactgtaaaaacgaaaaaa

SEQ ID NO: 31017 - DNA, 1321 bp, Setaria italica
  Peptide Sequence Number=SeqID_96991
tttttacgaacttacaactttaacgtctgctagtgctggggcatgaacatatataacagtgttcataatataatcccaatttctatcgtgaaaacaacagaaataaataaaggggtacacaagccaccgtaagaacataacataacagggcagtagttctaatagctgcccccttgactgtaccatgaattcttacacagaacaggtaaaaatgctgatacggagtattaaccatccgagcaaagcaaagtcaacagatgtgaaacatgattgtactggaaccaagagtctattttgtctatatgaaggccatggggtttagaggaagacgtccttctcgagcaacttgaggacctcgtcctggttgttgagcttggcgacatcgatgggcgtcttcccatccatgttttggagcgtgacagcagcaccatgctttaagagaagatcgacacactccttgcgcccatagccagcagcatagtgcagaggggtgttcttgttcttgtccaaagcatccactgcagcaccggcctcaagaaggacttgggcacacttcaactcaccatacccacatgcaaaatgtaaggcccttcttccctcggagtcttcttcgtccttgtctgctccaccatccagtgccttcttcagacccttatcatcaccaacactggctgtgtgatgaacaatggattcatcttcatccccaccttcctcctcagcttcttcagtaccagaaggttcagcagaagaaccagcaccaaatgggaagctacctcccattgcctggccaatcttttgaagtgtatcagggtcgttccagtacttcatcattgcagcaggacccccattctctaactcatcgagaattgacttcatagctggatcttccttaatgcgagacatacgctcttccagctgctccttgtgtgatggactactaaaggtttccagcatactggacatagcaggatcctgcataagagcattccccagacgctcagccattgtcataaactgggggttttccatgaccttttgcattgtttccatgtattgttgagggtccaatggaggcattccctgttctcctgtactctgagcacctttctgtagctgctcagccatctggttgaatgcaggatcccttgcaatttgatctgccatctccttgatagatggatcatttagcaaactttgcatagaagcaaaatcgaaaggattcgaaaagcctgctggaggaaggctagttagttcctattgttaactttagttaccttaaaagttacttaatttaccttaaatttaggttaaggtttactta

SEQ ID NO: 31018 - DNA, 390 bp, Setaria italica
  Peptide Sequence Number=SeqID_96992
aggcactctgtcaggtcctaatccatacagaataaagggaacatcctgaaacattaaatcaagatgcagtagtgcctgaaccattctctttgtattatgtccctagccatcatcagatgcgcttggtcaaaccttgggagaggcagctccagcatgccgagtcggcggcgatgcaggaccgcagccgcgcggccgccaccgcgctgtgcagcggcatgagcgtgtccaggctcgccagcgccgccgccacaacgggcctgcggatgcgcggtggcgcgagaggggacctcgccgcctggaacaacctctccaccggggatctcgaccggagcgccgcggacctcacggcggcggcggagcggcacaaggacgccattggtttcttcgtct

SEQ ID NO: 31019 - DNA, 695 bp, Setaria italica
  Peptide Sequence Number=SeqID_96993
ctgaggaacaagatgtttcaagttctgctaggcaagcttacatgaaaggaatgtcagccagtcttcagatactcagtactgggacatatggaaccgtcagaaattgagtccagaattcgaagtaaagaggcaaaatattctcaaagctaaccagaatttgacaaatcagctggtcgagctagagaggcacttcaataatctggagatgaacagatccagtgaaacaggaagattggcttctagtcgtagagctgtttattccaataagtcaagggcgagtcaaacacaattatctagtgtgtgcaatgcactgaactcacaattggcagcagctgagcaactatctgaatgcctctcaaaacagatatctgtgttaaatataggttctcctactacgaagcgaggggcagtgaccaaagagttgtttgaatcaattggtttagcccacacaactgacgcaaccaaatttttaggcagcactccttctaagtccattaagcggtttccatcagtgaatgagcattcaaagggagtattagggccttccaagagtgctgaacctgagactgcacgaaggaggagagaatcactggatatgagcctggctagtttggaacctcagaaaactactgttaaaagaatagcacaacaacaacgcctcaagatcagcagttttctgaggttccaaactagcc

SEQ ID NO: 31020 - DNA, 457 bp, Setaria italica
  misc_feature (402)..(457): n is a, c, g, or t
  Peptide Sequence Number=SeqID_96994
aagcagaacacacctgccaagctcaaccacaagtctgtgatgcgcaaggagttccgcaagatggccaaggctgtgaagaaccaggttagcgacaactactacaggcctgacctaaccaagccggctctcgctaggctgagctccgtgtaccgcagcctccaggttgccaagtctggcgtcaagaagaagaacaggcagcctaagcactaagcttgtgttttgttgagggtcctgttggtgctcaatagtcccagcttattatctttgttccgacagttttgagacttgaagtgagacttgttagaactagagctaccttgttaagctgctgctgtgtgtcgttccataatcacaattgcttgcacttgatgattgaacacttttattttaagaaaaaaaacnnnnnnnnnnnnnnnnnnnnnnnnnnnnnnnnnnnnnnnnnnnnnnnnnnnnnnnn

SEQ ID NO: 31021 - DNA, 602 bp, Setaria italica
  Peptide Sequence Number=SeqID_96995
taacggaacaaacggaccaatagaccaaaggtagacaagttacaaccaaaggaagacctaaacaaacctctacaacgtgcactcgtacaagtactccggcttggcgaacaagaagaccgtgacaatccagcctgcagctggaaaggagtctgctgtggtcctctcgacgaccaagaccaagaagcagaacacacctgccaagctcaaccacaagtctgtgatgcgcaaggagttccgcaagatggccaaggctgtgaagaaccaggttagcgacaactactacaggcctgacctaaccaagccggctctcgctaggctgagctccgtgtaccgcagcctccaggttgccaagtctggcgtcaagaagaagaacaggcagcctaagcactaagcttgtgttttgttgagggtcctgttggtgctcaatagtcccagcttattatctttgttccgacagttttgagacttgaagtgagacttgttagaactctaagaagactaaccttagttaaaagactagactagactagttcacaattgcttgcacttgatgattgctaactttattttgctatacttgctgcgcatgattactccgtttt

SEQ ID NO: 31022 - DNA, 741 bp, Setaria italica
  misc_feature (740)..(741): n is a, c, g, or t
  Peptide Sequence Number=SeqID_96996
ccgaagcggcagcgagagaagccatggcgctgtccctctccctcgcgcgcgccgcgcccctcgccgtctccgccggcgcgggggccaggaggctccccgccgccagcctcgccttcccgcccaagtccttcttcggcgcgccgctggccgccaccgccacctccgtcgcgtcgccgctcccgcgcaagccggccaccacctccacctcgctcgcggtcgtcgcggcggggaagaaggggtacaagatgaagacccacaaggcgtcggcgaagcggttccgggtgacggggaggggcaagatcgtgcggcggtgcgcagggaagcagcatctgctcagcaagaagaacaccaagcgcaagaagagactctccaagatggtccaagttaacaagagtgactatgacaacgtgacaggggcactgccctacctcaaagtgaataggaaagcagactgagttctacttggtcttcaaaaaccattctgtttcattccaccaacttgtaatttgtgtatcttctcctctatttcccttctgaatatcaaggccttaattcagtttaagagagcataaacaactcttcgtatcagcagtttagcaatgtttcaaggttcactgcttgctgtagttgttatttggttgcagttttttgcaaaagggactgagactggagccatagcgggtggtttcttttgagaatagcaaatgttaaagatgggccttacctttaaaaaaaaaaann

SEQ ID NO: 31023 - DNA, 517 bp, Setaria italica
  Peptide Sequence Number=SeqID_96997
cgggccgcgcgttgctcaccgtccgccgcaggaaggtgatcggcctcggggcggaccagtggctggtgtaccccggcgaggagacgcgcctgccgccgctctacgccgtgaagcgggcggcgcagtacatgcgcggcgccggcaagtccatggcgcacgtcgcgccgtgctccggcgcggcgggcggcaagcaggccggcggcgggtacgaggtggaggggtcgtacctgcgacggtgctgcacggtgtacgacgcgcggcggcgggccgtggcggaggtgcggcccaaggaggccgtgggctccgacgtgttccgcctggtggtgcagcccgggacggaggtgtccctggccatggccgtcgtcctcgcgctcgaccagatgttcggcaagccgtccctgctcaggagctggtcctcctagcctctgtaatcgctgcgccgttccattcattggcgtaggtgcttcgtttcctttttgccacaattctttgggcccgggagcaaaagacacgaatt

SEQ ID NO: 31024 - DNA, 542 bp, Setaria italica
  Peptide Sequence Number=SeqID_96998
gtgcgatatttactgaaaaggaacgaaaaaaccgggagctatctgatcctaaagatggcttaattacacttcgagattgctgtggaaattacacatcgagctgcgttatttcgaagaatgaaaccgagtggctcgacgccgaggatctgcacgagccgtctcgctcgatggagtacgcgatgagcagcttcacgacgtgcctgtacctcctcctgtacgtcgggaacttcgacaggctcctcacgattccaaccagccttctactgatggcctgaatctgtgccaacctcacaggatcctggggcatctcggcgccgttatcccacacgctagtgctcgcggcgttgccaacgaagagggtcagcttctccaggaacctcacttcctcttcggtcatcttcagcgcctgtatctgctccttgagcaccagcacggggtggaagaaccagtccagcagccggtcctggggcctgttgtgctggttgacctcgacgttgcccagcaacacgcccctccggcgccggccttgatcgattgcagcg

SEQ ID NO: 31025 - DNA, 796 bp, Setaria italica
  Peptide Sequence Number=SeqID_96999
cctcatacacattattccatgcaatgtaagatcggggtttgcaagaaagaaggcgccctatgcatgcaatagcaataggcaattcttcacacttttgtaggaactttacggccaaatcatgcaaatcagatgggcaccctttgtcatcactactccgaaaagctaccttgcaaaataactcccaagagtgaccttttcctagcggttccaccttgatttcacaattactagttgccaatgatgcgacttcatagttttgtgatgtcagaacaaacctgctgatgcagttggttggaaagacatccatgattttaatcaacacatcatcttcccaaacatcatccagaaccaagataaatgttttaccttgaagatggttacggatgatgcctactacgactctcatatccatgttacttgtgtcaactgagatgcccaactctctcacaatcttcttcaacaagtcctctacttggtaactctttgccacagttacccatgcagcagtatcaaaattcactttcacaatcttatagacatgatcaactaaagtagttttacctactccacccatcccccaaactgtggcgattttgcacttcttttcctccaaatcactgcctagatactgtgtcagcttatccacattgtcctcaattccaactagatcttcttcctttggtaaacacgaaatttgattggtagatatgtcatgatggacactgcctccaccatatctcttgtttcctggtatggtgtaacggtctctccttgttgcagcctctttaagttcagc

SEQ ID NO: 31026 - DNA, 563 bp, Setaria italica
  Peptide Sequence Number=SeqID_97000
atactgatcagtgttcctgtaaattgtggtgcctggaaggtttccgagaagtgcagttcttggtcttgttacttgaagaagtattttggcaaacgagattgacacagcaatcaagagacctatctcaacagatttgaaaaccacaccaaagaatgctcccatgcaagcgatgaaatccattttgtcaactttccaaatgagaattgcggcttcatagtccacaaggccgatcacagcagaaataatgatcgatccaaggattgcattcggagtatacttgaacaatggtgtgatgaccaacaaggtgagaagcacaaccattgacataaccacattagatactggtgttcggcacccagccatgaaattgactgcagaacgcgagaaagaacctgttgcaatatagcaagacgtcattgagcctacaacgttcattgttccaagtgctaccatctccttattccatctaactggtagtccttcatggcagcaaatgtccttccgatcgccacggcttctgtcaaccgatcatgccgcagacaacaccgatcttgaaacctttg

SEQ ID NO: 31027 - DNA, 248 bp, Setaria italica
  Peptide Sequence Number=SeqID_97001
gcggatgtcgagcatgctcagcgcggcacccccagccccccgccgggtccggccgtggcagtcgagcacgatccgggtgcagaactcgacctcctcgcgcgtggaccctggcgccatcgccgcgtactggatgacgcggcgggttgcgggcgtatccacccgcaccgagctgcgccagcccaggagcacccggcccaccggcggcgggatcgtcggcagccgctgcgagagcgggatcagcgtggact

SEQ ID NO: 31028 - DNA, 560 bp, Setaria italica
  Peptide Sequence Number=SeqID_97002
gtaacatccgaaaataagctgtctcatctggactattattgaaaacctgcaacataaaaaatgacaattaattaacaaggcaacacatgaatcagaggagagggaaaaataggggtgtaacacatcacctggacaaattgtgaacgccgcaggttaaacataaactgagggaacaatgagaaatttgaatgtaggctaaatgaagaggggtcatcctttcgataatccccaaatcgtgaacaaagccgtatcagagatctatcaagccaccgtgttgcatcgaactcttcctccatctccatttttaaagagatgtatcttgccaacacaacagctgcagtctcctggtcaaaaccttcgactaattcctcggtattagtggaaccatccacccatttcctgcatatcgtagtaactcttatcctcatttggccttctgggtgttggtaacttgttacaaattgtatatacaaatgtcggatttttggttgtccttggtttggtcttcgttatttcgttttcttacttttggtttgttagttacttatttcttaaaaaaa

SEQ ID NO: 31029 - DNA, 534 bp, Setaria italica
  Peptide Sequence Number=SeqID_97003
aacggacggacaaaacctacctacaagatgcggcggcatctcctctctttcggccgacaacgggcaggctggttgttgtggatctgagtgttgcaataggtacctcatggtgttgcaatagttatttttggatgttgcaacggtggctattgacatttcatctgttttgcaacagtctgacttgctagcaatcgggtgttgcaccaaactgagccagcctttgaaggtgctcgcagaagacctggaagctaacatcatcggtgaaaatgatgtcagaaccaggggcaacatcatgagctgagttatatgtggacgatggattcagcttagccaataagaaccttgcctgcgagccgtgttggtcgcaaacaactagtcttggaactggaaatcgaccttttattatcatctgcgcctcctcatggggtgcttgtaacagttgtgcgaattgctcatgctcagaccggatactgctacttgatgcatactttagtgttgtcatcttccatggcatgaacaaattagactacaaga

SEQ ID NO: 31030 - DNA, 406 bp, Setaria italica
  Peptide Sequence Number=SeqID_97004
gaccccggcaagatccgagcaagcccctgaccctcccctaccccggccggcggcaacctcctcagatgcggcggcatctcctctctttcggccgacaacgggcaggctggttgttgtggatctgagtgttgcaataggtacctcatggtgttgcaatagttatttttggatgttgcaacggtggctattgacatttcatctgttttgcaacagtctgacttgctagcaatcgggtgttgcaccaacttgttccttatgttgcatatagttgttttctctgttttgtctcttcttctttcgttgttgcaatgttgtaagagattgttttttttgttgttgcaatgtgtctgttttgaatgttgcattgaagcaattcgggatgtttcatgcacgtaaaggtgttgca

SEQ ID NO: 31031 - DNA, 2530 bp, Setaria italica
  misc_feature (1)..(21): n is a, c, g, or t
  Peptide Sequence Number=SeqID_97005
nnnnnnnnnnnnnnnnnnnnnaatgatttgacgtaggatagaattaaaggaacactctttgtgatttgacataggatagaactaaaagaacactctttgcgaaatggaggggagggagtatagactacggataatagacctctggggcaacttatacattcttttaggattatttcccgaaaaaattgtctgaactcagaaaaccgtcacaatgtagggatataccaaaaaaacagcaatggaaattttctcacaactccaacctacagaccccgtaaattatcagcacctatcaaattgggtgtacatttttttttggcatacatgtcctcaagactgaacagccagcctttgaaggtgctcgcagaagacctggaagctaacatcatcggtgaaaatgatgtcagaaccaggggcaacatcatgagctgagttatatgtggacgatggattcagcttagccaataagaaccttgcctgcgagccgtgttggtcgcaaacaactagtcttggaactggaaatcgaccttttattatcatctgcgcctcctcatggggtgcttgtaacagttgtgcgaattgctcatgctcaggttggttctggtaacccatgtttctccactgagcaattgtcatgccatggaagatgacaacactaaagtatgcatcaagtagcagtatccggtctgctgctatcgatgccacatcaaggaatactggtgaaggaggtgaatcaaaagaaaatgatattaatgaaggctggatcatggcaacagagttggtgacagtctcacggttgagtaacatccgaaaataagctgtctcatctggactattattgaaaacctggacaaattgtgaacgccgcaggttaaacataaactgagggaacaatgagaaatttgaatgtaggctaaatgaagaggggtcatcctttcgataatccccaaatcgtgaacaaagccgtatcagagatctatcaagccaccgtgttgcatcgaactcttcctccatctccatttttaaagagatgtatcttgccaacacaacagctgcagtctcctggtcaaaaccttcgactaattcctcggtattagtggaaccatccacccatttcctgcatatcgtagtaactcttatcctcatttggccttctgggtgttggtaacttgttacaaattgtatatacaaatgcggattttggtgtcctggttggctcgatcgttcacttggtgagacatcaaaaaaaactgtcaaggaagtacttctatcgagaccacacattttccatgccgttgtatttccttgaccaacaattgtgtcggcacacaaagctcctttcttctccaaagatgtacatggtccaataataccttggaccttaatgtcttttgaacagtttatttcaattgtgccattgaatgaaagacctagagactgttcacctccttcaaaaatgcgtttgaaagaatccttgaatacggaatgcccaaaactttcagataagacgacaaggccaccggttctctcaattgcaaccttcatctcagctagtccaacctgatcaagagcagatgcgaaaacatctaacacgtggccttgactgaccaactgcttggcaaggacatcataaaatttgacggctttctggaagtgaggagctgcatccttgtcaagatccttatgtgatctaactggctctgacaaatccttcgaaacaatcattccagggccctcagtgcagggtccaccgagcaatgcaataattcttgcacctgtcccaggcatgcaagcaccaagcaacccagctgccacgctcagggcaacacccgtgcaccggatcgcacggttcccagcctccactggccactgatcgggctgcaactcgtccagcaacgtgctgagcgtgcactcgcactccgacactgggagcaggaacctgttcaccccggccgtcgtggcgggatgcatcccgttcacctgcggcccacctggctgctgcggcatcttggggaagcccgggcggccggcgccggccagccccagctgatccaaaatctgctccttggatatctccttggtcccccggaagacgtagatcttgctgagatcggagaatccgagctcgtgcaggtgcacctgcgtgccgaaggtgacgaggccgacgagcgcgtgctccggtaggagcgcgacggccttccgcatggccatcttgacgtaatccaactcctcctcgatgacgcaggtgtcgatgacgaagaggaagacgggcggcggcggggctccggcggccccgggggcgccgggggcgccgccgacgatgtactcgacggttgagcactgcgggaagagctcggccgggacgttggactcggagatggcggcgtagtgcggcgggaagtggttccgggagaagcagagcgggcagatccagatcttggcggcgaagtcgacgcgcgcgaagggattgaggagggcagagcagggcggcttgcagcggagcggcgggtatggcggcgtagtgcggcga

SEQ ID NO: 31032 - DNA, 273 bp, Setaria italica
  Peptide Sequence Number=SeqID_97006
aacggacaatacctagacaagacaaatggttctctcctcgacctacctcgatcgccggggacgtcgtcgaactcgaacggctcgcggccgggaggcctttatcgcgggcccgcggcggcgagcatctgctgctgctcggtggcctcggcgtcgatgatgcagagcacgtggtgcacggcggcggcgatgtcgtccaccgtcgccaggccgcagccttcctcgatcttgacgctgatggtgtagaggaccagggcgtccagcgtggtgacgctg

SEQ ID NO: 31033 - DNA, 555 bp, Setaria italica
  Peptide Sequence Number=SeqID_97007
gcccaggcctcgccctctcgcggcggtgctccctcttcgttcgtccccagcgacgcaggccggcggacatgaaggggagcggtgccatgaagccgtcgtccatgttctacgtccacgaggcggacgtcgtccagatccaccacttcctcgaggagtgctccctctgcgccaagtcgctctccggctggctgtgcccgcgcagaggtgacacgccgttctgcagcgaggagtgcaggcagcagcagatcgaggtggacagggcgaagcaccggcggaagaagcgcgcggcggcgcacgcgctgtcctcgcgcagcagggagcacaggcagcaccaccaccaccctcaccaccaccaccatcaccaccaccagcaaccgcagccgcggaaggccggcatggacaccaacccctgggtcgacggcgggttcccgagggcgcccgcgctgcgcgtctgaagaacacgatcgcgccgcgccgcgccgcgcgggccattcgtttccgcgagctctgcgagcatcacgagacggttttagggatcggttgcactggtagtac

SEQ ID NO: 31034 - DNA, 563 bp, Setaria italica
  misc_feature (494)..(563): n is a, c, g, or t
  Peptide Sequence Number=SeqID_97008
tatgtctaaaagcaaagcaaagcagcaagtgtttccaagcgttcatcagtagtaagaggtgccatggcggacatcgcgttgctggtggcggaggagttcgagaagagggtgaagcggggagcccccggcgccagcggcgaggcggacggtagcggcgagaggaggaacttcggggccgtggccaaggtgtggagctcgtgggtggagtccgcctcggccgccgcgtccggggtgagggtcaacgtcgccgtgcagctcagggagctggagcccaagaccgggctcggcctggccgccgtcgacggcctcttctccgcttaattagtagtctctactctcttttgattcggcggaagagtagtgttatgaatgcctcttccccccggagtgatcaatcaaaatggatcatatgccggtgtaacctgtacattcataatctgaaatcaaatataatctctccagtctccattttcaaaaaaaaaaaaaaaaaaaannnnnnnnnnnnnnnnnnnnnnnnnnnnnnnnnnnnnnnnnnnnnnnnnnnnnnnnnnnnnnnnnnnnnn

SEQ ID NO: 31035 - DNA, 452 bp, Setaria italica
  Peptide Sequence Number=SeqID_97009
cgccgtctacgacggcttctgcaacctcaagcagattaatttggagctcaaggtctgcggaggatcgtctattcgcaaaactctggtcaaagaagcagcttcctgtggcgccgcccatctcatcctcggtgttgccaagaattcccggtccttcggatcctcctccacatcagttgccaagtactgctcaaagagagttccggtgggctgctcggtccttgcagtgaacaatggcaaagttgtttaccataaagatgggggccacgggatgcaacatgaactgtaccaaagcacaatacctgagacaccaaggaggagctaccggaagctcttgtcatccatgataggagagaagctttgggatgaacatggaaaggacaacaggtccatttctcgtgccgtcaccatgccaatgaggtctcctgcctcatccataccaatgacggtctccc

SEQ ID NO: 31036 - DNA, 254 bp, Setaria italica
  Peptide Sequence Number=SeqID_97010
agcagcaacgctgtcatgtcactcattccttgacaataaccgagttctgtgtcttccgaactataagctttcaaaatactaaataaagcgcgttgtccttttccataccgttctcggaacatcatgtgattgcgggcagcacggttgacgtcgaggtcgatctgggtggtccacttggattggtccctggagcaggcggcggtacttatccgcgttcgaattgatctgcagcgccagggtgcccaccgtcaccg

SEQ ID NO: 31037 - DNA, 245 bp, Setaria italica
  Peptide Sequence Number=SeqID_97011
cgggagcttcgcgcgggggcggccgtggcgccagcgcctaaacgcgaacgcggcgcagtggtatgcgtcgttgccgtggcagatggcgagcgcgaggagcagcgggagcagggcgagggccagccaccagcatccccacggccacgccgcctgctgatcatgggcagccaccatcgtctccatcgatggaaatcggtggtaggctctcaataggctagtcagtagtcactggtaatcaccagttg

SEQ ID NO: 31038 - DNA, 403 bp, Setaria italica
  Peptide Sequence Number=SeqID_97012
ttttaaaaaaaccaagaaagggcttcactaaagtaagatatacatcattcagtcataccctaaaagaattgcttcctcactcaggcaatgcaacgaaacacgcttcaatcaaatttgagcccggcaatctggggccagtcactaccaacctacactacgtacaaaaaccaactatactttcttcctgtttttcacccctgtgtataattacaaagttagaacaagcatgtggactcagtcaaccactcagctgcatgcaaatatacagttagatagccttgtgacatcctggccttcatcctacttcctacatcacgctgcatataatcatatccatcctcagaaagtgtggactccgcgcatgggagatccgaagatcatattgaggggatccccccccccc

SEQ ID NO: 31039 - DNA, 494 bp, Setaria italica
  Peptide Sequence Number=SeqID_97013
ccgcatgtactgctgccttccgccggtgcacggccgacctcctccctcccctgcatgtgctgcaggcagatggcgtgctcggtcgacgtcgccgccggcttgccgctggtcccggagacgacggtgactgtggccttgggtggcagcatgccgacgtggcactccaggccgtacgagtcgtcggcgatggcgaagacgaggtaggcggcgtaggttgtgcccggggagagcagcgagaggctgagcttcccgctgatctccagccagcacacgtcgacgagctcggcgacctcaggaaacctggatcccggaaggctagcggtccatatccagcaagtcggatcgtctccccaggcaatgctgagcgccctcgccgagagcatgaagcatttcgccccgctccgtctcttcctagcccaaagctctgcacgcaaccgtcgaggaggacgggggtgtcgcagagtcgggagaagagctccttcttggactcgcta

SEQ ID NO: 31040 - DNA, 453 bp, Setaria italica
  Peptide Sequence Number=SeqID_97014
cattttgcctgtgaactccaacctgcaaagaagggaagggtcaattggccttgaagaaaatggaagtacattctcagaatggacttcgaggagatcatggaaggatcgacagaaggctaagaaagcaaatgcaaccggttcacaacatctactatcatcttcagaacctgagctaatatactatggtaaacattcaggattagttggactacgtaaatctgatgtcctttgtccggcagttgatgatgaagcctgtacatctggctatgataaggtcctagtggacgcggagtgtactcatgatggatccataaaacatatccagaaatttgagttctggggatggaaaactttagatcgccgtgtacttgatgctgaaagaactgataacctgtttcagcttcagttgcatcttctcaccaatcgtttaccattggtgagaagatgcaactg

SEQ ID NO: 31041 - DNA, 531 bp, Setaria italica
  Peptide Sequence Number=SeqID_97015
taaagggaaattaacaaaagaaaccaaaaccggaagaagaaatagactagacaactttacaaggtggtcgcagccatcaagattcacattttgcagatttgggcatgagagtcttaagaatgtcatcgagcggcaaccagcaagagagagactagccagagaactgctattcagttccacaatgctcaaactctcacaattgtcaaggatcaatgatctgagcatagggcaaccccctcatcactaaagacttcgcaaattgcatttgttaatgactcacagtcactaagatccacatcaatcaagttgtggcattgcagcgtcaagctagataggctctcttgtttttgcagcaccaatttctcaagtgcagtcgatgttatgctaacacgatgaagtgctgaacatctggaaactttgatgtaagaaagcacagggcttcgcaaattcaaatcagcaaacctaaaataaagggcaagacagtatatattgcgtaagtgcacaagacttatattcttaagatttggcaaa

SEQ ID NO: 31042 - DNA, 241 bp, Setaria italica
  Peptide Sequence Number=SeqID_97016
aaagaagacaatccatcgatgccaatggataagcatgatgacaggataagatgttcaatcagagggcaagcctctgccatacgagacagtgaatcatcctcaagctgcctgaacatgtaaaagacagtgagtacaacaacagtaagtaccaactactaaaataaaccaaaaattttggaagtgcggcacaacctgcagaaagaggcatctaaggatgtcaaaagggggcaattgataaaag

SEQ ID NO: 31043 - DNA, 465 bp, Setaria italica
  Peptide Sequence Number=SeqID_97017
gcttgggtactatgcttgggtactatatgtacaagagcgccatggagggctattcctgacttgcttattgaatggatagcactcctttctatggtagcagcctctaatattatgcaatgaggctgctctggatgcgcttgagactgggacaaaccacacggagcctggcaaaatccagagcattgatctttggacaagaatgtacattaaggatctccaatgcgctacaaagggatattgcagattctaattcctcctcttgcaacatggtgcatgcctaggacaaagacacagcatcagttaagtagatgcaacagtagcacagaaaataactaagtataattgggcaaaaaactgaaatgatacatgccaacattggtagtgaaaattatcgattaatgaaacgaagagacacaaactgagggcttaaactcaactaactaatggaattaacaagtatcaatg

SEQ ID NO: 31044 - DNA, 3123 bp, Setaria italica
  Peptide Sequence Number=SeqID_97018
tttaggggacctacaaatagacgtaagaacacttagttttgcacaagtcaagcagcaaatcaatatccaaatccagatccaaacattattattaacgcatataagccgggtacagatctgattgctccaacggtacacttacaagtaatacaaacaaacaaacatgtcatcttttttttatctccggcaacaaaacagattcagccaaaatacttattatagcacttgaatcaactggagaaattggattgcatcgcctcctggctcacaatataccatgccatgcaatatatcggcaatgcttgggtactatatgtacaagagcgccatggagggctattcctgacttgcttattgaatggatagcactcctttctatggtagcagcctctaatattatgcaatgaggctgctctggatgcgcttgagactgggacaaaccacacggagcctggcaaaatccagagcattgatctttggacaagaatgtacattaaggatctccaatgcgctacaaagggatattgcagattctaattcctcctcttgcaacatggtgcatgccagaagttggaggttggtcaatctggggcaatcaagcttcagaacctccagtgagctacagttgctcaagtttaacgagtgaagattggagcatgtcaaatccacttccttcaagtttgttgaaagattaagattgattttggacaaatttagaaagtttgccattgaaggaataacaactttcttaatgtttggacatccagtacaattgagaacttcaagcagacgaccagattgctcgctgatctcttcattattggctggtgcagaatttggatggctaaagtcaaccggcatatcaacagaactgcaatcattgcacaccaattcttgcaagtttgtacatccgttcaagttcacattaaccagatttgtacagcatgcaagaagatcttctatcgcagtctgcccaatggatgagtaggacagatctagctcaacaagcaatggaagagcaccgtctctgtaaagggcatctaacgatgagtcaccgaggtacttgcaggctgaaagttttaacaccttcaactgaggacaattgtcgaaaacaggcttcaagctgatcaggaatgtgtaagacaggtcaagcaaggtcagcttatgaagacaatgcaaagaagacaatccatcgatgccaatggataagcatgatgacaggataagatgttcaatcagagggcaagcctctgccatacgagacagtgaatcatcctcaagctgcctgcagaaagaggcatctaaggatgtcaaaagggggcaattgataaaagcctcagaaagcacaccacaacccttcagctccaatatagacatatttggggcctcaatgcgtagaacacttagttttggacaaattcccagatttagggattcaagaccaaccggagagaatgctgcactttcaaggtggtcgcagccatcaagattcacattttgcagatttgggcatgagagtcttaagaatgtcatcgagcggcaaccagcaagagagagactagccagagaactgctattcagttccacaatgctcaaactctcacaattgtcaaggatcaatgatctgagcatagggcaaccccctccatcactaaagacttcgcaaattgcatttgttaatgactcacagtcactaagatccacatcaatcaagttgtggcattgcagcgtcaagctagataggctctcttgtttttgcagcaccaatttctcaagtgcagtcgatgttatgctaacacgatgaagtgctgaacatctggaaactttgatgtaagaaagcacagggcttcgcaaattcaaatcagcaaacttgcgtaagtgcacaagacttatattcttaagatttggcaaatccagtgacacagatgtcaacaggctgcagttatcaagttgtagcgcctcaagcagacggctataagctattgcagccatggaagcagatgtaattccttcgcaacttagtaatctcaagtctatcagcataggaagcctcacagactcaaatgaaatgttggggcagttagatgcatcaagaacagaaagatgtgggcatgcgccagctatttcacgcagtgtctcatcagtaacacaagagcaagatgacatatctagttttgccaacaatgggcaagctgtagcagcttgacgaattgcattgtcagagagcttatggcaggattggaaatccaattcaagcaactgaggacagttgagtgatacatgagccatgccagttcgcctcaatgacaatattttaagttgggaacatctgacagatattctgagtgcacggcacttcaaaatttgaagctcacgcaatccatcatgattaacagttacttcttggatgccactcccaagagaagcatcagttactgttaaagcagtcaataatggacactcagccaaagcttgaaaaaatgcttctcctagttgtcccttgcccattgttaacgtcttgagatgccttaaaaacattattgcttccagcactagtatttctgcatttatgacaccgtgcaaattgagttctgttacattctgataacgacggcaaatatcaacaaagttctgcagtgatatcctagtgttttcgaatttcaaacacttccaaaaatctgcatgcacactagcagatcgccactgtttgcaggcaacacctgctctgcataaatccttctgacccaagaaagagaatatcaggtgcaggagatcatcagagagatccatttttattccaacatcttcagaatttcttccacctgagttttctgcatcatcaactagctcattattggcatctcttgagctctcactaccaccatcattagggaaaagtgacaggccaaattccaattcatgttctggggaacgagactgcttgaaatgagcatgttcatcagaaatgggcaaaaatggtgattcagagccaaaggcactggcaccagaatgctgtgggctttcttcgccaaagcgccgcactctgagccgtttattctgcaggtctctgtcttcatcctcatcgtccaggttggcccacccaacctccatactgccacgcgc

SEQ ID NO: 31045 - DNA, 680 bp, Setaria italica
  Peptide Sequence Number=SeqID_97019
acttgaagttgttctcgtcccacagaactcggtagtgcgtcggcctgctcgtcccctttgtgccccaatgactgcacaggtagaaatcgaactcccttgggtgtgtgatcacggtgtcgaccactgtccctggtggcacgttctggtcggagtagtgtgtcgagccaccattcttctccctgtggaagagcctggtgtgatgcctcttctgaaccacgacgaacgtgatcgatggcttgtaacctgggtaccttgaacatgtcaaccgcactgcctgcaactcctctgacagcaccttgtagaactgcgtctcactcacaccgtctctaaagaatatgattctacttgggagcttgccgacttctttcacaaactcctcaagcagctcaccagtcatcacatctaggtgctcaatgatttctttgcggtgcgtctgcgacctcatcctggaggtgtacttgtttgctgaaggccaattcatgcttgcaactacggcaaccactgatggactcgagtcatctaggggatgtgggtgcgtcacatcagcacccatgaacatcactggctccttgtccgaaaatattctaggaatttggcatggcaagctgttgtagagggcaacattgcatcccccgagcttggcatttatcttcagtgctagattggccaagaactgaaag

SEQ ID NO: 31046 - DNA, 238 bp, Setaria italica
  Peptide Sequence Number=SeqID_97020
cacaacttatactcgtcgcaaaggtcgagtcaaaagccaacaccaaacttctcagttgatcgcgagcgcgccatggcgtccaagagccaagctgatctcgagtcccagaagtccgcgccgccagcagcggctgtcgcatcggctcccacagcaaccgcgccggcttctggtggctctgtggagagaaccttaggctccgtcgttgttggcatctctgatgctcaccgtgcggcgccgg

SEQ ID NO: 31047 - DNA, 350 bp, Setaria italica
  Peptide Sequence Number=SeqID_97021
catcaacgcctgcttttatagggcagatattccagctagcaagatccttctgaaaatcagctgtagcaatcaccaaatcagcaacaggtgatgcaggtccagcaggagggcatgcaacgagaaaagcacgtagtctatttgacagctccacactatagatggaggcagctaaatttgggaggtcaacaaaactgggaagtatgtgctgattatgaatttcaatatctgtaaaaatttcattgcgcagattgttgcataatgatttcatcttctggtaagctgtggtaacagttaccaagtccaccctgacaccttctgaatttcccgttacatactcatcagtctcaagc

SEQ ID NO: 31048 - DNA, 518 bp, Setaria italica
  Peptide Sequence Number=SeqID_97022
cgaaagtacttctatatgactatgatttattttatatatattaagatacagaaatggggaaaaaaggaaggaagggactgcgtccatgtcctaaactataagcaaataaaactggagttggtactatagtataaaataagattttactccaaaataactcaaaaatgcaagggagtaaaatggactttttccctctatatgacacaccaaacactggcattgatctgatccccacaccataaattatttatagatgtttcattggacagctttgaagtggaagggtgtaagtttgtgaagccacatgcattgtttcattaaaagaaatcaaatttcatgtaaaaggcatgtttcaatggcatacttttcaaagtataaatagattaggaaatattgagtatgctactgcttatagaagtagatctaatccaaggaaccagcaaggtgctagtgggatactactagatgtacatatgtatgtttgtttctttcaatgaagtaccataccattgtttgaa

SEQ ID NO: 31049 - DNA, 577 bp, Setaria italica
  Peptide Sequence Number=SeqID_97023
cccccgcaggatcaccagagtacctaatacctatccatgggagccggcaccaagtgcctcggcgcctcgcggctcagcacccgtggggacctcgtccacgacgcgcacgccgaggtcatcgctcgccgcgctctcctccgccttgtctactccgagttcggccacagcggccagccggattggttggttggctctggggatggtagaagatggaggctaaaggatggtcactgtcttcatctttacatcacccagctcccatgtggggtcatgccagtaccgccatcagaatcagaattgccgagggaacagctggattgtggtgtgaatggatgcagtgacatcggttttgttcaaaggaagcctggccgtggtgatacaacattgtccatgagctgctttgacaaaatcactcgttggagtgttgttggaattcaaggtgcattgctgtcccacatactggaacccttgtatttgaccaccattactattggacagttacctgatggtgctcctgaagggttctctattgaaaataatattgagaaagttctcaatgctcgcttgtcctctctat

SEQ ID NO: 31050 - DNA, 266 bp, Setaria italica
  Peptide Sequence Number=SeqID_97024
caaattcgcctttggcggaaccaattccaaaaaatggacccttagcttggcgccatccacgctggcgccaagcttacacgtctcggcgccagccatcttggcgctaaggtccatgcgcagttactgatgcggaatccgacatggcgggggcttggcgccatcatggatggcgccgagcaattttgcctcctggcgtttcgaacgagaaactaagtataattattccgaggagtgtgcaacaaactacactctagttcaattggcta

SEQ ID NO: 31051 - DNA, 286 bp, Setaria italica
  Peptide Sequence Number=SeqID_97025
cgccatctcaatctatgtgtattaagattgatttatccaaacaatgccttaaatattcctctcaattgggtatgcccaggaagttgttgaggtcgtcaacgagcagatcaattatctcccggatatcatcatcatcaaccaagtcgccagaattgtcggcgagaatcctgtggccattcaggtccgcctgtgcagccagcttcctcgcagcgacggacgctgcaggcatcgcgcacgcctgtcgaggagcggtgatgaccgcctttttgctcaccagggagctgag

SEQ ID NO: 31052 - DNA, 248 bp, Setaria italica
  Peptide Sequence Number=SeqID_97026
cacgcccaaattctctgcggcagatcacccgaaacgcacgccgtaccgccgcgtcggctcggccgctctgctagttttcctgctagtaaagcacagagagacatcggcgctgccagccgggccggagtaaattctgcgcgagctctgcagctccggcggcgctgctccttcctcgcggcgcctgcctgcccgcgccgcctgagcgaagttcgcgtctttccaacccacgcctcgacaggacagtaaat

SEQ ID NO: 31053 - DNA, 317 bp, Setaria italica
  Peptide Sequence Number=SeqID_97027
aacccttctcctcgttgccgccgccggcgacctccagacaccagcccgccaccgccgcatacgccgcgaggcctcgagcagctacctcgagacccaattcaccgaacccccgcaccgccccctccaatggccgcccgccgcaggcccgggggggccgctgccggggacccgcctacgcggccgcaaccggcagatgcggtagcggcgtcaggcgagccagcgaaggacccggttctccggccgccgaacctgagcgtggccgctgcggcggcggcgatcttcctcgcgcccttctcgtacctcgcgttcgtgcacta

SEQ ID NO: 31054 - DNA, 298 bp, Setaria italica
  Peptide Sequence Number=SeqID_97028
acctcgtccggcacgggcgggtctgcggccgaggcgaggaggaactcctccacgaccttgttgccgccgcgctcgcccccgccgcggccgccgtcctcctccggatggtgtccgttccggctgaccggcggcggcagggacggcaccagcgcgccgcacagcgcggtgagcgcggccatctgggacgacgagaagccgtgggtgtagcgctccctcctcgcgcccccgcccctcaggagagggtgccccgcttctcgcccgcgaccatggcagcctctccgggtggcgtgtgagtggt

SEQ ID NO: 31055 - DNA, 209 bp, Setaria italica
  Peptide Sequence Number=SeqID_97029
ttctacttgactgtgctggaaggtttagcactctatgctgaccctaattttaagcttctgttcaaggacggaagattcagatggaataggcttgaaaatcttcttgttcaaggtcgccaagatagagagtttgcagccaaagatgctctacaacctgttctaaagcttctccttggtcctgatggggaggaattgcgtgtgctagttgt

SEQ ID NO: 31056 - DNA, 332 bp, Setaria italica
  Peptide Sequence Number=SeqID_97030
cactgcccgagcctgagcgcgcacccacctccccccattgacccgagcaggtcgagagcgcgtgtccacaccacaaaaggctgggctgcgtcgctcggttcccactcggcgttcttggctccggcagcggcggaataggagggatcgatgagtaagaaggcggagggcggcagcaagctggggcggtggctgggggcgccggtgcgggcgttgtcgagggcgtgcgactcgtacgtgcggaggatgtcggcgtgcgcggggcggatgccgacgcacgccgccgcctacggcggccgcggcgggttcgcgccggggcacgtgcaggccgcgac

SEQ ID NO: 31057 - DNA, 469 bp, Setaria italica
  Peptide Sequence Number=SeqID_97031
aggaatacaagtcactaacattcacaactatggtgattttacactaagctatagcatcattatttccaataatttttccatatatggtgcttgatgtgctgttgggaccttcttttttaacttacgccagctgattctgcattaaggttgtgaacgagcttaccagaatgagtaacgccacaccaggggttttcaggaaaactgtgacggacgtgcaactgaatggttatacaattccaactggttggatggtgatggtttgccccatggcagttcatctaaacccggaagtttttgaagaccctctcacctttaacccatggaggtggcaggatgagtctcaacggagcacactgttgaagaattttatgccatttggcttaggcatacggacttgtccagcagcagattttagcaagctttcactgcaattttcctcatgtgttggtcacaaactacagatggaagg

SEQ ID NO: 31058 - DNA, 600 bp, Setaria italica
  misc_feature (539)..(539): n is a, c, g, or t
  Peptide Sequence Number=SeqID_97032
caatggactaagacagttaacaacgccaataattgaatgactaaaaataatctgaaactcctaaacacctttgtacaattagagtgcaatattgaaattgtccggcacgtgttgaggtcccaatccaaccggccgatcttgttgttgtagttttttttgttgtaataccaagtctaggtttcatcttctttttaatataatcggtagctcttctgcctggttcgtttcaaaaagaagattagattgcaatatgctatattgaaattatggatagctgaaaactttgtaataagataacggctgcatgtacttttgcagaggctggagatgcccccattttcttaaaaaaaatatattgaaaggtgatatgatagtaatgaacatgtgtggtgaaaccttacattatacagtcctgaaatgtgattgatatgcatttgtcggataatgattattgatctggtggccaagaagttggttaacctcgatccctcagagtcaagagaattgacaaagactacagtgcatttcttcaggggttnatatcattcccactatatgtccctggaacaactatttaccgatgcatgcagggaagaaaat

SEQ ID NO: 31059 - DNA, 404 bp, Setaria italica
  Peptide Sequence Number=SeqID_97033
ttaattaattcgtacgaaatttctacaaaatattcagatctagatagatatcgcctcaaaatatggattttacctttatgatgtttaagtccattggtgtttttttgtctaaagggaaggaaaatatgcagaagataatgtcagatttgctaagcaagaggctaacgagaccagatgtaaagcatggtgattttcttgatctaattgtagaagagcttcagagtgggaagccaacaatagatgaaaaatttgctacagatgacattagttgcactcctgtttactagctttgtaacattggcacccatcctcatcttggcattcaagtttcttgggaacaatccgaaagttctcaaagctctcaaggaggagcatgaagcaatagtgaggaacagaggcgatgc

SEQ ID NO: 31060 - DNA, 725 bp, Setaria italica
  Peptide Sequence Number=SeqID_97034
actaagttaagaaaaaagacctctgagtctcttgtctggaaacccggccatattgcttgtagcagtagcaccatggtgagtttacaagttacatgtgccagcctctgtgctggtacgctgttgattgcatggttgctacactgggtatacaaatggatgaatcccccatgcaaaggaacttctccacctggttctatgggtttacctattgttggtgagagcattcagttcttcaaaatcagctattctctggacatcccagatttctacaagctaagactgaaaaggtatggtccgattttcaagacaagcttggtgggacagcctcttgttgtttctgcagatccggaggtcaacaggttcatatttcagcaagaaggtaagttgtttcggagctggtaccctgaggcagcaaatataatcattggcgaggagactatcgatggatttcatggccctccccacaagttcatccggaattccatttataaattatttggccttgaatacctcaagcacaaccttcttcctgaactagaggctgccataagagacaactttgcagaatgggccactaaatatgtcattgatgttcatgatagcaccccggataggctggagatgcccccattttctaaaaaaaatatattgaaaggtgatatgatagtaatgaacatgtgtggtgaaaccttacattatacagtcctagaaatgtgattgatatg

SEQ ID NO: 31061 - DNA, 1346 bp, Setaria italica
  Peptide Sequence Number=SeqID_97035
tttgttttggttttgtttaaacctttttacttattttatttacttagttccttgtaaattgttgtattgaaggctgcctaaacgtgtcattgagttcatgatagcacccggataggctggagatatattggtgatatgatagtaatgaacatgtgtggtgaaaccttacattatacagtcctgaaatgtgattgatatgcatttgtcggataatgattattgatctggtggccaagaagttggttaacctcgatccctcagagtcaagagaattgacaaagaactacagtgcatttcttcaggggttgatatcattcccactatatgtccctggaacaacattttaccgatgcatgcagggaaggaaaaatatgcagaagataatgtcagatttgctaagcaagaggctaacgagaccagatgtaaagcatggtgattttcttgatctaattgtagaagagcttcagagtgggaagccaacaatagatgaaaaatttgctacagatgcattagttgcactcctgtttactagctttgtaacattggcacccatcctcatcttggcattcaagtttcttgggaacaatccgaaagttctcaaagctctcaaggaggagcatgaagcaatagtgaggaacagaggcgatgcaaattctgggttcacatgggaggaatacaagtcactaacattcacaactatggttgtgaacgagcttaccagaatgagtaacgccacaccaggggttttcaggaaaactgtgacggacgtgcaactgaatggttatacaattccaactggttggatggtgatggtttgccccatggcagttcatctaaacccggaagtttttgaagaccctctcacctttaacccatggaggtggcaggatgagtctcaacggagcacactgttgaagaattttatgccatttggcttaggcatacggacttgtccagcagcagattttagcaagcttttcactgcaattttccttcatgtgttggtcacaaactacagatggaaggagataaatgatggggaagtggcccgcatgggagtgatcattttcccaaatgggtacaaaattcaactcctccgatcccaaggacccgatctaccatcagtgtattgaagatactatcttgatatgaaactgtaattcctggatgcttgtatggtgtgaaaaaatgtgtacatggcgcgtgtgcaccaagattggtctgtggatgtctccaaatatttaaccatttatatgaataagaattgtatgggtaaacattattattttgtgtgtgcgtgtgcgtgtgtaaatcatgattgtgtacgaattgctacaagttctttt

SEQ ID NO: 31062 - DNA, 248 bp, Setaria italica
  Peptide Sequence Number=SeqID_97036
cgcgtcgtcgcctggcacgaccgcgccgccggcgagtggcgcgtgttcgaggacgcctgcccgcaccgcctcgcgccgctctccgagggccgcatcgacggcaagggcaggctccagtgcgtgtaccacggctggtgcttcgacggcgccggcgcctgccagttcatcccccaggcgccggcgctcgggccgccagtgcacaagaatagcagggcgtgcgtggcgtcgtacccctgcgtcgtgcagaa

SEQ ID NO: 31063 - DNA, 365 bp, Setaria italica
  Peptide Sequence Number=SeqID_97037
agcgggaggccgagcgcgaggaaccggtcggcgaaggtgtggactgaggcgagcgagctgaggtcgagcgggagcacgaggacgtcggcggcggggcactcggcccggatgcgggcgcgcatgtcctccgcggccttgacgctccgtgccgggatgacgacccgcgcaccgcgcttggccagcacccgcgccgtctccgccccgatacccgacgtggcgccggtgatgatggcggtgaccgcgcccaggtccgggcacgccgccgtcacgtcctccgccgtcgacttggacccaaaccccgtcgccccgggggaccccagcaggtacctcgccgcctgcagcatgctgccgggcgtgagcagagg

SEQ ID NO: 31064 - DNA, 1244 bp, Setaria italica
  Peptide Sequence Number=SeqID_97038
tgccgcaccttgctaagcatctttacttgccgctcgaaatcatccttcgacttgaccaagctagagacagtaagcttcttgatggctaccggctgtccatctctgagaactgtcttgtagactgcaccaaagcctccacgcccaagctcacaatccttattcaacaatgcatgcccaccggcgctgaactcagggctgcccttaccaaacatgactagcttaccggagctagcatcattctccggggactggctaaggtaatcatcagacaatgcagtagcaggtgctgagcgggaggcagcagcacgggcacggacacggcggttgagcacagatatggtgatcactccgatagcaatggcagccccacccgcaatggcaatgagggtggaaatgctcagtatgattttcttgtgatgcttgttgctaggtgcactcgatgtagcctgcgatgagggatttgatgaggagttgggattgagcacaatcggctttggcataacagcactgcatgaatcattcttccgtgagctacaaagaccagaattgtccatgacgaaggagtcagggatgttgttaaagaagcggctatttggcagatcccctgtcagcatgttgtgggagacgtcaaagatgtggaggctaggcagatttgatagctccactggtagggttccgttcagcttgttctgagagagattgaccacctggagactggtcaagttgcccatggtgctaggaataggccccgtgaggctattgtgtgacaaatccagtgcaacgagggagctacagttcccaatctgtgcggggatgcctcccgtgagcgaattcctccccatccggaggtcccggagcgccaccgcgccgccaatctccggcggcacggttccgtcaagtcggttagcgctcacgtcgagcacctcgaggagcctcatcccaccaatgccggccggcagctgccccgacaaggaattcgaggacaggttcagtgactgcaagcccgcaaaggcagtgatccgcgacgggatctcgccggagaacgcgttcctcgacaggtcaagcacacgaagcgccattgcagcgtcctcgggcaccttgacccacccgtgcagctggttgccggccaccgagacgcgctgcagcggcaggccgaacacccaccagggaagctcgccggtgagcgcattacggctcaggtcgacctccacaaggttcttgcagttggcgatggtgtaggaaat

SEQ ID NO: 31065 - DNA, 1128 bp, Setaria italica
  misc_feature (1)..(36): n is a, c, g, or t
  Peptide Sequence Number=SeqID_97039
nnnnnnnnnnnnnnnnnnnnnnnnnnnnnnnnnnnnccctttagagaagcaacacaaagacttgcatccctaaaactttgaacacattacaagcattccaccctctgcaccgcaccccctctgctcctttcttccccaccgggcaatcatatatgcatctcagacaaaacaaaaaagaaaaaagctcaaggcgaattagaatttagaacagagatcccaggtagtgcctcaaaccagctcctcctccgcactatcctgaggactcctcaccagctcgagtatgctcaccacctcgcccatgtcaggccggttcgatggcacctgcgaggtgcagacgaggcccagcttgatgatcggcagggcctcgtccatggggaactcgccgcatagccgcgggtcgatgcagtcttccggtctgccttcctccagcgtgcttctgactagatcacatagcacaacgacgtcgtcttccaagtactcgacgggcctcctgcctgtcaagacctccagcacaagcacaccaaagccgtagacgtcgcacttctcggtgatcttcaccgtcttgcatgcgaattctggggccatgtacccaagtgagctctgtatcttactgctcagcacgtaccggtccagcatcggcagcagcttggcgaggccatagtcacccacctttggctcgccattgctatccagcagcacattgcttgacttgagattgtaatggatgatcccatgctggtgcaagtatgtcagccctctggcaacaccaaggatgatatcaaacctctccatccaggaaagtgaattatcttcagtgcactcatgcagctgtttatgcaaatttcctcctggcaggtaatcatagatgagaagctgcaaggatgaagtccagtaaaagcctctgagcgcaacaatattgtggtgccgcaccttgctaagcatctttacttgccgctcgaaatcatccttcgacttgaccaagctagagacagtaagcttcttgatggctaccggctgtccatctctgagaactgtcttgtagactgcaccaaagcctccacataattagtaggtagaccgacaaccttaagaactaaaagaacaaattaacttttaaactttaagtaa

SEQ ID NO: 31066 - DNA, 494 bp, Setaria italica
  misc_feature (474)..(474): n is a, c, g, or t
  Peptide Sequence Number=SeqID_97040
cctcacaccaactctaagagtaactttttaaactctgacagttcagatggaactagtgtaaagatagggatgatattttacaggtgaatcaaaagcaagtgcctgtggtgttacaaacctatccccgatatatgttgttgagtagtcatcaagatactcttttagaatgatggcattggtagtgccaatgatatcttgcaatttttgagtagattatttgaacttccttttgcagaatagcatcaatgtccgtgtctgcagaagacgtcttgagctcatcataagacttggagagctcaactaactgggaggataaaatgttcacatttggtgcatcacaccagccaagttttcttgcagatacatggaacaggaatcagcactaagaattcgcatttttgatgaaacaagccacatctgtgatttcggccttgtgatgactggaggtgctacactatcttcagataaaaaccntggaagtcctttgagctaag

SEQ ID NO: 31067 - DNA, 527 bp, Setaria italica
  Peptide Sequence Number=SeqID_97041
cttcaaagacgcagctcactacgagataagctgtttggcttgtaaaccgaagatttaacatgtcatacaaccacatctttcccttcagagttgcgttgtggtgacaaacaaagccagcagtgatacgtactgttacgccactgaaatttaggaagctgcagttttcctgagcttagaaggagaaaaagtaaattagcaggctttctgcttctttcttgtacaaagttaagcaaaactgcgatgcttgtatcatttgtaaatctttcctcttgcacgcggcgcaaatgcaggctccagtctaattgcttgaatcctttttgtacatctcaggcttgagaacaccgacataaggcaggttgcggtagagctccgcataatccaaaccatagccaacaacaaaacagtctgggcactcaaagccactgtagaattttccatcccccacaagctgaatattaacttttcttctagctggtttgtcaaggaaagtgcaaactgatatggacgatgcacctttcttttctaaa

SEQ ID NO: 31068 - DNA, 389 bp, Setaria italica
  Peptide Sequence Number=SeqID_97042
tgatagatcagcttcgtggatcttgaaacacggtaagttgttccaggatgactagctaattttcacatatggagcttgttagttgggacctgaaaaatcatgagctgtgtacttcaccatgagagttttgtgcaaaatccagtaatttcactaaactttagcactggagtcaggtcacacacttagacttacaggctggtgtttatctttcagccccatttctccctgcagtatcagtcctgttgccgccactatccagaaacggaccactttctgtttgtgctgatgagggtacactaaaatgctggttctcaacctggaagaattgtgcaaattggatatatatacatatatacatatatatataagagatccagacaagaactggt

SEQ ID NO: 31069 - DNA, 799 bp, Setaria italica
  Peptide Sequence Number=SeqID_97043
agaatcaagcttcgtggatcttgaaacacggtaagttgttccaggatgactagctaattttcacatatggagcttgttagttgggacctgaaaaatcatgagaggctggtgtttatctttcagccccatttctccctgcagtatcagtcctgttgccgccactatccagaaacggaccactttctgtttgtgctgatgagggtacactaaaatgctggttctcaacctgcaggatggtctgtaattctggatctcctgtatttgttccctgtcgagcttcactattcatattctgctgctgttgagttgctacgtcttgatgttgctcctgcaccatgttagccatggctgctgagacttgaggggccaggtttggcctaacaggaaggccagccaaagatgggaatggctgtacactagatgctgatggatgtattgcttgtccgggaagtccaaacattggtaccgtgtttcttccaggcatcccaagaccttgtgctgtcgtgcctgggatcatcgagcaagggaagtgagcaccaggcatggacggaaagggaaccgctgggctgctgttcatgtcgaagacacccatcccataccccaatcccatgccgagatgagggaaatgagctatttgggggatttgcaagtgctgcatggttggtggcagcagcattggaggaatgcacagcccaattcccatggacatcatctgaacttgaagctgaagggttttgaggtactcaatcgcttcgtctagcattgaggctttgtcaatcttgttgcagttggggatgag

SEQ ID NO: 31070 - DNA, 1001 bp, Setaria italica
  Peptide Sequence Number=SeqID_97044
aatgtttggaaggaaagacatattgatccaccaagacgttctagtttgtaagcaagaaaaactactcaaggaaaactgcactggctgttaagacttgcagcttgtaaccaggttgcacctaccatctatattttacacaaaactttcgagcatcttagctcactaaagctaggcctcctgccaacaattccatctcgattgattgggctctcttgtcaagtgatagatcagcttcgtggatcttgaaacacggtaagttgtttccaggatgactagctaattttcacatatggagcttgttagttgggacctgaaaatcatgagaggctggtgtttatctttcagccccatttctccctgcagtatcagtcctgttgccgccactatccagaaacggaccactttctgtttgtgctgatgagggtacactaaaatgctggttctcaacctgcaggatggtctgtaattctggatctcctgtatttgttccctgtcgagcttcactattcatattctgctgctgttgagttgctacgtcttgatgttgctccgtgtttcttccaggcatcccaagaccttgtgctgtcgtgcctgggatcatcgagcaagggaagtgagcaccaggcatggacggaaagggaaccgctgggctgctgttcatgtcgaagacacccatcccataccccaatcccatgccgagatgagggaaatgagctatttgggggatttgcaagtgctgcatggttggtggcagcagcattggaggaatgcacagcccacttcccatggacatcatctgaacttgaagctgaagggttttgaggtactcaatcgcttcgtctagcattgaggctttgtcaatcttgttgcagttggggatgagttcttgcagggcgcgcattttctcgttgatcctgtctcttctcctcctttctgacaaattgtgcacctcggcggtgcggctgcgcttcgtgcctctgctgccaagaatacttactgga

SEQ ID NO: 31071 - DNA, 807 bp, Setaria italica
  Peptide Sequence Number=SeqID_97045
gagtttctgtacctcctaatccaagaccaaccgaaagaaagaaatcagctgagccttcagaaaaaagagcacataagaaagcagccttttgcagcatctcctgacatgtactgattccgagaacctgacataacatctgctcagtcaccttacctatgccacctatctttcttataggcaatgtagatacaaatgtcaatacagcttcccggtcatttggcaaaataaactgtccattgggcttgttaatatcagaacaaacctttgcaatcatgcggtttggagcaaccccagcactacatgttagaccagtttcctgatgaatggcagccctaagttcagtagcaacctcctctcctgtaatgcctctctcaatgcagacatttgttatattgaggtatgcttcatctagacttgttgcaatgaagctgggatcgtatctctggaaaacttttcttgtcagctcactataatgagtgtacctctcaaaatttggccggaacaaaaaccaagccaggacatagtttacatccaataaaaccaggcattgctgcacgaacaccctaaaattttcgtgcctcataactggcagtagctatcatagacatactaccaactgctaatggttttcccttcaaggatggatcctccaatgtctcaacagcagcataaaaggcatccatgtcagtgtgaagccatatctttgaaagatcccgtgaagcctccaactccaacattttcttttcagcaaccttctgaaaatgtgatatgtcattatcagtcagtgttgcacactgtgcacggaga

SEQ ID NO: 31072 - DNA, 539 bp, Setaria italica
  misc_feature (1)..(25): n is a, c, g, or t
  Peptide Sequence Number=SeqID_97046
nnnnnnnnnnnnnnnnnnnnnnnnnacttaattgaaaaaatcaaatttgtcacaagaaacattcacagtgaaaccagtctaatgcatcaggaactagatggagagccttttcaagagatactctgctacaagaaacattctattaaggaacacaataaaaggagcttgggtgtcaaaatgatccatgggacatttttctgcagcaatcaagaacatacacacagcatcccacgattagggacatgatgcacgcggttcaggagaaatatgtgcggatatcaagaggccaccacggtgatcctgaatacattgcaaaaggatcgtcgatccatcttaatggcagtctactcgggtatgttcatcggaggctccaggctctccacaagagtccgcaggtccaaatccttaccctcaaacttcttgatgaaagggtgattcaagagttctgaagcagacatcctctctgctggatccttctgtatgcaagaggagataaatgagcagaattctggagagaactgatctgcaggtgcagaagg

SEQ ID NO: 31073 - DNA, 1528 bp, Setaria italica
  Peptide Sequence Number=SeqID_97047
atctcagaagtcgaaattgacgtttaagattactcgaaatgcgtcatatttgacctcaaaacgtctgtatcctcctcgcagaacactggcaagcatgttttgaatattcagtttgattcatcccttgctaataagaaaaaggtaaaacacagcttcacaatcacaaggcccgtcgcaacaatagctacaataaggcgaccagaaggaatgctgcatgattccctctattcttatgctcaaacagtcaaaagggacttgaccatacaatgatgttctggcacgttcatgtggaggttgcagttcaggagaatatgtgctgatgccagatgcctgatgccaagagccgcctcgaccctgaaacaacaaaagactcaatacccctgaaggctgacgacatgattactcgggtatattcattggaggttcgaggctctccacaagtatccgtaggtctaaatccttatcctcgaacttcttcaggaaagggtgattcaagagttctgcagcagacatccgctgagctggatccttttgtatgcaagaggagataaatgagcagaattctggagagaactgatctgcaggtgcagaaggtggtggctgatcgacaatagcctccagtagttcataaaagcttgaccaaccttctccttctgaaggtatataggggaatcgcccaattgcacactcaagtattactaagcccaaactccatatgtcactcttgtagtcatacgagctcccactaatgcgttcaggcgccatatagttgtaggttccaacaaaagtatctcgctgacccactgagcttgctagcacggcacttaccccgaagtcagtaatcttgacttcccctttacggttgactaacaagttagaaggctttatgtccctgtgaatcacgtgcctttcatgatgaagatataataaaccctccaatacctgcttacaaagtaccgcaaggtatggctccagaactgtcttcacttgcttaatgatgtctgcaagtgatccacgatccatgtactcaagaacaagatatattacaccattgtggtaaaaagattgatggcacaaaactatatgagggctctgtgttgcctggtttattttgagctcttgtactatttgtttgcgaactgactcctgaatgttcatttgaataccctttaaggcatacaatgtccccacccatttgtgccgcactagctggacaacaccaccactccctttaccaatgacttgaatcatctcaagatcatccattgataactgtacatcttccactttcaggtttgtcgattcatcttcatctccattttcctcggaggtaagccgcaagccgctctgattaaggcgcagttcgccatccttgaatgtaccactcgccgtcaggaacttgtcgacggggatctcctgcgccggcacggagagcttgagctccttgagcggcttcttccccttcatggcctcgtcgtcgtcggcgctgtagggtttgggacgggactggctggctgctcgtgctcgg

SEQ ID NO: 31074 - DNA, 596 bp, Setaria italica
  Peptide Sequence Number=SeqID_97048
cactggtcactaggattaaagacgtgtaacttaggatataagcacattgaatcagatagcagtactccttccgtttaacagacttcataggaccacacgttcttttgaccagactgtcaatgagactacaattttaagaactatcttgataaagcatgttaattttctttctgttgtaaaactacacttggttgcttgttccagtcaacagattctatacacctatgatagtcatggtattttgtgccacgtggactggatgcgttgacctatgacgtgctggctgacatggtgtaggcagattgaagccattccgaggatcccattgccattttagtcttacacgttcactacatgcaacatcatcaggacagggataaacttttcctaatataactatgatacaatggtattctgacttacctctgaaaatttctctgaaagatacgcaagactgtaagtggataagtagaattaaataacttagaaacataaaaaatagaaaatgaataattaaacttatttgtagcaaccaaaatcctgtaatacttggtactggggtctattccttttgtttttaatggctatttttttca

SEQ ID NO: 31075 - DNA, 327 bp, Setaria italica
  Peptide Sequence Number=SeqID_97049
gcaatggagaaaggcggcggcggaggcggcgacgacccggcgacgagggcggccggtggcatgtgcgaccggttcctgacgttcctgaccaggaacttgacgatgagcagggtgaagagcatcgccgatggcccgaagaatggcgccggcgccggccaacctgcgatggagagggcagaggagggcgaggaggaagacgagttcgccattccaatcgagagggccgagttcgactacgagttcggcggcggccatggcgacggagggtacagcagcgtggcgaccatccttgaggagagcgccgcaatgacgacgacgacgacaagg

SEQ ID NO: 31076 - DNA, 595 bp, Setaria italica
  Peptide Sequence Number=SeqID_97050
ccatacagttaatacaaactagtttttagtttatgctataactgccatattgaatctactatctactttgttcggtataactgtcaaacctaaagcaacagaagggccatgttctctactcccagaatgtaggaaattaacagtggatattaagtgtgccaaaaaatatgcagattctgatgagtatcagaactgaaggaatttcatagggagcttaatgcattctaaagactattatgaaattcccacattctaaacaagccctaaacaaacagcttattcatgaagacgaccttcaagactgcttaaggaagggttttctaggacgaaaccaggcatatggcgtccggttggttctgccttccttgagcttctccatgtacggaatttcttccacaacatcagattccaaatggaacacagatacccaatatggtttgttgcaagctatacccgcatagtagatgcaattcctcttgatcacaggaaactcctttgcagagagggcaaaggtgtcgcctctgcccacaaacagtgagtggtcaccaaggtctctcaccctctcatggagctccaagcgctggttaggcgtcca

SEQ ID NO: 31077 - DNA, 315 bp, Setaria italica
  Peptide Sequence Number=SeqID_97051
ctgaacacatcgaggaaaaaccaaactccaagatggtgaggacgaggaggaggtcggtgctgctgctcctcctcgccctcacggtgctctccccgctcgcgctctacaccagcagcctctctgcggcgctcaaccccacccaaacgcgggatttccctggagaaatcacgaatcagggccgtggcgtcaaggcagacaaggctggaatgcgcttcctctggaaactgtgagctctttgaaagaacctgtcggcatcgtcttctcggaggaactggacggctggcgaaagatcgactggatccgaggccaagatgg

SEQ ID NO: 31078 - DNA, 393 bp, Setaria italica
  misc_feature (252)..(252): n is a, c, g, or t
  Peptide Sequence Number=SeqID_97052
gacatgagcaaagccggccatgcatctattcaagtttcattaggagaaagaacatggccgcctgtttctgggtactcttttgtttgctggttccaatttcagaacttctttaaaggccagccgaaggaagcagaaaaaacatctaaaggggcctatggtaaaaggagcgggcatgttttgcgcatgttttctgtaggtgcagtggatgatgccaacactctatatgctgaactttatctacatgataatggngtttttactatatctacgggcagttcaagttcattgtcatttcctggcattgaaatggaagaaggaaaatggcatcatcttgctgttgttcatagtaagccaaatgcactagctggtcttttccaagcaagtgtagctagc

SEQ ID NO: 31079 - DNA, 406 bp, Setaria italica
  misc_feature (338)..(338): n is a, c, g, or t
  misc_feature (399)..(399): n is a, c, g, or t
  Peptide Sequence Number=SeqID_97053
caaaggatgggaatgccttgtcaaggcatagtgccgagtcctccatcaactccacagttgatttgaaagagtccccagagaggtcatcagtggcttccccgtcagcatcatcctcatccttcttcaaaagtctttccgaaagtagaagtctaaaattcagcggcttcagttctcctccaacaactactagtacccatatagaagctttcagggtatttgcagccacatggaatgtagctggaaagactccgggcatgggtctcaatctgaatgatttcttgccttctgatgactactcagacatttatgtgttagggttccaagaagtcgtccccctnaacgccggcaacgtccttgtgatcgaggacaacgagccggcgtcgagatggctcgccctanatcaacc

SEQ ID NO: 31080 - DNA, 263 bp, Setaria italica
  Peptide Sequence Number=SeqID_97054
ggaccgctacgcgctcgccgaggcgcacgcctgcagccggagccgccggggctcgcgctgcccttcgaccctccggcgcaggctccgcgcggccagccctcgcacctccagttcggcgcgctgtccggatccgagccggcgtcgccggccgactagcctccccgcggcgtccccgagcagctgccgaagaagtccctggtgctggagacggaggagatcgggcgagcggggcggcggcggcgttgcgggtgcgtgacgcgccg

SEQ ID NO: 31081 - DNA, 937 bp, Setaria italica
  misc_feature (893)..(937): n is a, c, g, or t
  Peptide Sequence Number=SeqID_97055
ggtagatcatcaagctaaagaacgcccagtttcgcgttaagaggaatcattttctgcaagagctctacgagttggtacggattccatccatcatggtatgcctacatcatttccaatgggaaattctgtcaagggcattccatcactgtcaataaggcacagtcagcatccaagatccgttagttgtcaagcattctcactggcatcattcagctacccggagctgacttccaaacccagatggtggtggagaactcttgcttgtgtgccatacttgctgccactccacaacatgtggtcttatgctgacgtgatctaccagctgcacacttacttgcaagggttttcgctgctgtacaccttcatcgatactatgacgctgtgtcctgggtggctctttctggtgatatttatgacggtgtacttcttcgttgtgaggcggaagtggtcaccgcactttctgaggttccatgtgattctggctatcctcctggacactggctcccaagcagtggccaccatgtgtacctggatgccaagcattgtgtatcaggggaaaccaatgcagtacttctggatgtctattgccttcatgcagatcttcacagtgcttgagtgtatgcggtgtgctctctgtggaatgtacccagatgtcccgttcatatcccacactgccttcattcactctgatctgaatctgttcagatagatgcttactatacaaggtccaggatataagaagggtggttttttgaagtagctacttacagttctagagacaatgttttgttcatattgaagggtcttgtataattcttattatgaccagctcgtacaacagattcgaacactgcattttggtttcctcttttaatatttcctttcttgaagcnnnnnnnnnnnnnnnnnnnnnnnnnnnnnnnnnnnnnnnnnnnnn

SEQ ID NO: 31082 - DNA, 448 bp, Setaria italica
  Peptide Sequence Number=SeqID_97056
tcggttgcatctgcatctcgagcaccacgggcggctggagcagtggcggcccgattcaccggcggcccgattcaagctcaactgattcttctttgtgtctggcctactcattgttgcacggattgggggcgatttcttcctcagggacgggagattgggcttcaatttgggatggatttatctggtttggccaaccctaaccctacggcgagcttaatggagggaggcggaagagggcgggagtttgccgccgagaggaatcggagcgcgctaaacttttgcggtcttttggcttgcgcgggagaaagaggggcgggagaagctgaggcgcgcggtggccatggcgtgtcgtggcccatggccgccggtgatcaccggagacgtgagtggacagcaaggaatcggaaaaggggggttttgggaatcgcggaggtaagtttcctcgcga

SEQ ID NO: 31083 - DNA, 341 bp, Setaria italica
  Peptide Sequence Number=SeqID_97057
tttattaagttcaatcaatgctgatattatggaggggaagaagatctgtgcgaggaacaaaggggaaagtttctccgtgtcaaagatttggcaatggtctaatctgaagggcaagctacctgctggttcggattagaccattgccaaagtttctccgtgtcaaagatttggcaatggtctaatctgaagggcaagctacctgctggttcggatgaatgttcggatgccgggagccttccatggatgaagagaggaggtgccgcggatacatcaaacatatgactctgtactagtgtactttgatcatctctaataaaaagaaacattagctactatcaaag

SEQ ID NO: 31084 - DNA, 1036 bp, Setaria italica
  Peptide Sequence Number=SeqID_97058
taccggactaccggactgctgccgctctgcggccacgccttccacctcaactgcatcgacacgtggctgctctccaactccacctgcccgctctgccgcggggtgctcttcgtccctgggctcatgggcgaggacgacaccatgttcgacttcgaggagaggctggaggaagggaggctgtcggaggactgcgacgacgggtttggattgcctgggcagaaggcttcagggctggcacagacgccggtggctgagaagagggtgttccccgtgaggctggggaagttcaagaatgtcggaacacagggtcccgtgcaaggtggcaatgctgacgtcaatgccagtgtgttgagtagggatcaaggggagagcagcagcagcagcctggatggaaggagatgcttctccatgggcacctatcagtatgttcttggcacttctgagctccgggtagctctccagcctggctggaataggaatggtgctggtggtgcgatgaggggaagacctgctggtttaagttcaatcaatgctgatattatggaggggaagaagatctgtgcgaggaacaaaggggaaagtttctccgtgtcaaagatttggcaatggtctaatctgaagggcaagctacctgctggttcggatgaatgttcggatgccgggagccttccatggatgaagagaggaggtgccgcggatacatcaaacatatgactctgtactagtgtactttgatagtagctaatgtttctttttattagagatgatcactcaattcctcacctgtagtcatttttcttgcctaattttcatatgctgattttgattggagtgtcaatctcattgggggcttaacttttggtagtcatgccagcttagtatgttgcaccatgtagattccaatcacttagaatgatgttattctggcctgccataatttttgtgttgatctgatgctgcaatttatatctctgcaatttctgatgtgctgatcagagtatagttagcattgttcctaaaaataaataaaccttaa

SEQ ID NO: 31085 - DNA, 856 bp, Setaria italica
  Peptide Sequence Number=SeqID_97059
cctatagactccaacacgatacacgggccaatggcccaaaagacggtggcgtcacctgacatattctggatatccacttgtttcatcgatttccattgactccaatcgaattttaaggtgggaacagttccattggaagctccatgaaattttgtttccatccatataaagaaagcccaaaacggacaccatatgcgacctaggcgtcatttttagtacgtgctgctcctggactccgagacgggcttgaacttgagttgttttgggcctccacctcggagactcgaaccgaattagcctcgggcctccttcttgacttggacacccttggtggcctctttcccctctataccatgtgccaaacatggtcgtatgcatgggtgtcatgtcctcatcacgtagaccatcttctgtccactcctaatgatctgatgtaagtaacaaaatcattcaccttcacatttcagcaaagtacagcaatgatctacagattggacaactataactttgttgcctttgttcttttcacatgccgcccatccctttttggccgtggtcctcagtccctcacctccctccatgcttcctgcaaaggggcaaatgatccctcacctccctccttgcttcagatccgcacgacgttgggatcctcgatgtcattggtggcctgttggtggcccggtcaagcaaggccggcacggcggcggctagcccgagccctccgacccctccgcggctagcgtgggtgtggtggtgccccatcccgctcgagcgctgccctcacgaggccctcctagttgcccgctgcccgatcgcacctccagcgcctggactatgccgccatcgtgcatggtgg

SEQ ID NO: 31086 - DNA, 587 bp, Setaria italica
  Peptide Sequence Number=SeqID_97060
gagctgttgcccgaagccggcaacattcaggtcgtcgcgggcaagccgatcgttgccgtccaggtgacacggttcttaggtggaggatttgccattggtctccagattagccactgcatcgccgatggcttcggcatgatccagttcctcaaggccatagctgacatggcacggggccagagcgccccaacggcgcttcccgtgtgggaaaggcatctgctgatggcccgtgagccgccggacaccgcctacgtgcaacaaaaaactgatgtccccttctcaagaacgctacaggtgagacgccgccgagcatggtttaccggcacttcttcttcggcccggcggaggtgtccgctctgcgaagccacgtcccaggggatctcggagcgtcatgcacccgattcgagctgctaacggcggcgatctggcggtgccgggcggcggtgtggggcttcaacgacgaccaccgcgccgtcctcgccttctccgcgaacgtgcggcggaggtgggagcacatcccgcgagggtactacggcaacgccctcgtctaccacgtcgtggacgccgccgccggcgagctgcgccgt

SEQ ID NO: 31087 - DNA, 253 bp, Setaria italica
  Peptide Sequence Number=SeqID_97061
gcagtaagcagagcactagcagtcggcctccccctaccccgcccgccgccgccgtcgccgtcgccagccatggggtacacgaaggaccagctcctcgcgcgcctccaggagctcaagattgacttcacatgctatgatcaccctgttgtgttgacagtggaggaacaggcgaaacatgttggccatttaggaggtgctctgagtaaaaatttgctcttgaaggacaagaagcatcggttatatgttgtttctg

SEQ ID NO: 31088 - DNA, 270 bp, Setaria italica
  misc_feature (235)..(235): n is a, c, g, or t
  Peptide Sequence Number=SeqID_97062
attgcttgcaaccagggaagcatataggaaactgcatatgctttatttgttagccaagtattatagtgatgcttgccagatatgtacatttacccctgttttcgtttcatcctatggtagaacccctgtctaatggagtctgaatatcaagctaaaagagcaccatcttaagaataacgataatagtacattaaagaaattgagtcaacaacccgtacttgttattttaaaaacncctgaccgtttctaaagagtgtaaagagtcagtaa

SEQ ID NO: 31089 - DNA, 270 bp, Setaria italica
  misc_feature (244)..(244): n is a, c, g, or t
  misc_feature (256)..(270): n is a, c, g, or t
  Peptide Sequence Number=SeqID_97063
gttcctttcatcgtttcgtgcttgctgtttctgcttggatttcgtggagtgtatggaaagctggaagcttccagttagcgtccactgcttgcggttaaactgcgtgaaaatggcccgtagtttgttctgtttatggcacgtttgactaggccaaatatgctgttgcttcttccttagcttacctgctcatgtctgcaatgaattttgtcgatgattttttaggggaaaaaaaaaaaaaaaaaanaaaaaaaaaaannnnnnnnnnnnnnn

SEQ ID NO: 31090 - DNA, 555 bp, Setaria italica
  Peptide Sequence Number=SeqID_97064
aagaggcaatattggctgcaatggagtccttgcaaatgatgtagctggatttactagtatcagaaccaaatcaatttgtggattacgagctgccactgccactgcaaggcatccaccaaatgaatctccaacaaggtatattggtctgtttggtgataaatcatgctcatgctcgatagtattttcgacggtttgtagcaacccttcaaatggcgtacgatcattgattggtatatgcaagcaacgaacctcgaatactttgcccaacgacttgtggtgcaggatgagccccatcccgacgccatccgttcctggcaagaagagcagcagcggcgcgtcgtccaccgccgggcggccgcactcgacggggcagaaccagcgcggcgggccgccgtcgtccctggacacggccttggccgccgcgaagtagtccttgacggtgacgctgccgaagccgtcgtcgtagaggacgtctagccccttcttctcatcctcgtccttcaccactggcacatcggccttatcctccttcacctactccatcctctccacggg

SEQ ID NO: 31091 - DNA, 300 bp, Setaria italica
  Peptide Sequence Number=SeqID_97065
catcaattctgattctgagggtgctggcactcgatcatacagctaccgtgttgttatgcaaacgggtgatgctgagctagaaatgagagggcgatgcagtgctggtcagaaggtgcttgcttctctcataatcagactagcactggcggaaacattctgtctgaactgtggcatattggccttggatgagccgactacgaatctagatggcccaaatgcagagagccttgctactgcgctgttgagaataatggaggccaggaaagggcaggagaacttccagctgattgtaatcaccca

SEQ ID NO: 31092 - DNA, 456 bp, Setaria italica
  Peptide Sequence Number=SeqID_97066
aaaatggtggcgccatttcggcatctgttgttgccttctctatagcaggcatgtcgacgatgccggagccgccgcacgtcctggccgtggacgatagcatcgtcgaccgtgcggtcatctccaggctcctccgcagctccaaataccgagttacgacggtggacagtggcaagagagcgttggaggttctgagcctggtaagctcttgtgacttttgttgtatgtagtgccgccatggctgtgctgtttcgtcaatcgtcagtgaaaagaaaggaaagagaagagaagagaagagaaggaagaagaagactgaacaatttgtgtgtgcgcgtgttgaatgttgatgaagcaggatcgcagtgtgcacatgatcatcacggattgccggagatgagcggctacgacctgctgaagcgtgtgaaggagtcggcggatcgtgcgggagatcccggtggt

SEQ ID NO: 31093 - DNA, 298 bp, Setaria italica
  Peptide Sequence Number=SeqID_97067
ggaggggttgggtgctgggtttaaaactttttactttgaacaagaattgccttcattgtttccttttgcttgcatgtgctgagagagagtggatgtagcaggctgcaggacggcaggagaattgatggcaatggctttggcccgatttatagtcttcaacgccgcatccttgattcctttagagttgggtgggcgtagcgcgaatggtttgattattccgtttggtactgtgatgactgatgacaaggaccattgctgctgtcattgcttatgggaagtgtgctctagggatctgatg

SEQ ID NO: 31094 - DNA, 293 bp, Setaria italica
  Peptide Sequence Number=SeqID_97068
cgtttcgtctcgtcgcccacgtgggctcgccgtcgccgcgagctccaccttcctctccagtctccactccgccaccattccagcccgagcgcgatgtggcgggcgacgaggcggtggccgccgctgctgcggtgtctctcgtcggacgccgcctcctccagggcgccgcggcagcgggtggcggcgctttgggggaacggggactacgggaggctggggctgggcgcgctggagtcgcggtggagccccacggcctgccccttcttcctctcccgcgccgccgacccgccccg

SEQ ID NO: 31095 - DNA, 810 bp, Setaria italica
  Peptide Sequence Number=SeqID_97069
gctgctgacgccgcagctggagccggacgcgcccagcgccgccgggtccttggggcccttctggtactgcgcctcccggtggtcggcgaaggacaggaacgaccggatgctgctgcggtggccggagcgggagatggcggtgccgtcggcggccgaggcgacgtggcgggagtactggcggacgagcacgcaggcgtggatggccagcgcggcggcgcaggccacgccgcagatgaggaacagcgccgagaagctctgcacctccagcggggccgactgcaggttggtggtggcggactccgacgacgaccccaccgacagccacttgtcgtggatcctctgcaggtcgccgttctcagacagcgccaggatcgccgtcgacaggtccaccgccagcggcgagtcccgcgggaacgcgaagccccagccgctcttggtgaactcggcccccacgatcgcgaacttgtcgtggttggtcaggaagagctcgacgtacgggcgctcgtcgacgatggccacgacgccgcccttgcgagggccgagctccaacgcagcctcgtactcgtccggggagccgagcttcctgagcctcgacggggacacgccgagctcgtggacgaggtagctctcggcgaaggagcccacctggaacccgatgggctcgtcgctggcgatcaagctgtcgatgcccctgatcggggacgtgagctgctgcacggtgaggatggaggtcaggttggcagtgtagctggacttaatgatcattgcgttcaagagccacttaatgatcacgaaacgcccagcgtgctc

SEQ ID NO: 31096 - DNA, 1447 bp, Setaria italica
  Peptide Sequence Number=SeqID_97070
cgccaatggccgccaccgccgccgcccccaccgctcccgcccgcctcttcctcctccactccacccggtcctcgaaccccagcagctccgcctcagctcaagcccaggccctccgcgtcccgctccccggcctcacgctctcccgccgccgcatggctggggccccgccggcggcgatcgcgggcgcctccggcgactccgagcgggacctgagcgcctcggcgttatccgtggaggcccatgagtccgccgtcgcgccggattctgatttggaggcgaaggagccaagcgtggcgacgatactgacgagtttcgagaactcgttcgacatgtatggggctctcagcacgcctctgtatcaaacggccacctttaagcagccttcagcaacagattatggagcttatgattatactagaagtggtaaccctactcgtgatgttctccagagccttatggctaagcttgagaaggcagatcaagcattctgcttcaccagtggaatggcagcactagctgcagtaacacacctcattcagtctgggcaagaaattgttgctggagaggacatatatggtggatccgatcgtcttctctcgcaagttgcgccaagacatggaatcgtagtaaaacgagtggacacaaccaaaattagtgatgtagcgtctgcaattggtcccttgactaaattagtttggcttgaaagtcccaccaatcctcgccaacaaattactgacataaagaaaatctcagagatagctcattcacatggtgctcttgttttagtagacaacagcatcatgtctccagtgctctcccgccctatagaacttggagctgatattgtgatgcactcagctaccaaatttatagctggacatagtgatcttatggctggaattcttgcagtaaagggtgaaagcttggctaaagagatagcatttctgcaaaacgctgaaggatctggtttggctccttttgattgctggctttgcttgaggggaatcaaaaccatggctctgcgggtggagaaacagcaggctaatgcacagaagattgctgagttcctagcatctcacccgagggtcaagcaagtgaactatgctgggcttcctgaccatcctgggcggtctctacactattctcaggcaaagggagcaggctccgttctcagtttcctcaccggctcactggcgctctcaaagcacgtcgtcgaaaccaccaagtacttccacgtaacggtcagcttcgggagcgtgaagtcgctcatcagcctgccgtgcttcatgtcgcacgcgtccatccccgccgcggtccgcgaggagcgcggcctgacggacgacctcgtccggatatccgtgggcatcgaggacgtcgaggacctcatcgccgacctcgaccgcgcgctcaggaccggcccggcgtagcaggctgcaggatctcgctg

SEQ ID NO: 31097 - DNA, 456 bp, Setaria italica
  Peptide Sequence Number=SeqID_97071
tttgcgatctgaaacccattacttacaatcccaaatagttcacctacaacatgaataagcccaaaactggatctcatctgctccatcaattattttaagagatgttttctacgcgtttttccgcatatgcacaacacagttttttgttgagcttgtactgataacacattgctagcctgcttactcttactacagcatggccagtggcccaccaaattatttcactactgtcaccactaaccattacttaagtgacagactgcacaccaaattatctcacgaaggcaaacgctctgagaatcactaaaattgacaccggctgtccaaatctcactatactaccacccgcccttcaattaaagagtcacaaaatcctaagttcacaaaactccaatcaaaaggctttactacattctgaaatcctactgacaacaaagcactacccatttctgcctt

SEQ ID NO: 31098 - DNA, 780 bp, Setaria italica
  Peptide Sequence Number=SeqID_97072
taggtttttggtacggtctactaattgggttgaagagtgtgatataccactttcgcaggaatcgagaattttgccgattaaggattggaattggacggccacctggccagatggatcctaaagcttttgttcttcagaagtttaataggactggtcgcgaacggattgattcagccataaaagagggtgttaacattctgaagatggtggccaccaagggtttgacagaggctgcaagattgtcaaatgcagatcagaagtataagcatctgagatcacatgatcttcaagactgaaaatgatgagactctgcttatctggggaattgttctttcagcatgcctcttgatgcccctcatgctccagtacttctattggatggctggattgggaatctagtatacccaaatgttctccctgatctctgcagcatacgtctctttggtgctggatatggagttttcgatgtttctcggtggtcaatttcagttgactcgacagttgttgatgttgaactggtgatccaatttcaaagcttctgattaagttagaagaaagcatcttttgaattagttttgttcattttggggaaatcaagtttctcattaccgcatggtgatctggggatgctgttgttgtggtagcacattactttggtttgcaatgggcaccagtgtaatgtgaatcttgtaaatataaaatgttgagccatttttccatacatcacattagcagagatgctacgacaataaatattccttctatttttctttatttttt

SEQ ID NO: 31099 - DNA, 958 bp, Setaria italica
  Peptide Sequence Number=SeqID_97073
cccaatacaaccatggttatttatcggtcttggcaaccctggtgagaagtaccaatccaccaggcacaatgtggggtttgatatgatagacgcatttgcagagtctcagggtataccactgactacacattacttcaaagcactatttggtgaagggatggttgatgggatccctgttcttcttgccaagcctcagacttatatgaatctcagtggagaatctgttggtccacttgctgcctattataaactgccacttaatcgcgtcctggtggcatttgatgacatggacttaccatgtggagttctccgtttacagccaaaaaggaggttttggacggcacaatgggttgaagagtgtgatataccactttcgcaggaatcgagaattttgccgattaaggattggaattggacggccacctggccagatggatcctaaagcttttgttcttcagaagtttaataggactggtcgcgaacgggtaaacatctcctcacaagtaatatgtacctttttcgttgttgttagcccctatctcccaggattaacactcttaatgctcacacagtgtttagctagatttgagccaacctcttgaagatggagggccttaagcttccttagtgtgccatccatactgttgaccatttaacactgtcactgatacgtggagtcacctgagtcattgacactggaccagggtggcaaattattaatttattttccgttatgttttgtgggaaaatcttccacctgacaaaagtagtttgtcttttggaaggaaaaccatccttgctatgcttatatgcatatatcagcagagttgtaactactttatcagttcaaaaatttggccatcatcttagagcatctccaacagactccattttttgctctctatttgacctagtttgttggcaagcttttaggagacacttgtctaatgaacttgat

SEQ ID NO: 31100 - DNA, 871 bp, Setaria italica
  Peptide Sequence Number=SeqID_97074
tcccaggcataatgctccgtagcgccatgtaaaggacgttgacaagaaggtttgaagctcctctttcccatgatcatctcaataagaatgacaccgaaactatatatgtcagacttagttgaggccctacccaccaacaagtactcaggagccacataaccactacacaaggaaataagacgaagttattagcaagaaaaactgggatggataagaacattagcaagaatttcgtggtggatgatggagccatggcctcgtgggagtgccaatattcccatcgttgccaacctgtttgcattgcgtgtgtactggtgtgttcatagctgcacgcgtacttgttccatgtaatttaaaaaggaaatcaaaataggatgagtgtgtgcttaataggtcttacagtgtgccctcaatcacctcttcattcaaagcactgcccagtaatctggctatgccaaaatctgtaatcttaggattcatgtcagaatccaagagaacattgctaggctttagatccctatgtagaatggtaacgccacagtacttatgtagataagcaacaccctgtgcaatccctaaaataatactgaagcgccgagtccagtcaagcagcatccctgttcctgcaccgcttatatatttgtccagaccaccatttgggatgtactcataaaccaaaatcatctcccttctttcagtgcaatatcctagaagcttaactatatttatatgttgaaacttcagaaggcagtaaatttcagcttcaaaacatcgtgcttgaccttttcggtatgaaattgaacctgaagtagaatatcttttgattgcgacaagtcgtccatgtatttacccttataaacggtagcggaac

SEQ ID NO: 31101 - DNA, 260 bp, Setaria italica
  Peptide Sequence Number=SeqID_97075
tgggagaggttcagcgtggtgaggttggcgaggttggtgaggttggccgggatagggccgaagatcttgttgtactccaggtggagctgcttgaggcccggggagaggcggccgatgagcggcggcatcatgccggcgatctcgttccaggagacgccgagctctttcaggctggtgcagtttgtcagggaggcaaagaacgggtcaaggttggtgttgttctctggactctctaggtagttgtatgagaggtagaggag

SEQ ID NO: 31102 - DNA, 280 bp, Setaria italica
  Peptide Sequence Number=SeqID_97076
ctccaggcccgaaagcaaaacggggaggagcacgccatggagaaaaaacctcgagccgccgccggcggcggcgacgacggaggcggcagccgcggcgaggcctccggaagctctgaaggtggaggtctggtcgaaaggctccccgaggcgctcctggtggaggtgctcggccggctcgaggtggacgacgcctgctccgccgctgcgtcctgccgggcgctccgcggcgccgcttccgccgccatctccgccatcacaaccatcgatctctctgcgtttg

SEQ ID NO: 31103 - DNA, 278 bp, Setaria italica
  Peptide Sequence Number=SeqID_97077
gcgtgagggagaggggactcctcgctccgaggcgtgcaaccgtttccgcgcgtgtcaggggcgccacggcgaatcacagcttgctcggtggcggcgccgccgccgcgataaaagagtggggaggggagaagaaggcgccggcgccggcgccagaggccgatcggcgagtgggacagagagaagtggggagaagagccagtgaaggccggatcgcgaggctgggaagcaggggatcaggggaggcggtgatggacgagcggcggcgacctggacgtgga

SEQ ID NO: 31104 - DNA, 369 bp, Setaria italica
  Peptide Sequence Number=SeqID_97078
ggccgtcaactaccttgaccgcttcctctcactataccagcttccggaagacaaggcttggatgacgcagctgctgtccgtggcgtgcttgtccctggctgccaagatggaggagacctacgttcttccgtctctcgacctgcaggtcggggatgcacggtacgtgttcgaggcgaagacgatccagaggatggagctcctcgtcctcagcacgctcaaatggaggatgcaagcggtcactcccttctcgtacatcgactacttcctccatcgcctcaacggcggcgatgcgccgaacaggcgcgccgtccggcgatcggcagagctgatcctgtgcatagccagagggacgcactgcttagatttcag

SEQ ID NO: 31105 - DNA, 300 bp, Setaria italica
  Peptide Sequence Number=SeqID_97079
acgcagaacaatatatccatgaacgaaagcatcgttgctggcttagccgagcagcttcttgacagcctggaacctggcgtccttgtcgccgaacttggggccctggtagtactcgaggtagtccccgaacctgtacggcccagggtaggagagcgccgccgcgtccccctcgccgccggcgccaccacggcgtcggggccggggttgtagaacgtggccacggacaggcgccgtccctcgttcccgccgcgacgcggtgcacgacgctccggtacgcgccgccgctgatgacctcgatct

SEQ ID NO: 31106 - DNA, 333 bp, Setaria italica
  Peptide Sequence Number=SeqID_97080
taatacaatgccaaggacgacgtacattcatgaaccacgcataagaacaaaattaaagttagggagaagaaaagaagaagaagaagaagtgaataatggaaaaataatctcaaattaaagcagcgatcagtcgacgtagattgcgcatgtggccctgatctcgccgtcggtgccggtgcgcactccgatccttcccatgttgatcatggagacggcgaagtcggcgaagaagacgtcgacggaggaggcgttggtcatgagttggacgtaggcgccggagaggctgtcgttgagcagcgcggcgtcggaggcgagcagcgcccggtggttgta

SEQ ID NO: 31107 - DNA, 950 bp, Setaria italica
  Peptide Sequence Number=SeqID_97081
taggcttatagcccctttcaggttttgcatataggcttattgctactgataagcagtgataccactgttgaggacacgcaggagtcaatgcaagatttcacaggcatagctttttttactagattgaacagcatcctttatagacttatagctcctctcaaaaaggttttacatataggcttattgctactgataagcagtgataccattgttgagggcatgcagaaatcattgcaagattttactggccatttttcctcttattctgattgcaagattattgtatacatcactgaagacagtaagggtactaaaatgtttagtcttgaaatccatgtctccacaccatctgcatatgcccggacaaatcccttggcccttatttttttctggtggaattgttacttgttaaactgaagactgaattccaattataccacatccaattctagctcctgcatttcctgttgacttactgagttcatggccacccctccctaggtcatcaggatcagcatgaacaacaactgcccttcccagtatggaatgaggcccactcagtgaaatctgcaagtcccttatgaacacttctgcaactccatctttgttggctactatgtttcccaggtcacccacatgtcgttcgtcatcaaatggtgctccatggggcttattgtgaggattaaaatggggcccggtggagttgcagccgttggtggtgtcgccgaagacgtggatgtggaatccatgcctgcccggagccaggcccgtgaccttgcccctcacctcggtgtacccggtggaggggtcctggaagaagtggagggcaccggcgaccgtgctgttggcgccgcctccgatgagggcgacccccttgagtccgccggctttccctgccatgcttctgcgtccgtcgtgccggcactgattcggcttcgtcggctgacggc

SEQ ID NO: 31108 - DNA, 274 bp, Setaria italica
  Peptide Sequence Number=SeqID_97082
cttgctgagcctctccatgtgcagcctcctcttctttgcttgggcttcctgagcaattcaacatgagctaatcatcatcagataccaccaaaattgagataataaaccaacaaaatagttaagttctaacgcctcatttatgaagccccttcacaccactcataaaaggctcaagcctccaataaaaagtgaactgcaaatcacggagaaataacctagatgatgctaacaccgtcaagctaaactcgcaagcccaaatcgatctcaaacgtcg

SEQ ID NO: 31109 - DNA, 260 bp, Setaria italica
  Peptide Sequence Number=SeqID_97083
agggtctggctcgcgtacaccgcgccagggaagctggcggcgatgatggaagggaagagggaggccacgagcatcccgtgcacgacgcggccacgctggaacccgcacagctcccgggctacggcgtcgtcgaggtgcaccgggttgcggtcgccgctgaccgccgcgtacgccgccacgtccgcctccgtgaagcaccgccgctcgcgcagcgcgtggccgacactcagcaccgccggcggcggaggcgcggccgacgg

SEQ ID NO: 31110 - DNA, 413 bp, Setaria italica
  misc_feature (4)..(4): n is a, c, g, or t
  misc_feature (384)..(384): n is a, c, g, or t
  Peptide Sequence Number=SeqID_97084
tacngtcattccagactgcaatttgtatgcctagactctaactactgttatatggaacccatgttaggctagagtagtagagttatgattcactagcaaatgtagctccctaatcctggtcatcttggatatcctcaaaattagtgatatccctgaatcatccccccagatgatctaaggagttacttcatcactcaatccatttgcttctatgatccttctagttgcttgtcaatgccaacgtgcctatgcttgtcccagctatgtacccaccagtccatgcgttctgaaagttgaaaccaccggtgaccccgtcaacattgagtacctctccagcaaagaaaagatttggctgtttcttgctttccatcgtgccaagtgatntctctgaaattcggaacccctccggcagt

SEQ ID NO: 31111 - DNA, 306 bp, Setaria italica
  Peptide Sequence Number=SeqID_97085
acccttagataagaaacacagataagaacgaacacggtactctagttgttgatcttccctcggttgccgatgccggggctgttcccgggagccgtcggccgggagtccgtggtcgtcattggcatcccttcgccggcttgctctgtgcccgtcgcggagaccatttcttgctttgacgacgtgacgcctccatcgccttcgatgtcgacggcgacgccacccttgcatgatccttccttgacgtcgcacgttgtcgccgccatcagccgccttgcatcagcctggcttgagatgacaagaaagatc

SEQ ID NO: 31112 - DNA, 374 bp, Setaria italica
  Peptide Sequence Number=SeqID_97086
gggctgcgggggctcgcgtgcgggcgcgtgctcgtgtgtctcgcggagaaggacgtggtccgcgaccgcggccgcgcgtacgccgaggggctcgggccagcgggtgggccgggaaggtggaggtgctcgaggtggccgggcagggccactgcttccacctcgttgacttcgcgtgcgccgacgccgtcaagcaggacgacgccattgccagatttgttaacctgtaaaatcctcacgtgtgctatacattgcatttgcgcacaatgtttgtgtatcctctatgatttgcagtggatttgcctgaaaacctgcaggcgaattcatattgttatcgtttgcttatacagttacgttttaggaaaaaaaaaaaaaaa

SEQ ID NO: 31113 - DNA, 337 bp, Setaria italica
  misc_feature (292)..(337): n is a, c, g, or t
  Peptide Sequence Number=SeqID_97087
gcgaggatgggaaaacaatagaggcggttagtgttcacggtgctattcaaaagattttcaagtcagtcagcgaggtggaagaaaggaatggaagcttatggataggctctgtcatgtcaccttttcttggagtatatagattgtagaagcatttggattgtatgattgaatatgcaacgtgtatttgcatatatggtagtcgtttaatagaggaaataacattatacacgtgtatatgtatatttttcccaccatataatcaaatttatttgcaaaaattaaaaaaaaaaannnnnnnnnnnnnnnnnnnnnnnnnnnnnnnnnnnnnnnnnnnnnn

SEQ ID NO: 31114 - DNA, 1466 bp, Setaria italica
  misc_feature (1383)..(1466): n is a, c, g, or t
  Peptide Sequence Number=SeqID_97088
aagaaagcaatgccacaccggtagtagctcacctaaagcaaatctgcaccagcctgcgtcgttgcacagtgcacaatttactctactgcctcccctgcttcttcttcgtctccgtctctggcggcgatgcgcgcggaggtggtggtgctcgtcgcggccgcggccttcctgtcgctcgactcgctcagcgacgtcaggcggctcgagatagggaacggtgacgtcgagctggtcccgctcgacggcgccgcggggccggagagcatcgtcttcgacaagaccggcgaggggccgtacacgagcgtgtcggacgggcgggtcctcaggtggctggcggaggagcggcggtgggtggagcactcctgctcggcgccggagctgttggacagttgcagaggctctcaggacccgggccgggagcacgagtgtgggcgcccactgggcctcaagttcaacaacgagacgggggagctgtacgtcgcggacgcgtaccatgggctgagagtggtcgggccggatgatcacgtgtccaggccgctggtgccggagtggcaagggagccgcccgttcagcttcgccaacggcatcgagatcgactacgaaaccggagccatctacttcaccgagaccagtacaaggtttcagagaagggagtttttgaacattgttatatcgggtgacaatactggtagattgttaaaatatgacccaaagagcaatcaagtggaagtcttggttgatggtttatctttcgccaatggcttggcaatgagcaaagatggcacatacttgctcctagtagaaaccacaaccggcaagattctaaggtactggatcaagacaccaaaagcttcgaccctagaagaagttgcgcagctaccttggtttccggataacatcaagatgagccccagaggagggttctgggttggtctccatgccaagagagggaagatcgccgagtggtcgatttcttacccttgggtaaggagattgatactgaagttgccgatgcgccatgtccagcgtgcctcctggctcttgaatcagcttggccgtcaggttatagcgctgaggttgagcgaggatgggaaaacaatagaggcggttagtgttcacggtgctattcaaaaggttttcaagtcagtcagcgaggtggaagaaaggaatggaagcttatggattggctctgtcatgtcaccttttcttggagtatatagattgtagaagcatttggattgtatgattgaatatgcaacgtgtatatgcgtatatggtagtcgtttaatagaataacattatacacgtgtatatgcatatttttcccaccatataatcaaatttatttcaatttttctcgggtttgaacttaaaaaaaccctnnnnnnnnnnnnnnnnnnnnnnnnnnnnnnnnnnnnnnnnnnnnnnnnnnnnnnnnnnnnnnnnnnnnnnnnnnnnnnnnnnnn

SEQ ID NO: 31115 - DNA, 1285 bp, Setaria italica
  Peptide Sequence Number=SeqID_97089
gggctccgccgggggcccgcgtcgggccgccagggagcgggagaacacgctgctctccttcggccgcgccgccgcgcacgccgccgtcgccttcgtcgagttcgatgtccaggtcacaaaagatggctgcccaataatcttccatgatgacttcatcttaacacaaggaattggggctgtatatgaaaggcgtgtaactgatcttctcttggaagaattcctctcatatgggccacaaaaagaatctcgcaaggtctctaagcctttacttagacggacaggagatggtagagtccttaattggagtacagaagaagatgattccctttgcacattgcaagaggtctttgaatgtgtcagtcctcatctgggatttaacattgagctaaagttcgatgacaacgttctccatcacaagaaagaccttgaacgtgctcttcaagctatattgcaggttgtttttcagaatgctagggatagaccagtttttttctcatctttccatcctgatgcggctatgatgacacgggagctccaaagtttatatcctgtacttttcttaacagaaggagggacatccaaacaccatgattcaagaaggaactcactgaacaatgccattcaggtatgcttagagcatgatttgcatgggatcgtgtcagacgtcagaggcattctcaagaaccctgctgcagtcgtcagagcacaagaatccaaccttgcacttctcacttacgggcagctcaataacgtgtgggaagcagtctatgtccagtacctgatgggcataaacggcgtcatcgttgatcaggtggaggagatctcaaatgctgtggcggggttcagtaaaccagacctcaaccggagcagtgctggtgtggacggagcaacacatcaggccttctcgcagcagcagcttgggttcttgctccggcttatacctgaattgattgagcagcgacattgaaggtacattgatcataatacccaagtgaaatctcagctttgaccctcaagcgtatgaccggcattcgtcttcggtcgatggttgttcagataggacgagtctaacatcagtttgacagtttaggtggtatactttgtatgttgattgtgagtgcatagatgattccatacaggccaaacccagttccctgttagtacagccgaccatgatcgtggtcttgatacaaatatatctgttcacagaaactgttgtcaacaacagttataacaagagtgatgtactgatgtatgccatgtatcgttggaaagttacaagatt

SEQ ID NO: 31116 - DNA, 285 bp, Setaria italica
  Peptide Sequence Number=SeqID_97090
gatcacggtgatctcatgcaacagatgttcagccagagctacaggccgatgataccggagggcggccaccacgtcgacgacttcttcgccgacctcgccgagttggagtcagatcccatgagcctgatcttcccatgtggtgatccgggcagggagaaggcaacaacacccaaaggcttgggcgccgatccattgttcaacatgctggattggggtaccatggccaccaatgttgttgctacttctgcagggagctcatttgagcaaggggagagtggcctacta

SEQ ID NO: 31117 - DNA, 388 bp, Setaria italica
  Peptide Sequence Number=SeqID_97091
ctgccgccgccgacgacgacaaggaagaggtctccgaggaggacgtccacaagatgccgtacctgaaggcggtggtcctcgagggcctccggaagcacccaccggctcacttcgtgctgccgcacaaggccgcggaggacatggagatcggtgggtacctgatccccaagggcgcctcggtgaacttcatggtggccgagatgagcagggacgaacgggagtggaggaacccgacggagttctcgccggagcggttcctcccgggtgacgacggcgagggcgtggacgtgacgggcaccaaggggatcaggatgatgccgttcggcgtggggcgcaggatctgcgcggggatcggcgtcgccatgctgcacctcgagtacttcgtcga

SEQ ID NO: 31118 - DNA, 280 bp, Setaria italica
  Peptide Sequence Number=SeqID_97092
ccacacggatttgaaaccagagaatgttcttctggtttcaacaattaacccggccaaggatcctgtgcgctcaggtttcaccccaatccttgatcggcctgtggggagccagtatggcgggacagtcatcagtttcagtgagaagatgctaagaatgagagcaagacgtgcggtggcaaggatttcacagaggcgggtttcgcttggcgggattgcggctgaagtagagaaggagaggaaccttgatgggatcagcttgaagtgcaagattgtcgatttt

SEQ ID NO: 31119 - DNA, 898 bp, Setaria italica
  Peptide Sequence Number=SeqID_97093
gccggccgaggcggcccgagccccccagcgggtggaggcggaggtgagcacggagggcggcgagggcgaggggttgccgccgtcgtcgtcggggaggttgacggtggtgatgtcatggatgctggagcggcgcttgtccttgccgccggagttgaggcggatgaagtacttctgcgcgtggctggcgacctgcgtcggcgtccggctcgtcacgaagttgcgcgagatgttccgccagtcccctcggccgtacttcttcaggcccatcaagaacagcttgtgctcctcctccgtccatgggacgcccttcttgcgttcctggtcggggccgcgcccgcgcttgccggcgaccatgtagcaggagcgcttgaagcccaggccgccggcgtcgccgtcccagtcgaaggtgaacccggcgttctgcgccgcgccgccgccgtactgggggaagggcaggagccccgcctcgatgaagcagacgtcgttctcgaggtcgtcgaagtgcgcgacgacgtcgggcaccatcctcccgggcagcatcgcggcgacgcgctcccaccggtcgggcgcgtcccagtcgacccgtgccaacgcgcgctcgaacagtttgttctcctcctgcgtccacgccccgggaccgggcgctcgccggtccggcaggaacctcccggcggcctgccccgcgaagtagggcggcggcagcacctccatccacgactccatcatcgttctccaaactccggccggccgagagagcgccgccacctgccgatcagccggaccgaccaagatttcgcctttctttccctgtcaggggagcgcgtacttgggcggcggccgggagcggaggtccggggaggaggaggcggggaggtgggaacgggcggggaggaggggg

SEQ ID NO: 31120 - DNA, 350 bp, Setaria italica
  Peptide Sequence Number=SeqID_97094
ctgatattaccaaccaatgataatgctcaagagatccaattgctgtcaagactcttatggtggcgcagccaagcagataccctttggtccgtccctcccctcttcctgccgctcctcacgcttgcaacgccgccgctcctacttccatctagcggaacatagatccatccatccccggcctggattggctggttccttctgctgctaccaatctgaatccatccatcggcctcgattagttcattccttctgttggttcttcttctgtgctcaaggccatattcttgatagctgattgattgaatttgagggcagtttgtttttcaagattttgagggggtttttgtcca

SEQ ID NO: 31121 - DNA, 958 bp, Setaria italica
  Peptide Sequence Number=SeqID_97095
taggtttccttttagtacctaagttgtaaattttgtagtctattgttgaccagccctctaggaatcaaagacttcgatttcatggcagcttcaggcttcgttgccttcattggtttctgctcttgtactgggtttctgccattccattttcttatcactgatcgccattccgagtcaaatataccttgtaactgttcggcaactgcatggacatcatttcctggaggattatacttcatcgcatttgcgaatgtaagtctcacatctgctgcaaactcactggctgtaacatattgcttgtttgtgagtttcttcttaacagtacccaagtccattggattacagataacatcgaagtaatcaggaatcccgtaaagaacagggtcaactggtttatggaaaagccaaccacctttgtgatccataagcttcttcagaatttttccacacagccttgtcttgctaacattcatgctttcagccatgctcttggtgaatgattggtgctcaaatatggaatgtgatgtcacctcagatttttgggaggttatttctccaacctctgaatctgtactagaacgttctggttcactgcttatacaaactgccctcctctttttatactcttgtgagctcaaagtgttttgtgagaatacttgctttctggttaaccagtaacttcagacttgtcaatacctctcagatagccacacaacgcatcctctgtagggctggtgtccgctctgccgtggcagagagcgcggggctgccgcgcgagtcccgccccccgtaggggcctcccggccccctcccctcttcgcgttcccccgacctcctcagatcccacgacggcgcggggcgggtcggagataggcgcacgctaacaaagccgccgccgccgccgccgctgacgcagctgcagctcttcaccggcgagcgagcgggcggtgtgagggaa

SEQ ID NO: 31122 - DNA, 1807 bp, Setaria italica
  Peptide Sequence Number=SeqID_97096
aggaaagatggacaatcattcagctactgatgacactatcagacatccagacaaagataggtacaagtccaaatataataagcgcagtacaagccaaaagagcaatacgaatttcaaacatccggcttaacaagtaacaccatataactacaatatacactgatatctctctattttttcttttttagaaagtccaatcaagagcttcctgtgaatagcctatgaccacctaaaacatacagtggcacatgacaaccacaaaactgatggcgatgcccaaattattctactcccgacagagacattctggggcaactaggttagatgacacatcagaccacatgaactgacaccaattttgctccgcttatgatgttgcatggaggcggaatagattacatagcacacacataatcttacaatcccaggttaacagtctggataaaggtatgctattgacagcagctgatctctccttcctcgacatcggcattcagggaggttgacaaactgtcctccagttcttgttcaacctcttcctcaagatctttctttatgaacaggccaagtgcctccagtgggctccctaagccctgtggcaactcaatcccatggacaaaatctacgatcaatttgcttggaggattcaactgccacttttggcacaagttctccaggtccttcagaaagtcactattgtcaatatcaacggtcttcttcatcatgtgcagtgccagtcgtgcagcctttctttccttctcgcgcttcatcctcatttcttcctctagctttagttgtgcagcagcttcagcagcctttacctgtgcctcaattcttgctttctcttctagctgacttttttccagtctctccttttctaactgcaactttgcaaggtctacttccttcccatgatccagaagtgcattttgttgtgccttcacaattgttccagcaaaacgactcttgagcattgctatacgaagggctttacttggtgacaaaggttcaaggtgtaaataactttcctccccttgttcagaggaagcaagaggtgaagtagaattgcaagacggtgactcatttccatttgataaagcgcagctctcatttgattgtattcttgatattttatcattccccttggtgcaatccagtgaattatctatagagtgctcttggataccagctttgagagaggtattctcacagccacggacaaaaaatttaatttttactttggaggatattgcatttattgatggttcctttgccagtgaatttgagcatgtgaccagccctctaggaatcaaagacttcgatttcatggcagcttcaggcttcgttgccttcattggtttctgctcttgtactgggtttctgccattccattttcttatcactgatcgccattccgagtcaaatattctatttaactgttcggcaactgcatggacatcatttcctggaggattatacttcatcgcatttgcgaatgtaagtctcacatctgctgcaaactcactggctgtaacatattgcttgtttgtgagtttcttcttaacagtacccaagtccattggattacagataacatcgaagtaatcaggaatcccgtaaagaacagggtcaactggtttaagggaaggttagaacaaaactagtacctaccaaagttaacttaagttaactaaaaactacaactaggactagtaaacaataattagacttagtttagtagaagtttacttacttaaacaagtaacccaaagtaccaattaggaattaacaagaataaacaatacga

SEQ ID NO: 31123 - DNA, 803 bp, Setaria italica
  Peptide Sequence Number=SeqID_97097
acgaagactacggccgactcgccaagcctccagtactgcagctcggctacaaccagttgtcgggagcattccaactcagctgggtcagctaaagaagctcactgttcttgcccttcagtccaaccagctcactggcgcaataccggcatctctcggggacttgccggcactgacacggctggacttgagctccaatcaactcttcggctccattccttccaagcttgccgagatacctcagctttcaactctgaaccttcggaacaacacgctttcaggaagtgtcccatctggtctgaagaagttgcatgaggggtttcggtatgagaacaattcagagctatgtggagctcaatttgattctctgaaaccctgtcctgatgacagcaatgacgacggcaaaatgccccataaacccgaatcaacctctgtcaagccccaacaaattcaaaagacagctgacctcaacagaaattgcgacaatggaggttgctcaaaaccttcgacgctctctgcaggggctgttattgctggaacaatcatcattgtagctggagcagcagcctgcggcctgtctgtgttctcatggcaccgtcgccagaagcagaaggttggcagttctgttgagcatttggaaggccggcttagcctggaccagtcaaaggaaacatgtcagagaagtgcctcctcactgatcaatgttgagtactctagtggctgggacacatcatctgaggggtcacagcatggagcgaggctgtcgtcagagggctccccaagtgtgaggttcaatctcgaagagg

SEQ ID NO: 31124 - DNA, 494 bp, Setaria italica
  Peptide Sequence Number=SeqID_97098
cataataatatctatgaacctagaaaagccaaaatcacctacatggaacggagggagtacaattcatacgcatgagacgaacacattgcaaaaggtaccggctttccttcccctcgaagagtcagcggatttcgttcaggtctctctgacaaaataagtacttcaccagtcaccacaaagtcgagactaccgttggtgcacggttcagtgtcagaaaagggatcggctgtttcttcatcatgtacaaaatggcacctcgagtgcgttggagcagcgtcagtcatcaataatcttgccgccagcccatgttgtaaagctgtcctgtgaaaaatcaatttggctcagtcgaaactcagttgtgttgtcaagctcaagattcacagtatctgagggctccaaccgctgacactcttccaaatctttcttgaagtcctctgtgggcagttgggcataaacagccaagcgaggctttatcgctctgggttcatctccgg

SEQ ID NO: 31125 - DNA, 1191 bp, Setaria italica
  Peptide Sequence Number=SeqID_97099
tccccacccgcaccctccctctctccctgctcgcgcaggcaggcgacacagcgaggctaaaaccctagcgcgaggaggcgtaggcagggccagcggcttcgcgatgacggcgccggcggacaaggggaagaaggccaagaccgaggccgacggcggcgaggagaacgagcagatcgacggcgccctcgtcctctccatcgagaagctacaggagatccaggacgagctggagaaggtaaatgaggaagcaagtgacaaagttatggaggtggagcagaagtacagtgagattcgcagacctgtctatctcaagaggggtgacattatcaagacaatcccagatttctggctgacagcgtttatgagccatcccctactcagcgaacttctgactgaggaagatcagaagatattcaagtacttggattctgttgatgtggacgattctgatgtcaaggcaggatactccatccatcttaacttctccgagaatccatactttgaggacacaaagcttacaaagacctattccttcgctgatgatggaacaaccacaataaaagcctctcagattaagtggaaggaaggaatgggacctgttggaaatggtatcaacaagaagggcgccaagcgcccattggtagaggaaagttttttcacctggtttggtgatacagagctcaagagtcttgctgatggtgtgcaagatgaggtggcagagatcatcaaggaagacctgtggcctaatcctttgaaatacttcaacaatgaggttgaagatgagtttgaaggagacgaagaagatgatgaagatttggatggtgaggatggcgaggatgacgatgaggagaactgaaccctcagtgtcggatctggatggattctggaacagcatgtcagctgttggtgggggactgtggctctgaagggcggaattatgtgacccttttgcgagatttttttggttgcttgacttagttgggactcaccgtagggaactgtttaatgccttatgaagtcaaccaacttgaaaggagacctctatatcataatctggtatatctatgatgacggcaatttgaccttggtttggtgctggtgctgcagtcttgtttcgcgtcctttgtgcagttgtgcttgtgctttggtttcggcctgttgccttcaacagtgtgcttgtggtggcattgg

SEQ ID NO: 31126 - DNA, 456 bp, Setaria italica
  Peptide Sequence Number=SeqID_97100
actaccagacaagcatgacttgcaaacaaaagcattatcctgcattacatgagcaactatgcattctcagcaagcataaataagacgccaacgaacgcgggggcatgttgagaaggatgctttctgtggctttccactgagagcattcatcaatatcagccagttaccacttcatatacttggtacacacaatgatggtggaaaaccagtatacagtttggcatatagaagatgcttcaagtcacacattttctcaatctgcatagactcaaactcaacagagaagtatcctatgtcaacctcatcagtagaagagcccaggtgcaaattccatggaatcccacgaaggagtaagtgcctatccattgcatctgcaaagctgaaaacatattgggcaggcaacctgactctcctcttgaactgccacatgctgttgccttcttcgtcgatatcccg

SEQ ID NO: 31127 - DNA, 469 bp, Setaria italica
  Peptide Sequence Number=SeqID_97101
tgacatagccacagaagacatagtgactggatttcgcatccatgggcaagggtggcgctccatgtattgtacaatggagcatgacgcattctgtggcattgcaccgatcaaccttactgagcgcctccatcagattgtgcgttggtctggtgggtctctagagatgttcttctcccacaataacccattcattggtgggcgtcggatccaacctcttcagcgtgtctcctacctcaacatgacaatctacccagtcacatcagtcttcatcctgatctatgctctaagcccggtgatgtggcttatccctgatgaagtatacatccagagaccattcactaggtacgtcgtgtaccttcttgtaatcatcgtgatgattcacatgattggctggctcgagataaagtgggcgggggtcacatggctggactactggcgcaacgagcagttcttcatgatcggctcaaca

SEQ ID NO: 31128 - DNA, 438 bp, Setaria italica
  Peptide Sequence Number=SeqID_97102
gtgagtagttgaatatgggcactctgataagtttatcctatgtatattagccctcttgcagacttagttttgcatgttttcttgcttctctgctggaataagaggaaaatgaggttgtagtttccagatgacaggaatatatgtgtgggatgagatgtttcgggagtatgtgttctttgacattataaccattgacacacaaacacacatgccttcacatgcccgtgtgctagcacatgtgtcgatttgcatcaaccagggatacgttcatgacctcaaggagcacaggtgcacactttccatagagatgtgctcacactgagtaaagttgtacaaccaagattggatccctagttggcggagtcgtacatccacaaccacaactcaactgattggccaatacattttttcctaaattttatgaaatgataatctcta

SEQ ID NO: 31129 - DNA, 221 bp, Setaria italica
  Peptide Sequence Number=SeqID_97103
aaggaaatcttgcagagtaaatttataggtttgagtggcaggtttgacctttcagataggcagcttgctgtttcaacatttcaaataataaatataattgggagaggatggagagaaattggattttggaaagcacaaaatggactttcacggagattaaatcaatcacaatcaacaacaaacttactgccagatcttaatcctgtgatctggccaggaga

SEQ ID NO: 31130 - DNA, 1171 bp, Setaria italica
  misc_feature (5)..(5): n is a, c, g, or t
  Peptide Sequence Number=SeqID_97104
ctgancttatcggtgaaacctgcgttcagaggtcattgaggttggacctggatttacactggaggaagggtggagttcaaacacaaaaactaaagtacgtcagctcgccataagcaacaactggaaaagagacaaggatgaatttgaaagaactctggacttgtcgcatgtacggtcacttatcgtgtttggggagtggatgccctttttcatcacagacaccatgaagtttgttcatgtacttgacttggaaggtgcttcaggactaaaagatcatcatctcaatcaaatttgccagctggttcacctgaagtacctttctctaagaggatgtaaggatattttcaaaatgcctgagtcgttggggaatttgaggcaactccacacaatggatataagaggtacatatatattccaattgccttccagctttaacaagcttcggaagctgcagcagcttcatgcatctgcttggtttaaagatgaacacaaagtagggccctccatatcaaatgagcgtgtaacggaaaatttgaagagacgtgataaactgaaactatccttttgctacgacaagaactttcactttctaggtcgtaatgtatcgtgtgttgtgcaagttccaagagggattggtaaactgaatgcactacgcacgttgggttacgtccgttttggacatggaaagagaaatgcgtctgtgaaagaacttataggactgactcaattgcgtaagttagagttacacggtgtcgacagaacaaactgtagggatttctggtctgccattgctggtcacaatcatctgctgtctttatcagtgaatagggactgtgtggcagatgatttggattggcatttgggtgggagcttgtcacctccaaaattcctcaagaaccttaagctgtggggccgtttagtaagagtactggaatgggtacagcagcttcagtatctatcaaagttgcagctacatcgcagcggactgaagcaagatgccatagaagccatcgggaagctgccaaatcttgggatcctacgtttttggaaatcttcgtttgtagagggagagctcaaaatcaaagggggatcgtttcccagtctcattctgctggaccttcgtgaattggatgccgttacaattgtggagtttgaagatggtggaatgcct

SEQ ID NO: 31131 - DNA, 1706 bp, Setaria italica
  misc_feature (1628)..(1706): n is a, c, g, or t
  Peptide Sequence Number=SeqID_97105
ttatggtaattgtgtggacagcattgtcatataccctcccaagcaaggtgccatcaggagtccccaggaggcttttctctccacttccctgggagtcaagttcgctgggacactggaccatagtgaaggatttgttttctgtccctccggcatatatatttgcagccattctgcctgctctgatggttgcaggactttacttctttgatcatagcgtagcttcacagttggcgcagcaaaatgagtataatttgaagaaaccttctgcctaccattatgacattttggtccttggaatcatggtcctgctctgcggtttgattggcatccctccatcaaatggagtccttcctcagtctcccatgcacacgaggagtcttgctatccttaagagacagttgctaagcaaaaagatggtcgatactgccaaggagagcatagggaaaagtgctactagtttggaaatatatggcaagatgcaagaagttttcatcgaaatggatagcgaacagaatactgattctgttgacaaggagttgaagaactttaaggatgctgttcttcaagaaggtgatgaagaggggaaattggctggagaatttgaccctcggaaacatatagaagcccacttgcctgttcgagtgaatgaacagagactgagtaatctgctgcaatccatattggttggtggttgtgttggagctatgccagtcatcaggatgataccaacatcggttctctggggttactttgcctacatggccattgacagtctaccagggaatcagttctgggagaggatgcaacttttgttcattgcagaaagccgacactacaaggttcttgaaggtcctcatgcatcttttgtggagtcggtgcctcccagaacaataaccatcttcacagtatttcagttggtttacctcctgatatgcttcggcataacatggataccgatagcgggtatcctgttcccagtgcctttcttccttatgatactcatcaggcagtatctcctgccaaagttttttgatccaatcgtattgagggaactggacgcagctgagtatgaagaacttgatggcgtcccccacgaacacactctggaggatgaagtatccgaggcaggaagctgcattagccgtcgagatgctgagatattggatgagctcacaaccaaccgcggagagctaaagcacagaacttcaagcctgcgcgaagaaagatcggttcaggttccgtcaaatgccgttcagccaagactctgaagataggaaagtgttttatctgtagagtgatgatcctcaagctgcggtccgttgaggtgaatactgttgctacgtaatgtaccactagtggtgttgtacttgggcttttaacccaaacgcatctgtatggaaggtgtaatttgtaagaacatgcagttagcgtaactaggagtgattggaaagacagaagggatatgaaagggaaatggctgaacgggaacgtagtagaatcatatcattagttaaatagactgtacggcaagaccttactttgttgtgtggctcacagattatcaatgcagcgagtcattgttatcaaaatgcattagcttgatctcttcactagtaaaaaaaaaaaannnnnnnnnnnnnnnnnnnnnnnnnnnnnnnnnnnnnnnnnnnnnnnnnnnnnnnnnnnnnnnnnnnnnnnnnnnnnnn

SEQ ID NO: 31132 - DNA, 295 bp, Setaria italica
  Peptide Sequence Number=SeqID_97106
gtgttaagctccaccgaactcgctctgcagtcgcctgtcgtcagtcttcgcgtagcaaagaaaatgtccacggcggcggcgtctcggcacgtggtggccgtgccgttcccggccgcggccacatcaacccgatgctcgtcgtgtgccgccagctcgccgccgcgtacaccgccctcgccgtgaccgtcgtcgtcacggaggagtggcacgagctgctggccgccgcgggtgtgctcgccgcgctccccgcgcgcgtccgcctcgccaccatccccaacgtcatcccctccgagcc

SEQ ID NO: 31133 - DNA, 575 bp, Setaria italica
  Peptide Sequence Number=SeqID_97107
gccacaggcggcctgagcgcagaatgagaagagcaccatggcggtgattgaggcagggagtgtggtagcgcggccaagccaaaggcagaaggcgccgcctgcggtctggaggatccagatgttccaaaggcgggcacgcatgccccagtagcgcgcaccaacatcagagaggatcccgcccaggggccttgccacgatgttagccatgccgaagcaggcggcgatgatgccggcaactcgaaggtccaggttgaagtggtcgaagtagtactcagcgatgacgttgtcggtggtgagctcgacgcccatgcagtagccgtagagcaggacgaagatccatgttcggtagttggtgatagcataccacataaccttggagaacttgtccttgttggcatcgcccttcttctggaggctacggaggttgccatcggggaggtcttgccccatggtgagcacaaggattcccatcacgatgtgcagtgacccaggcacgaagtaggcgagacgccacgccgtgaagggtgtggcgccgcacttgcggatgatgtcatagacgagtggcatgatgagct

SEQ ID NO: 31134 - DNA, 393 bp, Setaria italica
  Peptide Sequence Number=SeqID_97108
ccggtcggccagaggaggccggcgaaggcgcggacgttggcggcgtcgctggcatcggagacgcgcatgctctcgaggccaggggccttgccggggaccggccctatgtagccaccgatatggccggacagcgacccctgcttcgccgcgagagggagcgagaagagctccggcatcgcgacgccgaacaggtcacgccggagctcgccgccgagcgcgtcgtgcgcgaccacgacgcaaccgagggtctccatcgaggaggccactgcggtctgggcttccgcccagcctgggccgcctggtcggaggccatggaggtcgacgatgttcagccccgcgcggccacgggcttctcggacccgaccttgccggtgtccatgctctctcgggttt

SEQ ID NO: 31135 - DNA, 604 bp, Setaria italica
  Peptide Sequence Number=SeqID_97109
cgccatgtccgtgttgctcggccgcgcgctccccgacgtccgcgacgggctcaagcccgtgcaccgcaggatactctatgccatgcatgagatgggccttgcatctcgtaggccattcagaaaatgtgcaagagttgttggtgaggtgctaggcaagtttcatccacatggagatacggctgtatatgatgccttggtgaggatggctcaggatttttcaatgaggtacccgcttgtacaaggccatggaaattttggctcgatagatgcagatcctcctgctgcaatgcgatacacagaatgccgcttggatccattagcagaagccatgttcttgactgatctggagctgaacacagttgacttcgtaccaaactttgataactcacagaaggagccgtctttactgccaactcgtgttccatctctattgttgaatggttcttctgggattgcggttgggatggcaacaaacattcctcctcataatctgggggagcttgttgatgcgctttctgttatgattcagaaccctgaagccacgctccaagaactactggaatgtatgcctggtcctgaccttccctacgagggagggacaatt

SEQ ID NO: 31136 - DNA, 534 bp, Setaria italica
  Peptide Sequence Number=SeqID_97110
gggcccggtcgccgcgctgctggggcgccgcctcgcctcgagcgccgaggccgctggagtaccccttggcgctgccactttcctttgccagaggtgtgagacagtcttaaagccaggcttcaactgcagtgtccgcataaggaacaagagaaataaagctaaacggcggaagaaatcaaactgctgtcagaacagcatttcctatgcatgccatttctgtggagatcagaatctaatattgggtagtgggaagggtgtagttaagagcttgttaccatcaagagatcatgctaccatggccttaaccggtagaattttgaaaggaaacaacagcaacacaagaatacgagataggaaaaacgtgcttgagcattctcaagcagcaactttgcaagtggattcaccatccgggttgagacagtcaacttctgaaaggggtgaacatggggaaaggttaaaatgtaaatctctctattgattgcaaaatggaggaaggagcgatcttgtcaatggtgaagcctggtcatttagcag

SEQ ID NO: 31137 - DNA, 768 bp, Setaria italica
  Peptide Sequence Number=SeqID_97111
tttataaaggacttcattcaacattaaaagcaatgtacatgaagaagggtcagatggccccaagctacagaatggagtgctgcaagaacagcacagccatgaccatggagagaatttgtacacaggatgaaatagcctatgagaaaaaacatttctagctctaactgctagttgatgcgctgcctcattttgggctctagagattttggtcacttgcaaagcatctcgtgagccaagatcctgaaaatgagagatccatggatgaagcttccatggtgagtccaagggtgccatgtggagcagtctgactgcctgaaggcaatcagaaccaattccttcagattgaatctgcaacacggaaagaaattttgccgccaaaaggagagcagccagccctgccatcaccactgaatctaccctgacagatccaagtacctgcaaacaacaagagatactagtagatctaagatcaactagaacccccagtccagcaattcttgagctacttccttggccatcaggttggagagttgcatctgcatatgcaaaaacaaaagactgccaatattggcaatttgataaatcctgcatcagcaataaagaagggaccacaacaggaaaagtagaaccattgacattagttggagcagaactcaaagaagtcatattcctattagaacttgcatgagaggtatacagaatggacgtggcaatgtctgcctggacctcatgatttagtctgctcacagaccatttcttgttgaacct

SEQ ID NO: 31138 - DNA, 271 bp, Setaria italica
  Peptide Sequence Number=SeqID_97112
taaatcatatcaagcacgtgtatcagacaatggatgacttgatgttgccatgggaggctgttgagcttgttgagtggatgtactccacgcctcgggctgcagctagggcgatgcttgaccttaattcccagttaagtggtgtacggccagaacttctgttaccgtgcaggaccgcagaaaggctgcccatctgttcaacaaaaagaaagtcagatagtttcagtgagactggagtcttaacccttgcatcctgatgggtcaacggacgacc

SEQ ID NO: 31139 - DNA, 523 bp, Setaria italica
  Peptide Sequence Number=SeqID_97113
tcatccccaggaacgcggagcgcggctgtgaccgaagtgcggccgggatagatccgttcagctggttgaacgagacattgaactgttgcagctccaacttcaaatccggaatctcgccggagaatcgattgttctcaagtagcagggccttgaggtgcgtgaggctgccgagcgccgccgggatgggcccggacaggtcgttgccgtcgagcgcgagcctgacgagccccgggagcgcgagaatcccctgcgggaacccgccggacagcctgttgccgttgaggaaaacgttccggagggcggcggcgttggcgaggtcgtcgggtagcgcgccggagagcccgttgaggcggaggctgagcgtgtggagcgccgtcaggtttccgagcgtccccgcggggatggcccccgagagcgtcgccccggggaggcgcagcaccgcgacgcggccgttctcgtcaggttgacccccgtccacgagcaggcgcccgcggcgcccgaggcgttccacgccaggcggcgc

SEQ ID NO: 31140 - DNA, 2014 bp, Setaria italica
  Peptide Sequence Number=SeqID_97114
tttttttttttttttaggaatgccgaactttttttccctcatattcatatcgatacaacactgctacacagagttccgattctcatacatggtataatcaacagttctggttctatctccatccattgtcaagggtgggagaccgtccatttacatattagcttctttacatgaaccaaggaggaaaacaggagggtaaattttgaatcaactattatcatcatcgcattgtcaacgaatgaaacaaatagcttaacctttggatgtgggaccagccccggaacaaaaaggaatccaatactgtacagtgtacacttgactgcaatcatcttggaggtggtcttaagaatggagtcggcacggatgagtatgacgatgatgcaagtggaactgttgagaattcagagtctggacgaccaaaaagatgtggccttgtggttgtggaagggccaggtgcgaggtttgaggggtgctgtgatggttgtgggatgctcgaagaactactagtactagttgcagtttggctctcttcctgcgactgcctcgcagcttctgaggcttctcgtttctccctttcttccgtctccttgagcaggaagtccacccataggtctgcgaatgactggctatcctgagatgcttgggtagatttgccggatgaaccaccaccaacaattcctccaacaaggcgtcccgggaggcccaaaacaccgcgtacaacacccttaccagcattattttgtgcaaagccaatcctttgcttgtcttcctccgagaagccaagcatgcgaaccatgaggtccagaacctctttactgtgattccgttggaagtaggtgactagcaatttaatcacaatgcgcctgtcaacggagttatctgaatctagtgacatcctattcactgttgtcatgctttgttctagggcacgtcgtaatcttgaattatcatcctcaagcttctgcatggagcgcttcccatctgttaacatcctctctgcttgtgaaagtttggtagctatatcttccttctctcttcttgagatctcaatagtttgattcgccacctttaatgactgtgatagtttggacaattcttccctagcaacagctaaatcacctccaagccgttctttggcttcactctcagcatagtactgtccaagggcagtctgaagatttagcagctccacattttttgattcaagtgcactcatacagctagcaagcttggacttcaaatcttccacatgttcatttgacctctggtgctcttcgtttatgatccttttgctctcctcctgctttgctatctccacctttaaagccctctctaactgcattatatgagccctttgctgctcacagattacccgcaattcttcaatgagtttactatcttcatccatcttttcttggtcctccatgtccttatctaacaaatgctgcttcagccgagccaaatcctgcactgctttgtctctctcacgggaagcatcctgtagtgctcttttcaacgattccatttcttccttaacctttcccgagtcagggatcttgttatctgatgtaccgtcggcagttttttgtgaggtactcttcgtactcttgagatctgcctcaagcctggctctctctatctttaggtcagagttctccttctgtagagccattaacatgctccttaggctctgaaatgatccatctgatacgtgctccttgtcccttctgctcaactcatcttgcacacgtctcaactccaatttcttctcattcagttccttatgcagctcttccatgctagtcgatatcctctctttgttgatcttgagttcatttagctcttgttgaagaaatccattccgcttgttctcatcttctagcttcctttcaatttcagtttctttcttggacttattgctgagttgttgtttcaattgtttgatttcattttcaagactagcctgcttcaaagcaaaggatgctctctcttcctccaacacatttcccttagg

SEQ ID NO: 31141 - DNA, 439 bp, Setaria italica
  Peptide Sequence Number=SeqID_97115
tgtatagtccacaagagataaaattatattcctaagaaactgaaacaatgcaattaatatcgctaagaggtggtcagtcaaaaccaaaagtaattttgtcaatggattatagtatatatggcttgaataacaaattggataaactagttatgttgattgaacaggcaaacagacatacaaagatatatcagatatcaagagaattttgacatgatcagtttgatagcatcaggcagtcccttttgacagctccctgcattaaccagagttacaggcctccttatcattagttgagttgttagtcaagagaatcggtcacagtaagtggtaacattatattagatatcaattggagataagatcagcccttgctgtcagttaagagataggatcacatttgggttttagggggccgtgcaaagctctattcagcctaaac

SEQ ID NO: 31142 - DNA, 590 bp, Setaria italica
  misc_feature (6)..(6): n is a, c, g, or t
  Peptide Sequence Number=SeqID_97116
tttttnttttttttacgttcagagaaagcaatcaccaaacgtaaaaaccactatgtcacctcaggatggatagcgcattgccgtcaaagagttggccatgtatcaatttcagagtacaaatcaaaataacccgcgagataccagcagaaagaacaccattcttcctctactttaaactagactgctccctggagatgatgtggaccttcatggtaagcttcctcttgttcttcttcagttcgaacagacagatgtcaccgactcgcagaccattgtcacgagcaaatctggcccaacctccgttgagaaaccaccttctaccattatgaatcaccatctgtgttatccatgtcttccccatgcactggagcgccacagcttgcccactagctggaagatgtgcagcagcatatcgtacacctaattctagcatccacttctgagcaacaccattgttattcttcattactgctacacaaatgggaaatttggcttggatggctcgcactcgctcttcaacaatcttctttggggtttagatagagttcctacatggtacaatggttgtaggaaggactagcagtaattaa

SEQ ID NO: 31143 - DNA, 573 bp, Setaria italica
  Peptide Sequence Number=SeqID_97117
gcagatttttagttgacttgaaatggttcatcagcagctccaatttgcattccgattttggtaatttcatttttgatgtgccacatgggtcttgtgactgactgcttttggtataataataaaaaattctgaagatatccataccatattttttaatgggaaaatgggaggggaaactacccttcatattaatcctgtggataggaattacatagaaacataggctagttgcataggctgttgcaaagttacatttatctacaaattgctaggacttatttaggctaccaaggaaaaagaagctaagaaaaatgaagaatcagctatgctctctgaaaaagcttaagttcaccattctctgtctctctccttgatcttaactgcagtgcctatgaagctcccatagttcagttgtgtgatatagttttgcttttctggagttagtcctcatgcggttgtaatttttcctgtattcatcactgctatctggttttgtgacttgtgttacaagttgaatcaggaaaacagtgctttgagtgctgtgattccaacccttttagttatgtggtagct

SEQ ID NO: 31144 - DNA, 525 bp, Setaria italica
  Peptide Sequence Number=SeqID_97118
aagtgtgaaaagttctcaggaacttgaactggaggaactggagaaggcccccaagttcaaggccaagccactgaacaaaaagattctcgagagcaagggagacattggtgtgtttgcccatccaaagcctcaagtgacagctcccaaggagttccatttttctaccgatgttcgcttgggccctccttcagtcgctgatttatttgataagctatctcttcactctgattgttcttcaaacaacaacaggcaagatatgcccagactcaccagaccaaaccctttcaatctacacacagaggaaagaggtcatttaaaagagaggcagctagaagctcagctcctacagaagaagatggaggaggaaaaggccagggttcacaaagctaacccatacccatacaccacagactatccggtggtgccgccaaaacctgaaccaaagccgtgcacgagaccagaaggttttcaactggagagtttagtccgacatgaactagagcagcaaaggctgatggaagagag

SEQ ID NO: 31145 - DNA, 2748 bp, Setaria italica
  Peptide Sequence Number=SeqID_97119
taaacctaaattaaaccttaccaacttttaaggaattaaatagcgagctgtcagttttttcaagatatctgctcacaattggaaaacgacttcagaaaatcattagagactgaggtaagtgatgaacatgaagaagatgctattcggcctttgccttggtaccctggtaatcttgcatggcatttgaacttttctcgaatgcaactgaggagaaaccaagcacttgagagttttcatgaattcttgaagcgagagaatgaagttggcaacataactaggcaagaggctgtcagtatggtcccgccattgtttctgaatgtgcaacctgatcatcatattcttgacatgtgtgctgctccaggatctaaaactttccagttacttgagatgattcaccagtcaacgaaacctggactgcttccaaatgccctggtggtagctaatgatgttgatgtgcaaagatgcaatcttcttattcatcagacaaagagaatgtgcacagccaacctgattgtgacaaatcacgaagcacaaaactttcctggttgtaatcttgcaaagttctgttcagaaacgtgtatggatgaggccaagctgcagagattggagtttgaccgcgtgctttgtgatgttccttgtagcggtgatgggactgtccgtaaggctcctgatatgtggaggaagtggaatgctggtatggggaatggacttcatcgtcttatattagaaattgcaatgcgtggtatgggtttgcttaaagtgggcgggaggatggtttattcaacatgctcaatgaaccctgttgaaaatgaagctgttgttgctgagattctacggagatgtggggattctgttgaacttcttgatgtttctaatgagctacctgaattagcccgtcgtcctggacttaacacctggaaggtacgggatagaggttcttggtttggtgttcatgaagatattcctcgctataggaagagtgtggtatcaccaagcatgtttccctctggtaaaggcagcaaagatgttgaggtcaacacagatgtaattgatgcagacatgaaggattcaactgacatggtagagggagaacaagaaacaaatacagcaatcaataagagcaatgatgatgatgatcagaaaactgaagagaaagccgaagttgattgtgagtctggtgaagctccaactagatataaaaagttaaattctacttccacccgtacagaacattcggattacccgctgcatcgctgcatgaggattgttcctcatgaccagaacagcggggcatttttcattgcagtgcttcataaactctctcctctgaacgagagccatgtggtagatggggtaaaaagcgagcagaatatctcaaaagacaagaccgggaaacttgagaaggatttaggatcagataaggtatcatctgaagaaaatatagtgcaccagcaagtggttgatgatacaaatgttctcgatggagaacaaaacagagacatgggtagcaaaagttccaaagataagacctctgaggatactaaggtgattggtaatgaggcagaaaaaggtcaagcaggaacaagagataggaggaggcagcagaaccaaggcaggtggagaggggttgaccctgtgatattttttaaagatgaagtgacagtcaaaagcatagtatctttctatggtatcaaggattcgtttccacttgatggtcatcttgtgactaggaatcctgatactagtcatgttaagagaatatactacgtgtcaaaatctgttcaagatgttttggagctcaacataaaagttggcgagcggcttaagatcacctcacttggcctaaagatatttgaaagacagtcatccaaggatggttcaccatgcacatttaggttgtcatcggagggattgccgctcctgcttccatacatcacaaaacagattctatatgcatcagcaattgatttccagcatcttttacagtacaggacaattaagtttcctgattttgttgatgcaaaatttggtgaggaagcttcagctttacttccaggttgctgtgtcgtagtattacgtgaagggcatcaggatataggatccatagccacagatccctctgccatcgccattgtttgctggaagggaaagaccaatttgtgtgtcatggtatctccactggacgggaaggagttgcttgagaggatttcattacgttttgggctcaaaatccccaaattggatgaagagaaaccgaacccgaagattactggatcagatgagcagcctgatggtgccactgagacggatgatcaagaatgtttacccgaaagcaaagcatccgacatggaaattccagatgctggggaggctgagtagcttttgtttggatgcagcagtatcctcctagttgtctactgttgttagtcttctttcttgcatttacacccattcttcatgtacggattatactgctaaaggagaggtgatcgccacacaggaacgacaacacattgcacgagattcaaaaaacatggtaatcgtgcccctcagtgcgaatcgcttgtaacttgttgattttcttctttgagcggatgtattgcaccgattttgaattgttaccctgaacacagaatctagccagtgagatttgaaacagaatattatgagacattttgtgtgtaggactgtgggttagcactgaatgagatctgagaaatggaattgaaaatttaaccaaaaaaaaaa

SEQ ID NO: 31146 - DNA, 794 bp, Setaria italica
  Peptide Sequence Number=SeqID_97120
acgtttcaaatgttttaactaggatctccaacctaattatttcctgactaggaatagtcatcacgagtctaagtttgctcctcaggtagtttattatttgatcctattagtttctcaatttgcaagtacttttatctgtttctgctatctttctactgtgtacttccagcttctccatcagattaatcattccatatacggtgcactgcaagtgattttacatatctccatcagattaatccttcaggtatgtctcaggtattggtgttttgtgagagattttctgtgaaattgcttttgtggtgaaaaatgttacagtactattgactacattggtccactacaattaatcttttcttgctttgaaatttttctactgtcttcacttgcacaaccagagtgattgattttccacatcattcaatccttttctcaggacatgaggggcaagtaacacttgacagatttgcacttaattcagaaggctgaaaatttcataaacgaaatgtgaaatttgttagattcttccattcaattagttcttagcaacattggacagttagaaatcaatcatccaacaagatagatgttcattttgttattccaaagaatctgacattgcatctgcttatgcaggtgagataaagaaagcctgaaacatcattaccatttaaaacattggctcctggaaattcaaatgatctacaaagctactcaccacccccattggagtgagatcagcagcaccagcacagcaaggtccttcagctacatctgtcatcgccatgtacgat

SEQ ID NO: 31147 - DNA, 918 bp, Setaria italica
  Peptide Sequence Number=SeqID_97121
caactacacaatactcccattcttttttatatttgatgttttgagcactgaaaagtgatcattaatgtttggtgttatagaattttgagaagaggcatgcatatgctttcctaaagtgtcattattctcttctaaatgaaataacacgcagactggcggtttaggaaaaattgtcatattcaattcaacatttactaaattgtaagtctccaaacctctttgttcattgggcacatttggtggttgaggaaacaaaacaaatttaatgaggttgtaccatgatccttagattattagatacgagattaaatcattcttgcttgcttaaatctgaatgggtagtgctacactctatatagagaggttaggtcctgacaagagtttccaacactaacaaaaagaaaatgcaaccaactatatcttatctaaactaacgataacatgaaaactaacttaccaaccatgcactgcagcatgctaccatggttaatggtcataatatgcagcacataacaggttgcatgattttgagacatataattgtattaggcatatggccaccatttactttcaccatttaatacgagtgcacaagtcttaagtatcaaatgaaaaggaaaggatggaatatttgattattataataaatcctgccggcataatatgtctaacattgataaacatcagtattcatgttatgtctccagcttgtttctcctgaacagatgggtggaatatcaaggttatggctagcaaaaggtgtctcccaatttgtagatatcttcagatggaagacagattgtcgttaaccttatttcttagtcttcaccattctcattttgcatatataattggatatgctgaacatttatgctctctaagaaacacagacaagtagtgtggatagttcttactgaa

SEQ ID NO: 31148 - DNA, 311 bp, Setaria italica
  misc_feature (8)..(8): n is a, c, g, or t
  Peptide Sequence Number=SeqID_97122
ttctagcncaggcgatggattcttcgagaggatcgcgcacgggaggatcagttcagacacgccagcggaggcgcttcttcccggacacgaagaggaacggagcggatgacgaagaagccaagaacctccactcccctggtccgcttgccttctccaaggtccaagctcccttccggttcctcccacctagtttcgctgatgcgtcttcctccgccgattatactactgctaccgcctcgagattgagatcggaggggacatgtgcgcatcagtattttcgcagtaaacaaggatgcggattcagaaatgtc

SEQ ID NO: 31149 - DNA, 1410 bp, Setaria italica
  Peptide Sequence Number=SeqID_97123
taagacgtagcgataaaatttcatagctgtgtaaatcttgaacttctagttccatttagtgtctagattctacatttctgatacggactactgatgctatagctgcaaattagaggatatcacagagcaaaacagaagtacttctttcatcaagtagagcttaccatacaggtgctccagggaatgccaggtctagaaatgggtagggccacctaaacaaacacaaaccacattacacatcaagagttttcacctcattagcaagaaaaaaaagttagcatgtattaccaaattgacacgttagcatggatgatccactgaatattgacaaaaaggcctgtccacagcaggaaatatgctatcctaaaccatgggaaatgcaatttgtttagagcagcatcaccaactaggaagacaacattaattgaatgtgtcccaatcagaatctgtgatgcgcaatgtctataagaacagtatgtagaattgccaagaatgcagataacaaacctcatcaaagaaatgtttcttattgggtgtagcatggcgatagcacgtgtagaatgtaatcaagtaattgcttttgtcattcttctaaagaaccagactgcaagatgtaactactgaaaagcaatactgaatcactggacagtggagaacactatcatttctgcatctgtattaaccatgtaggcatgctcatttcgcgcaaagagatatttaagtcattaattaaattataatagaaaaaatgattcaaaaaagtgatcctatacgaagaagctgatccaacaagcatatatgaaccattgtgagacaagtaatgttcctatccacaaaaaacatatcacacaaacccttgagtgctatgctattataggactagccaaaatcctcttgaattgtgaatcgtgatcttgcaagtaactttgtacaaaatatggcaatggatattataagaattaatgacatattgttataatatggatcaccaaacaagacgcacagacacattgttttatttattttttctgaagtcacgaagtagtttctctcccttgcatgttctgtttaggaaaacatgcccttacagttttcctaccttttgttctgattaaatacggtaactttagatcttagattgaaataaagtttctcaaaatatcagaagaggaatactcacaaaattcatatcatattgattgtgggcaaggaaagggtacaaataagccagaacaccagatctgtaatcatcacagcacctgcatttgtctgaaacataatttggaagaggtaaaccccaaaatcctgcaatttctgtcctccatgtattctactgtaacaagaacttttgattgcatggccatatgcactttccctgttgagcaatgatatatgtgccatgatctgcac

SEQ ID NO: 31150 - DNA, 1674 bp, Setaria italica
  Peptide Sequence Number=SeqID_97124
tttttttttttttttagtttattaacattcaatgtgacaggtgctaaaaatgaacacgacaacagtaaaaaaaaagataatgatgtatatgatggactgtacacaaatctccatcgggctgttgatctcaaaatttctggagcatgctctgccaattttacatgtccgcttcaaggggtaaccctcgacaggcaggtgtaatctattcctgaacaatgtgatttcaggggtgtagacagtaagcagaatacccgctcattttgcagggggtagtgtagggacaaccaactaccactacagccttctctgattacttgacgtaagtttgagggaaccagctttccaacacagaatgcttgagcctcaggaccagggtgaatagagcatagcacgggaagtgcagcagggccaccaccaggtaccatacaggtgctccagggaatgccaggtctagaaatgggtagggccaccaaattgacacgttagcatggatgatccactgaatattgacaaaaaggcctgtccacagcaggaaatatgctatcctaaaccatgggaaatgcaatttgtttagagcagcatcaccaactaggaagacaacattaattgaatgtgtcccaatcagaataaaattcatatcatattgattgtgggcaaggaaaggtacaaaataagccagaacaccagatctgtaatcatcacagcacctgcatttgtctgaaacataatttggaagaggtaaccccaaaatcctgcaatttcttgtcctccatgtattctactgtaacaagaacttttgattgcatggccatatgcactttcccctgttggagcaatgatatatgtgccatgatctgcaccagatcctatcagatcagatccatctccactgatcttgtaagcatactgatagcatccgtaaattgaaagcagcgagccaagcccaaaatacaaggtgacaagcaagaacgtccactgcgtgtagtataggaagatactccatccatcagtgactatgtcgatcaaaagaagcgaagccagaatgaagaaggccacaacgcgaaatgccagcagccagccagggtggatctcctcaaggcacggcttccagcaatcttcaagatacaccactccaggtccggcccggggcggcgcctcctctctgtctccgccgtcatcaccattgctgtcccgtgaacggggcccctcgtacttccaaatcaagaagcaagccaaagccatgcaggagtacacccagagcgcgcacagcgacaacatccagttgagccagtactctggttcagtggtgtccacggccatggctgaagattggaatgctgaattggtcgaccacggcgatggattcttcgagaggatcgcgcacgggaggatcagttcagacacgccagcggaggcgcttcttcccggacacgaagaggaacggagcggatgacgaagaagccaagaacctccactcccctggtccgcttgccttctccaaggtccaagctcccttccggttcctcccacctagtttcgctgatgcgtcttcctccgccgattatactagatttatggatggatgggcagatctctgccagttcctcgcaagaagtcaaggcgccggcggtggactcgtgctggctggcggctgcttatccggatccctacggg

SEQ ID NO: 31151 - DNA, 623 bp, Setaria italica
  Peptide Sequence Number=SeqID_97125
tcctaatttaattaccaggtcaaaatgtccagtactaaatgcaccattagtaccagtcggtaaattgatgaacagccggaggtcacgcaaatttcacacataatatgcgcgtgcgcggttcgtgggattcaaacccacgacctcaaggctcacacgaaccttccttaccatctcaccatctcacctacatagcacatgtgactgagtaaaatatactttccttttgaagtaaaccgtggagaggcctttagtaccgggcaataacaccacccgatttagtaccagttggtgttattgaccggtactaaatggtactccacggggtactggtgttatcgcctgatactaaatagtccaggccttttagtaccgggtcataacacctagcatcggttggtgttatcgcccggtactaaaaggcctctgaggaccgaaaatttctacccagtactacttttgcgcgttagtaccagacgaaaagccgtccggtactaacgtcaaggacgaatgctcatatttctagtagtgaaagtttgcgtgcaagtataccttccttgccaggttccacaaactgatggctttcttgcctcgtccaattcttgagcatgaaacatgccagactt

SEQ ID NO: 31152 - DNA, 604 bp, Setaria italica
  Peptide Sequence Number=SeqID_97126
aaaaaagggactgcagcatgcaaaagacagggtttttcttgtgaatatttgttatcatcattcatccgaacatgatgcggatcttctcttacatcgtcttttatcgactcatcagtcatcaatcatcaacatggcactttttcgatccaggttcacgcttcaacatgagtacaaatattcacaagaaaaaccctgtcttttgcatgctgcagccctttttttttattaagccagttcctgttaatgcgttgattgcatctgcgcatcactttcaatttcaagtctcaatgcatgccccctgtcctcatcacgccaccgccgggctcctcagctcctccgaccgcctcctcggctcacgcttctccggcgcacgagacccgtccggttcgatcccgccgccggccgggtggtccggcctgagcgcgtggtaccggctcgcctcccgcccgtacgacctgccggcgtcgctcctcgaccgtgccatcgtcggccccgcctccgcccgcgtcgtcgtctccccgcgctcgctgtggccgccgccgccgcgggcgcgcgagtccgccgtcgtggcggtcgtcacgctgctcagcggcgtgcgcgcgca

SEQ ID NO: 31153 - DNA, 246 bp, Setaria italica
  Peptide Sequence Number=SeqID_97127
gaagaggtcaggtctcgatcgagagacatgggggcccctgctcgtagtatctgcaggcacgtcctcctcatcctcctgtcgctgcagctgcttcttgtggcgccatggcagggcgggacggcagctcgagctctcaacttcacgaggcaggatttccccagggacttcgtctttggggcaggcacatcagcgtatcagtacgagggggcaaccgatgaagatggaaggagcccaagcatctgggac

SEQ ID NO: 31154 - DNA, 316 bp, Setaria italica
  Peptide Sequence Number=SeqID_97128
aataaatttcttcccacacttgtcttcagcatcgggtatattcttttctccggtgctgatctgaatgattagtagacctaaactatatatgtctgactgggtagagatttcacctctatatagatactccggagccatgtatcctaatgatcccacaacattttgagtgtgcatccgggtttgctcctgaccgaatagtcttgaaagtccgaaatccgcaattttagggaccatgttatcatccaacaaaatattttcaggcttaagatccatatgaacaacaggccgatccattttctatttattgttaggtaaa

SEQ ID NO: 31155 - DNA, 1411 bp, Setaria italica
  Peptide Sequence Number=SeqID_97129
cttgcttcccggcccgcacgaaaccttctcgaagacgccacaaatccaagctcccaactcccaacgcaatccataatcaggcctcatcagatccccgcgtccctctcccaggctcccatcgggttccgcttccagacccgagtcaactcgtcgcggcgctgctgctcgaggatctcatcccggcgtgccacttcgccggtgggccggcagtatcccaagatggcttctttgaatggtgagactgagcaccaatggatagagaacattaagtccggaggagcagttccttgtctagcacctgaaagctgccctaatggctgggctactcctcccggtgattcattcatggtcagaggcccagaatatcttacaaataaggtaaaaataccaggtggagaatctcttctgaagcctcttggatttgattggatcaagggaccagcaaaaatctgtgagatcctgaaagacaagaaccatcgtgttaggaaagccatcgatgaggaggtttcacttggtaaacagcattttgtctgggctttcaacttgcaactgcccaaggataactacagcgcaatattctactttgtatcactggaacctgtgcctgaaggctcgcttatggatcaattcttgaaaggcgatgatgctttccggaagtccaggcttaagttaatcgcgaacatcgttaaggggccctggattgttcgaactgctgtgggtgaacaagccatctgtatattggggagagctctcacatgcaaatatgttcaaggatcaaatttcattgaagttgatgtagatatcgggtcttctatagttgcaaatgcaattgtgcatttagcatttggttatattacaacgctaactgtagatttagcctttcttattgagagtcaaaccgaatcagagctccctgagagacttcttggagccgtaaggttctctgagttaaatccaggatcagctggtcactatgaaaggcagtctgaagagcatcaggaaagcactcagtctcggtcagttggattttggcagggtttctggtcaaacaaccaaggcaacccaacggagccatcccctagtttacagaatactaatggaaatttgcacaaagaagaagcaaatgagaatgctaaatgatattattcggacccctactagaaaagatcaaaaccatatcttcattgtttgggggtcaatttatcagctcatcactcctgttacaattcttcagtaggatgatcagtagcagtctatcagatagtcccagggctttgtttctgtgcccctctcatctgctgtaaaaattattacactggcgacagacaaactgcatcactctgtacataaaactgaatgcctcctaaaatgttttattctctcatggaagaattgtacgaagttcaagggg

SEQ ID NO: 31156 - DNA, 500 bp, Setaria italica
  Peptide Sequence Number=SeqID_97130
gatgatacaagtgggttttcaaatgcggcaacctgagaaatatcaaactggccttcaacaggaacagaattaaggttgctattagactgagccatctcatgatctgctggtactgctggaaacgcctgagacctgctgggttgaggcaacaggccagaaccagatgtgtgaccttgaaaagcataactaggtgcggcctcctcagatccatggagaagttgtgaccctgaggtgagagaagatatcctagaatttgaaatttccactggagtgtcatagtagtgagatcggcttgccctctcatatgtatcacttggttgctcaggaagaaattgatactcatggaccgcacgtgatccaacatgaggttggactatgggtggattaccaactgttgattttctcttccccgtaaatgaattcggaacaaagggggtttccatggtaggtaaaaatgctgaagcctttaagagcttcggatcatgcctagaaaatatctt

SEQ ID NO: 31157 - DNA, 278 bp, Setaria italica
  Peptide Sequence Number=SeqID_97131
cctttccccccacgccaaaaaaacaacccagcaaaataagcgcaatacttcctctcctgcccaccgccgccgccaccttcgctgatgaatgatgcttggtagaatccatctaccgccatcatcataccgccaccaagaaacccaccagcgccatcatcaggagcgccggcgcggacacaccggccgcggtgagcgcagcggcgttagggctcttccccgcggacggcgccatggacgacgccgcgccgctgtcggtgccgctgccggacgcggacggg

SEQ ID NO: 31158 - DNA, 242 bp, Setaria italica
  Peptide Sequence Number=SeqID_97132
tttacgctttcccgtagtgagggtggccgatccatataataaggttggatctagagggcttgtggactgatctttgcattgcattagctggtcttttcattgtgcataagagcgaggtagaggtgagcggctacgctaatttaggcatggaatatgcttgtctgtgcatcaaagcgtgctgttcccgcatgtcctctccacaagcccatcagccgctgccgttgccggcttcgacagcttgg

SEQ ID NO: 31159 - DNA, 1003 bp, Setaria italica
  Peptide Sequence Number=SeqID_97133
tttttttttcatctactccggataaggaggcttcacggcgtgtttggtggaaaaaagatgaatctttgtaatagtctgtcctgccttctttatctccgcttcggtgtggaagaggttctctgatctgacaacttgtccaaagtagttcgtcctactcctaccccgtttctgcatccgaatatcgtccatatgcatcttatgacgtagaagctgcgcatctggaaatgcacatagccgtagtcaagactccagaatagctatgtattgcaacacgagattcctccaggatctgcaaacctccgctcccctcttttccccaacggaatagctactgtaactgtaaaccgtcgtcacacccctgacgcggatggtttttggcattgcgataaccacaggtccatgtgcttggcgatctgctcccttactgcattgactgctgcgggagatgagcagtttgaggagtccccttcaatcctgaaagggctttgaggacaacccctcaaatcagtgccatgtccgcaattgctgcatttcattaggtacgacggcatgccttttgacgatttctgcttggaggcatgacgccatggatcttgggagccgtttgtaagcacaattttagaagcagcgattcttgtgcctccgtaatacaagtttgtcatgaacacatcaggataaacgccttccccaaaaacatttctgcataggtccaaatggtacctcgtatcgatccttgcagaacgaacgctatccgttttgggtgcgatttgaaaaaaggcaacctcactgcaaacttggaaccaccagagcctagaactggaatcattgggagttgtgtccttcaaatattcctgatcatatgaagatggtggtgtctccatttctttgatgtaataatctttcacaaactgagcatatgcttccaccaagtttttcctgctcttctttgcatttattagtggagagcacacggagtctggatccccatactggaacgtcgtcg

SEQ ID NO: 31160 - DNA, 485 bp, Setaria italica
  Peptide Sequence Number=SeqID_97134
ggagcacacgccgaccgtgccgatcgatcgcccgctcgccatggccgtcgacgcgcaccacctactccacacaggaggaggagcgggagggcagaggcaactgctggcccacgcgggatgggcctgggcgggcgacgccgcgtgctacgaggcgccggcgagcgcggcgcggcagcagggacagcggagtccttgttacggcggcaaggaggtcgtcgcggcggggagaccgacggcgacgacgggccagcaggtgttccagcagtcgtgcgtggccaatccggcgccggcggcggggcagtacgcggccggcccgcggatgtgcgccgcggacgcgtcggagagcggcgtcacgttcggaggaggcggcgcgcaacaggaggtgatgatggcgcccaggaaacggaagcgccccgaccagatacagacgccggtgcttggtcttggcgcggcggacgtggcggcgcacttccagcagcagctgg

SEQ ID NO: 31161 - DNA, 365 bp, Setaria italica
  misc_feature (7)..(7): n is a, c, g, or t
  Peptide Sequence Number=SeqID_97135
ttacggngtccccaaccagtcccgtccagacaaatgaaattggaaatcagtcccgtgctctaactaaccgacaccgcgtgccacccaccccgcggctagggttccgttccgttccaatccgtctcgttccgtgatacagcagtcctagggtatggtcccgatgggaggagtaggatctccgtaccaggcgatcgtcgggcatcagctgcggcggcggccagatccagccgggcgagggcggcggcggttgactagggttggttccccccgtttgcccctcccctgcttcgttgccttccccctgtgatgcgccgctgggctgcttgtgttgggttcttttttttcctcctcttccaatatttttt

SEQ ID NO: 31162 - DNA, 358 bp, Setaria italica
  Peptide Sequence Number=SeqID_97136
aaaacacaaagcacatgctcgccaagttccgacccctcatggcaacggcggcgaaggcgagggcgccgccggtggtagcggcttccacatccgcggcggcggcggcggcggagcgggacgaacacgtgcactacaagcacaccgacgcgtgccaccacctccggtggacagccaaggagagctacgagtacatgtacgcgcggccatggagcagggtggtcgacttctatgccgagctcgtgcgcaccggcgccggcgcggcggggctagccaagctgtttgggaaagatgagaaagattacagccttgatactactggagagaattacctagcaccatcagaaaaacaaacggcaac

SEQ ID NO: 31163 - DNA, 321 bp, Setaria italica
  Peptide Sequence Number=SeqID_97137
acccgaaatttgtagggctcgaatagtatgcatcagcttagcaacatttttactagaagtagtcactatatcttggtgttctcagcgccctgtagcattttcttgagatgaagtaactccccttcatctgtggtccataggctgtcgaagacaatgaggcatcttttgccatgaagtacttctcgaagacaattcattaggatctgaggattatcttcgatttcctctttgacttgtgacgtgccttcctctgctctgttagcttctgatactattgcactagcgatactattaaaatcataactcatattcagattgata

SEQ ID NO: 31164 - DNA, 502 bp, Setaria italica
  Peptide Sequence Number=SeqID_97138
gaagcttgcccgcgagttcaacgcccggggcttcctgcggttccccaacctcgcccgcctctcgcggcccagtcccgccgcgcggaagaggagggagaggaagggaggcggcggcgacgaggaggcgacgcgggagcctgacagagacaaggcgtatgtggtggaggtagttagggaggggatggaggacgacgaagacgagtggtggaaggggctggtcggggaggagggcttcgggagaggcgcgtggaggataggccccacccggctgctgatgctggacgagagttacgccgagaggagggtcgatgagctgccagaggctgtcaaggtgctgatttcttctggtgcatcttcatagtatcagtttttttaacttagaatggcatctaatgggaaggtttcccgttaatggttattctggagaatgttaccagaacttaatctgatattcataacttctaaaatgagatactgttgcatctcttcaagatgaatcaag

SEQ ID NO: 31165 - DNA, 353 bp, Setaria italica
  Peptide Sequence Number=SeqID_97139
acccgacctactacgacggacccaagtacccgaccgacgacggaaagaaggaagggagaggaagggaggcggcggcgacgaggaggcgacgcgggagcctgacagagacaaggcgtatgtggtggaggtagttagggaggggatggaggacgacgaagacgagtggtggaaggggctggtcggggaggagggcttcgggagaggcgcgtggaggataggccccacccggctgctgatgctggacgagagttacgccgagaggagggtcgatgagctgccagaggctgtcaagggtgtgttaaaccatgaaactcaacaggatggattgtctgcttatgagcttatacgctgtc

SEQ ID NO: 31166 - DNA, 231 bp, Setaria italica
  Peptide Sequence Number=SeqID_97140
tctggtagtttcagtcactaataagccaagacatgttaccattgtacctactgatgttgctattattgatataaaatcaagtcaaatgttgatatgcagcactgaaatcaagtcaaatcttgttgctagagtccttacggatgttattaccagtgcacctaccaatgatccctacttctcatgttgatgatccttgggtgaaatgatgaaatagcgtatgttggcatagat

SEQ ID NO: 31167 - DNA, 488 bp, Setaria italica
  Peptide Sequence Number=SeqID_97141
ccgctgccgccggtcccgggctcgccgccgccgttcgccgcctacggtgcgcggtggccggcgccgcacgaagagagcggctcgccgtccaacctctactactccttcgaggccgccggcggcgccgtgcacgtcgccatgttgggatcgtacgcgcccttcgactccggctccgaccagtaccggtggctggcgcgggacctcgcgggggtggaccggcgcgccacgccgtggctcgtggtgctgctgcacgcgccgtggtacaacacgaacgcggcgcaccagggggaaggcgaggccatgcgggaggccatggagcggctgctcttcgaggcccgcgtcgacgtcgtcttcgccggccacgtccatgcctacgaacgctttacaagggtgtataacaacgaggcgaacccgtgcggacccgtgtacatcaccataggcgacggcggcaacagagaaggccttgccttcgactttgagaagaacca

SEQ ID NO: 31168 - DNA, 415 bp, Setaria italica
  misc_feature (1)..(49): n is a, c, g, or t
  Peptide Sequence Number=SeqID_97142
nnnnnnnnnnnnnnnnnnnnnnnnnnnnnnnnnnnnnnnnnnnnnnnnncaatcgggcacttgaaatcatgaactacaaatatttgattcaacaccttcaaggatgggaactcaccaccgagatccccaaatctgcatgcaacccccatctgaaatcttcagatgggatttcgcgagatcgggttgcgtgcacccacctgatggatgggcgggaacatggagcaggtgcagacagggcactcaagcagctcgagcacgctagtcgccgacggccccccgaccgctcctaccgcgcccgctgcgtctttgttcgtcctgtcccgacccctgcattcacctcgcgaaacgcgcggccgccccggcggagggcaggtgggcggagtggagcgggaggccaagggcgctcggagacggg

SEQ ID NO: 31169 - DNA, 314 bp, Setaria italica
  Peptide Sequence Number=SeqID_97143
acggccacactgcgaaggaggtcggagagcacgccttcttctcagacagcaccaccgagagggaccgccagcaggccgcggggcagtggcagttcaagaatctcggcatggagccgaagcacagcgccgcgccgttgttctcggccggcgggtatgggaacggcgcggcgtccgcgtacgccgttgatctgaccagggaggacgacgaggagaggcggcgccagcagcagcagcactgcttcgtgctaggggccgacctgcggctggagaggccgtcgggccacgacgccgcccccgagcagaagccgctccgg

SEQ ID NO: 31170 - DNA, 194 bp, Setaria italica
  Peptide Sequence Number=SeqID_97144
gcaacctgacgccgccccggggccgtcgagtgccgggccaggcccgtggacggggacggggaggaggatgacctggcacgccacgtcaggacctgcgaggatgatggcgatggggttaagttctttgactaggttgtttgatccatggactaatttttaatcgtgggtcggatgttgatactaattagaagact

SEQ ID NO: 31171 - DNA, 244 bp, Setaria italica
  Peptide Sequence Number=SeqID_97145
agcgcatctctcccgtcccgcacgcgatggctgctgcggctgcggctgcggcttcgccctcggccgctcctccctccgcggcggcggcggtcttcgcggtcaacggcgagcgcgtggagctccgcggcggcgaggtggaccccggcgccaccctcctcgagttcctccgcacccgcacccgcttcaccggccccaagctcggctgcggcgaaggcacgccaccattccgatccccctgatctcc

SEQ ID NO: 31172 - DNA, 867 bp, Setaria italica
  Peptide Sequence Number=SeqID_97146
ttggtgctactagattcatcatgtactagaattattcgtcatgattttgtcatatcatgattgattatttcctcttgacaaaagagcagacctgtacatgtatcaattgccaaattcttgctagagaacgtataacaacattacgagtctacagaaccttttgttcactagttgcagaaagcatcatcgttccagccttcttagcatttctctgtacaatgattacatgtcatctacgaacagctctcaaacactgctaccggtactctggtgattcaattcagaactaggctcaacacctcctgtaatccaaatgaaacgcgacatgtataggtgtctacttgttgtagtattgtcttgtcttcctttagcctgccggcattgaattccctaaaatttccgtaacttgtgcatgttttggtaatttggcaacaactagcacggtgactgctagggtgttgaggaagagcataggatgttgatagtccgtggtgtgggaagctatcaagtacagaacgacaggaaccgctgtcaaaaactttctgttgcgggtaagctgtttgccattgtccatttgttcccaccaagtcaatgtgttatacatcccttggtcatcagcaaatggagtccccttcttccagtggaaaaagtggtacgtgatcggcgagatgtctcactgttcgggaaaccattgcagccacaccatgccacctcatctgtttacaggaaacaaaactgcaaagtattgatgcaacgtttgcgaacctgaataggggggcctcgcctatccaacttcacatatcaagcggcgtcaggcacaaaagggggtataatgcttctatgggatgaccgagtctttgacatgca

SEQ ID NO: 31173 - DNA, 1016 bp, Setaria italica
  misc_feature (1)..(32): n is a, c, g, or t
  Peptide Sequence Number=SeqID_97147
nnnnnnnnnnnnnnnnnnnnnnnnnnnnnnnncctttaacttaagttggtgctactagattcatcatgtactagaattattcgtcatgattttgtcatatcatgattgattatttcctcttgacaaaagagcagacctgtacatgtatcaattgccaaattcttgctagagaacgtataacaacattacgagtctacagaaccttttgttcactagttgcagaaagcatcatcgttccagccttcttagcatttctctgtacaatgattacatgtcatctacgaacagctctcaaacactgctaccggtactctggtgattcaattcagaactaggctcaacacctcctgtaatccaaatgaaacgcgacatgtataggtgtctactgtgagatgctgctccttagctgccggcattgatcccaaaaatccgaaccttgtgcatgtttggtaatttggcaacaactagcacggtgactgctagggtgttgaggaagagcataggatgttgatagtccgtggtgtgggaagctatcaagtacagaacgacaggaaccgctgtcaaaaactttctgttgcgggtaagctgtttgccattgtccatttgttcccaccaagtcaatgtgttatacatcccttggtcatcagcaaatggagtccccttcttccagtggaaaaagtggtacgtgatcgcgaaatggccgaggttgacgagcgtccacgccgtgccgggggcgcacccgaagacggagaggacgaggatccaggagaagaagaggatgaggatgtaggtggtccagacaccggggtacatgaaccactccgtgttcctgttcagatccgggggcggcaccgcctgcacgtacagcttcgccatcgaaatcagccaaccgccccttctcctcccacttcgccggctcggctccctcgtcggctgcgtgctgctgctgctgcggtctgggagggagggcgggagggagggggacagtccgcctcgggctcgatttataaggatgg

SEQ ID NO: 31174 - DNA, 1197 bp, Setaria italica
  Peptide Sequence Number=SeqID_97148
ctgcgccggcgcgccgcgagtcgcacgccccctcacctctccgtcgctcgctgtctcgcccgcgcccaaatcctagctggcgcgcccacttgccgtcagatcgattcacgagggctacgccacgactgcaattccgccgtcgcagtccttgctgcgcccctgacgtcttcctcccccgcgagctgcggtctgccgcctccgtccactggcgcgaggtccaggccgttgcctccgtccgcagacgagcaccgcggaccccgctgccatccacctgtgtgctcccgaggacgtggagagggagctcccgaactcgtcggcgaccccgcagtcctcgagctcgcacgcgcgagggccgtcgccgtctgcccgcgggagggcccgctgtccacccgcggccttcctcttccggtcctgccgcctcccacggttttttcaatcggtaagacccgacccgacctcaagcttgattcaccagtccgcatgtgcactgatcccagtcctccacaatttgaactgaaagctatctgataagtaagtatctcttagctgttaaggaactgtgattttaatattgtaactgagattgatcagatgattataacttcaaaactagcctattttggagcaaagaaggatttagaacccacccctccgttctccaaaggtgcaccgaagatgccgcaggttatggtggtggcgcggaacttcatggatatggtggctgcgctgcctgcctccaagcttgacatgctctatgactctgccttcatctgtgaggctgtactcaggtcactcccgccactagctaagaagtatgcactgcagatgctgtacgtgctggcaccgttgaccgccgcagctatggaagagtgggtgctcgatgaatatgcttccaagcacagggtcgccattgataagctgctccaactcagggtctttgtcgaagtgcgcgatagataagatcatccatctccgtaagaggatatttatggcttgacgtatgagcagaccataactaacctgggctagaccagttattagtgaatcgattggaactcaaaactcaaaagtggtgatatgctgatatatatcttgtcttcgttctagtgttttgagtcatttattgccttttctgcattcatgggagcttggattttaacagatagcaagttgttagatttttgccccacgacaata

SEQ ID NO: 31175 - DNA, 642 bp, Setaria italica
  Peptide Sequence Number=SeqID_97149
ttaggccattcctaactttcatggtttttgctctgtatatagacgaaaggaggtgagttacaagatgaatcaaaagttccagggtaatatgcagaagtatttggttgacgggtggcgcatctcgtgatccccgtacgtaccccaaggctttgttacctgttggccacggagggtgtaccgagttctccacaccgattttcatgcgggacaaaaatagaaatcagagtgtactttttatttggcacactaataatttccaatattttgaagcgtcgtcggataggaatcctattcagacagatccgaatcccataacaaaaatctttcaagtttgacgttccaagccagataaaaacattggcgggtgatcgggcgtggctctcgacggcggcggcggcggtcccccttacgggcagaactcggtttcttgaagtttcactgacgacaagccttgactcatctgagacatggcacggcgacgcaagggaaatcgaggagtgcagacgacttctatattacccggtctgaacctgtcaagtatgattctgatggtgtggatgattccagtaccagaggtggactgaaagactttggatgggtatctagagtccgcaaatccatcgtgttccttgacgctatcgc

SEQ ID NO: 31176 - DNA, 1644 bp, Setaria italica
  Peptide Sequence Number=SeqID_97150
ggggcgcgcagcagcagcgatgcccccgtcgggtgccgccgcgtcagtcttgctcgtccaccgcgccggcgcgccgcgagtcgcacgtcccctcacctctccgtcgctcgctgtcttgcccgcgcccaaatcctagccggcgcgcccacctgccgtcagatcgattcacgagggctacgccacgactgcaatcccgccgccgcagtcctttctgcggccctgggaccccgctgccatccacctgtgtgctcccgagggtgtggagagggagctcccgaactcgtcggccaccccgcagtcctcgagctcgcccgctgtccacccgcggccttcctcttccggtcctgccgcctccccacggttttttcaatcggtgcactgaagatgccgcaggttttggtggtggcgcggaacttcatggatatggtggctgcgctgcctgcctccaagcttgacatgctctatgactctgccttcatctgtgaggctgtactcaggtcactcccgccactagcgaagaagtatgcactgcagatgctgtacgtgttggcaccggtggccgctgcagctatggaagagtgggtgctcgatgaatatgcttccaagcacagggtcgccattgataagctgctccaactcagggtctttgtcgaagtgcgcgacagacgaaaggaggtgagttacaagatgaatcaaaagttccagggtaatatgcagaagtaaggggttgacggtggaagtttaccaagggaaccgataccgttaagtgtcactggtagattgcctgcatcagcagacctggaagcctatgctcttgatcaatgggagtgcttcttgttgcaattgatcaattcatctcaagtcgaaaaaggaacaagtttcagctcctccatgatgaagacatttcagcgcggccttctgagttcaagggatggtgaagctccaaagttaactgagaatggcttccaatttcttcttatggaaacaaatgcacaactttggtacataatgagagaatacatttcctctgcagaggaacgtggagtggaccctacggagctgatatcatttctcttggaacttagttttcataaattgggagcggcttatagtttgaacactctgactgatgttgaacgaattgccatcagggatcttgccgagttgggattagtcaaactgcagcagggtcgaaaggatagctggttcattcctacccaattagctacaaatctctcagcaagcttgtcagattcatcgtccagcaaagagggctttgttgttttggagacaaactttagaatgtatgcatactctacctccaaattgcactgtgaaattctgcgccttttttcaagggtggagtatcaacttccaaacctcattgtgggagctattacaaaagaaagtatttatggtgcttttgagaatggaataactgctgagcagataatttcatttcttaggcaaaatgctcaccctcgtgttgttgacaagatacctgttgttccggagaatgtcactgatcagattaggctgtgggaaactgaccgtaacagggttgagatgattccatcacatttgtatgaagattttcctagcaaggaatggtttgaacaatgctgtgatcacgcaagagatcat

SEQ ID NO: 31177 - DNA, 235 bp, Setaria italica
  Peptide Sequence Number=SeqID_97151
gcgccttgtgcgcgccggagcgcgtgcggtcgagctgcgcgcgctgccgcctcgcggcccgcgcggcaagggcggactcgatgccggaggttggctgctgctggtgcccctgcccttccgcgcggctgtgggtgcggccgaagcgcttggtgaggtcctgcgagaactggcgcgcgatggacatggcctccgccttgagctcctgcgagaactgcagcagccggtgcgacgacgg

SEQ ID NO: 31178 - DNA, 1572 bp, Setaria italica
  misc_feature (1565)..(1565): n is a, c, g, or t
  Peptide Sequence Number=SeqID_97152
gggggggggggggggggggggaccgtctcatctcgatcccgtcctcatccggcgaactctcatccggaggagctcccggccggaccctcatccggccgaggcgagcaactgccgctcctcccgcgccgccgcggagtcttcgcgcctgcacgcacgccaggaaaatgagtcgtctcttcctcttagactcctcgtcctccgactatgatgacgatgaactcattcttacaacactacaccaagcacatactcaatatgaagctatgaatgttccacggtggggtgtttcagtgcctgggcgtcggtacattcatcgagaccgagttttcagacgctccgacctatggaccatctttcttccggcgaaggtttagaatggcttgctctctgtttatccgaattgtgcaagctgtagagcaacatgataagtattttgtgcaaaaaagagatataaatggacgccttggtctatcatgtttgcaaaagattactgcagcatacatgatgataagtcatggagttccttgcagatttcatggaccattacattcatattggtgaaagtactgttatacagagtctaagaaggtttgtcagagctgtggttgaagtgtttggagatgagtatctgaggactccaaatgagcatgacacagctagattactttctattggcaatagattgtatgcattggcaatggaaaaactgtcctacagcatggcagggtatgcatacgagccatttgcaggagcccacaatcatccttgaagctgttgcttcacatgatctttggatatgacatgctttctttggtttgccggggtctctcaatgatatcaatgttctacaccgatcacatttgtttgccaagctagcacaggggaagctcctgcagttaattataccatcaattatcatgattatatgatgggatattaccttgcagatggcatctatcctcgatgggcgacctttgtgaagacaatatcacaaccactaggcaataagaggaaatatttcgccaagggacaagaagcaactaggaaggatgtggaacgagcattcggagttctagaagctcgatttgctattattcgcggtccagcccgtttctgggataaagagacgctcagagaaatcatgacggcttgtgtcatcatgcataacatgattattgaagatgagtgaaatgaagatgaagatttccactacgacggtgtcggccaagttgtgatacctacaccacgtgaagtgcgtaaccgtactcaagaactacatgatttcatccaagttcatcataatataagagacttgcaaggccattctcaacttcaagaagatctaatcgagcacctgtggaaccgacatgcggacatgtattgatcatgtattattttctcgttaatgcaccatgtattttctttaaatcatgtattttatttgtgtggactttgtacgaacactatctgtaggctatcatgttcatttttgtttgtctttattatgtgtagattattagcattcgaaaaataaacattaaaaaatggcataaaaagaaattaanaaaaaaa

SEQ ID NO: 31179 - DNA, 475 bp, Setaria italica
  Peptide Sequence Number=SeqID_97153
taagccagtccacagcagtgctgccacttgactaagtaatagcagaactctaagcctgtccacagcagtgctgacacttgaataagcgcagaattgataaaattatacctactcccaccacttttatctctgtacctgcaggaaagaactctaattgatgttttgtgtagatcaagttgcttctcatgttgatgctgcttatgtacttcactacctcagccttttgtctactgcactttgggtgtaatgatcaaagggccatgcctcactccagttttcgaataattgatgcagcgcaagaaagaaaagcaacaggaggaaaaggatgtggaatcaaccctggagaacaaagaatgggaaccataaagctcattaactcacatatgatccaacatggataccggatcagctgaagagctaggtgtctgttagactgttatcttctttctccatggcagtactcttccatcaacaa

SEQ ID NO: 31180 - DNA, 721 bp, Setaria italica
  Peptide Sequence Number=SeqID_97154
gtttgtaacggtgtctctggcacaagaccgaatcgttcttaccgtcctcttcttcgccgtcgccggcactgccgaaatctccaccgactcctcgtttcctttcttgcggcgacggctgggtgagcgccgccgtccttcgccaggccttcgctggcgacgagcatccaccaagaaacacatcaagttgtttggtgataatggacccaaagcattcagctgaagtgtccaagcatttggacaagcaaaatcaagcactaatgggcacataccgagcaatgtcccatgagctgcataaacttcaggtagaagaagaaacaatcatgcgtaagttgtatgaactgatgtctgcagaagggcttcttccaaagcgcaagaaagaaaagcaacaggaggaaaaggatgtggaatcaaccctggagaacaaagaatgggaaccataaagctcattaactcacatatgatccaacatggataccggatcagctgaagagctaggtgtctgttagactgttatcttctttctccatggcagtactcttccatcacacctcagacgaccactgcatttaaatttgcagtatgatggattagcaatagagaatttcagctccagatgtttcacaattgaatctttgaacctgaatattggtgtatagatgaactcgaaccactcccttctactatgattgtttagaaatatagatatagattagcagtagta

SEQ ID NO: 31181 - DNA, 877 bp, Setaria italica
  Peptide Sequence Number=SeqID_97155
atcaacaagaatattattgcaccgtagcctcctaactcaggcagccaaaagatcgcatcattcaaccaataaatcacacaataacaagcacttgatgactcgtttcaatcactaagctacatttttaacaaaaccacagccgcaacaaaagaaatattcaatgcgtttctaactcggttgattccttgttcaacaaagataatgtaaattcagtcctaaacaagtttcacgagagaaacacagcgaggcatttactaggcacatttgcattatctgttgtcactagactggaggaaataaaaaaaatatagctgttcccccctctgatccctttggtcattattgttccagacgcaagacagaacgccctcactatacgaacacaggggagactagccaagatttcccagatgccggctaaaattagcggcctcttctcactgcaaatcggttcgtcaacaagcagaaatcaaagtgtacctggtggccactcgtacaacaaaatgcgctaaaaatcagagtctctcgggctccaacccactccagcctcccaaagaagaaatgaaacaaacacctttccccaaccaattcaccgccatttccgccaccagaaggaactgagtcagtagcaaaagcaaagtttgtttggcatttcacgactacggtttgcgcacactctgaaaccgaaacgagcaaaggaagaaaaatggtagaaaaagagcatcccgctttgcaacggaaaacgcaagagctggacacgagagaattgagccgcctcctcccctcacctcgccgagacgagccgccgacgagatccgggccaccggcgcgcgccggccgcctccatcccggcgcccagcccgcgcggctcgaccgg

SEQ ID NO: 31182 - DNA, 423 bp, Setaria italica
  Peptide Sequence Number=SeqID_97156
cgattgatcctgctgacaaatccccctttcctaggagacatacgttctgggtcccatcaatcttgtcttgaaacaaacatgttcagagcacctatatttcctcataaggttgcaccaactgattacctattagttcgttcagccaaaggggtgctttcccttcgtcgcattgacaagctatatgctgttggtcaacaagaacctcatatggaagtcttttcacctgggactaaaaatgtgcagaattatcttctaaatcgagtgcttgcatatgtttatcgtgagtttcgtgctagggagaggcctgatggtattcctcagattcgggcagatgagttacccattcaaagtcctctgacagaagctatagtgaaaaaacgattgaagcattgtgcagattttaagaaaggaccaaagggacta

SEQ ID NO: 31183 - DNA, 214 bp, Setaria italica
  Peptide Sequence Number=SeqID_97157
tggcggctcacggcggcggctgagccgtaggccgtgcaggagcaaccggcgcggtcggaagcgtccggcgagaccggcgccgcggtggctccccaagcatcctccaagctggttcttgttgtcgggggcactggcggcgttggcaagacagagataccgctgctctctgtctctgttccatcattgcagtatttcagctcctatacagtaaagc

SEQ ID NO: 31184 - DNA, 480 bp, Setaria italica
  Peptide Sequence Number=SeqID_97158
gagggcgagcaccaccgcgcgtgcgccgccgtcaccgaccgttcccactcccaaccaccgccccgcgtgatgaccggcagctccgctcttctgcgcgccggccgcggtggccgcgctgccgccacctggagagcattacagcaggcgtgcgttagcccagggattagatcattatagccaatgattgccttcgaaaacaagcccaaagtgagctccaaacgatggtgatgagtgatgacaagtccacgagcacgattgcacgaaactgaattaaaaaaaaaaatcagcagcactcctatgtgtataaagttcctttctttttttgggaagcatatgccttggctctctttcagtagtgtcctgcttcactgatcactgttgcaaacttgccggcgagctctgtacagaggcagcacggatgcagtgcagtagttgtgctctccctgcagcacattgatttctcgcgtcgactcgaccgag

SEQ ID NO: 31185 - DNA, 288 bp, Setaria italica
  Peptide Sequence Number=SeqID_97159
gtctcggttagcgtggagagagaaaggtgggggagggaggagagggagaggtcaagccggagccgagaacagctcaacagcagagggccgaggaaaaggagaggcgtgggaaggcgcccagcaccctcgagggagagccagccagccagccacccccaccgcaccgcggctgccgtacgcggagcaaaagccctgcatctggatcaggcctcctcctcgcgccgcttcctgcgctcgccatcgccaccccgggccgccgccgagtggagatccgcccccgggcctggg

SEQ ID NO: 31186 - DNA, 276 bp, Setaria italica
  Peptide Sequence Number=SeqID_97160
aaacatgtagctttttggaagacgaagtttctagaagcccttactctgtgattgttgaggttggtccccggatggcattttcaactgctttttcaaccaatgctgtctcaatttgcaaagctctatcactaacagaagtaacccgcttggagaggtctagaagatatcttttgttccttcagcctgggagtggtccgcttgatgaaagtcaactcaacagctttgctgccttgattcatgatagaatgacagagttgtatttatcctagcaagctc

SEQ ID NO: 31187 - DNA, 262 bp, Setaria italica
  Peptide Sequence Number=SeqID_97161
cggattcgtggtagctgagttggtgtggcgctcagagatttggttctcttgttcataggtttggggagatcggccgggttctcgccgcgagattcgatttttgcgcctgttttattcgcgagatcgcagcaacgagtctcgattgctaagcaagctaagatttcctttttctagatcaatcgtaaaagaagaggagcaaataaagcagcaagaggaagaatttcgggggtgagcaagggagaaggcataatgctggaaaggg

SEQ ID NO: 31188 - DNA, 443 bp, Setaria italica
  Peptide Sequence Number=SeqID_97162
gggggcttccgggggcgatctctgagcgcagatttggtgcctgcgatctgccatggattcggtttaggtgcgttccttttccttgttttggcgtcttgtttgcttggctcggattcgtggtagctgagttggtgtggcgctcagagatttggttctcttgttcataggtttggggagatcggccgggttctcgccgcgagattcgatttttgcgcctgttttattcgcgaggtccggcctcctcagatctcaagtcttcccactctgttcttgatccctttgctctgcttgatttcgtccctgcttattttttttcgttcgattttttgcacctgcagatcgcagcaacgagtctcgattgctaagcaagctaagatttcctttttctagatcaatcgtaaaagaagaggagcaaataaagcagcaagaggaagaatttcggg

SEQ ID NO: 31189 - DNA, 574 bp, Setaria italica
  Peptide Sequence Number=SeqID_97163
ggcagcggccgccaccaggctaactacctagtgtgggggaggaccggcggtgggggatttctcgggggcggagtggccgggaggacctgattggggggcttccgggggcgatctctgagcgcagatttggtgcctgcgatctgccatggattcggtttaggtttggggagatcggccgggttctcgccgcgagattcgatttttgcgcctgttttattcgcgagatcgcagcaacgagtctcgattgctaagcaagctaagatttcctttttctagatcaatcgtaaaagaagaggagcaaataaagcagcaagaggaagaatttcgggggtgagcaagggagaaggcataatgctggaagggaagtcctacctcgtgtcgcgctccgtgccgagctcctgcgaggcggagacggagtgggcgtacctagcgaacgaggtcctcagcggcaagcgcccggcgccggaagatgtcggggtcgaaggcctcgacgaagctgacggcggcggcaagcgcagcaagccgccgtctccgcagccgcacacgccggacatcaccgaggccacggctccgg

SEQ ID NO: 31190 - DNA, 269 bp, Setaria italica
  Peptide Sequence Number=SeqID_97164
ttttttttttagttcaaaccaagacaaaccaaaggcacctttcttcttgcctggagacttgagtgagggcaaagtacagtacaacatatgaatgttgagttgcttaccgtaacacaagtacagttgtacaaatcaaacatgattgctccataatcataggcttctaactccctactaagctcctgaattctaacaggaggatggacattaggaagcttgatatatacagaacaatgtcctaattaagccacacacacacaccataccaa

SEQ ID NO: 31191 - DNA, 1272 bp, Setaria italica
  Peptide Sequence Number=SeqID_97165
gggccccgcctccccacggcgatgcgccgggagctcgacgcgatgggtcccggcggctccgacgacgaggagctctccgacgcgggtgcccaggacgtgtacgagtacgaggagggggtccccgaggaggaggccggcaagaacggccgctacgacgccgtcgccaagtatgagtacgagttcgacagcgacgcctcggaggcggatgaggatgtgccttcggaggaaggtgaggatatggaggaagatgacgatggtgaggatgaggagaagcagataagaatacttcaggaaacgactggaatgcctagagaagcctttgatggaaagaagaggaaacagccgttggagctgccattgcagcacggtgatggacctgtcacaattcatgatctcttggataatatccagggaaagcctgggtatagcaaggtccgtaagaggctgcagcagcaggagaaaaaaacaatgattgtggctgccccacttccaaaagtggatagggagaagcttgagcgtggcgtggcgaatcaggaactcaagcgtgagctcacaaagtgggagagaaatgtgaagggcaaccgtgaagctcctacactattctttgaaaatgatgccaacttgggtgtgaacaccgttgcggcaattgcaagcaaatttaaaccaaggagtgagtttgagaagagaatggctgagattacacgaagcagtgaaataatggaggcacacaagaatgacggtgccaaaatcctggaactcaacaagattgatgtggaagatgtgagagaacgccaaaaccgccttgctaaaatgcgcagccttctatttcgtcatgagatgaaagcaaaacgtgtgaagaagatcaagtccaggacatatcaccgaatgttgaagaaggacaaactgaaggtagcatcagcagaatttgaggcagatcctgaagctatcaaagattatgctatgaaacaagaatttaaacgtgcagaggaaaggatgacattaaagcacaagaatacatcgaaatgggcaaaacgaatcctcaagcgtggattgtctgttcaagatgaaggcacacgaggctgctattacagcacaactccaacaaaatgctcttctgactagaaaaatgaattccatgaaagatgattctagcagtgaggaaagttcagatgatgacgaagatgagaatgactcagaagcaaaaaatcttaaaacagagggaaagaaaagattcttaaagttcttagaagaagataaagagataccaaattc

SEQ ID NO: 31192 - DNA, 575 bp, Setaria italica
  Peptide Sequence Number=SeqID_97166
gttgacagagtattttcacgaacagagcaagcagaggagaggaggtaggagcattgctgacaaactgcgacattcaagaagaaattgtgtgcaacaatcgtgaagcatttgaactaatccgtatgcatataggggggattgaaaaggtacctcaaggatgctcacgcttgaaggactgaaggagcaaatgaagatgcaggcctaggcagattgcagggtatagccagtgccccattgcctgggaagattgcagggcagacaaggagaacaaagggccaggggcgctgcttcacgggatgaggtcaagcgagtagcagcccaagcgccgctgccgcggacccaatcgctcccaatacccccccgagccgagatccagggaccagccgcattgtcgcagatcgaggaggggatggcgccgcagctaaccggcgcgtcggactcggcggccgcggcggccgtcaagctgcagttccgccactaccaccaccactgcctgttctagcatccagctttggtggacaatgaagaaacactatgcaatcaaaatgaaaaggaaaggttgagaagataaggtg

SEQ ID NO: 31193 - DNA, 237 bp, Setaria italica
  Peptide Sequence Number=SeqID_97167
tactccgccactgctccccgcatcaaaagccgcaccttcttgtgcgccaagctcttggtcgcgaccggatggcatgtgcggtttgtaacgtaacgtgtgctgatgggcacggcgcgtgcagggtgaccaggcgtcgatcgtggcgggcgccatcaacttcgtcaaggagctggagcagctgctgcagtcgcttgaggcgcagaagcggcgcgcgggctcgtgcaccgaaccacacgg

SEQ ID NO: 31194 - DNA, 470 bp, Setaria italica
  Peptide Sequence Number=SeqID_97168
aaaggacgccgaaccgcgccgtcctcgctgccaaatcatctgtcgtctcgttggcctgccacgcgcccgccaccgaaaacaccggcgagcccaaccgagcccccctagcgccgccgcgcctctgtttgcgacccgtgcggcgtgcccgtgctccgctgcgatatcaatcgcatggcctgcgccggcgcctcgcggaaggtctcggcggtgctctaccactacccgtgcccggacggcgcgttcgccgcgctcgccgcccacctctacttctccgccgccgcccgccccgtccgcttcttccccaacaccgtctacgaccccatcaggagcgattcacttcctgtggatgaaatagaagatgtttacctccttgacttcgtgggacctcctggttttgttgaagatatagcccctaaggttgaaagagtaacaattctagaccatcataagactgtcttttgagagtttgt

SEQ ID NO: 31195 - DNA, 278 bp, Setaria italica
  Peptide Sequence Number=SeqID_97169
gttagtgcaaagagactggtcgctggagattctgcctttttatctggaatgacaataaccagctgcttctgggcattcgtcgggcaaacaggccacaaacggtcatgccatcatcagtactttctagtgatagcatgcacattggtctgctggctgcagcagctcatgctgcatcaacaaatagccggtttactattttctataatccaagagcaagcccttgtgagtttgtcataccattggctaaatacgtgaaagctgtgtaccatacccgtata

SEQ ID NO: 31196 - DNA, 1410 bp, Setaria italica
  misc_feature (12)..(12): n is a, c, g, or t
  Peptide Sequence Number=SeqID_97170
tttttttttttnttttttttttttttttctttgcaaaccgtttcacatacttccatatatgcggaaaatgagctgtttcctgaacaagtcgagctagcacacattgcataaactggggcatcagtagagcattcgaataaattacaccgtaatatcggacgcatgcctaaaaatcaaagaaaatgaactgccttatgcgtacagcatcttaacatgacatgggttcgacaaaactagagaaccgaagaacagaggtacagagagcagatcaatctttcatgaagactcaaacttgagcggtgccttgtgtgaacttgggatcctcgcatctgtactttccatcagggccaataccaaaacctttagggtcggcaaacacgttttccaacaattggctccgtggagggtgcgggcttgcgtcggcaaactcaacagcctcctcaacaacattgtcaatgttcttctcaatgctcttcagctcaggttcagttgcgaggttctgctcaatgatgtacttcttcaaggccgtaatcggatcccttgcagcatagtgggttttctcatcaggcttcctgagctcatctgggtctgcaagagagtggcctcggaaccggtaggtttcacactccactagggttggtccttcacctctccttgccctctcaattgcctccttagcaacctcccttaccttcaggacatccataccgtcaacatgcaccccaggcattccaaatgctggtcccttcttataaatctctgggtccgatgtagccctaaggtgtgacatcccaattgcccacaggttgttctccacaacaaacacgataggaagcttccaaagctgcgccatgttcaggcactcaaagaactgcccattgttacaggtaccatctccaaagaaagccaatgtgacatcaagcccatcgggacctgactccttgagcacctcatggcggtacttagcagcaaaggcagcaccagtggcaacagggatgccctctccgatgaaagcaaagcctccaatgaggttatggggagcagagaacatgtgcatggaaccaccctgcccacggcagcagccggtggccttgccgaagagctcagccataacagaacggggtgggacacccttggacagcgcatggacatgatcacgatatgtgctaacaacacagtcagcttggtttagaagcttgataaagccagtggaaacagcctcctggccattgtaaaggtggacgaaaccaaacatcttgccacggtagtacatttgcgcgcacatatcctcaaagatacgaccaagaaccatgtcctcgtacagctcaagtgcctcttcccgtgtcacagccggatgcgcgggcgtggcctgcgcggccttgttcccggcgagcacgtcggaggagacga

SEQ ID NO: 31197 - DNA, 387 bp, Setaria italica
  Peptide Sequence Number=SeqID_97171
gtatgaatttctcggattgttaggtgttcatgaaacgttgtacaggattgagttgtatatacgtcaggaaacacttgcccaaacttagaaactaacaaagagaagctcatctgtttaccacatgaatgatttgactcgctacacggctgacgattgacggggcaagggtcgagagacgagcactgcagttccacttgttgctttcgctgatgcaatctcttcaaggcgtttccatgtggcttcttgcttcaacttaacctccttctccttggctttctcctcctcatatttccgcagacactcagtgaatagtccagcatcatggtcagagaacagttttcgaacatttagagtgaggctttgaacagcttggttccagtgcccgtt

SEQ ID NO: 31198 - DNA, 774 bp, Setaria italica
  Peptide Sequence Number=SeqID_97172
ccgccgcattcgctgcgcctcgtcatcggcgacctcaccgccggcgacggccacgccacaagccggccgccatcccttccacggaagtcttctaacatagggaggcgtcgaccctcctccccctcctgctgctgctcctcgccaccgccctcccctggtttcgaaccggcgtgggggtggagatccatccgcccttggatcggtttcctcctttgttggctggagcggctcgatttgctcgccaagaattcagattttggagtgacgcttgccttccttggcatgacaatgtactagggtttactgttcagtaataggctagtagctctgctactcggaagcggacaaccgttctcagaagctctttgaagctggtgttgggtggatttttactaatctgggtgatagcatgataaagcaattccttggacggctccctaagaagccgtccaaatccggggataaggatcctattggcaggcccagcccctcggtgtcacacccgccattgggtccaagaactgcagacaggacttccaattcgagtagccagccaccggttatctccagctctgggctcagttatgggagtggcatgcatgtcggcaatgcaaactcgagggtgaacatgaatggtgattcagcctcatctgcctttgtgtccttaccaagctttaaggatgtgcccaactcagagaaacagagcttgttcatcaagaagttgaacttgtgctgcacccaatttgacttcaccgatccaacaaagaacattaa

SEQ ID NO: 31199 - DNA, 1798 bp, Setaria italica
  misc_feature (1)..(27): n is a, c, g, or t
  Peptide Sequence Number=SeqID_97173
nnnnnnnnnnnnnnnnnnnnnnnnnnnagctaaacttgctcatattggattcatgcatcagggagaaaattgtacttccatttacaacaatgaaggcccatgccagactcaaagaataacaacaacatcgactcatttttcagactctaactagaggtctatccaccgactaccgccaatttcgtctccgaaatcagatacccatgagaagattgcaggaccagcagatgatacaaatcgtaaccaacttcagacaaggcaaataaatgatacagcaatcaactgcagatctcagcatgccaaaagaagccaggactcaggaccaagaaaatgatgctactgtgcctaaacccatctggcttctcagatcttttgtcaatttgcccaccttaatatacctcgtatatacaactcaatcctgtacaacgtttcatgaacacctaacaatccgagaaattcatacgtcaggaaacacttgcccaaacttagaaactaacaaagagaagctcatctgtttaccacatgaatgatttgactcgctacacggctgacgattgacggggcaagggtcgagagacgagcactgcagttccacttgttgctttcgctgatgcaatctcttcaaggcgtttccatgtggcttcttgcttcaacttaacctccttctccttggctttctcctcctcatatttccgcagacactcagtgaatagtccagcatcatggtcagagaacagttttcgaacatttagagtgaggctttgaacagcttggttccagtgcccgttggtattcctctccagtgcaggaaagatgataggtaatatgaccctactattttgtttgatcaaactctcgatatggtcattgttccacaaaaataacgctcgctcagcaacctgaaagtgtgagctattcaggcaccgtgcaatctggcggaaaagagggaccatgcatttctggaactctgcaggttgtgtagcttccaatatctcctccaactctcccagaaacatcacctccttggagctgtttgtgatgggccaatatttcaataggcctctgataactgtatctgcaagtttgcaatccttttcgacaaactgggtgatgcagtaagacaactgctgatgatacattgaaatgccctttggcttgtgaagtggaattaaagctcgaacaaggaacaatttgtgctcttccttaagtggcaatgcaaacccattgatgatacttcccaaaatctccagtagctctgcaattccattgtgcttttcagtttcatagataaactgatagaagatgttgttgatggctttcctaatgtatggtcgatgaaccatgaactttccatagacacggtggagtatcatcttgaggtactctctctccctagggtcttcagaatcaaagaggtcaagtagcctcagaacaaacgaatgatcgatgtatcttttagccaacttggcatcagtctctggagactgaatgaacctcaagaacaactcataaacaatctgtaagtgcgaccatgcaggatccatgacaggctcctcctcatccagatcaaagccatccactttgttctctctgggaggggtactcagtgtcctgaacaggtttgcagaaaccatcttagtgatctcttgcatgcttgcctcagaaaatttcccactggcggagccaatatagtcaacgagctccactaaattttgcctctttatttccttctcctttatgttctttgttggatcggtgaagtcaaattgggtgcagcacaagttcaacttcttgatga

SEQ ID NO: 31200 - DNA, 235 bp, Setaria italica
  Peptide Sequence Number=SeqID_97174
catatgattatgtatcaaatttgtaatgttaccaccagattcaacaggtatctgaggtaaataccccataaactgtaaaccactcaatccagcctgcaatctctgctccagataaccatttccagttatgttgatattcttcaatccattgattataggcactctgcacgtaccatatgcttcatctctcattggacaagttagctaccacaagaacggtgcgagtggatggttg

SEQ ID NO: 31201 - DNA, 414 bp, Setaria italica
  Peptide Sequence Number=SeqID_97175
ttatttgttattttatttgtttatttcttaaattttttgtttaatttgttttaccttaccttagttattttctaactaggttatctgaggtaaataccccataaactgtaaaccactcaatccagcctgcaatctctgctccagataaccatttccagttatgttgatattcttcaatccattcatcaagagcatttcttgttcactgagcaatttcgaataatcagggctattgaaatgtggaaccattgaggcagatacccgcaggtcagaggcaacatctgggcaagctgaaattgtgttctgaggaccaacatgctgtgtaccattgcttgtccagctggaagcaggcacctcaacaggctgcatggtagcttctaaattcgcagcaagtggaatcaccttaggtaatta

SEQ ID NO: 31202 - DNA, 397 bp, Setaria italica
  Peptide Sequence Number=SeqID_97176
gaggtcttaaatgcacagacacaaaggtttgatgaaacagactgccaacagatcaatcatcttccactcccggtctttgaagcatggcaatggctgctgttaggtttgggattgccatcgtctttgggccaaagagggagtggaagatgattgatctgttggcagtctgatgggatgaattgtatgaggtcttaaatgcacagacacaaaggtttgatgaaacagactcgaatccagtgattataggcactctgcacgtaccatatgcttcatctctcattggacaagttagctaccacaagaacggtgcgagtggatggttgttggagcaactgatatccacacttgattggcctttcacgtctagtttggtttccgtcttattatttgttcgtta

SEQ ID NO: 31203 - DNA, 3760 bp, Setaria italica
  Peptide Sequence Number=SeqID_97177
gtcgtttttattgttggtagctagataagttgtctttgtggaaccttataattatggttttgctaatttcttttatagatcaaatgtccaagtcttactctaaatgaggtctgcttgggatgtttgcatgtggtgcttatacattgtttggttggtttgcaatttacagggattgccatcgtctttgggccaaagagggagtggaagatgattgatctgttggcagtctgatgggatgaattgtatgaggtcttaaatgcacagacacaaaggtttgatgcaaaccgtctgcatttaagatcatacaattcatcccatcagactgccaacagatcaatcatcttccatctttggcccaaagacgatggcaatcccaaacctaacagcagccattgccatgcttcaaagaataccattctcaaaagaaatttaacactatgagagggctgcaggtatgggccgaactcaatagggggtcaagctgtgccacttaatccaacgatccccagcaactccagcaatcattctggtacaaaataccgagtcacacatggtaactgttggaccagatagaatttgttggctcttgttcagccatttgaccactttgctgacttctttgcgggaaattttggaacatattctgttttgcaggctcaaaaaggtggaaatcttgccatgtctgctcaatggccccttgcgggtgcaccccagagacctgttgtttcccagcaaaggggaatgtagtggtgaatgcagtgctacttgcactcacaccaggataaacagctctcaaattgtgaacatgatccattgatggctggtagccatccaaccagctgtagtcatcgacctgtgggctctgcagtttttcaactgaaatagaatcgtcttgacgcttaggggtaacatgattaaatcctggaggtggtccaacaggctttgacggacgactaacagggttcttctttgaagcagctagtggtgtttcagtgaatttcagcggtacgccacccgatggtgctattgaaggtacaactgaatcaaatgtagaggggatggtctctccagttattttcatatgattatgtatcaaatttgtaatgttaccaccagattcaacaggtatctgaggtaaataccccataaactgtaaaccactcaatccagcctgcaatctctgctccagataaccatttccagttatgttgatattcttcaatccattcatcaagagcatttcttgttcactgagcaatttcgaataatcagggctattgaaatgtggaaccattgaggcagatacccgcaggtcagaggcaacatctgggcaagctgaaattgtgttctgaggaccaacatgctgtgtaccattgcttgtccagctggaagcaggcacctcaacaggctgcatgagttcaaatcttgaagcagcactaggaatcaccttttgctcaccattgacagcccaaccaatcgaagaaatgggaagtgactggttaatgttataattaccagcaactgatacagatgcagtgttattataattaccagctgcagacattgatgcagtgctctgaacagacactaaattagcattggtcggccaaccaggagcagacactgggacaggatgggtgtatccattaactgacaggtctgaaggagcttttggaaacttctcagaagccgtaggcttgaaaacaatttcttcatcatcatctccttcaggacacaactgcactttcgactgaattgcactcataccagaaactgaatcaaatcttctagcagcttcatgctccatttcaattgcatttgttttaagaacatcaggagattcatgtagaggggcatcaactttagaaacaggaggattcttggccataacaaacttcttagaagatggatcaaaaaatatcctcaactgatcaatctgaacaaagttcagcagtgacttccctgcggcaaaaatccgttggacccgtgctttcttctccttggtgcttccaacatttccaaatgcatgtttgcttgagaaatccaaaatgatatgtgcaggaactaatggcaaaaacctctcaattcaagatcttcccaaagggcaagcctgttgccagtttcaccctcctcatacatgctcatattagaaaagcaagcctcatcgtcatcaccatcaacagctgcaaggttcgtgaggaccagcttattcataaatgcaatacactggttccagaagaaagatcgggcatttgcatgtttttcctccatctctgaatcaacagccaattctggatgggatgccagccattcgatgtagaccagaatggctggcagataaaaacttgacgcaacatcccgaagctctgaacacctcctgagaattcgtccaacaaactcaaaagcagctgtaaacgcactttgaagcagtactctgcgttgcacaatttcagcatacgactggctatccggttctttctttacattgtgcactgtgaatataaggatggcggtaagtctaacaacagataatgcattctctgccgcatcagaaccaaaattaagctcctcctcaagaccagaagaaagaagaatctgcaaatcattgctgactgaagaaaacagctccccaaatgtttccaaactggtcctcgtgaaaagaattccattgagcctaacaaatcgtatatagaaggtcttcaatgtatctggaatattgcactcccgttcccttgcaactgtttctgtattaacatcttttggctgaaaccttacttctccccgtcctcggcccctcccagatgaccgtgggggtaatatcttagcaatgggaactttattgttatctggcagctgtccatagctttgacgattcttctcaaaaagaataatcaagttgtcccgtgcagtactaaaaggagtatccgcagctaagcttcggaagtacctataaacagctaccacctcattgcctgagtaagaagctagtatagcaagctgatgatgagggttgccactggaaggatagatagaagctgcctccttgtagtaactagaagcggcagcatattcacgactagcagaatcaccatcaccatgcaagctcttgtaacgagcaagatctcccaaatatatcagacagcgatggcatgaaatcaaacctttcctcaattgagctgttttcttgtcagagttgctagcattctcaaagccctccggaaagtaaccgagtggaaggccacaattggatttgatctttaacatcaagtcatgatagaagccagttgcttctgaaaggaagcttttgaaggctgatttaattctcttgactcgatctgggttggcattgttcttcccactctgagatgcagccgagcttgcggcactaatgctcctcctgaagtcctcgattcttttgtagtgcaactgccagaggagatactctacctcattctgttcagagaagtcattatctgtaagaattatcttctcaaagttgtcacgcatctgaatccatgtgttgggatctgatgggagtttggactgcacggacttgcggagctgatcttcgagttcgttgttcttgttgaagaggcgctccgcgaggtcccgcgaggacgaggcggaggtagcactatccatcggaacagtcatcatccatcaaacgcgcacgggattcagcacctggtcgtcgcttgctctcgcgacgggagcgagagaggagaggggaatttggtgggggattggagagcgagcgaga

SEQ ID NO: 31204 - DNA, 768 bp, Setaria italica
  Peptide Sequence Number=SeqID_97178
ggagttgctggggatcattctggtcaaacgagttaccatgtgtaactcggattttgtaccagaatgattgctggagttgctggggatcgttggattaagtggcacagcttgaccccctattgagttcggcccatacctgcagccctctcatagtgttaaatttcttttgagaatggtattctttgaagcatggcaatggctgctgttaggtttgggattgccatcgtctttgggccaaagagggagtggaagatgattgatctgttggcagtctgatgggatgaattgtatgaggtcttaaatgcacagacacaaaggtttgatgaaacagactcgaatccagtgattataggcactctgcacgtaccatatgcttcatctctcattggacaagttagctaccacaagaacggtgcgagtggatggttgttggagcgactgaaaggccatcaagtgtggatatcagttggttccgctatatgcgatctatctacgaataaaagttcgaggaacaactagcatgtgtcctagtcgtttctcaagtatgattactgtgtcgttttatgattttatcatgctctgtaccgtttggaaacaacgtgtcggtcgcacttgttgcaagttgcaattaaatatttggaacagtttgtcatggtatttgtgtgggacctatataaatggtttccgtttatctttgtaacaaaaaaaaaaaaaaaaaaactaaaaaagagaactagccaacggacgaacaacaaggggaagtaagga

SEQ ID NO: 31205 - DNA, 262 bp, Setaria italica
  Peptide Sequence Number=SeqID_97179
tgctaatgtaggaaggagtgagatggcagagcttaagcatctcaccagccttcgtaaactcacaatcacatggagtgagataccaagcatattagatggtgactcagacacggtgaaaggtaggcgtgccgaacttattgagaaatggaccagctttgagctgccacaagagcttttgaaactggatcttcggtgctatcctaagaatgagctaaaactcaaaaagcaccagaatctcaagaagctttattaagaggtggag

SEQ ID NO: 31206 - DNA, 274 bp, Setaria italica
  Peptide Sequence Number=SeqID_97180
atcagtagagcttatcttcacaccacttacaagctccaaaaccaacacgccaaagctatacacatctgatttagcagagaatacacctcgcatcgcatactctggagccatgtaaccatatgttccggcgactcgctttgtgtttgcgttctgttggttgtcactgaacatccttgccataccaaagtctgctatcttaggtctcatatcttcatctagcaaaatgttgcttgctttgaggtctctgtgaattatcttcagtctcgaatcttga

SEQ ID NO: 31207 - DNA, 426 bp, Setaria italica
  Peptide Sequence Number=SeqID_97181
cgcatccacatcgccggcgaggagcagcggattgccggagaggcggagacgccgcgagcgcactcaccatggacgagaaggagttccggcgcatgctcgagctcttccccgtcgtccggtcccgggactactgcgctgagcctggaacatcaagtagaggcaccagacagcaatcacaggttcaggaggcaacaaagggcaataaaaaggatttatctggagcagaagatctgtttatgcagaagttgaagatggctgctgagaaaaagattggagcaacgaaggcagagttcttctgtaaggcatttgaagaagctcatgaaaaactagtttacaaagagctgaatcttgatgctgctaagaagtttctgagtgcgtatgagagctgatgatggaacaatagacagatgctgctcgaagtttcgc

SEQ ID NO: 31208 - DNA, 331 bp, Setaria italica
  Peptide Sequence Number=SeqID_97182
ttggtactcggatgctcatttccttcagcgagtcctttttgaatatgtggtacgcatggtatccttcattacactcatccattatctgttccctaaggctaagtaaagcatcgaagagcatcgatgaaaggttctcatcaacttcactttgttgctgaacggtcttattgatttgtggaaataatgatgcatcaagtttccccatcttggaggccttatcaggagcagggaacttcaggacaatgctgtgtttgccagagcgaagctcattagcttttgaatgattagcctttagtacagatgatattgatccgtatatgttgtcactctt

SEQ ID NO: 31209 - DNA, 241 bp, Setaria italica
  Peptide Sequence Number=SeqID_97183
ggcggccgacgagcatggtgctgcggagaaggtttgcaccgtggaagcgctggtggcctgctggcttcaccgtggatcctccgcaccaccattgcctcccagcctgcaggtcaccggttatatggtcagatgctccgctgtccatgtaccaggttgtgtccaccccatagcttgttgcagctccagcaatcttggggtgttgttgttcttctccattctcatcatacatgtaacagcaggt

SEQ ID NO: 31210 - DNA, 394 bp, Setaria italica
  Peptide Sequence Number=SeqID_97184
ggtcggtgaggaccacgtgggctcccagcagcgccgcgacgcaccccaccaggccgcacccggatccgaggtcgaccgctcgcgcgtcgcggaggagcagctgctgggagtcgacggcgtgctcgaggaacttggcgagcacgacgccgctgtcccagacgacggctccggtgacccccggggtggacatggaggagggggactgcagcagggagaggcgccgcccgcaggcgtcgagctcgaaggagtgcgcggcctggcggaccaaggcgttgttgcggtgcgccgtgggctggccgagcccccacaggagcatcgtctcccccgccgcgctctccaccggtcgcaccgcgccgccgtacgcgcccatcccgctgcccatcctccactcgaa

SEQ ID NO: 31211 - DNA, 292 bp, Setaria italica
  Peptide Sequence Number=SeqID_97185
tttttttttttttaggtaaggtaacaactttacacttggtaaacttgattcaaatgttgtaacatgtggaagttcagagaataggagaacaaactccaaagtgtctgtggtaaactggtaacggtatgtgtcttttaaagactacgctaacctactgtgaaatgaatgaatttaacaacatttgaatcaagtgaaaccaagtgttgtaatgtcaagttttttcttcttctaaacttcaactatttgctcgtgtgcaaaacaaaaatctccgtattatgcatccagtattata

SEQ ID NO: 31212 - DNA, 265 bp, Setaria italica
  Peptide Sequence Number=SeqID_97186
gaggcgacgagatctcaccgggccaaaaatcccgcccgccgccgattgccgccgccggtgcctatcgatccgccgactgccatccagcagatcggcttccttatccgtttggatccccctctcgtgtccggcgatggaggggcggccggccggcgcgtggcgggtgcaggggcccgccggggcgcccgtcgcggcggggctgcccatcggattccgcttccggccccaccgacgaggagctgctgcctccactaccctccgccgc

SEQ ID NO: 31213 - DNA, 451 bp, Setaria italica
  Peptide Sequence Number=SeqID_97187
agatgaggtggtcgctcgcgttcaggcactccacatcaaggccatgacgacagcgaacagcagcacggcaaaccgatacgtcgtcaagttcgcaaccaaatgcttcacagatgaagaggggggctctctggcgatcgaaggggaagccatggctgttgtacccacactggagctcagctcttagtcaactaccaagtagtagtaaaaaggtgaccatggaactggccgaattgtagtactaatttatcaaaacctttgccacaacagtctacttcccctaggatgtatatgcactgggtccccagctatagtgatcttggattttcaactaaaccccaaaaggttgttttctcaaacatttcgaaataatgctaatattcttgttgtgacagctaatgtcattctttcaaccttatccatggttcgctgcttgagcagaatcttggctgca

SEQ ID NO: 31214 - DNA, 548 bp, Setaria italica
  Peptide Sequence Number=SeqID_97188
aagctcatcattatgtgaagacaggcaataccgagcagtttcagaagatcacctacctctccccttatgcagaggcaaagggattgactcctgggtcgccagagtttgataagagggctgttgcagtgatgcacgagatactgagcttcatgttggaaaagaggctggtgaccgatcaccttacgcatttccgccgtgagtttgtaatgccgcagaagctgatgaggttactcttgaagcattatggcatcttttatgtttctgagaggggaaagagatttagcgtcttcttaacagaggcatatgatgggacagaattgatagagaagtgcccgttggtgcggtggagggaaaagctccttcaacttactggttacagagggaggatgaagaatcttggtaaatttgacgcgtcttctgattcagaggattacttattaggtggtggtgatgatgctgtattggacattgaaagtgaaaattcggatgacatcttagatggctgttctatttcatatgattctgagatggattttaggggggataca

SEQ ID NO: 31215 - DNA, 690 bp, Setaria italica
  Peptide Sequence Number=SeqID_97189
gctcctcaatgtcaggatgaagcttgctcaagatattgggaccgctccatatgctatatgtggtgatcagacaataagaaactttgcaaagatgaggccttcaactggagctagacttgctaatatcgatggtgtcaaccagcattttatctcgcgtttcagtggcattttcatccaaaatatcacacaattgtcgaaggagttaaaccttccattggataattcaccattaccaccaccaacaacaacaaatccagctgtggaaaatatagctggtttaccgaagcctgtacaaaacaatcttccaggtatcttgggtgatgcaaagttgactgcatgggaattgtggcagaagcaggagttttcattcctgaaaatcgcatattttcgcagagccgtgccaataaaagagcaaacagttattgcctacatacttgatgctgctcgagaaggatgtgaggtggattggagaggttttgcagggaggtagggctgacacctgagatagcctcagggatccaacttgcaattgcaaaggctggatcacgtgacaagttgaagccaatcaaagaggagctcccagagaatgtaacttacgacatgatcaagacattcctgacgattgaggggcgtggactgtcaagagcaagttttcggtagtgcacctgcttcctcccatgcaaaccgaaa

SEQ ID NO: 31216 - DNA, 292 bp, Setaria italica
  Peptide Sequence Number=SeqID_97190
gtttccatctccaatatttacaaaggagtaaggaccaaacatcgaacctggaagatacatcttctggtgtccattttgcatgacaataggagcatctgagatcttcccgtcgtaaaagctggtgtttgggaaaatactaatagatggatgcattctgtattgcacgttaagtaggtgttttctgtgcccaagtgaacttaacctttcaaaaagacttcttccaaataatgcatctgtgcaaaccttgcttttgactgttgcaggcaattggcactcatcaccaattagaaca

SEQ ID NO: 31217 - DNA, 858 bp, Setaria italica
  Peptide Sequence Number=SeqID_97191
ccttttaacccgaggccaaaatatacatacaaactatgtatcttggtcaaaggagcaacaactacttgctcccgtcatgttacacatgatttcctctatacaacaaggggtgtggtgctgtagatgacagaacataacacaaggtaggatgaagcacattctaaaaaaccaagctggacgtctcggcccttcatgcaggtttacatcaacttgtcattactgaagagagccgatcggttccgcacacattgtacttgtcgtacactttttcccgattgtcattccaccatgattctgcttggtgttctccaaacctcctacggctgaatcgtactcgtttcaactctttggttccgtcacgaagagaaactagagtcaggtatactccaggttcatactgctctatccactctgcttcaacttgattattgggggaacctgaacttctcatgttcaagttgtttagatttatctggaacctgtctgtttccttccggtcatgatcgtctggtctatgacgatacccaatagtccctccattggccctctgctgcacagaggagaactctctgaaaccgttgaggtgttcacccctgccctcttgtggaaccatgactgtttcattgtattcacttgcatgatgaacttggggaggtaatccaccaaaccgagcagacgcaacagaagccggagtttggggatactgaatgctgctagggtcatatctcatctggttctctcttccaatttcaggcggtaaagcacccatcaggcgcccattcttcgcatcacatgctcctgcaggaagcctttcagacatttacttttaagactagaccaaaaaaaagaaaaggaaaa

SEQ ID NO: 31218 - DNA, 309 bp, Setaria italica
  Peptide Sequence Number=SeqID_97192
gctttttctccttcagggttgaatagttcagaatacatggcacactaccgccctgaggatatgtaagaataccaactcttaaaagttcctgtatgcatgacctcaagatctcgtatcgtgcttgaagcgtagggggtccaacatatgccttaatgtctgccctgtcaacaaatgcaatatcaatcgctgtagtgatatttgatgttgtcaaaatgataacatttggccaggacttcagtttgtccatttgtgttagcagcgcattcacaactctaatggagtctgaaggttcagagccagatatggcag

SEQ ID NO: 31219 - DNA, 262 bp, Setaria italica
  Peptide Sequence Number=SeqID_97193
agacaataactttaagtcaaattcattacaacaaaaggtggatcaagaatttacagctctctgtcttgcatacgcaaatgctgaaatgcatcttcgaagcaatgaaaaaggggaaaccaggtagatatattttgactcaaatataacaaggtttgcatgcagatacaagatgatgtatcattgttctctgaatgcacatgacctccattggtgaaactgaaatggaaccatgccacaggaagatatagtgctcttgagcaaa

SEQ ID NO: 31220 - DNA, 588 bp, Setaria italica
  Peptide Sequence Number=SeqID_97194
attctcgagctggctgaagttccccttctccttgatcagctgaatgtggtggtgcttgcagtagagcttcccctcgtgcgcgatatagttggaagggctgatggtgcatcctccatggcagcacttgaagcagctcttgtgatacatagtgttgttgacagtaacctgaaggattagtggacgtgtcgcaatcagcatattgctattcatgcaaattaactctcaagaggtatgacatgcttgtcacctttccatctttcagcagaaagtatcaataatcgagcttccaatatggaagtgcagcaaatgctgtcttcatggacagactttttattatttgtttgtttatttattctcaaacacatatttatataactcacaaatgtgaatccagtgaccgttgtcaagtatcaataattgagcatccaacttggaaatgcagcaaatgctgtaatcatggatacaacttttgacattttttccttctcagaaacattatatttgtataaatcatgaatgagaattcagtaacaggttgtcaaggacactgaaactgcagacaaatgattgagatagtagaatatggaa

SEQ ID NO: 31221 - DNA, 395 bp, Setaria italica
  Peptide Sequence Number=SeqID_97195
ctaattcatacgaaggcatgtattagatcattgcgcctccagcacccctgagaaacgccatcttagttgctttaacatactgactctgcctttcccttttttcgcgctggcactcaccacaccagctaggaaaatccttctggtatttcttcatctccctgaacacagagctccggcaccacaaaagcagattgattctgagtccagatgatgtagctcgagcaccatgcctatgtcgaccacgatggagtacagcctgtccaggaatatgagtgtaatcatacattttcctcatgttgtgtctctgaattcacatgattctcacaacgaatgcctcggaagtataatcatacatttcctcatgttgtgtctctgaattcacatgattctcacaa

SEQ ID NO: 31222 - DNA, 514 bp, Setaria italica
  Peptide Sequence Number=SeqID_97196
ttttttttttttttttgtttactacagcaatttcagggttcacttattcatctgtggaacaatgctcaaagattaatactctgcttcttcatcctccagcgacccagcctgtgatgtcttctcatgatcattctcgagctggctgaagttccccttctccttgatcagctgaatgtggtggtgcttgcagtagagcttccctcgtgcgcgatatagttggaagggctgatggtgcatcctccatggcagcacttgaagcagctcttgtgatacatagtgttgttgacagtaaccctctcaattggatagactgtcttgctgcatccaacacatttctctctggtgccagcaaagacgctggagactttaattgcattctcattctcaacatttctttctggcttgacaacctttgtaggaagtacccttacgaaagactacttagtaccaagaactacccggtacctacttagaaagaagactaggtacgaaagtagaaggacctagacaagta

SEQ ID NO: 31223 - DNA, 379 bp, Setaria italica
  misc_feature (1)..(1): n is a, c, g, or t
  Peptide Sequence Number=SeqID_97197
ngaaagcaggagataatcgttttgtcacaagacatggtgttgttttcacagatgggccataggctaaaacaattatgcacccatagacacatgaaacaaagaggtggtgatggttcatgtacgacaatggctgacctgttgctgcacacaacagcagcacaagcctgcctgcagccctatacacaacacaaggctgacgtcgttgcatgcttgattgattgattacacaactgaagaaaagaagaaaagaaaagatgcaatggataccaagctgctgcctcactctaatgctactaatgtcacaatacaaatgacgaccacgccatcatctactacacaagaaatattgtacaaaatgacgaactagtgcgactgagtc

SEQ ID NO: 31224 - DNA, 865 bp, Setaria italica
  Peptide Sequence Number=SeqID_97198
aaaaccaagccaaacagccgcaggactcgctgagcaacttgtgtgatactttcacaggttagcagctttagatgattaccgtgaaataagagcatttgaagactggattcgatggtgatgatggcttggttttcgcaaagtcgacaaggtccttgaaaagggagtcctcaggtttaagcctggcgggacgctgtcggccgtgatgtgctcttctcattctggttgagggagaggttttctgtctgtgtcaccagcccatcgtagccgcctccattgctcccaccagagtacacgttctgctcaaagtactgctgtctctggccgtaccttgccggaggtgggggtagggaacctgcggcagcctgtggttcccatggagccttcggaatatcttccctggaatcttcataacctttcgtagctgaagatgatgagaaactgggaagagcagttgggtttatgaagtcatcgtcaggcagactctcctgctgcttcacagatgtacgggttggctcctcacttgtaggacgagaaggcgcagagaagctgggtgctgtgggtttacaagtcatcaggcacactttctgacctgctaccgtaacttggaggcggatacgcttccgtcttcaaatgggatgatgtagatatattggcaggggcagttgggttgatgaaatcatctgatactttttctgacttgtaggagtccccactaaggtagtcaatattgcttgcctctgtgtaaacaggcctcttagatgccggaggtggaggaaggagcgggcttgggtatggcctttcattcctcggagcagaaggctggttgctctgtgccactgtgccatcccttgcagacctaagaagc

SEQ ID NO: 31225 - DNA, 1674 bp, Setaria italica
  misc_feature (1)..(52): n is a, c, g, or t
  Peptide Sequence Number=SeqID_97199
nnnnnnnnnnnnnnnnnnnnnnnnnnnnnnnnnnnnnnnnnnnnnnnnnnnnaaatgaaacggaggaagtagtaaaatctaataataatgtgagcatatagacgccacaaaaattgtatgtccgaagtagcatttcttgctacgctaccagattatcacccgtttttacatttgtttcagctggacttaatcacagtaagcttacatttacatacacctgtgatcgcgtcgatgagcctaacagaaagttgactgttgactacagtctacaaagaccacgatgagccgtctaacagaaagttgactgttgactacagtctacaaagaccacctcttcaagtcccaaatgatgaacaaagtttagtatgatacaaatttgtataaaatacatgccttcgtatgaattagatcattgcgcctccagcacccctgagaaacgccatcttagttgctttaacatactgactctgcctttccgtgtgagtgcgctggcactcaccacaccagctaggaaaatccttctggtatttcttcatctccctgaacacagagctgtacataggaagaactcattcagttgcagcatttcacaaacacttgttagtcaaagtataactttacatgctgacagtagccaggagtttgacatttgggttgctttctgtccacaaactttacattccggagactccatatcttttcactccttatgtatgcatcgagcatccaaagcatgcaaactcataattctgtgatccatataattgaaatgaaaactataggaacaaatatttgggtatgcctttgccaattacaggatctgaacacaaccttagacgctgctgagttttgtttagtgtgaaggttgggaacttaggatcagaacagctgtgaagtttcacgatacaccatactgcataatggcattgacaaggtggtcgaggagactgcatgaggggtgtaggttactcattcatgcaagaaaactgagccaccgaggtcatcaaactaagaccaccatgcatgcagccatgtatcttttacagtcagacccttgattagaaacaagtaggcaatggagctgataaatcaaagcacagaacaaatacacagaatgactatgcaaattgccattatgcagcatcgcaatataactcctgtactcaacaaaaatggcaagagcagaatgacaagttgacaaccttttgaccggaaaagcacctatactgtatcaacattttcaataaacgataataagacaaatttagacatgaatatatcaatatatgtcaaacgtcaggcgtcactagcatatacacagtagacaagtgctatgaaatctgcaaatacatattgattccaatgtgctcaggaaccaatgataaaaatggaacagtaggaaaaggcctgtatacctccggcaccacaaaagcagattgattctgagtccagatgatgtagctcgagcaccatgcctatgtcgaccacgatggagtacagcctgtccaggaatatgagtgtaatcatacatttcctcatgttgtgtctctgaattcacatgattctcacaacgaatgcctcggaagtataattcaccaccagagaattgtttgccaaggcaaacatttaatgtaacttcagaatcatcaacatgaaaaccgagttcaacatccc

SEQ ID NO: 31226 - DNA, 1770 bp, Setaria italica
  Peptide Sequence Number=SeqID_97200
tgtaaactaaagtaggttggttagtaattaggtttactaattagttaacggtactcaatggctgacctgttgctgcacacaacagcagcacaagcctgcctgcagccctatacacaacacaaggctgacgtcgttgcatgcttgattgattgattacacaactgaagaaaagaagaaaagaaaagatgcaatggataccaagctgctgcctcactctaatgctactaatgtcacaatacaaatgacgaccacgccatcatctactacacaagaaatattgtacaaaatgacgacccacacaaaacggagctgctgcactccaagcagtcatggaatggggtccctctgcgcgccgggtggagcagcaggcattgggaagttgtaggaacaataaccaccgaattgaggggcctccacatatggactctgggcataaggaggatttgcatcgaatatttgatccctaggagattttggtgatgaatccggagagctaccatcattgtcatctgagttatttattgtattcttcactgctgctggctctccatcggtagcattgagcttaacacgctggaatattttgcctaaagttttcaatcctttagcacgagctcgcagttcctctttcctgatgctgctgtcttgaagaaccatttgacacacatgtgatagggttgcctctatatcagcaacattaagcttccataaggaatctaccataacacttttgtgagtctgcatgtaagcctccaattcctcttcagtgtagtggcactcagcactaagatgcttcttcaagtcttcctgcagctgcataagagctattgcacctgtcgcagctgttacttgggatttaataaaatgtcctttgtttctgaaccattcagctataaacggaacacccagatataaagctttctttccaagctcctttgcagcttgtctagaatacacgtaaccaatagtgctcagcatatcaacaccatatgctgcattagagagtctagtcacctcagcttcagcatgctggataaattcctctttatttccttgaacataaaggtgcaatcatttttcagtgcctctgcgagcttctcctccctttccttctgtacaactcgcatttgctcttgcagcctcctttcattgatttgttcatcttcactaaaaccatcaagtgaagccatggatgccatcgccagttgaccaatgtaatcctcaaagagctcgctaccaaacagcattgcaaaaattgctgcaggatctattatggcttccgttgaaataccagattttccatatgagtcataggattgccgctgtgtggggtcactgagtacttgatatgcctcccccaactcctggaacctcgccgccgcgagcggatcattggggttcttgtccggatggacctgcctcgccttgatgtagtacgccttcttgatttccgcctcggtcgccgccggggtcactcccagcacgtcgtagtaccccgtctcccttaccatcgaaccaatctactcctctcctccacctccgctctcccggagctcccgccgctccggctcgatcggagcccccgcgagatctccgcccgcccgccgctcacctccccactcccctccccttccctccgcgcgggtggtgcgagacagcgagagagagagggtggcgaggtggccggcgctgcaatgctctggcggccgctggtgctgggggaatccgaccataaagcgcgtcgaataattcgcgtgctttttccctccc

SEQ ID NO: 31227 - DNA, 923 bp, Setaria italica
  misc_feature (1)..(29): n is a, c, g, or t
  Peptide Sequence Number=SeqID_97201
nnnnnnnnnnnnnnnnnnnnnnnnnnnnntttagtttttttgttttttgtttttgttttaaaaggggaaaccaggtagatatattttgactcaaatataacaaggtttgcatgcagatacaagatgatgtatcattgttctctgaatgcacatgacctccattggtgaaactgaaatggaaccatgccacaggaagatatagtgctcttgagcaaatgcaagaagattcattattcatctgtggaacaatgctcaaagattaatactctgcttcttcatcctccagcgacccagcctgtgatgtcttctcatgatcattctcgagctggctgaagttccccttctccttgatcagctgaatgtggtggtgcttgcagtagagcttcccctcgtgcgcgatatagttggaagggctgatggtgcatcctccatggcagcacttgaagcagctcttgtgatacatagtgttgttgacagtaaccctctcaattggatagactgtcttgctgcatccaacacatttctctctggtgccagcaaagacgctggagactttaattgcattctcattctcaacatttctttctggcttgacaacctttggagtcccttcgaagctcttgtccagactcccggtcctcttgaagagctggtcgaagtgaggcctgcagtagagcaccccctcgaaggagttgtagttggcaagcttgagggtgcccttgcagtggtggcatcggaagcaggccttgtggtagacgcggttgtcggcggtgagcttgtcgacgaggtacaccgtcttgtcgcaggcggtgcacttggtggtcgtcccctggaacgaggtcgccattgccgtcttcccctctcttcctcccctgcaacaacacgctctcttcactaaacggaaccaaaggctgctggtgtgc

SEQ ID NO: 31228 - DNA, 2318 bp, Setaria italica
  misc_feature (1)..(12): n is a, c, g, or t
  Peptide Sequence Number=SeqID_97202
nnnnnnnnnnnnttttttttttttttggtacaaagccaaagtaatttgccctcaaattgcaaactcaactatgaatatcactgtcgaatctgagtagcatatatatacacagctaagtgaaaaaaaaaggaagtaaagccgacaacaaaggaagtttaagagcagctaactacacataacacacccaggattatggccaagtatggtatccgacatctgtgattctaaatcctcaaaaacacaaccgaaaataattcgcgacgcaaaggaatccagtcttcaaatgctcttatttcacggtaatcatctaaagctgctaacctgtgaaagtatcacacaagttgctcagcgagtcctgcggctgttggctggtttcgatggtgatgatggcttggttttcgcaaagtcgacaaggtccttgaaaagggagtcctcaggtttagcctggcgggacgctgtcggccgtgatgtgctcttctcattctggttgagggagaggttttctgtctgtgtcaccagcccatcgtagccgcctccattgctcccaccagagtacacgttctgctcaaagtactgctgtctctggccgtaccttgccggaggtgggggtagggaacctgcggcagcctgtggttcccatggagccttcggaatatcttccctggaatcttcataacctttcgtagctgaagatgatgagaaactgggaagagcagttgggtttatgaagtcatcgtcaggcagactctcctgctgcttcacagatgtacgggttggctcctcacttgtaggacgagaaggcgcagagaagctgggtgctgttgggtttacaaagtcatcaggcacactttctgacctgctaccgtaacttggaggcggatacgcttccgtcttcaaatgggatgatgtagatatattggcaggggcagttgggttgatgaaatcatctgatactttttctgacttgtaggagtccccactaaggtagtcaatattgcttgcctctgtgtaaacaggcctcttagatgccggaggtggaggaaggagcgggcttgggtatggcctttcattcctcggagcagaaggctggttgctctgtgccactgtgccatcccttgcagacctgcgggaaagcacagagaactcatcttctggctcatcgtcctcgtggacatttagaagtggagaaaatgaaaccgcagtggacctaggaggggcagtcccttggtttgtatttgcagaagcaggggcagttgctcctgtaccgggaggaattccctttgctatgtcatcatgacgctgaacaacacgctgtaattcatcatttagtcctagagcctgaaataaaaggctctcatcaccggtactgttaacaagatccatgacacgagattgatatgatcggcactgcccaacaaggtcaatgatgacctcctccctcacaccctcaggatgtctgtggtcaagagcatttaacatctcatctagcacatccacaattcctcgagcactttgaatctcacttagactcagggcaggtacagaaggggcagattgaagagaagcttcaatggcagcatcttcatagctttgacctgggggtggatatagatgtggttgtctcaatggctgagtttgaggaggtgtaaacaatgggactgaattttcctcacgaggtggaaaatcaacacctgcagccctgagttcttggtaagctgcatgatactgcggatatcttccagaaggacctccaaaagccacttgccatgtgtcaatcaaactcaatatcttctcccggacatttaagtctggctttttctttactatcttaaccatttcacttaatatgtcacgttcaacgatcagttggtgaacaacatccccacaatttttgcttagtgtctccagcacataaagtgtcagaatttgcacttttgaattcttgcttccaagacgtttctttaaaagcttgattgtatcttttgcttgtccgggatccatgttgatgatgtcgcagagctcgatgttgacggcccagtccgggccgatcagcatgtcgttcgtcgccctctccgcgcacgccacagccgccgacatctctcccggcggcacaaaacccactaccacctccaaaaccctaaatccaaatctgagcgaatcgccgcgagattcgcccgccggagccaccaaagcggcctcctttcccgatccgggagcgccgggcagccgctgatcgcgcaagaaccgggcgggcggtgcggagggtgggaggtttcagggcggattcgagctgagaagctggtgggattgggttggag

SEQ ID NO: 31229 - DNA, 445 bp, Setaria italica
  Peptide Sequence Number=SeqID_97203
ggtcgtcgggcccgggatgctggcgtaccagatgccgaggtacgttcggccggcggcgccgtccggggtgaagaagccgagcgcgtagacgccaccggcagagacgatcgtctggttgccggtgagcgtcgtgttccggtagatggtgtcggtggatgccgagggagtgaaggagacggcggcgagggcggcgaggaggaggagggaagagagcgtgcgcgccctcatcctctctcccggttactcccgatcacggtgcgccaaaccctgccgttgacctcttgctcctctcctctcgttacatgggcttatgacttggtgtgagactgcctgcacgggcgggtggcggtcgtcgtgccagcaaccacggcaggaaacggccgcggcggcggtgtgagaatgcacgcgctattttttacgcccacagggccacgtccatggcgcc

SEQ ID NO: 31230 - DNA, 720 bp, Setaria italica
  Peptide Sequence Number=SeqID_97204
catcatcaaatcaaattgattagaggcgagcaatgtattgtatttacatgagactcaactcaatcaagcctaataacctactctaatctcctagtatgtcctccctcccttgcttgggtctacgtctatcttcttctagcacccaaaggacttggaggagtagcatattcctcaaataaataacaaaattcgccacgcaatcacttggtttcagtacttgccctgctcatctttcccttccctcattctgcaatctgcatgcggagatgtggtgtttttcatgccatttatacagaaaatcaccagggcgccatttcttcccctcccttccaacatgtatttgctacgacagcttcatgtcaagcttgccccctctgtgcaaatgaacaagtgaactcaagtgctcttcatttacatgtactggcaaggaaggcatctgacccatggtaccccgtgtctccctcattctttctgaaattgctcttatattgttattcatgcgtagaaataggtccatattctcctccgtctacaagaaatttgtaatcacggaaaaggttataatgactcaagcttctttttcttatgagtgtcggactacgactcaaacttccatgcatagctttgaactactatgtctaggtctatgtgctttttttaaaaaaaaaaaatcaatcctatgtgctttgcaaccacttttcatctccatgtttcatctga

SEQ ID NO: 31231 - DNA, 1676 bp, Setaria italica
  Peptide Sequence Number=SeqID_97205
ggcgcagggggcggtccgcctcgcccgggaggtggcagattcggcacgcgtcctcctcttcgccgggcgggagacgagcggccgccgccgcgtcggccatagttggcctcgaaggaaagagaggaagcttccgggcgggggggtgtgttatttatttttaatgcaccgagaccctactggttacaacaacttgtgcctataaattgctaccagaaccagagaatagacaaaacaaggaattagaaaaaggattttttttgctactacaaatgtcatcatcaaatcaaattgattagaggcgagcaatgtattgtatttacatgagactcaactcaatcaagcctaataacctactctaatctcctagtatgtcctccctcccttgcttgggtctacgtctatcttcttctagcacccaaaggacttggaggagtagcatattcctcaaaataaataacaaaattcgccacgcaatcacttggtttcagtacttgccctgctcatctttcccttccctagcaatcaaactttccaatcaaaagatagtcccaacaacagaataggcctgcagttacttattatatatgccgcaacttgctcggtgtagcctacatatcacctcattctgcaatctgcatgcggagatgtggtgtttttcatgccatttatacagaaaatcaccagggcgccatttcttcccctcccttccaacatgtatttgctacgacagcttcatgtcaagcttgccccctctgtgcaaatgaacaagtgaactcaagtgctcttcatttacatgtactggcaaggaaggcatctgacccatggtaccccgtgtctccctcattctttctgaaattgctcttatattgttattcatgcgtagaaataggtccatattctcctccgtcttgaaggttttgatatttgcagctatctggctgagtaactgattattttcctccagaagatgctgaattgcactatctaaaacaggggctttccataggaaccaagctattttgacttggatgatgcagtgataatggaagcaggaatgcactgtttgtaggcggcattggaacgttagctgccgaggtagaggcagccatcttattcttcaagtacgtcatgttccctgcataatagtcatcaggttccctcctcctagtttcgtttccaggagtccaacagcatcttagtgcaacatccctaatggtcttagccggcagcatagcagcaatcttgatgtacttggtaatattaggttcatgggcgtatctgatgaggccctcctccaaggttgcaacctcgtgtgcggtccaatcggcaggcgaagcggtgacaaacttgtacttttttggagctgatggaagtgaggaggtggtggcggggggcataagggtgggatcgggagtggacgacgtgaaggagagcatgtggttgtggtggtgcggggggttgtaggaggaggtgtaggggagcccctggccctgaagctttgtaatcacggaaaaggttataatgactcaagcttctttttcttatgagtgtcggactacgactcaaactttccattgtcatagctttgaactactatgtctaggtctatgtgcttttttaaaaaaaaaatcaatctatgtgctttgcaaccacttttcatctccatgtttcatctg

SEQ ID NO: 31232 - DNA, 292 bp, Setaria italica
  Peptide Sequence Number=SeqID_97206
gctgcccagccatccgcggcgcccgcctcccccgatcgatcgaagcttcggcttcccctgacagaggccggcgcgaaaacaccccatcaaaccccgctcaaaacccaccagaccgttgccgcgcgccgattcgaacccgccggagcaggagccggcgccttctcgccccgcggaggcggcgcggggcgaaaccctagcgatggcggcgtccgtggactctgcggcggcggtggcggtggcacccccgcggtggtctccgccgtggatgaggccggtggcgcggtggagcagg

SEQ ID NO: 31233 - DNA, 551 bp, Setaria italica
  Peptide Sequence Number=SeqID_97207
ctgatgtgaatgacgaatcctttgacaataggttgtaacatcacttagacatgatctaagaatccctcgactttgaagctggttcaaaaaatacttttcatgatcaacactaattagtgcatcaagaacatagaaggaaattgctttgccagcttcactcccatggatggcatccttagtaaccaaatcgacaatagcttgagcttccttccttatgatggaaaagttgccacgtgctaattcattgtgctccttgagaaccttttgaagagtgaagtcgtcatcatcagcttcttgttcctccagtagcaagaaccgtagaactgatggagggacatcagagtcaagaatgctacgacaatattgaaaataactcaataataatgcatattgccgtcttctcaaggtttcagatgattcatttcttagtatcgccatcacaagcttaaataataatgagttacaagctgcatttggtagctgcttcgatgaaataatgtcaaggcaagtgactgcatcagaatctgcaccagctgggcatatgaatcttt

SEQ ID NO: 31234 - DNA, 664 bp, Setaria italica
  Peptide Sequence Number=SeqID_97208
catagtgatgacttattctcagcagtaatgacaactgagcatcaactttgcaaaaccgctgtgaagattctgatgtgaatgacgaatcctttgacaaataggttgtaacatcacttagacatgatctaagaatccctcgactttgaagctggttcaaaaaatacttttcatgatcaacactaattagtgcatcaagaacatagaaggaaattgctttgccagcttcactcccatggatggcatccttagtaaccaaatcgacaatagcttgagcttccttccttatgatggaaaaagttgccacgtgctaattcattgtgctccttgagaacctttagaagggcagaagaatgatcagcaatagtcacattacaaaaggaaataaagtaatgcaacagggacctgaagagtgaagtcgtcatcatcagcttcttgttcctccagtagcaagaaccgtagaactgatggagggacatcagagtcaagaatgctacgacaatattgaaaataactcaataataatgcatattgccgtcttctcaaggtttcagatgattcatttcttagtatcgccatcacaagcttaaataataatgagttacaacctatttgtcaaaggattcgtcattcacatcagaatcttcacagcggttttgcaaagttg

SEQ ID NO: 31235 - DNA, 4157 bp, Setaria italica
  Peptide Sequence Number=SeqID_97209
ttttttttttgttttttttttccccagaacagacaaattaacccaagaaatatggcatctaatataaaattggccgcctcaggacagtccaagctaatagtttaattcaataagggagctaacacaacaacaatgttttacatctacaaatctagcaaagtgtagctatcctacaaaaaacatgtgtattgtacaacacacccctccgtccttcatacggtcatgcatctgatggtcatctccttcagtgtggtcacagatctgtggaacaacttcagactactacgtccaactttatcctcttttaaatgttctagcctctccagcacaggaagtagatcatcagaaaatggagaaagatcttttgcgcaactctcgtcctggaaatgaacaaggagaataataatggcacattccgctatttggagcagaagggttataagctggtctcggttcccagccatgcaacacaaatctatcattgcaatgtacctccttttacggatattatcattgggagagatgcaatcttgcttcatacataattttattatctcatcaacctcctttctggataactcattcaggtcacgaaccttgtttagtagcatatatttttcttcagctactctttctatggctagtgttattgaactcagaagatcggaaaccatttgtagtgttggttgctgctggtcactattatggtcataagaaacttgaaatcgcatgttcttctttgtagccagaacatacaggtaagatataaggctgaagcaaagaccaaacgctctcaattctgacttctgattctcaatcatgtttggcgattgcataaaattcagagacccaaagtcaaggctgaaaagagaatgcatcaaggcaaatagatcttggatatagctgcattcctcattttcctcatatgcccacaccttgctgagaacagaaaccaccaagctaagacgctccaatgtgaacaaattagctccagacatgttctcccttaaaatgctattaaaaactgactgatgctgctttgtgaagtccactatctctcgtacaattttgttcttcacctcaagaaaatcagccgagtccacgagtgatgtaaaagaggtgactattcgcagtacaggtgcaataagtgacctcttcttgtcaatttcaccagcccgttcctttacgatattggatattgcccgcgaatttccctttttttgcacacccatgaggttgcaagatgaaaggttttgtaaagcacccatggacaacaaaatctgagagccatgtttgccatagtgatgacttattctcagcagtaatgacaactgagcatcaactttgcaaaaccgctgtgaagattctgatgtgaatgacgaatcctttgacaaataggttgtaacatcacttagacatgatctaagaatccctcgactttgaagctggttcaaaaaatacttttcatgatcaacactaattagtgcatcaagaacatagaaggaaattgctttgccagcttcactcccatggatggcatccttagtaaccaaatcgacaatagcttgagcttccttccttatgatggaaaagttgccacgtgctaattcattgtgctccttgagaaccttttgaagagtgaagtcgtcatcatcagcttcttgttcctccagtagcaagaaccgtagaactgatggagggacatcagagtcaagaatgctacgacaatattgaattagtactactgtctccgactcagtcgcactagtactcaataataatgcatattgccgtcttctcaaggtttcagatgattcatttcttagtatcgccatcacaagcttaaataataatgagttacaagctgcatttggtagctgcttcgatgaaataatgtcaaggcaagtgactgcatcagaatctgcaccagctgggcatatgaatctttcatcccgcagtttagccatacaggtcaatgatacattggttaaaacatatgccattttcactgaacaatctggagatgttgtggcactcaatgaagcatcaagcagctcaaacaacagcttagaacggtcctcaagtaatgacattcttcttgatacagcaacttcaacaatctgtgaccagccagtcaacatgtgaagttgggcagcctgctcttcaagatttttgttatatcgccaagcccatttcagcaaatgatgaactgattcttttacttcgcctttctcagactcacttaattgtgagttcaactcttgtgttatctggagaagtttttcatggaaagcatccagatcaatcagtcggtcacctctctctgaataataatatacaccaccgaattcagatgtcgcagagttccttagaatctcctcaatctttggttcaactcccaggttggaaagcagctgtggatacttcattgaagtgtctggacatctaaactgtaaaacctcaagcaagtccaaaaccttatttctatttcctgattcattgctaatgccagttgaagcatcacgtgaatggaacaagcttgtactctggaagttattggcacactgaccaaaagtatgatacagaatagccacacaggcttcccggtatacagatgatgatacatcggatagatgtaatgccagtgctaacatctttagcaaccatgccctctcatggagcatgctgatacgaagagactggttagtgttcctttttggaagtggtgcaactccgatggttccaacatgcttagaaaagaactggtacttctttgtacttaggagatccataacaggtccacaagttaaagggtcgagacataactcgtagagaagctgaaaactgaactcgtgcagtaaggcatttatatctggctttgtcaccttttcgaggttgtcaaggattaccttcaaacaactatagtgggattttggttttagaactgttcgctcaatggatccattgacatcaaatctcaagagcaaatgtgttatgtttggagctggatggcaaatattgtcaagaagcaactgcagtattagaactccaacatcatctttcgtatcctctataacctgaaaatcatcaaatcggaactccaagcaagcagcgtaatcttctattacagtttttccaacatcagctttcaaaagcaactgtaccaggccaactattctagaactcaggatggccataatttttattgaacactgttgaatttggggaagatagtcatatcgtacaaactctagcaatgctactatctgtctatgattttgtgctaaaacaacatccaatggctggtagagtggccggaaaacatcagcaagagccagatctctctccatgacaagaataaatatttcaagagatagatggactgttttctccaaaagaataccatatgtttgtgtggttcgctcattgataagagagtcaacacccactaatatgatgttcatgatattgcggaatgcagctttcccactcatgaaatctttgagtagttctagcagagggagctgtctctcgatggatgaaggggctgatgtgttaacagaagcataaatatcatcatcatttatgtcatacatgctcaaaaccatgcggaaatgctccaggcaggcaagtgcaagctcccatttttcctgagggtcagcgtaggctctttgagaaaaaggaccaaagacatcttcataaacaaacttaaagatacccatgaacctccggcctttgtcacttatgtttctttcttccgcaataagtgcattgatcaatttgagaaaagatatggtcgaggggtaactctccctccttgcttccacttcattcaactcaaatctcatatcataaatctgtgttgctgtatggtgccctagtggagccgtaaccaccggaagatcgtattgctcaagataattccaaatagtgtcttttagagggtgacactttgataaatgcggctattgaatttcgcaaagccccttcaagtacggaggcacattttcatagctgagaagcttaaataaaggttcaatatcagggaaccatttccttcgttctataggattcccattttccaccaccttctgaagaactgataaataagcaactagtgcctgtgcatcaccctcaggaaaatcaggtagtatgca

SEQ ID NO: 31236 - DNA, 429 bp, Setaria italica
  Peptide Sequence Number=SeqID_97210
gcgccgcccgcgaagggagcggagtcggcgccggtggagggcacggatcggcccgaaccgcccccgcaccagcagcaggtggagaaggcggaggttgaggcggtggctaagcccggagcgacggcggggagctcgctgcaggacgcgccgctgatcgaggaggtggtgcaatcaggcggagcggcccagggcggcggctccgcgcaggaggagcggcaggaagggacgtgcgacctgtacaagggccactgggtgtacgacgagacccgcgcgccgatttacaaggagtccggctgcagcttcctcacggagcaggtcacctgcacgcgcaacggccgccgcgacgacgactaccagaagtggcgctggcagcccgacggctgcgacctccccagatttgatgctaagttgcttctggagaagctaagg

SEQ ID NO: 31237 - DNA, 539 bp, Setaria italica
  Peptide Sequence Number=SeqID_97211
atgttcaattttttatgccgagtttttttctctatcatcacctacgaatcttatgtttttttgataaaatatgaaccttatggttaatccggtactaataatttacttgggatgtttcaggaatacaatgcaacagttgagttctactgggctcctttcctagttgagtcaaactcagatgatccagacattcatagcatcagtgaccgcatgatcaagccaacatcaatcgcgaagcatgcagcaaactgggaaggggtggactacttgatcttcaacacttacatttggtggatgaacacaccacagatgaaaacaggcatggtggatctttttcaaggaagcatgttaagtatgatgaagtagaacgtgtcgttgcataccgaaaggtcctcaagacatggtctagatgggtagaaacgcacatagatcctaagagaacaacagtcttattcatgagcgtgtcacctgtacatatgcagtaagtatccgcatcttgattcaaaattctcccagcatgctgtttgtttcaaactgta

SEQ ID NO: 31238 - DNA, 1535 bp, Setaria italica
  Peptide Sequence Number=SeqID_97212
ctctatcatcactacgaatcttatgttttttgataaatatgaaccttatggttaatccggtactaataatttacttgggatgtaacgggcggctccgcgcaggaggagcggcaggaagggacgtgcgacctgtacaagggccactgggtgtacgacgagacccgcgcgccgatttacaaggagtccggctgcagcttcctcacggagcaggtcacctgcacgcgcaacggccgccgcgacgacgactaccagaagtggcgctggcagcccgacggctgcgacctccccagatttgatgctaagttgcttctggagaagctaaggaacaaaagattgatgtttgtgggggattctctgaatcggaaccagtgggagtccatggtgtgcctggtccaggcagaggctccatgggacaaaaagtcacttgttaagaatggttctctgaatgtgttccatcttcaggaatacaatgcaacagttgagttctactgggctcctttcctagttgagtcaaactcagatgatccagacattcatagcatcagtgaccgcatgatcaagccaacatcaatcgcgaagcatgcagcaaactgggaaggggtggactacttgatcttcaacacttacatttggtggatgaacacaccacagatgaaaacagtgcatggtggatctttttcaaggaagcatgttaagtatgatgaagtagaacgtgtcgttgcataccgaaaggtcctcaagacatggtctagatgggtagaaacgcacatagatcctaagagaacaacagtcttattcatgagcgtgtcacctgtacatatgcagagtgaaggttggggcagccctaatgccgtaaaatgcttctctgagacacagccagcaatcaattacacgaaaaaactggaggtgggcacggactgggatctctttgcgaccgcacagcgcgtgacgaggtcgatgaagaaagtgccggtgcacttcatcaacataactgcgctgtcggagatccgcaaggacgcgcacacctctgtacacacgctgcgtcaggggaagctgcttacggcggagcagaaggcgaacccgaggaagttcgcggactgcatccactggtgcctccctggcgtgccagacacatggaacgagtttgtgtatgggcacatcatgtcgagcccaccgcagctccagatgcccgaggatcaacctcacagatgacagagaaatgttgcaccggaaatctggtagctcattttagtgaggaaaagatttgtgatcgaggccataagttatattttttctaggtttagaagtctatgctgttggttcgcctaagcatttgttgggaggtaagatcacagtatagcgaacacgtagctgtgaacacagccacgagcccacgatcacctgaggagcgttctcgcgttgtctgaatgtggttgtttgatgaggagaatgcttctgtgcttctcgtgtctcacgtggcacgtgtacataattttaccagattttcatgaaattgtttatattcgtgtagtgaa

SEQ ID NO: 31239 - DNA, 632 bp, Setaria italica
  Peptide Sequence Number=SeqID_97213
ttccctttgttaattttttgttcccttgtgccctgcatagacattgttcttagagccagaactccatacatagctaccactgacaatgtcaaaaatagatgatcatccactgatttagagtgttgattctgtatagattcctcttccagcaatagaacatccaagacctcatcaagagcatgtaattgcactttattagcacagccatggtctttagaccatttctcggcacagcattggcacatgccttgtgcatggcgcattgcccgaagagcagaccaacgatcttccactaattgaggccttgcagcatcagcccctcggcgatcttctgaggaagatttatccacacaaggaggaactggcaatgataatggtgatagagaatcttgtttgtggttggaaaggaaatctgtctttcggaaatcacgcctcttagccggcaatgagacctcgtcctgtaactgagcaagcacatagctatcttccgaaaatcacgcctcttagccggcaatgagacctcctcctgtaaccgtgactggggatgaactacgatcgtaacagacccgaagccatcctcctggtggaagttgtcaacgcggtgcccatggggcccgtcggcttcgctcgta

SEQ ID NO: 31240 - DNA, 502 bp, Setaria italica
  Peptide Sequence Number=SeqID_97214
ccagtgcaagaacatgagagacagcagtgtgagctatgcatcggctcgactgctcatagcgaacaaagccaatcttaatctttgttgagcaatgtttcaacatatgaaggaagacactgatggggtggcgtccacatatggtgttctcatactcctgcaggtattgtttgaatgcaacaggatcaccagtctctatgatctccatgcccatacggtactactcacacgatttatgaatggcaccatgtttcttctcataatatgtataattgaacctgatgcgagaatgggatcaagaaaattgtatttctgtttaccagatgaaaaaaatcaacaacaaagaaatcttcatatactaaaagaggtaataacaagatcttatgattgggccctaagacgcgttgactatggccccaaaaaactaagccccatcagccatggtcggttttccctacctaggtacatgaatgtggtcaggctttcttttagttttagcagtttt

SEQ ID NO: 31241 - DNA, 1510 bp, Setaria italica
  Peptide Sequence Number=SeqID_97215
ttttttttttttttattttttccggtacaactaaagactcaattggtgatgctgcatcagtgagcagagaaccacatttgcgcgtaaagttacctgattcaaagacaggcatcacctcacgcggctcaacaggtagactgcagacacacagaaacacatccccaaacaaagtttcattgattgcctagtctcccggcgtttccggagatacattcggcacttaaccaggccctgttattacaaactggcatcgtgccaatgctaacaagtttgacaggaccagcgcaaaccaatcacacatgttgcgccaaggtttcgcaactgcatcagacaaaccatagctcgctcaatctttgttctcttcttcccctgatgggtcaaccttcgctgctgctgatgcatagctcacactgctgtccctcatgttcttgcactggcttgactgctcatagcgaacaaagccaatcttaatctttgttgagcaatgtttcaacatatgaaggaagacactgatggggtggcgtccacatatggtgttctcatactcctgcaggtattgtttgaatgcaacaggatcaccagtctctatgatctccatgcccatacggtccaaggcctcaatagatttatgaatggcaccatgtttcttctcatagtatgtataattgaaccgggatccccaatggcagaagtctgacgacacagaaaaaaagttatttggatcatcaacatatttagagagcagctgtccaaacatggcttcactttgggagctaagtgcgccaacaaggatagggacaacttttacagtatgcccttgaaagactttagaaaggtagggcaaatgcatttccatgctatgttcagcttcatccactctaagatccataaattcaaattttccagtagcgctgagttcctcaatgacttcctggtctactggcaaatccccaattggagtggaatagacagtagccctggttagagcacattttggagtgtagtagtgatgagaagggccaagcagaaacacccgagaaatgttagtcggatcgatgttcccaaaggcataagctgcacagcgccccgagtatgaataaccagcatggggtgcaattacagccctaacatcaggagacttggttagaccagctgcccccagccaaccatcgagttcctcttccagcttcctggcattgtttgtgtaccaagaaccggcatgcacagcccttctcacacgctccattgattgattcagaaattgctatccagtagcagagcctcgccggcctgtaagagaacggcaggcgcccgggtgagcttggggaggggagcgtcgccgtcggtctggggaagcctcgcggtccggcgttgacctgagaaggcgacggggaagggaggaatggagtgtgggacagtgggagtagtggaacaaccggttcctctgacaacagacctttctaactaacgtacactaaaaaaagtaaaaaacctttaaaaaacaaaaaaa

SEQ ID NO: 31242 - DNA, 1216 bp, Setaria italica
  Peptide Sequence Number=SeqID_97216
ttgagagttttatttatataacatagatagacacctggcttgctcagccaaattattgaacagactaccctacgaatgtctcgatgaatgcaccctgctgttgagggtctaccatgctgatggttttctctagtaaatacattagcaaaatgccttctagttggagaaaggagaaacataaagatcctcaaaaaaaaatgaaaaggaagaagaatgaactgaacagaacacgcaacaccatcccaagggaccaagcagaccaaactttgctagatctgaagagcagaagcaataggtccagccaggcttagaatttcaaatggccgcctgtccttcaccgcctcgacagttagagggcatgaatcggtaagccaaaagtggctcaggccatgctctggaccctctccattatcatgctgaaatttctcccatgagttattggggaaaatgccatgtgtcacatatgcactgacctttgctgctccatgagctgccagtactttctggcactcaatcagagtaccaccagactgcaccaagtcatcgactataacaacatgacggccactaggatctccctcttttatccgtacaattctctgatccccttctctaactttgttacatacaaccatgggaaaatgttgaagttgcttatagaagcgcttccatgcaccatcatctggaaatgctatggttatgttatgggaatccggcagctcctgaagcctactttttagcaaggggataccactctcaaaacatggtaagactgagtctccaaagtagaatctctcctgcaaagcatggatatcaaaaatcactaaactcgaaggtccacctcgtgatattggtatatgtgacaaaattctggcaagtgtgaacgcggttgcaacatctccttcatcttccattctctcagaagtcccggttggaaaaacgggagtataagagtaaacgaagaaataaacagctttggcagagcatatatgatagatagttgctcaaatatgacattgggcgagctaaatgatgctaaaaaagcaacatgccgcccacgaatgctatgggcattcgagatgaacaaatttgggaatccatcagcaaatgtcctccaggagatggagcgcagctcgatgtcgtcgttccgcgcgaccacctgcttggcgaggttccgcatctcctcgcagtagaagagcaggatgctcttgtgggt

SEQ ID NO: 31243 - DNA, 594 bp, Setaria italica
  Peptide Sequence Number=SeqID_97217
tgaactgttcgagatgctcaatggttggaaggggtaatttatgggtttgcttcttctttccatcatcatgccgacttgtaggagattcaggtgccactcctccagaccttggatgcaatggggaaacacttccactatgcacacgagaactagggccaggactcgtcattcttgggctgggaattggtgaacactctggactacccctgctgggctgccaaaaaagctgggctagcatatcgccacccactgaattatgtccagatgtttgccctgaacctggactggagcactgaccagatccaaggaaagttacatctgcatgaggcttcactgcccaaaaggctgaagtcggaatatggtcaggacatatccgtcttggacttctcgaaggacttgacatcaaactattgggagcactctccaaaaccaccggacggaggttttgtaaatttggttgattattgtcagctgcaatacctcttggtgatgtggacagtgtatggttattgaggaaagcactagcagttggcttcgatgtttccttcgtgttcttggtagtgatggcaccagggtgctccttgcgaacattac

SEQ ID NO: 31244 - DNA, 1731 bp, Setaria italica
  Peptide Sequence Number=SeqID_97218
aattttatggatgtttgcatactgcctcttaagtttgtcaggaatcatcattgttcagatagcttccacttgcactccagttaattttcaatacgatgcatagcagaagaataccattcgggttgaattactatgtcatcacaatctgatgagccaagagttaccttgagcgtaatatatgtcaatctacagcaatcaccacacgccacatatgtaatggaactagttctgtgcggcgatcaagcaatccatcagttatatcttttaatttcatggttccatctccattgctttttttacatcagatgtccatgtgatttgaagctcttctcttttttgattatttgttctgctcagtttgcttgtttgtcagattctcagattctgttgccaatatatggtactaatttatattgtccttgctttgtaactttaaagttacgttacctttagttgtaaagattcttggggaaggccagcaaactgtttcccctcggctatttggctggcaagaacgcctctccgcaaccatagaagaccttcagaaacagttggagctgattattagctatgattgggactttgaccattatctggaggaggatgtacctgctgcgatggattacataagaaagcagagtgttccgaaggatggaaagttgcttgccattggacattccatgggaggaatcttattatatgcgatggtttcaaagtgtggattcgaaggggctgagccagagctggcagcaattgttactttggcttcatcagttgactacacaacatccaattcctcactcaagatgctattgcctcttgcagatccagctgagatcttgcgcgttcctgctatcccactaggagtattactgtctactacatatcctatatcatcccgtgcaccatatattctgtcactgctgcgttctcaaatttcagccaaggagatgatggaccctgaactgctttcaaagcttatcttgaataacttttgcacagtaccagcaaaggttctattacagctgacgaccgcattccgcgatggtgggctgtgcaacaggactggtacctttttcttcaaagagcatcttcacaaaatcaaagttccggtacttgcccttgctggagatgaggatctgatttgccctccagaagctgtttacgagactgtgaagctaattcctcagcatttggtcacatacaaggttttcggagaacctgaaggccctcactatgcacattatgacttagttggagggcggaaggctgtccatgaagtgtacccgtgtataatagagttcctctctcagcacgacaaagtgtcttcatgagttttcatcactgatatctatcactgtacgatattcaagacattgaaatacatgatgaaatcaccaaaatggaattaaaggtgttttttttcttttggttaacgctaggttcgaggactaggcactctgctattggatggctgttagtgttagtctgttgctggttctcctctcattttttccctctctgaaacagatgtgtataaacaaccatattgcagtagaagcactggggagacaaactcagctggatgctggcacctcgggcagtcaggcgggattgatgataccttcaaaatcgatgtatatatcttttagctcgctggatttagtggctgttgatgcaaggttttcaactacagtgctattgtttttgggttcgtcagtttcagcgggc

SEQ ID NO: 31245 - DNA, 253 bp, Setaria italica
  Peptide Sequence Number=SeqID_97219
tcataaaaaacgaagaatgatgccccatactagtacagaacacatagtccaaataacgtcaagaatgagaatcacagttgaggatcatttaaatcggcaaacattctttttgcaagtagatggtgcacatgtatgattcttattagccttagtttcttaggatataactccgcatctgtgattactatactagtacagaacaattctttccaagtagcaaattaatccgtactcgcttggcatttagacatcg

SEQ ID NO: 31246 - DNA, 285 bp, Setaria italica
  Peptide Sequence Number=SeqID_97220
aaaatgtagcttcagcatttgactaaatggaggctggaagtaatgagcgtgcccaaaaaaagaactgtgcattaagactatgttgggttgttgaaccaccccctcccaaccccccaacaacaatgagtgagaagtagcccacaaattagaccagaagtttgagaaaattattgaaccacccttgctatcaagactgcgtcaatgcttacgcgactcctcaaaccttatccctcaaatccatatcaccttcaagctattcaaaccgctggtaaattttttatggta

SEQ ID NO: 31247 - DNA, 263 bp, Setaria italica
  Peptide Sequence Number=SeqID_97221
gctggcggatcttttctctggtggattgcattaaattttaatcatacctatacttttgtttccctcttttccttgccactcaaatactctctatggtgatgccattgatctgtgggggaggcaagtagctgcggctcaacgacgcgcaccgtggcgatctcatctttccacatccattccctgctcacatcctcaaccacctcgtttttttttttgtatggaacaaccacctcgccctttcacagcgcaccttagacgcacca

SEQ ID NO: 31248 - DNA, 405 bp, Setaria italica
  Peptide Sequence Number=SeqID_97222
gtacctgaccgaacgtgatgcacgggcacaggcacgtcacgcagcctgcacagcgcagcggtgggtgtcagatcggagaccccgggccgcaagtgaaccgagaagggacacgacttcgcggtgcttgcttacagttgctgcagtcgtcgaagcagtcgcagagcccggtggaccacgcggcgacgggcgccttcgcctgcaccgccagcgccgccgtcgcgccgcccgcctggtagtagccgcccccgccgctcatcgggaaggcccgcagcggcgcgccctcctccgccttcgggtacatggcgacgatggcgcctcgttgcttccgcggggacgagagacggaaaccaccaaccaccggttggggggggggggggggcgaccgcgggttgagagtaatcgagt

SEQ ID NO: 31249 - DNA, 277 bp, Setaria italica
  Peptide Sequence Number=SeqID_97223
gacgcggccgcggccgccgaggcgcgggtgcttctcgtgccagggcttaaggtggtgaccgccgagctcatcgacaggctcccggcgctggagctcgtggtggcgacctccgtcggggtggaccacgtcgacctggacgcgtgccgccgccgcgggctcgccgtcaccaacgccgggggcgccttctccgtcgactcggccgactacgccgtgggactcgttgtcgccgtgctgcgcagggtcgccgccgccgaggcgtacctccggcgcggaaggt

SEQ ID NO: 31250 - DNA, 342 bp, Setaria italica
  Peptide Sequence Number=SeqID_97224
gtgcacatgcagcgccgcggactcgaccgcggccgccacagccgccgtgaccgccttgcacgcgccggtcctggacgcgcgcgccacgagcgcgcagaggaacgccgccgtgaggcgctggttggagtccccgtccggcggcgcgatgttgttgagcacccagaggatctgctgcgtgagcgtggcgtcgttggcctcgatggcgttggcgcagtgcaccagcagctgctccatgcagctggtgctgttgaggttgccgagcgagatcttggacgccggcgtcgggaagctccccggccacgggcgtgccctcggcgcgccgacgtcaaggaacagcccgag

SEQ ID NO: 31251 - DNA, 593 bp, Setaria italica
  Peptide Sequence Number=SeqID_97225
gaaaatgcaatattgctgctagagctatgtcaaaccaaatagagcatgctacggggagaaaagggaaggctaagaggcgtctggatacctatattgatgaggaagtcgaggtgtctgaagatgctgatgtttcagaggatgaggatgataatcagagtgaagataaatatgaaggtagcttcattgatgatgaggcaactccaactggtgaatttacccaaactgaacaaggcagacgaatcagtggggacatgatgggtttctacaggcaatcactgcttactcagtccccagtacttctaccctcaagatacctcgatgtttccgacaattctgcttcttggactggtaatgcaagctgttcttcagaggttgggcataattctattgagactccaaaagagcttcaaacacatcataccatggacccaagtccatcataccaacaaagtttactgggaaaagccagttttgttaaggatcaatgtgggacaactttcgcaaattcggaatcatcaactaaattggattgcagaaagagaaagctaagcttccagcaacctgccacgatccctgtaataaaccttgaaccg

SEQ ID NO: 31252 - DNA, 251 bp, Setaria italica
  misc_feature (20)..(20): n is a, c, g, or t
  Peptide Sequence Number=SeqID_97226
gacgtggtgcattcgcgcancggcgaggcggatcatgacgcgcttgagcgccgcgtggcgcgggtcggcggcgtcgaggaacgcgagcgggaggtggccgccgaagagcgcgagcgagggcatgtaggtgccgtcgagcgtgccggccttgtcgacacgggagtcgtcgagcaggacgcggaagctgcgcgcgtcgaggagagcaacgacacgggagtcgccggagattaacggggacccggcggcatgtt

SEQ ID NO: 31253 - DNA, 414 bp, Setaria italica
  Peptide Sequence Number=SeqID_97227
ttttttttttttttttggtaaaaatctcaccatacattttcttagaacatgtgtactctcaccatacatatgaagagagaacgtcaatctaatcattacagtttccagtagccccccctaacatctgcttactcttgatcatggacaagtttacatgacaacccctttcaaacgatcaatcagctcacccttctttaacttggagtagcccctcatccttctcgccctcgccagttccctcagatcagccaccttcatgtcctccagatttaccatccttctctgttcctctgaaaaatcatcggcgccaccatctccatccatgccatatgactgcttcctcttgtcaacctcttcgaacgggtcaggcggcggcttcctcgtcctcctggaagctttaggcgagctctcgga

SEQ ID NO: 31254 - DNA, 306 bp, Setaria italica
  Peptide Sequence Number=SeqID_97228
gaggggaaaggggaggctggtggcgcgaggtcgggcgccttggaggggagggagatggggaaggagcggaggtatgagatgtcggtgaagcggaaggcctcgttggagcggcgggtgggccagggcgtggagaggagggatagcgcggaggcggagcggagggggtcgaggagcggggatgaggaggtcaccgagtcctcgagctgctcggcgatgcggaggacgaggtcgtcggagacggccggcgccgcgcgcgccagggaggcggtgaccggggaggcagagcggcggaagcgcaggagaggg

SEQ ID NO: 31255 - DNA, 697 bp, Setaria italica
  Peptide Sequence Number=SeqID_97229
aactaaacaacaactgaataattgtttaccagtccaaagctcaataggtttaatcaaggctggtgttggcaaatcaatgttctccattgcgtcaccaacgtatgagcaaaaaagagcaaaggaagatctatcgtagaaagcatcttttcttgtaacaagaaaagatgaagtcaagaaatcttgtgtggaagcaaccagtatctccccattcttaggagtacataaattattctgaacccccatgagcataagtgcttcagtgcgagcttcctctgtctagagggacatgcaaattcatttcatcgccatcaaaatcagcattatacgggttgcaaacagactcattaaatctcagtgttctccatggcattatccttgccctgtgagacataatcgacattctatgcaaactcggctgtctattgaacaggacaacatcaccatcttctaaatgcctttcaactgtatagccacactttaaatcccgcgcatgaatccttctatcaccatattttaagctcagctttgtgccatcaggggttataataaaattagcccctggatgtttatatggtccattccgtatacactgacgcagcttctcaaggttatagtttgaaaccctttcaggataagtcaagactcgagccatcaacacaggaatagccacctctgactactcacacttgtagttcgt

SEQ ID NO: 31256 - DNA, 321 bp, Setaria italica
  Peptide Sequence Number=SeqID_97230
gggtactgctagctttattcaagttatttagagagcagcagtactaccggccggcgtcctgtttatctgaacaagtttgttattagttcgcacatcaacaagagtggtgaacaggcgacgggacagcgatatgaggcagtggttttgttgtaactgccacttcgatgatgaggaagatgggcacaacaaggagcagtccaaggctcagagcaataagatagacccgaagcagaaatcttcgaagcctcctgttactcaacctgagccagagatcctcccctcctaccaattgatgtccctgaattgtcattggatgacttg

SEQ ID NO: 31257 - DNA, 1727 bp, Setaria italica
  Peptide Sequence Number=SeqID_97231
acctagactactaatacctacctacctacctcctccgtcgcgggggccggcgcgggtgggaggacccatccctccgaccggaactcgattgggttctccgttcgtcgctgtggtgaacaggcgacgggacagcgatatgaggcagtggttttgttgtaactgccacttcgatgatgaggaagatgggcacaacaaggagcagtccaaggctcagagcaataagatagacccgaagcagaaatcttcgaagcctcctgttactcaacctgagccagagatctcccctcctacaattgatgtccctgaattgtcattggatgacttgaaagaaaagactgataattttggatcgagtgccctgattggtgaaggttcttacggacgagtatatcatgccactttggatgatgggaggcaagcagcagttaaaaaactcgatgcatctgaaaatgaacctaatgatgagttcttgaaacaggtctcactggcatcaaagctaaaacatgacaatcttgttgagatgttgggttactgtgtggagggaaattaccgtatactggcatatgaatttgcaaccatgggttcgcttcatgatgttttgcatggaagaaaaggtgttcaaggtgcacagcctggacctgtgcttgactggatgcagagggtcaaaattgctattgaggctgcaaaaggcatagaatatctgcatgagaaggttcagccttcaatcatccatcgggacatcagatcaagcaatgtactgctgtttgaggacttcaaggcaaaaattgcagacttcaatcttttaaatcaagcaccagatatggcagctcgcctccattcaactcgtgtattgggaacttttggatatcatgcaccagaatatgctatgactggccagctgacacagaaaagcgatgtctatagctttggtgtagtccttttagaacttttgactggaaggaaaccagtagatcacacaatgcctcgaggacaacaaagtttagtcacttgggctactccaagattaagtgaagacaaggtcaagcaatgtgtagatcccaggttgaagggagaatatcctccaaagggagttgctaagctcgctgcagtggcagctctatgcgtgcaatacgaagcagagttcaggcccaacatgagcattgttgtgaaggcgctttctcctctccttcaacaaagacctgcaccgaccgcctcagagccagccccggaacctgccagctgagaccagtcgcatgcgatcggacctctcggcacaagccatcttggaatcgagcacattctgtgtgtaattgagtgtgttttggatgttcgttttgtagcgttcccaattggataaagcatacatgaagttgcccctgccgttcgtggccgcctaggtaggttcgctgcttttatattggcgccgtacaatggtatgtagtagggtcgaagttttcttttcccttttttaccaactctgtaggtttaagggactcgccatgtttggaagaatagaatgattttccgtctgctgcatgatatcattgctacccttgttcgttttcttgtgctggttcttactgatggaatatgaatgcttggcagcactcgtaagcaatagttgtaacaactcaggtgttcaattgcaacaccaaaatcggcccttgagattgcatgcgaggtgagagacagaaatgtaactcttcagaaaagatgagagcaagaaa

SEQ ID NO: 31258 - DNA, 184 bp, Setaria italica
  Peptide Sequence Number=SeqID_97232
tctccgtcggcggcggcggaggggccgggaagcggcggagggggcgcgcggctcggcggcccacgcagccgccggcgacgtggatcgaggcggtgggcacgctcgcggagacgctgcggttcacctactcggagacgctcggcaagtggcccatcggggacctcgcctttgggatcaagtacct

SEQ ID NO: 31259 - DNA, 410 bp, Setaria italica
  Peptide Sequence Number=SeqID_97233
ttttttactttacttcgtactactcactctgtattattccctctttgaactagcactgtacaacacacaaggttttacactcggatcgatcggatcgatcttactttacatcgcattgacaatatacactatatatgcgtacacagatgctagctagtagtatacatgtacgtacaaatctcttacatgaataaataaacaaagcatttcatgtctagcaaatctgataaacaaaagggatgcaatgcaaagccatcagtggcagatggggcacatcatgagcccgttctcgttgcacttggcgcacctctccacctcgcctcccttctccaccaccaccttgcagctgccgccgcactcccagcacggcacgaagcgcgcgccgccgcagccctcgcagccgcgcccgt

SEQ ID NO: 31260 - DNA, 247 bp, Setaria italica
  Peptide Sequence Number=SeqID_97234
ctatgatggagctctcccacagcctcgtcgagcacggcgtcaaggtcaccttcgtcaacaccgagctgaaccacggcctcatccttggcgccttggcgagcagggacagcgtgctcggcggtgtcgacatggtgtcggtgcccgacggcctgggctgcggcgaagaccggaaggacctcgcccgtctcaccgactcgttctcgaaggtcatgcccgtcgagctggggaagctcgttgccaggatcaa

SEQ ID NO: 31261 - DNA, 482 bp, Setaria italica
  Peptide Sequence Number=SeqID_97235
tttcccgtcctactattaagtaagtccttggtcggtcggtcgggtaggtagtccggttattgtctttgtccgtccttcgttgtccccttgtcttcgttgtcttcactaattcttacagcgtcgtcaccgtgctccgcatccccagctcctccctcgtcgtcaccaccgccgattcagagcgcgtggagcggcgggaggacttggaggcgctcaagacccatctgccgtcgaaccagaatagcctcgaggcccgcgaggagacgcggtccgtcgcctccctcccctgctccgccttcatcaacggtgaggccgggtatggcgaggagggcgtgatgtgctgcgaccggagccactaccgcagcgatgtgtgctacctccgcggcgacgtgcgcacggacccgtccacctcgtcggtgctcctgtacaacgcaccccgcgggagctccccggagaaggtccggccgtacacgcgcaagttcgag

SEQ ID NO: 31262 - DNA, 1124 bp, Setaria italica
  Peptide Sequence Number=SeqID_97236
acattgcttgatttacatgacagccagtccgattcctggaaaccgagggtccaccatgagcatcagtaaattatgatattttttgccttgtaaggaagctgctgaactgctgtatggtgcagtaaatcagtaatgtacaagcctatcaagaaaatgtcgcattgcactgttctcagcctgatctctctccttttggagtcacagacaatatcaaccacaaggtctgaaaatgctttcagctgtctactttatcctcttgaaaagctttgtatatgaaatctttgaagcgcctggaatactgttttggatcgactgctgagatggatgctgaatcatactgaaaagatttgtacgcatgctctagccttttgccaatgtcatagtcctgaagtatgtcaataatcccgaaatacaatataacatcacagtactccccagttggctctccaaaacatcaccatcattctttcggattgtcagctcagcccttgacagcatgtttgccccaagtttaattttcgaccacctgtttggatcagaacgaaagtgatccctgtcccatcttgaaacgcgaggtgttgcaagtttttcaccatcaacgtcaatggcacctctaaaatgtacacccaccaatagactgtaatccataatcttctcctgctcaaggaactcgcaatccttgtccacttgcctttgaaactcttggtaccattgtttctgtaaccgaaaggtaaagttaagatcaaggtccttcagagttgtatactcgtcaatctcagccggtggcttgtcagttatacggccaagagatgatcctttcagatcaaatcgcctatggataggatgatcagagcagaacaaatttcccattatgacaaaacgaaccttcttctggtgtgttccagattttacacaatgtagaccaaagaactttgtcactaaggtatcctcaaatgcgcggacatgattgtagtaagctggaagcatcttcagaagcatcttcacttcagctttcttcattgtctttatcatgtagcgatcatcattcgtcaagtaaaagaaacttccactcttgccaggggatgagagctcacgaagagcatcatctccgcagagggacaaca

SEQ ID NO: 31263 - DNA, 550 bp, Setaria italica
  Peptide Sequence Number=SeqID_97237
gttttactcgaaggggaggccagcagtgaaacgatggaaatgaccaccccggtgataacaaagaagtcagctggtgaaaataaatggaagatgtcgtttgtgatgccagcgaagtatggttccaacttgcctcgcccaaaagatccttctgtgaccatcaaggaggtgcccagcaaaatcgttgcagttgcagcattctcaggtttggttacggatgatgacattagccagagggaatccaaattgcgtgaatctcttcagaaagatgctgaatttagagtgaaacacgattcagcggtggaagttgcacagtataatccccctttcacacttccattcacaaggcgtaatgaaatagcattggaggttgagaggaatgatatagccttctgatgtcctagattaacaaataaattgttagaatttgagagtatatgcaaatgtccattgtccctgatgtgtatatataccatatctatgttgcctgttttgcatatatgtagacatgttatttatcacatgcatatcttacagaattgtaactaagttt

SEQ ID NO: 31264 - DNA, 344 bp, Setaria italica
  Peptide Sequence Number=SeqID_97238
agatagctggctgttggaactcacggaagagctaggtgtagtaggttgctttatatcctgtttagatgttaccggacttttgctgtcgggagaagcctttactggtgccttctttgccaacctttttagaagatttctgaattttgaagatccatcggtctttacagtgctgtccacaagtacttgttccaggcccgagagcatggagggttttagaaaacatgggtatccagcattcaaagaggatatgtagctgcggaactctcgagccaacatggcatggaacttgtgcttgtccttgtcagtagtagatgcaagacgaagtgctttacaccatgattcct

SEQ ID NO: 31265 - DNA, 298 bp, Setaria italica
  Peptide Sequence Number=SeqID_97239
gtcgccagaacccggcttcgacgcccacgaagccctcagatccgatcgctgctcccgtccaatcggctgcgtcactgcagccgctgcagaaggcggcggctgccggtggggccgccgtggatggtggcgagagggaggagaacgccggcgagtggaccgaccaggagctggagctcctccggcggcagatggtgaagcacccggccggggagccccagcgctgggagaagatcgccgcggtgttcggcggccgccgcacgccggagagcgtcatccacgtggcgaagtcgggcgccgg

SEQ ID NO: 31266 - DNA, 262 bp, Setaria italica
  Peptide Sequence Number=SeqID_97240
ggcaaaccaatctatagccgtttctgtttgaaccaactccgaccccaactcgggtatagtaggcagcagtcacaatgaacctatcatctaacttattgaatcatatttcagtagaactcttaataatagttcgttataattgggaggtttttgcatctttcatgttattatttctctaaaccctgcattcagaagcgaatcagatttttaattcacgctgctctagttgctacgccttatcacaaccacaatttacagtata

SEQ ID NO: 31267 - DNA, 351 bp, Setaria italica
  Peptide Sequence Number=SeqID_97241
tgggaaagtagtaatggtagcaatttaattggttctgcgcctccttgtttgacgagaaagattgttgttgcaaacttcctacctctgaactgtacgaaagatgaagctaccagagagtggtcctttgcagtggatgataatcaacttcttgttcaacttaaagatggctttccaattgatagtgaagttatttatgtgggtagtttgaatgttcaagtagatcccagtgagcaagatcaagtttctcagaagctacttcaaggaacacaaatgcatacctacttttctcccagctgacctccagcagcagttctatcacagcttctgcaaacagcacttatggccactttt

SEQ ID NO: 31268 - DNA, 614 bp, Setaria italica
  Peptide Sequence Number=SeqID_97242
gatcgcttctccccttcttctcatacttgagccacgccccaaacgatgagcttctcgtgtatggtgctcgccttctcccacgcggactggaggctccgtcgcgacagcttggcctcccccaggccgcggaagacctggaattgcagcaggtacaggcaggacttctcatccggagggcaggactccagctcctcgtgtatctgagccagtttgtcgacatagtccgcgggcttaaagtgcgggagcactgccggctccggcatcttcatcaaagactctatggaggagccgccggcggcatggccggagaacttggagagcttccccctctcgaggggcagccacgagtggggcgcggagtggagcttggtctccttgcaggccgactcggagaagaagagcttcctcatggcacataccacggcgaaccgaatcagagctccgcctcctcctcctcttcccgaatccactcaaatccttcccatccagggctggaatcaccccccggacagccaagaaacgccgcgaatcgaccctcccgcgccaaaaccggtgtccggggaacggcggcgagattcgggcccaagaaggcaagaattccgcggcggggcgaa

SEQ ID NO: 31269 - DNA, 493 bp, Setaria italica
  Peptide Sequence Number=SeqID_97243
gcgatcatgaccaacagagccccgacaccatggctaggacggcagccaccagcaagctctccacgcaccgccgccgcctcttcaccttgtttgctgatgcggcagacacggtgtagaatccggtgcccggccctacgccgtcggcgccgccgggtccttgcgccaccaccagcccggcgccgccgcccgtgccattgccgctcccgcccccgctgcccttccatccgctgatcgtcggcgccttgacgccgacgtcgtacgcgggcgtgccgtcgggcttgaacagcccgtagtgccgctccgacgccggcccgggcttctggtcctcgttgaacagcgcgaacacgtacacctgcagcgcctcgccgggcgccgccggggtgcccttcccctccgccaccatccgcatcaggttgccgttgtacctcgccgcgttctccggcgtcgcgccggcctcgtcgtcgtcgccctgcgacggccaccccgtctccga

SEQ ID NO: 31270 - DNA, 204 bp, Setaria italica
  Peptide Sequence Number=SeqID_97244
ttttttttaataataggtatagatagatatagatatagatatagatatagatatagattaatgttccatgtcaagaggtggctcaagttgcttcaagaatctcgctgaccacacgcttgagcgcaagttcatccgagatcatacccttgtgcgtcgtgttggggatcaaaatcgacctgaagtaaggctgatccgggtcacccc

SEQ ID NO: 31271 - DNA, 357 bp, Setaria italica
  Peptide Sequence Number=SeqID_97245
cttgtgtgcgcaccaggaatctgtggctgagtcatagatgtcccatgaatttggtgacttatctgtcaaaccaagtccaccagttatgtatagtttctctgtgagagatgcagacacaaaatagcacctgaaataaagtaacagcgcatcagcaagtggtcgccaattttgtatcagatgctgtatatacaacttataaaacatgagatgctatatataggtactgagaaggtacatatggatactgcttaaggtaaatatgtgatgtcatatataaatatcaattaaaggaaaacatgggatgccaatgaacattgtcattagaaatacctaggtgtaggcattggagctgctgtg

SEQ ID NO: 31272 - DNA, 2185 bp, Setaria italica
  Peptide Sequence Number=SeqID_97246
gcatgaacgattcctgttacccaaaaataatgggcaacatggatggtaatcagtgtcagtcatatcaagctcataggccaccttcagatggtgataaccctggatctctcgggagacaagtcttgctccaccaatggaccagtggaagaggtgaccacgaacccatcaactctggccgctgtatccatatcgattgttactacgctcaaccctcttccaatcacgtaaatcttcctgccgatagccacgagctggcatgggggccttgtaaccttgtccgagagcctgccaagcatgacccactccttggtgtccttctgccacatcatcagcgtcgtaccgagcttctgctccagcatgtacagtgtctcatccacgacaactgttgggctagagaaacagcgtgctatctcgttctctgtgcccctccaggtgcggtccagtggatcgtatatgccagcaaagtacattctgttccaggcagcctggtgaatggtcaccagctcctcatccaatgcaacaaacttgactatgtcaggggtgagcattgggttcttgtgtgcgcaccaggaatctgtggctgagtcatagatgtcccatgaatttggtgacttatctgtcaaaccaagtccaccagttatgtatagtttctctgtgagagatgcagacacaaaatagcacctaggtgtaggcattggagctgctgtgctccagcaatttgaggatgcatcataacagtaaacttcatccgtaggttcatttagccaactacacccaccaagaaaaaatagcctcttgtctaaggcctcgatggtcacaccttgcctcgctgagcatgggggttcaatgatatgcatgactctcaaggaccgacttgaaggatctggagccaatacatagcatttgatgcctgattctctacagattacatagatccaggactcatccaagttgttcctcttgcggcaagtgcgccattcttcactgcatagcagctctctccatctctttgagacacacctgagaacattatgaaaccgacgaggaacccttgctaagcaaatgagagcaatctcatcaggaagaccatgtataagaggggtatgaccaggagcagattccatgactctaatggacagctttccaagatgcactattttggtggtggttgatcatcctgacagaataaagagcgttacaagttatgcagtgctagcataaaaaggcaaatcagagtggcattctgatgcgatcaattcagtaaggaaaatgcaatcacatcatttagaaagaagcttacagaaattaacttttcctaatatagccaacatgacatgttagcatgagaaatttctcatcagttagaaagagttcagctttaagcagttcagctcatggacaacatgtaccatatgagattgtaagtgcgataaccaactactaagtgtttacaaagttcaaagggtaaacagtgaggaagcagatccaagtaatgatacactgctagagtggcaggtacaaagtataaatggctaagtgaaaatacttcagaatatctcaatattctaaggattaatacctgataacaggcaatgctagcaaagctcgcatggaaattcattactattttctgaatataaatataaatgtaattgagcacacaggaaacagaatgctacaaatggataaatgaagtaacaatagagaaaactgtagcaacatagtatttgcagactatgactccctgctttattactttgcactagaagtcagtgaaataagtaacagcgcatcagcaagtggtcgccaattttgtatcagatgctgtatatacaacttataaaacatgagatgctatatataggtactgagaaggtacatatggatactgcttaaggtaaatatgtgatgtcatatataaatatcaattaaaggaaacatgggatgccaatgaacattgtcattagaaatacctaggtgtaggcattggagctgctgtggattaaaataacgaatcacacgctgcggcgcgccgaatctgaagacaagcaggagcgggcggtgggtggatgggacagatttggcgggggagcggcaagagctacggtggcctgggagacagattaggggatcaggaaaccccggatctggtgaggggcggcggcggcggcgaagggaattaaga

SEQ ID NO: 31273 - DNA, 325 bp, Setaria italica
  Peptide Sequence Number=SeqID_97247
atgcggaaccaaccgccccgagggcccgtggaagccccggatggcggcgtcgcggggcgggagcttcttgaagaggagcagccacgcggcggccgggccggggcccgacgacgccgaggagaggtggtagaggcggcggaagtccggggaggagatgaggctggagagcgggcgcgccacggagcgcacacggaggagctccgggacggcgaggcggaggaggatctcgtggaggagctccgacgggagcagcagcagcgtgcccagggccgtggccgccgagctcgccggtgaggggtggtgctcgccggtgaggggtgatcgg

SEQ ID NO: 31274 - DNA, 366 bp, Setaria italica
  Peptide Sequence Number=SeqID_97248
gagatgaggcatgttgtcgtagccacccgtgccgcggtcaccagtcagtgacggctccaccgcgtcctcatggttgaatgttgcgctaacctggggagagggaggttattttggccctcacatctaaaatctgacatgggacaaggaataagttgacggaatatgctaacggatagatggcagtgctatgaaaggcatgaaagttaaagttggtatcagataaggaagcaaaatttttctcaaggccatagaaggaagcacattttaattatcattcagccaaaagaatatagtatttagtgttttatggtattcgcttattcatattgaaaattttaacattaacaatcctactcaattacatca

SEQ ID NO: 31275 - DNA, 403 bp, Setaria italica
  Peptide Sequence Number=SeqID_97249
ttactagttatatatggagatgcttgatgccaatacttttgttatgactgccaaaaacagagcttctgctgagcattagaaattttagttatgttgagaaactttgttccattcatctttatactatttatcagattttgcactgatcagatttgttatttcacaatgtatgacctcacaatccattctttttaagcctagcacaatgagattgtgacgctccttttctattctggcgatgcatcaaattttggcaccatgaagtaattgagtgcttgatctgcatgctgcgtttttcttgacagtgggtaaacggtagcgctttacttgcatgcaatgctgcttataatttttcgtgcttgtattcattctgatgtcattctaacgttgcctttcattgggg

SEQ ID NO: 31276 - DNA, 528 bp, Setaria italica
  misc_feature (259)..(259): n is a, c, g, or t
  Peptide Sequence Number=SeqID_97250
agctcacccaacgtattgactgggtcggattgggtttgcgtttttctcaagtgggtcgcggcaggtggcaccgtatacaacggatgtggtgctaattattcgcgtcccgctcacataaagagcaggcatatgtgagccggcatggtggatccttggaacaaaaataacaaaataaataccaaagaaaacctccgtagacccagagaccaccgtcgaggttttcatacggtcgcacatgacaagtcatgtatttttcacncaaaaatccacaaactccatccacatgtgatcccttgttactaccaccccactaacacttgttgctaatacaactgagagttctattctttttactcttattatctaaaactttgattatctaagtaatttagacaaaaaataattcaattaaaaaattatatatcatgttggaacataatatttttatataaaaaatgtgttcattgagttcatatgaaaacttaataattttataaatatgttaaaattcaaactccaatatacagc

SEQ ID NO: 31277 - DNA, 348 bp, Setaria italica
  misc_feature (297)..(348): n is a, c, g, or t
  Peptide Sequence Number=SeqID_97251
gtattagcgatgaatagttgtgggtactgtatctggttctggttagttgtatgagggtgcaggtatgtcaatggaaatgaagataatatttttaaggacagattgcatgcattgatccttgttttattgaccaatttatgcactatattaattgaattagtcctcaagacccaattagcaaatgtagtgtcagatcttttggattattatgtttgttgtctctaatttactatggtgctgaattctaataaaacggtcactttgtgctatccaggaatgtcattcataggaaaagtnnnnnnnnnnnnnnnnnnnnnnnnnnnnnnnnnnnnnnnnnnnnnnnnnnnn

SEQ ID NO: 31278 - DNA, 391 bp, Setaria italica
  Peptide Sequence Number=SeqID_97252
tgcatccttgggaccgtcacggtcagcacgccgtgggtgtactccgccgagatgccgtccacgtccaccatccccggcagccggaacttcctgtcgaagctcctcctccccaggccgacggcgccgccgtctccctccgcgcccgcggcggtggcgccgtccagctccgtgcggatgacgaggtacctcgcgtcctccacttccaccctgatctcctccttgcgcacgcccgggaggctggcggagaagaggtgcgcggcggcggtctcctcccagctgacatggttggccggccggcgcggctgctgcgcagctgccgccgccggaggagagagcagggagaagaggcgccactcgccatggcaactgcgccgcccggagtcccggatgc

SEQ ID NO: 31279 - DNA, 937 bp, Setaria italica
  misc_feature (1)..(116): n is a, c, g, or t
  Peptide Sequence Number=SeqID_97253
nnnnnnnnnnnnnnnnnnnnnnnnnnnnnnnnnnnnnnnnnnnnnnnnnnnnnnnnnnnnnnnnnnnnnnnnnnnnnnnnnnnnnnnnnnnnnnnnnnnnnnnnnnnnnnnnnnnnagttttaaggggaatgcacatgcattcaatgactatatgtctgttataaatatttttagaataaaaatcaatgcacattaagataaatattaatgcatagaggaaattcgttttgactgtagcaaagcaccagcacgatactaatctttaatagaaagctactataataatgtaaaaatcgacttcattcaggcggcccgggccgcggagtcggcggccggcccggcgccgaggaggccgacgacgggccgggcccgggtgtgcatccttgggaccgtcacggtcagcacgccgtgggtgtactccgccgagatgccgtccacgtccaccatccccggcagccggaacttcctgtcgaagctcctcctccccaggccgacggcgccgccgtctccctccgcgcccgcggcggtggcgccgtccagctccgtgcggatgacgaggtacctcgcgtcctccacttccaccctgatctcctccttgcgcacgcctaatagtaataacaaccagaaccaaattaattaacgagagctttgcttaattagttgctggacgaaactaaagctgaaaacaaggggggagctcctgctttttacccgggaggctggcggagaagaggtgcgcggcggcggtctcctcccagctgacatggttggccggccggcgcggctgctgcgcagctgccgccgccggaggagagagcagggagaagaggcgccactgccatggcaactgcgccgcccggagtcccggatgctgctgctggtgcaccacctcctcctccattgggtagtagtaatccaatgggcgatggagctcag

SEQ ID NO: 31280 - DNA, 421 bp, Setaria italica
  Peptide Sequence Number=SeqID_97254
tagagcttttagccttttcaagcataatgctaactacatctatggattcttgaacttttgtggtattgaaatcagaaggagcactgttgcctgtgaggttttctttattgagtttcaaactagtaccttcatcactacagtcaccaagctgtgttttgtcttcagaattcacatcagcctctgtcaaaacaggattttggcttattttccataacagctccttaaactcttctctctttgctgaatctgaagagttcgcgagttgaacaaatgcctttttaactgcagcagaaacctccatatcaacctgaaaagcagtctgaaaggatgcagtaactttatgggttgatcgtcctccagtatgtgatgatgattccacttcatactgctgatgtggacatctggtgtgtcatacatcatc

SEQ ID NO: 31281 - DNA, 2494 bp, Setaria italica
  Peptide Sequence Number=SeqID_97255
ttttttttgtacgacaaaataatgatacaattaccataacaaattacaaaggttatttacagggccctaagaaaagctatttacagatttgagtaactttctttttattcctgcaaacttggagttgtgaggaagcaaacgcatgtaaaatatgtcagttattcgtcttgtccccagagaagaaggctgatgtgtcgtgcatctaaacttcgtcagttagcatctagcttactctcagcctcgtccacgatctcaagctctcccaacaaagcagcgagtttcctcgcatcctcgtcttgcttgctctgcggggccttctcgcggtatcccgaagcattcattttctgtgacaacgcatcgtgttgcctctggatctcctccctctttctccttagcttctcacgctcagctttagtgtccagagctccccggagctggaggaacacggatagatccttgtttacaatatgcgtggcgcaatcaagaggagttgggtcatcttcggccaggatctgaagagatgatacagacgcaagtgttgtgatataagactggtaggagcgcatggtggcagcagtctccaagcctcggcaaagcacaaaagcaggacgtctttcgtatgtatctgttgatggccgaagtgatcgtagcttgttcacagtatctaacacgatctccatctcattttcaatttgatcatttgtccattcatgtactgctgcggggtattctgatatcataatggaatcttttgtacaggcttctttaggttgaggaagacgctgccaaagttcctcagttatgtaaggcatgaatggatggagcaggcgcaaacccgtgtccaagcatacccataatgtatctctagaagcacctcttgcagattcaaactcttgagattcattgaaataaggttttattgcttcaatatatacatcgcaaagctggtactgccaccatgaatatatagaggacgtagcctcagagaatttatacgcttctagcgatgactcaatcttgccaacagccttgttaagtactgagagtatccatttgcagacaggaggcaaagaacacactgcaatagttgctggtgggcgtactgatctccaagcttgttcatggcaaaacgaatggcattccacagcttattgcaccactgtcgatacccatgcactcttttgatatccaggtttatcttgtcagactgcaatgtaagagatcagggcaaagcgaagggcatctgtaccacactctggaatgccattagggaaatcctttctctgtccttcttttgctttctctacctcttttggatccagattgccatcttccaactttttctgaagattttccagtgatatgccatttattacatcaatggggtcaatgacatttcccagtgacttggccattttacggccatgtgcatcacgaataattggatgcaagtaaaccttttgaaatggcacatccccaccgagttgcattcccatcatcaccatccgtgctacccaaaagaagaggatatctgatccagtttcaagaacagaactagggtagaatgtactaagatcaggtttatcgtctggccaaccaagtacacttaatggaaagaggccagatgaaaaccatgtatccagtacatcaggatcttgatataactgatatttcttccctggatacctctgctttgcctccaggattgcatcattttcatcccttgcgataatccagtggtcactgtaagaacccatgtctttgtctttgtcgtcttctaatgtcacataccaagcaggtatccggtgtccccaccagagttgccttgatatacaccaatcacgtatgttttcaagccatctataccagtcttgctcatattgtggtggaatgatctcaatttttttggacttcacagcatcaagagcttcctttgccatagagttacaattaacaaaccattgaggcttcatcattggctccacaacatctttagatcttgaacacagactcaagctcatcacattactttttgtgtctcggtagagacccttattcttcaatgcatcaataacagcagttcgagcagcaaaacgtggcatcccttcgaattgcgagcctcccatttcatttatttttccatcatctgtgaaaatattaatgaactcaaggttatgctgttccccaaccttgaaatcattgggatcgtgagctggtgtaatcttgacagcgccagtaccaaaactaggatccactaactcagcatcgcaaattattttgagtttttcggccattgaaagggtgtaaagcatattttccatgtaagtgcttatatctttcatcctgcggatgaacagctatggcagtatcgccaagcatcgtttctatcctggttgttgcgacaataattccatataaaccttcttctagaggataggcaaaagatatcaaaacaccaaattgcactggagatctataaccaggaacctctaat

SEQ ID NO: 31282 - DNA, 340 bp, Setaria italica
  Peptide Sequence Number=SeqID_97256
gttccaggattctgatggccatccattttgacccctatgataaggggtcggcgagaagacgaccaccgaaggggatgagcgcttgaggggagaagaccgcgtcgccgtcgccgccgacctgccgtgcgccttgcgggtatccaccgtcgccgccgtcgggagggggtctccgtaggggagacagccgtgctcctgctgattcacccgctccgcggccgccgccggccggagatgtcgcgcagggccgcggcgcctccaccctcaccgcctcgtgtcgcctccgcccgcgagggttggttccacgccaatcgggagattttgggttcccggccgaggtggg

SEQ ID NO: 31283 - DNA, 540 bp, Setaria italica
  Peptide Sequence Number=SeqID_97257
aaacggacagtaaaaggttcatcatgcttaaaaacagacattagtctttattcagacatacataatgttttacagtaaacagagtaacacactaatttaggttacaacagattccagctaagttgagtttgagccttgccaaagtctaataattctatccaatcatctcattagcagtgtaccagtaatctcaaaacagttcgtatcattaaacaactgaaactacttcaatcattaaaaaacagaagctacttcaatatggaaaatctctagcatggtagtaaatgtccctggacattctttccttatccacaaggctttcatcaatgtccaaaaggtggcaaagtgagaaaatatccaaaagataaacataccatggacaaaatctttctcagaatgaatatgacacaagagaggaaaaaacggcatgctcaaaatcaataaaaagtaggcaaaatctaccaacatttatacaattccatgtataaaaaaggctaatcattttcatctcttgacggtatctcatcatctactacaaac

SEQ ID NO: 31284 - DNA, 244 bp, Setaria italica
  Peptide Sequence Number=SeqID_97258
cccgcctgcctggccgcctgcagctccgaggcgtccgccgccgcgggcttccgctgctcggcgccgccctccgccaccgccgccggcacgtcctccagcgcgaagttctccgggagcacgaacacgctctgcgacgcccgcctctggtgcctgcccgctctctgcgacatctttgcggcgctcaacaacacctacaacgacagggcttggcctcgtgcggctgtttccactaggcagaggaaag

SEQ ID NO: 31285 - DNA, 455 bp, Setaria italica
  Peptide Sequence Number=SeqID_97259
atttatacaaatgttcttgggagggggctattcaatagagtgagataggttcctttttttctaggaagtgctgtgattatataggtgctgtgtgcatgtgttgtgggtcagatttagcacgcctcactgtgtcgttatgttcatgtatgtgatttgagaattttgcataaaccctttatgccgtgtttgattcttagagggaatggattcctcaactagataagtgactccaaacctttttctgtcatgatgccatcaaattggacatggaattattacccatgtaaaacggggaagggaaatttttttgaaatcacttttgcagacaaaatgatgtagtaccgttacagtatagctctccaagaactttcctcttgagataacaaagggcttactttttttaattttttttaggatgacaaaatactactatacttataaatacttatgtaaag

SEQ ID NO: 31286 - DNA, 646 bp, Setaria italica
  Peptide Sequence Number=SeqID_97260
atcgtagggaatctccattgtgccagtagtagatggcaggagctcttcaaacatagcatgtctagcatctggctctggcaatggtacaagaatacgcttctccagccgacgcagcattgctgcatccagctcccatggtaaatttgtggccgctagaacaaaaacaagctcatctgtcttagtcaacccgtccatctgtattaacagctcagttttcaatcgtcggctagcttcatgttcactacgagcttcaccacgttgactaattatagcatcaatctcatcaaggaaaatggtagatggtgcatgatgccttgcaagctcaaataagactttcactagtttctccgagtcaccacgccacttgctcacaattgatgaggcagaaatattgaaaaaggtagttttgcattcagtagccacagcttttgctagcatcgtctttcctgtcccaggtggaccaaatagtagtatacctttccaaggtgataataggcctgtgaagtacttgggatatttgatgggcatgacaactgcttctttgagaagccgctttgcattctccagaccttttatgctttcccatttgacatctgggctcccacgaattatatccctcaacaatgtctcggctatgttgcgtcga

SEQ ID NO: 31287 - DNA, 1559 bp, Setaria italica
  Peptide Sequence Number=SeqID_97261
tttttttttaagagtaacgccagagaaataggtaaatcgagccaaatgtaggcatagagtcctagtttttgcttattccagaaactaaattacccaagagcttattactcatcaaatgaatgataatgtacagcatacaaggataagcatagtgtttacaaggataccttcattccatcgatggaaattccacattatctatcagcccatgcacaagttccgtactgaatacaaatatcttacaacagtctccttcagccatggacatgactgccataatcttggttgaacttctcatatctatgtgcatgaagatgagcagacggccttgtattcctcaaagcaagttcaatatcttctgtcgttactggaccaacttcaggcaactcatcttcaggaacctcttgattgcgttcgagaactgtcattaaccgtcttaggggctgcattgctgcctccttgcatacaaggcgaatatcagagccagaatatccttcagttttctccacaagaacatcgtagggaatctccattgtgccagtagtagatggcaggagctcttcaaacatagcatgtctagcatctggctctggcaatggtacaagaatacgcttctccagccgacgcagcattgctgcatccagctcccatggtaaatttgtggccgctagaacaaaaacaagctcatctgtcttagtcaacccgtccatctgtattaacagctcagttttcaatcgtcggctagcttcatgttcactacgagcttcaccacgttgacagtttctccgagtcaccacgccacttgctcacaattgatgaggcagaaatattgaaaaaggtagttttgcattcagtagccacagcttttgctagcatcgtctttcctgtcccaggtggaccaaatagtagtatacctttccaaggtgataataggcctgtgaagtacttgggatatttgatgggcatgacaactgcttctttgagaagccgctttgcattctccagaccttttatgctttcccatttgacatctgggctcccacgaattatatccctcaacaatgtctcggctaagttgcgcgtttctgcggattcaaatgaaggaagcagaggtttctgcggcggcccgtcctctatagccccattgcgcatctccaccttcctctccatccgctcgaactgctcgaagacagcgaggtccgcgcccccgttggcgcgtgacacggcgggtcggccggacagttggtcggatccgcgcagcggggggcggccatcgtcgcggtcgtcaccgtcgccctccgcgggctcgcggcggatgccgaggcgcacctcgtagtagacctcgaagtcctcgaaggtccagcgcgtgatggaaggctcgccgtcgtcggccatcgagacgcgcgcgcgcgcgtgacggcgtgagggggtggtgcggtgctgcgctgcttcgccggccgcacgcacgcacccacccacccacgcacgcgcgacgcgagctctctggaagcagctagcggggtggaggaagagccgaaggagggggtgcggttgggctg

SEQ ID NO: 31288 - DNA, 514 bp, Setaria italica
  Peptide Sequence Number=SeqID_97262
gggcggggtcaggggctcaacgagtcaacggcgagtgaatagcgagagtccggggcctgctgatccgacgtcgtcggcggtcggcggaggaagcgcggaggaggcgaacccgcagcggtcaggccggtatggctaatcacaggccatcaatagttgcgacatggccaaggcggtgcatgaagatgtcaatgcaatcctcgacatcatatgacagctccctcaactgacccatccactcctttacttgcaagcttgcttcctccgactcggacaccatctctagggtggtgctcatgcttcttagttcttctcgcagaaagatgacctgccgatggacgccttggaggttgacatcctccctctccaacaggctgccgagcctaccgaggagggggtccatcacccccatcagagcactcgccgtcaccccaaccatctcttcctgtgcactctatagaagttagcaagaaatttgctgtaacgggtactggaatgacgcttggatctcttatag

SEQ ID NO: 31289 - DNA, 581 bp, Setaria italica
  Peptide Sequence Number=SeqID_97263
caaatgcgagcctatatcatttttcttggttagcaaacacgcctcatccacaaacaaaaaggaggaaagaattaaacacaggaaagtagtgggggacatatacattctctggcgagccatcaccatttagggaagtactatcatggttctaggacggctgccctaataacttgtgtgcaagttgacaaccgaaaaggatgtatgcctcggtggaagcttgatctcgtcgtgatccaattctccccaaatgcttggatacactaaaagtgaccttctaatgtagttagcatcaacatctactccgtcatcacaagttgcctgcctcaggtaaatccatttcggccaatgcccgcgttggagcaattcctgcccggcgtgccactcccggactgcgccgaccctgagccgaggaaatccgagggcgatctcttcctgtgccggttagcaaggaacctgccgccgttccgggaggaggtggcctcgtcactccggccgccgtggcgcgctggcgacgagtactggcacaagctcggctgcggcgacgtcgagcaccgcacgtcctcctttgcgcattcagcggc

SEQ ID NO: 31290 - DNA, 234 bp, Setaria italica
  Peptide Sequence Number=SeqID_97264
ccatctccaggtaattgcatcaggctgatcatttagagttatgttctgaactgagtcccacagtaaaagaaactctgccatttctgtaactgaattcattctccagagccctctagtccaattgtgctcaatgatctcctcatggactgtcttattctttctccacgcaagattgtagagatttggggcgatgtctcttggagctttaccatccaaccaggaggaattccaaaa

SEQ ID NO: 31291 - DNA, 551 bp, Setaria italica
  Peptide Sequence Number=SeqID_97265
acttcctatgggttggagagcgtactcgtcaacttgatggtgcccatgtggagtttcttcggggcattgccaaccctcttggtatcaaggtaatataatgcccaataatcactcggcaactcctccgtttgaatgctgcatttgaaaagcaaaaaattcaaagcattatctgaaatacatttcaccccaacttctgatgaaatacaggtcagtgacaagatggacccagcagaacttgtgcggttgattgatatcttgaatcctgaaaacagggcagggagaataaccatcatcacaagaatgggacctgaaaacatgagggtgaaacttcctcacctgatacgtgctgtccgtggggctggccagatagtaacatgggtcactgacccaatgcatgggaacaccatgaaggccccttgtggactcaaaacccgctccttcgacagaattttggctgaggtgcgtgcattctttgatgttcacgaacaagaagggagctatccatgaggcaatcctccttttcctcaagcgctcagcgatgatgaatgcca

SEQ ID NO: 31292 - DNA, 1745 bp, Setaria italica
  misc_feature (1612)..(1612): n is a, c, g, or t
  misc_feature (1640)..(1640): n is a, c, g, or t
  misc_feature (1665)..(1665): n is a, c, g, or t
  Peptide Sequence Number=SeqID_97266
tttattgtcttgtctaattgtctagtagggttaactactagttggtaacctttgtactttctaccctagtaatttgttgtaactagggtcgtattaggttactattgggtagtttgtacaaggcggagctggatgaggtgctgcggacggtggaggcgttcccgcccatcgtcttcgccggggaggcgcgcaccctcgaggagcggctcgcggaggcggccgtgggccgggcgttcctcctccagggcggcgactgcgccgagagcttcaaggagttcaacgccaacaacatcagggataccttccgggtccttctgcaaatgtccgtcgtgctcatgttcggaggacagatgcctatcgtcaaggtgggaagaatggcaggccagtttgcaaagccaagatcagatggtattgaggaacgggatggagtgaagctgccaagctatagaggggacaatataaatggggacacattcgatgagaagtcaagattgccagatccacaccgcctgataagggcgtactcacaatctgctgctacactgaatttgttgcgggcattcgctactggaggttatgctgcaatgcagagggtaacacagtggaaccttgacttcacccagaattgtgaacagggcgataggtacatggagttggcccaccgagttgacgaggctttgggattcatgtcagctgctggactcactttagatcaccctataatgacaacaacagaattctggacgtcgcatgagtgccttcttcttccttacgagcaggcgcttactcgtgaagactccaccacaggcctctattatgactgctctgcccacttcctatgggttggagagcgtactcgtcaacttgatggtgcccatgtggagtttcttcggggcattgccaaccctcttggtatcaaggtcagtgacaagatggacccagcagaacttgtgcggttgattgatatcttgaatcctgaaaacagggcagggagaataaccatcatcacaagaatgggacctgaaaacatgagggtgaaacttcctcacctgatacgtgctgtccgtggggctggccagatagtaacatgggtcactgacccaatgcatgggaacaccatgaaggccccttgtggactcaaaacccgctccttcgacagaattttggctgaggtgcgtgcattctttgatgttcacgaacaagaagggagctatccaggaggcgtgcatctggagatgaccggacagaatgtgacagagtgcattggtggatcacggacagtgacatttgatgatctgacctcacgctaccacacacactgcgacccaaggctcaacgcctcgcaatcgctggagatggcattcatcatcgctgagcgcttgaggaaaaggaggattgcctcatggaatttgaacgggaaccagctgggttccattccatcattggggctgtaaactgtgataatcattgtcaaggaccactcctccagttttcttttagttgctttgtcaaattttgtgtcatgtactggtaaacaagataaacttttgatttccattgtcatataaataagatgcaagttaccttcaaccgttcttactcaaaaaaaaantacttctctttgcttgcaataggcttcnctttgcttgcaatcctatttcaatntcaggtctgcaattctatttaatgggataattgctcaattataccacctctctgttattctgttgagtgaatagtgagta

SEQ ID NO: 31293 - DNA, 597 bp, Setaria italica
  Peptide Sequence Number=SeqID_97267
agaagtcttgtaggcgtcctgtatggatctgtattctttcattatgctggtgaagttgtatgagctttgctccttatcttctaatctgtgcatgcacactagaatgtacagttccaaaatcgagagatcttgtaggctgtccatcttgggttgcctctgcaaggaggaaagcgccttcaggaagctttccattgacagaaatccagattccatgtccatgtatgacacagctctgaaaagaaatcttagaatattgctcgttgttgcgtcagcatccatgagggagttgagaattcctttgaatttcttatcactgaaaatgttagtaagtcttgagttataatccgtgatatactttgctggtaaacctgaatctttggccagtattagcaaatgttccactaacctttgtgtatcttccagtgaagaaggaacaaataaaagtttcctatgagagaatcgggatctaacccttttctctaggagttgatcagcatccaagcggcaactcacaccaatgacaacagcttgtgatgtgagggactgcattgcatcaagtaagctgtagagcaaccgctgttaccctgagcaaagagg

SEQ ID NO: 31294 - DNA, 251 bp, Setaria italica
  Peptide Sequence Number=SeqID_97268
tggatatcaacaatttataaaggttgagaaggaatcaattcacaggtgcaactaaagcaactgggctttcagtggatgtatttgaagaggcagtaaagatacttccatatgcagtgccttatgaatatgtattatttggttctccagaggatacaagtagtggaagctatgatgattttgtctatcaagttcatcttaaggtatacgatatagtaattggagatataacaatcaggtataaccgaactttc

SEQ ID NO: 31295 - DNA, 1352 bp, Setaria italica
  Peptide Sequence Number=SeqID_97269
catggcgatgccaactccggcgagctgctccggcaggccattggcgctggtgctcgtgctcgccgcggcggcgctgtgctgccgcctgggttcctgcgacggagctgccgccgacaggatcaggcggctccccggccagccggaggtgagcttcggccagtactccggctacgtcggcgtcgacgacgtcggcaagagggcgctcttctactacttcgtcgaggccgaggtcgaccctgcatcaaagcctctcgtcctctggctcaatggagggcccgggtgttcttcactgggtgtaggggccttctcggagaacggccccttcaggccgagtgggcaggtgctggttaagaacgagtacagctggaacaaagaggccaatgtgatttacctggagacgccggctggtgtaggctactcctactctgctgatgctgcctactaccagggtgtggatgacaagatgacagccacggacaacatggtgttcctgcaaaggtggctccaaaagttcccacagtacaagggcagggacctctacatcgccggagaaagctacgcagggcactacatcccacagctcgccgaggtcatggtggagttcaacaagaaggacaagatcttcaacctcaaaggcatcgctcttgggaaccctgttcttgagttcacgacggacttcaactcccgggcggagtacttctggtcgcacggcctcatctccgacggcacctaccgggtgttcacgtcggtgtgcaactactcccggtacgtggccgagtactacggcggcgcgctgtcgccgctgtgcgcccgggtgatgaaccaggtgacccgcgagacgagccgtttcgtcgacaagtacgacgtcaccctcgacgtctgcctctcctcggtgctctcccagtccaaggtcctgacgccgcaccagcaggccggcaaccgcatcgacgtctgcgtcgaggacgagaccgtcaggtacctcaaccgccgtgacgtccaggcggcgatgcacgcaaggctcgtcggcgtcgacaagtgggccgtctgcagcagtgttctcgagtacgagctgctcaacctgcagatacccaccatcaacattgtcggatcgctcgtcaagtccggcatccgggtgctagtttacagcggcgatcaggactcggtgatccctctaacagggagccggacgctggtgcagaacttggcgcacgacatgggcctcaagacgactacaccataccgggtttggttcgagggtcagcaggttgggggatggactcaggtgtatggtggcggcacgctgtccttcgccaccatcaggggggcatcccatgaggcaccattctcgcagc

SEQ ID NO: 31296 - DNA, 1248 bp, Setaria italica
  Peptide Sequence Number=SeqID_97270
aaattaacaaaataaaataagaagaaccaaaaaataaaaagaagactaaaaaacaagtagacaaggtagaaaggtgataacattgtatggcatgctgaaatcaggagtcgtcaggggaacgagcaatacttctgtatacgacttcacaacagtgtcttcctggaaattttctagtaaaggagacccaagtaatggatcaatttcagggtaatttctagcagagttgaactcaggaaagctaaccaaagctgatggaatgtcaaatccttgattagcatcaggaggatattcatctatatgcaggaatcccttgtcaaaatccaatgtcagagtagccgactgcatgctgcaagggaatcttagtagcatctccagagtaccaggcaaaagcttgtcttctgaaggagtgacatgaatcttgtcaactacatctgatacagttttccggttcccatctataaaaatttctaggctgtgataatagaccttaacataccatggaaccatctggaaaataactgcctttattgaacaatcatttgggctgccaaatatcttctgaagattagtggacgtaaaggacagagcaattgaccctctttcatttccactacccataagaaatctgcttgcatgaaaaggtgagggggtgcaagaccatatcaggggaagcttccaagttatgcccacatcaaaaggcttttcctcactgtagttactaacatcatattcatatataaaagaagattgaacttccaagttatttaggcctttgatcaacctgtccgggccattggacaacacaaagaattcattattccaagaaagatcacttccagatttgttaactttgtcaacaatgcctttatcaaactctatgaatattctgctgtatttagaaacaagacatttccctgacaactttctgttgaaaagatgtctcatggaccagctgggctgaagttgtcctagattagaatgcagctgtttatcattaatagtatttggttgcagtacaacagtcagtgtttgatcaagaataataccaagtgactgggatgatcttagtttcagtttctgggaatggtagtatcctttgtaaattgaaggtctatacaacaaagaagctatcccagctttgtcacgacatggaagaagtttcagccaaggtgtcagattctcagtgcatactgcttcacgaggcaatgcaccatatcgcaaattgccttcattcaatttaaatcccca

SEQ ID NO: 31297 - DNA, 276 bp, Setaria italica
  Peptide Sequence Number=SeqID_97271
tgacaccggtggctgtgacgtaggaggaggcgaataatcctgtggcggtggcggaggaggagacgggctgtccggtaatgggctcggtgccgccgccgtgtaatcttgggcgttggcagtggcaagcaaggtggcgagcacgaggggaaggacgacaaggactgacgccctggccatgttgaccgctagctgggctcgtcggccgccggcagctttgtgtgtgtaacgtgtgcacagtgctctgctgaacttgattgctagagcgtgcttgagagc

SEQ ID NO: 31298 - DNA, 969 bp, Setaria italica
  misc_feature (1)..(22): n is a, c, g, or t
  Peptide Sequence Number=SeqID_97272
nnnnnnnnnnnnnnnnnnnnnnttttacccctaaaaattccaaatcatcaacgcccaagcatcatatagtgaattcatctcacataacttttcactccactccagtacaagtatctgccaccacacgcaaaacttgttgatattcggtccacaaatgttaacatctttcgtcgactacatggcagcagggcaatctcgagaaactcaaaagaaaaggtctgcatacgacatgagcacaagcaacacaataccaaccggctactcttccatccgatcttcagtctgctgctgaacaactttgaccttgaccttgacctttgttttctcagctgaagcctcattactaataagcttcttcggaagcatgttgatgtcctgctccagctccttgttatctctctccagttccttctttttaccaggtttttgcctgtctgaaatgtgcttcttcaggcgctcatgcctagcctttgtaataatcgggatggccttcagagtttgctcggtcacattccggtcatagcgctcaggcctattcctctttctctcaaactcaaaggtcgaatcctgggtcatgtccttgccatgcaagcgcctgtatgcttttgtccacttaaccttacgaggattcctcttcatcttgaaatttttatgacactttgatcggcaaaagcgaaagatcttggcgtcgttgcggacgaactggatgccatggccggggtagatggtggaggagcagaaccagcacttctccaacctcatggcgccgcctccttccttagcgccgcactacaggctcccccaaatcggcagcgaaacgtatctggcgctcaccaggcaatcgattcggagcgaacttgcaggcttgatctggtcgcggcagctgcacgcgaagacaagggcggcggaggaggtatggcgattggcgaaccctagctgaggggaggcgcaacgccgggtgcgcgcggc

SEQ ID NO: 31299 - DNA, 1423 bp, Setaria italica
  Peptide Sequence Number=SeqID_97273
ggtgggcggagcgggtgcggcgcggggtgaggactgtatggttcatggtggtcatggtggcgtcgctgctcgtggcgtcggcgccggcgctcgtggccgcgggcgacgtcgccgtggcgctgtggctcgaggtgcgcctcggatgcctccgcggccacggcctgcgggaccaactgcagcggtaccgcttccggagctcgctcgccgacataccgctcgtctccatccttcgatctctcatcatcacttgtgtatacctcatgtctgatacttctggtctctctcatggtccttaccttggaacagcaactttctgttccttggcatctctgctcattttgttaattaaggcctccgtttatagtccggggcaggacattgggcctgagctctcgccgtcattgccggatcacaagctcaatctcaagaagcttatggggaatgccagtgctttttctgtcttccttggtgtttgctcttggccatgttattgttgcttacagaacaagctgcagggctcgacggaagcttctcattcaccgcattgaccctgaatcgattttagcgtacaagaatgccttttctggatgctacaaggttccacggtctcctacaccatatggtgcaaagcttttctcaaggagtgaaagcgagacaaagaggaaaacaattgtacatgatgaccgcgatttgccaatcagttttcttgcagacagtgatagcatgttcattgcttgccaggggatcactgtacactacaaaatttccgatccatcaacctgcttatcgtcgccccctgactccttttcagaaagggatactcatcatgatgtaatttcatcgagcatttctcctagaagacagagacatgagagcccaccgtccgcttcctccaatacccgccgccttctgaataggagctttagccatcaatatcatcaaacttctctatatgcgccactattggtagaaccagtgacatctccaactttgtcagatgagatccctcttatgagtcttgatgatggcagtgctgacgtatatttgaatcctgtgggctttgaccttgtagtcggagagcatggtaaatttgctgtagttttagtgcatgggtttggagggggagtattctcgtggagacatgtctctaatttgctagctcgacaagtgggctgcaatgttttggcctttgatcgcccaggatggggattgacatctcgacctcgcagaaaggactgggaagacaagaaattaccaaatccatatgagttagagtctcaggttgatcttcttatttcattttgctcggagatgggtttgcgctctgtggttttagttggtcatgatgatgggggcttgcttgccttgaaagctgcagaaaagttgcgcacttatggagatcatataaaggttgaggtgaagg

SEQ ID NO: 31300 - DNA, 258 bp, Setaria italica
  Peptide Sequence Number=SeqID_97274
ggcatggcggtcgacgtcagcggagctcttcagcttcttcgccaacgacatcgtgtgccaggccgtgacgggcaggctccccagggaacaaggccggaaccagctgttccgggagctgctggagacgaacgccaagctcctggggggattcaacctggacgactacttcccgagcttggcgaggttcgacatggtgtcggccaaggccgtgaagcacaggaagatatgggatgacctcttggacagcctcatcgacaa

SEQ ID NO: 31301 - DNA, 2653 bp, Setaria italica
  misc_feature (2624)..(2624): n is a, c, g, or t
  Peptide Sequence Number=SeqID_97275
tacccaataccatcggcatcgagcggatcctatcttatctcgcgtttgacatcgagtcggcgtcgtccactggacccaagtgctccaggcaacagcgcagccggaatcgccgcaccgccgcgaatgagagaagcttgcctcgccggcaagcaatgcaaccacgcagcgcgtctcaggtcgccgtctgcaccggagaggtgacagcatcagccagttaaagaggtccaagcaccaacagtcgtctaccacagcaattccacttcttttcctttctacacacacacactagtatatcttatctaccaattgcccgaacgcacactatagatacatgtcccactcccaatagacagacagactcttcctgtactgtacatctcaataacagagcacaactgtagtctatagaggacacgacaaaataaaaatttgatgaacaatccagcacccaaaggccaaacgtggccagatcgaccctgttcttggcttcttgctgaatgctgatggatggggctctgcctcggcaacaatttgcctttctttcttccgagcacggtacaccatctgaaaaaagagcttttgatctctgtccctcagatggcgtcgcccgtgccgccttcgggcaccctgtacgagtaccccagatcatcggactgccgccggatgatgctagccctctgcatcagccgcaccagctgctgcaccacctcggacatcggcggccggaactccggctccgactggacgcagatcgcgatgatgtcggcgaagcgggagagggattttgcagggtacagcccgtccatggcaggatccaccatcttggcaagcaggtcgatgtcatggagctgcggggtcgcccatctcactagggactgctctgacctctccctggagctatccagaggcttacggcctgtcagcagctccaacatcaccactccgaaactgtacacgtcgctcttggtggtgtatgttcctgacatggcgaactcgggggcgctgtatccgaaagacccaaccacctcagctgaaacctctctctcaggatttggtgacagagcagcaaggccacagtcagagagatgtggactgtactcctcatcaagcaggatgttggacgacttgaagctcctatggacgacagggggcatgcacacctcatgcaggtactctagagcgcgggcggtgcccagtgctatcctcacacgggtgttccatgtgagtttcctgctcattccatcagagaagtgcagtatatcgtgcagcgttccgtttccaatgtactcgtacacgagaagcctttgcccatgttcagtacagtagcctgtaagaggcacaatgtttggatgtctcagccgggaaatgttcgagataacctcaaggaaattttcttcttcgtacagagacagtgaggcgctgtctatcttcttgacagcaagtaccttcccattgggaaaatcagccttgtaaacacgaccaagcgaaccctcgcctaggagagagtcttgacaaaagctgttcgtagcaacttggagagcagcaactgtatatgaagttgccgtcacagggacctttgcattctttgcagtagaaccatttgtaccataaactctctctggagtcatttttccactaggttggagatctgaagttgctacaacagcattttcatggctgttattcgggatcggggtttccctattagatgctctctctatgtttactgcaagggaacctacaatatcttttggttcactgctcgcatcatcatttcttttccgggtcttgtgaaggcagaataccaacgcgaaaagtacgcatgagccaacagctattgagccaacagctatccctacaagaggacctgtttgcagcttcttgtcgtcctgatcaataggagtctcagggacaattggagcacttataggtccttgaggatggtttggctgatcacgtgtattctttggaggtggcgtgagagttggcggtggggaggcaggcatattggcaaatgagtttcctccaactatcaaatttggaatcgagctcaattcttgtggtatcgtgccgctgaaattgttgtttgcaatatttagtgtcgcaaggcttaggttgctgaggacatcaactgtgcctgatagttgattattttgcatgtaaaggctagaaacttttgacagagagcccattgaaattggaagactccccgtcaggttgttgaaagatatgtctagttctgaaagtgaattgaggcttccaaacagttcaccaatttcctgaaataatgagttgtggctgagattgaggtactcaagtgaaaccatggtggatatggagtacggaagattaccagaaaggttatttttcgccaaattcagataggtaaggtttgatggcaactggtaaggaattgaatcatgcaagaagttgttacttaaatccattgttttcagtgcctgtagactggacagttcgtaaccaagagtaccattcagctccataccagaaagcttgattgaggtgacggcggtgcccgagcaggtgacgcccgcccacgcggcgccgcaggggtcgccgccggcggcggaccagccggtgagctgcgccgggctgttccaggngctgtagaggttccccaacgccgcgacgt

SEQ ID NO: 31302 - DNA, 703 bp, Setaria italica
  Peptide Sequence Number=SeqID_97276
caaagcaggggaaatgtgcaatatgctttgctagcatgagatctggccatggccaagccctgtttactgcagagtgttctcacatgttccattttcactgtatctcatctaatgtaaaacatggaaactatgtctgcccagtttgtcgagcgaagtggaaagagataccctgtcgctcactatcttctactagccctcatggaagaattggaggtaaccaagtcaatctccccaacaagatccccatatggctcttcgccagcaagtttcaaaccgtcggcgagaggtccggcgcttacatacttctgaaccagcaggctacaatgatgatgaacctttgcagcgcaaagaggcttttgacaatcttaattctggatctggcaaaactgcccaaatcagctcatacccagaattccaagctgttccacagtcatcatgtctaaatggatttgatattctggttcacgtgaaggcgcccacttctagctcagatcacatcacaggcagcttggtcaatgaaagctctgtgaggtcatcaagccgagctcctgttgatcttgttactgtccttgatgttagtggtagtatggcaggcacaaagctagcgctcctcaagcaagcaatgggttttgttgttcagcaccttcggccatctgaccgcctttcagtcattgccttttcatctactgccatcttacttgtc

SEQ ID NO: 31303 - DNA, 676 bp, Setaria italica
  Peptide Sequence Number=SeqID_97277
agaggtggcaaggaccaaacaatgcccgcaggttccttccaactggtgcgacttgtggtggacagcatctccgcagtgcttgttgctcccatctgcacccgcatctccgctaccctccgggtattaatcttccgtaatgattggcgggtggagagcttcacggaagagcaggagcaggcccttcagctcctcacatccctgcaacggctggaatttctgagctgcagggtgctgctgtccatccctcgagggctgcattgcctttctgctctcaagattttatatatacgtggatctcctagaatcagatcgctgcccaagaagggcctccctgattcactgcaagagttacacatatctgattgctccgccgagctttatgacgaatgcatgaaattaagaggaacaaggccagatatgatgacgtggggtcaccggtggtaaccgctgaacatctgtgcttatttctgcagcaactacagctctgaaaagtcaggacgaacaataccgagtcaaacattcagttatgcaatccctccctcacggattgcctcacctttctgcctcttgaagaaataaatatcactagctctcctaaattcatgccgttgccaaggaagagcctgcccgattcactacactggctaatcaaagctagttgttgctacgaagttta

SEQ ID NO: 31304 - DNA, 1142 bp, Setaria italica
  Peptide Sequence Number=SeqID_97278
ctgcaatttaatcagctccacctcaactttttccccagtacttgcataatgctctaacctagtccagtcactctcggtgatgtcctctagttttgatggtaacacattgtacccgtcatcaacataattcctgttaccagtagcattcatcttttcatcaactggagatggcaaaacttcagcagattgattttctcttttaggtcttccttgtaagaaagcctgcatagagaaattgttgctagttgctgattggttatccactgaaccagcagaagtattagtttcttgcatgacagtttgactggatggctgtggtcctgcactggaattatcatcaagcccagatgattcatgaaagttttcagtcactaattttgcgtcaagacccttagtttctggctcaaattcgatgttatcctctgcagaagaaattgtggtagagctagcggaggcatggtcctggtctggattagcaatatcttttgcaacatctggcttttgaagaagagaaatttttgttaagtcctcattcatatctttcctcattttcaggtcaatgtttggcttcattttcagctttgacttcaaatcatcatcctcactctgatacacagtgggtttccgcaaggtgacatccacatcacttgttctagagatgctccccacctcactgtcatctgttgcagcagctaaactctctttgctaggccaactatcttgtaccacagtgccccttactattggcttgctcccaattggccgtgacaaggtcaacaggggaatatcttcctttgccttgcttcctactggtcgcaactgagccagagaaggctcatcttgcttaggtttgcttcctgctggtcgcagtaaagtcaacggaggcccgtcttgtttcggttttcccattacaggccttgaaatattcaaagaactcttgccttcaactggcttgcttattgttggttgtggggatacactttctggtgttttgaaatcctgatccttcttattagcatccatgaactccctcaaaatatcatctagcttgtcctttttagtggcgatcagtttctctacatcgagggatgaggcatctgggtcagacttcttaaccagaatctttgcgagggtgagcttgg

SEQ ID NO: 31305 - DNA, 260 bp, Setaria italica
  Peptide Sequence Number=SeqID_97279
aacgtaggaatattgcagtcatttttatctcgtcattctgaaaattttggtactacaatgagtcaatgacacattatcaaaggcatgaaaagtaaaggttaggtttccattgttccttaaaagaaacacaggtttctcttagtttttagtcatgtgttaagatgctgctagttgtaaccagcttagagttaagcaccacaactgaacttgcttttgctatgagtgggtacacgaaatcttcaatatacaacctaaagggt

SEQ ID NO: 31306 - DNA, 473 bp, Setaria italica
  Peptide Sequence Number=SeqID_97280
cacgtgccgtactcggcgggatctcaccggagaagaagttccccccgaggtggaggtggcggagcgccggcagcgcggcgaccccgagcgggagcgggccggtgaggttgttgttgtagaggtcgaccacccggagcgcgcggaggcgcgccagcggcggcgggaaggtgccgttgagcacgttgttggagaggttgaggtgggtgaggtaccggagccgggccagcggcgtcgggatggggccggagaacgcgttcgcggcgaggtcgagccgcgcgaggtgcggcagccgggacagcgccgccgggacggggcccgagaggttgcggccggaaaggtcgacgccgatgaccgcgccgcgcgcgttgcacgtcacgccggaccacgcgcaggggctggcggtggcgttcgccgtccaggacgccagcgcgccggccgggtccgccagctccgccttcgccgccagcagcgcg

SEQ ID NO: 31307 - DNA, 414 bp, Setaria italica
  Peptide Sequence Number=SeqID_97281
atggggtactatgatgcaatactttcttcaaatcatggtccatgtattcaaaaaccatgtatatatctcctctatacatctgattattatctgcatatgtttaacacaattctaggatcaaatatatgcaggttaaatcaattaaatggggcaaagttcaaatcagtcatcatgaaccacagaaacgaagaatataagcaactaaacaaaagcaaacatagtgatgtacctgatccccctgttccatgtgcagaacctgagaaaatttaaaaatgggtgagcaatgctctcatactctaatgtatatctagaaatgactagatgaacatttgttaccaggagatactacaatctctttcaatctgatgatgttctcatgatccagtcttttttaatagtttaatctcacgcaag

SEQ ID NO: 31308 - DNA, 410 bp, Setaria italica
  misc_feature (354)..(354): n is a, c, g, or t
  Peptide Sequence Number=SeqID_97282
aggccaaaatcagcaagctttaacagtttaccaccacttattagaagattagcccctttgatatcacgatgaagcacattattgacatggcagtagtgcaatccttttagcagctggcccatataaaccttaacttgggatggggtactatgatgcaatactttcttcaaatcatggtccatgtattcaaaaaccatgtatatatctcctctatacatcagattattatctgatccccctgttccatgtgcagaaccaggagatactacaatctctttcaatctgatgatgttctcatgatccagctttttttaatagtttaatctcacgcaagatttggcgtggaaacccttntttgccatcatccagtttttattttcttgagtgctgctctttccccggtaataata

SEQ ID NO: 31309 - DNA, 754 bp, Setaria italica
  misc_feature (18)..(18): n is a, c, g, or t
  Peptide Sequence Number=SeqID_97283
atcttttgcagatattcnctttgtaggatcaaggatcaacatacgttcaatcaaatcgacagcatgatagtcgaagttctgtaacatatctctcaggcgtcgcttggtaggcgttgcaggatggatagccatagttttgtacaatggcagcttggatacacctggccagttttcctcatttggagatccacacagttcaaatattttggatagctggtcttgctcggttctgccaggaaacaatggttttttaagcaaaaattcagcaaatatttgtctaaccgacctaatatccacagcttcagcataatttgtggcaccaagaagcaactctgggggccggtaccataaagtgatgacatgatttgtgaaagttccttctctagtgaatggccttgcaaggccaaaatcagcaagctttaacagtttaccaccacttattagaagattagcccctttgatatcacgatgaagcacattattgacatggcagtagtgcaatccttttagcagctggcccatataaacctgatccccctgttccatgtgcagaaccaggagatactacaatctctttcaatctgatgatgttctcatgatccagctttttaatagtttaatctcacgcaagatttggcgtggaaacccttctttgccatcatccagttttattttcttgagtgctgctctttccccggtaataatatccacagcctcaaatacctcaccgtaggtgccctcgccgatcttgcgg

SEQ ID NO: 31310 - DNA, 374 bp, Setaria italica
  Peptide Sequence Number=SeqID_97284
ttattgtctagtagtccttcttccaaaatgtcgaaagatggcaccgcgtcgacaactcctcttagactgacagtatcgtacaatatcatatagattttgaaggccacaattttcgtagaagaccattgaactctgccttggaacatcgccaggccgataatacaaaacacattctgaaggtaatccatctcgccctgcccgaccactctcctggtagtatgtctccatagacttgctaaggctatgatgaatcacaaatcgaactagaaaaaaatatttcttagataatctattgggaagaaagcaatagcaaataccaaaactgtaattcgatcgatggccgaagttagatgtcaagcatttcccaggctctt

SEQ ID NO: 31311 - DNA, 500 bp, Setaria italica
  Peptide Sequence Number=SeqID_97285
ctgaaggtaatccatctcgccctgcccgaccactctcctgaagtcagatagctttattagaaagggaaccccttggttggggtgacaaaaaaaaaatgatattaacatacctggtagtatgtctccatagacttgctaaggctatgatgaatcacaaatcgaactagaaaaaaaatatttcttagataatctattgggaagaaagcaatagcaaataccaaaactgtaattcgatcgatggccgaagttagatgtcacccaagttcctgggaaatgcttgacttgataatccatgttttcacataatgaccccatattcaaagatcctagtacgagcacatttaatatggaatggcttaacatttctcaactaaattataacagaaacctacgaaatagtgtttaccgctatttcagggagaaggcttagtattttgtctgtacggaactatttcagggacaagacaacgctcatcagtttgccggcccgtacctaaaaa

SEQ ID NO: 31312 - DNA, 543 bp, Setaria italica
  Peptide Sequence Number=SeqID_97286
tagacaagaagacctactaccaaaatgtcgaaagatggcaccgcgtcgacaactcctcttagactgacagtatcgtacaatatcatatagattttgaaggccacaattttcgtagaagaccattgaactctgccttggaacatcgccaggccgataatcaaaacacattctgaaggtaatccatctcgccctgcccgaccactctcctggtagtatgtctccatagacttgctaaggctatgatgaatcacaaatcgaacatctggtttgttgattcccattccaaatgccactgttccaacgataacttgtgatttccctttgctccaacgcatgtgaattttctcacgagcaacaatatccatatccgcatgataatgctcagccaaaatacccctatcgcacaattcttttgcaacctgttcgcattccctccttgaaaagcaatatacaattccagattcattatttgggtatgattcacttataaaatttgcgatctcatcaatgacaacctttccaaccggtgattttcatgtacct

SEQ ID NO: 31313 - DNA, 611 bp, Setaria italica
  Peptide Sequence Number=SeqID_97287
gtataagctggactatcaactgctcaatttcttctcttttaagatcaacatcttgattggaacgacctaaacctttccacttagccttgaacttatccaccaactgcaacagtgtagctctttgttcattaagttgcaggtcatgtagaactgaaactacaactttggtatggtctgaacaacaagtaatagaaattaacatgggaatatgaacagaaaataaatgaagaacttcaaattatgatcattaattgtaatttcgagactgatgcagagtcatcatacgggtggcatctatctccttgagctcgatactagaagcacaattgtcacacattccattgcagtcctgcagagcctctccaaaatgtcgaaagatggcaccgcgtcgacaactcctcttagactgacagggaaaaaaactgcaatcagattatactgaaaacaaaaacactacagtgacaatttattactttgtttctcaaatgcaaaatgtgctagaagtcctgctactccctctgtcccaaattataagttgttttggtttttttagattcataggtttttgctatgcatctagatatatattatatctaggtgcatagtaaaaa

SEQ ID NO: 31314 - DNA, 497 bp, Setaria italica
  Peptide Sequence Number=SeqID_97288
ctagatttcttagatacttccagcaaagcctttaactgtgactgtcgctcatacaactcctcttggcgatcaagtaatgttctaatttgtccttgaatgtcctggagttgtgaccccacaagaaacagttcatcctcaatgttttcttcgtcctccatatctcagttcttctctgtcttctttcgcaaatctactaacatatttgcatgttttcctttcctgaaaaattgagacttaaggcttgagaaatttctaattgttgaaattccaggctttccccaaagccccagtcgagaacccaaccaccagcgcctgctcgccgccacttggtcctgggcactgccctttggaccagcgtcctgccttcccacgcccccagcgtcttccgccgcccgccctacaggagccgagtcttcacggaccagagcttcgtgcgacgctgcccgccgcctccaccggccttgggtgcgagcacgaggaagcgttgcaaggaaagg

SEQ ID NO: 31315 - DNA, 247 bp, Setaria italica
  Peptide Sequence Number=SeqID_97289
aacaacaagtaatagaaattaacatgggaatatgaacagaaaataaatgaagaacttcaaattatgatcattaattgtaatttcgagactgatgcagagtcatcatacgggtggcatctatctccttgagctcgatactagaagcacaattgtcacacattcctgtgaagaattctgtaaatattgatgatccaaatgtttagatcctgatcctgataaatataaagtagcaagaaaattaaaataa

SEQ ID NO: 31316 - DNA, 641 bp, Setaria italica
  Peptide Sequence Number=SeqID_97290
ccaaatacattgaatctggtatcatcagcccgagaatcccatgggaagctcccagaccaatccttcgagaataactgaagttgaattgtttctagatttcttagatacttccagcaaagcctttaactgtgactgtcgctcatacaactcctcttggcgatcaagtaatgttctaatttgtccttgaatgtcctggagttgtgaccccacaagaaacagttcatcctcaatgttttcttcgtcctccatatctcagttcttaaggcttgagaaatttctaattgttgaaattccaggctttccccaaagccccagtcgagaacccaaccaccagcgcctgctcgccgccacttggtcctgggcactgccctttggaccagcgtcctgccttcccacgcccccagcgtcttccgccgcccgccctacaggagccgagtcttcacggaccagagcttcgtgcgacgctgcccgccgcctccaccggccttgggtgcgagcacgaggaagcgttgcaaggaaaggatgaagccggcggcgtcgcgaggaagaagccgccgtcttgggccgggctgcttcgtgggccccaaacccaaaaaaggcccagctcaaccacaatgcgtccgtctaaacgcggcttccgg

SEQ ID NO: 31317 - DNA, 495 bp, Setaria italica
  Peptide Sequence Number=SeqID_97291
cagcctctgttcgtccaattgaactgaacttgaaagaagcttgaagaactggagcaagcaatgtcgaaaggaggaataaccgagctggccggggttcctggatttgccagccctgcaatagatgagatcatgaagatgattgcatccagggcagctgttgggtagaaagttgctgatgggcaaagaactgcatcttttacttcttctcagatggccactttgagcaatgtctctggctcagtcatgtctacggcagcaacaaccagaagtactgtaactgacctcggggttgtaggcagaggtgtcaaacgagctagcagcctagcgtcaaggtgataacagctgaacctgctcaagaagcctgcagtggattcagcacctgtgagaggagatagcagcaacagctctgagagtaggttcttcatacaacacagaatggtgatgattctgtatcgaagtacagtacaagttcactagccctaccctcacgctaac

SEQ ID NO: 31318 - DNA, 3229 bp, Setaria italica
  misc_feature (115)..(115): n is a, c, g, or t
  Peptide Sequence Number=SeqID_97292
ttttttttaactaccaagtaactaaatttgcttcaaacttgttgaaattccaagaatgctttgtttgcaggtaaaagtggtacggtgaactggttatgcacttgctgctgaaggngactcagaaaaatctgctcctgaagctgacatagaacagcctactgtacgtcatattgactgaacttgagaagaaggtaaaacaattagagttgcgttttgttttgcttcatgagccttatactgtatcagcaatgaagatgatttgtcttgcttctgaggaataatgccatctctgaatggttctgtgctcagcttgaagaactggagcaagcactgtcgaaaggaggaataaccgaaataaattgtaagctttgttccatttccactgataatgtgatatttcttccttgttcacgcatttgtatgttcctcagaagaaaaccttgtctatcccactctgtctgcattatgtgtatggtacagtgacaggaaacaagaacctccaagagactagagacgcggacaagaccattgctattcttcgtcgctactctctacacagacaacatccttacccttcttgttcttgtgcctcttgttagcatcaactgcatttcctgttcctgcatccttgacatgggaccggatcagctcaatgatcctgctgccgtacttctccgtcttcaccttccctatgacctgctctagctccgcctctgtggttggtttctggcagctcaggagcgaaatctgctcagaggagagaactgcatggggaaaaatgcttatgcccccgttactggacgatgatgacagctccctgcgcagttcatcaagtttagcttccagatcactcatccggctgcgctttgcacctctggatgatctaccaccaccacctttatcttgacaactctggacagcagcaatctcaagcttcactggtctgttcccttgcaaggctggcttccacagtggtcctaaggtaacataggcgttggttgaatatgctgtatgctgaaattcttctttcaaaacatggtcgagtataagctggactatcaactgctcaatttcttctcttttaagatcaacatcttgattggaacgacctaaacctttccacttagccttgaacttatccaccaactgcaacagtgtagctctttgttcattaagttgcaggtcatgtagaactgaaactacaactttggtatggtgggtggcatctatctccttgagctcgatactagaagcacaattgtcacacattccattgcagtcctctctccaaaatgtcgaaagatggcaccgcgtcgacaactcctcttagactgacagtatcgtacaatatcatatagattttgaaggccacaattttcgtagaagaccattgaactctgccttggaacatcgccaggccgataatacaaaacacattctgaaggtaatccatctcgccctgcccgaccactctcctggtagtatgtctccatagacttgctaaggctatgatgaatcacaaatcgaactagaaaaaaaatatttcttagataatctattgggaagaaagcaatagcaaataccaaaactgtaattcgatcgatggccgaagttagatgtcaagcaatttccagggacatgcttgacttgataatccatgttttcacataatgaccccatattcaaagatcctagtacgagcacatttaatatggaatggcttaacatttctcaactaaattataacagaaacctacgaaatagtgtttaccgctatttcagggagaaggcttagtattttgtctgtacggaactatttcagggacaagacaacgctcatcagtttgccgaccaaaaacaagatgatttcgggaaatatacaggccaattcattttgtccttgatcccatttctgatttctcaatttgttttgcatgtccagcacacaagtcatatgaccaataacatgcaaattttaatctgttttcagactcctgctggtgttgtttacactatataataacttgattaaatacgtagggaagtacatcaagccattttgatcaaactccaaagagcgaacacaccatctggtttgttgattcccattccaaatgccactgttccaacgataacttgtgatttccctttgctccaacgcatgtgaattttctcacgagcaacaatatccatatccgcatgataatgctcagccaaaatacccctatcgcacaattcttttgcaacctgttcgcattccctccttgaaaagcaatatacaattccagattcattatttgggtatgattcacttataaaatttgcgatctcatcaatgacaacctttccaaccggtgatttttcatgtaccttataaaaaaggttgggcctgttaactgtgctaacaaacttgacacacctcgggatatgaagcatctctatcaaatctgtttgaactttacctgttgcagttgctgttagagcaatcataggaacactaggaaattggatctttaaaatgccaagattcttgtagtctggacgaaaatcgtggccccattggctacagcagtgtgcctcatctactgcaatgagagaaagacgtccagcatgatggcatttctcaagcttagacatgaaccttttacttttcgatatcttttctggtgtcacatataatatcttcaattctccttcacctttatcaagtgccctatagatgaacttctcaacttccttgttggtagttgaagtcagcatgtatgctgctatacctaaaactgccagtcccatgacctggtcctggataagagaaagtaaagggctgacaaccaatgcaattccattacgaagtacagctgggagttggtaacacaggctcttccctccaccagcagccattatgaccagaacatccttttgactcatgactgcgttaattatttctcgttgatttgaccggtaggaggtgatgccaaatacattgaatctggtatcatcagcctgagaatcccatgggaagctcccagaccaatcttccagagtaactgaagattcataattgaattgtttctagatttcttagatacttccagcaaagcctttaactgtgactgtcgctcatacaactcctcttggcgatcaagtaatgttctaatttgtcctggaaagcattaatttcaactgtgaaaattgaagcagtggcattccttgtccacaaaatactcaa

SEQ ID NO: 31319 - DNA, 374 bp, Setaria italica
  Peptide Sequence Number=SeqID_97293
gcaaattgttgatgttcccttgtctgtacgtgcagatccaggttctctgcacttccacagttaaacatgcatatgcggcaccaaccaacatctccatttctcaagggtccacccaaaccaaagtgcactggttcttttggaaatccatgacgagaatagtcagcaaaaagattaggatcacctggatacatgtgaccagggaggaaatgaggagggaactctggaccatcaaaagcatgctgtacattcccaggaaggttaccggagccaagctggtctttacggggaccaccactcatccctgggtttctgaaattaggcattacatcagctccatggtgattaaattctgcaccatgtggcagaaagtcagg

SEQ ID NO: 31320 - DNA, 515 bp, Setaria italica
  Peptide Sequence Number=SeqID_97294
cacttctccacaaatgcactaacttcaaagtagaatttcaaggagcaactgcaaatcggttttaaaacgggtggagcgccagactagagaaccggtgcctctgtcacgacaaggagcttgtcaggtcaccagtgcaggggaagtgcaatgccctcactacaatctgcaggccttttcaaggactaattccttgaagcaccctctgacagcacgagcaacagtggcgatcaggactattccatcgaacaaattgatggtgacgaagactttgaagaagtccttcagaaatcagaatttctggttttccaccgttgaaacctcggaagcctcgatcatcctctgcaatggacgcgggcgtgacgagaagagaaaaaccaaaacagacttcatgccgggatcaacggacaccgttcgcgacctctgtcaggtgactaatcggcacctgatcacgtgcgccacaaactttcaatccgtcacgcacgctaacctcgtaggagcacgtgctgaaaccgagg

SEQ ID NO: 31321 - DNA, 918 bp, Setaria italica
  Peptide Sequence Number=SeqID_97295
tgtatattttaaggacataagatgacagatagttccaaggtacatttgaacatatgtaattcgttgtaggaatcaatcaatgaaaatgcatttagaaaaatgagaaagaagaaaactatatttgacacaacatgtgcatcaaagcttttgtccttcaagtattttgatttaataaataacaacctattctaacacatccaaagttagcaaaggcaattcattgatgtcctacagcacttgtggtcagcaagtaattagtgcttgccaatcttagtacaaaaggagactatttttgactaatttttattttccggttaaaattttcggggtagacttaaatttctaactaaccagtatttctattacttctcagtactaattggcactgaatgaacatcatttctgaagagatacatactaaagagaaatccttgttcccttggtatcccatgatggacacaagtcattgcgtttaaaaaaataatcactgccagcagcgagaagctgctcaaaccactcctcaaactaaccatacagaatggccattaacaagtaatcaattagggtggtgttacaacaatatgtaagttacttttgaaactacacaaaggaataaaatgcctagaaaagtaactacatggtacagagaactacaatgttaactgagcagaaaactatcatgtgccacttgcaacactaagctgtcctattctcagtctgctgtggtttctaaaagaagtagccttattctagatcctcagaggaacatagtgcacatattatatatctacactaacatgccttgaatagaaacagaataaaaaagaagctattctcattatgcagctcatgcctttatcaattttgaaaagatagggcagaagaaaattcgaaacagaattaggaaataacaggaca

SEQ ID NO: 31322 - DNA, 793 bp, Setaria italica
  misc_feature (770)..(770): n is a, c, g, or t
  Peptide Sequence Number=SeqID_97296
accgacaaaaagcaatgacaagttagcttctgattcaataaacacatcttgccgtgaccctgtcaaatttggcaagtcaagtaatgaagaggttaagaaagcacagaatatcagatctatgtatctaaaagatattaaagaatctctgggaagaattcgtgctgaaccattaaacagagtacaggccaccaatttttgttatccctcaaggcatgcagttcaggaatcacattcagcttgcaaggagatcaaagtgcctttgcgtgacagtggaagggatttcggaagagatcgtgcactagagttggttgctacaagtccagcagaagagagttctcgatggagacaagaacagtatgcacttcaaattttagaagatgtgcaaaacgctcgaattgctgagaaaactaggatggagatggagatcagaatactgaaagcacaaattgctagcatggagagacaggtgatgaacttggatcacttctctgaggtgaagtccagatcaaaaaggcactagctatttgcagttccaacacatgcaagtgcttgttttgcatagagtatccatgtaaaattgtacagctttagtttgtaaaacaagcaccaaagcacgcaagttttctctcccatcatgtacctatttaaggtcagattgcattttcgaattacccctgatccatgtatgatgcctgcattttaacgtgcccaatttaatttagtgatgagctatattatcagtaagaaaaaaaaacaaaaaaactaaaagngactgaccaaggcacacgagggg

SEQ ID NO: 31323 - DNA, 1553 bp, Setaria italica
  Peptide Sequence Number=SeqID_97297
tttaattaaattgagaaagaatggtgctaatattactgatgctcttggagtagaacaggcggcagaaggacaagccacgtcattgacaaagaaaagtatacatgaccatgttgaggaaattactctagttgaggagctggatgaacaaagcgagagggctacaaggataagagcggaggacatccctgaagaaatcactcaggcacatgaaaaggaatctgataataatgatatgatgaaagattcaaagaactcaaccgacagtgagatgctttgtagttcagctactgtacagtttaaaggaggcatgatggagaagcaatgcattcagaatgttgagccgaataatcagagggaactgtcatctgaatctgatgcagctgctatgaaggttgaaggaatttatgaccacagaaccatggatatggaggaactggctctgacacagaaacatgaccacaaaatcataggcgagaacaaggcaacagcaatattggaaagaagccatatgctggatagtggagtgaaatctgatttgatcactttggaggttgatgaaattcacactgcaggaggaatgcaaaaccaggaaattttggacttggacaagcacaaaatggttccaaaacagaaacaggaccgcataatcatatgggagaacaaggagacaatggttttggaaggcagccatatgctagatagcagagtgaaatcggattcggtcactttggagactgatgaaactcatgctggaggaggaattcgacaccaggaaattttgggcttggataaggaaatggctctgaaacaaaaacaggaccacataatcgcatgtgagaacaaggagacaacagaactgcgaggcatccatatgctagatagcagaatgaagtccgatttggccactttggaggttgacaaaactcctcctgcagaaggaaatgaaaaccaggatattttggatgtcaacaagcaacaaggaacgagtggaacacaggatcttggaactgcaattgggaacaacaaaatgaatatgtcggaggatgaagatattcctgtttgcagtggatatcaaattggaccgacaattgagagtaataaaatgaatatgtcagaagatgcaggtattcctgattgcggtgaatatcaaattgatccaactggtatagaggttaatgaggtcgagtctaccaaaagactaccgaaccaagaacttttggacaatagagaacaactagcaatggaggaaggacaacatttagaaactacaattgaaaacaacaaaatgaatttgccaaatgaagcagatgctttagtttgtggtgaacaccaaatcgattcaactggtacagaagttcctgaggtcaaatcttccagtgttatacagaaccaagaacttttggacaataaagaggaccaggtaacggagaaaagaatggagtgtcacaccgcatatgaaagtggaatacccttagaagaagcctataaatttggtgatggagtggatacctgtgtggttgctgtgaatgttagtgattcaacgcagaacaagg

SEQ ID NO: 31324 - DNA, 1641 bp, Setaria italica
  Peptide Sequence Number=SeqID_97298
ttgttaagttcttagttatttgttctttcttttgtttttgttggttgtaactacctaaattcgtatttctaacttgatgcaggtattcctgattgcggtgaatatcaaattgatccaactggtatagaggttaatgaggtcgagtctaccaaaagactaccgaaccaagaacttttggacaatagagaacaactagcaatggaggaaggacaacatttagaaactacaattgaaaacaacaaaatgaatttgccaaatgaagcagatgctcttgtttgtggtgaacaccaaatcgattcaactggtacagaagttcctgaggtcaaatcttccagtgttatacagaaccaagaacttttggacaataaagaggaccaggtaacggagaaaagaatggagtgtcacaccgcatatgaaagtggaatacccttagaagaagcctataaatttggtgatggagtggatacctgtgtggttgctgtgaatgaccagataacggagaaaagaatggagtgtgaaattgcatatgaaagtagaatatccttggaagaagcctatacacttggtggagcggatacctgtggggttgctgtgaatgttagtgattcaacgcagaacaaagaaacttgcaccactgaggaggcaatggaggacaagcaacaccatgaagttgaacatgtgaatgaggagaggattttggaagacacaactatgatagatagtagtgaattgaaatctgatgtaactcatgtggaggttgacatggctgggtcaaaggagggaacactgaaccagcatgcaactgatgtggaggttggcatggctgggtcaaaggagggaacactgaaccagtatgctttaagtgtggaaacggaagcggcagtgcaagagaagcaggatcatgaaatggccggtgaagacaacagagatgtggctgatgtgaatgcacttgaatgtagggtgaaacctgatggagttgttaaattgtctcatgagactcttcttacaacacaatctgtttcttccgaggacaaggagaatgcaccttcctttgaggaacataatataacagaagttgcaggctttgaatcaaatcaaactacagggatggaacctgaaggagctcttccactagagcctaaaaacatggtagaagtgaaacaagaaaatttggagagtgaaaccgaaagatccatttttagggagaatgatgaagtgacttgcaaagatcagacctcagcatgcgttgtgatttctccttcaaatgtcgatgaccagtgtgacgatgataatggatgggctgaagaaccgacaaaaagcaatgacaagttagcttctgattcaataaacacatcttgccgtgaccctgtcaaatttggcaagtcaagtaatgaagaggttaagaaagcacagaatatcagatctatgtatctaaaagatattaaagaatctctgggaagaattcgtgctgaaccattaaacagagtacaggccaccaatttttgttatccctcaaggcatgcagttcaggaatcacattcagcttgcaaggagatcaaagtgcctttgcgtgacagtggaagggatttcggaagagatcggtgtaattactaacggtaaaaagtaaagtaaattaactaa

SEQ ID NO: 31325 - DNA, 305 bp, Setaria italica
  Peptide Sequence Number=SeqID_97299
atttgccatgtactagaactgtaatgtaagggtcgagcaatgttaagttatgcaaggatcagtgaacgagtggctgctcatttgctgctatttgtggcccagacgtgtctttcaagtcagatttattagccggcaaagctcagcccgtgatatctgacttgaaagacacgtctgggccacaaatagcagcaaatgagcagccactcggtcactgatttcttagacttgtagcttgcatttgccatgtactagaactgtaatgtaagggtcgagcaatgttaagttatgcaaggatcagtgaacga

SEQ ID NO: 31326 - DNA, 331 bp, Setaria italica
  Peptide Sequence Number=SeqID_97300
ccacgcgcaacatcttctcctccaacaagttcaccgtcaactcggcggtgtacgggcccgagtggcggtccctgcgccggaacatggtgtccgggatgctgagcgcgtcccggctcagggagttcgggcgcgcgaggcggcgcgccatggaccggttcgtggcgcggatgcgcgccgaggccgcggcgtccccggacggcgcgtccgtttgggtgctccggaacgcgcgcttcgcggtgttctgcatcctcctcgacatgaccttggctgctggacctcgacgaggagcacatcgtgcgcatcgacgccgtcatgaagcgcgtgctgctcg

SEQ ID NO: 31327 - DNA, 302 bp, Setaria italica
  Peptide Sequence Number=SeqID_97301
cggcctgcttactgatggtgtggctggcctcagttggggctgaagatgccgagcgacgtggcgaccagtcgcagcaaccgcgcctggatcgagcgtggagcgagggatcgggaaacgcgcggaagcggcagtgccgggagcagctgccgggcgcgctgagggcacgggtatggacatgggcagggtggtagcagggcgagaggttgtagccgcggcggcgagctggggccgagggctcgggaagcgcggggcggcggcggcgagaggggtggtcgggcgagcggacgggaaggaaggggtgg

SEQ ID NO: 31328 - DNA, 261 bp, Setaria italica
  Peptide Sequence Number=SeqID_97302
ccctcctgctagcagctggcgcggccgtcgacggcgctgctgctggcgacaccggcgaccccggggaatcctcagccggaacaccacgcggcccagccttgccctcgccgccggacaccgtcggcgacgacgccgccgccccgtcgctccactcgccgtccatggcgcgacgcgatcgatccggaagaactgaacggagacgagacggcgggcggcgggtcagctagctggagcagttcttgtcctgatccagaatccgat

SEQ ID NO: 31329 - DNA, 307 bp, Setaria italica
  Peptide Sequence Number=SeqID_97303
gaaaaggcctgtaatacgcaactcaagatgttccccccgcgtttactttcatcctgaagccaagttgcattgtttgcatctgattctcccctcagaaattcagagaatcaatgaaagaaagcatctttttaacatcatcataggcaaaaagttcttacatcggcaagcttttgctgaaaagctcctttccatcccagagaaagaagatgttcgtgaaggcatgtgtggtggtgttcacctcctttccagcccttcccggctgccatgctgcaatctgttccccgatacctgcatagtgccctgcccc

SEQ ID NO: 31330 - DNA, 414 bp, Setaria italica
  Peptide Sequence Number=SeqID_97304
cccccctctcccatgagcaacggcaccgcgtcgccggccccggcaacagcgtcgctgttcccctccggccttcgccgtccctagggtttgtgatatccccttcttccccgatgagattactcaccaggaatcaactagatcccaccatatgcatcgagccgttgtgaatgactgaatatggcatatccttcgtttgagtaattttgcgtcctagcttgtgatccatgtgtacttcctacagtgagttactagttcagactacaaagatgtgctgcgtcctgcatttggaattaagattcaaatcacaatgtatttgggacgcataataattttcatatggcatttctacaaacaaagaacaggtatggtgagctgtggaggccgttgcttgttctgtggaacgagaacaattgt

SEQ ID NO: 31331 - DNA, 463 bp, Setaria italica
  Peptide Sequence Number=SeqID_97305
ggctcttgttgggttccatctctagcccccctaaccttgcacagtattaaaaggctctgttttttttcctttttttttcctcgaacacgcaggagaactgcgatcattgtattaatagaagagaaaagagccatagagacccaacacacatacacacacccactgaaaggctctgttgttgtacctgatattttgactgtgtcatggacacaattaagtatgttgcccaggagagtagttaagtgtctgggttgtgtgtagtgacaatgattctacacatgcttctgataccagtgagcatttgacaaggaaacactaacaagtatagatggacaagagtcatcactgacctagagttattgtttacacatccatataaagattatgtggaataacattattggagatggtgttattgttgtaggcgaatggtacataagctactaatgaaaaaaaaagagcc

SEQ ID NO: 31332 - DNA, 286 bp, Setaria italica
  Peptide Sequence Number=SeqID_97306
atatcgcgagaggggaagattttcccttgtgggtttgggcaaagcccatgattcttttgccatgtctatcatggctcggcggtcgccgaaatgtcccgtagggcacacgtgtttacgcagtaaactgtagtgtgctacagtttacatggaactacgaccgaaaaaggagcgatgcccatgtcaaagtttatggtttgtcatatgcaaaaattcaagatgacagatgtgaaaggattacaaatacataatcaacgtgaaaaagaaagtcattcaaatctcgcgatat

SEQ ID NO: 31333 - DNA, 266 bp, Setaria italica
  Peptide Sequence Number=SeqID_97307
aagcaaaacacaaggttcagggctgctagagtcggcagaacaactgcaagaaccacagcgaacactctgtactttctcccccctcctccggccgccgccggcgtccccgcccccagcttcacggccggccccggctccggcgctccagagcccggcgacgccagccgcaccgtcgccggcccgttgaagaagggcgcggtctcgtagcggtaggtgcagttgatctccagcaccctgcctccgatgttgctctggaacacccccag

SEQ ID NO: 31334 - DNA, 370 bp, Setaria italica
  misc_feature (1)..(68): n is a, c, g, or t
  Peptide Sequence Number=SeqID_97308
nnnnnnnnnnnnnnnnnnnnnnnnnnnnnnnnnnnnnnnnnnnnnnnnnnnnnnnnnnnnnnnnnnnnagtctaaaaaaagcagtagtacacattattgaacgtcggcataacacagtatgaatcaacaaagttcaatagttgattctgctagcataatttgacaagtaaaaccctcaaccgcggtttacaacatcaaatttgcgtccaactcgatggaagcttggagttggtggtggtcttcagtcggatcgttccctgtgaatctcatccagaatcaccaccagagcagcgacgaacacgtaatcgacatgcgggaacacggtgacaccgaacgtgtccttcccgagcagcacattcgagacagtgta

SEQ ID NO: 31335 - DNA, 236 bp, Setaria italica
  Peptide Sequence Number=SeqID_97309
cccactctagcttctcagctgtcaacactgcttgtgtattttcagaacactgcaactctacatttttctttataatctcaagaacttcatcattgtgatcagtcaagacaacctttttgcagaaacggctgcacaatatgccagtaataccaattccagatcccaactcgataactgagcattccttcacagtttcagggtgttcagatagatagttgttcatcaggactgcaccg

SEQ ID NO: 31336 - DNA, 258 bp, Setaria italica
  misc_feature (218)..(258): n is a, c, g, or t
  Peptide Sequence Number=SeqID_97310
ttcgcggttcaagcaacggcacgacaacgctctatccagcaaccactgacgagtggggccgtgaaatttcgctgccaatgcccagcgcttataagattcagagtaccagctcgttgagtccatgtattgtttctgtaaaacaaatatcgattcttcactacaatccatgatgtttgtatgtaaacaagtctttatgtgagccatatacttcttctagnnnnnnnnnnnnnnnnnnnnnnnnnnnnnnnnnnnnnnnnn

SEQ ID NO: 31337 - DNA, 194 bp, Setaria italica
  Peptide Sequence Number=SeqID_97311
gcagaggtctctggtccagcgcctcctctagacgaccccctcgttttcatcgatagctgctacttccttctccatcgggtagaatcaattgatcgtcgcggctatcttagctgcagttcggttaatctcttcgtttcgtggatcgttcttgttaccgttgttttgtcaggtgtgagttgttgttggagtcgtct

SEQ ID NO: 31338 - DNA, 392 bp, Setaria italica
  Peptide Sequence Number=SeqID_97312
aatcatttgtttttacccagccaagcaggtatggacagttgggaacaagaacatgtacccatgtgcttaacaaagggaatcaaggtcatccagaaaaaggaaatcaagaagcaaaatgaaacacaaaaatcataaaatttcccacctccgaaaattaataagcagaaaaaaaatctttttcctgacgaggaacaaagcgtatccattatacccggctgctacacatttcctagaacaagctcctttgacaaagaacaggtattgagatccaagcaaaactcaaaagaaaaataattcaacagagatgtgcgaaactcaggtttctggacgggaaccgcaacgtcatcctaggcagcagccttggacctctaccatggactagtggactgagt

SEQ ID NO: 31339 - DNA, 477 bp, Setaria italica
  Peptide Sequence Number=SeqID_97313
ctggacgtcgaccacgatgagttcaggactgcggcaggaagtgctcccaacaaccaccccgcccccaaccctgactactccgactccgaccttgacagctatgaggactcggacgacgaaaacaacagcattagcaacaacgacagggagtgggaggattttgaggatttcaccgagaacctgatgcatcgctgcaacatctctcagttggattccttgaggttgcatgtcaatacgagcagggcacctaactttgcggacaaacaggcagggggatggctccgtcgtgcaatgaagtactgcaacccagatcctccccggcagtgtgagggattgagctccggttcgtggcagctcaaaaggctgtatctctgcaatgtggctctggataatcgttttgccaagcatgtcagttcagtgtgccactctttggaggagctagaactggagattgcacatgtgagattcctgcaatca

SEQ ID NO: 31340 - DNA, 242 bp, Setaria italica
  Peptide Sequence Number=SeqID_97314
ggaaaagtggtagctcgtcggcatcatgagcacgatccatcatgatcggaaggcgagctgcaggccggagaaggaggaggtgaaagaagtccccatccaagaagaaggtggcttattttcttccataccgatggtgcagcaccaaaacttctggctcagtcctaagctcctcgagagcatcgagctcgtgcaggagcagttcgtgccgcgggccgacgacatcatcctcgccaccttcccaa

SEQ ID NO: 31341 - DNA, 252 bp, Setaria italica
  Peptide Sequence Number=SeqID_97315
cggctcagctcccctaagatgcagtgttgctccgatgaagagcaactcagcaacaccaccatcacccgcgccggctttaccctctccaccattgcagccatcatcccctagaaccgtgccgtcagcgcaaaggtggcgtcttacgcagccgaggttgtcggggcctctccggcgcagagcctccttgagctcatccaccgacacgcccttcccctcacccgagcgatggatctccgctgcggcggcggcggg

SEQ ID NO: 31342 - DNA, 317 bp, Setaria italica
  Peptide Sequence Number=SeqID_97316
cttcctcctagctcatgccaagtgctttcactaacgccaacatctgcatctgatgcataagtgcgatgatcttcatgtatcactctgagcgatgacatgttaaaaacaggaagttgaagcttgtatacatcaaacttcttccccatgctctgaacataatggaaaaaatcattgaggaacatgttttgtgtaaccagcgactgatggctacaagcgatgacctccagcaagtgcttaatggctacatcaattatcccaagaactccataccaccttccaacattaaatgtacattgattctattgtattgttaactt

SEQ ID NO: 31343 - DNA, 243 bp, Setaria italica
  Peptide Sequence Number=SeqID_97317
agactcattgcccgttgatcttcctaagcccattgagaatgaaaaacctgtggaagttgtacattccaatgtgaagacattcagtgtacacccactgcccccgacttctgatgtgctcacaaaatcctcaaatggttctgatgattcgaaggaagagaaaacacagtactatccaggcaaggaaatcaagcgcagaaaacgacatagaagaaagcagtatgtggatcaagagccatgcattag

SEQ ID NO: 31344 - DNA, 426 bp, Setaria italica
  Peptide Sequence Number=SeqID_97318
tagggtaagggttagtaaggtaatttaagaaggaattaggataatatatattggatttgggtatgaacaagagtgggtttgtccataccctccccagtggcaggcctaagggcaccttagctttgtggatatatggttagagatctgccatcatgaatttaagaaggcgagttatactagcaaaaacacagcatgcctctcaagagcattgtttgtgcgaaaaatgctttgatgccaacaccccaatctgcacagtaaaggaaaaaatataattgacatgagcattaccagaggatgcaaaggaagacaacaatttaagcaatttccactgccaaacaattgacacgaatcactccagcaaccagtgtcacaaacatgtttaacaacatatgtaccatctgtattatgctaccaaatgcatcattt

SEQ ID NO: 31345 - DNA, 549 bp, Setaria italica
  Peptide Sequence Number=SeqID_97319
gccccatctggagagcacctctagcgaaccatccgacctcgccgcccgtctcctctctctcgcattccccctcggtgccgaaccctccttgccggcaacccgcgtcgcctcgagccctaagctccaagccgaggagccgccgcgaggccgggtctcttgccgcttctcgcgccggcgcgggagattataggaggatggagtcggaggtggtgaggacggagatggtgctggcgccgacgctgtcgttcaagaaggtgcagacggcggacaagtaccccaagggccagtcccgggggcgccagtggaagcacctccgtcacctcctccaggccgcagatgcctcctccatgccccccgaccgccccaactatctgaatattcaatcacccccatccatttacccaccaaagagatactgtgacataacaggttttgaggcaccgtatgtggatcctaggacaaagctgcgctacgctgatccagaggtgttcaagcagatcaggatgcttcccaatgaatacgttcaaaggtatctggccttgagaaatg

SEQ ID NO: 31346 - DNA, 502 bp, Setaria italica
  Peptide Sequence Number=SeqID_97320
tactaaaactttaattaactaattacccttaacttagtcttgtctaatttacttaccccttcctcactttttggccgccaaaccagcaagtgaactgaatttcccattgcaggcaccgtatgtggatcctaggacaaagctgcgctacgctgatccagaggtgttcaagcagatcaggatgcttcccaatgaatacgttcaaaggtatctggccttgagaaatgcagcggtcatactgagatagcaatccctgaacacagataacagtcttgtagccctaaccatgttccaccgctcacttgaatactttgattctgtatggaggctgtttctgaaccctgatccttttaaacggatctttcttcctggctctcgtatatcagggtttgcctatgtgcttagagacattctgtgtgtattttgcatgctgaagtttgcgaactgatgtttaatgtgttcttgtctgctgtaggtgagttcgtttcaatccaaacgtggtatc

SEQ ID NO: 31347 - DNA, 205 bp, Setaria italica
  Peptide Sequence Number=SeqID_97321
taaggttaataaataattacaaacaaagttgctggttaagcatatccatctggggtatatttctgtttaccctgttgccacatgccactttccaaatgtagtctagatgagagtgtagaggctactgcagaggtctctaaaacatttgatgagaaaatgggaagtactgtgatgtaacgcgtatgtcattggtatatgccgggac

SEQ ID NO: 31348 - DNA, 247 bp, Setaria italica
  Peptide Sequence Number=SeqID_97322
ctgaagaattaggagctgaaatggctgttcgttcacttgagcgtctcttgcaatacggcgagcagaatattagacgggcagttcctcttgcccttggtatactctgcatatctaatcccaaggtatgtggatctggtcttatatactaactctctgaaatgtgaaatcctgctcaaatcattaaatgcctgatcagtgaagtggaaaacttggatttcattaaaactgcattaatactttaattccg

SEQ ID NO: 31349 - DNA, 275 bp, Setaria italica
  Peptide Sequence Number=SeqID_97323
ctcctctgcttccattcttctcgcctcaactagtcccgccgcgcctccggagtagtcccgccaaaaaggaaggcaccccccttcccagctccgctccccgattagtcccgccgcgcctccggagttccctcgccgccgccatggctccgtcgccgccgggtaaggggaagggaaagaagaaggatgatatcgacgatctgccagaggaagatttggcgttgaaggagcagctggagctctacgtcctgcgcgcgcaggacgccgatcccggtgtg

SEQ ID NO: 31350 - DNA, 413 bp, Setaria italica
  Peptide Sequence Number=SeqID_97324
gtcatgacggtttaagatgagacgatgactgtatatcagaattcagagtccgggttccttgtatgcagtgtgcaattgcatgatggaggaaaccggtaatttctaaacttcctgtcttcctatctccagtctattcctctcagagtttgagtaggttattcatcaaacttttgcaattttgttgagtaggttataatattcaaacaagttgctggttaagcatatccatctggggtatatttctgtttaccctgttgccacatgccactttccaaatgtagtctagatgtatgtcccttcccttttacaggtcgctttagtgactctcaaagatgtgcttagctaacagaatgctgatacccaattcctatttcaggagagtgtagaggcttactgcagaggtctactaaaac

SEQ ID NO: 31351 - DNA, 437 bp, Setaria italica
  Peptide Sequence Number=SeqID_97325
tgatgtaacgcttatgtcattggcatatgccgggacagggaatgtgcttaaggtatttaatattttccttgaaatgatttctagccacttcaaacttgtaaatgtttccaattctgcttgcaggttcagaaacttcttggcatttgctcacagcatcttgagaaaggcgaaacacaccaagggccagctgtccttggaattgctcttattgctatggctgaagaattaggagctgaaatggctgttcgttcacttgagcatctcttgcaatacggtgagcagaatattagatgggcagttcctcttgcccttggtatactctgcatatctaatcccaaggttaatgtgatggacacattgagcagattgagtcatgacgcagatgctgatgtgtcaatggctgcaatcatctcattgggtttgattggtgctgggac

SEQ ID NO: 31352 - DNA, 210 bp, Setaria italica
  Peptide Sequence Number=SeqID_97326
gccattgccttgggactggtgtttgtcggttcttgcagtggctgagaaaaccaagacctcgagaggtgattgggggtctcagccattgccttgggactggtgtttgtcggttcttgcagtgaagagattgcacagcctatcatatttgccttgatggaacgtagtgaggctgagttgggagagcctattatacggttgcttcccgttgcg

SEQ ID NO: 31353 - DNA, 264 bp, Setaria italica
  Peptide Sequence Number=SeqID_97327
ttaagtcagctacaacttctctgaaaagctacaactctttgatgagaagttgtagctgacttaatcgcatgcttggttgtgtgatgacataccagttggatatgcatgccggggcacgcaggtgttaagtgttgctgtttacttttaccaccagctgtatctatgtaccggaattaccgagggaatgtttagaactgaaactgactcgttgatgcgatggcacatagatacagctggtggtaaacattccctcggtaattccgg

SEQ ID NO: 31354 - DNA, 336 bp, Setaria italica
  Peptide Sequence Number=SeqID_97328
cctggtgtccagaagctcgccctcgagagcatgaggcaggagatccgctccgccacaagctcaatgacttctgttccgaagccgctgaaatttctccgcccacactatggaaccctcaagtcctactttgagaccatgccagaatctgagctgaagaaatacatggcggacattttgtcggtgttagctttgaccatgtcccttgaaggagaaaagggagagcctgaagtatcgattgttgggctctgaaggtgacatcgggtcatggggtcatgaatacgtaaggaatttggccggtgagatcgatacttcaggctctccctttctccttcaagg

SEQ ID NO: 31355 - DNA, 488 bp, Setaria italica
  Peptide Sequence Number=SeqID_97329
tagacaagaaggtactactaaaaacaatttgatgagaaaatagggaagtactgtgatgtaacgcgtatgtcattggtatatgccgggacagggaatgtgcttaaggtttagaaacttcttggcatttgctcacagcatcttgagaaaggcgaaacacaccaagggccagctgtccttggaattgctcttattgctatggctgaagaattaggagctgaaatggctgttcgttcacttgagcatctcttgcaatacggtgagcagaatattagatgggcagttcctcttgcccttggtatactctgcatatctaatcccaaggtatgtggatctggtcttatatactaactctctgaaatgtgaaatcctgctcaaatcattaaatgcctgatcagtgaagtggaaaacttggattttattaaaactgcattaatactttaatccttttggaggtttgtaaattggccaaattgttgttacgttgttgt

SEQ ID NO: 31356 - DNA, 610 bp, Setaria italica
  Peptide Sequence Number=SeqID_97330
gagtctgaagtaccggttattaggctctgaaggtgatatcggatcatggggtcacgagtatgtaagccccatggggccttcagatgatccctttggtgttgctgccatgatgaactttgatggatactcggaggtctgcagcccttcagttgctgatcagatattctcgatgctgaatgacccctcagctgcacaacagatgtttgctatgtggtcatccttgggatcgtctccgtgtacttctgctgtgagagaagacatgccgtttgacacctattctgaacctgtggacatgacagcagcacctgctcaaaggatcaattcggcatcggcgttgggtccaactggagtgaacagagagctaaaagtttcagatgagcttgttccaaataatggttcacagcaagggactaacatcattccgaggtctgtgggcaacgttcttgcagacaagatgctcatggcgctgtctttgttcaggaaatcattgagtgatggtgttctcgcccaagtctggatgcctattgagcacaatggtcgtatcgtgctgagtacatttgagcagccttttctacttgaccaggatctttgcaaggttaacagaagaaag

SEQ ID NO: 31357 - DNA, 3232 bp, Setaria italica
  Peptide Sequence Number=SeqID_97331
actacttgcagaaggggcaaggaagacgggcgccggggacggacgctgcttccatccttctcgcctcaagtagtcccgccgcgcctccggtgtagtcccgccaaaaaggaaggcacctcccttccagctccgctccccaaatagtcccgccgcgcctccggagccaatcccaccttccctcgccgccgccgccatggctccgccggaggcctcgcagccgccgccgccgggtaaggggaaggaaaagaagaaggatgatatcgacgatctgccagaggaagatttggcgttgaaggagcagctggagctctacgtcctgcgcgcgcaggacgccgatcccggtgtgcagaagctcgccctcgagagcatgagacaggaaatccgatctgccacgagctcaatgacttccgttccgaagccgctcaaatttctccgcccgcactatggagccctcaagtcctactttgagaccatgccggagtctgagctgaagaaatacatggcagacattctatcggtgttagctttgacaatgtccgttgagggagaaagggagagtctgaagtaccggttattaggctccgaaggtgatatcggatcatggggtcacgagtatgtaagaaatttggctggcgagattgcacaagagttccataagcgtcaggatgatgacttgcccattgacgccctaatggagcttgtgcagcaaattatttcatttcacatgaagcataatgctgaacctgaagctgtagatcttgtgatggaggttgaagaccttgatttgctagttgagcatgtggacactacaaactacaaaagagcttgcttgtatcttactagttcgtccaaatttcttcctgctccagatgatatgttggcgcttgacatagcatataccatctacatgaagtttggagaccttgcaagtgctttgaaaattgcccttcaacttgaaaaatccatgcagtatgtgaagcaagtctacacatcaactgatgattttctgctcaagaaacaattctcatacatcatagcacgccatggtttggctatggagattgatgatgagatagctgctgatgacaatgataaggaggttttgcaagaaatagttaataatactaagctgagtgagggataccttactcttgctcgcgatattgaggtcatggagcctaaatctcctgaggatatatacaaggtccatttgattgatggccgtggtgccagctccagtcttgattctgcaagacagaatctggctgctacatttgtcaatgcatttgtgaatgctgggtttggccaggacaagttgatgactgctccatctgattcgtccagcagtgggtcttctggaaactggttattcaagaacaaggaacacgggaaagccgagtgcagcggctagtctgggaatgattctcctgtgggatactgattctgggcttgctcagcttgacaagtacttgcatagtaatgacactcatgttgttgctggagctttgctaggtattggaattgtcacgtgtagcgtgaagaatgattgcgatcctgcacttgctattctcatggagtatattggtaaggatgactcaaacatccgtattggggcaatattgggtctaggaattgcatatgctggttcccagaaagaagagcttaaaacgcatctatctgctgtgttgggagacccccaatcacctctcgaggtcttggttttctcagccattgccttgggactggtgtttgtcggttcttgcagtgaagagattgcacagcctatcatatttgccttgatggaacgtagtgaggctgagttgggagagcccattatacggttgcttcccgttgcgcttggcctcctatatcttggaaaacaggagagtgtagaggctactgcagaggtctctaaaacatttgatgagaagatagggaagtactgtgatgtaacgcttatgtcattggcatatgccgggacagggaatgtgcttaaggttcagaaacttcttggcatttgctcacagcatcttgagaaaggcgaaacacaccaagggccagctgtccttggaattgctcttattgctatggctgaagaattaggagctgaaatggctgttcgttcacttgagcgtctcttgcaatacggcgagcagaatattagacgggcagttcctcttgcccttggtatactctgcatatctaatcccaaggttaatgtgatggacacattgagcagattgagtcatgacgcagatgctgatgtgtcaatggctgcaatcatctcattgggtttgattggtgctgggacaaacaatgccagaatagctggcatgcttcgcaacctttcaagttattactacaaagaagctgctcatctgttttgtgtaagaattgctcagggcctcgttcaccttggaaagggcttgttgaccctttctccataccattctgatcggtttcttctttccccgatggcactgggaggacttgtaactgttctgcatgcctgccttgatatgaagtccaccatcctagggaaatatcactacatcctttacattattgtcctggcaatgcagcctcgaatgctgttgactgtggatgaggatctgaagcccctgcctgttccagtccgggttgggcaagctgtcgatgttgttggtcaggcaggaaggcccaaaacaattacgggcttccagacacattccacacctgtcttgcttgcagctggggagcgtgctgaactagctactgaaaaatacattccactgacaccagtactggagggctttgtaattctcaagaaaaacccagaatatcacgaggagtgaaagactatgcctgatcgatatgatgctgatttctggctcgcctgcactgcaacctcataagcctggtggcggtcctatgtggacccctgttatgcccttccaactcttgctcggcacttcctggtggttcatcaaataaagttgtagcttttcacaccagagttgtagccgacataatcgcatgtttgtggttgtgtgatgacataccacttgggtatgcacaccgggacgcgtaggtgttagtgctgctgtctacttttaccgccagcttatttgtatatctatgtaccggaaattaggaattactgagcgcatgtttagaactgactcattaatacggtggtgcacagtggcattttttttagctttttgactcgtgtgatcttttgtttgataag

SEQ ID NO: 31358 - DNA, 3148 bp, Setaria italica
  misc_feature (3092)..(3092): n is a, c, g, or t
  misc_feature (3098)..(3098): n is a, c, g, or t
  Peptide Sequence Number=SeqID_97332
cgcgtctgtttctcgccagaagttccacccgtccgccgccgagccgtcatggcgccggaacagccgaaccccgccgcgccgtccgagcactcgcaacctccgccgccggcggcggttaaagggaaggagaaggcgaagaagaaagaagaggacgatctgtccgaagaagaccaggctcttaaggagcaactggagctgtacgtcctgcgagcgcaggactcagatcctggtgtccagaagctcgccctcgagagcatgaggcaggagatccgctccgccacaagctcaatgacttctgttccgaagccgctgaaatttctccgcccacactatggaaccctcaagtcctactttgagaccatgccagaatctgagctgaagaaatacatggcggacattttgtcggtgttagctttgacaatgtcccttgaaggagaaagggagagcctgaagtatcgattgttgggctctgaaggtgacatcgggtcatggggtcatgaatacgtaaggaatttggccggtgagatcgcacaagagttccaaaagcgtcaggatgatgacttgcccattgatgccctaatggagctcgtgcagcaaattatttcatttcacatgaagcataatgctgaacctgaggctgtggatcttctgatggaggttgaagaccttgatttgctagttgagcatgtggacgctacaaactacaaaagagcttgcttgtaccttactagttcatccaaatatcttcctgctcctgatgatatgttggcacttgacatagcatataccatctacatgaagtttggagaccttgcaagtgctttgagaattgctctgcaacttgacaaacccatgcagtatgtgaagcaagtgtacacatcaactgatgattttctgctcaagaaacagttctcatacatcatagcacgccatggtttggctatggagattgatgatgagatagcttctgatgacaatgacaaggaggttttgcaagaaatagttaataatactaagctgagtgagggataccttactcttgctcgtgatattgaggtcatggagccaaaatctccagaggagtatatacaaggtccatttgattgatggccgtggtgccagctctagtcttgattctgcaagacagaatttggctgcaacattcgtcaatgcatttgtgaacgctgggtttggccaggacaagttgatgaccgctccatctgattcgtccagcagtgggtcttctggaaactggttattcaagaacaaggaacacggaaaagccagcgcagcagctagtctgggaatgattctcctgtgggatactgattctgggcttgctcagcttgacaaatacttgcatagtaatgatactcatgttgttgctggagctttgctaggtattggaattgtcacttgcagcgtgaagaatgattgtgatcctgcgcttgctattctcatggagtatattggcaaggatgactcaaacattcgtattggggcaatattgggtcttggaattgcatatgctggttcccagaaagaagagctcaaaatgcatctttctgctgtgttgggtgactcccaatcacctctggaggtcttggtcttctcagccattgccttgggattggtgtttgttggttcttgcaatgaagagattgcacagtctatcatatttgccttgatggagcgtagtgaggccgagttgtcagagcctattatacggttgcttcccgttgcacttggccttctatatcttggaaaacaggaaagtgtagaggctactgcggaggtctctaaaacatttgatgagaagatagggaagtactgtgatgtaacgctaatgtcactggcatatgccgggacagggaatgtgcttaaggttcagaaacttcttggcatttgctcacagcatcttgagaagggcgaaacacaccaagggccagctgtccttggaattgctcttattgctatggctgaagaattaggagctgaaatggccgtacgttcacttgagcgtcttttgcagtatggcgagcagaatatcagacgtgcagttcctcttgctcttggtatactctgtatatctaatcccaaggtaaatgtgatggacacactgagcagattgagtcatgacgcagatgctgatgtatcaatggctgcaatcatctcattgggtttgattggtgctgggacaaacaatgccagaatagctggcatgcttcgcaacctttcaagttattactacaaagaagctgctcatctgttttgtgtaagaattgctcaggggctcgttcaccttggaaagggcttgttgaccctttctccgtaccattctgatcggtttcttctttccccgatggcactgggaggacttgtaactgttttgcatgcctgccttgatatgaaatccaccatcctagggaaatatcactacatcctttacattattgtcctggcaatgcagcctaggatgcttttgaccgtggatgaggatctgaagcccctgcctgttccagtccgggttgggcaagctgttgatgttgttggtcaggcaggaaggcccaaaacgattacgggcttccagacacattccacacccgtcttgcttgccgcaggggagcgtgctgaactagctactgaaaaatacattccactgacaccagtactggagggctttgtaattctcaagaaaaacccagaatatcacgaggagtgagagacagtacgcctgatagatatgatgctgattccggggctcgcctgcaccgcaacctcataaaccctagtggcagtccttttatggagccttgttatgcccttccatctcttcctcggcacttgccggtggttcatcaaagagttgtagcttttcagagaagttgtagctgacttaatcgcatgcttggttgtgtgatgacataccagttggatatgcatgccggggcacgcaggtgttaagtgttgctgtttacttttaccaccagctgtatctatgtaccggaattaccgagggaatgtttagaactgaaactgactcgttgatgcgatggcacagtagcattttttggctttaaacaaaaaaaaanaaaaanaaaaaaaactaaaaaaagagactagaccaaacggacacaacagggagtag

SEQ ID NO: 31359 - DNA, 975 bp, Setaria italica
  Peptide Sequence Number=SeqID_97333
cgcgccctggcagaacaggcggcgcacatcgaggccgaggcgagggccgtcgccgcggcgcgcgcggaggtcgaccaggtgcacgccgacatccaggtgctcgcgagggcgcgcgccgagctcgtcagccgactccaggtcctacgggaccacctcgcgcgcaagaaggccgaggcgagtaagaccgattccgtccgtgcccagattgaaaccatgcgccgggagatccagaagggcagagctgcggttgatttcgaaaagaaggcacattctgataacctcgaacaaagtaaagcaatggagaaaaatatgatcgctgtggctagtgagattgagaggcttcgaggagagcttttaaatgctgaaaaagggaccacggctgtcaactcagcagcagctgttcctaactctgggtatcctgcagcttatggcaattccgaggcaacatatcccggaatgtacggaaatcctgatccaacatatgctgcacactcttatcccgatgcttatagcactaatcaggctcatatgcacaccgaaggcaattctcattacatgagtcaacctgtttcgtatggacaatatgagagccagcacaccaatgttcaaagatgactgccaactcaagatagcttagacttgcctgccatctcaatgtaaaaggatagttgcagaatcagccaaactaagcatgttagagatattcattacatggaagtgctggaagtcctcgtgttcatgtttttcttttctggtcaatttgttccagaatgtatgagtcggaatttggagcagaaatctttcttgcttctcgatgtactagcctgatgattcatcagttagttctgcagatcggtgttgttattcagggatgctgatgactcacttttggtggtgcagacatctgtatataaaaatggataatgccagcaagttggatcatctttgctacgaaaccgaacaaagagacgaaaa

SEQ ID NO: 31360 - DNA, 245 bp, Setaria italica
  Peptide Sequence Number=SeqID_97334
ccgaaccacccctcgcccccactggcggcggcactggcagcggcaagcgagaaaagctgtgtcgatcgactcacagtgagatagaaatggcagagagcttggatgtagcgcctgatgatgccaatggaagtgctgcagttcagattgaaccttcccatgaagacgtcttgtgccatgaccttgacagtatggcttctttgtatgatgaagtcattgccgggcttaactattcaaagtttatgact

SEQ ID NO: 31361 - DNA, 256 bp, Setaria italica
  misc_feature (242)..(242): n is a, c, g, or t
  Peptide Sequence Number=SeqID_97335
aatacaacaaattttttcctgcaaccattcttccaaggaaggaattggacatgctgacaaggagtcaatgccaaagtgtttaggagcataaccatacagaacctgaaatggggaaaaacccaacgctgaatgccaactagagttgtaccagaactcagcaagataaatccagtcaacccatttagaaggacaagcattcacaaaacaacgcaaagaaggtttccatacattgattaaccctnttggtctgaccatc

SEQ ID NO: 31362 - DNA, 610 bp, Setaria italica
  Peptide Sequence Number=SeqID_97336
ggtggggtggggaacaaattatcatcttgacaaggggtcaaacttaattaccttcgagttacattatcatcttgataagatcacccaagaatgattgaacatacagtcaggaaggctagtatattatttgtataatgataaattcatgaatatggcttggtaagaaaatctaggtccattagaccgagttagagtatgttacatgttggatcatataaattttatatatatgaatgcaaaaagttcgtatatagttaaaataaagatgtctgtccatacctagacgtttctgcagagccatttgagtttgtatggcactgtatttcgtgccctatccactcacgcagtctaatatactttctgcatgtttgacaatattccgttcggtttccacatacatcctgcatctcaaaatgatgtgaactgaacatctaaaatgaaatttcaagattacatggtttcaaaggtacaaattatacctgatgttctttcagatcaactgcaggcagttcgaactcgcaatattcacaggcaaccattctttgtgggcacttttcacttttatgaagatcccaactttcacgttctattgtttctttgcaaagagtgc

SEQ ID NO: 31363 - DNA, 1200 bp, Setaria italica
  misc_feature (1)..(77): n is a, c, g, or t
  Peptide Sequence Number=SeqID_97337
nnnnnnnnnnnnnnnnnnnnnnnnnnnnnnnnnnnnnnnnnnnnnnnnnnnnnnnnnnnnnnnnnnnnnnnnnnnnnaaaaaaaaaatttaactgctgctccgtgttacaagttcagatgtgataacccggattgtacaactcacctcaacttacagacgatcagcaaaagtttgaaaacaaaatataagtttcagaactgagaacagatatatccatggttattctgcttttctgacaaatccattaccctgggactatactctcaaacaaatacgatttatccactgattacaaggggttattatacatcaactgatctcttatggtaaccctgttgaaatacatcaacagatctctccctgtcgaaatacaactcgacaaaggatgcctgtggctactggagctagaaaccctcgtccctttggaacagtatagagccaaccatgactgctattccagttaccgcaattgtgaagaggagccgcttgtgttgtgaaccgtgagcaggacgcgctggccgtactggtggcggaggtcgtacttctctctctggaatcgttctagacgtttctgcagagccatttgagtttgtatggcactgtatttcgtgccctatccactcacgcagtctaatatactttctgcatgtttgacaatattccgttcggtttccacatacatcctgatgttctttcagatcaactgcaggcagttcgaactcgcaatattcacaggcaaccattctttgtgggcacttttcacttttatgaagatcccaactttcacgttctattgtttctttgcaaagagtgcaattcatcggtgcatggttttcatcataatgttcatccataagcttccttggaaccatttctccacagtgctggcacttttggaggttacgggcacagtgtacagaatgcaagtcgatgttggaagatgggatctcgcgctgacagtgcgcgcaggtggagacggcggggacagccgaggcgggatcggagtcggcgccggccgctgccatgtcgcccccttaacctccggctcccgatcggatcggcgacggggggcggtctcctcagccgcggccgagacggcgccgggcagagctggggccgcgggtgacgaggagaggcgcgcggccggaggtcccgagggaaggcggggggagccggggaggagagagaggagacgcggt

SEQ ID NO: 31364 - DNA, 368 bp, Setaria italica
  Peptide Sequence Number=SeqID_97338
cgacgaacaccgggagctcgtggccgtcgtagttgacggcaccgttgagcgggaacaatgcctggacgatgcgtgggacatccgtgtcgggaggtatcacgtcggcgacggcgacgccgtcggcgacggcgtggaggatgtcgacgccctggccgccacagtcaatagcgaacgagcagccaacgacgtctccctggtcgtcgcggtgctgttccgtgacgaagcggccggccacggggtagtacgaggcgagtgcgccggcgagggcggcgggaaggtggtcaacgagctcggtcgtggggagcggtggctgcgcgaagaggaggcccttctggatgtagttcatgaacagaccggggctcccacga

SEQ ID NO: 31365 - DNA, 290 bp, Setaria italica
  Peptide Sequence Number=SeqID_97339
ggtggctgcactgcacttggcctttcgaaggacctggcagagaacaaccctggcgcccgggtccttgtggtatgctccgaggtctgcaccttgtcgctgcgaggcccctcggagtcgcacaccggagaccttgtcgggcaggcgatcttgggtgacgctgcgggtgcggttgtcgttggctcccgccccgccgctgacgagcacgccatgttcgagcttgtgttgacatgccaagagaccgttccgggtacggaggaggcattggtgtccaagctgcgagaggaagggat

SEQ ID NO: 31366 - DNA, 483 bp, Setaria italica
  Peptide Sequence Number=SeqID_97340
agttctattctgctggagcaacttgatgctgctggaattgaattcccagactctataagtcaattgaaagtcaagttccaaatgtttgtgaaactgaagcatggaagagcagggcccattgggctggttctaaagtgcctgaagaagctaaccaatccattaaaaaggctgatgaatacctccagtcttgcagacctgtaaggagaaaacatgggaggttgctggaggaaggtgctagtggctttcttgccggaaaaattcctgttggggatggtgattctattcagtgtcatgagagaagttggagctcattcaatgaacttattaaatctaaggagagtgctgaaaatacttttggtagcagtaactgggcatcagtttatcttgcaagtaccccccaggaagctgcagcattgggtctccagtttcctggagttgacgaggtggaggaaatatctgaagttgacggtgtttttgatgata

SEQ ID NO: 31367 - DNA, 352 bp, Setaria italica
  Peptide Sequence Number=SeqID_97341
ggaggatgtacttgaatgcctcggtctcgcaggggatggcgagcgcgccctcgtgccggaacccgaactcctcctcggccttctccagcaggagccggaacacggggtgcgccaggtaggtcgtcgggatcacgaaccgccgctgctcgggccccacgtacacggggcagtacccgcggggcacgtccggaggcggctccgggctgtggcagctctcgtcgtccgacaggaccgagtccgccgtgtccgcacgccgcagccgccgcagcacgaacggcgggatcgccgacgccaccatctcctcatccacatccggcacctcatcctcccgctgctgcttgttggcccccag

SEQ ID NO: 31368 - DNA, 193 bp, Setaria italica
  Peptide Sequence Number=SeqID_97342
cgccccgacgcgacgagccaaacccgaagcaacgcagccgccacttctctgagccaatcggagaggccgtagccgtccggcggcgtgccctccttccctcctcgcgattcgctgccgcccgtccccggcgagcgcctgctccgaggtcgcgcctatccctagggttcctccccacgccgccgccgccgtcaca

SEQ ID NO: 31369 - DNA, 1943 bp, Setaria italica
  Peptide Sequence Number=SeqID_97343
gggtatcttgctgacaaaaactttcgtcgcctatcatttgatatgatgttagcttgggatgctccttcttcttccagccagcatagtgttaaggttgaggtagacagcacggttagtttagaagcttttacaagaatagcccctgccatcccaaccattgttgatgtagtaacttgttcaaatctctttgatgtactttcatgttcaagcggaggccgtcttccattttctgtatatgataagtacctttcagaactggacagagcggtgaaaaagatgaagacacaatctgagtcatctctcctatcaaacctccggtctcagagaggagaaaggattctggaagttgatggaacattgacaacacaaccagtactcgaacatgtgggtatttcaacgtggccaggaagattgatactcacagatcatgctctttactttgaagctcttcgggttgttacctatgataagcccaaagcttatgaacttgcagaagatgtaaagcaggttgttaaacctgagctgactggtccatggggttcacgtctctttgacaaagccgttatgtacaaatcaacaaccttaacagaaccggtgatcatagaatttccagagttggctggccattcccgccgtgattattggctggccattatatcagaagttctttatgcccataggtttgttaggaagtttgacataagtggagttgacaaagaggaaacaattctgaaggcagtacttggtattctacggttacaagccattgaacagttaggcttcccagtgccgaatcgatatgaatctcttttgatgttcaatctatgtgacaaagttcctggaggtgatttaatacttgaaacactagccagtgttatatcatcaagaacttcagatcgaactaaccaacctggcacgagtagaggaatgcatgccgtcttgtcaaacttgggcgtggtatcaccagttaataatggtgagagaatttttgttggtgagatggttgttggggaaattagttccttgcagaaggctgttattgactcaatgaacaactataagaaggttgaactggcccaagctagtgttgatggagtcaaagttgatgggcttgatacaaacttagcagtaatgaaggaattgctatccccagtaagtgagctttggaggattttgctactgctcacatcatgggatgagcctctgaaatccatggtgttttgccttctattctcttacattatcatcaggggatgggtagtctatttcatggtcatggtgctacttttttcagcagcatttatgtttctcacaagattaactaatcaaggaaagccaatgactgaggtcaaggtggtatctccacctccaatgaacacaatggagcagctcctagctgttcaaaatgctatctctaaaatcgaggagctcgtccaggatgcaaatattgttcttctgaagataagagctttattattggcttttccatcccaggcgacggacagggctattcttgcattggtactgatggccttgagccttgccatcgtgcccacaagagtgcttatgctgctgatgtttctggaggtatgcacgaacaactcaccaccacgaagagcaagcacagagcgatggaccagaaggttgagagagtggtggttcagcatacctgcagctccagtagtggtagagaaggagacagaagacaagaaaacaagatgatatccgtgtatatatatccaatgtaatcttgtctctcccggttggctgatgcattgagtgatgtaccagccaacgccaactctgtacaaaaaccactatattcacagcaaggacagttttaaaggaggattacctccactcataccagctgcctctaatgctctattggaatatgttggactacaactgcggcaaattacctttaccagctgcctctaatg

SEQ ID NO: 31370 - DNA, 509 bp, Setaria italica
  Peptide Sequence Number=SeqID_97344
gcaggaacaatcgaagcaagaagctgaataggagaggctgttggtagggagaagacagaagagaagcgaggtcgtctttcttgtgagctgtgcttgcgattctgtcgaggtggctccacacacccatcgagcgtctcctcgcgcctccccacgcccgctgatggtctcctcgagccgccgctggggagtgccagctcttcctcgagttcgcgccgagcggctcggcgagggggcggcgggcgcctgggcgagcgcgccgtccgagcgtcatggcgcccgaggtggcgcggggggaggaggcagggcccagccgccgacgtctaggctctcggctgcacggtcatcgagatggccacgggctgcgcgccgtggagcgacgtgggcgacctcctcgcggccgtgcaccggattgggtggccaaggaaataggtggccaaggagatggccggcgaagacaagcgcctgctgcagaggagggagaaggggaggggaggaggtaggaaggggtg

SEQ ID NO: 31371 - DNA, 919 bp, Setaria italica
  Peptide Sequence Number=SeqID_97345
gcgacatccgggcctacgccggggacgtggcgcgcgggctggcgtacctccacgcgcgcgcgctcgtgcacggggacgtcaaggcccggaacgtggtgatcggagccgacggccgcgccaggctcgccgacttcggctgcgccaggcccgtcgagtccgcgcgcccgatcgggggcaccccggcgttcatggcacccgaggtggcccgcggggatgagcagggcccggccgccgacgtctgggcgctcggctgcacggtcgtcgagatggccacggggcgcgcgccgtggagcgacatggacgacctcctcgccgcggtccaccggatcgggtacaccgacgccgtgccggaggtgcccgcgtggctgtcggcggaggccaaggacttcctggccagctgcttcaagaggcgcgccagcgcccggcccacggccgcacaactcctggcgcacccgttcctcgcctccgccgcggccgtccgtgacctgccggcgaagcaggagttcccgtcccccaagagcacgctgcacgacgcgttctgggactcggacaccgaggatgaggcggacgagatgtcgacgggcgccgcagagaggatcggcgcattggcgtgcgccgcgtccgccctgcccgactgggactccgacgaaggctggatcgacctgcaaggcgacgaccgctcggaaactgtcgatgacgcaccaccggcgacggcggaggccagcgccgccgccgaggactacttcgtctgggcggaaccatcagatgcagcagagttcgagcagttcttcgccaccgccgccacagatgtcagcgaccttctccatcttccgcgcatcgcaggagtaactgtttccaccgccgccattagccaggccagttacttgccaatgtatctaggcgtgcatgaaaataaaat

SEQ ID NO: 31372 - DNA, 340 bp, Setaria italica
  Peptide Sequence Number=SeqID_97346
cttctttttctttcatgagactgactatggtcagcagagccgcgggagcacttggagaagccaggtatttttgcagtagcagcagtggcgagcctactcatgcagccgctggcgacctcttggtcgcccctgtcggccggcggcatgggtggcttcgaggaggcccttccacatggccagacagcccgacaaaggactcctcggcttgcatcttcttcttgctcgtcgttgtcatcatcaggagttttaggacaaagacatggccaagctccacatgagactcctctcgtatcttcatccgcgggctcatcgcgggtagcagagccaccggagccgttgg

SEQ ID NO: 31373 - DNA, 408 bp, Setaria italica
  Peptide Sequence Number=SeqID_97347
ctccggaggcggggtgtcggcggttccggtggcgcgggcgccgggttcgtcgtgccggcggtggtgctgaggcaccagaagacgctggacaagaagaagagccagaggctgtacaacaacgtgatcgaggagacggcgagcaagctcgtgaagacgaggaagagcagggtgaaggccctggtgggggcttttgagtctgtcatctccaagattgcaaagtagctaggaagctgggggcatatatctagtaatataaggtgcggagcttgtcgtgcactttttggtggtgtggagtgagtttttgctcctaatggctgatggaaacaatggccttggtaattcaaaggcgttgatgtgtccttgttcggtcactctgggctgaactggggactgtgtgcaagaaaaaaa

SEQ ID NO: 31374 - DNA, 926 bp, Setaria italica
  Peptide Sequence Number=SeqID_97348
aaactgcttggcagggtctggatgtagcctctcatctaatttatttttaaccgtcggagaatgctcaacaattggtgacaagtgtttcaagagaggagaagcttgtcctcgtttcacaggttcttcatagcttaaccttactggttcatgtgtgacaacttcactagaccttgaactggaggaaacatcactatgctttgagtcgtcagatgagcgctccctattgctgggtgaatttagctttacacgactagctctcactggtgaactgctttccctgaacttgctctcctctcttagagttgttagtatcttcttaatgatttttggttgcttatgctcatgtctgggatgctgattattatgtacagatttagatgagtcttgtctctccagttcaggatgagcagtatcgttatggctctgaagatctgtattttcagcaccttcagtatcaatggtgttgttggaacttgaagctggtcctgatgtgtttctttcacttgattgtatactaatactgtccatatcactgccagaaatgctactacactgactcccagacatacttctctgactactccgtgaactggtgacaggtttctctggcgatcgaccgggatgcaatatatcagcaaatggacgatattgatttacataaggttgaaggtatggactttttagaatctcggatgcagtaggccgatgttcaggactcttcctcaacatgcttttgataagtgttttcatagatgaagaatagcaagtaggcaaagggccaatggaggagcgatttatcttacttatcagtccagccatatcaaaagctttgaaagcaggccgatgagcagccatctcatacatgcaacatccaagagaccatatatctgacttgaatccataagggatgtctgcaagcaactccg

SEQ ID NO: 31375 - DNA, 1686 bp, Setaria italica
  Peptide Sequence Number=SeqID_97349
aaccagtaaggttaagctatgaagaacctgtgaaacgaggacaagcttctcctctcttgaaacacttgtcaccaattgttgagcattctccgacggttaaaaataaattagatgagaggctacatccagaccctgccaagcagtttggggaagatgctgatgcaactgctgggaaggctaagaacaaaacaccaccaagttttattagatgcacaagtattcctgctcggaggcaaggggcagcgagtccaagccgtcaacacactggtatcaaacgagctcacaacaaggtcgtggcagagcatgcaaaaagccctagccgacctccccacagtccaaacaatgctttcgtggaacttccagcttttccaatgattcctccaggtcatctggatggtattcagagaaaaccagccagttcacgagcgaaatctgcaccacctagggctgtaacaaccaaggaagaaagcagcgcttgctccagttctacagtaggttatgctgagaacagcaatcagtctgaaccatctgaacctgactcaccaacctacttgcccccatcctgcaaatgttcaatccctgacactactatacaagcgcatggcgtaacaattaaaccaagttcagaggtcaaaacaacaagttttcagaagaaaatgactagtaatggtgatattagtccaatctcatacatgcagccatcttctgatattactgaagaagagtttgtttgcaaggatgacatgccatccagtaaggtgggcctggacagtgacacagttactgtacaaggtgatgaagacaagtttacagtgcaggagctgctttcatcaataccagatgctgctttctttgctccaacaacaagcattgctccagacagaggatcttttcctctccagtcttcagagaaatcaacagcgacccgtttaattcctccagttgaggacgtcatacatgtcataagccatagcagctcccatgtcaatggtgagcaggcagaaaaagaaacggaagcacagagcactgacgttggcaaactccttaacgtggtaagagaagagagagatgtgagaagcatgcagccaagcctgataccttctggacccattgattctgctacacagaagctgagtgtcgtagatgctaataccacgattcacaaaccggctggtacagatgtgttaaaattgcccaccataccggaaggaaattttagtactccagagaccaacaatggttataaggaggaagcagctccagctaaggaaatactagatgttacatccttcaggcagcgagctgaggctctagaagggctcttagagctttctgcggatttactggaaagcagtaggctcgaggagcttgcaattgtcctgaagccatttgggaaggccaaggtgtcccctcgagaaacggctatatggttggctaaaagtttcaaaggcatgatgaatgacgaagcaagccgcagttcaacgtgagtgcacatagccttcgccctttgcttttcttcttctttggttcctttctgtttgtgccctactgccctgaatcttcaatggttttcttgttcataccccgcttcttgacatcgtgtgagtccccacggtttcatttggatagttctccattctttacagaacattttgaaatagcgcagacttgtgaacagaaaataag

SEQ ID NO: 31376 - DNA, 356 bp, Setaria italica
  misc_feature (286)..(286): n is a, c, g, or t
  Peptide Sequence Number=SeqID_97350
actggaaggtgtgacatcctactgccaaagccattggagtccagtttagttcttgatgtgtatcatgtagattgtggggtcaagcatgctgcattggtcacgaaaagtggtgaggtttttacatggggcgaagattctgggggccgtcttggccatggaacacgggaagattctgttcaccctcgtctggtcgagtctttgacagtttcaaacatagattttgttgcctgtggggagtttcatacttgtgctgttacaacaacgggtgagctttatacatgggganatggaactcacaatgttggacttctcggacacggcaatgatgtaggacactggatacctaagaggatttc

SEQ ID NO: 31377 - DNA, 258 bp, Setaria italica
  Peptide Sequence Number=SeqID_97351
ctgctgtcctggcgcgacccgcgcgcgacgggggtggttcgcggtggtgaccctgctggcggcgctggtgctgtacgccgtgccgttcaaggtgctgctgctggggatggggttctactacctccggcaccccaggttccgcggcgacatgccctccgccggcttcaacttcttccgccgcctgccgtcgctctccgaccgggtgctctagagcgcaaattgagttactgatcgctgatcagtcttagttttcttcca

SEQ ID NO: 31378 - DNA, 339 bp, Setaria italica
  Peptide Sequence Number=SeqID_97352
cggctgtgcggacatgctgctcctgctctcctcctcctactcctccttggccgccgctcccagattcaccgcgccgcgccccctgcccgccctccgccgcgatcccggcctgccaagacccctacagcctcgcaggccgtggttcgtggccgcacccttaccgccggtggcgtgcgcgcgcgagaggcaggccggccgctctcctctggtgtgccgcgtggtgttcccggcacccgacgagtagtggctcgctactcccggaggtgcaggtgtaaatgcagtccacaaattcggcatgagccccctttctgagctggtgtggtctccggatgagggttt

SEQ ID NO: 31379 - DNA, 308 bp, Setaria italica
  Peptide Sequence Number=SeqID_97353
gaagaaatgatgatcttctgctatagcaagctgtcgacgcagcagaagggctgcctgcagtacctgactgctttccttcaggaaagcagtatcagcaggacgagcattgtcaggcgatgggtcgctgaaggcctcatcggaagagaacaagggacaactcacgaagaagcaggcgagagctgcttccatgagcttcagcttcgatgctttgttcgtcccaaggccattggtgactccggcaccgtcaagagctgtatcatggataagtccgtccgggagttcatcattaacatctccaagagacgaaa

SEQ ID NO: 31380 - DNA, 259 bp, Setaria italica
  Peptide Sequence Number=SeqID_97354
aaggacaaaacgggagaacgatagagatggcgagattcagagagccagctaacggcagatgccgacgaggaaggcaaggcgaaggcggcgagctaaagcggcggcggtggtgattgctgaaagcagaggaggaccaggaagctggaggcccaggtgtacttgtccgtgagaggcaggcggtgcagcaaaaggccaaagccaaacggtgctaaacttactactcggagacggagacggagacggagacgagaactgcacg

SEQ ID NO: 31381 - DNA, 581 bp, Setaria italica
  misc_feature (1)..(51): n is a, c, g, or t
  Peptide Sequence Number=SeqID_97355
nnnnnnnnnnnnnnnnnnnnnnnnnnnnnnnnnnnnnnnnnnnnnnnnnnnttcgtttagtttttttttttgggtcagcaagttgagacgcctttcatttaacataatatacacgtagcagtcaacttattacatgatattatatatacaaacccgagcaacttcactctttggttgctgcagacacgagttaaggacccacattgcatatctttctcgttaataatatgtacaggcgaaaggcaaaaacacaagagaactcggacaatcatggattaaccacgacaccttgcagtagacaaggatgtccagttgcaatctgctctgcctcaagagagcaggtctctgtcgccacattctcaggtagagcctccttgcaggcgcgacatcgcagccacaggtacgaaaaaccagcaaaagctgccttgctagcaaactgcgcacggtatattaggcttatctcccacaatccactgcccatgttaagtgccaacgcatcggcattatacccttctaggtctgattctgagcagcgcatttgtgatggtctcaagaaatcaagaacctaagaaagggtaata

SEQ ID NO: 31382 - DNA, 1737 bp, Setaria italica
  Peptide Sequence Number=SeqID_97356
gaagttgctcgggtttgtatatataatatcatgtaataagttgactgctacgtgtatattatcgtatatgcaaagcggatcaacttcactctttggttgctgcagacacgagttaaggacccacattgcatatctttctcgttaataatatgtacaggcgaaaggcaaaaacacaagagaactcggacaatcatggattaaccacgacaccttgcagtagacaaggatgtccagttgcaatctgctctgcctcaagagagcaggtctctgtcgccacattctcaggtagagcctccttgcaggcgcgacatcgcagccacaggtacgaaaaaccagcaaaagctgccttgctagcaaactgcgcacggtatattaggcttatctcccacaatccactgcccatgttaagtgccaacgcatcggcattatacccttctaggtctgattctgagaccatcacaaatgcgctgtcatcaaaggcaacaaggttgcgagttgcaaggaacaagggtggcttgatgataggattgtcgaggcaagtagacctcccagttttcttcactctaagttggtagaattcttgcacggcttgccactgtgcagaagctaataacaccctaggccgacgcaagcggacatgttcataagcttcagcaggagtcatatttttatattgcaccaagtagcaaataacaaccgtagtgctacgtccacgaccagctttgcagtggacgtaagtcaatttcccagataaagcatttctgtggatgaaatcagtggcttcacaaaggttaacaaaagaaggtgcataaagataatcccgcgttggtagcaccaggttttcgattccatgagcctcgtacagtgatctaggaacaagcctctcgtatgattcattcaatgttaccacaccagaaactccaagctcctttagccggagaacatcgctagggaatggaacagcgcctagcagaacatgctcgtcgacctgatcccaccagtggaagtgcgactcgagccgattcctcacgacgttgtagcaaagcgtcgggtagaacagcatccgcgcgccgacgcccactgccgcgcgcttcgcgtcgacggccacccgcatcaccaccccaccctcccccgccgccgcgccgcaatccccgcgacgcagctgcggaagctcctccccaccctctcccccacctcctccaccggaatcacccggaagctcctcgattcgcatcgctccccgatcaactcaactcagcccgatccgatcggtggcccaaaaaaaacacaaaatccccaaagacgatcgatttgggggaaagcgagtggaccgaattggggggttggaatccgatctgaggcgttgggtgtaaccgaattagattctcgactcggcaaccggggtaatctagatcggaagcctcgccatctccactttcctcgcgctcacgcctcctcccctcccgacccctccacctcgcctctccgaactcggaagaagccaaaaagattgaaggcggttagagcagaacctgcagaaatcctgagctaattgaagcatgaaaaggcagcagagttttttttcataaccatgtgttttcagaacttatcagcaaacacaaaatgaaatcctgagtcagaagaagatccccgagccatgaagcagaaaacaaaaccatgactgcaaactgccatgccttaccatcaggagaagcaaaaccacattccagaaacaaa

SEQ ID NO: 31383 - DNA, 668 bp, Setaria italica
  misc_feature (10)..(10): n is a, c, g, or t
  Peptide Sequence Number=SeqID_97357
cgttatcacncttttgcagcatcttcacatcctccccgagagctacctttcgagccttgagcttgttaacggtaggtaagctccatgcgaagatactcgatccacatatcctctgagtctggacaggacctgaggccactctgcatcagtgcacgtgctgcagcaacattcaggttctgatcaaattcccatgctgccgcatagatccaaagcccaggaaccttgggatggaagcgaatggcttgtgccagaacctgcttcatccttccgtgtcgcttgtcgcggcagaactcgaggtatcggaaccagaggtcgaggtctcccttgaacctgacggttgccatcctgtagatgtcgaggacgcggaggacccccgcgacgtcggagatggacttcttccacttcttgccccttttccttttcctcttcttgctgcctccctcgtcgtcactgccacggtcgtcgtcatcggattcggagtcggcggcgcgtatgattgcgcgcttgcggaggttgcggagggagtcgaggcggagctcgtaggcgatgtagtcgaggaagtcctgacggagcggggagtggcgtcggatgcggaactcgaagtcgcggcggcggcggcgtcgatggctgcgatttcggacgccaaaaccctagccccttctcctttc

SEQ ID NO: 31384 - DNA, 602 bp, Setaria italica
  Peptide Sequence Number=SeqID_97358
cacgcgaagcaaaaaaaggacacactaaaccagcgggcgcctcgatcttgtcaccggggggaactcgccgccggccggcttcactcacttcttgcagaccaggccggcgccgcccttgccgctaccgcagagcgcgtcggtgggctcctcgatgatgtccatgggcccggcgagccctgcgtcgtcgccggcgaaccgcgccacctcgcaatccgtggccaagatgtccgacacctggtacctggcggcgccgcccatgacgggcaccctggcgccggcgtccaccccggcactcacgtagtccggcctgtaggtctggcccagcacgccgtgcacgtcggcgctgatggcgtagaacttgaacgccacgttgaggtgcgcgaggctgccgtcctcggggcgaatgccgtagccgtggaccctcgagtcctcctcggtgacgggcaccgcgtcggcgacgatccggaaccggccgtcgaggcgcaccaccacgccgttggcggcgcccgtgcggaagatggagagcgcgggcgccgcggtggggctccagctggcgccggcggcggcgtcgagcgggacgggcgcgccgtcgaaggtgatgg

SEQ ID NO: 31385 - DNA, 416 bp, Setaria italica
  Peptide Sequence Number=SeqID_97359
tctattattgtctaactttattttctaagtttacttttattttaaaagtctaattatttattggtcccctttaggtctatttattcttgtttggtaagttttttacttaagtttgtttcttgttaaacaatgaaaagacatcacccagacctgcaattgttgttgcatttttcacacagttttttacagaacatggagcatttagatgaagaaaaggatttatttgtttgttgtttcacgcaattcttggatacaagtcctaaggccaatatgtaataagatgagacttaactttaagaaacacaattccaatgttaggtcgatttgttctgatatccaagttcaagcaagcaaaccacttatatgcattatttttcgttgttgcagactattgcttattattggcgcaacttgca

SEQ ID NO: 31386 - DNA, 1176 bp, Setaria italica
  Peptide Sequence Number=SeqID_97360
gtctgcatgtaaacgatggtgtaagtttgtacatataacatcttgtacataccctgttcattgttgctgctactatgacagatgaatatgctgactttttgcatggttcgctcttcttactatccctagtttcggacctccagattctaaattttaaaagggttaactttttcttagtcaaatgtagcatacccaatcaaagaggggtgatttttataatcatcctagcagtggaaataattacaaaataaattcattgacactgttctgctggtcacaatttcatgagaaagagaatgttgcagttctcactaaaaagaaacaacgtttcaaggtgtatggtcagtagcaacagatattggtaaaaggaaaactaagctctgcccttgattctcattctcatcctagtcctgggcgcacaagccacccccatcgctgcatcccgggttccgagagagaaaccacagccccagggaagaaactcggcgtccttgacatccatgcctggggcatccggctgcacatttgatccgaataatccgttgtgaaatctggaggccatagttgcagctcaggcattaccatactttgtgtagtctctctcaccaagtacggaactgagaggttaagaagattttctatgcttcttctgtgcaacattccttgaccttggtgaagaaaacacgcccacaatataagttcccgtgggagaacactttcacatcaataacttccttcaaccccttgaattcacaatatctgtggaggcaagaattcaaaagacactggcaatttgcaaggtacaatgccattaccagcatttctcagaatttgtcatcaggagcaaatcctctatgaatcatttcatcatgaagctgaaatgcctccttcgagttgccagctgcaacatgaccattaatcatagacatgtatgtatatctatccggttcaattcctctctcacccattttcttgaaaatccaaccagcttcttgcacattgccatgttcagaaaacccatttatgagcatattatatgtgacaacgtctggctgtaccatttccttctccattatgttaaacacattgaaagcttcgtccattttttcttctttaacataaccatagatcagggtgttgaaagtaattaaatctggtaatatgttgtcttgcctc

SEQ ID NO: 31387 - DNA, 862 bp, Setaria italica
  Peptide Sequence Number=SeqID_97361
gacggggcggttgcagggaggtgtttgtgttggtgtagtcatgacgggtggggaagtttgtggcagctgctcgggggaggtgtcggacgaaagtcatgctcagtgtgccgggttgacaacggcgacgctttgggcaccgcaatttcctgttagcgacgttgtcatgtcactctcctcgcgtcgttctcggaaactccaggtgaaaaccttgcttaagttttttgggcgggcggcgacagcgcagctagcatcgtgtccttcttgaaggtgtcgtcttcggagttctgatggtggtgggcagcgccccgatagcttccctgtttgtttggcggcgagcgatcacgcaaggcggcggctgtgtcgatgcgaagctccgaccatggtggatttgggcctcgtggtggaatgggtggaggcctagtcaatgacttaaggtgcggatgcccgcggtggcggaaggcgactggaagtagatgtttgaaacggtgtctagagggcaagacttctgcttggcatgagggcgacggtagggaggagccgtgcgccagttgtgaccacgaatttggcatgtggctggcgtggtacgaggtggctgatagatctgcttcactaaagagacctgcgtggaggtgatcctctgatggctgccagatgccctgccagcaccctgctttcctcgatgaggcgaggttgcttggtgccacagtgtacaaccagatctcgggggacgtggttggcagttgatgtccggagacagctactcctgtattggttcgacggcttgcagcattctacagcggctagccttgcttggtgagtttagtccgatgtaggacaacttcgtttggaagcacaagcggat

SEQ ID NO: 31388 - DNA, 267 bp, Setaria italica
  Peptide Sequence Number=SeqID_97362
ccctgttccaacctcctggtcccttcctcttgtgaaatggatcaccttatcatcacccacatatattccatctattccactcgactcttagggccgtgatgcgcgtagacccaggcggccctccacgagtagatgtgatcccccgccttgaggctctccttcccaatcctgttggagaggagacccatggagacggggagcctggcgcggccggtgggccgatttgggacggcgagcggaggcggcgtagagggagagagaacaagg

SEQ ID NO: 31389 - DNA, 297 bp, Setaria italica
  Peptide Sequence Number=SeqID_97363
tagaggtggacttttgttgttttttctttctgaatcaaccagtggtactgtgagaaatgaagcatcagtaggtgccccctctccaagaaggtgtaaatgctcaaaccgcgaaaggcatgttaatatatgctcccatgcttcctgcaaataatcaccatcttcgattgcaatggatattatagccttcacagcatccacattcttttgtttcatgtcagcagcacaatggagatatgtgaatttggctacagatgtcacaaaggcatctctctgtgtctgcatgcacataacagaggt

SEQ ID NO: 31390 - DNA, 349 bp, Setaria italica
  Peptide Sequence Number=SeqID_97364
gccccacgttggttggaaccatgagaggctgaaccttttgggtttgttagactgtgagccacatgatgcaaggaaggaaataagttgtcggtgcaaaggcgaatccaccgaagaaactgagcaattcattgaagaaggggaaggtgatggctacgaacatcgtgaacgcaacataggcagtccgggcaatcagacgcaacattaggcctgggggaaaccaaaacttcctcaccagcaccgtttctagcatgtcgaacaccggcattgcgtaaatctggtaaccgccaaggagatggacaacgaccatcatgtttgcgagggcaatgagccactttggtttgttgtaggg

SEQ ID NO: 31391 - DNA, 501 bp, Setaria italica
  Peptide Sequence Number=SeqID_97365
ggtttacattgacatttgatagatggactcaaccaagaagacctaccgctgggtttgaaactgaggcccatgaagatgaaggtgatgagagcaagttacctttgcagctggcaattgtggggcgtcctaatgttggtaaatctacccttttgaataccttgctgcaagaacaagagttttggttggtccagaggctggcttaacaagggactcgattcgggctcagtttcagttcgataaccgaactgtgtatttagtggacactgcaggttggatggaaagatcagggaaggagaaagggccagcgtctttgagtgttgtgcagtcgagaaagaaccttatgagagctcacattgttgctcttgtgctggatgctgaaaagattgcgaagtccaaaagtagtatgaatcatccagaagttgtgatagcacgacaagcaatagaagagggccgtggacttgttgtgattgtcaacaaaatggatctccttagagataacca

SEQ ID NO: 31392 - DNA, 257 bp, Setaria italica
  Peptide Sequence Number=SeqID_97366
ctgaagtagaggaagaggagggggggggggaccgcggacctggatggaagcgggcggaggccgaggcgcccacggccacgaccgggaagccgctgaggggaggacccgccggcgatctgccgcgaggtgcgcgttctctgagatcgagctggggatgggagcggaggacatggagagggagatgatagctgaagtggaggaagaggaggaggtggcgtgcgagtgctgcggcttcacggaggagtgcacggcgccgt

SEQ ID NO: 31393 - DNA, 302 bp, Setaria italica
  Peptide Sequence Number=SeqID_97367
tggtcggctcggtcatcagcttcttgcgccgccgcgttccggcctcgatgtccaggggggtgtcgtcgtcgctgaaggtcgccgggtcggcggagtgcatgtactgcggcggcggggtgaagccggtgaaggtgaaggagaagccgaggctggcgctggaggcgcggctgagcgcggcgctgttgctgacgaggtcctccacgtccagcttcagctgcgcgctcctcgacttgcggatgtggctgttgccaccgccgcccgacgccgcgcgctgcttccgcccgaagctggacttgcgcgac

SEQ ID NO: 31394 - DNA, 175 bp, Setaria italica
  Peptide Sequence Number=SeqID_97368
tgatcaaaatacataacggaaaaggactgtgatacacatccttgcttgaaaagttaaaacaccagcggacatctccttctaaggccatgtaagcatgcaagcacaccgtatagagtcagtctgcgactgcgactaatctctataggtcccttgatcatgtcagttaacctgaggc

SEQ ID NO: 31395 - DNA, 284 bp, Setaria italica
  Peptide Sequence Number=SeqID_97369
gtgtcttgcattgcatgattgggagcttgaaatgttttggtatcaatggattttctcatgttacattgttgcaaagtggatgctaatgttctcatacttcttatcttatctaggtccctatccaattttatttgttcaagagtgaaggctcaacagacaagcgacaactataatatatggtaatatagtgattctgactataatggaagacaactatccacttaaaggtccgtggaagtggaatgaaaattgaagagataaaccatatcttatttcttggtcta

SEQ ID NO: 31396 - DNA, 704 bp, Setaria italica
  Peptide Sequence Number=SeqID_97370
ccatttttttccttaatccgctcccctcccctccatcgacggcgacgcctagggttcaagcggacccgcctcatcgtccctcccccgccccctcaagccgccgccaccgccggagccgcaccaatctagagcgccaaccatggcattcggagctctcgtcgcgtcaaggatggccaggtccagctgcaccctcgcctctaccggtacccaggtccctatccaattttatttgttcaagagtgaaggctcaacagcaagcgacaactataatataagtggctggaacggcggcaacggaagcaatggactggatcccgacagtccgcgacgcggtggcaagtgctgaggcagacgaagaacctgcctaggatcttttggagaaaagcttgtagagccgttgaaacttggtcgccgtggttgatgtggggcgcttcggctggagtgaatgcgccgtactcctatgtatagccagttggtggcgctttgagcggtggtgtcgctgcacacagctccagctcctcagcggcgcgtggatgtggccttggaggtgaccggtcttgctcagggaactcctagccgggatagtaatggcggagcgaagtcaaggacacggtggttggcggaggagttcatggcgcgctcgaaccacatcagcataagtgcgctgcacctcctcgggcatgtcgggcactagtgactcagag

SEQ ID NO: 31397 - DNA, 431 bp, Setaria italica
  Peptide Sequence Number=SeqID_97371
taggttattgactgcattacaggaacacaaattcaaaatttgaagaaagatacatgtcgaagttactatgtgtgcatttcctaaactcatttcacgcattcaagtagcaatgtagcatcatcagtgacttttcactgggcaaatatccccaacaaaactattaaaagggccttctgggatggagattcgtcagcacagcttatcattagaattcacaaaccatgcattcatatctatgcacctgcatgacacttgaaaaacaagtaaatgcaaatataaaatataatataaacatctttcaaatccaaacctgatgtatcctccctctgggtacatatatatgcccatgacttttatccctctataaataaatggctgagttctcccatcatcaaatcctcaaccgctctcttgcaacaccaagaaatgac

SEQ ID NO: 31398 - DNA, 246 bp, Setaria italica
  Peptide Sequence Number=SeqID_97372
ccttctgggatggagattcgtcagcacagcttatcattagaattcacaaaccatgcattcatatctatgcacctgcatgacacttgaaaaacaagtaaatgcaaatataaaatataatataaacatctttcaaatccaaacctgatgtatcctccctctgggtacatatatatgcccatgacttttatccctctgtaaatattctattgatttctttcctgtctgtgcattatttagccatttatt

SEQ ID NO: 31399 - DNA, 181 bp, Setaria italica
  misc_feature (1)..(25): n is a, c, g, or t
  Peptide Sequence Number=SeqID_97373
nnnnnnnnnnnnnnnnnnnnnnnnngtccaaaaaaccatcaagtaaaaattattggttatacacacgtctatatgtaaggagataaacttggagaaatctcgtacatttcactattcgagctattccatcatagccaggagctgaattaattgtaaattcttcgttactattttcttattt

SEQ ID NO: 31400 - DNA, 597 bp, Setaria italica
  Peptide Sequence Number=SeqID_97374
agctgcagcacgcagctcagctttaaacgacaggcagaccgagagaccagatcgatggcgggctacagggcgctcggcgtcctcctggccgcggccgcgctcctggccgcggcagcgagggcggcggacgacgaccacatgcaccagtggaggtgcttcaagtcgtgcgcgagggactgccaggaggaggacgccgccgaggacggcgcccccggcgacggcggaggcgtctcccggcggtgcaagaccgggtgcctgcacgagtgcttcgaggacctgccggccctctgctacgagcagtgcgtcgtcagcacctgcctctgcctcccaccctatagcaaggagaaagtgacgtgcatgaagaactgctgcgacaagtgcttccaccacggcccgcctgcgcccggtcccggcccgaagccgccgaagctgcctctgccgccgcctctcaccaagatagccgctgccttctcaacaaacttgtctttgtaatcagaacgcagcttcatcatgttagtcatgtccacttcgttgaatgtagtcaacattgcaaaagtgttttgcgaatccttcaaacggtttgcaatacgcttcctg

SEQ ID NO: 31401 - DNA, 742 bp, Setaria italica
  misc_feature (738)..(738): n is a, c, g, or t
  Peptide Sequence Number=SeqID_97375
gcagctaagctcatctcacccttcggacgacgaccaaccaagagaccagagcgagccagcgatcgatggcggggtacagggcggtcggcatcctcctggccgcggccgcgctcctcgccgcggcggcgtcgggggcggcggacgacgagcacatgtaccacttgaagtgcttcaagtcgtgcacgaacaactgccacggcgaggaggacgccctcgacgccggcgtctccgccggcaggtgcaagaccgggtgcctgcacgagtgcttcgaggagctgccggccctctgctaccagcagtgcgtcgtcaagacctgcctctgcctcccaccctacagcaaggagaaagtgacgtgcatgaagaagtgctgcgggaagtgcttccaccacggtcccaagcctggacctagcccgaagccgcctggttctaagtccaagccgtgcccgtgccccccgccgggctcgaaaccgtgaacgccaacaactgatacgatggatgcgccagccagaataataaaaaaaagctcatggaacctgacgtcgaacgtacgcacgtgctatctataagtagaggtcccatggtatatgtggtatgactgtacgaatacgaatcaattgctgccgctagtaaaggataagaaatactgttacgtatctccgatccgttgctgtgaactgggctcaatatgtttcaaaaactagggctcaaatgcttaatagtatggttctaataaaaaanaaaa

SEQ ID NO: 31402 - DNA, 619 bp, Setaria italica
  Peptide Sequence Number=SeqID_97376
ggtggttctacttttggcgctttctcctctactttggtttctcttcaactttggtggagaggattcttttggagttgcttcctcagatggagcaacatgtgtttcagcagattgagcagactttgatatgattgcaattttggtgcctggagtaactgtatcaccttcactagcaatgaacttttcaataacaccagcttcaggacttgcaacatctatagtaaccttatcagtttcaatctgtgctatgggctcatcggcctcgactctgtcaccaggtttcttcaagaagttagcaagagttccatcagttacagattcacccatgaagggcacaacagcctcaaccttgtcttcattatctgaagcaaatgacctactccaaacttggtatggagaggcattcggcatgtaataacgtctcgttagcttcgagcactgggacgtagctggaatcaaagctgaaagttgactgctgtagtttctgacatgtgtataactccttaggaggcctaggttggcgccggcgcggcggcggaggaggcccgaggcgatgcgggacgccattcgccggagtcctcacggcggcggcggcgacggcggcgtgtgggggaagaat

SEQ ID NO: 31403 - DNA, 1069 bp, Setaria italica
  Peptide Sequence Number=SeqID_97377
atcaatgacagcattaacaactggctggttttggagggcagaaacagaagcctgcaaaagcgactgggataagcactgcaaaatccagtaacgtatagtttaaacagcccatcaaattgtcatcaccttgacaaagcaggacatcagacccaacttgacaccgtgcttctcaacaaacttgtctttgtaatcagaacgcagcttcatcatgttagtcatgtccacttcgttgaatgtagtcaacattgcaaaagtgttttgcgaatccttcaaacggtttgcaatacgcttcctgagtcttggcatgggtacccgtctctctctttcctttggagggagcaggggttctgaaggggaggattttagtggtggcatggttaattttggctcctgctttttgacgggttctacttttggtgatttctcctcaaccttgtttttctctgcaggaggtggtggaggggtctccttctgggaggcctcttcaggtggtgaaacatgggcctcatttggaatagcagacttagatatgacagcaacctttgtaccaggagtaacagtgtcgccttcactagcaatgaacttttcaataacgccggcttctggactggaaacatctattgtaaccttatcagtttcaatctgtgctataggctcatcagcttcaactctgtctccaggttctgaaggggacaacatgtcattaacaaggaaaggaagagagggagcgaggttggaagcgcatactctttaggaagttggcaagggttccatcagttactgattcacccataaaaggcacaacagcttcaaccaaatcaccattctctgatgcaaatgatctactccaaagttgataatttggaaggaaattgcgtccacgtgttggctttgaatatttatgaacaccttcgaggagctgagtgctgaaatgtctgacatggctgcaacttcgtaaaatgcacattgtagcggtggggcggcgaaggaggaggcgggaggcgaggcgtgacgccatctgattcgccggagatggacgagggccgatgtctcagcgatctgtctttct

SEQ ID NO: 31404 - DNA, 674 bp, Setaria italica
  Peptide Sequence Number=SeqID_97378
aaggaattttaagtggtggcatggttaaattttggctcctgctttttgacgggttctacttttggtgatttctcctcaaccttgtttttctctgcaggaggtggtggaggggtctccttctgggaggcctcttcaggtggtgaaacatgggcctcatttggaatagcagacttagatatgacagcaacctttgtaccaggagtaacagtgtcgccttcactagcaatgaacttttcaataacgccggcttctggactggaaacatctattgtaaccttatcagtttcaatctgtgctataggctcatcagcttcaactctgtctccaggtttctttaggaagttggcaagggttccatcagttactgattcacccataaaaggcacaacagcttcaaccaaatcaccattctctgatgcaaatgatctactccaaagttgataatttggaaggaaattgcgtccacgtgttggctttgaatatttatgaacaccttcgaggagctgagtgctgaaatgtctgacatggctgcaacttcgtaaaatgcacattgtagcggtggggcggcgaaggaggaggcgggaggcgaggcgtgacgccaatactagaattacgaccggaagaataggaacgaagggaccgaatagtactacaagacgaatactagactttaa

SEQ ID NO: 31405 - DNA, 858 bp, Setaria italica
  Peptide Sequence Number=SeqID_97379
gaaaatgaacaaagtttctgcttgtcgctctcttttaacaattctgaggccggctagcaatgataggagtcaaaatttttgcatccaattatttggaaaaccaggacaacaattgcagcccagcaatgatgcaagaaactatatgtcgaggagcaacctccgcggatcttcaaccacatccttgatgcggcgcaggaagagaacagcttctctgccatcgaccaacctatggtcgtatgtcaatgcaaggtacatcattggtcttgcagtaatcttgccatccacgaccatggggcgctgaacaatggaatgcatcccgaggattgctgactgtgggggttgatgatcggcgtgcttataaggcttccatagacaccaccatttgagatggtgaaggtcccccctgccatctcatcaattgaaagtgctcccgcatttgctttcttagcaaggttgtttatccccttctcaatatccgcgaagttcatcctgtcagtatcgcgaatgacaggcacaacaagacccttggaagtgccaacggcaacactaatgtcaatgtagtctctgtatatgatgtcatcaccatcaatgacagcattaacaactggctggttttggagggcagaaacagaagccttgacaaagcaggacatcagacccaacttgacaccgtgcttctcaacaaacttgtctttgtaatcagaacgcagcttcatcatgttagtcatgtccacttcgttgaatgtagtcaacattgcaaaagtgttttgcgaatccttcaaacggtttgcaatacgcttcctgagtcttggcatgggtacccgtctctctctttcctttggagggagcaggggtttc

SEQ ID NO: 31406 - DNA, 1623 bp, Setaria italica
  Peptide Sequence Number=SeqID_97380
aaaacagcatatatatatccactgtttgtccgtccgtccaatttttacaccgatttcactcaaaattgaaaaaacaatcctaggttattgactgcatttacaggaacacaaattcaaaatttgaagaaagatacatgtcgaagttactatgtgtgcatttcctaaactcatttcacgcattcaagtagcaatgtagcatcatcagtgacttttcactgggcaaatatcccccaacaaaactattaaaagggccttctgggatggagattcgtcagcacagcttatcattagaattcacaaaccatgcattcatatctatgcacctgcatgacacttgaaaaacaagtaaatgcaaatataaaatataatataaacatctttcaaatccaaacctgatgtatcctccctctgggtacatatatatgcccatgacttttatccctctataaataaatggctaaataatgcacagacaggaaagaaatcaatagaatatttacagtaataaaaacaaaattatagcactacattacggtataattctagtataagtaagttgtgattttatagttaaacacaaattacaaacttcattctgcatcatgttatttttaggactggtgggcgacacattaccaatctactgactagaagtgataatttatcaatctagaattcaggtaaatatctagcatgaatagagaaagaaattatagatcatacaaatgcatgggtaaaaagaaagtaaacaaacagatttggatatctttacctgagttctcccatcatcaaatcctcaaccgctctcttgcaacaccaagaaatgacacgtacataggcagaaagaaaacagtgagatctagaatagaacacgaggaaatgaaacaagcacacagacaaggtagaaaaagaagggagaacttaacaaagcagacacacaatgaacaaaactgtttacactggttgtcgctatcttaacaaagcaggacatcagacccaacttgacaccgtgcctctcaacaaaattatctttgtaattagaacacagcttcatcatgttagtccacttgtctttgtaatcagaacacgacttcttcatgttaatcctatatatagaataacacacacaataaacgaacatgcacaatattgagaaatactgatgaggggtcatgtagcaaccttgttaagggaacagtgttcagcaaaaaggagagagagatcaattgaacattcaagaaaaggtaggtcaattaaacagcataaatcaccaagtgtgtccagcaatcatagaagaagtaaaagagtcctgcacagagaaaggtactaagaagtgctaacaaggtcttgatatttcaaatctgggataacatggaaaggaagggctccgatgtataggtcgttcttcaaaatcctgaatcaagaaagaagagaaacctgtaaactggccgcgaataaaggaatcagtttcctttaagctattttttttgtataagtatgtaggcaaggacaacatatgctcacttttagccctagacaagctttgccctacagaacacatcactaaaatcctatggcttgaaacatagaaatatgtttgaatcatgtgtgattacaaaattt

SEQ ID NO: 31407 - DNA, 1676 bp, Setaria italica
  Peptide Sequence Number=SeqID_97381
ttttttaggaagaaaataacaatggagtacttgccaaaaaaccatcaagtaaaaattattggttatacacacgtctatatgtaaggagataaacttggagaaatctcgtacatttcattattcagctcctggctatgatggaatagctcgaatagtgtacagttcaaactaaaagggggaccagaaatagaaaaatttcatcataaccccaacactgaaagcacaaacaaccagttcttcagaacaaacaagtcatcaatactcaggtgtgcataatagattgctgtcctctcagttccgatcaaacgattgaatatgctcaatgacttgctcgatggtctcgaattggcgtcttcccttcaggatcgtcttcgcacaattgagggcagcacgctcacactctgctctcttgctggcatccttaattgactcaagatcctcaacatgagcgataccgactattctcctgatcattttggctgaaccaaacccaaggctatcatgaaataagtttgtcatgtacttcttctgagcaaggctcagcaggtttgagttgttgtatatgtcgggcaggtaagcctccccatttccttctttgtgttcattccatagtccaacaaacttattctggaacaaattccatgactcttcaattgtcttcaagatccatttcttgtaagctttacgatcatttgcttgatcagcatgtccgttctgtgcatagtatgccaaaatcaggtttcctaggaaggctccaatgtcgaaacccattggtccatagaatccaaactctggatcaatgacttgagttgaatcgggggtcaccatgatagaaccagtgtggagatctccatgaatcagagcctgagctctctcgataaacattgatttcaattcagctacttccaacttcagctcatcatcctctcggactgcttcggcatctttgtcaagatacggtgaggtccaccgattaaatttggagacccggtatgggtctgagaacacaacttgctctgtgagcctacacatctccacattcgcacagtactgagcaactcctttcttatgatccgtcgtgttgttatagaggagggacgtgaagaagagcgtcttggccatataattggacatgtggtcggcgagcagcgggtactcgacgccggcgatgaggcccttgcggaggatgatgtgcggtggctcgatgtagcgcatccccatgagcgacatggcacggtcgaagtggtagacctcgggggtgtgctccgggcacaggcggccgtgctcccgtagcgtggaggcctcgaagtaggcgcgctcccgcgtcatcggccacgagtccccgacgcagcgcacgtacggaagcgcctgcttgatgacgatggtgccggagctggacttgacgatgtagacgaagttgaggttgccatcgccgacctccttgatctcgacagagtcgagactgccgccgccgccgaggcgggaggcgagcgcgggcgtggccttgatgtaggcgaccagggacgcctcggcgagcgggcggaagccctgctccgcctccgcggccattcctgaggcgcggcgattggggcgacgccgcgggcgccggccgagagatgcggaggagaggagtggacaagggagggagggggccgaccgggagactgggagagcgg

SEQ ID NO: 31408 - DNA, 254 bp, Setaria italica
  Peptide Sequence Number=SeqID_97382
aggcaacgaaagcatcaaacttaagcccacctcttgaaggcgaggctacgctctacctggatcttggttggtggcggcgacgggagcacggtgcggcgtgatggtgatggcggattctcgggagggcgacccttcgcccgagaccccgcatggggggagcccgacggagaggaggatgacattgttgtctcacatctgggcacgagaacaaggttgatgcggtagtggattctgagcggcaaccgactatcggt

SEQ ID NO: 31409 - DNA, 513 bp, Setaria italica
  misc_feature (479)..(479): n is a, c, g, or t
  Peptide Sequence Number=SeqID_97383
aaaagctaaatcaacatcagctgcagatgataacatatatgaagatgattcggtgaaaggatcaattctgagctcaccattagttgagttcagcactgtttattcagcaacgaacaatttcagtgacaagcttggcgaaggtggatttggttcagtttacaagggaatactaccagatggccaagaaattgctattaagaggttatctaaaagctccgggcagggattggaagagttcaagaatgaggtgacggttctatccaagttgcagcaccggaacttagtgaggctttttggttgttgtattcatgtagaagagaagatgatgctgtatgaatacatgcccaataagagtcttgactcgtttattttcaatgaaagtaagaggcttgtattaggttggaaattacgatacaagattattcagggaattggaagagggttactgtaccttcatcaggattccaggctgaaaattnttcatagggatctcaaagcaagcaattattttac

SEQ ID NO: 31410 - DNA, 1873 bp, Setaria italica
  misc_feature (1)..(25): n is a, c, g, or t
  Peptide Sequence Number=SeqID_97384
nnnnnnnnnnnnnnnnnnnnnnnnnttttttgaaacaaaagccagcatggggaagttggtgactcccacagaaactggtaccttcacgtcatatggctgaagcaacctactacgtatgcacatatatgctggcgtgcatggaagacccgtatttccggctagtgcaaatacaccaaactaacatacgcacatagatgctacgcacacatgcatactgatacgtgtcacgcaacgtgttgcattggtagattccaaactcacactagtgctcacatggcgcgcggagacgtgttgatcagtcaggagctagcagcagccgtgacgcgcgacgtcgtcccttctcctgaccctgacggcgagcccattcttcatgtggagtatgatggacagcttgggctccacgacgtggcccggcacgagctccacggcgaagttccacagcacggccgccgccgcggtcttcatctgcacgaacgccatctccttgccgaggcacgtccggggcccggcgttgaaggagatgaacttgtacgatggctcgtaccgcagcttcgtccccgcctcgtcgccgagccacctctccggccggaactccgcgcagtccttgccccacacgccctccatcctgcccatggagtagctgaacaccagcaccttgtcccccgccttcatctccttcccgctcggcagcacgtcgtcggcgaccaccgccttgtgctcgaacgggaccgacgggtacagcctcaggcactcgcacagggcggcgtgcaggtacaccaggttgccgagctcgctcgcctcgaaggtcaccatgccagcggcgtcggtgaccttgcgcgaagccacgggcgcgagctcgtccagtattttctgctccacgcgtgggttcttgcagaggaggtagaagaaccacgacagcgccgcgcccgtcgtgtcgcggccggcgagcaggaggttcaccgtcgtgtcgcgtaggaacacgtcatcgttgtggctggagtccttctcgtggcagatgaaggacgacagcaagtcggccgattcggtgatgccttgttcgatcttgtcggcccggcgtttcgcgacggtggcggcgacgaagcagtcgatcgtcctccgagcggcggccattttcttctcctgtcccactttcagtctgttcatcagcttccagcacggcatgggggtgatgtgccggaggaagagcgtctccagcgcgtcgtccatggcgcgcgcgaagggaaccacgggcaggccgatcgccaggcacccggggtcgacaccgaagacgagggtgcatgtcatgtcgaacgtgagcctcaggaacacgttgtgcaggtcgcacggcgctccctcgtcggcggcgtgggcgaggaaaggcaggaggctcctctccaccttgtcgcggctgcaccgcgccgtgaaggtccggaaccgcgaaccggtcatgagcatctgggccttcacccgctggcgccgccacgactccccgtcggcgttgaagatgccgccgccgaggacgtcgaagatcaccgcgaactcgtcgcctttagggtagttggcgaagttggacgtgaagatgtggcgcacgttggaggggtcgcaggtgatgaagtagcgcaggccggtgcgcccgccgcgggcctcgaagttgtagctcgcgccgcggaggacgccggtggcccagtcgtggaagtggtggatgttggcgaccaagccggggagttgccccactattggccattcggtcggctccaaagggctcgtcttcttggattgcaggtggtggtagtacagggtgaggaagcagaggactagggtagtctagtcttgttaatttgtttaactttaggttttaacttttaacgtttta

SEQ ID NO: 31411 - DNA, 388 bp, Setaria italica
  Peptide Sequence Number=SeqID_97385
tcgcggtctatgtggtcagcgaggatgcgacgtagaaccattataaactcagtgaacgacattgcatctccgatggtgtacactacagttagatggccagacaccgttttgatgacctccactaggcaagggacctctttaataattctccccggacgagtccgcccttcaatgtttccccaactgacgatggtcgcttcaacaaaagtttgctcgtcgacttcgtcagttgtactctgagtatctccatgtacaaattggaaattgatggaagtattctccacctttatgttaagcattttgtcagattccagcgcaactgtatactcaagcccgccattcacctcgaggtgctctggctcgtcaccagtgtctgtaatgattgtac

SEQ ID NO: 31412 - DNA, 2241 bp, Setaria italica
  Peptide Sequence Number=SeqID_97386
gagagcgagatggcggacgcgccggccgcggcggcgatccccgccgccgccgagccgctcccggcggtggcggaggaaggggaaggggaggcggccgaggcggtggggtccaccctcaccatggagcgcgtcgccgccacgaagaagttcatcgagaaccactaccgctcgcagatgaagaacatccaggagcgaaaggagaggcgctttaaattggagagacagctagcttcttctcaagttcccaaggagcagcaaatcaatttaataaaagatctggagaggaaggaaactgaatacatgcgacttaagaggcacaaaatttgtgtggatgactttgagctgctcaccatcattgggagaggtgcttttggagaggttcgactgtgccgagagaagacctctggccacatttatgcaatgaaaaaactcaagaagtctgatatggttgtcaggggccaagtcgaacatgtcagagccgaaagaaacttgctagctgaagttgctagtcactgcattgtgaagctttactattctttccaagacgctgagtacctttaccttattatggagtacctccctggtggtgatatcatgacccttctcatgagagaggataccttgactgaacatgttgcgcgattctatatcgcagaaacaattcttgctattgaatccatccataaacataactacatccacagagatattaagcctgataacctgcttctagataagaatggtcacatgaagttgtcagattttgggctgtgcaagccaatcgactgttctaagctctcaaccttgaatgaagatgaacccatgggcgatgataacctaagggaatcaatggatgttgacagttctctgtctgacacagcaaatggtagaagatggagaagtcaacacgagcaacttcagcactggcagatgaacaggagaaaattggcattctcaactgttgggacaccggactatatcgctccagaggttctgctaaagaagggatatggaatggaatgcgactggtggtccctgggcgctatcatgtatgagatgctcgttgggtatccaccattttatgctgatgatccaataactacatgccgaaagattgtgcactggagaaaccatttgaagtttcctgaggatgcaaagttgtcaaatgaagcaagagatctcatttgccggttattatgtgatgttgaccacaggattggcagtgcaggggcagatcaaataaaggcacatccttggttccgaggagttgcatgggataaactttatgaaatggaagcagcatttaagcctcaagtaaatgatgaactggatacacagaatttcatgaaatttgaggaattggaaaatcctccagcaagaacaggctctgggccctcaagaaagatgatgctaaactccaaagatctgagctttgtgggttatacatacaaaaattttgatgccgtgaaagcaataaaaatttcagatctgcaaaggaattcatctctaacaaggccctccattggttcaatattcggtccaccaggcatggattctccaatggaaccaaacggcagggacacacatatgcacaccgtttcatctggtgatccaatgattccctaaccgtcagtgttgtttggcctctgcaaagttccaaactaaatcagcacacgaaacgcctggatgatgtggttccatctggacaacctgctcatttttagccaggtttctgcatttttaaccgtgggtgggcgttttgtagaaatccagcaaagtttctagttgtaaaatagcatggcaaggactttaacaaaggtcccatgtgctaagggctcgtcggacatatggggggcaggtttttggagaaattgcaccttgcggctggctgcccaggttggcggagcaaattgcggccttctcttgtggcagttcccggtctgctaacattggatcacggaaaggaaataagatggtgttcttgcggcaggaattacatggctgagctgttgttgttcgtgatggtgtttgatatgtatcaggaatttttcccatttctgaagtaggaattctcgtagcagagctgttgtagctatttataagaaaacatctttttacagcatctttggctcttgatctgtgacccacccttttaggaactctgaactctgtgcggtctatcattcacctgctatttctcgttgatttatggaacctgacatgtttttggtgaaaaaaaaa

SEQ ID NO: 31413 - DNA, 463 bp, Setaria italica
  Peptide Sequence Number=SeqID_97387
ggtaggggcgccttcgcggggaagcggccggagagggagccgaggcggccgccgcggggcggggtagggggaggcggcggcggcttcggaatggtggacgagaacgggctcgacgcgatatactggagggagttcgagaaggacggcgatggcaggggtaggaagagctggcgcccgccgcagccgccgcctccccggcagcagcagcagcagcgggtggagatgtggccggagccccagcagacgtcgtcgccgccgtccccgccgcggcggtcgaggaggaacaagatagatcaggagccgctcatcccggtgggctccctggactccgcgtctgacgtgttcaacgagtcgctgcgcccgcccagcgctggctccagctcgtcgtccttctccgtggacgccaccaggccgtacgcgcgtccgccggcccggcggtcgccatgaactccgtgccccgccc

SEQ ID NO: 31414 - DNA, 155 bp, Setaria italica
  misc_feature (3)..(3): n is a, c, g, or t
  Peptide Sequence Number=SeqID_97388
ganccagcggggaacagcagccaccaccagaggggagggtcccgtgggagggaaagggaagggatccgcaggttcgccgctgccggcgagtaggttggttggtcggtcggctgccgtgccggtgggagagtgcttgccgctgctgcagttcgcgg

SEQ ID NO: 31415 - DNA, 215 bp, Setaria italica
  Peptide Sequence Number=SeqID_97389
ttgagaatctggagcgtctggatcaaacattctcctgagcctcttagttgagaatctttcatcttcatcaatgccaccttgagtatcttcttcagattctacttgcaatggtgatgtgccagatgctttctgatcagcaggcagtgctttagcttgcttctgggcatcctggacacctgattgtacttcctgggctctaggtggtggagcccgta

SEQ ID NO: 31416 - DNA, 772 bp, Setaria italica
  Peptide Sequence Number=SeqID_97390
ttttaccactatccatgataaattccctactgggacttctactattcatgaggtcatgacggggctgattcaaagattatgtgatgaagtggatccaaaagaattgccgttgatatatacttgtctatttgaagaaatcaacgactgccttaaggatggctgtttggagcatttgaagtgcttgattgatttctttcatttgctttacataagaaacaaagcaatgtgttcgataaggtgaagataattgaacttgttgagttgctggttagtagatatgtgttacctggtaacaacatagtagaagctgcttcatctgaggtgctgggaagtattttggactttctgctgtgtgttctggatgttccaatcatttctggcaatttatcaatcgtatcacccttttatgtcccagtgtttgaactaacgaatctgagtgtgattgtctttataaagaaacttttggcaaaaggtccacaaattacacaatattttgaaagccagatattgagtgcaatgtgcaattttctttcaagttcaccggaagaagttctctttatccttctgaatttctttaaaggatcacagaagcaaataattcttcatagcactgatgcaaaccatctggattcagtggagaaagtgtgcaagttctgtgaatcgaaattctctttctggatagaattcttagatgatacagtcaacatttccaatcaatctagtaatcagatcagtgaaaaggaagctgctatactgtgggatctatttgttg

SEQ ID NO: 31417 - DNA, 504 bp, Setaria italica
  Peptide Sequence Number=SeqID_97391
tgtccgtctattgtcttgtattctagtatttaggtctagtcgttcgttggcccggagcttcttcatctcatttgccgtgaccctggtggaatccagggatagcgagcgcaggttctgcatgtccttcaggtgtttgagaccggcgttggacacccgggagtttgagacgttcaagttgaccaaagcggtcaagccagaaatcagctccaaggttttgtccgtcaggttaatgttttgagaaaggttcagctgcgtcagagctttcagatccttgatgttcttcactccagcatcagtgatgaacccgcacagacctcaagagacttaagattcttaaaacatctgaagcagtttgcgccatagtcagttatgcgagctccaaaaaggtcaagatgagtcagcccagtgagacctgcattatcaaccacatgcatcaaatttcggttaatatcaagtggtactgaaagtctgaaatctaggttcgtaacaactcagagcacctaa

SEQ ID NO: 31418 - DNA, 570 bp, Setaria italica
  Peptide Sequence Number=SeqID_97392
cagtgtgactggcactgcagggatgtttggtagagatgggatggatgtgaaaactttgaaggtcttagaaaattgaaggttttaaacttgggatttaactgtagtagcacaaggcctttcagatactgtagaccttcatctccaatcttgcacgaatccaagttcaaggactccaaattgattaattctttgagatgcaccaaacaagcatctgtaatacagttaaatcccaagtttaaaaccttcaattttctaagacctggaaagcagtggtaagcaatgaattagattgctaagcatgacataaacatgcagaagaattgtttagagtagctatcatggcaacacatgctcagcggctaactaagcaagcttgattcaacacagcaatgcatctatcatctactgtgcataaaaagcaggtaaaaccttctataatacttttctgagttggaaacagaagcattttttttttgagttcaacaagaagcattacatttaccttcaaagttttcactatccatcatcatatatacctacaacgattcaaattcaatgatatcaatgaag

SEQ ID NO: 31419 - DNA, 1377 bp, Setaria italica
  Peptide Sequence Number=SeqID_97393
ctgtaatacagttaaatcccaagtttaaacttcaatttctaagaccttcaaagttttcacatccatcatcatatataccacaacgattcaaattcaatgatatcaatgaagccaatcctgaaatagcttccaaacaagcagcagtcactgtgcagccctctaggttcaagtgggtgagcttcgacaagcctctaagataagatacacccagatctgtgatcctacaacatgacaattgaaggtccttcaaattggtaagatctgttaaatatttgatatctgaatccgcaatataattgcaatacctcaaattcagtgactccagctttgtcagatcttttagatgaataaggccaccatgaatctttaggcaaccttcaaggtcgagttttactaagttaattaaatttgtgaaggctctcattccttcagcagtaacaccgttacttctcttgaaacttaaagaagtcaggtttgaaagtcctgacaacattcccaggctatgttcagagatttgatcacagtaattacatgccaagctttgtatgcttgagcaatctctaagaagatctatcccactatcagttacttcagagcaagaaacatcaaccgacaacaatgattttctttgagatgccactacttccatccaagcatccttcactccagggtactcccctaagcaaatgtcctgcagcgcacagtccctaaaagtttgaagcgatgcctccgtaagacagtttgattctactagcttattgaaaatctgctggctgagatccctcggcagcatcgtgaaagtagaatacttgtctatatccttgcagactctagccacacaaagatccatgagggacgggcatcgcccaggaccttccccttgccccttgcgggagacatcagaattggtccggggcagcgagagcagcaaccatttcaagctgctggtctttgagaaccttggggatgtctgcaaagagtctccctcatccaccaattggcttctcttcctagagcagacgccacccatgattgaggcacaaaatcgaaccaaatccagtcacttctcttggtatcaacaattttggttctataagaaactggtagctgcaccgccactatcttatcacccaattatggtatattcaaagccagcctccgtcacctcccactccattctaaccggagaccagcgtgccgccgccgccgaagccaaccaacccggccgcgcccccggcttgggtttatccccccgcacggctcagctccaccgcttgcgactgcgagcacgagcacgagagcggagagggatggctagcccgctgctgcgctgataaatatctgacgagttctcgcggaggaggcgggagggggaag

SEQ ID NO: 31420 - DNA, 198 bp, Setaria italica
  Peptide Sequence Number=SeqID_97394
cttggcggggaaggtggtcgggcagaacaccggttctgccggcgaccggaagacggtgccgtcactgaggacttgcaggaagccgaagaggtcctcgacgacctcgttcgccggcgtagcggcggcgcagcaggcggcagccgagacggcaggcatggttggcgatttaagacaacttgagaagacaagaaggctgag

SEQ ID NO: 31421 - DNA, 586 bp, Setaria italica
  Peptide Sequence Number=SeqID_97395
agcaggatgtcagcccttgaaggaagccttcggaagaagttcatcagtggagatggcatcctgcttctgaatcttggcggccgcatggcgtacaagccccagagcccaatcatcaccttcataggcacacaataagcaatcacagcagcaaggacacatgcaatggagaaaagaagtgtcgccctcgggtcacgccagctgagcaggccctgcatcctctcaccctgtgttgcaatatcaccaaccaccgtctgcaccctcccagccacactgcggaggcggtcatacctgaagcgcacgacatctccacggctcgaagggaacgtgtcaaactcctcatcaagctcatctgcagtagctccgtctgcatgagacagcctcatctccatgtgaggcgggttccttggacggactcggtacctccagaggccagtgaatgccatggccagaaaggctgttggaagaatcagctctggcattgtgacaaataccaggaatgtgaacacagcaaggcaagaatgcaccgggcgctgccaagagcagacaagctcaaaccacttgccttattggttaattaggttacctt

SEQ ID NO: 31422 - DNA, 1193 bp, Setaria italica
  misc_feature (1)..(54): n is a, c, g, or t
  Peptide Sequence Number=SeqID_97396
nnnnnnnnnnnnnnnnnnnnnnnnnnnnnnnnnnnnnnnnnnnnnnnnnnnnnnggtttaaaccaactatatatctgaaaataagttgatatgaccatctattctggagtcatttaacaagtatctacaacaaaggagtacaaagattcgaatgatgtttcaaaaagtttttggtgtgaggactagaaatctacaacacaggagcctgcattcaaagccaaatcaaacatttcagggtgaagactcgattgttttgatgcccaaaatcatgcttgcagttcatatgctcagagcaataatgaacccttcaattcctggaccaacttccactctttcccccagatttgtgctgcagacagacatctgttatacaaatgtcctttgaagcagctttgcacatgtcataaactgtgaggccagcaatggctactgcagtcattgcttccatctcaaccccagtctttccgctggttgtggcctccccttctatcacaacactagaatcctcttcattgagagtaagatcaacacgaacatgggaaatattaatgttgtggcacaggggaatgaggttgctagtttgctttgctccagttattccagcaatcttggcaacagtaaggacatctcctttcgcaatctcatttgatgccaccaaattaaacaccttttggcccagcaagaccctgcagctagctatagccactctcttagtgtcctctttgggtgagacatcaaccatctttgcctgcccattgctatcagtatgtgtaagcactggttgtgaatcctcagcttcatatgcaggctgagccggttgctgcggaggacttgagcctaaaggactgggtgaaggagattcaccaaatattgattccatttccttatttagctctgctacagtatcgtaaggaatcccagtggagaagcatctccagccattagatcttgttactcttgggaggacggagaagatggacatcataaacacaaccttctcaacactatcatcagttggattttcaaggagtaccgtaagaagctccagcgctacaagctcatgtgccaccacctgatttaccaagtgtgctatgaacttggttgctgcaaccaattggggctgaacaggggctggggctccttacgccggaggccgacgggagtaatcacgggcggacggaggccgacgggag

SEQ ID NO: 31423 - DNA, 582 bp, Setaria italica
  Peptide Sequence Number=SeqID_97397
cgcggaggtgcagcagccatggcgcacctgctgctgcacggcacccttgacgccaccatcctcgaggccgaccacctcaccaaccccacccgcgccaccggcggcgcccccgggatcttccgcaagttcgtggaggggttcgaggactctctggggctcgggcagggggcgacgcggctgtacgcgacggtggacatcggccgggcgcgcgtgggccggacgcgggtcatcgccggggaccccgtgaacccgcgctggtacgaggcgttccacatctactgcgcccacttcgcctccgacgtcgtcttctccgtcaaggctgcgcagcccatcggcgccacgctcatcggccgcgcctacctccccgtccgggacctcctcggggggcacgagatcgaccgctggctcgatgtcctcgacgccgccaggaagcggctcccgcacgggcccaagatacgggtgcgcctccggttccaggacgtggccgccgacccgcgcgggtggggccggggcgtcggcggcgcgcggtgccccggcgtgccatacaccttcttctcgcagcggcccgggtgcaggtcacgc

SEQ ID NO: 31424 - DNA, 586 bp, Setaria italica
  misc_feature (7)..(7): n is a, c, g, or t
  misc_feature (9)..(9): n is a, c, g, or t
  misc_feature (13)..(13): n is a, c, g, or t
  misc_feature (15)..(15): n is a, c, g, or t
  misc_feature (17)..(17): n is a, c, g, or t
  misc_feature (19)..(19): n is a, c, g, or t
  misc_feature (21)..(21): n is a, c, g, or t
  misc_feature (23)..(23): n is a, c, g, or t
  misc_feature (25)..(25): n is a, c, g, or t
  misc_feature (27)..(27): n is a, c, g, or t
  misc_feature (29)..(29): n is a, c, g, or t
  misc_feature (31)..(31): n is a, c, g, or t
  misc_feature (33)..(33): n is a, c, g, or t
  Peptide Sequence Number=SeqID_97398
tctcgtntntgtntntntntntntntntntntnttgttttggttttggtttttgggttttttttctaagcaggaacttttgaccctggatctgctattagctcatacagtactttaaatacagagaagcatagtgctatattcttacaaagtttgatcataagtttagctgatgtgcagcaagagaaacagataccactcccgagtacctcctcaggctaatggaactggataacagccccacaaatgttgaaatgtacttgcaagcgtacttgggcagtggcccagagtgtttgaagagaatgctacataccaggttgaccgtcagtgttgttgctacacaactggtgtatataacatcatggtgaagacacgatttaccagcgcaatgtccagattatgttactctataactactgtagtttgttccaaccaaagtttctgaaaacattgccaggaatcctcttccaggaacatatgtagtaacacaagtctactgctcagctggagtctcctttcggaggagctgtaggcccctgggcctgagggcgacccagatctaagttttgcatctcactagcaagaag

SEQ ID NO: 31425 - DNA, 624 bp, Setaria italica
  Peptide Sequence Number=SeqID_97399
gtgatccatcttggccgtccttcgaaaccaacatcttttgaaccatttggtttgtagcccagaacatgtcaggtacagttggtgctttgactgaggagctaatctctgtagaaagggcagcattttgttcgccgtcgacaatcttgtctgtatttaggagccgcttgttgttgcatgattcacataatgaggtggaactcagttgggcctggttgttgagttgtccacgaagatcagaaaccttttgcttcaagttcataatgtcagcttcagcggcagctacttcctcaagatcagccttagtcttgctgtctattgttgacgggaaggacacctgtcctcttcgcatattcattaggccagactccaatgaagccctcaaatttctctccttctgcagctggtctcgtaaattttccacttctttttctagtgctacacggcgctcatgtagtgcttcttttcgcctttctagacttgcctggagtactgtattttcttttacctccattgtaattttagattggagatgactcttgttgttttcaagcttcacaatatgagcctcatcatcatcaccaccgcaacagttagcctcctctgttgagaggtcttttcttgctg

SEQ ID NO: 31426 - DNA, 570 bp, Setaria italica
  Peptide Sequence Number=SeqID_97400
ttttgtttaccgttttcttttagtttttgttttttgttttttgtttcttttactttacttaactttggtttgtttattattaactattcatggtgaagacacgatttaccagcgcaatgtccagattatgttactctataactactgtagtttgttccaaccaaagtttctgaaaacattgccaggaatcctcttccaggaacatatgtagtaacacaagtctactgctcagctggagtctcctttcggaggagctgtaggcccctgggcctgagggcgacccagatctaagttttgcatctcactagcaagaagcgcccttctttctttcaaaaagttgagtcggctagtcagcttggctaatgcagacgatggtgccatcccagattcctctgctttagtacttgaaccttgagccttgttcgtaactgcattattggagttctgcctctgcgcaaagttccacctcgtggtaagtgatccatcttggccgtccttcgaaaccaacatcttttgaaccatttggtttgtagctcctcagtcaaagcaccaactgtacctgacattgtt

SEQ ID NO: 31427 - DNA, 1429 bp, Setaria italica
  Peptide Sequence Number=SeqID_97401
ctgggagacagcgctatttacagcttaaagcgcacatgaaaaccaccaaacagcacagaaaagatgataatcaactctggaacagaataaccaggtgaactacaacacattgtcactccaccaaacaggacaacctaaacctcgtgaaggaccaacacaatgtgcaaggagaacaatggcttgcagctaattcccagcagggtcctcaggggtggtgcgcctccttagcttggcacgcgtaacacggatcgtctcctccattggcgactcatcgagcgaagggtcgagctcatctgtgccctcagcagcgtcaccaccggcctcatcgatggccatcttgtccacctcttcggcttcagggagtagtttggcactaggctcggattttggtgaatcagcgcttgtggctggagttcgcacaggctcaatggcaggtttcgactcacttttctttgggctaccaccagattttggtgtggatgcagatgtgacgggctttgtcgatgccactgaactagatttcgctgatgcttgacgcttgatcttcggggaagatggaacgggtttggtctcctgagattgctgtgccattgctgcttgccgagcagcgattgatgctgctctgcgcataacaggtgctgcttgtttttgtggttgctgctgctgcacttgtggttgatgctgttgtggctgttgtggttcctggtgagggggctgccttgatttctgagaaggtgactgggcggcaacatatttcaaaacatcaaagaaagtattctgtcctttagaagcagccttctggaaataaaggacaaccgtatcggtggctcgagctctcaactcaagcagattgcgatcgatttcattctcatgctgagaaatatatggcctaaagaaagtaccataaatgtatgtagttccctttgtctttgggtaccacaagtatacaaagaacatcagctttgcttctgagtaaaatggtagccatgatattgtaaaatctccgaatctctcaagaacagtcaacagtgcaactaaaatccaatactgacaccaaaatatgagctgctcaatctctggtttgttcagttcaacagtcttgtagcattcataggcaggataggcgtagccaaaggccaacagaaggaccctggagaggaacccgcccatcatcttctccggccttccgcaaagaagttttgcaggagagggatctggacggggggcgaccggggcggggcggtggctggatggaacagacggaggccgcccgtgaggggagaggaacggccaggagctccggtttcccccctctccacgctacctccctctcctggccgcggctaaaaataccggtaatgcggtggaatggaatgcggagggagagccggaggagaggcgagcacgtccgccgtcagctcaaactcga

SEQ ID NO: 31428 - DNA, 296 bp, Setaria italica
  misc_feature (233)..(233): n is a, c, g, or t
  Peptide Sequence Number=SeqID_97402
caccgcgcccgcgcccaacgctaatggcgccggggtcgtccgagcaggttaccgggctgtcgcggccatggcgttggcggcggtcgcatccatggcagtgctacagtaggtagccgctccctagtggccgtgtgcattgtgtcgccacgatgtgtgcctgattgtgaaacttttttttatgttcttgttcgctttgcagatgcgtctgattgctcagaatctgtgctttttcnctgttcagatattaatttgctattgtttctctgtgtataagtaaaaaaaaaaaaaaaaaaaaa

SEQ ID NO: 31429 - DNA, 444 bp, Setaria italica
  Peptide Sequence Number=SeqID_97403
gtgacatcaagttcactgacaaggaactcgatatcattgagatggctgcctacggggatgttattcgtccaggtaagcaatgccgttgcaggacggtagctgagatgctagggcaagtgaagtcaaagaatcgcgtggctgcttgcgagctaccagacaaaagcacatcttaacatgttctagggctttttacacgaatcagtcccaatttcttctgctcctctcagggaggacaacctgttgagtgttgtctctcagctgattccattcaacaattgtgctctcattctttgtccaccagcatgccattttgcaaaaagaatctagttccttctgagctctcgcaagcaaatgcgtgatcgaacattctgtttcgctttggttgatctatgctttttcttagaatttgattcttgatctgtaacatatgggtcgacaaggcca

SEQ ID NO: 31430 - DNA, 314 bp, Setaria italica
  Peptide Sequence Number=SeqID_97404
gtgtcttgcctccgtactccaaccttgcctgcttctctcggtctgacgacacgagcgcatggatcctgtcagaaattgcacggaccatcgccatcttgcggcggagccgggccaggacgaggagctttgttcttagggcgtcagtcttgctcttgaacacagtcaccgccttcttgagaagctcgggggccttgcacatcctcatcttagagaaggattgtttctaatgatctgcagtgcttcaatcttggcatgagtagattgcaagttgcagcgagagtactggtgagagagtagcttagggttttcggagg

SEQ ID NO: 31431 - DNA, 313 bp, Setaria italica
  Peptide Sequence Number=SeqID_97405
ctcctcgtcactgtactcttcgtcgtcttcatcgctctcctcgtcgtcctcaccctcttcctcctgcatctcctcgtcttcgtgagccttggacgcctgagacaggtaaccgtcggcgtagatctcagggtcgtgtacgaggagggcgcagaggccgttggcgaggcggaggaggcggtaggagcgctggtcgttgggtgacttgatcaccagctcgtcgtcgcgcgacaccgccgccgccatctcaccctcgcggcctcgcctccgccgccgcctccactaggtagtattaccgggtagtaggtctagtagt

SEQ ID NO: 31432 - DNA, 432 bp, Setaria italica
  Peptide Sequence Number=SeqID_97406
tttttttttttttttttttattttggagtttttttttttttttaaaattcaaacgaacgtatcatcatccatttcacttgcttggtgtatacagagctctatacaaatttctcggcgacacaacccaaaaaattggcgaggggaattaatcaattgaaccgcaggatcagaaggagactatggactcgaagcagttgatcccgtcgaactccggcgcgaaccgcgcctgcttcctctccgcggcggccgccgggcgcgagccggcctgctgctccgcggccttcttctcctgctgcctcggagccggcttctccgcctgctgctgctgctgctgcttctgggtcacggcggaggaagaggacctccacgagaggcgggtggagaagccggtcgacgagatgtcggccggcgacgagctcaggatggagaagg

SEQ ID NO: 31433 - DNA, 484 bp, Setaria italica
  Peptide Sequence Number=SeqID_97407
tgaagccggttgtgtgttggaaatttaagtacctttgtggaaaggaagggtaaggttatatttagcactttttctcctagctgtttggttctgatttctattccatagtcttgcgctgggcatgctactatgctttattcacacatagtgaaggaggcatagaaatagtaatcagtctgtaaaggtctcatacttgtttgttatttcttgtggaatcactgacgatcctgacatttcctagtgcattgtcattttgtttagttcagttcttgtaagatccttttttgctacctaataagctaacaaaagcctgtaacttactgtcgtgcatgcagagggaagtgttaaccaaatttgtttatgtctttttctgaacaaaagaatctacaatcatgagctatctttttagaacagcagttctttgatttccatgccagatgcctagtttgccttgatttgcttgtcaggtttattatgccacttg

SEQ ID NO: 31434 - DNA, 430 bp, Setaria italica
  Peptide Sequence Number=SeqID_97408
ctgttgacatttagattgtctctcggcaatctaagtcaatccattccattttcattaaaggaaaagggaaaaaaaaggaaagaaagaaaagccatttgtgtaaaaggaataccattgtgctgtgcccgttatctgtaaagccagaataacgaattagcattcccttgtctaaattcatctggtcccaatcttaattcaatctcacttgagtggaagcccagataggtgacatctagattagaaccttggccagttggatttccaggttcgtcagggtcatgcattatagagaactttgagtgcatgttgtctgggttgttcgttgtggtgacgatagctgggattctggccgactttatcctatatcgttgcaagcaacgatttacttctggctgtccatggacacagctagctacactcactggcctta

SEQ ID NO: 31435 - DNA, 290 bp, Setaria italica
  Peptide Sequence Number=SeqID_97409
aagagagagaagaggagaagagaggagagagagagatgggcgtggcgacggtgacagagctgaagcagagcatctccgggaagaggacgttccggccgagcctcatcagccgccacgccaatgagtggcctccgaccgacgtctccagcgacctcaccgtcgaggtcggcacgtccagcttcgccctccacaagttcccgctggtgtcccggagcggcaagatccggcggctcgtcgcggaggccaaggacgccaagctggcgcggctcagcctgcacggcacgcccggc

SEQ ID NO: 31436 - DNA, 335 bp, Setaria italica
  misc_feature (318)..(318): n is a, c, g, or t
  Peptide Sequence Number=SeqID_97410
gccccgtcatgcctggcgcgacgtacggcgcgacgacggcttcaagcgcgcccgtgccagcgggagcggtctgcgccggcgctggtggcgccggaacagcggcgtggtccagggcgaggccgagcctgcccagcgcgccggagagctcggtgggcgtgatgacgccgtcgccgtcgcggtcgaacaggtcgaagacgcggcgcaggcgcagggactcgagccgccgttgccggccgccgtcgcagggaccttggcgctgcgtctgctgcaacgacgatcctggacgagccgatgatgacgccgcggcaccagcgggcnccgcggacagaagcagc

SEQ ID NO: 31437 - DNA, 602 bp, Setaria italica
  Peptide Sequence Number=SeqID_97411
tcagacatgatatgcgactgctaccaaagcacaggcagcatggcacagacaatttccagaggtcatgtaaagaagaagctcacaagtcacatcaacctttgctggctgaagattgaaacgcagattttacccttcttcagaaaaaaaaacaagtcttggttgctctacaagatagaattacatgggtacacaaaattctgcaaactactaaatctttcaatcatacagagacttggcagactgaatccttgtcttcttgctttttgccttctggatcttctcctcagattgttcattatttgatacggccctggcaattgctttcattttcctcgcattctgtgaccttttcatctgtactccttttttattttcttgttgatcgaaccgagcgccatcgatgtcgacgatggctgattcccctcggatgtatccatgggttgcggagccgacgcggtggtggaggcgacggggccaccctcggaggtgtccatggcggcgacgccgccggcgcccttcttggccttgttcttcttgttccggttcttcgccattggcttgcggtccgtccttgtcgtcgtcccttttcttcttttttcgtt

SEQ ID NO: 31438 - DNA, 277 bp, Setaria italica
  Peptide Sequence Number=SeqID_97412
ctgatccgtggtcgccgccgccgtcgaagaaggcaggagtagggagcggtgggcccagaagtggacggtggtgtcggcgtccacggcggcggagccggggcggaggccggcggaggtgaacgcgcgccggaacgccgcgtcgagcagggacaccacgccgaaccccattgcccaatgctagcttaatttggttagttcaatttgcctctccggcttaatcagagctctggcatgaatcagctagtgatcatggcatcagttcttgaatgggatatag

SEQ ID NO: 31439 - DNA, 354 bp, Setaria italica
  Peptide Sequence Number=SeqID_97413
gcatacaagtaaacaagaattccaattatcaagctgacaagtgcgaccatcataaatgcaacacgccatcctgggaatccccagaagtctttcccagccatgattgttgccaaaatactaccaccaataccacctacagcaccgatgaggcttaacagaccaaatcctgcgccacgtgtaccgtctttgtagctatcagcaatgaatgactggagtgctggtatgacaatggcaagcccaaggccgtttacagctctccagaatgcaacctgcccaaaatgctggctaacaccaacagcccctgttgataaggcccaaaagacggtccctattgcaagcactgttggccggtca

SEQ ID NO: 31440 - DNA, 1495 bp, Setaria italica
  Peptide Sequence Number=SeqID_97414
tttacgctaaggtcaatgatgatatatacataaatgttgatactttgagtgcaatgcttgaaactcactgggacaagccccgtgtctacataggctgcatgaaatctggcgaagttttttctgactcaacccacaagtggtaatgaaccagactggtggaaatttggtgatgggaaatcgtatttccgacatgcttctggtgaaatgtttgtcatatcgagggctgtagctcagttcatttctataaacaagtctgttctccggacatatgcccatgatgatgttagtgtaggattcgtggatggttgggcttgctgtgaagcatgtaaatgaagcaaaattgtgttgttcatcttggccctcaggtgcgtctggctcatgcatggcatctattgaccttgatattgattcctttctgtttgcgtactgtcaattgccaagtttgactctcgatgatgctatcatgcactaatgccgtttgtaagtggttctgtcagattctcctgatttttgaaccatgtattggacagtaattatgttttggacagtaattatgtttctgagtactgaaactgcaaggtatacatgagcatagaaattgcataatttctttgtaagtttcttggaattaaagtgcaagatagagaatagaactataagctatgtcaaaattatatactaccttgtagttgctacagctgtagaccaacttttttagatcaaaggagcaatgtcctaagaatactaaagccaaagcatgtgcttcagcatttattcttgattacaaattcctctgatgaataggctagaactagccgtttgtgatcagctgagttttaccatctcataacaagttataaaaaacttagttccattttctctcaagctgtctataaaccattgaagggttggcaaattgtgggttgattatgtttcggacagcaaggcagtggtttcaaggctttgcagaaaacagaatggatgcaaactaagttattatcatgctgcatgtgcactgaatttccacactagcctgtggatttgggtcctggttgggttctaaatatgtggcgcaatcactatgattgcttgttaacttcattaaactgaaataatggtggataagggatatagccaaaggcagtgaagattagacattgtttactggggaggcatgaacttcagtctgctgttttttggtgtgtatagtttgtgtatttaattgttgaattgattggtggtcatttcaccaggatctccagatattttaattggctaactactaaaattgttttgcaggtgcgatgtgttcggccctatgatgaacaacgcatactgagggagaattttgcaaacagcgtgttaggctcactagtgtggtggacgatacatacaatgtgcgtagaatgagattggattggcatggagaaaattttgtttttcttctgccatctgagacacgcaacaggggtaggcaaggcacacaggggatagg

SEQ ID NO: 31441 - DNA, 1242 bp, Setaria italica
  misc_feature (1204)..(1242): n is a, c, g, or t
  Peptide Sequence Number=SeqID_97415
acttgagatggagctggctgcagcaaagcatgaaggttttgtggggaaatactcccctgagacaaatggaactcattctagaaagaagccactgattgtcattggaataatgagtagctttggccggaaaaactaccgtgatgctgtcaggaaatcatggcttccgacaggttcaatgctgaggaaactagaagaagaaaaaggcattgtagtacgtttcatagttggaagaagtgcaaatcgaggagatacttttgatagggagattgatgacgaaaataggagcactagggacttcttgatcttggatgatcatatagagtctgatgaagaactccctaagaagacaaaaagtttctttgctaatgcggcagagacattcgatgctgcattttacgctaaggtcaatgatgatatatacataaatgttgatactttgagtgcaatgcttgaaactcactgggacaagccccgtgtctacataggctgcatgaaatctggcgaagttttttctgactcaacccacaagtggtatgaaccagactggtggaaatttggtgatgggaaatcgtatttccgacatgcttctggtgaaatgtttgtcatatcgagggctgtagctcagttcatttctataaacaagtctgttctccggacatatgcccatgatgatgttagtgtaggatcgtggatggttgggcttgctgtgaagcatgtaaatgaagcaaaattgtgttgttcatcttggccctcaggtgcgatgtgttcggccctatgatgaacaacgcatactgagggagaattttgcaaacagcgtgttaggctcactagtgtggtggacgatacatacaatgtgcgtagaatgagattggattggcatggagaaaattttgtttttcttctgccatttttttgtgacatcctttggaggaagcttgtgccagttcatacagaatcagataccttgttttccaaaaggaaaggtcttgcatattttctttgcaagagcgaaatactggactcaggagttctaacgaatacccgtctgccgactgtatcctggttttgcttgccatttgtagatgcccacccttaccattctttttctgacagacactgccattgttggagtgacagaaatcaatagcaattcaggaaattattttgctccgtagaatacatgtcaaatgtgtgtcttaaaccnnnnnnnnnnnnnnnnnnnnnnnnnnnnnnnnnnnnnnn

SEQ ID NO: 31442 - DNA, 403 bp, Setaria italica
  Peptide Sequence Number=SeqID_97416
taacgtgctgcggctgtcgtacaattaccttactgggggcctgccgatggtgttagaggggttgggctcgctggagtcactgcagcttaacaaccagaagtctggtgagaaactgtctgggccgatcgatgtcgtggcgaagttgccgagcttgaagacgttgtggcttcagtccaactcgttcactggcccgatcccagagttcagccctgactcgcagctggttgatttcaatgtcagggacaatagtctcactggggtcgtaccgccctccctgatagggatcgcaagccttcaggttgtgaagctgtccaataacaagtttcaagggccaaagccaaaattcacagctaccactgtagatagtaattctgggaatgggttctgtctcaaagaccctggg

SEQ ID NO: 31443 - DNA, 469 bp, Setaria italica
  Peptide Sequence Number=SeqID_97417
tgacaaccacggtgaggcacggctccacgatagcggcttaccaaaaagcaaagtggcggccggcactgaggaagatgatggtggagaggtgctgtggtggatagggctggacaacgactagtgggatggatttaggaggtcaaggtggtggttctggcggagggaaatgaccggcggtggcgggacggtggcggaactcaccggtgaccgaggtgcggtaaaaaggagcagcgcggtgaaaggataactccggccggcgggagcggtaatttgtacaaacttttaccgcccttgctacggccacctcctgcttgcttacctggttcgcgtcacatgcctgcaccggcacgtggcacggcgaaaccgcccttgccatcggcggcaagcagctgcgtagcagcagcctggctctgctcttccccctttctttcccaattccgcccgagattcaactccaatttgcgccaat

SEQ ID NO: 31444 - DNA, 315 bp, Setaria italica
  Peptide Sequence Number=SeqID_97418
caccgccggcggcctccgtctcctgcggcggcggcggcggcgccgtgcgccctccgcgctcgtcgccgtcgcgaggcggcaggtggactacatcctgggcgcgaacccggcggcgacgtcgtacatggtggggttcggcgcgcggttcccgcgccgcgtccatcaccgcggcgcgtccatgccgtcggtgcgcgaccacccggcgcgcatcggctgcgacgaggggttccggtacctgcacgcggcggagcccgacgccaacgtgcttgtcggcgccgtcgtcggcgggcccgacggcggggacgcgtacaccga

SEQ ID NO: 31445 - DNA, 391 bp, Setaria italica
  Peptide Sequence Number=SeqID_97419
gctcctctgtcttccaattttgatgtaccctgtcaacaaattttcttgcagatttgtcgtcagaaactgaactgttcttctctccggtcgtgatctcaagaataagcatgcctaaactatatatgtccgacatggtggagatttcacctctgtatagatattccggagctatgtacccattatgtcccttgacattgactgtgtacatccgggtctgctcttggccaaaaagtcttgagaggccaaaatcggcaatctttggcacccagttatcatccaaccatatagagttaggcacaagattcatatgaataagggggccatccaattccttgtgaaggaaatgtaaaccctggcagattcccttaactatttggaattgtgtgcccca

SEQ ID NO: 31446 - DNA, 733 bp, Setaria italica
  Peptide Sequence Number=SeqID_97420
gaatggcaacaagttagttacagtatgcagttctgtagcacaggatctttggctttagtttgtcagtctttgcggttaaaaaagcatgaaaccatcaagatattggctcaacttatttgatgatgttcagagtgtaataatccatgaaattcgattgctttagttgtcctccttttcgcacaaaaaaaaggaaacgtttcttaatacataacacaacataatgaaactggacgatctgaacacagatcatcaatgtgacaatgtctcaagtgctcatacctgctcaaatattggtacacgtttgccattgagcttatcaacaatatccgctatggaaggcctcctgttccgatcagcctccacacacattagcccaattacaatgcatgcttttacttgctggaggccatttggatctagtgatgggtacttgtatattatttgctcatttgtcttccaattttgatgtacattgtcgacaaacagtcttgcagatctgtcttcagaaactgcacaattcttctctccggtcgtgatctcaagaataagcatgcctaaactatatatgtccaacatggtggagatttcacctctgtatagatattccggagccatgtacccattgactggagaggccaaaaagtccgcctcttcgccaaaaagtcttgagaggccaaaatcggcaatctttggcacccagttatcatccaaccatatagagttaggcacaaga

SEQ ID NO: 31447 - DNA, 598 bp, Setaria italica
  Peptide Sequence Number=SeqID_97421
ttctgttaggatagaatgtgacttctagttaactaattcactccattgctatctatctagatatacactatgttaagatatatagtaaaagttataaatttaaattatgccgaaacgatctataatttataatttaggacaggggagtacttcacttaacctttcactactagatctgccaccattttttgttgacggttaaaaaccatcggacacctttgcttcctctcgggaaatgtagtggccgacggctttccctcgcgaattgctcgtcaaattaagttcgccgagaaacacagtagtgcctgaggcactaccgtcaccatatctatagtagtgtttagcgtatctttgacgtcccattactatttgctgtttctcgcatttgtttttatattagtttgatagtgaatggcaatggtcaaatatcttgttcatagaaatttggcgtctcctgtgggatccagattaagctgtctgatatttcggtaacaatactatattatccgttgaacttgcattgttgaatggcaacaattcttgaacagtatctacctcgtgtacctcattgatgccatcagatatcgacgaacaattg

SEQ ID NO: 31448 - DNA, 1570 bp, Setaria italica
  Peptide Sequence Number=SeqID_97422
gtaggttacataaattctactttaagatgagatcaacagaggcaaaagtactccgatgatacagtgtacattgttgccagtaagagagaaatttaacgaaggatctcaattagttctgaagaaaattagtgccgtctacagatcatacagcaggtttgacttcatcttggacatcgatttctctttggaaagaccatgtttcatggacgctaggaaggggggaaccttgattttcctcatgttcgagaatggacggtgagcaccgagaaagcgcatcctctttgggctcctccttggccaaggcgcgtggagttagctcaagttcgacgccgtcgggcgtggatgccacgaagctgccacccacggtgccctgccccgacgcgctgccgctcacgcccttccagccctggcccccgaatccatgggcatgttgttgttgtccagcgccgctgctctgatttgccatagccggcggtggatatagcgggccgtggttgtgcttgcccttgtacgtggtgatcacggtgctcgggtcgcgggacgagcgctccacgtgcttgcgcaccgagcagcccgccatcaggcacttgtagtagctcctgtggtcaccgttctccttaaccatcttcttcccgtacttcctccagcggaagccatcatcgaggatgtcgatggcgctcctggttaccaaagcgactctcggctcgtgcaccatcgtcgtccggctgccggacattgagatcccctcgccctcattgtcttttctcaatctcttgaaatcttcctcgtgctcgtcaaactcggagtttccggcccgcgacgagctcaccccaacctcgtcgttcctgcccgacattccgccaaactttccctcgaacgcctcgctgccgccgctctgcatcggctgcgcagccatgctagatcctcccctgcttgtgttctgtggcttgtcatggttgtgcgtgccattgtacacgatctctatgatctggccgtccagcgccgacctctccaccctcttcttggtgggcagttagggaaggtgcacctgtagtagcttctcgggtgctcacggatccccttcaccagcttctgcccgtacttgcgccagctgtagccgtcgtccgatgaccggcactccgatagcgtgttgctacccaacaacatgatgcggtgctatcgccgtcgtcacgtccgacgaggtcatctggaacggcacgctgaaggctgccgtgttgccgtccgatggctgctcctgacatccgtagcctggaggaatcggttgcgggagggtcgttgatgtccacgcggccttttcgcccacaggcgccatctgatatttcggtaacaatactatattatccgttgaacttgcattgttgaatggcaacaattcttgaacagtatctacctcgtgtacctcattgatgccatcagatatcgacgaacaattgagtgtctcgtctgaaccagaacagctttctggagtatcagcaaattggggaatctcttggtcgacggaatggacaattcgtaggttgaagcttataagtcttgaatgcaattgtct

SEQ ID NO: 31449 - DNA, 1546 bp, Setaria italica
  misc_feature (1)..(44): n is a, c, g, or t
  Peptide Sequence Number=SeqID_97423
nnnnnnnnnnnnnnnnnnnnnnnnnnnnnnnnnnnnnnnnnnnnggtaaaaccgaaaaaatttccaccccaagtccagaaaaaaagtagcaaatttttccatgcagcaaaggtacataaattctactttaagatgagatcaacagaggcagaagtactccgatgatgcagtgtacattgttgccagtaagagagaaatttaacgaaggatctcaattagttctgaagaaaattagtgccgtctacagatcatacagcaggtttgacttcatcttggacatcgatttctctttggaaagaccatgtttcatggatgctacgaaggggagacctggtcaaatattggtacacgtttgccattgagcttatcaacaatatccactatggaaggcctcttgttccgatcagcttccacacacattagcccaattacaatgcatgtttttacttgctggaggccatttggatctagtgatgggtacttgtatattatttgctcctctgtcttccaattttgatgtaccctgtcaacaaattttcttgcagatttgtcgtcagaaactgaactgttcttctctccggtcgtgatctcaagaataagcatgcctaaactatatatgtccgacatggtggagatttcacctctgtatagatattcgggagctatgtatccactgcaggagttattaaagaatcaaatggcattacttttataatgattagaaggaataatcatatatttcaccgtttgtttcagcttacttatgtcccttgacattgactgtgtacatccgggtctgctcttgaccaaagagcctcgcaagaccaaaatcggcaatctttggcacccagttatcatccaaccatatagagttaggcacaagattcatatgaataagggggccatccaattccttgtgaaggaaatgtaaaccctggcagattcccttaactatttggaattgcgtgtcccagttgatggatctagtgtccgcataaagatacttgtcgagggttccgtttggtagatatttatagcacagacagctttcgaccatgtctacaatcacatatcttccattatgctgaaccactttcttctgtgcttcatggcagtagccaaccaactgtacaatattgtcgtgctgaagtaccataagatttgtaacctcggtatcaaatgttttgccaggtgccactggggcgttttcagccagcctcttcacagcaatcgtgcccccttctggcagaacccccttgtaaactattccaaatacagaacggccgagttctcgcccagcggcgaaatcgctggtaatttccttcataaaggtcgcaggtagttcttttggtaatgtacttactaggctctgctggctctgtaggttagccatttctgatgactgatgcaggtacggatctgcgcttctataaatcgaggcttctggagaagaacacttgaaggatcctagcttcagggaaggatcctggagaagcagaatgcaggcgcacgtctatcttgtcgtagtattagtattgtccttcct

SEQ ID NO: 31450 - DNA, 253 bp, Setaria italica
  Peptide Sequence Number=SeqID_97424
gccatttgtcacagagaggaggcaggctgaggccaaccgcatcagggagaagtaccctgatagaatccctgtaagcatctgttcttattcatgtattctgctgctttttcatgatcaacttgttcttagtcaagctggctttcttgtgatacaggtcattgttgagaaggccgagagaagcgacatcccagacattgacaagaaaaagtcagtcagctcttatccatttttgaattaacagttggacagtttg

SEQ ID NO: 31451 - DNA, 299 bp, Setaria italica
  Peptide Sequence Number=SeqID_97425
gaccgatcccgtccaatccgctgccgcccggtccacccacccgtccgtccgtcccggtttgctgctgcctgcgccgcgcgcggttgaggaggaagaggaaggcgggcgatggccaggagctcgttcaagctggagcaccccctcggtgcgtcctcccccgcccactcacccctctcgctcgtctctaatcggttcgctgtcctcgtcgtggcgctggattctcggccgcgaccgtggtaccgatcgatcggatcgatccgttgagtttaagcggagcttcgtggtcggcggggggtggg

SEQ ID NO: 31452 - DNA, 732 bp, Setaria italica
  Peptide Sequence Number=SeqID_97426
cccacctctcccggtcctcgccccaatttctcccccctccgcctccgaccgatccccgtccaatccgctgccgcccggtccacccacccgtccgtccgtcccggtttgctgctgcctgcgccgcgcgcggttgaggaggaagaggaaggcgggcgatggccaggagctcgttcaagctggagcaccccctcgagaggaggcaggctgaggccaaccgcatcagggagaagtaccctgatagaatccctgtcattgttgagaaggccgagagaagcgacatcccagacattgacaagaaaaagtacctcgttcctgctgacctcacagttggacagtttgataattccattgcttttctaattgtccggatagttttcctggtattagagttctcgttttcctgtgcttctgaaagtatagcaattttcgtgattgattttgtcaaactcttgatagtgcaaaactgttggttgcctttgccgtgggtattactcctgtgccaaccatgccttaaagttgtttatctctaataagttccatagactaaacgtccgaatcaagtatttgtttcttatgcatgttgtcatcaataaattgattgcttactccattagcatattctttgcttgtatcaccttgcaacattaattaattcagaataaagcctagtttatcagtacaagcgaagaccaactgtaatgtacttttcttgtatcatcaaggtgtatggtt

SEQ ID NO: 31453 - DNA, 1099 bp, Setaria italica
  Peptide Sequence Number=SeqID_97427
aaagattcaactcccttcggtcaagtatagcaggcagcaattttttgcagatttcaagcaccttaacctcaatatccagatttttaagaaataaaggaagcccactgctgaattcattaggcacagattagtctttctattggaactatcagcatcagtagagatatcatcttcaaaatcagagctgctatctgcaacctgctccacatcctcatgataagctagtatggggtggaagctgctagctgctggtggtacagttgagctgccagtaaatttccgaggtttcaaacactgacagctgcttcctctcacacctccagctccacagtcacagaagaaacggcttgatctagagtaaacaacacgatgccctcgatgacacaccttggcacaaacagaacagcagcctttcgaaactgtcaggtcacaagtatagcagaagtaccaatgctgttccatgaaattactgccactggatgtaaatgtgcacacttttgacgctagagctctatcactgtctccgtcatcttcctcatctctatcaatactccctaattccccatcagaagtagcatcatcttcatcttcctcaccagagctagcatcacaatctacagcaggattacttacttgattcgtgcggataacaaggttttctgaatttttcaactgctttgggatgagagatcctgatccaaaactgctgccagaagtttttgatgaaagtctcttaagagcacttctatttagtccagtatcgccgaacactgcctccacaaagaaaacagaaacttcaaagtgtgcagcttacccttgtcctcaaccattgtctccatcagtatcagagtcttttcaaacaagtgcttgaagtgtgattcctcacttgatagttgaacaagaaaatggaaatatgctttagcagtctggaggtcatgtgacaaaaatgctctatcaagtaacagtagcatagagttgaataggtgatgttgaagttctttggtcactgcttcaggtgaaggacagatgagattcgtaaaaaatccactgctagttctcgggttgcaggaccagcagtgccatttgtgtttttgtcttt

SEQ ID NO: 31454 - DNA, 1218 bp, Setaria italica
  Peptide Sequence Number=SeqID_97428
aaaacttaaacaaataacaaccaaataaagtaggaacaggacaggaagaccgttggcatctgatggtaaaaaaaaagaaaagaaaacaaatggaacaggagctggaaagggctctatgaacggcgacgggttcaatcacgttggtgcatttccctgagcatgaacagagcacgaacagccaaaatatatacgaattggcagcccctgttaccttgtgcatcatgtagttcaggcaaagcgtgttgcttaccaatgctgaacccttgggagccaatcttcagtaaccaaagacggaggcatatcagcaacttcacaaaatacagcagctattattatccttctttggatcttgatactgtgttaatgcctccaagaattggttccaaagtggaccagtctcctgaaggttaacattctctggtcccccgaggtaagcttgaacaatgaattcataactttgttcccttccttcgtaatgcgacaaccatgccaagtaagatgcaccaaagtacattgatgcaaaaggattgtagagatcatccacagagatcactgtatacgccctgtaaccacaatccctggaaagccatgcagcagtaggatagtctattcccatcaatccagtccgggtacttactccatgaacaaaacgcatactgcagacctctgcaagtgccgcaagagcttctggttttgatcctctagtggtcaaatggcgtgatatgattatttctgcaacagccttcacctccacgcgagaaaggtaaggcctcttctttgcatcatgggagaatcgtacatttccacgtcgctcaccggattttgtccactccttatacacatcaggatgtttccacattgcatccatatcagcctctgataccttggaatcccaatatatcaactgtgcttctgtgcttgataaattttcaaggtcaggagtgatctcgttgcaaatttctggttgtcttatagacaacaagctctctttcacataaagataacgctggaaaatgggggaagttgatttgtgagaagccttctttttgccacccttatatgctctaactacaaattcttcagttctttgtttgtcatcacaagagaagagccatttggcataagcagcaccaaagtagacatttacaagaggccagtagagcaaattggtatcatcttcaatatcatatttcttgtaacccaattcccttccaagcc

SEQ ID NO: 31455 - DNA, 719 bp, Setaria italica
  Peptide Sequence Number=SeqID_97429
aaaaccaaaaaaacaatacctaaacaattccttaatcgctgaccattcagttatgaccatcaatatcaccaggagcagtagcagatttgaccaaactctcgaaatctatgatggttgactgaaaattgaagtgatacccgctttgcatccatgattttacgcacattgtagcctgcatactactaaggggaaggcagtactgctgcttgtggatgttgtcgcctttacttgtgaacagttcttcaggatccattgaggtcccctgaatcgccaaaaagtctcgggccatcaaggagagccgtgggtagcgggaggaatgccccctccaccattcaagggcgtcagtggaaattggtgcagggggctcagcgagatactgagagagctcgtcagcagcagtggtcatgctcacccgacgtcgcttacggataatctcttcagcaaaggagaatgcgccagcttcctccgtggtgtcctgagcaccatgaccatttccaacagcttggaaggtgttgctgtagtccctgacaaaatggttccttgcatcttctaagttgctcgcggaattcagggtttctgggatgagctctcccttaatccttggatcaagaatcgcagctgtgaaggtgtagatgctgtaagcttcagatataaagttatcagctgtctcggacatgttactggcaacgttcttgagccattcttggtggctgctgttg

SEQ ID NO: 31456 - DNA, 668 bp, Setaria italica
  Peptide Sequence Number=SeqID_97430
tacgaccaaagcttcggtcggcgctcgagtcctggggcctcttcgcggtacttaatttagacaaggcttttagtacacgtgtcagttcactatggttagagtactgaaactttgtcgaccaggtgaccggccacggcatgccggagtcgctcctggacggcctccgcgacgccgggctggagttcttccacctgccgccggaggagaagctgaagcacgccaaccggaccgaagccggcgagttccagccggaggggtacggcatcgaccgcgtggacaccgacgagcaggtcctggactggtgcgaccggctctacctcacggtgcagccggaggaggagcggcggatgcagttctggcccacccgcccaccgtccctctcgaagctcctccacgagtacaccctgggcagcgagaaggtggccaggcgcgtgctcgcggccatggcgagggcgctggggttcgacgaggggtttttcctcgaccacgtcggcgagaacgtcgccacgtacgcgcggttcacctactacccgccgtgcccgcggccggacctcgtgtacgggctgaagccgcacacggacaactccgtggtcaccgtgctcctcctcgaccgcgacgtcggcgggctgcaggtgctcagggacggccggtgggtggacgtccccgtg

SEQ ID NO: 31457 - DNA, 463 bp, Setaria italica
  Peptide Sequence Number=SeqID_97431
gcgaaggctggtctcctacgtacctacgaaccaaaggtaaaccctagtaataacctatagagttcaatatatatggcgatagttctgttgctgttgcaagatgtgcactcaagatgcaaaattcaggatttggatgtgcacgccggaggttaacagatccaattatgctatgcagtggcaaaccgcaaatggtccagaactctggacatatctccctactgaatttgtcatgctccatggtcccatcccaaggagcaaacagttccaaacatggtatgccatgctagtcctgcagcaaacactacacaagaccttgtccaatacatggcatgccatgctagttctgcatggcatgtaatgctaagactggttctggcatattatccaactggaatggatggattatagcagaaaactaaatgttcaactaggatctggtgtcaaagttttataaatttagaga

SEQ ID NO: 31458 - DNA, 202 bp, Setaria italica
  Peptide Sequence Number=SeqID_97432
ggctggtagtggtagcgacggtggtgctagtggtggcggtggtttgggaggaggatttcttgagccgcttgaggcggcgaggcggggaagcggcgggggacgcggggagggcgaggagctccgcctcgtcgaatggctccgtgtccatggcgccgcgtctcggcctctcctcttgccggcgggatctgtgatctggtgggtg

SEQ ID NO: 31459 - DNA, 420 bp, Setaria italica
  Peptide Sequence Number=SeqID_97433
cagctcgacggcgtgcctgggccttggccgacgccgtgctacggcaatggctgctccaagcgccgccagtgccagtacatcgtcaactacggcgacggctccaacaccaccgggacgtacagtaccgacaagctgacgctgaccccggcgtacgccgtcgacgacttccagttcggttgcagccacgccgcgcagctgttcagcgacaaggccgacgggctcatggccctcggcggcggctcgctgtcgctcgtgtcgcagatggcggagaaggccttctcttactgcctcccgccgacggcgagtcactccgggttcttgacgctcggtgtgccgcgcgtctcctcctccaggttcgtggtgacgcccatgcatagcatcggcaacatcaagacgtactacggcgtgctcctgcagggc

SEQ ID NO: 31460 - DNA, 211 bp, Setaria italica
  Peptide Sequence Number=SeqID_97434
tcaaataaatgctgtgttctcaacttttcatgatcactactgtcagaaaggttcagatactttcctttcctgggcagtttatcaccattaggaaaacaccgttcacaaaaaggacacagcaagaattgaacttttaactttacagaagattatttcccgcagaccagtgtttcaaaggcgtccaggcagacccagctcgacttgggtaaca

SEQ ID NO: 31461 - DNA, 361 bp, Setaria italica
  Peptide Sequence Number=SeqID_97435
ctggtccccgccggtcccggcgacctggagaggagggtcatggcggccgtgaaggcgtcagaggcgcgcggggacccgccgctgctgcgagcggtggagctggctcgcgtcgtcgccggggagggcgcggggatccccagcgccgacctggcggggatcctcgtctccaacctctgcttcgcgcacaactcaccctcgctctggaagctcgtcggccaggccatggcctcccgcctcctctgcccgctccatgtgctcgcgctcctcacccccagggtcctcccgcagcggcgagcgcagcccgaggcgtatcggctctacctggagctcgtcaagtgtaacatcacgtcctcctcgctgt

SEQ ID NO: 31462 - DNA, 255 bp, Setaria italica
  misc_feature (194)..(194): n is a, c, g, or t
  misc_feature (250)..(250): n is a, c, g, or t
  Peptide Sequence Number=SeqID_97436
ttgtactgcgacatccggtttgaccacctcggcctcgtctccggctggaagagctggatcagccagaacaccgcccccgccgccggccggagccgctcgctggctcgcagatcggcgaaggtccagggggagatcaccatgaggaggatggcgtaggtctccaagaagatggcgcctcccaggagcacgtaggngatgtcgacgtcgacgcgcgcgttgcttcgcatgtcgccggcggcgcgcgcgaagngcacg

SEQ ID NO: 31463 - DNA, 302 bp, Setaria italica
  Peptide Sequence Number=SeqID_97437
tgacatcagagcaggtcagcaatacttgttacagacttacagtagctaattttgcatagcaacagaaacaaaaacatagatggattacaagtggaccagtttgaacttgggcacaacatgggtaaccaagcaccaaatcagaggatggacaggccaggaatcagcaagttaggcgcttatcagacctcaaaagcagcactgccaccattgcaaaatagctcgaagaggcagagatctcccagctgcaaattgttgtcacgagcaaactgtttccatcctttcgaaagcctttttggttccgg

SEQ ID NO: 31464 - DNA, 1187 bp, Setaria italica
  misc_feature (1045)..(1045): n is a, c, g, or t
  Peptide Sequence Number=SeqID_97438
ggcaacaaccactaggcgcgcggggggcctcggctgttcagcgcgagagagttcacgcgcctcgtgcctgctcgatcttggagaggagggatcgggtcggagcaggccggtcacgcgcgcggctaggtaactgttgaaggcgaggagatggtggcggcggcgagggcgtcggaggtgaaggcggaggggttcctgcggggcgcgtgcgcggcgctggcggcggcgtccgcgctgctggtggggctcagcacgcagacggagaccgtgctgctcgtcaggaagaaggccaccgtcagggacgtccaggccctctgggtgctggcaatggcggcggccgtggcggcggggtaccacctgctgcagctgctcaggtgcttctacctcggccgcgtcggcggcgtcaacccctgccgccggagcagcagggctttggcatggatatgcctcctgctcgacaaggcgtgcgcgtacacgacgttcgcgacgacggtggcggcggcgcaggcgtgcgtgatcgcgctggacggcgcgcacgcgctgcagtggaccaagctctgcaacatctacacgcgcttctgcgagcagatcgccggcagcctcgtgctcgggatcctcgccgccgccggcaccgccgtcctctccgccgtctccgcgcgcaacgtcgtccgcctctacccggcgccgccgccgccctacgccgcgcactagaagcagcggtgggctcaaggcgtcagctgggccgcgtgcgcttctctgaagaatctctaacaacgatgggccgtgacgaaatgtaggcccaagtgaagagtgaagatggagatgttagtagaattctgcctactttggactgtactatttcgctctctccctcctccctctccaaaaaaaggggtacttgtatggtttttttgcttttgtttcgtttgatatgttagtggagatgagtacgtatgtgtgctagtgtatctgtatgtatttgcagtgtattttcgtagataataatatgctacgtcttaccagcagtgcagctaaagaaaaaaaaacngcagttactgcctgctgtaaaggagttgtactgctgtagtgacaatattgcagtaggacttttcatacctcaatttgaaaatcacgtttcattttaaaaaaatggatacaagattccattagttcttgcttgcagacacaca

SEQ ID NO: 31465 - DNA, 314 bp, Setaria italica
  Peptide Sequence Number=SeqID_97439
gtcaggagctcgatcaggaggtggccgaagttgcagacgacgtcctggtcgtgcgacgccgagtagtacgtcgccggcctggtgagcttgtacccggcgatcttggcggtgaagtcggtatccaggaagatctcgctggacctcaggtcgtggaggaaggtcggcgcggcctcgtgcgcctgcaggtacgtcagcgcgctggcgagctcgatggcgacgttgacccggtggtaccagctgaggacgcggcccttcatctggcgcaggtgctcctccagcgtgccgccggcgaagtgctcgtgcaccagcagcag

SEQ ID NO: 31466 - DNA, 468 bp, Setaria italica
  Peptide Sequence Number=SeqID_97440
ccgacgacgagcggcagcggcgacgacccgaccggtggtgcaggacgtggtgacgcccaacgacatggacagccagtactacaggaacgtgctgtcgcacaccgtgctgttcacctccgacgcggcgctgctgacatcgccggagacggcgaagatggtggtggagaacgccaaaatccccgggtggtgggaggacaggttcgagaaggccatggtgaagatggccagcatcgaggtgaagaccgggtaccaggggcaggtcaggaagaactgcagggcgataaaccactactagttgatcgtcttgcaactgcacaagtgtgcaacgcgtgaaagacgatcgttctttagaaaaacggcacggtgattggtgaaggatctatcgtcggtcggttcagttgttggttttttattcttgaccgagatgcggtgtatttgtcgtaatgtcaactgttattgttatctttt

SEQ ID NO: 31467 - DNA, 219 bp, Setaria italica
  Peptide Sequence Number=SeqID_97441
tatgatgggttcgggtttatattgtgaaaacaagagtaatagagcaccagaatgccttagctaatcgattgacataagccagaacccccctggtgttgggaggcaacagatagattcatatttaactaggaaaacaatctcaaacagagttgatgacaaatcactatattttggcaaagttttgacacctagtacaaaacactcaatgaggtaatctta

SEQ ID NO: 31468 - DNA, 294 bp, Setaria italica
  Peptide Sequence Number=SeqID_97442
gggcggaggagggggcggccgcgggtcttccatggcgaggcttggggaatttggaattcgagaggtcacggcattagatcgagggagctagggttttgaggagctgggctgggggaggggagtggggagtggaggaggaggaggtgggctccggagttcgaagagggaggggggcacgaaaacgccctcggtttggtcgtggcggagggggtgggttgggggtcgcgcgcgccggatgcccggatgggatgagctaaccgccgtggatttctcgtcgccgttgctttggctcct

SEQ ID NO: 31469 - DNA, 838 bp, Setaria italica
  Peptide Sequence Number=SeqID_97443
acctccgtcggctccacgaggggaggtacctgccggggcccgacttctcgtccgcgccgcacgccgtctcacccgacgtcgtcaaggccgccgccgagcggttcgggcacgacaaccaggtcgtcgccaaatggctgtcagggagcgacttgaagaagttagccttgtttgggtgcccgactgttgaacgaagaacggtttttgcatcaaaaagattacgagctttcttcaacatccaggaagacaaaatatgcagctcctgtaaactgagaagttcttgcaagtttgctaaccaggaagtccttaggcataataaagtgattctgtcggatacaatgagaattattagtttgcttgtcttggatgcttgcccaaaggaactccaggttacagctgaattaaaagctagcatctgcaaggtgctaaaggacaccataaatctaagcagttaattgctgagaatcgggaacagagtttcgacagtttttctggtccttctaacacagtactgcctgcatttacttggagcaaatagttgaagctatgtttgatgtttcagtcacagtgacctctcaagctaagcagtgaaattcacacctatcagtcggactcgggcttctgaggagtgaagacaaagctaacatccagcaatctgggataagcatcaggattcatgctgattgatgcatagacaagctttgctgtactagcttgaatgcctcatgatgtataggaactctggtcgttgacagtgatggcaagatggaacaatttgatgacataatagttcattcccccttagggggtgtttggatacacctcctaaagtttagtaacc

SEQ ID NO: 31470 - DNA, 943 bp, Setaria italica
  Peptide Sequence Number=SeqID_97444
agtctgcatcagggcaaacagatgcttttgcaaaaccagactaaaaatcaggcaataacaaattaacacatggaccctaaacaccatgtccacaaagtcaacacagaattccctcctactagaatctaagatttacagcagagaaaagtgaatggaaattgtagcagcaacgatgccattcatccaagcaaagttgttcttcacccgaacgcagtgccgccaccaacaaaagggttccctctgcctgccactagaaaagttgaacgaacaagacgcccaaacccaagcagtgcgacgtaggggcgccatgatcacgcacaaaggtagagcgccatgagcgagcagaaggctaggatcaccagccgggcagcgactccggccaccgggaggacattggcgccgctgttgtcgttgagggccgacgggcccatgcccatcgtcggtgggctgtacacgccgggcgaaccgccgttgctagtcccagcagcgctcggggttgcaggataagtgcacccattgccgctcgggtcggtgcttacgagcgtggcggtgccggagaagacgcatgcctgcgcgttctggttgttgcgctggtagaagctgttgacggcgtaggagcagtgcgccctgacggtgtccggggcgaagcagggcccgttctgcaggatgggcttgcagtcggcgccgtcaccgcacgcgtagtccagcgtcttctgcagcgcgctgtcccccagttccgggcggcacacgcaccacgcgccgtctgagcggccggcgagcgcggcggccaccgccaccagaagcaggaagaggcgagccgcgtccgccatggagatggagcacgctgctgagtggctgtgggagggcggtgagctgcgacggcgggtgagcgagctcgatcgatctccgtcgcaccgcgcggcgtcccttctgcttgctacac

SEQ ID NO: 31471 - DNA, 318 bp, Setaria italica
  misc_feature (7)..(7): n is a, c, g, or t
  Peptide Sequence Number=SeqID_97445
tacgctncggggtgttccccacgaactgcgtggttatggggagctcgccgcggttcgacatgtacgggtgcgacttcgggtgggggaaggctctggcggctcgcagcggcatggccaacaagatggacgggaaggtgtcgctgtatcccgggcgggacggcggcttcgacgtggaggtgtcgatgttgccggagtacatggcggcgctggagcaggacgaggagttttgggccgccgtgtcgccggacgcagtgccgccgggcatgaaagagtgaagctttttaccactgtttacctcgttggctcgttgcctctttg

SEQ ID NO: 31472 - DNA, 304 bp, Setaria italica
  misc_feature (22)..(22): n is a, c, g, or t
  misc_feature (43)..(43): n is a, c, g, or t
  Peptide Sequence Number=SeqID_97446
gaggatggggagagagtcacanacggggaatgtgggaaggganaggggagcaagcacagcaaaaaggctgcaaaggccgaaaaggcaaaggcggccgaaaggggccaggcgaggcgagcaagcctcgtcgtctcccgtcgccgcgactgtgagcttgcgatcacggaacccctcctcctccggttcccgttcccgttgccatgtcaccgtcgtcaaccgcagcaactactcccctacccaagctaccctatcggctctgagtaggaggagggtacactgctgctcactgctcccatcgtcgtcg

SEQ ID NO: 31473 - DNA, 259 bp, Setaria italica
  Peptide Sequence Number=SeqID_97447
atcacacaacacatctggcgctagcaaaacaaacaatggcgtctgtggccaagccctccgttgttctcctcctcgccgtcgccctcgccgcggcctccgcggcggacgcgatcaccttcaacgtcatcaaccgctgccgggacacactgtggccggcggcgctcccgggcggcggcgcgcgcctggaccctggcaagacgtggacggtggaggtgccggcgggcacgtcgagcgcgcggatgtgggcgcgcacggggtg

SEQ ID NO: 31474 - DNA, 350 bp, Setaria italica
  Peptide Sequence Number=SeqID_97448
ctctcccacaaccgcttctccggcgttgtgccgccggagctcggccgcctgcccgccaccgtcacgctcgacctccgcttcaacaacctctccggggccatcccgcagacgggctccctcgccagccagggccccacggcattcctcaacaaccccggcctctgcgggttcccgctccaggtcccctgccgcgccgtcccgccgccaacgcagtcaccgacgccgccggcgacgacgaccccattaccttccaccgcgtccgatcaccaccagcccatcaagaccagcctgatcgcgctcatctccgtcgccgacgccgccggggtcgccctcgtcggcgtcatcctggt

SEQ ID NO: 31475 - DNA, 265 bp, Setaria italica
  Peptide Sequence Number=SeqID_97449
cgcttcattttgtcagggatgctttaattaatttccggcaacacgcaggtgaatatgcaatgttttatgaggcagcagtggaatttcgttattgcaaatgattgttccatggcttgtcgagtggtgaggcaactgcagcagcttaaataatacaaaggcatatcaacaaacgaataccaacagttacaactcaatgacaaccgccgcctcatcttacaaattttatattttcgcctccccacgtttacctttttagctttgcaac

SEQ ID NO: 31476 - DNA, 459 bp, Setaria italica
  Peptide Sequence Number=SeqID_97450
actctggagtgggatgggctggacgtcggccaccagccctccctctttgcgccacgccacccgacgtactacaagaagcgattgctgagaaccacggttctccggtgaaccggcctcacgtactttgctgcttgctcgcctgtccagatttcatggggggttttaggagagacgacagcggcaagctctgctttctgttgcgtgcttacctcgccgcgagggtccaactgtttgcctagccaagtcttcgatgtgtttcctcaagataacaattggcatccgatgctgcctatatccgccaaatttagtgtgttaatatgcttttttctatgttgattcgtatgcgtctctgacaaacgtctatatgtgtttggtcttgctttgctacgtgtgtacgctttgaaataagaggtctgatgggactatgttgtttgtgtgtgtatcagtccctggaacccc

SEQ ID NO: 31477 - DNA, 552 bp, Setaria italica
  Peptide Sequence Number=SeqID_97451
aatcacttttacttccgaagaacaatttccgtggtggatcccaaagaattcgtagggttatctgctctagaagtgctagatttgagcagcaacaacctggatggaacaattccagaggaactgagggcaatgccactgcttaagcaactatcacttcacgataaccagttccaagaaggtgtctcttctttcgccatccaagatatagctgatgatcaggcaggatgcttgagcagaaaactagggtgctggtcagactttaaggatttgatatctttcaatggcctccgagagaaatattacaccaatgtaccaagtttcagtgaggcacgcatcatgcagaatttgcagacatttgcaagtgccatgcgccgcaagcttctcagtgaagctgacaacctacctgctcttttagggaatgatgctaaatcttctgttccggaaaattaaaatgaaattcaaaacctgctgatgtgctttctctaggaagtggatcattccctgcatttccgaacacatatggccaaactctgacgcctttggttcccgaag

SEQ ID NO: 31478 - DNA, 436 bp, Setaria italica
  Peptide Sequence Number=SeqID_97452
ttccaagagagaacttagagcaagaagaagaggcattctttcgaccttttcttcaggtagtaagccatcagttgcaagcaaattatctagaaaggaaacaaaactatcacagctggcaagtgcctgcaggatgacattaagaaagcaattgttgccaagatttcgtagacctccaacatagtatactctccctgatcccaaaaataaattcctcggagaaaacccatggtatggacaaaccactatgcaatgccttgcacaagccagcaactcctagtcccaagccaacagcaacggctgcaagattgtagtgacgcctgtttacttcactatgagataccagtggactgtcatgcataaacttccccatgattgttcaccaacaacaacagaaggaacgaattaatccaggtccagatggatccacgcaacgcaa

SEQ ID NO: 31479 - DNA, 976 bp, Setaria italica
  Peptide Sequence Number=SeqID_97453
tgtggtgccagaacgccgggtcagacggcggaggaggagccccacggcggcgttggagcgcgagggacgaggtgccgtggccacattggcacgcggggcgactctacccctggggtagggtggccccagacgtgcaacggccttccgaagtgctgcatgggatgaggaggaggaggaggcggcggtggcggagggaagccgatggtcggcacggtccatgcgttggaatcgggtctcttcacggcggtggaggctcccccggcagcgtacatctgccgccgctgggtccagctcgctgcctccgcctctcttgcaagcatatgcttcctgtgagaccggtacttctgtaaatgacttgctatattatgccgcgtgagggagtcgatccccatgatctcgagtatcctggacggcactgccttgtcaatgcccagctgctctaccgcttgaacaaatctccggtgaagctccggtgtccaatccacctttgctttcttcttcccatgagagtgcttgctggacgacttgtgccggctctcagcctcctgcgatgacgatgtcgtcgaagacggcgacttctcctcagccaagactgttccaccgccgcccccaaagtcaccattcccgggtaccacctcctcagcatggttgcactctcctttcccttcttccacatccgcacgcgtcgtattgtcctcgccaagaacaacactgcatggatctagtgcatctaagtgaaccgcatctgttaagggctggacactgggcacctcctggtccatgacaccatcgctgccggtggcgatcgcctcaaagtcggtgaagatctcggcagggtcgacctcaaggtcaggcagcgcatctccgtcttctagcctgaggaagaagtccccgaagtctatgtcatcgaccgtgaagtcgaaatccaggtccgacacaggcccaatctctaccatctccatgccggcgcctaccg

SEQ ID NO: 31480 - DNA, 715 bp, Setaria italica
  Peptide Sequence Number=SeqID_97454
tgggagctgcaacacatgagaccaatctcctttgccagaacaattgcaacagtatcagacaccatccttccagcaagacaggtgatccctttcttatgcatccctgggagctgcaacacatgagaccaatctcctttgccagaaccaatcttccatgacatgatagcgccatcagcacttcctgagagtagatagtatgtctccctgccacgaacttggagcacatccttcttcgtgggaagccatagcgtgcagttcaccggcgccttgtgccccggaagcgtcgtcacgatctcacctctctcgggagagaagagggcgacggcgttctgggcgccaaaggccacgaggccgcaagctccccacgagacgttgttcaccacacggttgcagccggcccctatgaagaccctctgcacctccatgcccccgccctctccgcgggctccagcgagctctccggcagccggcgacatcacgagtaaaacccagctcccagcagcggagccgcaagtgaagcgcgcctagggctggaataaacggtaaacggccagggagtaatcaaactacaccgcccaacggagctggcgctggcgctagcccagctaggatgacgagcggcgcggggctggagagacgcgacggcggcggcagcggcgagcgggccggagacaagcgtgccgtggggggaggagggcgcggcggcgggtgctcg

SEQ ID NO: 31481 - DNA, 395 bp, Setaria italica
  Peptide Sequence Number=SeqID_97455
ctttgatctataccataaatattaccgcattaatatatcaatagagaggaactttatgacatttgagaagccaaaagttgagtcagtcaattgaacagaacattactattgttgttaataggtttggactttggagtcctatctactccatcacatatctgaaaattcaggatttctgagtcactatggtaattgtcttcagtaatgactgtcagtaaacctcagctttcaattcagtgatctgggtggtgtggttacacccttgggtgtagagtagtagttgttttaaatcaataactaaatgttgttgcataatactgctttgtaattttgttcccattgaattcatatgcaaactgaaggtacaactatactaatacaccctacaaccccca

SEQ ID NO: 31482 - DNA, 425 bp, Setaria italica
  Peptide Sequence Number=SeqID_97456
gtcggcaggcggcggacgcgacggtcttcgagttcgggtccgcggcggagtcaggggttgccgtcacgctcgcggggtactgccccgtctctgacgacctcgagccgtgccgctgggagctggtgccggccgccggggagggcgcgccgcagttccggatcgtgttctaagcgcgaggagagcacccccccgttctcggattgtaccaggttctataggtatgaaggtgtgggtgtggtcctagcggtgtactggtaaccatgcattcagtgaataaaacttgaggtacaattgatgaattgctgattagttttgaccaatcatggatgttcgtctgtgcttgatttgcttgctgaactgctgatgatttgatatcgttttaaggtgaactaatatagtatctacaggcaaacagtaacgtaaga

SEQ ID NO: 31483 - DNA, 390 bp, Setaria italica
  misc_feature (384)..(384): n is a, c, g, or t
  Peptide Sequence Number=SeqID_97457
ataattatctttgcagtttccgcaaccaaagaggcatgggatgattacaacaggtatatttcagacaaacaagcgaatgaaaaagaagtgtggattgttaagaatggtgcccggaaacatattcaagcccaagatatccgtgttggtaacatagtttggattcgagagaatgaagaagtaccatgtgatcttgttttgttgggaacatctgaaccacaaggcctctgtcatgttgagacagctgctcttgatggggaaactgatttgaagacaagagtaagtccaccaccgtgtgtagggctggagtttgaacagttgcacaaaataagggtgtgatcgagtgcccgataccagataaagacatacgaagatttgatgcaaacntccgcc

SEQ ID NO: 31484 - DNA, 670 bp, Setaria italica
  Peptide Sequence Number=SeqID_97458
ctgacgcctcgaagagggaggaggacgacgaggatgaggatgaggaggaggccgggggcaggcgggtggcggagatccttcagaggaggcagctagaggagagtggcaggaagcgatgggagctcgccgcaagggttttaccaccagagccccaggatggcttcaaggttattgtgaagcatcgacaacctgtaactgctgttgctttatccaaggataatgataaggggttttcagcatcaaaagatggagtcattgtgcattgggatgttgaaactggcaaaagtgagaagtatttatggccaagtgaaaatgtattgatttctcatcatgctaaaccacctctatcagctagaagaagtaagcatgtactagctttagctgtcagttcagatggtcgctacttggcaagtggtggtttggaccgtcatatccatttgtgggatgttcgttcacgggagcacatacaggcttttagtggtcatcgcgggccagtatcatgccttgcttttgggccggattcatcagagttattctctggttcctttgatcgttcaataatgcagtggaatgctgaagacagaacatacatgaactgcctatatggccatcagaatgaaatcttgcccatgtatgcataaagaggtaattagtactaattttaagttaa

SEQ ID NO: 31485 - DNA, 1999 bp, Setaria italica
  Peptide Sequence Number=SeqID_97459
gcagaccacaatctgaaaaatacttgaagacacacacacacacacacagagaatgggcggttcatccggccttgtggactggagaggacggcctgtgaacaccaagaagcatggaggagtgagagcttcaatcttcattcacgcgctggtgctgctcagcaacgcagccaacattgccaatatcttgaatcttgtcagctacctgcgcaatgagatgcacatggacgtcgcgagggcatcgacgatggcgagcaacttctttgctgcgctgcagatgttctccatcccagcagccttcctcgccgactcctacgtcaagcgcttctacaccgtcctcatctttggccctattgagattctgggttacatccttctggcggtccaagcacatgttccatcactgcaaccaccaccgtgcacccctggacaccaggcaaccacttgtgagtccgtccatggatcaaacctgagcttgcttctcctgggcctctacctgatccccatcggcgatggggcagcacgggcttgcctgccggctctcggcggggagcagttcgacacatctgatcccgtggagcagacgcaagaggcgagcttcttcaactggtacaccttcgcggtgtcgacgggtgggttcgtggggctcgtgttcgtggtttgggttgagaacagtaaaggttgggacattgggttcttcgtctgcgctatctgtgtgctcctgggaatgctgatatggattgccgggttcccgttctacaggaaccagctgccaacaggcagccccatcacaagactattgcaggttctcgtagcagcattccagaaacgaaaagttaagttaccagaaaacccgagtgaactaaagcaaataaacaaagatgaagccagtgccattgaaatgctacataaaaccgagggatttcattgccttgataaagctgcagtagacactggaaagactggtgcctggtctctctgcagcattactcaggtggaggagaccaagatcatccttcgaatggtgcccatcttcctcagtgccgtccttgggtatattccggtgcctctgatcctcaatttcaccgtgcagcagggaaacacaatggacaccaggcttggtgcaattcacatctcccctgcaacactctttgtcatccctaccgtattccagatggtgatcctcattgtttacgaccggtttatcgtccccttcctgcgaagaatcacaggctatgtgggaggtgtcacacacctccagcgcatcggcatcgggttcctttcagccacagtggccacaggcattgctgccctggtggagatcaagaggaaaaaggtggccgaagagaatggccttatggatgcaaccactgggattccaatatctgtcttctggctgacagtgcaattcttcctcctaggtattgtagacgtcacctcctttgtagggcttcttgagttcttctacagtgaggcgtccatggggatgaagtccattgggagctccatcttctactgcattcttggggtgtctgcttggctggggagcttgctgatacaattagctaaccgagttacaagacacagcgatggtacaggagggtggcttgatgggacaaaccttaacagggggaaacttgatcggttctatgggttgctagcagttctggagctagtgtcgctatttatctacatgttctttgcgaggaggtatgtttacaggaatgaccaaaaggttgtgattgatggagacaataagactgcatcagaaggtgccataaatgtgatctgagaacctgcaagtatttctagggcaacatggtgaaatgcttaatttacaagaactatggtcatgtgggggaatagaaggatatcatgcactcatccaaactgtgttagaaatatcaagctcggattgcctgtaaactacaactgcgatgctactaccaggttgtagagcactaatatggactgtacataaaataaatgaaataccaaaaaa

SEQ ID NO: 31486 - DNA, 402 bp, Setaria italica
  Peptide Sequence Number=SeqID_97460
tagtattgtttggtcttggtcttaactatttatttggttttggtattatttagaagatgaatcagtatcatcaaacatgtaggaaggtgattgttcatccattgttgatgaacatgccagtgaatccttgggatcaatgttgacagtcctattaaatgaatcaacatgacgtgtactgcttgggacatttgtaaatggcttgtatttgctgttatcagtgtctctacgcactgctgaatattttatctcttcatcatggtccaagtcatcacccaggaataagcccctttcctctgcaagatgaatatctttggtatcttctccctctatttctctagctattcttgaagcatgcttttctagctctctcatatgagggagaagataccaaagatattcatc

SEQ ID NO: 31487 - DNA, 1362 bp, Setaria italica
  Peptide Sequence Number=SeqID_97461
ctttttgagaatgtatgcagtcaaacttgctgtaaaaaataaattaaccagcaaaagtgtacagtagagactgcgccaaacacctaaacagtacttaatcagtgacattagtatgaaagttatttttaactaaggaaagatgtttctggagatttgaatccttgaccagaagacgagggttcgtatgcatgtgaacttgaaggtggcccatccaacccttcagaaataagcggtctgccaccaccagataaattattctcaggttgcaactttctgttatccaagttttcattactatctttgctcagcttcttgtccaacctgttttcatcaacagaaaagggcttattcgatgggtcatcagatgttggctggctaacattattggtttggatattagaagatgaatcagtatcatcaaacatgtaggaaggtgattgttcatccattgttgatgaacatgccagtgaatccttgggatcaatgttgacagtcctattaaatgaatcaacatgacgtgtactgcttgggacatttgtaaatggcttgtatttgctgttatcagtgtctctacgcactgctgaatattttatctcttcatcatggtccaagtcatcacccaggaataagcccctttcctctgcaagatgaatatctttggtatcttctccctctatttctctagctattcttgaagcatgcttttctagctctctcatatgaggacctctctcaagctttgtggtataaatttcttcattgaaagtactctttaccccaaacaaagctgcattggtttcaaactggtcccagctcctatttccctttctgtcatatttctccagttcgatacactctgaatctccttcatccggtgcccatcgctcaagttccctctcttcaagataatgagtgcgggaaatagcagaatcaatcaacaagtctttccttttgtcatggccaggaccttttggcagctcatcaccgccaagtgctacatccttggcgaaaacttgcacaagctcccttgctggtattatcatagtctcaggcttctttacaacatcagtagcatatctttgtcctctggcagaaccatcctttatgacctgagccatttttaagacaactccaaagtctttgtcagagtttgttgcgtggaaaattccagagattatagacccatttttcacatgcacgtccacatgatgcccaataagttgtgttagaacatagactagccgatccctcgaatggcttgcatgccctaagttgatgccattttctgcaccaccaagaccaccagatgatgacctcaccaaatttgtttatgtcatgccttccactactctccctgtccag

SEQ ID NO: 31488 - DNA, 1350 bp, Setaria italica
  Peptide Sequence Number=SeqID_97462
aacatgaacggccagcacgatgattatgcaagtatctgcaaggcaagtcccctgcagcagatcagagtccaaacgggcagatatctagtcagcagtttaatccccttcagctctgagaattcctttcaaatcttacattagaacaagctgaagtaaaggaacgcataaatattacaatggggcaaactcacgcatttatgaatgtcatttcagggtccaacagatgacccgcaatttaatttacaacaccaaaagtctgacaaaaataattatcctgcttcggagttgaacactggtaaggaacaatgatgagcttgttgtcaaagcaatccgagcagcacacaagttggtgtgagatcatcgccagttctttccattctaatagcggtttttgcctggttataatcccatcaggcgggatagctgcgactttcatccagcagcagttcaaaatagtatatttagaagtttcttcctctgtattgttgcatctcaggtgcataataataaacaggacgattctgtcccatcatcatctgctgcccatactgcggcccagcaggatgcatgtaaccctggggtggtgttccaggttgagtattatacatgacaggctggccaccatatgctggagggaaccccatgcccactggcaaaccaggtccaagtggtgccgccggcatgttgttaggatagtagtatgatgcatcggatgctggaggatgtggtggcctcagagatgctgacggagtaaagctcttggcattagggtttagcttgaattccttagcatttgggttcagagttgatttttctgaggtaagagatcctattgaagagcttggcgacaagccaggagcactcgcaactgagtttgcagcaatgcgctctgacgttgatgacgccgaactaccaggtctttgagaggaagtcacaggttccattgtggaaggatatttgacagataatgtcgaatccagtgtttctggagatttgaatccttgaccagaagacgagggttcgtatgcatgtgaacttgaaggtggcccatccaacccttcagaaataagcggtctgccaccaccagataaattattctcaggttgcaactttctgttatccaagttttcattactatctttgctcagcttcttgtccaacctgttttcatcaactatctttggtatcttctccctctatttctctagctattcttgaagcattgtctttttctagctctctcatatgaggacctctctcaagctttgtggtataaaacaatacccaagacaagacaagttactaaaataataactaattttagaaactagactagactaggaatagaaa

SEQ ID NO: 31489 - DNA, 327 bp, Setaria italica
  Peptide Sequence Number=SeqID_97463
gggggtagatggtgcaattattcattggattagcatcttgtagccttgattcatagtttcaaaggttgtacgggtagatggtttgcacccagataccgttccccatccatctacagtatgaaatatcaatttttctttttgatatatgtgaattatgatagacagtaactcctagctattgaatttggtaacaattaccgatctctgtgttgatcgagttgaagattataatttatattccctccgtcctaaattactattcattttatcttttataggtacatagcatttacaaatctagacataatatatacatagttatctagc

SEQ ID NO: 31490 - DNA, 543 bp, Setaria italica
  Peptide Sequence Number=SeqID_97464
caacacaaggggaatcggaatccggtcgcctcctcccctcccctacccctcccctcccaccaccaccaacccttcttcccctctttctctactgctccgccgccgccgccgccgcatcccctgctcttcctcctcccttctccgggctccggtagccaccagcagccagcaatcagctgcctttccctttcccctcccttacccgtgcggccgccggatcggctgcctagcctcaacaagtcccttcctgcgccggcggtttccgcccagatctgagctcctcgccccaacaaaggtccaaaggtcccgcctttccgatggcctcctcgcccacggccgcccccgcggcgtcctactggtgctaccagtgcgaccgcttcgtccgcgccacggcggagggcggcgacggcagctccccgcccgccgctgccgctgccgccgttgcctgcccctcctgcggcggcggcttcctcgaggagatgggcgcgcccccctccccgggccgcctacctccgccgcccgcgcgcgcaccaccaccaccac

SEQ ID NO: 31491 - DNA, 228 bp, Setaria italica
  misc_feature (218)..(218): n is a, c, g, or t
  Peptide Sequence Number=SeqID_97465
ggcatcccgtggcctcggcgtgctcgccggaatgcgccgccgagatcgacgggctgccgccgcgcgcgttggcggcgcgcgcgcagatatagacgcctaacccctgtaattttagctccattctcatctcgctttgtttaatttgctcctgcaggtttggtcggactgcaggttccatcctcccgttcgatccgcacaagcctccagcagcggaaatntggcagaagc

SEQ ID NO: 31492 - DNA, 1438 bp, Setaria italica
  Peptide Sequence Number=SeqID_97466
ttttttttttttttaaacggtaagaatgctgaaatgaggccagcttattatttcataaactgcgacttacaaaaaaattaaacaagacacagacacacacatcacatcgccgctacttggcttacaggccatgtgatggccagggggctcgtcaccctgtgcttcccgtcgctccacacgatcgacccgtccgtgtacttctcggtcacgttcgcccccaccaatggcataaaagtcaccgcatactcctgcgtccgctgccgtcggttgaacctcagaatccgtggcttcaccgtgacacgcacgccggccggcctggtgacggcgaccctgtacttggccctgacgttgctcccgacgttgcgcacgacgcggcgctgcgtgacctcgttcttggtggagttgacgaacaccaccgagaaggccgggtagttgaggtcgccggcggtggcccttctcgtcgaacagttcaccgccgggtcgcctttcgtcgtgaacttggcgatctgctcgtcggtgtaaccgatcgcgcagaggaaggacatgtagtcgtcagcgccggcgtcgtacacgaggcccgggtcggcggcgcggttggggtctacgtggccggccccgcgcacgaacggcgtggacgcctggccggtggacatatccctgatgatgtcgccggcgttatccacgttgtacgcggtggtcatcagcgcggacttgatcgcggcggggctccagtccgggtgcgcctgccggagcagcgcggcgatgccgctcacgtgcgggcacgacatggaggtgccggagatgatgttgaagtgcacacgcctcttgtcgctgtcgagctccgtgggtgagttcgcgccggtccaggctgcaaggatgtccactccaggggcggtgacgtccggtttgaggatcaccggcgcgcggaagttcgggccccggctcgagaaggacgccattcttggagaagaaggtttccggccgacgaccgtgccttggaacacgatcgtcgcgacgggggacgcgttcttcgtcctcatgtacttcttgatcttctcggcagcggcgaacgtgacggccgtcgcgggaaggatgtgcgggctggtgatgacctgctcaccgaacacttcgttgccgacgaggattgccccggctcctccggcaagtctcacaacttctcctttttctacccgaccgttcacgcccggatcgcacaccacgatcttcccggctaccaagctggcgttgagcttcccagcttcgcagacttccgagcccacgtccccgccatacactagcggtatcttggcttcactgagcggcgctccagcatagagtgaaaagccggtgaaggtctcgccgttgccgaggacgacggtcgccgggaaccggcggttgatggttgacgcaccgaccgtgaataaaaccatggcgcgat

SEQ ID NO: 31493 - DNA, 371 bp, Setaria italica
  Peptide Sequence Number=SeqID_97467
gaacagatcacactgcttggtgggtggcacgccgcgcggcgcgacgccaccagcaacgttagcttctgcgtgtggccgtgggcgcccgcgcgcggcatgacgaccgccaccgccatcgtcgccgggcacggcctcgccctgcgccggagcctcccgctccctaaccctccagggagacccacctcggtctccctctctgcgcggcccctcccgcacgcacgccgccgcacgattgttccggtcagcccatcgccgcggcggccgtgccggtgccggtccatctcctccgagagctccaccgccgcctccgccgcgtccgacaccgtcgaagaagaggcggagcccgctgagacctacgacgaggacgagga

SEQ ID NO: 31494 - DNA, 1229 bp, Setaria italica
  Peptide Sequence Number=SeqID_97468
gttggctagaataatacttcctgatgatggaaaagggtgggtagatgaggcctttgtcgatatgctccggggttacctggtcagctagtccttcagcagcagcaaggaccatatcgtctgtcacccggaccgcccctgagatcaccacacctagaccaaaccctgggaaaatgtatgcattgtttgcctgggcaggcacgaatagcttgtcattatacttcaccgggtcaaatgggcttccacttccaaatatcgcgcggccccgactccatgtataagcttgctcagcagtacattcagactgtgacgttgggtttgatagagcgaggatgataggtctctcattaatcgaagacatagcctcaatcacctcttttgtgaaactttgtcccacaccagctgatcctattagtgcagttggtctgatggccttgacagcgcctaggagatctttaacaggttcgtgctcatgtgcatatcgtttcttaaacggctgaagagtctcattacgtgaggtcacaatcaatccctttgaatcaacaagccagatctttttgcgtgcctcttctactgaaaccttcgcctgtccggatatctccagagcaactagctcagcaatgcctgtgccagcctcgcctgcaccaaagaacaggaatgtgtgatcggctagagtgccgccgacagacttcagagcagcaataagccctccaagtactaccgcagcagttccctggatatcgtcattaaatacaagatggttttccctgtacttctcaagaagcgtaaatgcattgtggttcgcaaagtcctcaaactggacaagaaccttctgtccatagttctgcctaactgctgtcatgaactcatccagaagttcagagtattcctggccagttgctcttctttgctttaacccaatgtagaactcatcctttagtagattttcattatttgttcctacatcaatggtaataggcaagcaagcagatggccggacacctccaagagcagtatacagtgcaagctttcccacaggaattcccatgccctggcagccgagatctcccaggcctaaaattctctcaccatcggtaacgacaataacttgaatactcttttctggccaattccttagtacctccaatattctccccttctctttgaggctgatgtatgaaccctggggtcttctgaagattgacccatacttctggcaagcctcccccacc

SEQ ID NO: 31495 - DNA, 797 bp, Setaria italica
  misc_feature (28)..(28): n is a, c, g, or t
  Peptide Sequence Number=SeqID_97469
cctttcggtcgagtctttctattttttntttttttttttttttttttacctaatttcatgtcgcatagctcaaaaaaatcatgtcacatacactcacatatgcttcgtaggaatacgttctacagccccgtgaactctattacacgactacatacatttacaaacgaacaagcagaatcgactcgtcaatagcgagctttaccacacattttacacgacgatcacagggaagcatagcggctcagcagtagatgccacagcaataggcatatgcgattcctcaggtggagttgtacagaattcgtccagtgtcaacaactcagtattgtcgcccttcatctgtaagatcggtagacaggggtgtacatgcagctctcggcgtacttcaccaggttctttgggcgagggagctggctagccaacccgagatcgtaggcttttgccgccacgcgggcggcgatgttggctgatatcttcctgatgatggaaaagggtgggtagatgaggcctttgtcgatatgctccggggttacctggtcagctagtccttcagcagcagcaaggaccatatcgtctgtcacccggaccgcccctgagatcaccacacctagaccaaaccctgggaaaatgtatgcattgtttgcctgggcaggcacgaatagcttgtcattatacttcaccgggtcaaatgggcttccacttccaaatatcgcgcggccccgactccatgtataagcttgctcagcagttactatttctagtacttgttgttacgttttgggtttttgttattagta

SEQ ID NO: 31496 - DNA, 241 bp, Setaria italica
  misc_feature (164)..(164): n is a, c, g, or t
  Peptide Sequence Number=SeqID_97470
cgagcccgtagtactgccccagcgtctggctgcacacgccggagttccgatgccggatcatcttggagcggttccgcgcctcgccggcggcgccgtccgttgggggcgtagtagggctccacgagccagtggtggaggtaggtctcgtggagcgggacgggacnccgtggtcgtcgacgacctcggcgttgaagctcttgagcgcgaggtggccggcgggggaagcgatgtcgtggtacca

SEQ ID NO: 31497 - DNA, 184 bp, Setaria italica
  Peptide Sequence Number=SeqID_97471
agctagaataatgctccaacgtgtcatctgcctgacggtccatcaagacagctagaataatgctccaacgtgtcatctgcctgatagttttttctcttactcctttggccataacactcttaattatactcttcagttataagacgctatactaaattcttctcacaggttgctcgacagccat

SEQ ID NO: 31498 - DNA, 445 bp, Setaria italica
  Peptide Sequence Number=SeqID_97472
tgccgacgatgtagtccgcctcgttcccggcctcctggccatcgccgtaggttgccgtcgattcgcacagcagccggccgtcctcgccgtgcagagaagcggcgatgccacccgaatgcaggtgcgcgacgccgaacacgatgtcgcctccccgcggcaggatctgcttggccacctgaacatggacgcagtcgttcttggcccggttctctgagctgcattcctcgaccaggtactcaacctgcacaaacagacgtctcgccaaaatcataaaccatctcgagtctgatcgcacatttctcgatcaacatctgaaacaggtcggcatatgaagcttttagtccttgctgcatatgcattaccctgcaagcagtctcggttttcccctcgagcagagctctgtcagtgacatcgaagatgtagatcttcaccggcaagaccgcgt

SEQ ID NO: 31499 - DNA, 1175 bp, Setaria italica
  Peptide Sequence Number=SeqID_97473
ttttttttgtacgtgaaaatgttggtggtatgcatatgtaatcacaatattttttttactaatagattgtacatctacttacagtaactcaagtaatccgtgtaggagttattccctataacagttcttttgctactgatactgcaaaacccaccctaacacaagtatgcgggcccttcaagaaactgactgactgatggtccatcaagacagctagaataatgctccaccgtgtcatttgtctgattagttttttctcttgctcctttggccataacactcttaattatactcttgtcagttataagaccctatactaaattcttctcataggttgctcgacagccatgacggcaggcaccatgagactgggaagctgaagcacaggccgggcttgccggcggcggccggcagctgctgcggatgcggctgcccgtgctcggcgacgaggatgtagacgaggcccatcactccggtgtgctgctggtggctgctgtatttggacaccacggtcaggacctcgccgtcgcgcaccgtcacggcgcccggcttcgggtagcacgtcgacatgccgacgatgtagtccgcctcgttcccggcctcctggccatcgccgtaggttgccgtcgattcgcacagcagccggccgtcctgcgtgacagagtccagtgcatgcagttcatcagcatccaggctagcaactaactgtttcagatccattgttcgttacttgctacttggattgtgcaaagtttcagacgatgataaatactgagctctgcagcagagaaatgcaaagagatcgatcgaattcgtggtggcagctacctcgccgtgcagagaagcggcgatgccacccgaatgcaggtgcgcgacgccgaacacgatgtcgcctccccgcggcaggatctgcttggccacctgaacatggacgcagtcgttcttggcccggttctctgagctgcactcctcgaccacgtactcaacctgcacaaacagacgtctcgccaaaatcataaaccatctcgagtctgatcgcacgtttctcgatcgacatctgaaacatgtcggcatatgaagcttttagtccttgctgcattagttattgtctatttacccttgttcttaagttcttagttttcttttcggttttttcccctcgagcaagagctctt

SEQ ID NO: 31500 - DNA, 881 bp, Setaria italica
  Peptide Sequence Number=SeqID_97474
ccgtactcaaccttgcaacccacaggcagaggtctatgagtggcatcgaagatgtaaatcttgaccggcacgacggcatcgctccagtcgagccacgtcacggtgtaccggaagaacagcttcctcgcctcgccgtcgacgaacccttcctccaccctgcaccgagtctggtcgtagcagcagagcagcccgccggcgtagtcgtcggcgatgcggcggccgtgctcgtccaccgtcacgttgtacaggtcgcacctgcactccgtgcaccccatcctgtcggcggcgccgcgcgtgtctatggcgtgcacgttgagcatccaccgctcctcgtacccctccggcggcgccgccgggtcgccggcctcgacgccgtacgggtcgggcacccacgtcgcggtgcgccgggtctcggaccccagcccgtagtactgcccgtgcgtgtcgccctcgcacacgccggagttcctcgccgggagcgtcgccgggcggcccgcggcggtggcgttcgtggcggcgtagtacgggtgcacgacccagtggtggaggtaggcctcgtggagcgggacgggggcgccgcggtcgtcgacgacctcgccgttgaagctcttgagcgcgacgtggccccgggggaaggcgatgtcgtggtagtacttgttggcgacggcgccggggcggaggaagaagggcggggacaggaccgtcatggatttcagccgccggtggcctctcacgtcgagcgctgcctctgcagacggaagctcggcgatgatggcggatgagagtgcgacgatgagcagcacaaggagccaccgccaccgccattttcatctttgtcaccaatcaacacctgaaaaggaggcgccaaaagctgcggtaac

SEQ ID NO: 31501 - DNA, 1704 bp, Setaria italica
  Peptide Sequence Number=SeqID_97475
ttttttttttttgaaactcgaactatcttgtgtggtttgttaaaaaaaaaatatatgctggggtatacatgtgtaatcacaatattttttttacaatagattgtacatctggttctcacttacagtaactcaagtaatccgtataggagttattctgtataacagttcttttgctactgatactgcaaaatccacctcaacacaagtatgcaggcccttcaagagactgactgactgacggtccatcaagacagctagaataatgctccaacgtgtcatctgcctgatagttttttctcttactcctttggccataacactcttaattatactcttcagttataagacgctatactaaattcttctcacaggttgctcgacagccatgatggcaggcaccatgagactgggaagctgaagcacaggcccggcttgccggcggcggccggcagctgctgctgctgcggctgcccgtgctcggcgacgaggatgtagaattggcccatcgctccggtgtgctgctggtggctgctgtagttggacaccacggtcaggaccctcgccgtcgcgcaccgtcacggcgcccggcttcgggtagcacgtcgacatgccgacgacgtagcccgcctcgttcccggcctcctggccatcgccgtaggttgccgtcgattcgcacagcagccggccgtcctcgccgtgcagagaagcggcgatgccacccgaatgcaggtgcgcgacgccgaacacgatgtcgcctccccgcggcaggatctgcttggccatctgaacatggacgcagtcgttcttggcccggttctctgagctgcactcctcgaccacgtactcaaccctgcaagcagtctcggttttcccctcgagcagagctctgtcagtggcatcgaagatgtagatcttcaccggcaagaccgcgtcgctccagtcttgccacacgacggtgtaccgcaggaataccttcctcgcctcgacatcgacgaacccttcctcgaccatgcaccgggtctcatcgtagcagcagagcagcccgccgacgtagtcgtcggcgacggggcggccggactcgtccaccgtcaggttgtacaggtcgcacctgcactcggtgcatccgagcttgtcgacggcgccgcgcgtgtcgatggcgtgcacgttgacccgcaacctctcctcgtacccctccggcgccgccgccgggtcgccgatctcgatgccgtaggggtcaggcacccacgtcgccgtgtgccgggtctcggacccgagcccgtagtactgcggcagcgtcttgctgcacacgccggagttccgatgctggatcatcttggagcggttccgcgcctcgccggcggcgtcgtccttgagggcgtagtagggctccacgacccagtggtggaggtaggtctcgtggagcgggacggggacgccgtggtcgtcgacgacctcggcgttgaagctcttgagcgcgatgtggccgcggggaaaggcgacgtcgtggtaccacttgttagagacggagccggggcgcaggaagatgggcggcgacaggaacgtctgggacttgagcagctggcctcgcacgttgagcgcctccgatggaagtgcggcggctgcagataggagagtgacgatcagccgaacgaacgcagacatcttcatcttgtcagcccagcgctactaccagctgaaggcagc

SEQ ID NO: 31502 - DNA, 1534 bp, Setaria italica
  Peptide Sequence Number=SeqID_97476
gtgtcatttgtctgatagttttttctcttgctcctttggccataacactcttaattatactcttgtcagttataagaccctatactaaattcttctcataggttgctcgacagccatgacggcaggcaccatgagactgggaagctgaagcacaggccgggcttgccggcggcggccggcagctgctgcggctgcggctgcccgtgctcggcgacgaggatgtagacgaggcccatcactccggtgtgctgctggtggctgctgtatttggacaccacggtcaggacctcgccgtcgcgcaccgtcacggcgcccggcttcgggtagcacgtcgacatgccgacgatgtagtccgcctcgttcccggcctcctggccatcgccgtaggttgccgtcgattcgcacagcagccggccgtcctcgccgtgcagagaagcggcgatgccacccgaatgcaggtgcgcgacgccgaacacgatgtcgcctccccgcggcaggatctgcttggccacctgaacatggacgcagtcgttcttggcccggttctctgagctgcattcctcgaccaggtactcaaccctgcaagcagtctcggttttcccctcgagcagagctctgtcagtgacatcgaagatgtagatcttcaccggcaagaccgcgtcgctccagtcttgccacaccacggtgtaccgcaggaataccttcctcgcctcgacatcgacgaacccttcctcgaccttgcaccgggtctcatcgtagcagcagagcagcccgccggcgtagtcgtcggcgatgcggcggccgaactcgtccaccgtcaggttgtacaggtcgcacctgcactcggtgcatccgagccttgtcgacggcgccgcgcgtgtcgatggcgtgcacgttgaccagccacctctcctcgtacccctccggcgccgccgccgggtcgccgatctcgatgccgtaggggtcaggcacccacgtcgccgtgtgccgggtctcggacccgagcccgtagtactgccccagcgtctggctgcacacgccggagttccgatgccggatcatcttggagcggttccgcgcctcgccggcggcgccgtccgttgggggcgtagtagggctccacgagccagtggtggaggtaggtctcgtggagcgggacggggacgccgtggtcgtcgacgacctcggcgttgaagctcttgagcgcgaggtggccgcgggggaaggcgatgtcgtggtaccacttgttggagacggagccggggcggcaggaagatgggcggcgacaggaacgtctgggacttgagcagctggcctcgcacgctgagcgcctccgatggaagtgtggcggctgcagatatgagagtgacgagcagcggaaggaacgcagacatcttcatcttgtcacccctgcgctactacccctagcgaggacatggggaaggaagggggggaaggcggaggtgcaaccgacgagctagctgcagggaggaagaggacgacggagcagagcgtaccaggctgaaggcagccg

SEQ ID NO: 31503 - DNA, 264 bp, Setaria italica
  Peptide Sequence Number=SeqID_97477
aaaccgaagctgctacggctaggacagcgagaacgcgtgccgctgatcgaactcaaagccaccgagcaagcgacgaggtctcctgcaccggcgccaaggcgatcgagctccccacaaataatggcggcgccctacaacgacggagctccggcccaggcgccgaccccggtggcggtggtgtccccgccgcagttctgcgcgccgtacgcggtgccgctgacggtggtcaagaaggccatcagcctctccggccgggcttcgtcg

SEQ ID NO: 31504 - DNA, 449 bp, Setaria italica
  Peptide Sequence Number=SeqID_97478
gctgccggacggcctgtccttcaccgcctacacctacgccggcgagctcccaagctgtgccttcggcttcaacagcaacggcgtggccttcacgctcgattcggttcctccagtgaacgacgaaatcgtcgccggcgccattgcccggttcttcgtgccacgggacctgctagaggcgaagaacctcgacgatgcgatgcacgtacgcaactgcctgcaactgcaactgaactaacgccgccacgtcactgcatgatctttgtcagtaaagccattgatgccattctacacacatatgttatccttggaacagaggatctgctcaccgagcgtctcagtcggccatagctacaacctgatgaacgtcagaggccggaggatcgtcaacgtcgagaccgcctccaggaacaggtccgccgtcctcgaggccggcgccgcgcccttcttcc

SEQ ID NO: 31505 - DNA, 692 bp, Setaria italica
  Peptide Sequence Number=SeqID_97479
tcttcgtagtcgttgttcgtcatcactaggcgcgctaagcaacatgggcgccggcggcgagctggacgtcttcaacgccggcctctgcgccgacgggtacgcgctcggcctcgccgtgggtcggcggttcgcggacgccatcgggagcaggatgcggcaggacctggtgctccgggagcagctgctgccgttcgcgtcgacggcggaggcgcggcgactcctcgccgccctccaggccgccaacagcgagaggtacccgcgctactgggacgagctggtgggcacggccgacggcagcggggtcccgctcctccatgtcatcctggtcaacttcaggaaggagatcctgccgttcgtcccgaaggccggcggtgatcacgaccgggagaaggaagaggaggagcccgacggcgactgctccgacgtcctcctcgtcagtgactccacggcgatcgccgcgcacaacgaggacggcaacgtcgcgctgctcggccacacgtacctcgtgcgggccacgctgccggacggcctgtccttcaccgcctacacctacgccggcgagctcccaagctgtgccttcggcttcaacagcaacggcgtggtaagcgaccatcacagtcgcatgccatagctattgcattctgaattttcatttccactgtcagaactcagaagccaaaccaaaataaggg

SEQ ID NO: 31506 - DNA, 424 bp, Setaria italica
  Peptide Sequence Number=SeqID_97480
cttcaccacctctggagtcttatccttgaccacaggctcgaccttctgcttgccgaacaccgagctgcacttctgggagaagtagttcttgacgcagatccagtgcttatgcgcgggcatcgccttgaactggttgaagtagtccttggcgctctccaggaacgtcgcctcctccccaccgtcttcttgtagcacttctcccgcgcctcgggctccttctccggcgccgtcagggtcggcgtcgcggtcagggtcggcgtcgcctcctccggcgctgccaccgcctcctcgttcacgccgacctccttctccatcgcgaccccaacagcaagcgaaggcactcggacggaaggacggaaaccccgaggagaggagatggagaggctagtggtggatggaggaacagagccaagaggatgggaag

SEQ ID NO: 31507 - DNA, 465 bp, Setaria italica
  Peptide Sequence Number=SeqID_97481
ttttttagttgtctaaattgagctcagtaaccattccattccaggcagattaaggttcacattctaagaacttgatgcagaaacacatagttttcatgacgagttactggaccaacgatgcccacaccactacttcgaacagctagcaagacatactatgatactagtttctaaggagaccaacaaagtctcaagttttcaccaccgtagaacacctccaagatcatttacatttgttttcccaaagacgatcagaaccccttcagtgagtctcaactgctgccggcttcaccacctctggagtcttatccttgaccacaggctcgaccttctgcttgccgaacacctgcaacctgttctgggagaagttagtttctttgttacgtcttagtttttatttttttaccagtgcttctgcgcgggcatcgccttgaactggttgaagttagttcctttggcgctctc

SEQ ID NO: 31508 - DNA, 500 bp, Setaria italica
  Peptide Sequence Number=SeqID_97482
cgcggggcccgagagggtgaggtggaggccgaaggggccgggcgcgggggagttccggtacgacgcgctgagctacgcgctcaacttcgacgagggcggcggcgacgatgacgaagcgtgcgccgccgaccccgccgcggccttccggtaccggaacttcaacgcgcgcctgccgccctcgccggccgccgccgccgcgcggacccaccagcgggccacggccatcgccatcgcgtaggaggactaatcgaagatcgctgctctgtgaccttttttggggggtttcctcttgtaattgaaattgtatgatccggtgagagctctgtgcagcgagatacttcagtgatgaattgtggtatactagtaatagtaatagtagcatcaacgaatgctccaatgcgacgggtttccactttccactactgatgaaccctagaaattgggggctttgattcgccgacaacatacaaagaaaagtttccccttttggcttctgttaa

SEQ ID NO: 31509 - DNA, 779 bp, Setaria italica
  Peptide Sequence Number=SeqID_97483
tagctgtaatgaaagaataagggaatgaaccaaccccgctctgttcttgtgatccgacccagcctacactaaaaacagccatagggccttcagctccacaagaaaccacagctaataatggcctactacattaaccacgagcaccatacaatccacagcatgaaacccaaaacccaagagcactactacacttccccctcgggtcctgtcgggtcggtctcttttcagtcgtcctggtcctggcacagctccttcctgagccgctgcgagaagagcttgcaggcgtccatgcagagatcgacggccgcggacagcgcgacgaacaccgcaacgtcgcccatgcacgtcacgcgctgcacgccgacctgcacggtgggccggctcgcccgcccctcgccctccaccgtggagcccatgacgaagccgccggcgaacggccacgcggcgccggcggtggcctccgggaatgtggccgggtcgatgacgaactgcccgccgcgcttggtgctgatggaggactcggcgatggggacggcgcactcgtgggggcccgagtcgaagaccaactcgaggcggtacccgagcgcgtcgacgggcccgcgctcgcgccacgcctcgaggcgcgcccagggcttccagcttgacggcccggcgcccgtggcctggaggatgagccaggagcccgggttggcgcgggagacgcggccggagcccggggacggcacgaacggggtcaccatcgacgccgccgccacgggggagcccgacaggtcgtggat

SEQ ID NO: 31510 - DNA, 369 bp, Setaria italica
  Peptide Sequence Number=SeqID_97484
gcccatagcaagcgcacccaccaccaatctcccagcccaaagcaaacaccacctcggtctctctcgtctcctcgtttgcccatggcgaccctccaccagaacggcggcgcccgtgccgccgaggacgtcaacggcaacggcaacgggcacgcggcggcgccggcggcggagtggcagttcgcgcgggcggtgaaggatggcgcgctggcggcggcgggggaccggatgagcatccgcgcggtgcggttcaagatcagcgccagcgtggacgcgcgcgacccgcggcccgtgctgccgctcgctcacggggacccctccacgttcccggcgttccgcacggccgccgaggccgaggccgccgtcgccgcc

SEQ ID NO: 31511 - DNA, 484 bp, Setaria italica
  Peptide Sequence Number=SeqID_97485
gaactgttcatccgaaaggtagatgatgagccagtgaactccatggccagtgctgccaccgtccttgccaacattgttgattcaggcatcgatccagataccacggtggtgaacaaggaaggtcatgttctcacttcgaagtactccatctacaactttgtacacatgctcaagtgcttcatgccagatgacctcaacctcagcatcatccgagtcctgctagtgctcactgagctcaccaagccactggccacagtggtctcagtcatcagggagaaccaccgcagccatgccatcgtcgagctcatgagctccccaatggaggccctcagcctcgctgcgacaaggctgctgatcaccctgtccccacacattggtcacaccatcgtcgagaggctttgcaagacgcaagggcagccacgcaagcttgtcaaaagcatcagccataccgggcgcatcactgaacggcaagctgcattggcaa

SEQ ID NO: 31512 - DNA, 359 bp, Setaria italica
  Peptide Sequence Number=SeqID_97486
ctgggcatggattgggggtttagctgaacccttcaaattcttgagaaagaaagtgcaaccgcaccacgggaaggttgatcttgtgcgatgataaggaccaacaaacgaggagatcgatccaggtgcggccgggtggatctgcgctccacgccagacacaaggtagcagcagaaggcggcaccgacaccccggccaagaaaaggaaaggaggaagacaactaggcctggttgccgcgtccctcgccggcgacgacgatgcggagcgggcggcggcggcggcggtggcggagaggaaacagggaagggaacccttcctctgggttcttggtgcggcggtcaattttgttgctttctggttt

SEQ ID NO: 31513 - DNA, 462 bp, Setaria italica
  Peptide Sequence Number=SeqID_97487
ggcgtggtgcttcagcgacccggagatgaagaggcggcggcgggtggcgagctacaaggcctactcggtggagggcaaggtcaaggcgtcgctccgcagggggttccgctggatcaaggccaagtgctccgagctcatccatggctgagcccgggatctcgttgtaattctattgggatggtggaaagatgctgcaacaaagtgcaaggggatgggtgttggcctgggtgtattttgctaattcgctcccaaatgcggaagaagatttgttcgtgagattgtgtagggaactcattcatgctgcccctggttaaaagtggttataggaaagaattcaaatgagctctcctgagactgcttgttattgcctgctaattagccccctaatttgttcaaaatgtttgaagacctgaatcctgaaaaaaaaaaatcctctgcatgacatgatactagtacagtaga

SEQ ID NO: 31514 - DNA, 247 bp, Setaria italica
  Peptide Sequence Number=SeqID_97488
gccctgcttgtgggcatctacgtcgacgatttggtgatcacgggcaccaaggacgaggaggggaggcattcaaggaggagatgaaggctgccttccaaatgagcaacctggggcctctctccttctacctggggatcgaggtgcaccaggacgactccgacatcacacttcgaaagaccacctacaccaagcgcatcattgagctgggtgggctcactgactgcaacccttgtggtacaccaaccga

SEQ ID NO: 31515 - DNA, 357 bp, Setaria italica
  Peptide Sequence Number=SeqID_97489
aagatggcggcggcgaaaacaacggtgaagcggcggccgatccagtcggacgtccggccggccgcgaaggaccctatgagcgagtagacgttcagaatccccatgagtatctccagctgcacgtccgtgatcttcaggtccttcttgatgtacagtgccgctccgctcatcaccccaatgtcatagccaaggatgatggaggccatggaggcgaggatggcgcagaaggaggcatacttaacgttgctcttcttcttgggctcgacggcctcttcgagcttggcggaagccatcgttaacggctactccttggatctctgtttagaatggtcaagaattgaggttgttcctaagtta

SEQ ID NO: 31516 - DNA, 536 bp, Setaria italica
  Peptide Sequence Number=SeqID_97490
ttccacaatcaaaggtccttgggctttgatatatatactggcagatggactcaaacacgatttggtttagccgggatgcatttggaaggagaagcctattggtacattggcccacatctgatgaccctcgctttgtattatcatcagtagcacctccttcatttgcaacaaataactctgatgcaacagtaaatgattttgtgtcagatcctgacatgtctgactgtaccaaagctagctactgggaagagcttccttgtgggatatacagcatccacatgaaaggcattggaaaagatggcacatgtgtgaaggaaggatggattgtcgaagttaacacacatgactggatggattcttcattgaataaattaattcaatgggagaggaaactgacagttcctaccgtagagaacaattctgttaatggagggaaccatcacttgtctcagaacttcataagctcaggaaaatctgaaagaaaataaataaaaatgggctctcgaagatagatctcctttcagattctagcttat

SEQ ID NO: 31517 - DNA, 447 bp, Setaria italica
  Peptide Sequence Number=SeqID_97491
acatagcagttctctagaacttggaattttctatgtcttctctaaattgagaaagtaatggtgtcataacaccatggtcaaaagaatgtctctgcagctaggcaagtccgcagctatatttccaagacaccatatagcctgatgcctgatgttcgcatttggtgactccaagagttccaccaaccttggaacagcaccacattctgcaaccagcagtgtataatcagatgcagctatgttggtaagcacccaggccgcctccagctggagctgaggaagcccatgtcttgaaagaaactcagcaaatctgggcaggacatccgctctaatgatttttatcacagttgaattcttcccatctgaaagaagtttcctgaactggactgtggcttcaagctgactggtgctatcatctgaacatactttgtcgaccaattctgacaggcc

SEQ ID NO: 31518 - DNA, 286 bp, Setaria italica
  Peptide Sequence Number=SeqID_97492
taataatgattgtaactagttgtttaatctgatggaatcattctctgttttatctccaagaggtacctgaagtacttgaccaagaagtacctgaagaagcacaacgtgcgtgactggctccgggtcatcgcgtcgaacaaagaccgcagtgtctatgagctccggtacttcaacatcgctgagaatgagggtgaggaggaggattaggcgcactaccttatctatgtcttgtgaacttatggctgagacacgcaacagaggataggcaaggcacacaggggatagg

SEQ ID NO: 31519 - DNA, 298 bp, Setaria italica
  Peptide Sequence Number=SeqID_97493
actcgcggcgcagccaccaccaccaccggagcagcagcggcgcacgcggcgagcggagaggcggaggaagaggcgatggcgcgcggcgtggcggcgggggcgaagggaggcgcggccggcggcaagaagaagggcgccgttaccttcacgatcgactgcaccaagcccgtggaggacaagatcatggagatcgccacgctcgagaagttcctccaggagcgcatcaaggtcgccggcggcaaggctggcaacctcggcgagggtgtcaccgtcacccgcgacaagaccaaggtcaccg

SEQ ID NO: 31520 - DNA, 303 bp, Setaria italica
  Peptide Sequence Number=SeqID_97494
agataaggtagtgcgcctaatctatgtcttgtgaacttatggacagtgttggaacagtcttgctgtagcctttgaagggatgagttttgatgtttaaattgctcttctgatctgttttaagcgtggtggaacttccaatgtgattcttggactcgattatctaagcatcacattggaagttccaccacgcttaaaacagatcagaagacatagataaggtagtgcgcctaatcctcctcctcaccctcattctcagcgatgttgaagtaccggagctcatagacactgcggtctttgttcgac

SEQ ID NO: 31521 - DNA, 660 bp, Setaria italica
  Peptide Sequence Number=SeqID_97495
tatcccctgtgtgcctttcgggaaaaccctagccgccacacctcacgacccacccgagcaccagccgagcggaggagagatggcgcgcggcgtggtggcggcgaagggcggcgcggccgcggggaagaagaaggggtcggtcaccttcacgatcgactgcaccaagcccgtggaggacaagatcatggagatcgcctcgctcgagaagttcctgcaggagcgcatcaaggtcgccggcggcaaggccgggagccttggcgactccgtcaccgtctcccgcgagaagaccaaggtcaccgtcacctccgacggccccttctccaagaggtacctgaagtacttgaccaagaagtacttgaagaagcacaatgtgcgggactggctacgcgtgattgcggccaacaaggaccgcaccgtgtatgagctccggtacttcaacattgccgagaatgagggcgaggaggaagattagagtgcattccacttatatcttagttttgagcttgttgaattttgatacttgtacccggtagtcatttgcacctatcttcccatgttatgctgtggtgaattttggatggttaatttgaagaatccttacatttgatcgcctcaataaaaaaacctactttgtgtctgaacaaaaaaaaaaaaaaaaaa

SEQ ID NO: 31522 - DNA, 1068 bp, Setaria italica
  misc_feature (1047)..(1068): n is a, c, g, or t
  Peptide Sequence Number=SeqID_97496
cccaaataacagattcagcagcccccgagccccagcccttggaaacccttccatcgcctctcctccgcgccgccacttcccctctccagcgagctccccacggtttcgcgcgagatctagctagggttcgggttctcgacaccggcggcgatggcgaccgagcaagcggcggagaactacacggtggaggacctcgtggcccttaacccctacaaccccgacatcctcaacgacctcgagaagtttgtcaacgagcaggtctcgtctcaaacatacaacttggatgcaaacctgagcctccttcgcctgtaccagtttgagccagaaaggatgagcatacagattgtagcccgcatattgattaaggctctcatggcaatgccagcccctgacttcagtctgtgcttattcttaatccctgaacatgtgcaaatggaggaacagttcaagacattgatagttctttctcactacctggagactgctagattccgtcagttttgggatgaagcagcaaaaaaccgccacatattggaagttgttccaggttttgagcaggcaatccaatcctatgcgattcatgtgctttccttgacataccagaaagttccgaggcctgttcttgcagaggctatcaacattgaaggtcttgctttggacaagtttctggagtaccatgccgcaaacgcaggttgggtgattgagaagggtggacagtctcaagtgattgttcttccgcgcaatgagttcaatcaccccgagctcaagaagaacacagctgatactgttccatttgagcatgtgacacgcatattccccgtccttagctgattcaggcgtactgagagatttatatataactcagagcgagtgaagtttctctaagcaattgtatctcctgttttgtggtgtatcgcattttgagaaatcttgatatacctgtttttggctgaattagtacttgcaactgatggtgcctaccctactacattactctaatgaaatgctcagttatgttaaaaaaaaataaaaaaaaaaaaaaactannnnnnnnnnnnnnnnnnnnnn

SEQ ID NO: 31523 - DNA, 243 bp, Setaria italica
  misc_feature (241)..(241): n is a, c, g, or t
  Peptide Sequence Number=SeqID_97497
tgccttctaagtgctgtattgatctggcgaagttgattattcagccgcttcaattcttcctttcttcggcgtgctaacaatccaccaacagcagctccaattagagccacagcaatgaaaattggcatattggcaaaagaattaggtggttggcacgtctcggctaacgcctcaagtggtacagcaaataatggggtcgaaagtagagcagctttcagaaggtcggtgcaagccattttcnga

SEQ ID NO: 31524 - DNA, 378 bp, Setaria italica
  misc_feature (333)..(378): n is a, c, g, or t
  Peptide Sequence Number=SeqID_97498
gttctcaccaacggcgcctacggcagcgtcgagcacagggtggtcccggacgccgagaggggtcgcaccaccgtggcgacgttccacgacgcgtgtgtccgagggcaggtggcgccgctgccggagctactcggggtaggaggcggagaggtggcggcacgctacaggtccatcgggaaacttgagttcaggaagggcagcgccagagccactgcccaagggactcggttcctggacaccatcaggatgtaaacaaccgcagctactttacttggattgttgccactgtccaagctgaattggaacagagtttgccaagaattgtaataaacnnnnnnnnnnnnnnnnnnnnnnnnnnnnnnnnnnnnnnnnnnnnnn

SEQ ID NO: 31525 - DNA, 370 bp, Setaria italica
  Peptide Sequence Number=SeqID_97499
ttaattattccagtaactccaataaagaaaatgaagaatgtcaatgttctttatagaaatccataaaaaacaatctaatgatagatggtgcacataatgtacagatgatggagatacgtgaagctgtcaatgatgtcagtgattctcaaaccctggagaagatccaatctcaggttaagaaaaagctcgaaacctggtctggttccttccaggaagcatttgaccaaaaggattttgaccgtgctatagaagctacacagaggatgaggtactatgaacgtgcagtggaagaaacagtgaagaagctctgatctccaattacaattgtcaaaggagggagcttggaaatttttccttacatttccttttc

SEQ ID NO: 31526 - DNA, 908 bp, Setaria italica
  Peptide Sequence Number=SeqID_97500
actttaccggggtttaccccattggggcgccctctggctctcggtgcctgtcgaaccaggcgggcggaggagggggcggcggcgcgtgctggagctgcggcgcgacgggagcgttcctgtcgtgcgggtcctgtgggagcgtgcagcccgtcgaccccgccgtcgactacttccaaatctttggcctagaaagagaatacaacataaaagataataacttggaacggaggtacaaggagtggcagaagaagttacatcctgacctggttcattccaaatctgagaaagagagaggctatgccgcggagcaatcagcacttgtgattgatgcgtaccgcacacttagcaaccctttatcaagggcattatacttgttaaaacttgagggagtacatgttgatgaagaaaaaactatcaatgacccagaacttcttatggagatgatggagatacgtgaagctgtcaatgatgtcagtgattctcaaaccctggagaagatccaatctcaggttaagaaaaagctcgaaacctggtctggttccttccaggaagcatttgaccaaaggattttgaccgtgctatagaagctacacagaggatgaggtactatgaacgtgcagtggaagaaacagtgaagaagctctgatctccaattacaattgtcaaagaggggaggcttggaaattttccttacattcttttcacctccactctcagaagagcatatattgtgatactggctcatgggaaatttggtacagagtagaatgtcatttcactcgtaactcccacaattccaaatgcatgaatgcatccatggttgtccacagagattaaagaggagaagagatttagaataactctttctgccagaagtttatagagttactggcaagacatggcattta

SEQ ID NO: 31527 - DNA, 378 bp, Setaria italica
  Peptide Sequence Number=SeqID_97501
gccggcggagcgccgggagccccgggccctgcgcgacgagggagcgcacgaggtccgcgtcggctggctgcttgggcgtggggatgcgctcgacgcccatggagcggtgcgcgacgcaccactcctggatgaggcggcggagggtgtggttggggatgagcgtgaagtcggcgagcggcgcgcgggtgacggggcaggtggtgttgccggtggcgacccaggactcgatgctggcgcggtcgtaggtctggcccgtggataccgtcacggggtcgcgcatcagctccagggagatggggcaccggaagtaccacggcacctgcaccccgcgtgtccaggcccagcgccagcgggacgctccccggcattacagccgca

SEQ ID NO: 31528 - DNA, 529 bp, Setaria italica
  Peptide Sequence Number=SeqID_97502
ctgcgactgcgagatgctcgcttgcagtggaccggagcacggccacggcgcaggccgcgaccgacgactcggaccgcaagggcgggggcggcgcttcgcggccgtcgagcggggtcggagggcgtgggcatgaccgggttaggcggcgcggccgctcgagctggcaggcgccgcacgtgaagtgggccgccagccggcgctggcatggctggtgccgtggccgaggggaggaactagcgtaggcgtcacagccactgcgcgtggtggacgggggcaccgcggcttccggagatgacggcggactgccggcgttccccgcggccgcgctagggctgggccatggccgcccagcgctgcggcggaagctcctgctatccagatgctctccgcggggcgcgacagccgggacaccagcatccggcgcgaggcgaggtggcacaggacgcggacgccgtccggcacgggcgcagggcgcgggaaagccgtgggctccggcgaggtgggaggcggagtgccggcgagctgcaga

SEQ ID NO: 31529 - DNA, 444 bp, Setaria italica
  Peptide Sequence Number=SeqID_97503
cgttcccgcctgcttaccctgtggggccatgcgtccggccaagctccgacgaagacggcgcgttggcttgcttggactggctggatcggcagccggcaggatccgtggtgtacgtctccttcgggagcgcgggctcgttgtctgtggagcatacggccgagctcgccgccgggctggaggacagcggccacaggttcctctgggtcgtgcgcatgccaagcctggacggagaaaactccgactggggaaaaagccaccgtcgcgccgaggacgatcccttggcgtggcttcccgaggggttcttggagaggacgagcggccatggacttgccgtggcggcatgggcgccacaggtgcgcgtgctctcccaccccgcgacggcggcgttcgtgtcccactgcggctggaactcgacactggagagcgtggcggccggcgtgccga

SEQ ID NO: 31530 - DNA, 926 bp, Setaria italica
  Peptide Sequence Number=SeqID_97504
aattcttgagtccgcagctaaatgtaggcagtcatggcactttcttttccactattactgaaacaattctagtccaagctcgtgatccatctcagctatcactggagatagagaatgcaatcgatgagcggagatttgatgatgcatggagggcttatgagaagcatgttcacatggatggacttccaagaaagtccgttttgagcaagctcatcactggcttggcagagacctgtgatgctcactggcttaaccagtcctacaatgtggtcagtcatgcatttgaagagaagcatgaattgttgggtaaggagcccctgatttacctatctctcacccttgcacgctgtgctctgcctaatcttgctataaatgttgtgaggaagttggtaaagatggaggcatacccacctgtttcagcttggtcggcaattgtagcacatatgtgtcaaaccaacactggtgcatttcttgctgcagaccttgttatggagcttggttaccttttccagaataatagagttgatccacggaagaagagcaaccgccctttgctatcaatgaaacccaattcatttacattcaatattgttctgactgcagctctcctgtttggtactacaagaaaagcggagcagcttctcgaactaatgcctaggataggggtgaagcctgaagtcaacttgttgattgttatggcccgcatatatgaaaggaatgggcacagagatgagattcagaagttaaagaggcatgttgatgaggcctatggtcttagcgaatcagagttcaggcagttttatgattgtctgctctcctgtcatttgaaatttggggatttggattctgcagttgatatggtgttggatatgctaagaaaaggcaagaatgcaaagcggtcattggaagcagccaaagcagttctt

SEQ ID NO: 31531 - DNA, 718 bp, Setaria italica
  Peptide Sequence Number=SeqID_97505
cttgtcatggacagagaagagtgaaactaagagtgatatattcgaagactatggtgggatgaagtcaggaagtcactcccagactttagggagactgtatgcttgggagaagaaactttatgaggaagttaaggctatagatcaaatccgacaaacctatgagaagaaatgtgttcagctgaggaaccaagatgccaaaggttcagagctgcgcagtgctgaaaaaactaggacaacagttagagacttgtatacaagaatttgggtttcactacgagcagcagaatctatatctgataggatacaaaagttaagggatgaggaactgcagccacaacttgttgagctgttgcagggctttacaaaatcttggaaattaatggtagactcacatgaaacccagagacagataatgtttgaggtgaattcattcacatgtccagcatacggcaaattctgtaatgatgcgcagcgtcatgcaactctgaagttggaggttcaactgaggaattggagatcctgctttgtaagctatgtcaatgctcagaaagcatatattgaagctcttgatggctggttatcgaagtttattctgactgataccatccggtactcccgagggatctcatcaattgctcctgatagagctggtgccccaattttagttgtgatttgccatgactggtacaccacgctgttcctaagtatttcctaaact

SEQ ID NO: 31532 - DNA, 584 bp, Setaria italica
  Peptide Sequence Number=SeqID_97506
ttcaagacgtgacaagatctgcaacatcgcggcattgaaagccaacagagcgaaatgtagaagcactccaatagtaatagcggcagctaaagcttttacttgaacagataagattagtgatcttgatctacttacttgaatccatgggacctgtcaattgtcaaatgaaatattttagaactgaactccaaagatcacagatgtgaaactaaaagagcaacataaactaaagaggaactccagaaatctttgtcccatgtaacactaaaacattctcagtttctctatttgaaattgaaagtttgttcttatcattttattgttatatgatgggatcaacacggagcccaaataggaataaatttgaattaccccttcaagtatcgaggttcatctacttagggatcaacaccctaagattttcaataccgtttaaataaccccgcagactggttttgtagatggtttcgtcaacatggccaattacatgcccagtgatgtggttacaattcttcatgtcagacagcctctcttcttctctccctgacactttggcaccatctgtcatatctttcttcattctt

SEQ ID NO: 31533 - DNA, 993 bp, Setaria italica
  Peptide Sequence Number=SeqID_97507
taatgatctggttaatgtgtgcagcaatacaagggatgaccagaaatgcggattccccccagggctcctccaagctgatcaaccacagcaatcaacactggcagtgttttctgactggccaccaaaatgacagctcgtgcgtactcttttttagcaaagactggctcccctttctgttcaagacgtgacaagatctgcaacatcgcggcattgaaagccaacagagcgaaatgtagaagcactccaatagtaatagcggcagctaaagcttttacttgaacagataagattagtgatcttgatctacttacttgaatccatgggactaggctgagaagaacagcacttgcaacagaaaagccttgtttatttctatcaacaaaatcagcaataccttttacggtttctcgagcaaccttgcctataatcagagggattagaaggcgggtgaccagacttctgaatagttgctcagtaggcaaagacaacccagctccagcgccaatgaactttgctagagaaagaggtacagtgataatgccaagtaaattggatacaactgtcattgcaagagcaagtgcagagttaccgccaacaatctgtgttagtgtgactccacttgataatgttgttggcatgcagcaaaacatagctaacccggtgataaattcacgaggtaagagctgaacttgcataataaactgagcaagaaatggtgtaatcagcaaaatagagcctattccatatagtccagcaggccaagcttctaatgctgcaccaagctcctcggttcgcagggtcagtcctgagatcaagaatatcccaaaggtgctgtacttcgacagggagcatttgtgagcaaggcatccaagagtaggatttaggagacccaatatgaccccagcaacgagagcaagggggaggaagttgctacgcgcgaagccgagcagcacggcccccagcgcgggaggcggcaccgcgcctttgcctcca

SEQ ID NO: 31534 - DNA, 195 bp, Setaria italica
  Peptide Sequence Number=SeqID_97508
cggggcttgttataaggcccgattggatccctgtgtccctcccatatatattgcacacttcaacttttaggaatccaatcaggcagattgcacgatctactccgtcatattgttgcacatttagggggtggttggctcccacatgctaaagtttagcacctatcacatcgaatgtttggatattaattaggagtt

SEQ ID NO: 31535 - DNA, 709 bp, Setaria italica
  Peptide Sequence Number=SeqID_97509
tgctgaataatgacataaattgctgacgaaagatcaactgctagtatattttcagatatttctcattggattcttgagtgattattaggtcggcagcaagagataccagtacgtctgcagaacaaaaattagggggaaattaaatgcggttccctttcacacataaactggcttgcaataatcatgggtaggacgaacgtcattttccgaataaaacgtgcagagatcggctattcatcagcagcgcatgcagccggaagaaaaaattcaatttttcaaacaaatgtcaaaatcaggcatacgtgatttcaacgaggcatcgcccgtatgacgtggaaatttaattgtcttctctgtcaaacacacgtcggaccagccgcctggaatcaactcaagcaacctacgaaaacgacctcgcgaatcgcgatgcaacaatgctctctccatcaggccactgcagaagaggatagagcagctgtcttgcatgatgcacagccgcacatgaatgatggtctcatatccccgtgctaaaatattcagaaacgaacaagacagcgatgttgcgcttcacagaaactgaagctttctatgccaacatagatttcatatgtatatacaaccacatgagctatccaaccgttaattttaaattaatggtgggatggatacggagaagaaacaagtagtaagaaaaggagaaacgaaattc

SEQ ID NO: 31536 - DNA, 473 bp, Setaria italica
  Peptide Sequence Number=SeqID_97510
caacgctgacatcatccgcgactgccgcaagaccgaggaccactggggcgacatgtgcgggttcgtgagcaacgccggcctcggccggccgctcgccgaccgcgccgacggcgtcatcaccggcgaggccgggtggtacggcacgcaccagttcgcgctcgacttcatcttccacaaccggatgaggcagtacgagtgcctcaccaaccactcggccgtggccaacgccgtgttcgtcccgttctacgccggcttcgacttcgcccgctaccactggggctacgacaacaccaccagggacgccgcgtccgtggacctggcggagtggctcatggcgcgtccccagtggcggcgcatgggcggctgcgaccacttcctcgtcgccggccggacggggtgggacttccgccggagcaacaacgtggacccggactggggcaacgacctcctcgccatgccggccggccggaaca

SEQ ID NO: 31537 - DNA, 261 bp, Setaria italica
  Peptide Sequence Number=SeqID_97511
ggcatccttcaacgagtggaggcccgaggtggacggcactgtcaaggacatatgcctcgaggtgcggaagctctccaaacactgggagcacaccgtctcgagcattcccctcctctactatcaactactcctccggctgccgagcacccacctgctacgagcgaagccgacgggccccatgggcaccgcgttgacaacttccaccaggaggatggcttcgggtctgttacgatcgtagttcatcccccagtcacgggtgca

SEQ ID NO: 31538 - DNA, 493 bp, Setaria italica
  Peptide Sequence Number=SeqID_97512
tctttgttgcttccaatcttatggcttgtatttttatagtcctcccgcatggttaggttggtatctgcacattatgaacgtttccaatgctttaacacccctcatcattttgtgcaaagctatggcccattttatgtgttgctttatcaatcgtatttattcttactgacctccgttgatttcttttgtctactgcagtagtgtcagtaactgaaccaaatcagttttcaagagcaagtatcttgattgtcatggaagctgggagaatggatcagccttgcatggctgctatcaatagccagcctttggtggctgatgttgaagcagtgaagaaatccagcggggacatgcctacgacaatgggaagcggatgctttgactgcaacaacatcagccaccaaaggctggctattgatagcagccatgcaaggctgatccattctcccagcttccatgacaatcaagatacttgctcttgaaaactgatttggtt

SEQ ID NO: 31539 - DNA, 215 bp, Setaria italica
  Peptide Sequence Number=SeqID_97513
tatcatcgggcttctcataacccaactgggctaatgcagctcgtacctcctctgcaacaaagaggaagtagttaacactctccccagacacgctagtgccactatatggccgtggagggagctcgaagaaatcgctgaatggtgtggccatcccgcgccgtcccatggtgcaccgggagacagttgagcatcagaacgcacagagcaatgtcgat

SEQ ID NO: 31540 - DNA, 1488 bp, Setaria italica
  Peptide Sequence Number=SeqID_97514
ctgaagccgtagaaaggattcagcattggatgttaataaggttcagagcacttccaagagttcagttcccaaccagcaacaagcaacgcgagcatgatacatccagtgagacctgtggaagaagacagtactgaatgtgatagtgggcttgacaatgctagtactagtagctttgagttccatggaggtgagaagacgtcgacacagaatccaggagtggggtatttctctagacaggcttcctcgaagtggaatgatgctgagaaatggattgtgaaccggcagaatgttaatcagaacatccccaagggcacatcacagaatcagaccgtccaccagatgaattctgctgcagccaggggcgtcattgtgcccaaaatttctggtcgccctgtgcagaaaatgaagagagtgaatccaactctgtctgctccgcgcagcatattagagaggttatcttttgcttcgtatcagccaaagctggttaggcatgcagatgtctgtccagttagtagttctagtgctaccccggagtatcacaaggcaactgatactggttcatcaatagaagtgaagccctgcaatgacccaaaagctattccaacagttcagtcagtgtccctgagagatgttggcacagaaatgactccaatacctagtcaggaaccgtcaaggactggaactccactcgggtcaatgacaccaactagaagccctaattgttcaataccatcaactcctgtaggagggaggtcagtagcatcacctggagaagaaaacacagatgatgggccatatttcaacagaaaaggtgtcacacatggaaatgaattgtcagatactgaaatgaggctcaagacaaggcaagaaattgccgctcttggtatacagctaggaaagatgaacattgctacatgggccagcaaagaagagctagaactagtctctgcagcaccgagcattgctgatttggagcggatgaagaaggaatatgctgcccgtgctgcatcatatgaggaggcggaaaatactaaacatacagcaagattcaaaaggaagaggtgaagattgaggcttgggaaagtcgtcaaagagcaaaaattgaatccgaaatgagaaaaatagaggaacatgctgagagaatgagaagtgaggcaatggcgaagatggctgaaaagttagagatgacacaccgcattgctgaagtgaaacgagcttcagccaatgccaaaatgaaccagcaagcagcaatagcagttcagaaggccgagaagatccgccaaacaggaagagttccaaggtcaaatatcctatgctgcagtggctgcttctgtgaaccttagtagatattcaacaaatagtatgttgaatgtagtggtggaaatataagctccaccctctaaatcagcattccttgattttagtatgaaaatgggaatgtctgattaggtattcagatgcaaacacattctcgtttgtcatgtaaat

SEQ ID NO: 31541 - DNA, 848 bp, Setaria italica
  Peptide Sequence Number=SeqID_97515
ttttttttctagcaatgacatgcttattgaggtaggaaaacatctctagttctccaaaatagaggtggcctgcccgatttctactgttccaggtgaaagccgctcttccagaattacatcaatagccgacgtaaactgcagcgttgactatgtagcagtcgtcgtttttgtcccccattgcttccaggcacacgccgctcgaacagatcatgccgccatcgacaacctcgaagctgattatctcgccataggggaagacggctttgactctctcagcatccagcaagtgctgtgtcgacctcggcacgccgagcttgatctgcagcttcatctggtcggtgttcactccgggtatagacccgccgcggaaggcggggatggagttggaggatatggcatccttgcaggcgcgcacggcggcggcggtgatgtcctggccgtgctggtcgtagccgacgcccatctccacgaacagcagcttcatggccgactccgcccctccctgggcgtcgcgcgcctggggcagggacgcttccatgcgagaggagacgggcgccgccgccgggttcttgggtttgggggatcggatgcggaagtggaggcgggagtgagaagatcgggaggtggaggacgggagcggtggtgtccttggtttggtcgggcagaggaagccaccggtgaagggtgctgctgacgcccccatcttcggctgtctagtggaaatgtggaatagtatgggtgatgcaaagttcagagttcagccatgagccatgtccaagtccaactgttgatacagaacgcctacctacagaaatctgctgctttcttttttgagggagagaggtcaa

SEQ ID NO: 31542 - DNA, 256 bp, Setaria italica
  Peptide Sequence Number=SeqID_97516
aacagttcatcgtgctgattggcatggatcggtaagcttttgcgtgctctatttattcataagctgtaactgacaggtgtgaaaatattgttgcctttgcttctttattctgattgactgtgccccattattgaactagaggggttgggaaaggggattagattgatttctttcttattcgattcaatctattacatagtcaacccttatggctgaacccttctatgactaagatctagtctcagcttaacttaag

SEQ ID NO: 31543 - DNA, 346 bp, Setaria italica
  Peptide Sequence Number=SeqID_97517
ggggtagtgggcgtgagcgcgctccacggcggccacgcgcgacgggtgcacggcgccggccctggcgcgctcgccgtgggactgggacggcagctcgcacgcctcgcctacggagccggaccggatgtcggcgggcgggatgaagcagtcgacggacaggccggggacgttgaaggccacctcctcgatgctccatgcctcctccatccgcgtcttggtgtggctcatggcggcctcgccgaaccggaacagggtgacggcggagcggcccgagtgcgcgatcatgacgccctccacggggcggtagtcctccagggccggagcctgatggtggtctcccagtaga

SEQ ID NO: 31544 - DNA, 265 bp, Setaria italica
  Peptide Sequence Number=SeqID_97518
tttcttaccccgttcaccccgcgcgcctgcatctccccgaacacgtcgatcgcctcgccccactcctccgcctcggccagcatggcgacgtgcttgttccacagcaccgcgtcctttccgtcctccgcatccgacgcctcctcgagcagccggcggctcgacgccccccgaccaagccgcgcgaggagatcgacgagcgcgcaagcgacgtgcgggtcccgcgctcggtccgcacggacggccagcgagtgcagttgcggcgcga

SEQ ID NO: 31545 - DNA, 1019 bp, Setaria italica
  Peptide Sequence Number=SeqID_97519
cagtacaacgctgtcgcaaggaccttcaacgccaagctgcaggacctcgtcgccaagctcaataggacctccgggggctgcggctcgtcttcgccgacacgtaccagctccttgccaccgtcgtcagcaagccggccgactacggcggtagctagctcgctgcattcatgtgctgccgtacgtcgtctccattaatggtgctcttctcagctccggccgccatgcatgggcgccacatgccatgccttggcaacacgtcgcagcggctgtagaattcaacagtgccctcgcctcattactgaaagtttctctgcacttgcacacagtttttcggttgacatgttcgttggaacttgaattgaattatgttgctactccctttgtttaaaattataaatcgctcataaatatttgtatgcatctagaaaagttaaaacaacctacaatttgggatgagggagtacatatagtaatatggtaatgaggaataaataaaagccagaaagatctgtttgggagagtatacatttagcatcaactagaggcgtaggttagtatgttttgtgctaccaaataatttcggacacaaatttaggattatttctcttatatacaaataattagcggaatttcaaagtcatcataaagaaaacgagttagcaaatttgttctcaaaaccttcactaggatgtatgaaattatatgtctagccaaacatttcgttgttaaaagtatcaaacattgattaataagagtgtagcgcaaagtaagaggctatcgaaccagatagtttcatttctcctttcctggtgcgtgcgcaggatttgacaatgcagtacaaggttgctgtgggaccgggcttttcgaggcaggctacttttgcagcttcagcacctcgatgctatgtggaaacgccaacaagtatgtgttcttcgacgcgatccatcccacggagaagatgtacaagctgcttgccgataccgtcatcaacaccacgttgcatgtattcttgtgaaaat

SEQ ID NO: 31546 - DNA, 1304 bp, Setaria italica
  misc_feature (1282)..(1304): n is a, c, g, or t
  Peptide Sequence Number=SeqID_97520
cgaaacgccaaatcatcgtcttcttcactttgtttgcaagagcttgggcctttctttcctctgtttcttttttttaatctctgggagtggtggtggtggccacccgccggcaagcaatgtcatcactccagaggtacttgccgtggctgatcttcttcttgcttcacggcgggcgaggagcggcggccgggaaggtgccggcaatcatcgtcttcggcgactcgtccgttgatacgggcaacaacaacttcatcccgaccatcgcgcggagcaacttctggccttacggtcgcgactacgccaacggcctccccacgggccgcttttccaacggccgcctcgccaccgacttcatctccgaggccttcggactgccgccctcaatccccgcctacctcgacacaaactgctccatcgaccagctcgccaccggcgtctccttcgcctccgccgccacgggcctcgacaatgccaccgccggcgtcctgtcggtgatcacgctggacgagcagctggcctacttcaaggagtacacggaccgcctcaaggttgccaagggcgatgcggcggcgaaggagatcatcagcgaggcgctctacatctggagcatcggcaccaacgacttcatcgagaactactacaacctgccggagcggcggatgcagtacacagtgggcgagtacgaggcctacctcctcgggctcgccgaggccgccatccgccgcgtgcacgcggtcggcggccgcaagatggacttcacggggctcacgcccatgggctgcctcccgccgagcggatcggcaaccgcggcgaccccggcgagtgcaacgagcagtacaacgctgtcgcaaggaccttcaacgccaagctgcaggacctcgtcgccaagctcaataaggacctccgggggctgcggctcgtcttcgccgacacgtaccagctccttgccaccgtcgtcagcaagccggccgactacggatttgacaatgcagtacaaggttgctgtgggaccgggcttttcgaggcaggctacttttgcagcttcagcacctcgatgctatgtggaaacgccaacaagtatgtgttcttcgacgcgatccatcccacggagaagatgtacaagctgcttgccgataccgtcatcaacaccacgttgcatgtattcttgtgaaaatacttgatcttggtaatggagactaggtctggacgggttatatggctgtggtagccagtgtgtaccatgtaattgtaaacagacatatatatcacacattttcccccnnnnnnnnnnnnnnnnnnnnnnn

SEQ ID NO: 31547 - DNA, 249 bp, Setaria italica
  misc_feature (220)..(220): n is a, c, g, or t
  Peptide Sequence Number=SeqID_97521
gaggtcccgggccaggaagcaggcgtacaccaacgagctcgagaacaagatcgccctacttgagcaggagaacgagcgtctcaggaagctcaaggtaaagtcaatcaatcgatcaatcctcaaagtcacagaaaagaagcttgtcccttaatgcggtcagtcagttcgtttgtgagcttcatcagttgagctcttgggtggactgaagcctgcaaaaacnctcaatctgaaagtgagtcattttcagta

SEQ ID NO: 31548 - DNA, 177 bp, Setaria italica
  Peptide Sequence Number=SeqID_97522
cagccgacgggggacgacgatgacgcggcggtcggcgttcgacgccatcatggccggctgcgtgccggtgttcttccacccggactcggcgcacacgcagtacaggtggcacctcccggaggcgcacgagacgtactcggtgctcatccccgaggccgacgtgcgcgcaggcaacgt

SEQ ID NO: 31549 - DNA, 328 bp, Setaria italica
  Peptide Sequence Number=SeqID_97523
ggacggcggcgcggagctggagctggagacgctgctgaaggcctcggcgtacatcctgggcgcgtccggcggcagcatcgtgtacaaggccgtgctggccgacggcgcggcgctggcggtgcggaggatcggcagcgacgacgccggcgttcggcggttcagcgagctggacgcgcagatgcgcgccgtggccaggctgcggcacggcaacatcctccggctgcgcggcttctactggggccccgatgagatgctcatcatccacgacttcgccgtcaacggcaacctcgccaacctctccgtcaaaaggagccggggtctcgccgat

SEQ ID NO: 31550 - DNA, 848 bp, Setaria italica
  misc_feature (1)..(18): n is a, c, g, or t
  Peptide Sequence Number=SeqID_97524
nnnnnnnnnnnnnnnnnnagttacaagacaaacaggaggaagacaacatgttaacacagctgatgagagctcaggatatggttttaattgtacagatcatctccattactcaagcggataacagtagagtaaaactcttggtctctccctcaaatatgaaacatattactatgcatctgtcaaccttcctcctgacaccaaagtagggagtgcttattgcttggaggtatcggatactcaagagtactgagggccttattggcaaccctagctgtatttcagtcgctctcttcatcatagcaaggtagtcattcagtcctgtcgggctcatctgcattgttctgcacatcagccgggagggatgcagatttctcacagggatcaccatggttctcatccacagtcattgtgctggatgaagatgctgtctccctagtcatttgtgggttctgttgatttacacggttcttcaaagtcttaacagcacacagtacttgtggctcaattggccccttcatcatattgtagtagtcattcctgtttgggaattttctatacaagatctcctcaagccgcttcgccagttctggcaaccgcttccgccactggaccgacatttgtttccttactgttaactcgaatatctttccgcgcagagtggtccgtagcatcacaaactgccggtccactcctgagggggctgccatgtcctccaccagctggtcctccccgtcggcgcccgcgacaccaacgccgctgctgccccgatggtctggtgatggagacgacggaggcgggggtcgcggacgtggaggaggactggaggagggttgttcttgggaagcgtg

SEQ ID NO: 31551 - DNA, 342 bp, Setaria italica
  misc_feature (325)..(325): n is a, c, g, or t
  misc_feature (331)..(331): n is a, c, g, or t
  Peptide Sequence Number=SeqID_97525
gggtggtcaaatttgtcaaggaatttctggagaggtccagggccagcaagctctcaagacggcaaatggaagcgaagatggaagagtttgatattccacagttgggcaaggttatgttggtcaccacccaagaggaaccggagcgcgtgcagttgactccgctccacctacaaggattcgaggtggtggtgttcgaccaactgctgctaccaacgatcctcaagagatccttcatgatggcttcctgcgccttgttcagtgatggttgcgaagacggcgcatcggcgccggcggccacgggcgcatggtgaaacagacagacggngaaacnctagcacgaag

SEQ ID NO: 31552 - DNA, 461 bp, Setaria italica
  Peptide Sequence Number=SeqID_97526
agacaacccagctcttggcagccggattgcacacgacgtatcgggacaagtggtgcggggatcccttgggaggccggcagaggaggaggccgttgcaggcgtccacgattgcggcgtcctcgtacccgggcatgaaggcgaagggtgtgctgatcaggggaggctggcgcgcctcgcagagattggtgaatcgccacacctcgcggccgtcgttgaagtcgtcgcggaagaagccggcgagggtctgggggagccggcggcggtggtcagggtgggagatgaggtcgcgccagtgcggggagacgcacttgcagcggcacagcgacttgacggggagccgcgacaggatgtcgacgatgaggtcgtcggtgaggctggccgccgccgtgttggccgtcttctccctgggctgctccgccatcacgcagacaagcaaacccttggatacgggcagggatccg

SEQ ID NO: 31553 - DNA, 308 bp, Setaria italica
  Peptide Sequence Number=SeqID_97527
cgatgcaagtggtggtggtgtgggaggaggcggcggcggcggtgcagtcgttgaaaccgtttgagctcgatcgctgccctttttcatttctcactagagcacatagtatatgaaacatggaaatgtgaagggaaggagaatattgtgggggaggaggatcatgaagggcacatccacttattaattgtgtctagctagttgcacaatgcatgcaacatgcacaagagacaaatgctgtgtacataccacatagtgttgaacagtccatgagagagagagagagagagagagagaaaggttggtggtgg

SEQ ID NO: 31554 - DNA, 210 bp, Setaria italica
  Peptide Sequence Number=SeqID_97528
ggatgtcaattgcatgaactggctcacagcacgcagcttgttatttgttctatatggatcaagtaacaagctgcgtgctgtgagccagttcatgcaattgacatccgtaaggggaatacaaaacccttgggggttcaggatgctggtgtaggtagagagggaacaaggaatttacatatattgtagagataagagctctctcttaccatt

SEQ ID NO: 31555 - DNA, 591 bp, Setaria italica
  Peptide Sequence Number=SeqID_97529
cacactacagtgtccggcatcctcctgacctcctccccctccctccctctcgcccctctggcctctccacttgagaagaactcaatagaaaaaaggcaaaaatttttttacctttttatatctatctgaataaaatcaagaagagggagagggagagaaggcagggagggggaggatagtagcaatccagattcagagaggatagcaatcagctcgcgaggaggggaggagaggagagtaagagctgcgctggtgaattgattgctcgttgctccagtcctgcattcctgccgtagcagcttttggcaagtaggtggcgtggcaagcatgctgccgggctatgactgcgccgcctccgtgctgctctgcgcggaggacaacgccgctattctcggccttgacgacgagggggaggagtcctcttgggcgggcgctacgccgccacgcgacaccgtcgtcgccgccgccgccgccgccgccgggatcgcggccgatgggttcttgacggagttccccttgcagtcggatgagtgcgttgcggcgctcgtggagagggagacggagcacatgccggtggaggggtacccccag

SEQ ID NO: 31556 - DNA, 1644 bp, Setaria italica
  Peptide Sequence Number=SeqID_97530
taagtacttgtcttcttgtatttgtctttctaggttgttgtcttccttctacctacttcttaggtagttttttggtttggtttctaattctattctttaattttagttttggtcctactgtggcaagcatgctgccgggctatgactgcgccgcctccgtgctgctctgcgcggaggacaacgccgctattctcggccttgacgacgagggggaggagtcctcttgggcgggcgctacgccgcccgccggccgccgccgccgggatcgcggccgatgggttcttgacggagttccccttgcagtcggatgagtgcgttgcggcgctcgtggagagggagacggagcacatgccggtggaggggtacccccagaagctgcaacggcggtatgggggcctggatttggccgccgtccggagggacgccgtcgattggatttggaaggtcattgatcattacaatttcgcaccgttgactgcagttttatctgtgaactacctcgatagattcctctccacgtatgagcttcctgaaggtaacccttggatgacgcagctcttggcagtggcatgcttgtctttggcttcgaaaatggaggagacttttgcgccactccccttggacttgcaggttcctgaggcaaagtttgtttttgaggggaggaccataaaaaggatggagcttgtggtgctaagcaccttaaagtggaggatgcacgctgttactgcttgctcctttattgaatactttcttcacaaattgagtgatcttggtgtaccctccttgctcgcacgctctcgctctgccgaccttatcttgagcactgctaaaggtgctgaatttgtggtgttcagaccctcagagattgctgccagtgttgctcttgctgcgattggggaatgcagaagttctgtaattgaaagagctgctactagttgcaagtatttggacaaggaacgagttttaagatgccatgaaatgattaaagagaagattactatgggaagcattatcctaaaatctgctggatcatcaatttcctctgtgccacaaagccccattggtgtattagatgctgcagcctgtctgagtcaacaaagcgatgatgctactgttggatctcctgcaacatgttaccatagttcttccacaagcaagaggagaaggattactagaagactgctctgattgcttcaggtgtgctcctcaccactctaggagtttttggttggttcaatcatcttaatttagtttggccactcaaggataatggtgtagtcaagtagttgcttaaaggaacaacaaagcaggcacactacttgatccatatagaacaaataacaagctgcgtgctgtgagccagttcatgcaattgacatccgtaaggggaatacaaaacccttgggggttcaggatgctggtgtaggtagagagggaacaaggaatttacatatattgtagagataagagctctctcttaccattttgtacttttgctccttcaatttgcattgaactttaggcaagggttgccttgggcattgaacttgcgatgaatgagaagaatccaaaaagggatcagcagtgcaatagaacaatttgatatatttcatgatactaaaaatatattttcttttgttaaaa

SEQ ID NO: 31557 - DNA, 1004 bp, Setaria italica
  misc_feature (1)..(1): n is a, c, g, or t
  Peptide Sequence Number=SeqID_97531
naaggagacagcaccaggctgaacttgctcgtcaaagaatgaagagactgctagaaggcttgctggggtggttctggttctggtgaaggacgtggtcctgcaagggcttcaaatgagcttgttgcatacaagaatgttaatgatgttccatttgtgagagagttggtgatacaagtggatcagaagaatgaagctgtcctcttacctatttatggcagcatggtacctttccatgtttctactgtgaagagtgtgacaagccaccaggacaaccgtacctgcactatccgcatcttcttcaatgtgcctggcatgccgttctcaaatgatagcaagctgaattctcaaggtgccatctacttgaaagaaattacatttcgctcaaaagacccacggcatagcagtgaagttgttcagcagatcaaaacgttgaggaggcaagttgcatcaagggagtcagagagagctgaaagggcaacccttgttactcaggagaagcttcaggtgggaaacaacagaatgaagatgatgagactttctgatgtgtggatacgacctgcatttggtggccgtgggaggaagctcacaggaaatcttgaggcacatttcaatggtttcagatattctacttcaagggctgatgagcgtgtggacatcatgtatggtaatataaagcatgcctttttccagcctgcagagaaagaaatgattactctccttcatttccatttgcacaaccatatcatggttggaaacaagaagacaaaggatgtccagttttatgttgaagtgatggatgttgtacagactcttggtggcagtaggagatcagcgcttgatcctgatgagattgaagaagagcaacgtgagagggatcggaagaacagaataaacatggatttccagaactttgtgaacaaggttaatgatcactggtcacagccacagttcaaggggctcgatctggagtttgatgtcccattgagagagcttgggtttcagtt

SEQ ID NO: 31558 - DNA, 553 bp, Setaria italica
  Peptide Sequence Number=SeqID_97532
gcgaggcaagtaacgcagaccgtgaacacggcgctgagtcagacagcgaggaggagcggaggcgccgcaaggcgaagagctttggcaagtcgcgtgcaccggagcgcagcagcttcaagggaggtccgccatccaagaagccgaagttcaggtgaacggtgcctgccagttgctacggtggcgtggcgtggctgcttcgtgaacctcctttgtttgaggaggcatgtctgtaggagtgtcttttgttatctttagattatcttggtactatctatctctgcagtagcttagtccatttaggtaaaaaatgacagctgaactctggttaacttggatcatagtggatgacatgaacattaaacttgcttgcgtcattggggaaagcagatccgagttgatcgattggtgtaatatcctcattgatgtaatgttttcctggtagtaggctccagcttgtataatatttttgtgctttgcagttcaacctttttggtacattatccctacatggcagtgctggtctaatggagttttgttggaagcagcagcattt

SEQ ID NO: 31559 - DNA, 1217 bp, Setaria italica
  Peptide Sequence Number=SeqID_97533
ttaactaaagttaagttaagtaagttaagttaaggtaagtaaagggtctaaagtacatggttggaaacaagaagacaaaggatgtccagttttatgttgaagtgatggatgttgtacagactcttggtggcagtaggagatcagcgcttgatcctgatgagattgaagaagagcaacgtgagagggatcggaagaacagaataaacatggatttccagaactttgtgaacaaggttaatgatcactggtcacagccacagttcaaggggctcgatctggagtttgatgtcccattgagagagcttgggtttcatggggttccttataaggcttctgcttttataattccaacttctacttgtttggtggagctgattgagacccccttccttgtggtgagcctgagtgagatagagatcgttaacctggagagggtgggctttggaacaaagaactttgacatggctattgtgttcaaggacttcaagaaggatgttctccgcatagattccatcccttcgacatctctcgatgcaataaaggagtggctggacacaactgacctgaagtactatgagagcaggctgaatctgaactggcgtccgatcctgaaaactatcattgatgatcctcagaagttcattgatgatggtggctgggagttcctgaacatggaggcgagcgactccgagacagaggagacagaggagtcagaccagggttatgagccttctgatgctgagcctgagtccgagtcagaggatgatgactctgacagcgagtccttggtggaatctgatgatgatgatgaagagtccgatgatgactcagaggaggagaagggcaagacctgggaggagctggagcgcgaggcaagtaacgcagaccgtgaacacggcgctgagtcagacagcgaggaggagcggaggcgccgcaaggcgaagagctttggcaagtcgcgtgcaccggagcgcagcagcttcaagggaggtccgccatccaagaagccgaagttcaggtgaacggtgcctgccagttgctacggtggcgtggcgtggctgcttcgtgaacctcctttgtttgaggaggcatgtctgtaggagtgtcttttgttatctttagattatcttggtactatctatctctgcagtagcttagtccatttggaaaacattacatcaatgaggatattacaaccaattacgaatactaaacta

SEQ ID NO: 31560 - DNA, 530 bp, Setaria italica
  Peptide Sequence Number=SeqID_97534
cctcaggttcgccttctcccctaccttgaggtgctggccctggaacccgaccagctgcctcgccggtcggccgtcggttgcgttcggccaccggaggaacacgagcaccgtgtgcttcccgtccatgggcccgtggttcctcaccttgaccacggccgggaacttgagctgctcgcagacctcgtcaccgatggcatcgacgtagtagctcgccctatcctcggtcgtcgccgtcaggccagcggcggcgactaggctggtgttgtaggccgggttcttgcggccggtgactggccgctgggagaacatggagtagctgaggccgtagccgaacttgtacaccgttttgccgttgtagaaccggtagctccggccgggatagccgccggcggcgcgcatccgcatgtccgtcatggggatcttggtgaattcctcagggtaccaagtcaccggcagtttcccgctggggttcttctcgccgaagaggaccttggcgatggcgaggccgccagcctggccggggtacccgg

SEQ ID NO: 31561 - DNA, 300 bp, Setaria italica
  Peptide Sequence Number=SeqID_97535
aacaatacaatacaatacaataccaaatacctcaagctccatgtcaaatatacctttgtacaagaaggaacaaaggccctttttggaggaaatgtatgtgctgagaaacttgatggcttaatggtggttgtgtgcgagcacctcaagtcgtgcaatcgtgatcgtctatttaaggaatttggcattttgaagactatatttcgaaaatctgtgctgaaggtgcacaaatccaaatttgcccagtttatcatgttttatgcctgttccctggatcctgaaatctgcggtgttgattttgcc

SEQ ID NO: 31562 - DNA, 495 bp, Setaria italica
  Peptide Sequence Number=SeqID_97536
agacattctagctattggatcatcttccttcttagtaaaaatatctgcagtttcatatgttggaagctatctgtcccgggcaaggttcatttctgcagatacagttgttgctgtactcaaaaggttagtggaatggtgcatagattatattaaacgtgacagggaccctgtgaaccaggcaaaggcaaccaagcctaaagatcatcaaatattttacgctagctgccaggctgtgatgtatgtcctttgctttcggttgagatctattatggactacccaaatcttaaatcacagctttttcaaatgccaatcgagtcattttgatggacacactggagcctctaaaggtgtgcttgccctcaatagtaaatgagttcctgagacagtctagggctgccaggttgttcaatgcatctgtggaatttagaccaacttagaaagaataataagttagaaatactagaatttaatacgaaaggacttttaggaaggaa

SEQ ID NO: 31563 - DNA, 304 bp, Setaria italica
  Peptide Sequence Number=SeqID_97537
ttagtactagatggagataatactttcagcaactgttctacaccgaagcagtatgtctttaccatttggggtgaaatgtaaagtatatgtgtaccagggaaccgagtgaaagatggttttgcgagtgtatacttgtaggcagccctcggggggtgtatggtaaagacaacctgtttcggtgtagaacagttgctgaaagtattatcttcatttaactagactagatggaactttatactgacggttgccttttgatgatgctggatactggattggtcaaaaaaaaaaaaaaaaaaaaaaaaaa

SEQ ID NO: 31564 - DNA, 712 bp, Setaria italica
  Peptide Sequence Number=SeqID_97538
ctgtgatgtatgtcctttgctttcggttgagatctattatggactaccaaatcttaaatcacagctttttcaaatgccaatcgagtctatttgatggacacactggagcctctaaaggtgtgcttgccctcaatagtaaatgagttcctgagacagtctagggctgccaggttgttcaatgcatctgtggatttgccacttgaagatatagttgaatctgatttatcgaaggcttttggaggaccaaataggcttgacatgttcttcccatttgatccatatctgctaagagaatctgacaggtatatccgtccaaattttgagttctggtccttggtcaagacaacatacagtgacggtgaagacgatgagcttggcgaccttgacgcacctggaatgaatgtggacagcttggatgaccatgttgaaatagatttgaacgatgatgaaggcattgagtattcgcaacctggcagccctagactgtctcaggaactcatttactattgagggcaagcacacctttagaggctccagtgtgtccatcaaaatagactcgattggcatttgaaaaagctgtgatttaagatttgggtagtccataatagatctcaaccgaaagcaaaggacatacatcacagcctggcagctagcgtaaaatatttgatgatctttaggcttggttgcctttgcctggttcacagggtccctg

SEQ ID NO: 31565 - DNA, 1208 bp, Setaria italica
  Peptide Sequence Number=SeqID_97539
gacaaaaaccctaggcctcgcctcctcgccgccgccaaccgcctcctcgccgccgccttcctcctcccgtccagccggttccagcgcgcgagattcttccgcgggaggaggtgttgcgggtagctggcgatgggggcggaccagtggtgcgatgacatggagctgaacttcagcgactcccatatgttccggcaggtccagcacgtgctgcagtccgtgcggatggatccatttttaattgatctaagggacaaagaccactatgattttctgctactcgctgtagaccctaccaaaaagaggagtaaagatgagatggctgtgcttgttacgattttaaaggcactgtcagaagcagtatcaaagatagacgtcatgtatcatcatgcacttctgcacaatatatttaccacgtgcatctggtacttggaccttgacacaagggatgcgcttttgcatttaataaccagattggctgctgtggcagaccagtacctcagagaatgtttgcagatgcttgtgaataacttcactccacctggaccatatgttccactcatggagcagccaagaatgcttgcaaagaagaaagaaatctactctcagttgcatgagactttgaaaatgatttctgacactgtgcccttagcatcaaggatgttaaaggatgtattaaacaggagtatgccaaagttatttgacaacaaagctaaaatgctatcatttgtggagtgcatgttgggtcttgatactgacagattgggcgacctaattggaaccacattgttcgagaaagttgtggatctacttacggaattggatgttaatataacatgggaagatattcttcaagaggaacacaacaaaggtatatttgacatggagcttgaggatttggatgatgatgatgataactttggacaagaaggaacaaaggccctttttggaggaaatgtatgtgctgagaaacttgatggcttaatggtggttgtgtgcgagcacctcaagtcgtgcaatcgtgatcgtctatttaaggttaacctggctaacctcataaaaccaaaccgaacgaacggcctatatagttagaacatgaagctcatcttatcgaaggaagagaggctgggatttgtatttgggtatgaactgacatacccatcatctgaggagtcaggcggaacttaagaaaccctctgataccatatgga

SEQ ID NO: 31566 - DNA, 1323 bp, Setaria italica
  Peptide Sequence Number=SeqID_97540
ctgacaggtatatccgtccaaattttgagttctggtccttggtcaagacaacatacagtgacggtgaagacgatgagcttggcgaccttgacgcacctggaatgaatgtggacagcttggatgaccatgttgaaatagatttgaacgatgatgaaggcattgagtattcgatgaataagatgtccataacgccacaccgctctttctaccacccaatggctatgagcagtgattctgggcttagcatgcctgcgaggatcaggccttcagtgagccctccatcatagggccatcacaagatcgtttcattgttactggctcttgactgaaaacaatgctacgaagtcgcatgtgccgaggggcaagcagataccggagctctctcatagttggtagtagggttaaaaaccccattcttttgcagtatgtaggttaccatttggggtgaaatgtaaagtatatgtgtaccagggaaccgagtgaaagatggttttgcgagtgtatacttgtaggcagccctcgggatgtatggtaaagacaacctgtttcggtgtagaacagttgctgaaaattgctcaatcgagtctattttgatggacacactggagcctctaaaggtgtgcttgccctcaatagtaaatgagttcctgagacagtctagggctgccaggttgttcaatgcatctgtggatttgccacttgaagatatagttgaatctgatttatcgaaggcttttggaggaccaaataggcttgacatgttcttcccatttgatccatatctgctaagagaatctgacaggtatatccgtccaaattttgagttctggtccttggtcaagacaacatacagtgacggtgaagacgatgagcttggcgaccttgacgcacctggaatgaatgtggacagcttggatgaccatgttgaaatagatttgaacgatgatgaaggcattgagtattcgatgaataagatgtccataacgccacaccgctctttctaccacccaatggctatgagcagtgattctgggcttagcatgcctgcgaggatcaggccttcagtgagccctccatcatagggccatcacaagatcgtttcattgttactggctcttgactgaaaacaatgctacgaagtcgcatgtgccgaggggcaagcagataccggagctctctcatagttggtagtagggttaaaaacccattcttttgcagtatgtaggttttgttcctttgcagtatgtagtatgcattaggttataaagtatatgtgttgtaaagtcctaagtgaaatggttttgcgagtgtatacttgtaggc

SEQ ID NO: 31567 - DNA, 1948 bp, Setaria italica
  Peptide Sequence Number=SeqID_97541
acgaataatttttaactaaagaaaggaaagaatagaataccaaatagattggctgctgtggcagaccagtacctcagagaatgtttgcagatgcttgtgaataacttcactccacctggaccatatgttccactcatggagcagccaagaatgcttgcaaagaagaaagaaatctactctcagttgcatgagactttgaaaatgatttctgacactgtgcccttagcatcaaggatgttaaaggatgtattaaacaggagtatgccaaagttatttgacaacaaagctaaaatgctatcatttgtggagtgcatgttgggtcttgatactgacagattgggcgacctaattggaaccacattgttcgagaaagttgtggatctacttacggaattggatgttaatataacatgggaagatattcttcaagaggaacacaacaaaggtatatttgacatggagcttgaggatttggatgatgatgatgataactttggacaagaaggaacaaaggccctttttggaggaaatgtatgtgctgagaaacttgatggcttaatggtggttgtgtgcgagcacctcaagtcgtgcaatcgtgatcgtctatttaaggaatttggcattttgaagactatatttcgaaaatctgtgctgaaggtgcacaaatccaaatttgcccagtttatcatgttttatgcctgttccctggatcctgaaatctgcggtgttgattttgctctttttcttaccgatatttttactaagaaggaagatgatccaatagctagaatgtctgcagtttcatatgttggaagctatctgtcccgggcaaggttcatttctgcagatacagttgttgctgtactcaaaaggttagtggaatggtgcatagattatattaaacgtgacagggaccctgtgaaccaggcaaaggcaaccaagcctaaagatcatcaaatattttacgctagctgccaggctgtgatgtatgtcctttgctttcggttgagatctattatggactacccaaatcttaaatcacagctttttcaaatgccaatcgagtctattttgatggacacactggagcctctaaaggtgtgcttgccctcaatagtaaatgagttcctgagacagtctagggctgccaggttgttcaatgcatctgtggatttgccacttgaagatatagttgaatctgatttatcgaaggcttttggaggaccaaataggcttgacatgttcttcccatttgatccatatctgctaagagaatctgacaggtatatccgtccaaattttgagttctggtccttggtcaagacaacatacagtgacggtgaagacgatgagcttggcgaccttgacgcacctggaatgaatgtggacagcttggatgaccatgttgaaatagatttgaacgatgatgaaggcattgagtattcgatgaataagatgtccataacgccacaccgctctttctaccacccaatggctatgagcagtgattctgggcttagcatgcctgcgaggatcaggccttcagtgagccctccatcatagggccatcacaagatcgtttcattgttactggctcttgactgaaaacaatgctacgaagtcgcatgtgccgaggggcaagcagataccggagctctctcatagttggtagtagggttaaaaacccattcttttgcagtatgtaggttaccatttggggtgaaatgtaaagtatatgtgtaccagggaaccgagtgaaagatggttttgcgagtgtatacttgtaggcagccctcggggggtgtatggtaaagacaacctgtttcggtgtagaacagttgctgaaagtattatcttcatttaactagactagatggaacttttataaaaaaaaaaaaaaaaaaaaaaaaaaaagaacaaaagcagaactagacaaaccaaaggacaa

SEQ ID NO: 31568 - DNA, 633 bp, Setaria italica
  Peptide Sequence Number=SeqID_97542
tggtggtggtggtggtggtggtggtgcggcggggcggcggcgctgtcgaggtcgacgaggtgctgcgcgcagctgccgtggaggtcctggtcgatgaggtgctcgacctggacgaagcggtcgacgcggcaggggatggcgatggcgccctggtggcggaagccgtactcgcgctcggcctcctccagcagcgcgccgaagagcgggtgcttgaggtggccaagcgggacggcgaagcggcgctgctcctccccctccgcgcccacccgcaccgtcacgcaccccttgggcgccaccggcaccatctgctgctgctgctgctgctgcttgccgtgcatgatgatggccgccaggcaggccagatcgagaaggagctgctcggttggttgctgatcaagattcaagaagaggaggctaagctgagggggagggctcgtggctagaggcaggaggaagagaagggccaggggtcggagctggagatggcgaggcggaagacggtgagggaggagtcgcggagggaggtgggcacgttggacatggcctactccactttgtcttcttcttctcgactacgatacggggtgggttcgccttgcggtggagcttgcgatcgagagagctgcgatgtca

SEQ ID NO: 31569 - DNA, 244 bp, Setaria italica
  Peptide Sequence Number=SeqID_97543
acatccaatgcgttgattcatggcctttgcgaaggaaataatatgaaagaagccacgaaggttctaagagccatgatgaataacagggttgaattggataacatcacatataacataatgatccaaggttgctgcaaagatggtaaaatggaggaggcgatacaacttcgtgatgacatgatcaaaagagggtttaagcctgatcttttcacatataatactttcctatgtgcttattgctaag

SEQ ID NO: 31570 - DNA, 306 bp, Setaria italica
  Peptide Sequence Number=SeqID_97544
atcgatctagttgcgcgcacgtacatatacgatctatctcatctcatctcctctcatctcccatcgatcgatccagttgcagatcgaaatggatcatcatcagcagcagcagcctgcgccatgcgtgcccccagggttcaggttccaccccacggaggaggagctggtggggtactacctcgcccgcaaggtggccgcccagaagatcgacctcgacatcatcggggaggtggatctctacaggatcgagccatgggatctccaagagaggtgcagctacgtacggcggcgccggcgccaggacgg

SEQ ID NO: 31571 - DNA, 311 bp, Setaria italica
  Peptide Sequence Number=SeqID_97545
ggaggacccttcacatcttggcatgatctccctggaggaggaccaagtctggaattttcttgcctgcttgccgacataccgcccaagtttcccatcatagtactctggccagccatccttcaatagccgcctctcagctaggtcaattgctcttcttgcaatttgcggtcgtccagtcttgatgcaggccgcagtcagcagccacagaagtactggccatgaccctccgttgtgataactccatctagtattttcggatcacaacctgtcacaattcgccattcatggttctcaatggctggataacatat

SEQ ID NO: 31572 - DNA, 397 bp, Setaria italica
  Peptide Sequence Number=SeqID_97546
aaatcgagccaaaaataagcttcgcatgtgatagcttaaagcatgaaggcgagtagcaatcttctcaacaaactccttcccttcattgtcatgcttaagcatttgaagagcacacctaagtgccatgaagaaaagggcttgaatttcaagtggggtagccatagacaccctacaagattaacaataacaaagaacatgtaagctcagttacaaatcaactggcatttcaaactaagcaattcagcacttatgtccataagtaatttaaatattggcatgaatatgtccaaagccagcaacaaggaagacgaatatgattaataaatatcttcacaaaagatatacagtgaaatggatattattctatatgccatatttccatacacacatataagat

SEQ ID NO: 31573 - DNA, 630 bp, Setaria italica
  Peptide Sequence Number=SeqID_97547
caatagccgcctctcagctaggtcaattgctcttcttgcaatttgcggtcgtccagtcttgatgcaggccgcagtcagcagccacagaagtactgcagaaagatgaacaaaattatgaaaataatgtgcgaaaatagctcatattgctcagataccttggactaaggacaatgcatgataatgatatcaatatatcgtgttacggatttctattagaaatataagaaaccaggaacatcattgaacagatgggaacctaaagaattctgtgccgtgtgatatagattaggaaaatttggtatgaactatcatctaaaggaaaacgctgtccgatgaaaccttccaacactgatcagaacgtaaaaattgtaagaaaatatgaatgtatggatatcacgtatctcctcaaattatatccttactgccagtgtagttcaacctccaaaacaggatagaacaaaagcgaagcaccttttgaccttacaaaactgcaaggaattcaaagagagtaatccaagtaaagtgaagctcactaacctggccatgaccctccgttgtgataactccatctagtatttttcggatcacaacctgtcacaattcgccattcatggttctcaatggctggat

SEQ ID NO: 31574 - DNA, 265 bp, Setaria italica
  Peptide Sequence Number=SeqID_97548
gcccaaacgagctcggctccgggaagaactcgggcgcgccagcccatgaagccacctgccctcctcctcctcctcccctcatgccatcgagcacattgtcgtacatgcccgccgcggcgccgccgcccccttcgaagagcgcgaacgagtcgctggaggacctgcggtggccgggccggccgtgcccccgcgccggcgtctcgggctcgtcgagcaggtcgtcgagccacgacggctgctcgtcggcgaggaagctctccgacga

SEQ ID NO: 31575 - DNA, 390 bp, Setaria italica
  Peptide Sequence Number=SeqID_97549
tgaaggtggtagtgatgacagaaaggcatcattctgagtttcatctccatttgacacatcctcagttcttaaaacactgaatactgaactgaggcacttctttgcaatctcagtagcaaagatttcaggtgcagggtgtaaggtatagatggtgcttatagctttatctgcagctccataccatattttctcaggtagcgagaagcttgttgtcaaacttatcagcgcagcaaatactctactattagtacttatcagtttgcttctgtcttcttctgacaatctctgcagagcaagacatgcagttctagcaagcagaggctcctccttagcccagcgtccaaacccaatgtcaataatatcttgcaagtgagtacccaaaatgctgtg

SEQ ID NO: 31576 - DNA, 267 bp, Setaria italica
  Peptide Sequence Number=SeqID_97550
aaaagcaaacgcaatagatgttatgagttatgactaccacggagttccagttcaaggaaatgcatagataaaagggccctgtcaagcaattagttcggccatgtatttgaatctaaaattgcaaggaaaataataaatcatgaaacgtgtggaaacaatatcatacttatttctcatgtagcctagttgtagagaacatgacaataacaagcatcactgcaccagacaccaaaaagaacaaatcctccccaggctagccgcttgcag

SEQ ID NO: 31577 - DNA, 500 bp, Setaria italica
  Peptide Sequence Number=SeqID_97551
ccggccgctgcctcaccccgcggtagtgcttgcccctggccaccgccgcggcctcctcgctgctcccgggcgccgtcgcgggcgacgccgccccggccgtcggcgtctcgggctcctcctcgtgcgacgcgaggaggccgccgacgccgaggcaggagccgaactcgtagggggagtccggggacgccgggggctcgggcttgacggcggcgaaggagccgtcggggagccagccccgggagaaggcgtcccggagcgcgccgaagacgaccatgtcgtcggcgtcgtcggggcggaacgggagcgactcgctccactggtccgccaccaggctgccgaagctcgtgctgcggcggtacaccggccgcgccgccgccgccgccgccgccggctcgtccaggacgtggtgccggatgctgtccagcgccgccgcctcgcacgccgggttaagcagcatcttgtcttgctcggactgtgatgcgtcacgtgatctgggtttt

SEQ ID NO: 31578 - DNA, 284 bp, Setaria italica
  Peptide Sequence Number=SeqID_97552
gaggccgaggcgggccttgaagcccagcgcgacgcccaccggcagcgcgacgaggtagaagccggcgacgacggcgtacatgccgagcagcggtcgcgccgtagcccgcacgatgccgccgcacacgttcagcgggaagttgaccacctccaggagcgccatcaccttcatggccctcgccacgccgtcgcggacctccgggctgcgggtgtacatgcgcgcccagggacgccgcgccgccagcatgacaagcccgcccgccacgccggcgatcgcgccgccgg

SEQ ID NO: 31579 - DNA, 342 bp, Setaria italica
  misc_feature (276)..(276): n is a, c, g, or t
  Peptide Sequence Number=SeqID_97553
cggcagagtccggcgggctgatcgacacgacgggcgtggacatccggctgccgatgctggtgtacgtgtcccgcgagaagcggccggggtacgaccacaacaagaaggctggcgccatgaacgctcttgtgcgcacgagcgccatcatgtccaacgggcccttcatcctcaacctcgactgcgaccactacgtgcacaactcggcggcgctccgggaggggatgtgcttcatgctggaccgcggcggcgaccgcatctgctacgtccagttcccgnagcggttcgagggcatcgaccccaacgaccggtatgccaaccacaacctcgtcttcttcgacgtcg

SEQ ID NO: 31580 - DNA, 249 bp, Setaria italica
  Peptide Sequence Number=SeqID_97554
ggatctctgctctagcagaggaccagataggtggttgaagctgacatccaggatgattatactgctggagaacaacaaattcgctggtagactgccgtagagtgaattgcgggagaggttgaggtgcagcagtccggtgagattgccaagggacggtgagatcttcccttggaggcccttagaagcaagcatgatctccgtgaccacgctgttggtgcaggtgattccatcccactggcagcagtctgt

SEQ ID NO: 31581 - DNA, 531 bp, Setaria italica
  Peptide Sequence Number=SeqID_97555
gaatttataatgctagccagctgatacctctagatgatgatgatattgtctctgaagcttcactgcatcttatcaaatgcatacaagattttgagggtgctagtgtgatccaaaaatcagtcaggagatctcctaaatctgtaatcaactttcttccaggttcctacaagtacacaccaagaggatcaacttcttttccgaatttgtttattgctggtgattggattgtcaatcgacatggatccttttcaaaagaaaaggcatatgtaactggacttgaggccgctaatagggtggtggactattttggcactggggactttgccaaaataattgctgttgaaggagatgagccttatatagagacattgcgtaatctcagcagaagagccaatgagctgaagtcacaaattccattttcagagttctttctccaataatgtggttcggatttttttccatatggctgtggaccgatgcccattttcatagggtccatatgtaaaagtacttgttgaagcatacttatac

SEQ ID NO: 31582 - DNA, 225 bp, Setaria italica
  Peptide Sequence Number=SeqID_97556
cttgcgagcccaaaatctccaacatgagctgtcatctcatcatccagaagaatgttgctaggcttaacatcacaatgaacaatagttccttgactgtaatggtggagatactccagcgcatctgctatatccaccagaatacttaacctttgagccagtgtgatatggtttgaagtgttctcatcctcacaagttgagtacagtaatagatgcaagtcaccacgt

SEQ ID NO: 31583 - DNA, 1565 bp, Setaria italica
  Peptide Sequence Number=SeqID_97557
gacgcagcgcgcgttcctctcctcgctcccgcccgccgtgtcctccctctcgctcccgcccgtcgacctctccgacctgccccgcggcgccgccatcgagacgctcatgtcggaggagtgcgcgcgcagcgtcccggcgctcaccgacatcctcctcggcctgaagcggacgaccggccgcctcgccgcgttcgtcgccgacctcttcggcgccgactcgttcgacgcggcgcgcgacgccggcgtggaccggaggtacctcttcatcccgagcaacctccacgtgctcacgctcatcctccacctcccggagctcgacgcctccgtccccggcgagttccgggacctcgccgagccgctgcgcctccccgggtgcgtgcccatcccggggcccgacgtcctcatgccgctgcaggacaagaccaacccctgctacaagtggatggtccaccacggcagcaagtaccgcgaggccgacgccatcctcgtcaactccttcgacgccgtcgagccgggcccggccaagatcctccgccagccggccccctggcgccccgtggtgtacccgatcggcccgctcatccaggccgacaccggcggcagcaagaacgacgcggcgtgcctggagtggctcgaccggcagccggacaggtcggtgatcttcgtgtccttcggctccggcggcgcgcttcccacggagcagatgcgggagctcgcgctcgggctggagctcagcgggcagcgcttcctgtgggttgtgcggagccccagcgacgagggcgccgtcaacgacaactactacgacgccgagagcaagaaggaccccttcgcgtacctccccgaaggcttcgtggagcggacgaaggaagtgggcctcgtggtgccctcgtgggccccgcagataaaggtgctggcccaccgcgccacgggcgggttcctgacgcactgcgggtggaactcggtgctggagagcctcgtccacggcgtgcccatggtggcgtggccgctctacgccgagcagaggcagaacgcggtgatgctctcggcggagggggtcggcgccgcgatccgcgtccccgagtccaaggggagggagaagatcgcggcggcagtgcgggagctgatggagggggaagggagcggcgccgcggtgcgggccaaggtggcggagctccagaaggccgcggcggaggggctccaggaaggcggcgccgccgccgccgcactcgccgaggtggtggagaagtggacaggtggagagaactagatgatgccaagctgaaggctgagagtacacctagctgcaatgcaatcctagctagccgccaccctccaccatcctatggccccatgtcccaatgatggtttgtcctcttgtattctataaacttttgattgtaacttacaacttgtaactattatcctactccattagtaggtagcaaggtacagagagcttaattgcgtgctaagatgctattctatttcgcaactttgcaaagttaaattcatgattagaattttagataatggataaagtttaaactgatcctcctttcagggag

SEQ ID NO: 31584 - DNA, 1505 bp, Setaria italica
  misc_feature (1504)..(1505): n is a, c, g, or t
  Peptide Sequence Number=SeqID_97558
tatgtgtgtctagttgtctatcttgaacaatggtggctatcttgggtttttgtcaactgtggcggcttttactgtgtcatgctattccctacagtattcagtatatgctgcaagttacagggttaagcatgtagttataacaagtcttttgcttgttcttggtgcaatgtcaatgacatggatttgtgacaccatatcagaatctggatttggacatggctcatctttgattatctgtgtgggaattttgactggttacacagagacactacataagatgataactcagttttcagggaatttttccaagtgttggccttacatcctgggagtagctggaattttatgatgctcaccatgggggctgtgctggtgactgaaggatgcaggaagataaagcttcagtactatggattcaaattggcttctggtgcagggaaagagagcaccccagttacagaggttgagccatatattcccttcaacatcaatccgactggaatgcagcccttgcttacaacctcatacctactagcttttccaagcatcatggccagcatttttggctcaccgttttgggaaaacttgaaggaaattttgaatccaaggacttcaggtggtggtagtccctgggtctattatttgacatatgcttttcttgtcttcgtcttcaacatctttgacattgccaacttacccaaagagatatctgactacctgaataagatgagtgcgagggtaccaaggataaagcctggaagagcaacagtagattatcttacaaagatacaaacatcaacgcgtttctggggaggcctactactgagcttgctggcaacttcctctttattgcttgatcgatatctcaggcatataaatgaggggttttctataggattcacatcagtcttaattattgtgggctcaattattgagctgagaaggtcgtatcaagcatacaatgtgatgccagcactaagcaaagttttgaggagatatggtgcttaagcatatgtaagcacatatgttggtgatgatagctccatccactagaccaatagaaagaagagcatgaattggaaagtctcctggggttacagctcgtggtgttgcaacctcaaatggtgccaatgcgaacacttagtagcgcactatgatgagaaggttacacaacttctgctagattcattgattggattggaacggaaggattgtggttttacaccgggcttcattgacaaattgaactgaagaagcaacaaggacgtccaggtgttgtttcaagtgtaggaaatatgaacgggtgagataaccgctttcatgcatttgtacaccgtcaggagccgttgctgcaagtgaaagaaaatatcaggttcctgtttgccatgctgtatgaatttcgggggcgggtcgcattgctaatctgttcactggagacttggatttgtaatttctccacggtacaaatatcttgcagacgtgaacataaaaaaaaaaaaaaaann

SEQ ID NO: 31585 - DNA, 927 bp, Setaria italica
  Peptide Sequence Number=SeqID_97559
atcatgttccttgatcatgtgctgtgtcgtcgagttgtgtacccaacgctgcgttacacagccacgggtggcaagatcataagtgagaagggagttggtacactgctatctgtgacagctagtctgaagcagtgcatcaaacagttccgaaagctcgagttttaaaaggagaccgggaaccagacccacaaccatgcttccgtatgttccatgccacacaagctcacacaaattctcagatgaataagcttttactgacaatggcagagtggtaccgctatgctgataaccgcaagaaggtggtcaacttctgctcttatatcataaggggatctttggcaaagctatatgctgccaagtacaagttgcggtcaagggcaaaggtctataagattgcatcaaggaaccttagtcgcccattgaaagataagaaagggcagtcaccagagtatcacaatttgctgagaatgggcctgttggattcgattgatggtcttcagtatacaaggatgtcgatggttcctgatcctgattatacaccattacctagtggatggcgtcctgaccatgagaagattttgctggagtatataaagctcacagatcaacagacgttggaggagcagcgaacttgcattagagaggaggggcttataacaccacaggactatatttcaatgcttgtatgggggtacaagaaaaatgcagttttacttccttcttcaaaagggagtgacacccaaggatctacggaggacattggttcagatactgatgaattgggtgaaaaagagctaggaaacgagggccgtcagggtttcccaaagtttgctgagatgtcatgagtattgatgatctctgtaaacctcccaagaaacatttgtctggatggtgactactaattgacaatttaccattgtaaaccta

SEQ ID NO: 31586 - DNA, 1079 bp, Setaria italica
  Peptide Sequence Number=SeqID_97560
tagacaatctcactattaatgattggctcaagagaggaatccatgtcatcactccaaacaagaaagcaaattcagggccacttgagaggtatctgaagcttagaactcttcaacgtgcatcatatactcattacttctatgaagcaactgttggtgctggcctccctatcattagcactctgcggggtcttctagagacaggtgacaagatattgcgtattgaagggattttcagtggaacgttgagttatatttttaataactttgaaggagcaagaacctttagtgatgttgttacggaggcaaaagaagctggatacaccgagcctgatccaagagatgatctatctggtactgatgttgccagaaaggtcataatccttgcaagggaatctggtttgaggcttgagctttctgatattcctgtaaggagtcttgtgccagagtcactgagatcatgtacatcagctgatgaatacatgcaaaaactaccatcctttgatcaagactgggcaagtgagcggaatgatgctgaagctgcaggggaagttttgaggtatgttggagtggtagatgtggtcaacaagaaggggcaggtagagttgcggcgctacaagagggaccacccatttgcgcagctatctggctctgacaacatcatagccttcaccacatcgagatacaaagagcaaccactgattgtgagaggcccaggagcaggcgcggaagttactgcaggaggcgtcttcagcgacatactaaggctggcatcttaccttggtgctccctcgtaagtcatgaatgttgactggtggcttatacatgtaaggagtcttggtattcatattctcctgattttggtagagtttgaaatagcaggccagaaaataagtatgtgttccaatgtgttttgttcctggagcgctaggtaggggcagtataatttagtgggttatattgggaaaaataagacaatccactgttcttgctcgttgcaataatgttgtctgggtttgattggttgttgataataactaaattagggagtcaaaaacaatcaaatggaaaaaagctaattg

SEQ ID NO: 31587 - DNA, 3051 bp, Setaria italica
  Peptide Sequence Number=SeqID_97561
gtctccacctctcccgggtctcgccgtcaccgcggagatgcggggcctcgccgtcgcaagcccgctccctcccgccgccgcagccgctctccggcggacccgcgccccctcctcctccggcagggaagtgtcatcacaatgttggaagtatgacttaagccaagaccgatctttgggaggctccctaaggataggtcagtctcaaggaagtttgcacagacatcgtccgacaaatttgctcagaccagctgctgcagctatttcagtcgaacaagatgaagttaatacatatcttccaaaaggtgatatgtggtctgtccacaagtttggtggaacctgtatgggaacaccccaaagaattcagagtgttgcagatatagttcttggtgattcttctgagagaaagctgatcatagtttctgcaatgtccaaagtaactgacatgatgtacaaccttgtacataaggctcagtcaagggatgattcatatacaatagcactggaagaagtttttgagaagcatatggctgcagcaaaggatcttcttgatggggaagatcttgcaagattcttgtctcagttgcactcagatgtcagcaacttgcgagcaatgctccgtgctatttatatagctggacatgcgacggaatctttctcagactttgttgtcgggcatggagagttgtggtctgcacagatgttatcgtatgcaataaagaagtctggagcaccatgcagttggatggatacaagagaagttctagtcgtaaaacctagtggttctaatctagtagaccctgattacttagaatctgagaagcggtttcagaaatggttttctcgacaaccagctgagacaatagttgccacggggtttattgcgagtacagcagaaaacgtacctaccactttaaaaagggatggaagtgatttctcagcagccataattggttctcttgttagggcacgccaggtcaccatctggactgatgttgatggggtatttagtgcagaccctagaaaagttagtgaggctgtgatcttaagcacgttatcctaccaggaggcctgggaaatgtcatattttggcgcaaatgtgttgcatccccgcaccattatacctgtgatgaaagacaacatccccattgttattaggaacatgttcaatatctctgcccctggaaccatgatttgcaggcagcctgccaatgataatggtgatttagatgcttgtgtcaaatcatttgctactattgataatttggcccttgtcaatgttgaaggaactggaatggctggtgttccaggtacatcaagtgccatatttagtgctgtaaaagatgttggagctaatgttatcatgatatctcaggctagcagtgagcactctgtatgctttgctgttccagaaaaggaggttgctgcagtttcggctgccttgcatgttaggtttcgtgaggcattagcagcagggaggttatctaaggttgaagttattaatggttgtagcattcttgctgctgttggcctgaggatggccagcactcctggagtgagtgcaatcctttttgatgcattagcaaaggcaaacattaatgttcgagcaatagctcaaggctgcagtgaatacaatattactgttgtattaaagcaagaagattgtgtaagggctctgagagctgctcactcaaggttcttcctctccaaaaccacacttgctgttgggatcattggacctggtttaattggtgggacactccttaaccagctgaaggatcaggctgctgttctcaaggaaaatatgaacattgatctgcgtgtaattggaataactggctcaagtacaatgcttttgagtgacacgggaatagacttaacccagtggaaagagcttctacgaaaggaaggagaaccagctgatgttgctaattttgttcgccatttgtctgataatcatgtgtttccgaacaaggttttggtggactgcacagcagatacaagtgtagcatcccactattatgattggttaaagaagggtattcatgtcatcacgcccaataagaaagcaaattctgggccacttgatcggtacctgaaattacggactctgcagcgtgcctcatacactcattacttttatgaagcaactgttggtgctggcctcccaatcattagcaccctgcgaggtcttctggagacgggtgacaagatactgcgtatcgagggcattttcagtggaactttgagttatatatttaacaattttgaaggaacaagaaccttcagcaatgtcgttgctgaagcaaaagaggctggatacactgaacctgatccaagagatgatctatctgggactgatgttgccagaaaggtcattatcctggctagggaatcgggtttgaggcttgaactttctgatattcctgttaagagccttgtgccagaggcacttgcgtcatgctcatcggcagatgaattcatgcaaaagctaccatccttcgatgaggactgggcccggcaacgcagtgacgctgaggctgcaggcgaagtcctgcggtatgttggagtcgtggacgtggtgaacaaggagggccaagtggagctgcagaggtacaagagggaccacccgttcgcgcagctctccggctccgacaacatcatcgccttcaccacgtcgaggtacaaggagcagccgctgatcgtgcgggggccaggcgcgggtgcggaggtgacagccggaggcgtcttctgcgacatcctgcggctggcctcttacctgggcgccccgtcgtagggtagggtagccgagccctgtgacgaatctcctcagaggcagacggacaccattgtcctgcatgatgtctccgttgctcccgtatggacgagctgtgggtagtgtattgttctgagtgccagcaaataaggtccctcttgttagggaagggctttggtgtcaggcgtggttgtttcatcgaatccagagttcatattaaactgataatgaagtgccaactcaataatgcaacaacgtttgcttgtgggctaaaaaaa

SEQ ID NO: 31588 - DNA, 561 bp, Setaria italica
  Peptide Sequence Number=SeqID_97562
ggaattggtcacatgattattcttttgcaagttgagataaagagcatccaagcgtacttatgcttatattattactcattgcaaagtcattttttgtttcacattgggggcatttcgcatgtgtttgagtttgtagaagtaaatatttcacacgataatatttgatgcttatagatgaaatttgttttgcctgtagcaacgtatggacacgatcctagtcaattatcaaaatgcggcatttgctccaaaagacgtttggacaattatttcaagattcctttatgataagccagagtaggtggactcgtagatttcatgttataccattattttaggattggtgtatccttttgtctcccaaattaatggtcgatcctatgttctaaatatctcatttatgtaagatttaatatatgcgctagattatgtcaataggttcctatgaatcgacattaccgatatgaattgtagtttgtatgttgcgatgattaactgtcacgatgtggacgatcctaggttttaagtatctcatttctgtaagatttaaataaaaaaaaaaaa

SEQ ID NO: 31589 - DNA, 199 bp, Setaria italica
  Peptide Sequence Number=SeqID_97563
tccctgcgtcctgctcccccaatgtctaaggcagtaggttacgtagaaaaagagccaatatatgttccttgatgatgtacgtccacagaactagttgattcagagcaagcgaaaggaaacaactcacctgtctaatttagacatatagctcaagcaaatcaacaagaagagcaacctaaacagtaggagaatttagtat

SEQ ID NO: 31590 - DNA, 508 bp, Setaria italica
  Peptide Sequence Number=SeqID_97564
ttttttttttttttttcctattcagcaggctctgataccttccatttccattcccataaacttaacgcatcaacatagtgaaatcaatcttacattgcaacagttgtaaatacaatgatcgatcagttcaactgtatagctacgctgttggttacactgaacttaccatgataccacacacagtacaaatctaacaatcagtaagacaactcgctaataaacatgattacgaaactaccatggattaccggagttacagaagtcgcagaacagcagcaactaaggttaccaaccaggtttagctaatcaggagacccatcgaagcggcaatgccagccctcgcaggtgctatttcgagtgcggcccgtcagacttgctggacggcatgctgcggacgttcttcagcaggtcctggatcttggacagcatcatcatctgtgaggggtcaccagcgctactgctaccaccgatgccaaggccaccgctgctagcagtctagtccttgtct

SEQ ID NO: 31591 - DNA, 2006 bp, Setaria italica
  Peptide Sequence Number=SeqID_97565
agttaagaatttgtactgtgtgtggtatcatggtaagttcagtgtaaccaacagcgtagctatacagtacaaatctaacaatcagtaagacaactcgctaataaacatgattacgaaactaccatggattaccggagttacagaagtcgcagaacagcagcaactaaggttaccaaccaggtttagctaatcaggagacccatcgaagcggcaatgccagccctcgcaggtgctatttcgagtgcggcccgtcagacttgctggacggcatgctgcggacgttcttcagcaggtcctggatcttggacagcatcatcatctgtgaggggtcaccagcgctactgctaccaccgatgccaaggccaccgctgctagcagcctgcggcggcggtggccgctggttctcctgcagcttgatcttctcaaagatgtactgcttctccgcctcagcctcctccaggcggcgcttgaggtacatgctcgcgtagtcctgccccgcctcctccgacttcttcgccagcgcgacgctccgcagccgctctgcctcctgccgggcctcgctggccttcagctggaacatctccgcttccacctgcttcaggcggatgatgctctccagctcctctgcctgctgcagcttctgcagccgctccgccttcagctcctgggcctccctggccttctcctccagctcgcggtcgcaggcgtccacagcaaggcgagcccttttatacattcgcattttctcttcagcaacaatctccatctttttgacagcctcctggacaacctcggcaattcggttgcaggcctcctggggagtgatcgagcgccctggctcttcattctcaaagctctttggggaggcaatatccagctcttggagagcttgtagcagcatcctaggacttacggattcagcagaagcactcctcaatctgtcaaccagctcaacacatttcctgaacaatttattcccttttgaatcctcactcagacggaatatcttacaaacatagtcaagctcccgcaacaaagcatctctgtcccaaccaggcgcacattgctgaaagacatccctaacccaccccagcagttcagatgtcctctggcaggcctggcaccggaaaagcatctccgcatgactaacaccattcttaatcgtctgcccagtcccaatccgcccatcacggatcgcgcagtccgtgtgagtccagtgagagcagacatcacacccgatccagcggcacgtgttgacctcgaaatcaaacttattgcagatgacacacatgcagaggttgcagaacccgttccggctgctgcatataccacacctgcactcctcagcagggagggtgctctggcaggcgatgttccggcacctcttgtacaagaaaacctccgcgagccggctctggggtatgttgacgctgggatgcaggaacgcctggatcccggtcttgatggcgacaaggacctccagctgcacgtggtgcgccaccgaaagcgcggcaggggtcagatcaaccctgccctggacaagcttctgcaggtacaggaactcctccacatgatgcgaaccaccagtcccttccagaatcgagcggagctcggtcttgacctcatccagcacctcctcaccaatgaccttcatcttctccgcaacaacgtccaccctgtcccgagcaatctccctgagcgtcacccaaccggcgcccgggataatcctaccccggacggcctgcaggtcgtgaacgccgttacacaccaccacctccttgtccttgctgccagccatcctcaccgccgttatcggcgctgccgccacgggaggaccgccgccgccgccgctcttgccggtgctgggctccccgggccacgtctcccgggagctggcgctctcggtggcggagtcgtgccccccgtcggagttggacagcggctcctgcgcgtccgggggcgagccgacctgctccggcgaggttgcggcggccgcagcggcgccg

SEQ ID NO: 31592 - DNA, 333 bp, Setaria italica
  misc_feature (299)..(299): n is a, c, g, or t
  Peptide Sequence Number=SeqID_97566
tcaggcgtggacttcgttcatcttgtatacttgtctgctcacttacaatgttatttgattactaacaagctggtaacattgtcgacatttattaccagacttattctagttactgcagtattagtaaagaagtgatttaaatactcaattgtcggctctatactgaggacatgattatctgcatgataaaaaaagcaaatgaaaacgctaggtgtcgtcctaatcctactgctctttatccttctagttagtgtttgacatttttgcgaagttgtcaatatcatacttatttctaaagntttgctgctaccatcttctctgcatatctaacta

SEQ ID NO: 31593 - DNA, 457 bp, Setaria italica
  Peptide Sequence Number=SeqID_97567
gaatattttgcgagaagatgcaaaattaaccgtggacaggtgctttcttttcattttaactgtgtttccatggtatacagatatatttctcttatctaataggattatcctcagaggtgccagaaatgctgctgctagatccttgtatattcctgcgtgctcgagagaaaaaaaagatccttgtatattgctaatgctatttttgaagtatcatgcaagttttgcaactattgctgccttatctgtatagttcaagcagtgcagcatattaaacttgtcttctcttgttaatcatcaggttgcagcaggaaagcattacaacatttctactatcaggggatagggaagaagcagtgacaagcattggaagaattgtaggaatcaggaacgaaaacataaagtcttccctaactccgcaggacaaagcaagcattatatcaactttgcaaggggaggg

SEQ ID NO: 31594 - DNA, 819 bp, Setaria italica
  Peptide Sequence Number=SeqID_97568
cctcgctcggtatccatgtcgcccatggaacgtttttggatttgttgcataattcatatgtgaaatgtggcgttgctaccacggctttgtttgggcctggaagagatatactgtttgatggcttcagagcattcaagcaaggttcccccaacatgaactctctagtaggattcggctctgcagctgcatttgctatcagtgcaatgtccttgctgaaccctgagttggagtggaattcaaccttttttgacgaaccggtcatgcttcttggatttgtacttcttggacgatctcttgaagaaagtgcaaggcttaaggcatccagcgatatgaatgagctcatttcactgttatcacctcaatcgaggttaattgttacttcatcaagtgatgacccttcttcagacactattttgaattctgatgcaatcacagttgaagttcctgttgatgatgtccgtgttggagactcaatactggtcctaccaggagaaactatacctgtagatggcaatgtcattggtggatcaagttttgttgacgaatcaatgcttaccggagaatccttgcctgtagccaaggagacagggcttcctgtatttgcaggaactgtgaactgggatgggccgctaaagatcagagcaacatgtactggaccgtcatcaacaattgctaagatagtccgcatggttgaggatgcccaagcacgtgaagctcctgttcaaagactcgcagattccattgcaggaccatttgtgtatactgttatgacattggctgcggcaaccttttccttctggtattacatttggctacaca

SEQ ID NO: 31595 - DNA, 2067 bp, Setaria italica
  Peptide Sequence Number=SeqID_97569
tactaactaagtttagtaaagtttaccttagtttagtaattagtaattagttaccgttagtttaggaagaactacaatactggtcctaccaggagaaactatacctgtagatggcaatgtcattggtggatcaagttttgttgacgaatcaatgcttaccggagaatccttgcctgtagccaaggagacagggcttcctgtatttgcaggaactgtgaactgggatgggccgctaaagatcagagcaacatgtactggaccgtcatcaacaattgctaagatagtccgcatggttgaggatgcccaagcacgtgaagctcctgttcaaagactcgcagattccattgcaggaccatttgtgtatactgttatgacattggctgcggcaaccttttccttctggtattacattggcacacacttatttccggaggttcttctgaatgatattgctggcccggatggggattcattacttttgagtataaagcttgctgttgacgtactagttgtttcctgcccttgtgcactcggattagctacacctacagctatcttaataggaacttccctgggagctaaaagaggattacttattagaggaggtgatgttttagagcgtttggctggaatagatgctcttgtgcttgataagacagggacacttacagaaggaaaaccagtagttacttctattgcttctctggcatatgaggaggcagaggttcttcgtctcgctgctgcagtggagaaaacagcattgcacccaattgcaaatgctataatgaacaaggctgaactgctcaagttggatattccaatcacaagtggtcagcttacagagcctggatttggctgtttggcagaagtagatgggtgtttggttgcagtaggcactttggattgggtacacaaccgttttgaaactaaagcatcaccaactgaactgagagatcttagaaaccatctggagtttatgttgtctagtgaagcatcatcatcaaatcaatcgaagtcaattgcttatgttggtcgtgaaggagaaggaattataggtgctattgctatatcagatattttgcgagaagatgcaaaattaaccgtggacaggttgcagcaggaaagcattacaacatttctactatcaggggatagggaagaagcagtgacaagcattggaagaattgtaggaatcaggaacgaaaacataaagtcttccctaactccgcaggacaaagcaagcattatatcaactttgcaaggggaagggcacagagttgcaatggttggtgatggaataaatgatgcgccgtctttggcagctgcagatgttggaatagctatgcgaactcattcaaaagagaatgctgcctctgatgcagcttcagttgttctgttaggcaacagactttctcaggttgtagatgcactatccctgtcgaaagcaactatggcaaaagttcaacaaaatctggcctgggcagtggcatataacatcgtagccattcccattgccgccggtgtgttgctgcctcaatttgattttgccatgacgccatctctctcaggggggttgatggccctgagctccatctttgttgtcagcaattctttgcttctgcagctgcatgggtcgttccagaacacagagaaacggcagagtgatttgagttcaagattaaattaaattgttcggttcagttttaccccccagccgtaggatagtaccacaagatggtactgctggatgatagaggacgctggtactggttttccagctccggctcaagacagacgggctgaaagcctgaaactagtcgaactaaaactagtagcaagcaattcttgccagttgtagcatgttggtgcgtgtacagtttatatagccaactagagtagcaactatactagtcgcccagaaggcctataaggttagccattgcctttgccataaccctcgaacatatcattgtaaatttgtaaacaaattggattattgttcattaactgagatcactggggcctataaatgtatgattagtgttcatggacctaaaaaaaaaaaaa

SEQ ID NO: 31596 - DNA, 267 bp, Setaria italica
  Peptide Sequence Number=SeqID_97570
tcgtgtctgcatttcggttaggagtttgagcagggcaaggccggcacacatccttttcccaaacgtcacagacagttgggcgacagagatgccgtgcgacgccaagctactataggctcgggggcccttgctagttgtgggatgttgcggatagcaacacgtcgggagcattttccatgctccgtaggaaactacaccggacaaagctccaaatccgcggctatttttttcccgggggatcacaacggcaggtcgcccgtgatcgat

SEQ ID NO: 31597 - DNA, 482 bp, Setaria italica
  Peptide Sequence Number=SeqID_97571
tgtggagttgaagctgagtagcttccacgtcttggactcggaccccgggatgccccacaccgtggagacgtactgcccggcggcgccgctgccgttggtggccgtgagcaccatccagtagttgttggcaccgcctcccgccggcgcggaccagcactgcgacgtgctcacgtagctcatcgggatcatgtgggcgatcttgtacacgttcaccgcgaacttgcccacctgctggatgaagtagctgttgatgtcctcctgggtcgtgtaccccggcggcggcgacagggccgccaccacggccaccgtggctgcggcggcgaggagagctgcgactagcacaggagcggccgccgattgcttcatggctacctgatcggtagatcggtggacggcgagcttgctgtatgtgcgtataagcggctagggctcgtacgcacgtacagctagcgctgtgctagcgagctaggagggagctctgg

SEQ ID NO: 31598 - DNA, 283 bp, Setaria italica
  misc_feature (280)..(280): n is a, c, g, or t
  Peptide Sequence Number=SeqID_97572
ggctctagaagcttccatcactaggaacttccctgataatggcatcatatcatgcatgagccacaacacagacaacttgtacaggtaacaatcttatgctaaaatatcttgaaagcattgcttggtggttggtgcaaatatcttgaaattgtggtgattcacatgctgctattcttgctgcagttcaaaaaggagtgcagttgtgagagcctctgatgatttcgggccgagacgacccggcttcccataccaatacacattgcatctgtcgcctataacnctg

SEQ ID NO: 31599 - DNA, 499 bp, Setaria italica
  Peptide Sequence Number=SeqID_97573
agatatggaacctgaatgagcactctggtgtcgttggcgccttcaactgccaaggtgctggctggtgccgggtagggaagaagaaccttgtccatgatgagcagcctggaacagtcaccggtgtcatccgggcacgggatgtggattaccttgcaaaggttgctgatcaaagctggaacggtgacgtgatcgtgtattcgcatataggaggtaaatcctcattttcgtgaattactcatcttaactatctttctcattagtgacaagcattctggttgtccatttttcaggggaggtggtgtacctgccgaagaacgcctccttgcccgtgacactgagatcacgcgagtacgaggtgttcaccgtcgtcccagtgaaacacctgccgaacagcgcgtcctttgcgccgatcggtctgatcagcatgttcaactccggtggcgcggtgagggaggtgagatacggtgagaacgctgacgtagagctcaaagtgcggggc

SEQ ID NO: 31600 - DNA, 235 bp, Setaria italica
  Peptide Sequence Number=SeqID_97574
tttcatccagagatgaatgagcgtgaagccgctaacttcatggtacgaacatgtgttgatgcttacaacaagtggactactgcagggtatgacttgattcagtacttgcagcagggtattgagaaatagtttgtttctcgtttgtagatggtatatgttcgtgtacatcaattgtatgtagcaactaataccatctacaaaacgagaaacaaactatttctcaataccctgctgc

SEQ ID NO: 31601 - DNA, 321 bp, Setaria italica
  Peptide Sequence Number=SeqID_97575
gggtggtgattatggaggagcaagagagaggtcgagcagcaagcaagctgtcggattaaacctgtatctatttccgtacggtgttttgcctactggaccagggcgaggcataattgaggtggtcccaaatactcggagtagaaatcaaatgggtgaaacaactgatggtggtttactagagatatttcagcaagactttggtcctgtaggttcaccttctttcgaagctgctcgtgaaaagtttatgatcagtgtaggtagactaggaataatagactagttagactaagactttaacttacttacaaaccgaaaggaata

SEQ ID NO: 31602 - DNA, 337 bp, Setaria italica
  Peptide Sequence Number=SeqID_97576
gatacacacatctaaagagtatcactgaacaaaatgattgaagaaattgccttattgtttttggttcttttccctcttcccaaggaagagcggagagcgggtataagaagggaactggagaagatttcgattccaggtgatgacctctacctacctactgcgacaaacaagtttgtaaggggtatacagctggacagtggtactcctctccagtctgctgcgaaagttccaataatgattacttttaatgttgttgaccgtgatggggacccaaatgatgtaaaaccacaggcttgcatttttaaggttggtgatgactgtagacaagatgtgctgg

SEQ ID NO: 31603 - DNA, 1908 bp, Setaria italica
  Peptide Sequence Number=SeqID_97577
gtaagtgggaaagaatagattggaacggcattaggacggccaatattcctgcagttatggactctgcagcagcagcatcaggagccaaaaaagaagcacctgacttcagtctggaagtactctctactgcagtagtaagtgcaactgtgaaatgcaaccatgctggcgagattgctggtatgagaaggctattcagtactatgggaggtgtaaacatgggtatggctcctcatggtatgcagtctgcacagccccatcagtcatttgatgaagtttttgtatccaagtttgttagtcttcttcagaactttgttgttgcggcggagaaacaaccaatagataattcacaatttcgtgaaacatgttctcaggctacagcattacttcttgatcatatgatgtctgattctagagcaaatctggaaggattttctcagcttatacggcttctatgttggtgtcctgcttatatttctacccctgatgcaatggagactggaatctatatctggacatggctagtgtcagctgcaccttctttaggtcctcttgtgcttgcagaacttgttgatgcatggttgtggaccatagatacaaagcgtggattgtttgcatcagatatgaattactgtggcccagatgcaaaattgaggccacatcttatccctggtgagcctgaggcaccaccagaaaaggatccagtcgaagcaataatagctcatagactctggcttggcttctttatcgatcgttttgaggtggttcggcatgatagcatcgaacaacttctacttctaggtcggatgctacaaggaacaatgaagtctccagctcatttttctcaccatcctgctgctaccggcactttctttaccgcgatgctccttggattgaagttttgttcatgccagtctcaatctaacttacagaaatgtaatatggggcttcagttgttagaggacagggtataccgtgctgctttgggatggttttcatatgcgcctgagtggtatgaatctcaaaacaaagcatatgctcagaaagaggcccagtcagcgtcagtatttgtccattttctacaaaatgagcgcagcggcagtcctgttgattctgctttgaagtcgcagggacgtgaaggtgaacataatacggcagatcagatccaccctgtctggggctgtgttgacaactatgcaactgcaagggaaaagcgtaagcaattacttgtgacactttctcagactgaggcagacaggcttgaagtctgggcacaaccagtaaatacaaaagatacgacgacatttcgtggtaaaatcagctcagataaatggattgatcatgttagaactgcttttgctgttgatcctcgaattgctctctctatgcctttgaggtttcccacaaatacaacaatgcaatccgagatcactcagttggtacaaacgcggttactggagcttcgtacaattcccgaagcattaccttttttcattactccaaaggcagtagatgaaaattcagtgctgttacagcaactaccacactgggctccatgttctgttacacaggcattggagtttcttactcctccttataaaggacatccgcgtgttatggcatatgtccttcgtgtcttggagacttacccacctgagactgttacctttttcatgccacagttggtgcaatctctcagatatgatgaagggaaacttgttgaagggtacttgcttggagctactcaaagaagtaatatatttgctcatatcttaatatggcatctgcagggagaatacgttgatgaatctgagaaagatgcggctgctcaaaagggcagtgcattccaatccttgcttcctgctgttaaggacaaaattattgagagtttcactccggaggctcgtaaca

SEQ ID NO: 31604 - DNA, 1735 bp, Setaria italica
  Peptide Sequence Number=SeqID_97578
gatacacacatctaaagagtatcactgaacaaatgattgaagaaattgccttattgttttgagttgttacctttttcatgccacagttggtgcaatctctcagatatgatgaagggaaacttgttgaagggtacttgcttggagctactcaaagaagtaatatatttgctcatatcttaatatggcatctgcagggagaatacgttgatgaatctgagaaagatgcggctgctcaaaagggcagtgcattccaatccttgcttcctgctgttaaggacaaaattattgagagtttcactccggaggctcgtaacatgttcgaaagagagtttgatttctttgataaggtcacctctatttctggtgttcttttccctcttcccaaggaagagcggagagcgggtataagaagggaactggagaagatttcgattccaggtgatgacctctacctacctactgcgacaaacaagtttgtaaggggtatacagctggacagtggtactcctctccagtctgctgcgaaagttccaataatgattacttttaatgttgttgaccgtgatggggacccaaatgatgtaaaaccacaggcttgcatttttaaggttggtgatgactgtagacaagatgtgctggcgctgcaagttatttctctattgagggatgtatttcaagctgtcggattaaacctgtatctatttccgtacggtgttttgcctactggaccagggcgaggcataattgaggtggtcccaaatactcggagtagaaatcaaatgggtgaaacaactgatggtggtttactagagatatttcagcaagactttggtcctgtaggttcaccttctttcgaagctgctcgtgaaaagtttatgatcagtagtgctggatatgctgttgctagcttacttcttcaaccgaaggatcggcataatggcaatcttctctttgataaccaggggagattagttcatattgattttggttttattttggagatttcacctggaggtaacatggggtttgagagtgcacatttcaagctaagccacgagatgacacaactgctggatccatctggaactatgaagagtgatacatggatccagtttctcagattgtgcgtcaaaggatacctagcagctaggaggcacatgaatgggattttaagtacagtcaatctgatggtggacagtgggcttccttgctttagcaggggagatcctatcaataatcttcggaagcggtttcatccagagatgaatgagcgtgaagccgctaacttcatggtacgaacatgtgttgatgcttacaacaagtggactactgcagggtatgacttgattcagtacttgcagcagggtattgagaaatagtttgtttctcgttttgtagatggtatatgttcgtgtacatcaattgtatgtagcaactaattttttttcttatgtagaattgatttttttagttgtatcattgtatggtaaggatgagggaattcacgtgattaacagaggatgtttgttgcacagaggcaattcttttctccgcactgtaagactgcctagccagtagctagtaagtagctcgttgagtttttgtattagggcctcagaatccaaaacttgtgcatttgcacctgatatactcccaacttcactacatgtatgattcgtagtttgatcatgtggattcaccatctacaaaacgagaaacaaactaattactcaat

SEQ ID NO: 31605 - DNA, 736 bp, Setaria italica
  Peptide Sequence Number=SeqID_97579
cttccgtcgcgacagctcccgacctcctgccggtcttccccctctggtagtccgcgcgaatcccgaggcggcggaggagtaggaggaagaggaggagcggaggggggcgggcccatcagccatgagcctcgcgggctccgccctggaggcggcgctgcaggcggtggggcgcggcctcgacgccgccggcgaccaccgcctgctctactgcaagggcgccgggaggctcgtggacctcgacgaggaccgcgcacgggacatcccccttataagcgggggcgtcctctccagcgtgcccccagacgtcgaggtcgagcagtgccccagcaaccccgtgcgaatccggccccccgccccccacggcgcgcccccgcagccgcggacgagcccttcgtctgcagctatccgcagatggctgagtttttcaacaggaagtcatgcttgttagagaccgtaccgctgggttccttcaattcgctgttcagcttcaccggttcatggaagaacgatgctgcggctacgaaggccctcgcgattgatggctattctctgcctctgtttcgagtgataatcacgagtcaagaacttactctgcttgagagtgttaagcgagcgattccaaatgtttgggatccatcagcattggctagctttatcgagaattatggtacccatattattacctctgttacggttggtggtaaggatgaggtatatattaagcagcattcatcat

SEQ ID NO: 31606 - DNA, 720 bp, Setaria italica
  Peptide Sequence Number=SeqID_97580
attcacctgtaacttatgatccttcttatactgatccttcctgttttttattcctcttctccttctgctcctgcttctgcttttccttaagctccttcttctccagcttcatcctatccctctgatccttcagctcctgcttctgcttttccttaagctccttcttctcctgcttcttaaggggggacgggagggttgaggagtccaatatatcagtatctttggtttcgtaatcatacgtataataagtcagttttgaatctttcacccctgcttgaaacccaacacttgccttagtctctgtttgtggtgacataagtctctctctactctctgtttctccccgtctttctctactagattcgagatttggaacaaaagagccgagtgaatgaaggagcgagccttgtgaacgccagcgaagcattccgcaagccagtcaccacttaggtgctttcaattgctcttgaaaatctcaatcccacttcttgggtcaaagagaggacttgctggctagcctgtaaactagtctctagttactgattgcctctaactccctaagtttatagtccgcaaaggtaggagggattgaacatgtctccctctttgtatgctttttgtgataaacaaatctattatacaccagcacctgggctctattttgaataactaactgactggtttgcttaatatttccttcctgacaggctgaccactaaa

SEQ ID NO: 31607 - DNA, 696 bp, Setaria italica
  misc_feature (59)..(59): n is a, c, g, or t
  Peptide Sequence Number=SeqID_97581
agtcaccagctgggatacacttcttcaatctgataatccagagattaaatcaattgacnctttttgcagagtacttgtcatcacttcttcaagtagaagtcatcccagtagatggtgcacctggtttaacatcatttaagaaggaagagtgggtgcagaacagcattattttgtttgaaaatcttctgaacttcagaggagaagttgctaattgcaatgatttttctcagaagctagcttcagattggaggcagtaacttcttgagaaaggcacctgctcttcggatgttaacctctctatgtgatgggttgttctttgttggaaaattatcatttcaaataatgaaaggccttggaatgccagtgccctctcaattcatagaaacaaatgcagttatggaagtactacagattattcaagttgctagggataggaatgttcctatttattatccaacagatctctggtgcttgaacaatgacggtggaacattgggagtaattagctctactggacaactggatggctggacaccagccgatataggaccatcaacattggagaaaatatcttctataataccattatataagaagatactatggattggtcctacaaactacgatttagcagaagaattttcagttggagcaacacggttgggtcaaatactggaaaaaagcaagctttgatag

SEQ ID NO: 31608 - DNA, 495 bp, Setaria italica
  Peptide Sequence Number=SeqID_97582
ctcagtgtgagtagtgtctgctttgcaagcatttagacgacgagttgcatactccaatgcttgttatgatcgacatcatccatcagacaagattcggaattacccaagtgggttgattcaacaaacaagatctacccacatattgtatatgaggagctatccaaagcagaagctcctaatcaatgtgtggacacggacaactgcacactagaagaacgtcttttaagaggacttaagcgtgtgtcatgggaaaaggtggatgttagcttccacaacagcaaagtaagatctgcagcacatagtgtgattcaggtgaaggatcctgtgatgcattgcgaaggtgccgatgtcatacagcatatgattgaccattttactctctagtaacccgggtctctggaaacaagaacgtaaaaccaaggaataacaatttgactaaactagactagaagtacgaccgaaacctagaacaatagtttaataggaaaataacca

SEQ ID NO: 31609 - DNA, 1378 bp, Setaria italica
  Peptide Sequence Number=SeqID_97583
ggaggtggagaccggcgggaggcggcggccgaggaggacccggcggcggcgccggcgccggccggagccgggcccgaccacctggtggtcatggtccacgggatcgtcgggagcacagcagattggaagtttggagcagagcagtttgataagttgctctccgacaaagtcatagttcattgtagcaaccgcaacatgcgcaagcttactttagatggcattgatgtgatgggtgaacgattggcacaagaggttattgaagaaatcaacagaagaccatatatcaaaaagatatcttttgttgcacactcagttggaggattggttgctagatatgctattggaagactctatagaccgcctaaacaaacatcagaaaatgctccgcaaagtttgagtgacaacaacagaggtacaatacatggacttgaggcagtgaacttcataaccgttgcatcaccgcatcttggttccagaggaaataagcaggttcctttcctttttggagttactgcaattgaaaattttgcatgctgcatcattcatttgatatttggaagaactggcaaacatctctttcttactgattatgatgatggaaagcctccattgctgcaacgcatggtggacaattggggtgacctgcagttcatgtctgctttgcaagcatttagacgacgagttgcatactccaatgcttgttatgatcatattgttgggtggaggacatcatccatcagacaagattcggaattacccaagtgggttgattcaacaaacaagatctacccacatattgtatatgaggagctatccaaagcagaagctcctaatcaatgtgtggacacggacaactgcacactagaagaacgtcttttaagaggacttaagcgtgtgtcatgggaaaaggtggatgttagcttccacaacagcaaagtaagatctgcagcacatagtgtgattcaggtgaaggatcctgtgatgcattgcgaaggtgccgatgtcatacagcatatgattgaccattttactctctagtaacccgggtctctggaaacagacgtaaaccaggatacatttgctaactgctgagtcgccgaacctgacatgtttatggaaataccaggcatcaaagattcaagtcactgatggaagtaaatagagggggaaaacactcgttgtcatgttaagactatccttgtcattataaatgtttagcatttatttagtggtgttcttgatacggcgtgcgtgtattttagaagacatgctgcagatatgatgtgtatatgtgtttaaaaaaaaaggagctgttgcatggatacaacggaaatgctgatttcacttcgagaaatatgattgtacatgcaacaaggac

SEQ ID NO: 31610 - DNA, 343 bp, Setaria italica
  Peptide Sequence Number=SeqID_97584
gagatgtcggcgacctcgagggtgccgtcgccgaggagcagccgcggcgcgccgccggggcggccggtgtcgtcgcaggtgaggttgaagcccggccaggagcagcgcggcgggcccaggccgaaggggtacggcacctgcacgtcgccgcaggaggtggtgcagttggggagcccgataggcgctggagccaccagtggcagcggggcgggctgccgcaaccgcgctctgtgccgacgccgctgacatgatcaccgccgccgccgccgccgctaatagcactgctgctgccatggttagcggcgccatggattgacgcttgacggtatctacacagtatatg

SEQ ID NO: 31611 - DNA, 405 bp, Setaria italica
  Peptide Sequence Number=SeqID_97585
gggcagctgttgctacgacacgtgccgctactacgttgtcaacccatgcccagcacgatcgttgatgctaccgcttcgagcgtgtctcgccggcaacgacccgcttcgatcgtttctgcttgcttctgccactccccgtctgcctcgtggttcgtggaggcgtggagcgcccacggccgggcccgggcgctcaacgccgacgggtgcctttctttcttgtggagcagatgcactgcacacacgcgcggacacgcctgtccccgtccggctgtccccgcctgcctggctgcctcgtggttggtggtccgtgcgcgtggccaaccagtcagtgtgctctgggcccccacggggtgcagcagcgcagatctggactttaggacttacaacaacctaccgcggccagat

SEQ ID NO: 31612 - DNA, 332 bp, Setaria italica
  Peptide Sequence Number=SeqID_97586
ggtccaccgactgtacgatcgccctctccggcaggatgctcctcgccggatccgtcgccgttcccccgctcaagctcgacgagaagcccctgaagacgagcacgacctccacctcgtcgtccacccgggccttcaccagcagcgcctggtcgcgcgcgtcctcggtgtaccgctccatcctcgcgacgtcttcgttgtgcccccactccgcctcgtcgtcctccccctcatcctcctccacgtaccgcacccgccgcctcacgcgccagacggctctgcccgcgcgcgggtcgccgacgctgacgaggaggcgggagggaaggtgcccgaga

SEQ ID NO: 31613 - DNA, 743 bp, Setaria italica
  Peptide Sequence Number=SeqID_97587
agtcgatttacactggtagtcctacttgcattgcaaaaattctaggcatttaccaggttaagagcctgaaaggtggtaaggagatgaggatggatgtcctagtgatggaaaatcttttgtttgagcgtaatgtgacaacattgtatgatttaaagggttctgcaagatcaagatataacccggactcaaatggtagcgataaagtgcttcttgatcagaacttaattgaagcgatgcctacatcccctatttttgtttggaaacaaagcaaagcggctgctagagagagctgtttggaatgacacttcatttcttgcttccattgatgtaatggattattctttacttgttggtgttgatgagaaaaggcatgaacttgtaatgggaattatagatttcatgaggcaatatacgtgggacaaacacctagagacatgggttaaagcttcaggcatattgggtggaccgaaaaatgtgtcaccaacagtaatttcaccaaagcagtacaagaagcggttcaggaaagccatgtcggcttacttccttgtcgtcccagatcaatggtcacctccagcaatcatccccaacccgcaagtggctgagagtggtcaggacagcgaccaggttctcttgacggaattgtgagacgtgcatgcagaacctctaatggcagggaagtattcagggaataactctttttttgcaatgtttatagattttgacttgttacaattttgttcatt

SEQ ID NO: 31614 - DNA, 504 bp, Setaria italica
  misc_feature (484)..(504): n is a, c, g, or t
  Peptide Sequence Number=SeqID_97588
tggttttcttcccgggggtgctagccttcacagctgcatgacgccacatgggccagacaccaagacatacgaggcgacgatcagccgagctgatgccagcacggagccattcaggctcagcggcacgctggcgttcatgttcgagtcttcgctgatccctcgcgtgtgcaggtgggctcttgattccccgtgccgagaccttgattactaccaatgctggattggattgaagtcccacttctcacatgacaataatgctggattggatgagaaagattagttagctgcagcttatcatctatatgttgcattacattacatgcagacccgatggagctgtcatgtataatcgatccatctgtaataagctgctgcagtccgtagagtactcggtgcctatgtaacagaagcaagcagttagctagctgatgtgcagatagattgaataattgacggaatgtgatatttagatgtagctgtacgnnnnnnnnnnnnnnnnnnnnn

SEQ ID NO: 31615 - DNA, 1431 bp, Setaria italica
  Peptide Sequence Number=SeqID_97589
agccagcagaggagcagcagcaggagccttgccccgcccgtctcctcctccgacgacgattggagtcacctgcaaccgatcgaatcgatcagaagagagcaatggcggcctcggatgagattgaatcagtgtcgctgcggtacctctccggtctgggcaacagcttctcgtcggaggcggtggcggggtcgctccccgtggggcagaacagcccgctggtgtgcccgctggggctctacgccgagcagctctccggcacctccttcaccaccccgcgggccagcaacctgcgcacgtggctgtaccggatcaagccgtcggtgacccacgagcccttccacccccgggaagacaagggccgcctcgtcggggagttcgaccgcgcaaccaccgtcgccacgcccacgcagctgcgatggaggcccaccgaggtgcccctcgaccggcccctcgacttcatcgacggcctctacaccgtctgcggagccgggagcgcattcctccgccacggatacgccatccacatgtacgctgctaacaagtccatggacggatgcgccttctgcaacgcagatggtgatttcctcattgttccccagcaaggaaggttgttcatcacaaccgaatgcggaaagatgctagtttcacctggtgagatcgttgtgattcctcaaggcttccgctttgccgttgacctgcctgatggcccctcacgtggctatgtgtctgagattttcggcgcccactttcagctccctgatcttggccccatcggtgccaatggtttggcttcaccaagggatttcctttcccccacggcatggtttgagcaggcccaccgacctggatacatgatagtgcagaagtatggtggtgagctattcactgccacgcaggatttttctcccttcaatgtggttgcatggcatgggaattatgtcccatacaagtatgatttgagtaggttctgcccatttaataccgtcctattcgatcatggtgacccttcagtaaacacagtgcttaccgcgccgaccgataagcctggcgtggcgttacttgattttgtaatattcccacctaggtggctggttgctgaaaacacattccgccctccatactaccaccgcaactgcatgagtgagttcatgggcctcatctatgggatgtacgaggctaaggctgatggttttcttcccgggggtgctagccttcacagctgcatgacgccacatgggccagacaccaagacatacgaggcgacgatcagccgagctgatgccagcacggagccattcaggctcagcggcacgctggcgttcatgttcgagtcttcgctgatccctcgcgtgtgcaggtgagaaacaaaaggtaaaagggaaaaactaaaaacttaaaaagaaaaaattaaaaaaccccgttaaaaaagaa

SEQ ID NO: 31616 - DNA, 289 bp, Setaria italica
  Peptide Sequence Number=SeqID_97590
ctgcaactaaagtgtttggtcggcgcaaggagtcagaggaagcaattggatggctgaccaagccatcagttggagatgctgaaattgaggtgagcaaagtatctgttgtttccatagttggtcacggtgggatgggcaaaactaccctagcacaactcatacacaatgatgacactatcagaaggcattttgataaggtgatctgggcatgtgtatccactacctttaatgcaacgactgtcataaggaatatattggaaaatgctacttggccaacaaatggtgccag

SEQ ID NO: 31617 - DNA, 605 bp, Setaria italica
  Peptide Sequence Number=SeqID_97591
atggccgatacagcatacaatacacgaacctagctgagctttcctaaacatcagtgaaaaaaacacaccattgctgaaacttaacagtgagctatctgcggggatataccccccgggtaccaaggaaggtagaagatagagtccgaactgggactcctattaactcctattgtaatcaattaggtctcttgttgtaaccgactaggactttccatgtaaccctaccctccggagtatacaaggaggggcaggggtccctagatcggcagaaccacatcaggacttagagcctagaacaccaaaatacttgagcgcagggcgcaatacaatccacaccaacaggacgtagggtattacgctaatctggtggcccgaacatgtataaatcttgtgtctttgtgtccctgcgttaccatcttgctcctggtctggcgatcccacaaataatctaccaccgtgggtagccccgtggtgggactgccggtatattcccccgacactatccttaacaaccatttccaccatgtcatcaccaaatcctctttggtttgatgcccatctcaatttccttaagctccagcttcctagtcttcctagtccgtctt

SEQ ID NO: 31618 - DNA, 359 bp, Setaria italica
  Peptide Sequence Number=SeqID_97592
ttcaagccaaagaagatatacacttgttattgagatcaatatagccacgcacaaacacacgaccaatcgatatgattaacaaagtaatgctataacattacatatcctattcaggtgtcaactgtatatacaattgccctgaagtgaaagcagcaaaaggacctcaaaggaagcaatcacaacctcttcatccatttccgttcaaaactggccactctgtccaggaactactgtcgcgctaatctggtggcccgaacatgttattaaattctttgttgttcttccggtgttaccatcttgctcctggtctggcgatcccacaaataatctaccaccgtgggtagccccgtggtgggact

SEQ ID NO: 31619 - DNA, 1074 bp, Setaria italica
  Peptide Sequence Number=SeqID_97593
gcagaaccagctccgctaaaagttgattggataggaggcagagagcagagcgaagaacactgcggcactgctccttcccggcgctgcttatctccagctcccccctccagcgcgtcgccaactcgccatgaacacagccatggccaccacttccttatctctccaaggccgtccttcgcaggccccggccaagaagctgtcctccccgttcctcggcgccccggcctccttcctccggccactggcgccggcgtccagcgccgctccctcgcggcggaccctcgccgtcagggccatggcgccgccgaagccgggaggcaagcccaagaaagtggtgggcatgataaagctggccctggaggccggcaaggcgacgccggcgccgcccgttggaccggcgcttggtgctaagggtgtgaacatcatggcgttctgcaaggagtacaatgccaagacggccgagaaggctggttacatcatccccgtcgagatcaccgtcttcgatgataagagctttacattcatcttgaagacaccgccggcctcagtcctgctcctcaaggctgcaggcgtcgaaaaaggatcaaaagagccacagcgagaaaaggttggaaaagtaacagcagatcaagtccgtacgatagctcaagagaagttgccggacttgaactgcaagagcatcgagtctgctatgaggatcatcgctggcacggctgctaacatgggcattgatgttgatcctccaatccttcagaagaaggaaaaggtcatcttgtagtcttgctggcacccgcagatcatattaccaatggccttctgtagattatgccctcctttttgttcctcaattcgctgtgccaacttgaagttttcgtctggtgtgagtaaccttgttaaccaatccagtcatttggtgtagatgttcaacatttttttgccaaatccttctatatacaacatctgaaaggggtattccaagcctttgtgcaccaacattttttgctgtgtaaaccaaaaaaaaaaaaacaatacgactaggacaacggactagtacttaaactaaattaagggtaa

SEQ ID NO: 31620 - DNA, 249 bp, Setaria italica
  misc_feature (239)..(239): n is a, c, g, or t
  Peptide Sequence Number=SeqID_97594
gggaaaatgtttttatttgctagtttattgatggctcctgacctcaatcgccagtacgaacgaatgcacgcgcccttattttgctactgtaatttgtgcttctcggtgaatgacagtcatttcggcagcctggcctcccattcacgcaacgcaagcaagcgatgaatgggtcactcgcgcgtacaacaaatcaaccaagccagcatgagcggtagggaacagtacagcgactttttccnggcacatcaa

SEQ ID NO: 31621 - DNA, 434 bp, Setaria italica
  misc_feature (401)..(401): n is a, c, g, or t
  Peptide Sequence Number=SeqID_97595
cggcgctgcgtacgggccgtcgagcacgccccccgccacgaactggtaggccgcttcggtgaggtgcacgccgtcccacgagatgtgcctggacgggtccgggcacaggaccgacgtggcgttgcaggcgatgagcgtgccggagttgtgggggcctccgtcgccgcagcacgccgtcaacgcgacatccttcctgaacccgtgcttgagagggttgcgggtgatctccaggatggcgccgtagtagtcggcgtagacgacggcgacccccgggtggtcgtcgcgggggcggagctgccccagcatgcgccggagcgcgcggttgtgctcctcggcgaagtcgttgagccaccggatgcacccggcggcgtcgtagtcgccggggttgtcgctctggaacntggtcaggtaccgaggcatgcacccgaggggat

SEQ ID NO: 31622 - DNA, 230 bp, Setaria italica
  Peptide Sequence Number=SeqID_97596
cttcgactgggaactcagcgacgaggaccggctgaagataagtcagatgccacagcacaaaatggccagagtgacgggaatcctctgccccgaaggcgtctccagcgtggatatcaccgaggtcgatgtcgttgaaatgtaaccggcatctccatgcatttgcaatgggctagatatttggtggctcgagcatgcatgaggagtgacactgggaatttctggatgccggc

SEQ ID NO: 31623 - DNA, 594 bp, Setaria italica
  Peptide Sequence Number=SeqID_97597
gttggccctagagatgttaggttgcacaatcaacctatagacgaggtgcaacacccttgcaacctgattaggctgtgggcagtcaacaataaatccaatcaaacagcggacatcatctgaggctgctgttgaagacgctgctcctagcagcagttcaacaacaactaaaagttcatcaactagagcattcacttcacccaatgatctctttgttccagtaaatgcaaagttatcaattgaatctggttcctgaattgcccagtaacaccttctgcaaccatcaagaagcatttgcatcgcttttgcatctcgcatgcaagcagattcggtaaataccatatctgcaagagaggagagaagcttcttttgtaaaccatagttgcatgaactccacagcttcaggtccaacagtaaactgctgaaaagctgaactttaagctcatgattatttctttgagactggcacaaagatacaactgcagcaacaagctcctcatcagtcagtgcctcttctccactttccaccttcgaaagagcttgcaacagataatgtaaaacacgtgacaaaagctctggtgcaaatgtccagcataa

SEQ ID NO: 31624 - DNA, 695 bp, Setaria italica
  Peptide Sequence Number=SeqID_97598
ttcaatgcagactacagagattggtctgatcctcatgaccctggctttccaggtgaacacatacctgacccagatgatttagaggatcctatggatcctgttggggaggattctgatgatgaggatccatggaagcctttgaatccccatgaacctggcaacctaaagattagaccttacaagagagttaaaggttctgcacggcaggttatgggcactgcaaaaaagaaactctcacatctttatttcctatggcaaagatggatagtgttattatacctgaacatgcaaagcctttgaagcacaacagtctcagcaggaggaacttcatccttcccaatcaccccctccttatgaaaagcatatgaggtcatttcaatatggagagcaaggaaatcctgatgtgtttggagattcgacctatgacactggacctgataccgatgttggttttggtggtatcgatgatccgggtagtccaatgtgtggtggcatgggtgatgagtttgagagtccaacatgtcctgctgagaaaaaggaagaacctccttatgagactcaagtttcacaggagaacatagatacacatgaaagcctagacgatttgtgtcggtcacatctgaataagctccttgccagcatagctgaggttgaacaacagagtgagatggatgctcgagtttcaacgtggaaag

SEQ ID NO: 31625 - DNA, 1129 bp, Setaria italica
  Peptide Sequence Number=SeqID_97599
gcctagcccactcattcatgtattgatatttattcatcactgtccagctgctagccatagcgaaaatcaccactgacacatttctggaggatgccaacaccaccaccatctatttcctgttatacttttcaacttttgacaggttgcttgagatatgagggaccagaaacagccaacctctgttttagctgtcacctaccacaccgaccttcagtggcgcagtttaaccatgatcagctaatgaaactaacaaccacactaaagctattaaatatatgaaattatggaaaaatatttttgaatgtttcaattctctaaatagcctatcccagcttgctttgggctaaaaggctttcttgttctcttttttgtgtgttgtcgaaatatgttttcaatgttctatggagtgattatcatatctatacttatgtactgaataacttttgtagtgttacaagccatgctaaccatgatttgatatttcacatgttaatagttgagagtattcgcaaatattttactcttctggtcgaatctatttaaattgagtatatttgtctatttattttgattggacaaatttagtttcatataactccaagtttgtgttatgcaattctcccaggtaactttcaaaacaaggatttaccactgcaacgttgattctgctggtaaagtgcatttggacatattgaaggatggctggagtccagctttcaccatttcaaaggtgttactggcaataaaagacatcatcggcaatccagatccatgtatgttttgatcattctctgtacaccttctgtaaacagtcatggattccagtgcaaaccaagcctactgtctgcagggtttctactttgctttaacgctcaaaaagagttatgtttatgatctgtttgtgcagacaccccgcttgtgatgagcatttcacgtcagtatcttactgacagaactaaacacgatgaaatagcagctgagtggacaatgaggtttgcaagatagggaattctgtctgtatgtaagcaagattgatcttgtaaaaagaataaatccttaatgtggcctgagatgtagaatgttggcaaaggacccgcgttttgttaatccgagttgtgacataaaggtg

SEQ ID NO: 31626 - DNA, 866 bp, Setaria italica
  Peptide Sequence Number=SeqID_97600
cgctttcgccctccgtcactgtcgtccgtcgcggcgggcatgtcctcatcctccttccccacctcccgcttccccttcgccgccggcgccggggcccccggccggcggcggaggaggaggaggaggcggaagcagcgtgcggccgtgggggtcgagcggcgggacgtcggtgtcgtcgtctggtaagcggatacagaaagagttgctggacctcaacgcctccgactgctccgccgggcccaagggcgacaacctctatcactggctctccaccatcatcgggccccaaggatcgccgtatgaaggagggatatttttccttgatatcgtgttcccccctgattatcctttcaaacctcccatggtaactttcaaaacaaggatttaccactgcaacgttgattctgctggtaaagtgcatttggacatattgaaggatggctggagtccagctttcaccatttcaaaggtgttactggcaataaaagacatcatcggcaatccagatccatacaccccgcttgtgatgagcatttcacgtcagtatcttactgacagaactaaacacgatgaaatagcagctgagtggacaatgaggtttgcaagatagggaattctgtctgtatgtaagcaagattgatcttgtaaaagaataatccttaatgtggcctgagatgtagaatgttggcaaaggacccgcgttttgtttaatccgagttgtgacataaaggtgtaatttgtgtttgagtattacttgctgcttttaagcacagaatcatctccttttttttcgattttgcacttctgccacagttgcttaattaactcttcagaacctgctatttgagcttattagtttctcgaaa

SEQ ID NO: 31627 - DNA, 288 bp, Setaria italica
  Peptide Sequence Number=SeqID_97601
cggcgagccagggctcggccccggccccgtccgcgcggcacgcggcgacgaccgccttgagggccgcgaaggcgtcctcgtaggcggcggggaggcggtgctcgggagcgaggcggtagtcggcggagacgacgagggcggggaccgcggcggcgagggaggcggcgtagatgtggtagagcggggaggcggcggtgtggaccatgaacgcgccgccgtggaagaacacgatgacggggagcctcttgccgggctccaccccggcggggaggtagaggcgggcggaga

SEQ ID NO: 31628 - DNA, 323 bp, Setaria italica
  Peptide Sequence Number=SeqID_97602
cccgtccgctctttccccaatccccaccgatccttctctcccgacacggccaccgccgctgcgatgtcgtcgccggcagcgaccgcgccgtcttcctcgggcgcgacgcagacgcagccgcagcctccgcctccagagcagcagggcgcctcgagggagcggaggatggagtcgctggggtggctgacggagtcggcggtgatgccgaagaagcacaaggccatcgagggcgtgggcgccgcctccatcctcgacctcaaggcccagctctaccgcacccaggaggaggcccgcaaccccaccgcccctggtgccgtcacacg

SEQ ID NO: 31629 - DNA, 261 bp, Setaria italica
  Peptide Sequence Number=SeqID_97603
ggaagttgaccttctgaatggacatgcaatcaagccacacatcatcggcgtcatcatatcctgtcgactgttttaatttgtttaatcatgtagcagatcaacgcaagatcacggcgaggtcgctcttcttcgtcggtgagatcggagtcaacgactacttcctcgccctcatgagcaagtccgccgatgtcgcggagagcctcgtgccacacatcatcggcaccatccgctcagccctgactgtaactactatacacccac

SEQ ID NO: 31630 - DNA, 1955 bp, Setaria italica
  Peptide Sequence Number=SeqID_97604
cttaatgacatcatatcttgcctatgcggctgcagaggggttattgtggggcagtattctgactcttgtgtgagtaggtctcgtctacaatttctttttctcaaacaagcaggagagctgtgtatcattgcattaagaaaagagtcttacaaacaccaacacacaagtaataaggtactaatgccagctattctgtaaattgatcttagcaaaaacacaaggaatgaacacagaatatctttgaacaatcaaaggtcaggtccaggttctatttgctactggaacttccacgtcttgtataacagcaaaatatgctttcagcatcagatacagtaaacactggaacaaaataatggatacaaataagaaactagaaggcattgctgtagagctcaccgttgcaactcttgagagcaaagacttatccgtgtagaagaggtatgcaaaaccttccctacctgatcgtcctactcttcctcgcaactacaataattgtccagtttgcagaactatttggactcgcccagctgtatcagttacgaggaagagtaggacgatcaggtagggaaggttttgcatacctcttctacacggataagtctttgctctcaagagttgcaacggatagacttggagctattgaggagcattcagagcttggccaaggttttcatgttgcagagaaggatatgggtatcagggggtttaggaagtttgtttggtgaccaacaatctggagatgttgcaaatgttggcattgatctattctttgatatgctttttgacagcttgtcaaaggttgatcagttttgccttgtacctgttccttacaaagatgttcagctggatataaacatttctcctcatctctcctctgaatatattagttacctggaaaatcctgtcgaattgctcaatgaagcagcaaaagctgcagagaaagatctatggaccttaatacagttcacagaagatcttcgtcgacgatatggaaaggagccccgtgatatggagttgctattgaaaaagctctatgtaaggcggatggcagcagatcttggtatcagtcgggtatatccatctggcaaaacgatattcatgaaaacaaacatgaacaagaaggtatttaggctcatgacagaagcgatgacttccgaaacacatcggaattccctatcgttcgtcggaaaagaaattaaggctgaactactcgtcagtttaccagacactctacttctgaactggcttttccattgcttagcagactgctatgctgtgataccagcccttgtgaagtactagatactttgtttacaagaactgaaggtttttgccgccaccatgaaagggagcaaactatccatgctcgaagagaaagtctctgagaaagcagccttggcaattggggtagtctgcaatggatggttcttcctcgtggtgatattggcctcaggctctgccaagccaaggcatgcccaatcatacacataactggtttaggaaagtctgtcagaattgttaacataacagagcatacctaaagtcggtctgccaaattttacaggaggacgctagaagccacagattgcattttctacatttgctgacagcagtggctgatggattgcctgttgcataatactaacttgagaagttgagatgcagcgtgacattgggaagcttggagaactcaattttgatcctatctgacaaaatagattatattcaaaactaggcaagatctttgacggatggactatcaagttgttgctcgactaacaggttggtagcgttggcattgaccatacaccatttgtctgacaaaagaattattagggaatttggggccaattggtctgtaaattaatgtattgtaagacaggtagtgacagactgacaggtgacagtgatcatattcgttttctacaacaaagttgtgtagcggttcaagaggt

SEQ ID NO: 31631 - DNA, 880 bp, Setaria italica
  Peptide Sequence Number=SeqID_97605
agccccgtgatatggagttgctattgaaaaagctctatgtaaggcgggatggcagcagatcttggtatcagtcgggtatatccatctcgtcgacgaagatcttctgtgaactgtattaaggtccatagatctttctctgcagcttttgctgcttcattgagcaattcgacaggattttccaggtaactaatatattcagaggagagatgaggagaaatgtttatatccagctgaacatctttgtaaggaacaggtacaaggcaaaactgatcaacctttgacaagctgtcaaaaagcatatcaaagaatagatcaatgccaacatttgcaacatctccagattgttggtcaccaaacaaacttccaaaccccctgatacccatatccttctctgcaacatgaaaaccttggccaagctctgaatgctcctcaatagctccaagtctatccgttgcaactcttgagagcaaagacttatccgtgtagaagaggtatgcaaaaccttccctacctgatcgtcctactcttcctcgtaactgatacagctgggcgagtccaaatagttctgcaaactggacaattattgtattttgcgtttgcaacatctattccactttcaataatatgcgtgcagacaagaattttcacttccccgcgggcaaacttttccattgcaaattgtatgttctttgacattttctttccatgagcaacagcgattggtacatctggcaaagagtccttgagaaactgcaacacatcgtctattgcttttattcgtggtacaacatagaagacttgaccgccacgttgcagctcaaacttgatagttgagagggccctttctttactaaatgctgacacctattattgttctttt

SEQ ID NO: 31632 - DNA, 461 bp, Setaria italica
  Peptide Sequence Number=SeqID_97606
gtttaacttagactagcaatctgaatatctttttcaaatggtgtgcaaacctgcacgaatgtgtcctgatcagcacttctatggcttgtctgtgtttcttggtctgaaatattatgattctgggttttggggtgttgaatatgggcttaggggaaaagttttggtgattgtggcctgcaccattcagtataatgttttccattggttagatttgatgccaacatctctggtacataatggtaaatgggaagagccctgccagctgtttatctcatccaattcaccttatagtcctgtgagaagcaatgaagcaagtcattcatcaaataggtttacttcgctgttttctaaagttcaaggtcttataggtagcagctccagttcatctctgggtctaggcaacacttcccagaaatcagagtatgttgataatgccatcaaaggttcagatgtggacaaag

SEQ ID NO: 31633 - DNA, 599 bp, Setaria italica
  Peptide Sequence Number=SeqID_97607
gcgccatgaaggtgtcgccgatgttgacgacgaaggctccgggcgtgggggcggatggagcgccaccgcccgccggcgaagacctggaggccgccgacgtcgtcctggtggaggatggtgagggaggtggggtcgcaatgcggcccggtgccgagcgtgtcgtagggccgctggcatggcggatagtagttgaggcgcatgatggagtcgttaccctcgaagaatcgccggaagtgggagggccccacgcccaggctctcccccagcacctccatgatctccagcgacagccggctcatctccgagcagtagcgaccgtacacctcgccgtggtggcgatacgcctcgcccagcttctccacgaagtagctgctgacgagctgctcgccggcgacgtcgtcggaaggagagtagcggaacgacagcgtctccttccatggcagcttggaggcgaaccgccccgtgaagctgctggcgtagccgcagctctcgcccgggcggcgctgcgcgcgctgcttgtcggcgagggcagcgtgaagaaggtgtccatgcagcggtggcctcggcgagcagcgccgggtcgatgccgtggttcacca

SEQ ID NO: 31634 - DNA, 547 bp, Setaria italica
  Peptide Sequence Number=SeqID_97608
aggagtgaattcaagtcatttcaatctaatctgcaaccaggaaactttcaagatgatctctcaacgccatgtttccagacttcctgacacagttcatgggggcaacccatatgaaaaaagatattactgaaaaatgcatacagcaatcaggcaaaacattgcaagctgtaatctctgagtggacatcaaaatttgacaacatggaaattgatcgctcaaggttgcaattgaataatgtggatgcaattacgtccaggacatatatttgcaaccattgctacaacaagttcaccgatttcctgctgtactggtaccgcgtttcaatgccccgaaatcttcttccacctgatgctgtcaacagggagagctgctggtacggtttcctgtgccgcacccagcaccatcggcctgaccacgcaaagaagctgaaccacgtctgccgcccgaccagagggaacccctagcggcctagtttcaccccgttctacaaggtcacctcccgttgatgacggccgcataacttatttgtttacttagtttaattttt

SEQ ID NO: 31635 - DNA, 250 bp, Setaria italica
  Peptide Sequence Number=SeqID_97609
tgccgagccacacgcgaatcttctggatggtgtccttgatctccgccacccaccgccccgacggccgctgccgcacgccgacgaaccgcttcctcccccgctgctgctgcgccgccgcggccgccgccgccaccgacgcccacgcgtccgtcgacggcaacggtggtggtgagttgatgagcacgtcgttgccatcttcgaactcgacggagtcggaggccttgcgtttcctcgccatggaagcagtcga

SEQ ID NO: 31636 - DNA, 479 bp, Setaria italica
  Peptide Sequence Number=SeqID_97610
ctcaaaaccaagagaagaaggttcttcaccaatgggcatcaattctgtaccgacactgcagcgagtcattacttcatttacttttgcatacctgcacttttcacttgatactagatcaccatctacatagcatctcagctggctccctccagagaaggttctcccgattgtatgagtaacgcaaaggaatttccactgcttcgtagggaggctcagaggtaacaaaacacactgatgctttggactgacagactcatagattagagtatttttcccaagcatagctaaacatccttttccattttcagtgaagaaggagaaaaggcccatcatacccttctcagggaatttttccacccttaaccagcagcaaaaggataaacctttgttgtaaggccattgaactggtgactttatttcaataccagagtcatgaccgctaaactcaaagaaagcttcaggccccttttccttgagca

SEQ ID NO: 31637 - DNA, 495 bp, Setaria italica
  misc_feature (1)..(32): n is a, c, g, or t
  misc_feature (54)..(54): n is a, c, g, or t
  Peptide Sequence Number=SeqID_97611
nnnnnnnnnnnnnnnnnnnnnnnnnnnnnnnnaagtttaacttcgtgatcttanccttttcataaaagatcaacgggtttcaattaacaaaccaacgggatccccgcggtgtggccttgcatttgagtatttgacacggccaaagcagctacagtgagcacatggcaccttttttgaacggcatggtacatgcttatccattggcgtttttaggcgtctacgtactctgaagttttcagtgcttaactacaaggcacgggctgtgattttttgtgtacatcaggtagttttcttacccgacggcttcatgccccaggatgcacgggaacgtgatcaacccatccttcttcatgcgccagaaggtgatgtccgtgtggcagagcgaggtgcagacgaccctgatgcggacctcgtgcgcccgcggcggcgccacctccacctccaccgtctccagcggctccccggccgccttgcacaccgccgctgcgcgacgac

SEQ ID NO: 31638 - DNA, 390 bp, Setaria italica
  Peptide Sequence Number=SeqID_97612
gggcacaggttggtggccgtcaccgtgatcaccggggagccccagtagcaccagcgggagcccgcgcaccggatctggtagcacgtcccgcacccgtacccgtccttgaacagcgtcgtgctcagcgccgccgtgtccgtgccgtacccggtcgcgtacaggttgccgtacccgcacgccccacccatggtctcagccgcggtctcgtcgccgtagaacgtggcgtgcgccggagtccactgcatcgccgtgaacctcgcgtccgccgtggtggccgcacaggccaatgcgatgacgagggccaacaagatggctgtggatggagaagccatggctctgtttttgtttctgctcgtggcgttctaccgtaacttgcttgagcagctgaac

SEQ ID NO: 31639 - DNA, 241 bp, Setaria italica
  Peptide Sequence Number=SeqID_97613
ggcttaattcacacccttcctccatcgatgcccaaaccaaatacctacttgcatgcagatgaagtgtccgtcagaggcgacgctgctaacgaaacatgaggacgaagccacccgcagaggtagcagcggccgcggcccagacgccgatcgcgacaggccacggcacgacgccggcgaccttccacgcgaacatcgcggtgagcagcgtgcagagagcccagaccttgcgcctgatgagccg

SEQ ID NO: 31640 - DNA, 236 bp, Setaria italica
  Peptide Sequence Number=SeqID_97614
gcctgtcaggtttccatggaagtagaacgatgtaatcatgtcatgctggtcaggcatctctggtgacactggaatatcactggatggacgtcctcctccatcggcagctctttgcttgttgctatactgaactattcctctggtgatcaacgttgggctttgcgggtctggcaacggcgactggttgggcagggctaccatatagtatctgccaggatcagcgtcggcgaccaagg

SEQ ID NO: 31641 - DNA, 362 bp, Setaria italica
  Peptide Sequence Number=SeqID_97615
ggcaacgtccaggccggcgtgtacctggatcttgtcggagttgatcacctcgccgccgaattggagggcgaggtccacggcgaggcgagacttgcctgttcccgtcgcgcccatcaccaccacggccttgtgctttgctcccacgtacctattgacgtttacgagcggtggtggcggcggcgccggtggcatgggaagcgccatgccccgttccagccgcttcacgtcgatgggaggttctactagccttgggagggcggcggcagcggcggcgatggcggccgtgggcgccaagtagagtgacatgggttttgtcgggattatgttgctagcttagttaacactgctaggtggtcaagagt

SEQ ID NO: 31642 - DNA, 311 bp, Setaria italica
  Peptide Sequence Number=SeqID_97616
cccccacgcgacctcgctcccctccgtaacctcacgcatcgccgccccctcccctgaattcgtcaacacccatgctcgttctactccctgcagatcgaatcggagctcgattcgcggccatcctcatgtccctgcaacaaatcggcgcaagatccacccccaatagcagccgcatccaccatatagctgcagccatggaggaatccctagcaaccccgcaatggatggtgggcgtcgaggagaaagggggctgctggggggagccggccgaggaggcgagaaacgatgtattggacggcatgggggttggg

SEQ ID NO: 31643 - DNA, 381 bp, Setaria italica
  Peptide Sequence Number=SeqID_97617
ctcgcggcgctgctgtggtaccagggggaggccgacaccatcaaccgccgcgacgccgacctctacacggcgagaatggaggccttcgtccgcgacgtccggcgggacctcaacatgccacacctgctagtcatccaggtagtaaccaatcgcattctgaaatcccgtctcgtatcgatctctaccatgacgatgatcttggatgaaatgcacgacgacaggtcgggcttgccaccggtcagggcaagttcatcgagctcgtccgggaggctcagcgacgagtcaagctgcccgacgtcaagtacgtggacgccaagggcctccccatcgccagcgactacacgcatcttacgaccccggcacaagtgcagctcggcaaga

SEQ ID NO: 31644 - DNA, 401 bp, Setaria italica
  Peptide Sequence Number=SeqID_97618
gcatctgctctatctgttctgttctgttctgtttgcttgccgggatgaatcagagcaagcaacattcttacaaatggcattgtagctcctcattcatcgctacttttactctgctgtctgctcctcagctacctgcgcagtatacatctccatgacaaccaaacccattacgctgttcatcagtaaccagccagctgctatcaaaggtgcacctcagaatgcctgctgggtgactgctctgctaataatgcctcaaaagaagctgggctgcaacttttcaggcacttttcataatgcaggactgtcatgtcttgattggcgtggagatcgatgattctcttgcctaggccatgtttagttactcccaactcccaactttgacactatttgtctagaaagta

SEQ ID NO: 31645 - DNA, 999 bp, Setaria italica
  Peptide Sequence Number=SeqID_97619
cgacctgcacaacgtcctcggcgtcggccccgggatgcccttcgcgcacgccgtcctgcgctcgcgccgcctcccgccgcacgccgccgtcggcctcgtcccctgcgcgcagggagccacgcccatcaccagctggtcccgggggacggagctgtacgaacggatgctcgcgcgcgccagggcggcgctctccctgcccggcggcgacagggagctcgcggcgctgctgtggtaccagggggaggccgacaccatcacccgccgcgacgccgacctctacacggcgagaatggaggccttcgtccgcgacgtccggcgggacctcaacatgccacacctgctagtcatccaggtcgggcttgccaccggtcagggcaagttcatcgagctcgtccgggaggctcagcgacgagtcaagctgcccgacgtcaagtacgtggacgccaagggcctccccatcgccagcgactacacgcatcttacgaccccggcacaagtgcagctcggcaagatgctagccaacgcctacctggccacgctgttatagatgagatctattggcacattgcaaataattcttgcatctgctctatctgttctgttctgttctgtttgcttgccgggatgaatcagagcaagcaacattcttacaaatggcattgtagctcctcattcatcgctacttttactctgctgtctgctcctcagctacctgcgcagtatacatctccatgacaaccaaacccattacgctgttcatcagtaaccagccagctgctatcaaaggtgcacctcagaatgcctgctgggtgactgctctgctaataatgcctcaaaagaagctgggctgcaacttttcaggcacttttcataatgcaggactgtcatgtcttgattggcgtggagatcgatgattactacttagacctaaggaccaatagtttaagttaactacccaaactacccaaactttagaacaacttaatagacaaaaaagaa

SEQ ID NO: 31646 - DNA, 576 bp, Setaria italica
  Peptide Sequence Number=SeqID_97620
gtgctgcaaaagctgaacttaaattgagatttggaagtggttgcagcaatgccaattctaatgggattcattcgctaagagaagctatgcaaattgttattttgttcttacttttgttttgacctcgattgcacttgttgttcttgggatgggttaattatgagtagcttttatagtttttcctatggtgcaaatttttaattggtcaaagtcattcatcaggcagtaactagtgaaaaatgaaaatagttttctttgagctaaattctaacaaccatgacttctctaaaagtctaagcaattggatagttcattggaccatttgagtttatattattgccatgcaattcttctatattcaacagtaacaaaaccaaaagcctttaggatttgtgtttttgcagaatgaacagttgtttgcaccaactattaacatttgtttggatttgtgcgatttccattttatagagcctagagttaggaactcacaattgtatgcttttagcctttaggtcacctgagataatataatgaaaccattcattatggttcatgatctttaactcaggatgtgtc

SEQ ID NO: 31647 - DNA, 282 bp, Setaria italica
  Peptide Sequence Number=SeqID_97621
caccgccgctgcaccgcgcgggtgcctgatcctcccccgcatttcaactcgcccctcccgctccgcgccgcgcagccgcagccgcatggacctccccgtggtggatctcgcgccgttcctcgggaccgccgccggcggcggggccgcggaggtgggggaggaggtgcgcgccctgtgcgcgacggtgagcgccagcctgcgggacacgggggcgctgctggtgaaggacccgcgctgctccgccgccgacaacgaccgcttcctcgacgtcgtcgagcgcta

SEQ ID NO: 31648 - DNA, 332 bp, Setaria italica
  Peptide Sequence Number=SeqID_97622
gctccgctccggtcgcagaggcagcgccgccgcgtagtgccgctacgtcgtgtggctccccttcgacggcctcggaaaccgcatgctgtccatggccagcggcttcctatacgcgctcctcaccggccgcgtcttcctcgtcgcgctgccgccggactccgccgacctcttctgcgagccgttcccgggcacgacgtggctgctcccgcaccaggacttccccgtcgccaacctcttcgggctcggcgtcagccccgaggcgtcgtacacgaccctcctcaacaacaagaagatcgccgccgtcgtggacgacgacgacgatacggccgcga

SEQ ID NO: 31649 - DNA, 456 bp, Setaria italica
  Peptide Sequence Number=SeqID_97623
atagaagaagaattggctggctttagggaggattgagggcgccttttaagttaggcagcaaagtgcaggggagagaaagaaatggagatgcataacaggaatcatcattcattcatatatacattgactcgtagacctagtctccttcaggagaaatttgctggatcaaaagttcatcttgaaccgacaaaccacaaattcatctcgaagcgacgactaacccaaaattcatttggatcaacagcatgagtacaagggataagcagattcacctggatggattgggtcctctgatcgccaggatatgatgtctctaggaagcaagacgaaacggggaagaagaaacgacaaaaacaaagatgtgtggatgagagaggtgatagtaggtggatcaaccggggaatctgccggagagggccatggcgaagaggaggacgccgatgtagaagaggacga

SEQ ID NO: 31650 - DNA, 556 bp, Setaria italica
  Peptide Sequence Number=SeqID_97624
gctatgtgagactttggagggagtcaaaaggcaaccattgtggtttaaccacgagtcttggccctcttcatgcccatgctgttgcgaaatggggagactgacccagacttttgcgagctgtcgtctctgagggtaccgtttagcatggcaagctcgcgaagctgctgcttcttgaagaaattctcgatgacatgctgaaacctgtggatgaatcgatggacttcttcaagaagcagcatgtcatcgagaatttctcgggcctgcataaggcggatatcaactatttcagctggcagctcagcttctatcacaaggtggagaggctcattaaggtgttcatatcctggttttcccctcatcagctcttccttagcagcataaaggatgctgccacggcctctaatcaggacacggcagtcggtgtttgcctcaactcgcttaagagaatttccccttggaccaagtagtcgacccacaaagttgaactgtaaagcataatcccacaatcatataaaattcatctgaactgagggaaataagatatggaagctaacta

SEQ ID NO: 31651 - DNA, 516 bp, Setaria italica
  Peptide Sequence Number=SeqID_97625
aagcatatttttttaattaagaataaagcaaatccatggactattctacagtgcaaactacaattcaaataatctaccaaggaaatttccatctgatcaattttaacttggctagctttcaccagtggcctcctaagtcatgccattaccaaaaaacctaaaaggtgttaaataagatatctttgcagtcaatgagtctgaaaaaattgtgtgtccattcgagaagttaatacgcaaccagtcatcaactttggagttgggatcagtatttacccctacaagctacagcacacatagttaattgcctggtgaacaagaaaacactgcagggtattcgctactgataaatgttaagaacaagagaccaaccgtcacttcatttaggtatttcacattcaccacaatccataaaaacaatagcaatagttacgtcagtggtcagtaatcatacttcagaaggaattgctggcgccaaccattcatttcaacaggccttccatttggtattgctcctcc

SEQ ID NO: 31652 - DNA, 1233 bp, Setaria italica
  misc_feature (33)..(33): n is a, c, g, or t
  Peptide Sequence Number=SeqID_97626
gttttttttttttttttgttaccttcaccgagnttttccagatcaataattaatggtcatatgcactaagatgacacaaaagcactacccagttagattccatacaatcagttctttccataggtgaccaacatgttgagctatacaagcctaccaaaatcgcatagcacattctcccccctagattagaactctaaacactagcatactagacagccacagccacagccagagatggttctcttgtcacacaactgcaacatatacttcacagttcaggcagcaaatcaaagtctcacatagcagatgtattctctttggagggagtcaaaaggcaaccattgtggtttaaccacgagtcttggccctcttcatgcccatgctgttgcgaaatggggagactgacccagacttttgcgagctgtcgtctctgagggtaccgtttagcatggcaagctcgcgaagctgctgcttcttgaagaagtccatcgattcatccacaggtttcagcatgtcatcgagaatttctcgggcctgcataaggcggatatcaactatttcagctggcagctcagcttctatcacaaggtggagaggctcattaaggtgttcatatcctggttttcccctcatcagctcttccttagcagcatcctttatgctgccacggcctctaatcaggacacggcagtcggtgtttgcctcaactcgcttaagagaatttccccttggaccaagtagtcgacccacaaagttgaaattagggtatttatccacaggaatatccattctcattgttttcttcacaataaaacctgaagagttgccttgcggactatgccactttctagatggaggatggaacatgcctgccccttcagaaggaattgctggcgcccaaccattcatttcaacaggccttccatttggtattgctcctccatttataagggggctaccatgctgatacccaggttgatctaaaacaggaatccccaagagtgcagatacatgcaatattacttgattcaacagccgagatgtgcatggaagaacttgcatgaacggggtaaggcttttgcttctctgcaagcaactctgcaatgtacttctcatggtcggcgagctggaggtgaggggagtgcgggcccgtggagggcgacggcgagtaggccatgtgtcggccgccggaagacatggccgaataggaccgaccgaccggaacttagggta

SEQ ID NO: 31653 - DNA, 245 bp, Setaria italica
  misc_feature (241)..(241): n is a, c, g, or t
  Peptide Sequence Number=SeqID_97627
caagcaataatgaagcgtttggtggaggaaagaagggaaaagaagcatgccatgcaattgcagctttatgtgaaatatgttctatcgattcattgatatccaatttcattcttcccttgcagggagatcatatatcatgtgcagaggggcgcattcactgttcattaaatatcaatactgagacagggcgcttgtcagcacgaactccaaatctacagaatcaacctgcccttgaaaaggntagg

SEQ ID NO: 31654 - DNA, 378 bp, Setaria italica
  misc_feature (358)..(358): n is a, c, g, or t
  Peptide Sequence Number=SeqID_97628
cttggatgaataaagctgcagcttggataacagttctcgagatagggtggtagtctattgttcggcaaacagcccttatctttgcctccaaaattagttgcaactgttattgcgattgtttgcattctcacttgacccttcactgtcctttgatgagtagatctgcagcttggacaatagttcaggaggtatgcgggaaggacggtagtctttgttcaaacaaacagctgttgcctttgcctccagaatttgctcatgattaggcagcttctcaatgatgtgctcaaatatcatccgtatacctttgatgctcgcaagccgcaccttaacgacaaacttgtcaccactcctcaaaggngcgaagtacttgaggtgcag

SEQ ID NO: 31655 - DNA, 521 bp, Setaria italica
  Peptide Sequence Number=SeqID_97629
taaaactaaaataagaccatggatacgctatggaatgttgcatttcaatgagaggcacaggtgctaggttggcgcatgcaggatttgctgtgcatggaatggattatgaaggccatggaaagtcctctggacttcagggttatattacaagtttcaatgacattgtagttgattgctcgaagtactttgcaagtgtttgtgagaaagtagagtacaagaaccaaaagagattcttgcttggagaatccatggggggagctgttgtgcttatgcttcataggaaggaacctacttattgggatggggccattttagttgctccaatgtgcaagattgtagaagatatgaagcctcaccccattgtgatttctattctaagcaagctcagcaatgtgatccctacatggagaatcatccccaatgaagatatcattgatagggcgattaaaagcgaggaatggcgtgaagaggtttgagcatttccttattctacaagggaaagcctaggctaaagactggtt

SEQ ID NO: 31656 - DNA, 719 bp, Setaria italica
  Peptide Sequence Number=SeqID_97630
ctctgctacatagtcgttgcctcaaaagccatttcatatgagtttttgattctcaggtatgagttgtgactgtcaataagttcaagtcgaggcatgagtagttaactatttcaagtgacctgcatggagctcatgtggtgccgctttgcttaacagggatctctatgccacttacattgtcgagggcttgagaagatgggtgatctgactattgccttggactgccttgtcactaattggaggatgttgatgaaaaatgtgttgctggagacacggcaaggaaaatgcaattatgcatctaaatcggtagtgtcagatcgcccactgtctgagtactgcacccgaatggtccttccatcaagcacctcaccgttcatcttctgcactgctgcagcagcttcgtcttctgaagaaaatgtaacgaaaccaaatcctttcgacttccccgttgtcggatggcatatcaccttcactgcaataacatcaccatgttgagagaaagcatccttgagagctgtttcatttgtatcgtaagaaagaccgccgatgaataacttgggcgtgcgtgcacatgaacatgcggcgttccgattgaacagcttcccgaacggagtcacagcattgcgcagcatccctcctctcccattcagcatcatctgcccgcgcctcgcacgtgctcgccagccgccgcggtgtcccgggcgcagattgacgtcgcc

SEQ ID NO: 31657 - DNA, 182 bp, Setaria italica
  Peptide Sequence Number=SeqID_97631
ctcctcgccctcgccgcctcggcctcatcatagacgatgtctctcacctccctaaagacccactcgttgtccttctccccatccttgtacggctccgtcctcgtgcatgccgtggggtcgtcggtgggtttgccttcgaagtgagacatcgagaaggtggccagcaccaatgtcctcggccg

SEQ ID NO: 31658 - DNA, 327 bp, Setaria italica
  Peptide Sequence Number=SeqID_97632
cggcatcagcccagtgagcggcgctgcggcgaggttgagcaccgcggaggcgagagagacgaccctctgaatgacgacgcgtacgtctcgacgctcgcgctccagcaccgagcgcggtgcggcgtccgtccttgcggcgcagtctcccgtcgatgtgctcacgcgtcgcgacgctggcgtcctcccgcagagctggccaaggattcccggaatagggggggtgggcgggcagcggaattcccggtgggctcgccgtcgacgtcagcggtcggccgccggcgacaggaaggggagaagccggccatgatattttcagaaagaccccag

SEQ ID NO: 31659 - DNA, 247 bp, Setaria italica
  Peptide Sequence Number=SeqID_97633
ggctctccatcactttcctgtctcaaccagaatctttcatagatcatgggtgccgtggacatccaccatttgagctgttggtgccgcacgagggccccgcccccagctgctgcaggtatattcgctggaggaactgcacaataccgtcgccggagacggcctccccctcccctgccgacgaccacacttcgccgctcaacggccgcgctgcacctgagattgccaagaaccccaggaccagcagtag

SEQ ID NO: 31660 - DNA, 290 bp, Setaria italica
  Peptide Sequence Number=SeqID_97634
cccggcgatcgcacgagcggcgacggcgaatcgagaagcttcccttcccggcggccatgtcggcctcggccacggctgctggcagagacgccgctggtaccccggaagcagcggggacggcgaccaggagggataagcggcgcgagcggaagaaggagcgccgccggagggcgcggagggaggcagcggcgcgcgcgcgggtggcggtggaggcggatgcgcccgcggccgaccccgaggaggagctccgcctcctcgatcaagaggaggccgaggcggctgcggagtcc

SEQ ID NO: 31661 - DNA, 255 bp, Setaria italica
  Peptide Sequence Number=SeqID_97635
tggccggagccggcgccgtcctcgccgccgcagcgctcgcttggtgctgatcgcacctgctgaaggcgtattccagattcgaggggtggttcctcatttttggtgtgtactactagagggcgtggttggtagcacgagttcatagtagtagaacagttggttgatgcgtttgtatgtactactacgctgttctgggatctgaaaatcgaagattgtgattagctgtaggacgagtttgtggtagtgttgagttaa

SEQ ID NO: 31662 - DNA, 359 bp, Setaria italica
  Peptide Sequence Number=SeqID_97636
tacttacctaaacgtactaagtactttttagtacttttaggtccttcagctcctgagccttgctcctcctaccctccccgtcgattcctccatccatcagcttgttcagggccctcttcacttgctctgttcccacctccggcttcgtctcctcaacgccttggactctgttcagcaggcctttcgtgggctttgtggcgccgacggacacgccggtacccagcacgtcaacgatcagcttctcgttcagaaactgctcggcgtagaatggccaggtggccatgggcacgcccgcggccacgctctccagcgtcgagccccaccgcagtgcgtcagaaatccgccgacggcctggtgct

SEQ ID NO: 31663 - DNA, 334 bp, Setaria italica
  Peptide Sequence Number=SeqID_97637
gctgaagcagctacttttgaatggtcgggcgacgctaattattgatactctcttcaagaaatgccccggctactacaaaatggttgatgacaaaggaagaaacttgcttcattgtgccgttgagcataatagttaccggctggttcgctttatctgccaaaagtacaccattgctacattgttaaatgggacggattacgaaggaaacacaccgctccatttagcagtgaagtacggatttattcggatcgtcagtacactactggagacgatgagcgtggacacgaatatcgtcaacaaggatggtctgactgctggagaccttgctgcagcg

SEQ ID NO: 31664 - DNA, 525 bp, Setaria italica
  Peptide Sequence Number=SeqID_97638
agtatagtggtatgataattggtggaatggtttgtcatgtctcactgctacacttgttattgacatgcactgtgcctttgtggtcaaaacttgttggttattctgatgcatccatgctaataggatactacaaaacagttacatgatgaaatgccactccaatttggatattaccagttaatttatttcccagtggcatttaccaacaaattagctttaagccagcggaatttaagaccaatttgttggctatggtttacattttattgagtaataccattgctgggtcagttggccgcaatgtcacccagttattggttccatgtattaattactttaaaagtactaggaaattgcaatccaaacagattacccttagcatttctaaaccaccactgcgttttggttgtgttattgccagaatcaaactgagcttagtgatggcaggaataaggctaggttattcactcatgcggatgatttcttctgaggtttttaaatccactatgctgccatgatcattta

SEQ ID NO: 31665 - DNA, 321 bp, Setaria italica
  Peptide Sequence Number=SeqID_97639
tggccaatgaggcaccaacagcagctgcacagtgggaattcgcagtcagtagggagcaccactgactcgagctcagctcagaacacaatgtctcagatggagttggtgtccccagcctcccctgcgccgcggcaggaggtcatgatggtgaccactgatgattacagctacaagccaggcctcgccgctgcgcccgctgctgcccccgccccccgccccgccaagctttcagcagcaccaccccgccctcccgctgcacctgcacgggaggggggaggggggagggggagaccatgacaagaggaagcaaggatccacaag

SEQ ID NO: 31666 - DNA, 233 bp, Setaria italica
  Peptide Sequence Number=SeqID_97640
gcgatctacagcagcagctcgaccagttcatggacggcaggattgatggcagaatcttaaagctgtacacatcgcactggccgcaggagctctggcagcagtacgaacctcttctgaattactgtcgtgatactggaattaagcttattgcttgtggaacgccattggaggtgattgctagctttatacaatcgataagttagtatgcggataatgtggactaccctttttaa

SEQ ID NO: 31667 - DNA, 410 bp, Setaria italica
  Peptide Sequence Number=SeqID_97641
gacccgacgaccgcgcgctcgagctcgaggtcgtcaggggcctcgcgggccgctgcgccgacgccggcaggggcctggcgctcgcgctcgaggcgttcccatgcgatctacagcagcagctcgaccagttcatggacggcaggattgatggcagaatcttaaagctgtacacatcgcactggccgcaggagctctggcagcagtacgaacctcttctgaattactgtcgtgatactggaattaagcttattgcttgtggaacgccattggaggtgaaaaaaactgtccaagcagatgggattagagctctcacaaaagccgaaagagaagcatatgcccctccagcgggctcaggcttcatctctggtttcatgtttagctcgggccgtcattgatagacaagatctcat

SEQ ID NO: 31668 - DNA, 553 bp, Setaria italica
  Peptide Sequence Number=SeqID_97642
cattgcactggctggatcccctttccggcataaaccagctataaggggggaatatgatgctgcactcagtgttaatccctccttaaccatctcattcattaacttccttgcctggtcaaaatcatcgcattggcagtaaccattaattaaagagttgtatggataagctgtaactctgattccattctccctcatcctatcagacatgcaaagtgcgtcatccatcattcccctcttgcacagggaatgtatcaatatagcataggtcacttcatttggctctagacccctgcttcccatccctgtgaagagcctttctgcctcactaaatcttccatccttacacagtttatcaatcaatgcattacacgcaaacaggtttggtaccatgcccaactcacccaagtgacaagctaacctgaaggcctcctcgacacaccctctcttccgtagcccatcgagcataaaggagcaactggcctctgatggcacaaaccccagcctaagcatgtcatcagtcatttccaatgccatttccagtacctcagtccga

SEQ ID NO: 31669 - DNA, 426 bp, Setaria italica
  Peptide Sequence Number=SeqID_97643
cggaacggtcacttctccggtcatccccgaccgaacgagcgcgtgaagtttgcgaaaaggccccccacgtttacaaagcggagcccccagcctgtctcctccccgcacgaattcgaatccgcgggaggaggaagaggagaccggcggcgggtggtctggtccggtccggcgatggcgtcgctgttcggcaacggcggctacgtctactcctcggagtccgagggggaggaggaggacgaggggacggaagggtaccggaaaggcgggtaccatgcggcccggcccggggaccgcttcgccggcgggaggttcgtcgcgcagcggaagctcggctggggcaacttctccaccgtctggctcgcctacgacacccaccacagcagatttgtggccctcaagatccagaagagcgcgagggattacggg

SEQ ID NO: 31670 - DNA, 708 bp, Setaria italica
  Peptide Sequence Number=SeqID_97644
ccccggcagcggtctcacgcacgggcagcgagccagactcacacgtgggcccaccaaggcccaaacccaaaccttctcctgaacccttcccaacccgagcgccgccgccgccaacgcctttgcgctcggagcaggaggaagaagaacaggcggaccgatctcgcagtcgcagcgatggcgggcgggggaatgctcgggggcgctttctgggcgacgcgggcgctggaggtggtgaagcggaacgacggaccgggcctgctgtggaagcgcatcaagcttaccaccacccgcaagaacaacgccaagaagcgcctcaagcggctctggcagaatgaggcagttataagagcctgtggacaatcagaatcttcgtcagcatcaaacactgcttctgcagctgcaaaacaacagtagcttgatgaaaagtcaattagtgactcaaggaagagctcatacgcaaccagaaaaggtcaatgacatgctgaggcgtgaggcctgaattatttcgccccaatattttgagtttccagtcgtccacaaattggaaacaaatgttgatgtataaatccactttcgtaatccagaggacatcattgcttgctaccatgtgccactctgccccctccggaattccgtcgttttcggtttcgccgtttccatgttctccgaaaactgctacttatgaatatgttcgctttcctccattct

SEQ ID NO: 31671 - DNA, 538 bp, Setaria italica
  misc_feature (528)..(528): n is a, c, g, or t
  Peptide Sequence Number=SeqID_97645
ctagcgcctttgggtctgcaccatcaggaagcgcccaatcaaagtggtacaggagattcgccagtgtgagctcaattgtcatggttgcaaataaagctcctggacattgcctacgtccagctccaaacggaactgactcgaagtgtgcccagttgtagtccagtgtgctgttctcaaacctttctggctcgaacacctcagcattgtcccagtagcttgggttgcttgccaccgcgaatgtatttacaaagaccgaggtacccttgggaatctcgtaacccattatttgcagttttcttggcttgcacgaagaatcaacgggacagcaggatgtaaccttagggtctccttgatgaccattcgtaggtagcggaggtcgccaaggtctgctggtaatcatagctgttccctggcctagcttttgtcgaatttcgctcgttgccctcgacattgcccttggattcctgatgagctccgccatggcccattctagtgtagtggctgtggtatctgttgcagctccaaatntgtcctggaa

SEQ ID NO: 31672 - DNA, 968 bp, Setaria italica
  Peptide Sequence Number=SeqID_97646
tgcacagcgaagggagaggtcgaagtccgagagcatgatgtgcccgtcctcccgaacaaggacattttcaggcttgagatcacggtatatgatcccgagcatgtgcaggtattctagtgccaggaggacttctgctacgtagaatttgacagcttgctctggaaaatgtttgccaggctgcctctgtcgaagagtgtgcaggtctcctcctgggcagaactccataactaggcaggagaacttgtcggtctcaaagtgagtgtagagtgtaggaaggaaggggtgatccaggcattgcagaatctctttctccgtttgagctcgaagcaattttttacggcttgctagtgatgccttatccataaccttcattgcgaaatagctctttgtcccattcaattcagagagatacacactgccaatatcaccgcagcctagcctcttcaacagcctgaaatgactcaacccaagcatcccatctcttgtcctgaccatctgaatcgcctcccatcgtgaatcgttcgctttatgaggcttcgtgctgctactcatactgctacatgagctttcatcgctgacatcactgcttgtgctaggcctgcatctgctgctattgcctctgtcaccaatctctgatggatcggtcaacctagcacttgcactgacctttgcttgactacttccttcacatgtctgaaatgaagtggaacttccattcacattcccgagctccccaacagattccttgatgtggtggtctggtttctgctcatttgagttcagtttatgactcaatttgctcaggttagctgtttctggtaacaccgttggtgctgaaacgcatgcattgtttgtctgggggatctccaaaggagaagcgctcttagaacagtgcttcaggtctggggcgcttgagatttctgggggagtttgaggcattgccttggaagtcattgctgctacaactg

SEQ ID NO: 31673 - DNA, 453 bp, Setaria italica
  Peptide Sequence Number=SeqID_97647
tgcgtgtctcagctatgtaagcaatctttacttgtggatcaaccaagaaggccatggcttagtgctatgattgtgtgagacagttgagtaaccaaaggttgcagagcttgagttgtttatagggagcactcaataaggatgaggtagagctctgggtccagcacaattaaatctgctcttacagaagacctggggtgcaggttgttggctaacaatcccattgctgctctgcagtccatcggtagcaatggcacaggagagctggaaacaagagtccgaggagactggagtccatgcacctgaggccccaattctgtgcataaacaactgtggtttctttggcagcagcatgacgaacaatatgtgctcgaagtgttacaggggcttccatcaacttgatgaagtccctgtaacacttcgagcacatattgttcgtcactagtgcgactgagt

SEQ ID NO: 31674 - DNA, 288 bp, Setaria italica
  Peptide Sequence Number=SeqID_97648
taaaaagaaaaattaaaagttaaaagttaaagaaaagaaacaaagttaagaagtaaaccaaaaggttagacaagagcttgagttgtttatagggagcactcaataaggatgaggtagagctctgggtccagcacaattaaatctgctcttacagaagacctggggtgcaggttgttggctaacaatcccattgctgctctgcaggttcgatgcgcttgccctttatttttgttctgctagagaggctgacggacatgtcgatgtttccgactgttttcagttttacag

SEQ ID NO: 31675 - DNA, 897 bp, Setaria italica
  misc_feature (838)..(897): n is a, c, g, or t
  Peptide Sequence Number=SeqID_97649
ccctgaaataagccatagccttcgcctacctctcgacgcccgaaaaaaaaaggaagagaaaaaattctccgcgggggaaaagtcgcgtgccgtctcgcccacagtccatcggtagcaatggcacaggagagctggaaacaagagtccgaggagactggagtccatgcacctgaggccccaattctgtgcataaacaactgtggtttctttggcagcagcatgacgaacaatatgtgctcgaagtgttacagggacttcatcaagttgatggaagcccctgtggtggagaagaaggtgatcacggcagcatcttcttccgcggtgccactggagacagcaaagcatgatgatgcccatgctgctgctgtgactgaagctgtggcagagaagcaagcagagcaggagcccccaaagccacccagcaaccggtgcctaacctgccgcaagaaagttgggcttactgggttccagtgccgctgcgggggcaccttctgctccacgcaccgctacaccgactcccaccagtgcaccttcgactacaagaaggtggcacgggagcagatagccaagcagaacccagttgtgatggctgagaagatcaacaagatttgatgcctggtcatgaagggatcgctgaattcatgcttgggttcctgagtcctcaagaagttccaatcgataggttccttcaggtggtggtctgggttagtgtggtagtagggggtctcaattgtgtctatccttctcctttaatcatggtttcattctctcgattgtgtaataatgtaaatatattcaaactgtaatttaatcctattgctttctaactaaaaaaaannnnnnnnnnnnnnnnnnnnnnnnnnnnnnnnnnnnnnnnnnnnnnnnnnnnnnnnnnnn

SEQ ID NO: 31676 - DNA, 669 bp, Setaria italica
  Peptide Sequence Number=SeqID_97650
cgtcaaccgctagcgatggcgaccgagacgccgcctccggaggagaagaagaagaaggcgccgctccccaaggtggtcacgctcaacaaggccctcaagctggctcagacatgggtggacaaaatgagtgcatcggagccagatgaacccaatgataaggattttgagggccggccatcaaggcttggtcttggtgctaaagtggcccccggtgtgaagcgtgcgcctcccactgatccaattgagaggagattgctcgggaaggtgaatgcacagaagagaaaggccttggaggaggataatagaactgctaaggaggcgaatgaggctagtgatgatgattgtgatgagcctgaaagcagaaccaatgcctttaacaaaaagaggacattgccttcagttacttctacacctttagtaaagaaggcaaagtgacaagttgtatgcatagcccatctgagtgatctgcttgtccttgttggagtttcatactaactcccagactgatgctatttcatgggcactaccccctcgtaacctagtgtgtgatttcttaatgtaaagggatagctatgcttgatattgataatgcttattgccaattcagaaattcatgtactgcctgttcatagttaaagcactgtgatactcattcaattattatcccat

SEQ ID NO: 31677 - DNA, 226 bp, Setaria italica
  Peptide Sequence Number=SeqID_97651
taatacgaaaaatacagaatttcactgtcagacaaagcatgtatcagacaggagagacgaaaacactgtccacctacagatccatcgaatgatgcacactaggtgtatttgtagagggggacattggtggggcacatctactctagcatgtatgcacaccaaaagacacatatcgtgctcctgcataagcagtgctgcgtgtggggttgcagccatgcactgttga

SEQ ID NO: 31678 - DNA, 536 bp, Setaria italica
  Peptide Sequence Number=SeqID_97652
tcattcagacccttctccgtcccatgcatatggtagttcgagatgaagttcccatagctaggcggaagagacgaaagaatgaaatcagtggccaactcttggcccagtgggaagcctagcttctccaaccgttgagtgtaaccaaccatcttgattacgtgtggtcctactgctgcgccttctgctagcttgctctcaacaaaggccttagacacattgaacctttcagtcctggcctgtgtttggaacatgtctctaagtgccacgatcatatcgtgcgcctcatggtttgtttcgaactgcatctgcagctcgggttccatgcaagcaagcataaggcagcttacttcaaggttagcatcacatgttttcttgtaagcattcttagcagcagcgggtgcatcctcagcaggttcttctggtagtgggttgtctagaacatcttcctttttctcagccctgagaacaattctcaggttgcggatccaatccgagtaatttgttccattcaacttgtccttctcaaggaccgaacg

SEQ ID NO: 31679 - DNA, 781 bp, Setaria italica
  misc_feature (737)..(781): n is a, c, g, or t
  Peptide Sequence Number=SeqID_97653
agcggtggcccgagaggcccgatcgagatgaggacacaccaaagcaagccagtacactccctcgagtacactccctcgagcagaaagcagagcgggggcctcgagagagaagcagccaggaagtatggcggctggcggtggcagtggcgtggtgaagcacatcgtgctggcgcgcttcaaggaggaggtgacgcccgagcgcctggaccaactcatccagggctacgccgcgctcgtcgacgccgtcccctccatgaagtccttccactggggaaccaatgtgagcatcgaaaacacgcatgaagggttcacccatgtgtttgaatccacgtttgaaagcacagaaggaatcaaggagtacgtcaagcacccagcccatgttgaatacgcaaatgaattcttgtctgtatcagaaaagatcctcataatcgattacaaacccacttcagtcaattgaatatggattatgaagaacctgggagagctttcctcagttctcgccgtcaattattcttcgtactgtttgttggagaattttgtttccagttatcctgtgtacgctttctgctgaataaattcttctgctttgtttccttgttgggatttgggaatcaactttgagttttctgtaactgcagttgtagtaactgtgcacactttttgttcgtatcagaacccaaagactgctttgctcccatacaagttccgatgcaagcaatgaatatgtgtttcttttnnnnnnnnnnnnnnnnnnnnnnnnnnnnnnnnnnnnnnnnnnnnn

SEQ ID NO: 31680 - DNA, 715 bp, Setaria italica
  Peptide Sequence Number=SeqID_97654
aaccaggtctaccaaagtgggctcaaaagcagtcgcatcaatctacctgacgttaaagccatttgcctcatggaatgcccacttccagcagaagatggtttgaattttgtttgcgattatccagaaggtgacatacgcctctctgtcgatgattggattgacagggattatgattacttcgagtacctcacaccagatatgaggaatagttctcttcagctgcagggtccttgttaccctgtcatctttccaagtgtcaatgtctactggagctgccagtttattgcgcgggcatccaatgtctccttgaagcattggcagcagatgggtggtgtcagcatcgacgaaaacatgctcatagacaaaacaattcacaacacaatcaacagcaaatctgccgtcctcaagagatatgttgcagatattggaaagtcctggcctgtgttaatcatttgtgggggactgctccctctgttcctatctgggatctggttactgatgattcgcttttttgttgctgggatgccttggataacggtggtagtcttcaatgcccttgtaatatcagttacaatgttcttctatataaaagctggttggattggccatgatcctttaactgttgtaattggtgaaagtgatccttatgtcaacataggtggacgagagataaatcaccttcatgccgcttctgtacttgatgacagtaataatg

SEQ ID NO: 31681 - DNA, 323 bp, Setaria italica
  Peptide Sequence Number=SeqID_97655
gaggcggcggagttgcggggtagggtggctgtaggtagcgtgtgcggcggcgggaaggacgccatcggagttaacgccggtggattcagactggtctggaaggagtagggttttactgggacggcgagttccggccgcacctggcgggcgcgcctccctgcgtcggatcgaaccggacgcctcctggattcgcagcgccgcagccgcagccggtgggagctggagagatacttgcggggtgcgaacgcgaggaagcggggccggctcgcgctcggcacggtggcgacaggacgtgagccgatttagtccgcttttgcgaaggg

SEQ ID NO: 31682 - DNA, 439 bp, Setaria italica
  misc_feature (425)..(425): n is a, c, g, or t
  Peptide Sequence Number=SeqID_97656
ggagaacttctacgccgccacaaattgctcgaacttggatgaaatcgttaaaagggaggtgtctcgtaccttgttcaccgtcccaccacccgacggcggtcgccggatgggcgcctccctcctccggctcttcttccacgacagcttcgttcagggctgcgacgcctctgttcttctggacatcaacacggacgtgagaaagggaagaataatattgtcgagcgagaagcaagccagccccaacttcaactccctacgcggtttcgatgtcatcgaccggatcaaggacgaggtcgagaggaattgccccggcgtcgtctcctgcgccgacatcctcgccctcgccgcgcgggcagccgtcgtcgccctcgagggaccaacctggccgctgttgctcggccgtcgcgactcgacgacggcgaacntgaccgaagcgaac

SEQ ID NO: 31683 - DNA, 381 bp, Setaria italica
  Peptide Sequence Number=SeqID_97657
gccgactgtcgcgaccaccccggtgacggcgaaggggtgcttgtaggggatccccatagcgtcgagctcccggcgcacgagcgcgctggtctcgaactcctcgtaccccagctccgggttctcgtggatgcgccgccgcaccccgaccatccagtccgcgaaatccggctccttggcccgccgcaggagccccgcggggtcctccagcgccgccgtcgccaccgaaggccatcccgcggcggcgaggacggcgagggcgaggcccgccagcaggagtggcggcgcagcggtgcccatggttttttggtggttcggttgcgccttgcgcggttggtttgctggtgagtgatgaactgatctgagacacgcaaacagaggata

SEQ ID NO: 31684 - DNA, 547 bp, Setaria italica
  Peptide Sequence Number=SeqID_97658
agcggcgagccggggacctcggagctggagaacctggcgctcaacatccagggcctcgggaagcggaagcaggacgagaaggaggcccagggcggcttggcggcggagctgaccgacgacttctgggaggagctgctgagcgaagggatgaggggcgggcatgccgggacggcggtgccgccggtgccgacggagatggagaggaggcaacggccgccgggccggtacgtggacgcgctggcgcagaggattagctccatgagcaatagcaccgcgaagtaggcagaggcggcgggtggcgctcgcgtcgtggccgtagttcgtgaatcaaattgaccctccgattcgtcgagagccaacgttagtggcagctccattgctgtggcagtgttcttgcacactgtacgtacagtgccgtgctgtaggcttgtagcgatggatggccggcggcgtagtatttcggagtcgccggatccttggttgtagtagtgcatatatgagccacgattcttaattgtgatcattagttgcactacaaaaaccaaaa

SEQ ID NO: 31685 - DNA, 282 bp, Setaria italica
  Peptide Sequence Number=SeqID_97659
cgggccgaggcggcgccagccccgaacgaggacgccggcggagctcctgcgtgccttctccgtcgagatcgcctgcgttagcttcctgatctgcttcgtgctcaactacttcacggggaagaacgagaacatcgtgctggcctgggccaccaagttcgccaccaaggactccatcttcgcagctgggaggggcggcgtcgcagtgctgggagggtcggcgccgccggtcggagagaaggggagggcgacgccgcgacgggattgtgccaaggggagggaacg

SEQ ID NO: 31686 - DNA, 1798 bp, Setaria italica
  Peptide Sequence Number=SeqID_97660
atggcggcgccgagctggatcgggctccggccgccgcgcgcagccctcctactcctcctgctcctcgccctcaacctcactttctccctcgccgccaacttcgagggcttcgactccgacgacctcccctccgcggccggcgtcctcgacgctgacgatgacgaggaggggctcgacggcgtcgacctcccgccccctccgcccatctccctctccacctcctcgccttcccctcccgtcacgacgacttcggcgccgaaccctaaccccgccgcgcccacgcccccgaaccccaccccggcgctcgatctctgggacgaggacgagtttgagggcatccccgtgccggaggcgatctcctccgacgactccgccgcgccggccgaggtcgccccgtcagatccctccgtggaggcggcggccgaggcggcgccggccccgaagaagacgccggcggagctcctccgcgccttctcggtcgagatcgcctgcgtcagcttcctgatctgcttcgtgctcaactacttcacggggaagaagcagaacgagaagatcgcgctggcctgggccaccaagttcgccaccagggactccatcttcgacaagaacttcagcctcctcggcaccggcgatggcaaggacacgcccctcctgctcaaggagggccaggacgtgttcaagttctacgccagcgggaggcgcttctgccagggcatgctcgccaccatggagatgcgcgcccggcacgatctgctgtccaagttcgtggagctggtgttccccaggaaggacaccatcacgttcgaggtggtgatgaatgaggacgccatggaccatgtggttctggccgtcgccaggaagaaggcggccaagatgatgcagaaagaggagagggatctgcagagatttgccaacgttctcacttcggcacccgctgggaggaagtgggtgtcggatgagcttgctgtggtggctgagtcaaaggaggttgctggggatatcatcactgaggctgtgcttgaccaggtccttggtgagaaggcattcgagaaatttggaaagtggttcatctcacttcatttttcagatcaattggcaggatcctacaagaaggtcctcacattcaagtttgtactgccggatgcaagcaacatgtcagagatgacgagattggttgctcttgtgccatactacatcgatctggttggacgttacaagctcagctcgcatgctcgctcgaaaactgatgcagctagaacaaaggctgctcaggaggccttcaaggaacttcagaatgcgaggcaggaggccctgcaaaggaaaaaagctgaaaagaagaaacttatggaggaggcagatgccaaattgagtgctgaggcactccggaagaaagaggagaaggaaagggcacggcagatgaagaagtctggacccaaagtgaaaatgctccgttcttagtaacatcaatctatcatagcttggctttagctattcactcagctgattagcttatagttcagtgtctgctagactctcatttatattccaattttgggccatcatgtttccctgttgtgagaatgagcaaaaaaggatccaggagaaaagaatcctcactggtgtttcggcttttattggatacgtgcaagatctctagcccaatttgcccatgatagtttggtcaccttatgaagaatttgcaatgcagcagctccattgtaagaaaactagaacttacacgattcgctgtgtagaatgttgatagaattatgatatgaaattacgtgcttgagttaaa

SEQ ID NO: 31687 - DNA, 446 bp, Setaria italica
  Peptide Sequence Number=SeqID_97661
cagactcttgcacgctctctgcatagtctctgcaatgtcatcaagtaagcgctgctgttcatcacaacctttgcacatcagtggaaggaaatactctagcacataatcatcacttccagtgtatgtgctccgcagcctaattgcgacagcagcttgaaggccaaatttccgtgcatgatgggccagtggataatcacacacatcataatcctttacatcacaggagaagaatggactatttgataagattacatttccagcaacaccttgtccccctctcaagggggtggtcaccacaggcacggacaaaatagtgcatcctcatgtcattggcataacaggcagattcatgtatgcaaagcaaatctttcttccttaaattgaatttcatatcctggtcaccatactcaatcgacacatttgcattgctgctcgagccaaaacgg

SEQ ID NO: 31688 - DNA, 244 bp, Setaria italica
  Peptide Sequence Number=SeqID_97662
ttttttttttgtttaaattaggttcctagttcaaagtggaaattgaataaaactacaaaaggaaagtacacgtccaatccatgcgttccatagcaataacaaatacgctttgtaccttacaagtgtttcatagtgaaaatatgagatcagccaagttaaggaaagctgtgtgagatgatccactctccttaatgcctttctccgctatctctttcaggttcgtcatcctctctctaatctcttt

SEQ ID NO: 31689 - DNA, 273 bp, Setaria italica
  Peptide Sequence Number=SeqID_97663
acaagatgaccgtcaccatggcggagggcgaggagatggctgatgtctacgacggcaccgagttcaaatggtgcctcaactaccgctacatcccctccccaagtgactccggcaatggcaggcagagacaggtcgaggcacactccttcgtgatgaccttccccaagaagcacaaggagaaagccctcgactcttacctcccctacattgtgtccacagccaaggccatgaaagcgcaggaaagaactctccagatatacatgaatagttggg

SEQ ID NO: 31690 - DNA, 1577 bp, Setaria italica
  misc_feature (1548)..(1577): n is a, c, g, or t
  Peptide Sequence Number=SeqID_97664
accgcctccacctgctccgccccgcgccaggctccggcggcggctccaaccgtggatccacgctccggctcagggtcttcctcttccccgtccagtcgcccccgccgccgccgccgccggccggcctcctcgagcccaaggcggagcgccactggttcgtcgaggcgctcaacaccatcccgcaacccaagcaggagacgtctccgtcgccagtccccgcgcagcagtcgccgccgcagcagaagcaggagtcggtgttcgcgcagcagtcgtcgccgccgcaggcgaagcacgagacggtgttcgttcagcagccgccaccgcagacggtgctgcagatggcgccgccccagccgcacatggtgctagcggcggcgagccccgactacctgttcggcctcgacaacggcttcgtgcctcccccggcggtgaaggtgaaggaccctgctggcgatcctccgacggtgagggagaacgtccccgtcgagttacccgccaaaaacgacgaccgccatcccaaccccgcgggtgaccacgtcgctgtctcccccgtcgtctcacctgccgagttccagcgccagatccaggagctcgagaagctgcaggtcgccgacaacgccacccaccaaccacctcccgcctcggcatctgctccggccgccgcccccgccccggcacccgctcccgccgccctcccgaggaacggcagcgacgactccctgacccgcgcgtaccctcccgccaccgccaccccacccgccaacgcggactactaccttccaaagttcccggagaagcccccagttccaccgccgtcatccgcccctcccgcgacggcctacctgcaggtgccgggcaggtatacatccgtcgcccctggctccggcgcggaccatgcccccgtcttcttcatcccggcgccccatggctacttcgccgccaccgcctccccaggtgcgacctccttccccgccatgtacgccgtcgcgccacccaatgccaacgccaacgggaacggctccgccccctcgcccgcggtgtcaaacgcgacggcctacgcccctgccccgcaggttgcgtatgacagcaatggccgcgccatctactacaccagcatgctgccccagtatccttctgctgtcaatggcatgtcggcggcgggtgcagtgctcggcacagagcccgcgaagccggtggcagtgaagccgaccgtctcctgatcaccaccaccacagcttacctcaccttatcgccaatggatcaaaggagttttccaatttttctttcatccgccgcccgtcaatatgcgttaatactgcgtcagttggattcgttattgtctctagtattcacctatatttttttcctttcctcttttaaattgtctagagttttttggtttggcgttctgggtcatgatatgatgcaaaaactattagtagttctttggtgtgcttagatgtacatacagagtctgtggacataatggataagtattatattagcttactggaagagtttggagttcagttacgggttaaaagtttnnnnnnnnnnnnnnnnnnnnnnnnnnnnnn

SEQ ID NO: 31691 - DNA, 423 bp, Setaria italica
  Peptide Sequence Number=SeqID_97665
aataaatgggatctcagctagtgatgtgggaagggagaaattgagattttgaccaactagatacgaaattatacccgctgcataacctgcaagggcaaacccgctcaccttgcgaatataccaaaagaaatccactttttccattcccataaaagcagcttattgcattctgtgctggtactggcggttcaatgcttatcattggctctgcagcaggagttgcttttatgggaatggaaaaagtggatttcttttggtatattcgcaaggtgagcgggtttgcccttgcaggttatgcagcgggtataatttcgtatctagttggtcaaaattatacccgcttgtactattcgcaaggtgagcgggtttgcccttgccaggtttatgcagcgggtataattcggtatcttagttggtcaaaat

SEQ ID NO: 31692 - DNA, 412 bp, Setaria italica
  Peptide Sequence Number=SeqID_97666
cccatgaaaggtggcagaccggtgagagatttaaagactgggacaaacactaaaagctccaactccgacagccaatacaagttgtccccgaggagccatctgttctgatgacaggctggaggatttctgagatgatccattcgcttcactatttgcaatgcatacaaagtgttaaatcaggcacggttaaaactgttccatttcatatatcataagttgtcagtagttaacatggtttaacaacctggttagggacatcagagccagtggaactgccaatgaaacaactgagggaataaacaagccctgcattattttcaatgttgtaagctgaccatgaatccacaacatagtggttgtcacatcaccaattggtgtccatgcaccgccagcattcgctgctattacaaca

SEQ ID NO: 31693 - DNA, 722 bp, Setaria italica
  Peptide Sequence Number=SeqID_97667
agcatcaacaatctctacaatggtcattgcaccaagcaagaaaaacactatttcactgacttcagtagttgtatgattcaactcttcaacagctatgtcaatgggagccccaatgcttctgataacccataggcaggcagccatcaataatgcaactccacttttgttaaatgcaagtgactcttcaaaaataatacctgcatagccaatagcaaaaaccaacaccattgcagcgtcctgattagcagcaacccaggaatgatttattgcagctgccccagccaatgctgttgcaaagatagtaaaagctttcagaagatcattttttggtttgtagttttctcctaagtactgtgagctaacttcatcaactgagcataacgggtcacaattccctgttgtgtccagtagctcgtagtcttcgggctcctcgggcggcgccggcggcagcggaggcgatgatgacgaggacgaagcgcagcagaagcggaggccgcggcgccatcgctcggcgtgcgggagtggacccacggcaactgctggcgggcagcgtcggcgccggaggagagcggcggaggaggggagggaagggaaggctgccgcccgggcgccggcgagtaagccgcgggagagcgccattgctttgcttagctactgctgctgctggaatttggggacccgccttgccttctcactcgaatggatgaggagcgagtagcgtg

SEQ ID NO: 31694 - DNA, 1856 bp, Setaria italica
  Peptide Sequence Number=SeqID_97668
ttttttttgtaaatacctttttgtggttgttccaaataatgaaggattacatgcggtctctccgcatctatcatttaaatcaatgaagtgtatttttaagctttgatattcacaattagttacaatatctttttagacacgtgcgtgccgctcacgccttttactaggagtacaagaccaaccttctatgagccaggaataaatgggatctcagctagtgatgtgggaagggagaaattgagattttgaccaactagatacgaaattatacccgctgcataacctgcaagggcaaacccgctcaccttgcgaatataccaaaagaaatccactttttcctattcccataaaagcaactcctgctgcagagccaatgataagcattgaaccgccagtaccagcacagaatgcaataagctgccagaagtccgaatcttgaggatacgcagtcaggtcatacattcccatcgttgcagcaacaagtggaacattgtctataagtgctgatgccacaccaattgcactagcaataagatcagcatttggaatattggcatcaagataatttgctaattgcctcaaaatcccagcagattccaagctgccaaccgataaaaggatacctaagaagaacaaaattccttgtgaatcaatccgtgacagtgcctgtggaacttttagtcgctgcctttcagagtctccataatgtattgcatcagtcaggatccagagaatcccaagaccaagcagcatacccatgaaaggtggcagaccggtgagagatttaaagactgggacaaacactaaagctccaactccgacagccaatacaagttgtccccgaggagccatctgttctgatgacaggctggaggatttctgagatgatccattcgcttcactggttagggacatcagagccagtggaactgccaatgaaacaactgagggaataaacaagccctgcattattttcaatgttgtaagctgaccatgaatccacaacatagtggttgtcacatcaccaattggtgtccatgcaccgccagcattcgctgctattacaacaacagcacctaacaattttctgtattctgatggaggtactagtttccgaagcaacgacaccatcacaatagtggatgtcaagttgtcaaggatcgcactcacgaagaaagttactataccaatcacccacacaagagttttagggcttcgagtagatatattatcagtcaccaacttgaaaccttgatgagcatcaacaatctctacaatggtcattgcaccaagcaagaaaaacactatttcactgacttcagtagttgtatgattcaactcttcaacagctatgtcaatcgagggagcccccaatgcttctgataacccataggcaggcagccatcaataatgcaactccacttttgttaaatgcaagtgactcttcaaaaataatacctgcatagccaatagcaaaaaccaacaccattgcagcgtcctgattagcagcaacccaggaatgatttattgcagctgccccagccaatgctgttgcaaagatagtaaaagctttcagaagatcattttttggtttgtagttttctcctaagtactgtgagctaacttcatcaactgagcataacgggtcacaattccctgttgtgtccagtagctcgtagtcttcgggctcctcgggcggcgccggaggagagcggcggaggaggggagggaagggaaggctgccgcccgggcgccggcgagtaagccgcaggagagcgccattgcttttgcttagctactgctgctgctggaatttggggaccgccttgccttctcactcgaatggatgaggagcg

SEQ ID NO: 31695 - DNA, 506 bp, Setaria italica
  Peptide Sequence Number=SeqID_97669
caaagatagttggcgagagggagttattgctcagaattatgaggcaaatgagacaaagtatgtacatgatctccaataacccataaacaacttcctgctgtttccctgcgccttttcctggttttgaatttagagaaggtagacggatgagcaagacgtatttgaggcggcttatcaccatcttgtctcaatggcacccattcttcgcgtggaccagttccattgtggttgtcatagctgacaaacgcatattttcatttatatcaacaaccttggcagaaaccaagctactccaaaccacccttgtcagataaaacctcaacagcagatcctttttcaatgccattccagataatgctaattggtgctgtatcatttcggttaccatccagtggcacagcggtgggaacatcttcaaccccatgtcctgagtgtatttcttccagctgcaattctttgccaacttgaaagaataggactaccaaaattacaagttagtagactta

SEQ ID NO: 31696 - DNA, 3360 bp, Setaria italica
  Peptide Sequence Number=SeqID_97670
aacgtggaccagggctctgaggataccagggagcaacaccaggagacggctgcctcatgtagtgaattatatgtaaatggtgatactgcctaggctaaaatccagatgagtacctcgctgcaggttaaacgtagaactaccaagaggcacattaaaagttggagactgcagggttacagaagaatgtgctggcaccacagtttttgccaccttttttgctagctggcgcagttctaactgccgtacccttcttcctgaatctaggcatggaactcccttggtgtgaacttgtgggggtctctaaaccagtagaaattgatttttggtactgaaatcttacaacagcagctcgccaagctgcctcccatgtaggtttaccaccaccaggttctccgaaagctgccatcatgtaagcctctcctggtggtgttccttgaataagagctccataaacaaatatctgtgcacgtagctgcaaatgctgtgggtctgtgaatggaaggttcaccaaatcagagcactcgggggttggatgctgttgtgactgtgctggtggggaacttttattcttagtgctactgccaatattagagttgtctgagggccccccagcactttcagccactttcctttctgacagctgttctttaccagactttacaatagatgttttcttactcttcaatgaacttccaggttgaggattttctgtggttatcttcaatgagcttccaggacttccaggttgaagattttcactggttatctcggtactctgagaagctttgtatctaggaaaagggctccaaacagggctatgagctttctcagatacatttggtggagctcccacctcaaatgagaagcttctgtcgcctcctgctggattagtctcctgagaatcaggagcacatcctacatttctggtagaacattgttttgagctttgagcagcatcagctgaggcttcacaatcttttggatccccagattgtccatcaagtgtattaggaagtaatgcattgctgccctgtccaccaccttgtagagagggttcagcgcctgaaggggagccacatgtagtaccggtgcagatttcagtaccattgccaggttcgagtatgcttgagcctaccttgccttgggatggaacagtaccaggactatgatctgtaccatgatttaacactgtatcttgcacatgtgcattcaaatcgtcgcttgtatttagtggagtttctacaatcttttcaacaactttgccagttgagatgcctaatgagggtggtgtagcttgatctatgtgatgttcacattgtatcgaagatctatcagtctggcatttctgtgaagaagcatctggatggttacctgatttatcctgagtttcttctgtggtcaaaccacccaaagaactagccttcttgtattcctccttttctgtagcagaaacagtactactataaacgtcaatgtttgagtcctcaggcacagctgacatcccacctggttctgagccaggagtaacattgtggtcttcatcttctaaagcagatttagcaccttctttgaatgggccctcatgattcatagtggacactttcaagtccttctcatctggtaaagcagaagaatcatcaacagaaacatctagtgaacagccatttttatcctctgatgtaccgaaagtgtcggtaacagtggtagaagtgataccactgcttgaactgatcgctggagctgacattttctcttgaggcccagaagtagagaggtccaaatgcatgttttcaggctcctctactaaagcaggagtgtcacgttccttgaatgtctcatgatttatcgagggaatgtttggatcctctgaagcattgaaagtgtcagctggaaagttttcaggtgcaatactgtcagaagagttaaccttatcctttgatgtacctgtagcaccggtagcattttcttcatggtcattttccaccgtttgctcaatagttcctgaaactgcaggtatttcctccccatttgtcttttcttccatggcaccactttttaggttatcaacagaatcttgatggtgctccaacactccaagttttgattcatcaccagtacagctgatgttcgtactactggctccagcattctttgtttcttcaggaacaccagtggtatcagcgaccttacttttgggagacagagaactgacaagatgaggattagaattccgtgagtctgcctcagataggtgagatagagcagaatttgaaccaatgccaaactcgttggcgttgagttcattgctcctgtcaattgaagtattcagaccttcagttccatgttgcactggggaaaaagatggttgaagggtgttgtcgactctattgcaagtagtatcactcctgtgcagcttaactggatttgtaatggcctctagcaatccatcagaactttctgacaatagagtttcactgctaacttgactggacaagttcacagcccccaaagactgaccagcgcatgacaaactttgcagttcaggtagtcctccttcaactttactttcattaatatgacaaatctttgaatcctgagtaacatcaacctctgattctttatcatcttgttcaaagtgatatgagtcattgacatatatgttctgaaggggagccaactctgtgaaaggttcattattcaagtttctagaatctacttcggcagagggtacactgagtttgtccagagaatggtcatgatgaactgcttcaaaatagttgccaacacctggacagcttcctgatgtgttgtttgaagaggacaacttctcacttgcaatgcacttctcagcaacagaacctgctgcctgctcagtttccttgttcatcaagaaaggagcaaaatgctcaatctgaggctcagtgtttgaagggtcagcggccattctagaatgaatgctctgagaacgatcaggatcatcagtcattctagaatcggtgctctgagactgatctttcttagctggcactacagtactatctgtcggagagttcatggatttaggatgcacgttcgatggatcagtctgactgtccataccacttaactgaaggtgtgcattactgtccatattaccagttgtctcattttctcctactgatttcaataacatttccacagattcagtggatgttgcctctgaccagacattattagttttcgatatggagcaagattccgcagcactagaactaaaatcaacaacagtgcttccagtggacaaaacctcaatccaattactctcgtgcccttgcacgctgaaaaacacttctgaatctatcaaattatcaaatcgaagat

SEQ ID NO: 31697 - DNA, 3840 bp, Setaria italica
  misc_feature (1)..(28): n is a, c, g, or t
  Peptide Sequence Number=SeqID_97671
nnnnnnnnnnnnnnnnnnnnnnnnnnnnttttttttttttttgtttacagtaaactgtcggataaatttaaggcacgcccaatttctttcccggcgtatccacaccacacaaactaggaggttactacgagattaattgctattctagaacacggaagagttatgtctgattcaagcaagcaaaagaaaagggaggcagaatgagctagtttataatacatctgaatccttgtgctccaataaaagcttctactccaatcctatccttcggcttccatactggatggctgcatctatgtacaacgaggagagctgtcccattagaaacagtgctgtcgtgccttttctcagccatgacctctccctctcgacgaagcacttctgtaattgctcctaggagccttctcgctaggaactttggagattatgagggaactttgcaaaccctctagtaaccttgaagttggttgaattcgccggttagatcgtctgggttcagcagaatctgaactagtcctttggggctcaccagaatcagaactagtcctttcagaggttctaggtacacctctgttcacgttacccacagtaggaacatatttccttttagctcgattattaacgggtacattctgcttggaagtaggaacggtagatgcagcttgcatctcagaaacagaaggaacttcagttctaaggcccgtgcccagcacagaattatttttttctatagtgggcttctcagtgttggaagtgcttgttgtacttcccgcaaaagtagaagtcctttcagaaacaccaggatttggaacagatatgggcaaggaacccttgtcaggaacgctgttagctgcaacattctgagactttgtaggtttaggtaatctagacctcatctcacctaccctccttcctctattatgatcaactttagaagtattttcacgcggtcttggcaattgtggcatagaatgtttcgcaagcctgctagatgcattgccctcggaaatcttgtcagattggcctgcatcataatgtttgcttacttccataaacttcttcttctttccatgctttggaacaccatagacgaccttcgatccttctttctgtaatccaggccgtttgaatgcaagagcatcagatttattctcagctacactcttcccaatgttgaaaaccatgtccctctgagacaaaggcaatggctttagctcctccggcttttttgcattggtattcttgtccttcgaaggaccccctgcttcgccaacaatagatagatcactgcctgcttgaagcaggtctgtcctttggcgtttctcaagaggcgaatcacccttattggatttagatttcctttctcttgctcgggaccactctgtccattgaccatctttccaaacacgtgatggacgaagactccaaccatcgacaactaacgactcgccaccacctccaactgaaaaatgtacaacatactttgtctcatttgcctcataattctgagcaataactccctctcgccaactatctttgacccaagcatctacatgatctccaataacccataaacaacttcctgctgtttccctgcgccttttcctggttttgaatttagagaaggtagacggatgagcaagacgtatttgaggcggcttatcaccatcttgtctcaatggcacccattcttcgcgtggaccagttccattgtggttgtcatagctgacaaacgcattattttcatttatatcaacaaccttggcagaaaaccaagctactccaaacccacccttgtcagataaaacctcaacagcagatcctttttcaatgccattccagataatgctaattggtgctgtatcatttcggttaccatccagtggcacagcggtgggaacatcttcaaccccatgtcctgagtgtatttcttccagctgcaattctttgccacttgaagatggctccaaattcagttgtgcttgatcatatttaggtttccgaccacgctttctgccaggtttacttaaattagcaggtgcatatacctccaaggtttctgttactggattaacattactgcttccagttttattcctcactctctcggacttccagtagccatccgggccagcttccaagagctcccttagagtaaaaggtagtggttcacccattccaataatagtaccggctctgaacacagcctccgcagtaagctctgctgctttcagtatggcatccaagttttctgctcgttttgccgctgctgatgcctcttcaaccctctttctagcagcttcccgtgccactgaaatgatggaacctggagcatgggtgttctttagttttagagatgatgctggtgttgaacttgacaagctaggtggattgctactgacataaaattcgctagcttcatgatgcacagactttagagatgaagaagagttaagtgcttcctctgccatcattttagcctgtaatgcagcctctgatgccatcttggcagcttctgcagctgcctttgcaacagatactgccgcttcagcagcagcagcagctgaggtaagcttctcttcaacttctcgaggtaaattgcttattgagattgtggatagatggctccatatgccttctttgtgcctaactgcctccattgagtgcatacttgcacctttggcttgtccagttgattgttctattgcaccgcagatctgttctgaaaagataattctttgttcactatccataccacccgttatctggtagttagctacagaggggatctggcttgtgttaggaacaaccctactacccaaagcattacttggaggatgagtagataaggtgaatccttctgtgtgcttggtttcaggagttaacatcatgtctgttttgagctgaggggaagcaatgacgggctgctgttctagacttgctgaagctttctttctttttcttggctttcgtgatgcagtttcatgcttagagctagaagctggcgccttctgtttttcatcattcaaaacagctgttggagaagaaacaatagaaggtgctggactaggaacaactaaaccaggcgaaacagcgtgtgaaatggatatatttttggatgacgccccctttgcagtttcattggtaggaacagtcggttgcaccgatgaatcgaatattaagttctgtgatggaatcagccagggagcaggacgtggaccagggctctgaggataccagggagcaacaccaggagacggctgcctcatgtgtgaattatatgtaaatggtgatactgcctggctaaaatccagatgagtacctcgctgcaggttaaacgtagaactaccaagaggcacattaaaagttggagactgcagggttacagaagaatgtgctggcaccacagttttgccaccttttttgctagctggcgcagttctaactgccgtacccttattacctttttcaggcacagaactacctatacgtgaacttgtgggggtctctaaaccagtagaaattgatttttggtactgaaatcttacaacagcagctcgccaagctgcctcccatgtaggtttaccaccaccaggttctccgaaagctgccatcatgtaagcctctcctggttccttggttggttgtttcgctccataaacaatatctgtgcacgtagctactatatgccttctagttgggacggaaaacttttaaacccgtaaactttaaaaaaatattgcaccgcagaatactagttactagaaaaaagaataaattactttagttacaactaataccaataaccaacccgttaatactaggttaagttaagactaa

SEQ ID NO: 31698 - DNA, 261 bp, Setaria italica
  Peptide Sequence Number=SeqID_97672
ctgcgaatgcgacttcaagatctgcgccgagtgcttcggcgacgccgtcaagaacggtggtggcgtctgccctgggtgcaaggagccgtacaagaacacggagctggaggatgtggtcggcggcgcggctggggcgagggccacgctgtcgctgccaccaccacccggtgctggtggtgctgccgcgtccaggatggagaggcggctgtcgataatgcggtcgcagaaggccttgaccaggagccagactggggactggga

SEQ ID NO: 31699 - DNA, 434 bp, Setaria italica
  Peptide Sequence Number=SeqID_97673
ttatattggagacccagttgtttatggtctggattatcataatgcagagtaccaggagcaaggacttagtgactttgagcgcggctgttatcttgaaggagttcatgggcatagttgtttgaccacattaagacatataccacatattagatcagatcatgtaaattccaattctgaagagcatggcaaaaagttcttcaatccgagaagcttaatgggctcgcgtgctgactttgatcaccagaacactcagattggacatatatcaaagcaaagacctgagaggagaagaagtgcaaagggcaagaatggccgcactaagagacatcgtactcatgaacccaggaatggttcagaagagattgagcaaagaccaacacatagacatgcacaattcgtgatgggagattgttctcgttctcttgtctgtgcaa

SEQ ID NO: 31700 - DNA, 343 bp, Setaria italica
  Peptide Sequence Number=SeqID_97674
ctttcttgcccctctggtgtgtgcttcctgacttcaccttgcagcttggtcatgtgctgagggttgcgcatgagctctgccatggcaagttccaggaccaaagatgatgtgtctgtgcccgcattaaacaagtcctgtttacatacgttatatatacatatatatatatagtttgttaatgattcatgcagtggaatttacaaataaatgaaatgataatacttggatcgaccactcactatcaagatggccttggtatgatctctggtgagaccgtactcctgctgaactgagagcaacacatcagtgaagtcacgacatggcatggagatagagtgtcttc

SEQ ID NO: 31701 - DNA, 688 bp, Setaria italica
  Peptide Sequence Number=SeqID_97675
gatgacccgagtgccggagggtatggagtaggcgccatcgccgacgacgacagtacagtccgccatggcgaggtgagggaggagaagcggagcaggcgggtgcaaccttagcgtttccttcacgacggctctcaggtagggcatgctggctaggttctcttcctcgaccatttcttgcccctctggtgtgtgcttcctgacttcaccttgcagcttggtcatgtgctgagggttgcgcatgagctctgccatggcaagttccaggaccaaagatgatgtgtctgtgcccgcattaaacaagtctatcaagatggccttggtatgatctctggtgagaccgtactcctgctgaactgagagcaacacatcagtgaagtcacgacatggcatggagatagagtgtcttctctcgagctcgtggtcgcttatgatggtctcaagcaactcgtcccaccttttgtgtgcgtggcgggcctgcctgttacgcgggaaccatctgctgagaaaacctagcgagctggctaggcccgggaagtactcttccaggttgaatcctccaaacagagctgcgttgatcccaacgagctcccggaagagcttgttccggccttctgcccagaacaacttgcccgacacggcccgggtcacgacgtcgttggcgaaggcgttcattgcctcgctcatgtac

SEQ ID NO: 31702 - DNA, 517 bp, Setaria italica
  Peptide Sequence Number=SeqID_97676
acaaagttttggccagaccaagatgaagaagagcccatcatagcgagcggcgtccgctagtcgatcggagtcgatcgctgttcctatccactccccgtcgccgtttcctccctctaccgcggtcgcttcgcccttcgcctggtcggagagcgccgcccccacctgccttggtcgccgtgactgcgccgctggctcctgccaggccacgccgcccccagcctgccgggtgccgccatctccacccaccgccatgccccccacggcccctccttggagctccaggatgcgatggcagcggcggccccaaggggcgcgtcctcgccccgccgaagcttcgagacaaggcggagggaggtgcgccgcgagctgatgcacggtcctaaaactggaactcaggcaagatgcgccgctcggggcgccccagccctggggctcggggcccaccgcaccgtcgccctcatcccgcgaagtgcagctcaaggctcgcagaggggagggagagagagagcagggaagg

SEQ ID NO: 31703 - DNA, 360 bp, Setaria italica
  Peptide Sequence Number=SeqID_97677
gactgtatcctgtgatggtgctggctggtagcgacggtggcggaggtgggctgcagcggtggtggtggtggtggcagtgtgtatccagttccactgcttggtgctggcattgttggaccctgacctcctctgccctgagcagggcttccactcgggctgacaggcacgatcggactttgctggtatggactctgattccctttgccattttgcttgtgggaactactgctctttgctttcccttttcccctcagcagagaggtggagggcgctctgctgtgcctccaatgcttgccgctccttgcatcgcatagatgaacgctggagcaaagaacaagcaagacaagaagcagcagtcac

SEQ ID NO: 31704 - DNA, 439 bp, Setaria italica
  Peptide Sequence Number=SeqID_97678
ccgaggcagcgagcttcttgagctgcacggccagctgcttgcggaagttggacggcaggttcccgccgtgcttctcctccaggtacttgccgatggccaccgagctcgacccggtcctctccttcagcgccgcaatcgcctccgagatcatctcggcgtacggcgggtgggcggccggcttcctagcagctgcgggcttcttctccttgggggccttcttctccttgggggccttcttctccttagccgccgccttcttcgccttggcgggcttggcggcctccgcctcctcggcggcaggggcctcggactccacctcggtctcggggacctcggtcgcggcagcagcagcctcctcagccgacatcgccgctaaactaaccctcgggaactgcgctcgcgctagtgcgtttgcttgctgtgtcggcggcggcggccg

SEQ ID NO: 31705 - DNA, 481 bp, Setaria italica
  Peptide Sequence Number=SeqID_97679
ccgcagccttgggcttggcggcggtcttggccttcgccttcggggacgccttgggcttggccgccggcttggcggccttggcgggcttggcagccggcttgccggcggccttggcgggcttgggcgcggccttgggctcgaccgccgggcgggcggacggcagcttgaaggagttcttcacacgggtcagcttccccgcggcagcgagcttcttgagctgcacggccagctgcttgcggaagttggacggcaggttcccgccgtgcttctcctccaggtacttgccgatggccaccgagctcgacccggtcctctccttcagcgccgcaatcgcctccgagatcatctcggcgtacggcgggtgggcggccggcttcctagcagctgcgggcttcttctccttgggggccttcttctccgacaagcaatcacagaatcagatcgaattccaaaacacaaaaaaaacaaaaaaggcaatcgg

SEQ ID NO: 31706 - DNA, 560 bp, Setaria italica
  Peptide Sequence Number=SeqID_97680
gctcggcgtcgagtactacctgcattacacgctcgtgctcgtcgtgctgtccgggctgctcgtcctcggcttctaccacatgatgattcagaggttcaaggtggagtacttcaggagggtcactgctgttgggtactcctgcgttgtgtttggatggatgacaattctggctgccaagcagccgtcctccaagctgaacattttcggggttctgtcactgcctatcagctttgcgccattcgagtcgctgatattcacatcgatcatcgtaccgcaggctagcttcattggccacttgtcggggatcattgtcgggtactcaattgcctggggtcttattcatgggatgaacaactactgggcgatcaccatgctcggctggattgtgcttgtatttgtgttgagcttgaagcgtacaggatctatggagttgagttttattgagatcgaaccagtgacagacccctcactgccttctgttggtgtggtttccaccagaaatggtagaactctgcagatggatgtgctgcccggaagaagagttgcagacattgtatgat

SEQ ID NO: 31707 - DNA, 576 bp, Setaria italica
  Peptide Sequence Number=SeqID_97681
ccggttgtctgcaactgccatccgaaacgacaggctggctactaacttccagttgactatctttcttggcatccttgtcctcaggtagaatcttattcaaaccttcatcaaccatttcactggccttcagtggtgctagattctcactttgcactagatgttcattagcagccttggtggcatatgcatgagttcgatccacttcattttcatttaaactagcactttcaacagcagaatgaggagtagcacccttgttatccatactatctgcatgaatgtcaaccgcacttacaatagatgggctattacctgccttctcaagagtttgtgcttctttcaagatttcattggatatagatggcagagaacaaactatatttgaagcagcttcttttgaaatagcatcaggggatactgcagaagcagttgcagtagccatctgatcacctacagtaagatgtgaattatcagtcacactgtttggtgaaatttccatagcttgactgccattgttgatgtttgataactcattcttggatgtttggttgccttcatgaattggttggacactgt

SEQ ID NO: 31708 - DNA, 303 bp, Setaria italica
  Peptide Sequence Number=SeqID_97682
gaagaacggcagcaacgttagaggaatcgtgcaattaacttaatttaaggaggggatcccctcctcctgcaccacacgacctcgatctcgagagagatggtgatggacgagcccctcgactttgagaaggaggagggtcccctgctcccgcccgtgccccgccaagagagccataccaaataggccttcagaaatgtagaacccttgtggcctacaggagaatacaaaagtttgcactcaaggaagaaggttatcagcttggacgatctcctagttgattactttgaaactggcaaggacaag

SEQ ID NO: 31709 - DNA, 530 bp, Setaria italica
  Peptide Sequence Number=SeqID_97683
ttagtcatattctattttctttattcctttattattaggttggagctgcatgatcttgttcacatattaagcactttatatttttgacagttttaccgatatggtgacaaaatcttatgttgtaccatgaaaagcaagtaaaaactgcattatcctccatgatggagctaacagacaagaaggattgtgtcatcaccacaaaagatgtaaaaccaaagacattacaatgcaaaccacgtgcttttaccggtctatatagtattgcattgtgcaactatagcaagttgcaataaaaggctctgtacccaacttctttcaggtaaaataaaataattagcaatctttttctttgtgaatgcctattgtatagttcatgcgaaacatcgcactcttctcaaacaaaataaatatcgattctctatcccctacaagctaagaaaaaacacttatatgctgatgactctaggtactcaagaaataggtaaaagaaatgacctaaaattaattaaattttaaggacaacaagaaca

SEQ ID NO: 31710 - DNA, 537 bp, Setaria italica
  Peptide Sequence Number=SeqID_97684
cgcttctttaatgtatgttactgcctgtctctccattgttcgattcctcctgtcgccctcctcatcaaccaacctctcatcatctcatgtggtgatcatgtcatgcgagctatacttattagtcgtagctgctgctaagcttcctttaactccggttagatcgctatagtttaatcaaggtctctggctcctcctcgcatggatcagtcactctgctgatgaaaaggtcatgtggccatgcatcacggcgcgcgtttgccggggcacgaggcctggcgtggccctgccggccacattcgcatcaggctccggcacgagagctttgcgaatcatgcaggagataccctgcttggttacctgcccacggcgaatatttctgtttgatctgctgctgctcatgtaccataccattaggttacaggcttacagcaagttgcataggagacaccacaccgtggcctgtaactgcagcagcagacaagaggaagctgtgtggattgtatatgttatcactcgcggtgaattggttgttaaaaa

SEQ ID NO: 31711 - DNA, 514 bp, Setaria italica
  Peptide Sequence Number=SeqID_97685
ctcgactcgagctctagctcgaactcggagatctccggcgaggcgcgggacgccggcgatggcagcgggggcggaagacgcgctgtacgagatccgccgccacgcgtcgggatcccacgtgatccctcatgaaggataccagggcgacgcaacaagtagtggtagctcagatgccgaaggatacctactacctaatctctccttgcaaggtgtgagcaagcttagggagaggtgggctaggtacagcgcgctggggaggagtagccagaggaagaggggggatggcgtgtcattgttcgtctcgatgaatgcagaatatgtgtctgtaactgttgggaatagcatcaccatcttgaggaaacgtgatggctatgcatcaccttgtggtgtttacacaaataatgacagaataacatttttcactaatggggcttggctggaggctcaaggcatttttggtgtggtggatgacctaagcacactctacttgatcaaagaaatggggattattagc

SEQ ID NO: 31712 - DNA, 264 bp, Setaria italica
  Peptide Sequence Number=SeqID_97686
cactggtccggcaggcaggacaggccacacctgacacagtgacaccacacccgaagtcccgacgagatcgcgatggcgtcggacggaggcggcgggggaggcggccttgtctgcgtgaccggcggcagcggcttcatcggctcgtggctcgtccgcctcctcctcgcccgcggctacaccgtccacgccaccgtcaggaacctccaggacgagggcgagacgaagcacctgcaggccctggatggcgcgggcgcgcggcttcgg

SEQ ID NO: 31713 - DNA, 297 bp, Setaria italica
  Peptide Sequence Number=SeqID_97687
caccaagccaacgacggaatggagggcggcgccggtggaggcggcctcgtctgcgtgaccggcggcagcggcttcatcggctcgtggctcgtccgcctcctcctcgaccgcggctacaccgtccacgccaccgtcaggaacctccaggacgagggcgagacgaggcacctgcgggcactggatggctcgagcgcgcggctccggctgttccagatggacctcctcgacccggcctcttccatgcggccggcgatcgagggcgcccgcggcgtcttccacctggcctcccccgtcata

SEQ ID NO: 31714 - DNA, 1797 bp, Setaria italica
  misc_feature (1)..(1): n is a, c, g, or t
  misc_feature (8)..(8): n is a, c, g, or t
  Peptide Sequence Number=SeqID_97688
nttttttnttttttttaatttagaaaatcatcaaaatttggggcggcattgaaagagcagcggcaaatgttctaggatcaagacatccatacatgcatacatgcgcaaccacaacacaacagcacaatgactttgataacacaagttctatcaaaatttcttggtaaactcagtgccagcatacatgttttggatcacgcacacaaaatatcactgatggaaaacaataatcttaaatgaagaaaaggatttctaattccagactcctcgtttgcaaatcatcttggactcccatcaatggtcttggcaatcatacggagaatcactaacgcaataaacaaaatgagaaaccatcggattgcacagtgaacaacctgctgcggaagtacgggtgtaaactgaggactgtcctgattagaccgcctatagcagcacaaggccaagctccgagggcttgatgccattgcgaatacggtagttgtagaggtaatagtggagctgcccatctccaggaccaaacttgagctccttgaggaatgactcgttctccatgacatcaagagcattgaacacatcatagttcttctgcttggcaacaatcagcgcatcgttcatcagctgctgcaacggagttttggtcgaaacattgtaatacgagtatgcagccttgagcgtcgcataggtagcattgttcagcacagatgacggcagcgtgtaaaagctgcagaaatccgtgacctcatgcgtctcagggctctccacaaggtagctgtccaccacatcctcctggggcagcagccagtgctccacatccacctcatcaaaatccggtgccaccacaaacttcgcaaggtaggccctcagcagccgtgtgaccgcagcaacgtcccggagctccatccggcggaacccaggggtgagcggcgcatcaggcagcttgtagagccggacagtgcggctcatggtcatgcgcggaccaaggcgagaaaacccaacatcgatgagcttcttggggttgagggatcggtgccagtagcggcaggtggtgatgggggttgggaggacgacccctgctgtgtatgcagcctgccagatgttctcctggtggacgcggcgggtgacctcacggatgagcacgggcgcgaggcgcttggatcggagcttcttgtggacgcagaggaagttgatctcggccatgcggacgacatcatcgcgagcgcggatgcgcgcggggacgcccgagatgaaagcgacgagcttcttggactccttggcgcggacgccgatgtgccaggcgcggaagaaggacggcggcttgagcgcccagcggaggaaggccggggagtagttgaagcggaacatgttctcgtcgtcctcgacgtagttgtgggcaagcagcgagtagaggtcggcgaggagcgcgtcgtcgtcgagatcgcaggtgagccactcgaaggcggcggggagcgggtaggggtcggcgcgcacctcggagagcggcgtgggcggctcgatggcgccgtccgggagcgacgtgtcggcggcgtcgcggaactggccgacgggctgggtctcccagaacttgtggcggcgggcggcggggttgttggcgagggtcatgtgctcctgcacgcgccgcgccagcgcctcgatggaggtgtcctcctcgccggcgggggcggtgccgctggcgccggcgttggcggcgtcgttgctgttgggggcggccatggcgatctgggcccggatcggcggtagggtttggggggatttggggggagaagagacggacggagc

SEQ ID NO: 31715 - DNA, 346 bp, Setaria italica
  Peptide Sequence Number=SeqID_97689
ttttatttattccatagtgttttgtttctagttttgtaaaagttacatagttctatggtgtagtttggattactccgggagtccttgttccatcatatatattttgttattcccataataagaaaattattttgcagtggtaagttttgcattattatgaaatttattattccatagtatattccattgtttcagtgatgaaaaacatgaatccatggtatttattgtattgatgtggttgtaaaaatccattcttcctatatcttatcaaattgttcaacatgcatgctttatttctttgtttttcaattagccttatctattattatgtttaatgaatcatttt

SEQ ID NO: 31716 - DNA, 816 bp, Setaria italica
  misc_feature (27)..(27): n is a, c, g, or t
  Peptide Sequence Number=SeqID_97690
atctacgacaccatgcagtacatccgntcccccgtcaccacgctctgcatcggccaggcggcctccatggcctcgctcctcctcgccgcgggggcgcgcggggagaggcgggcgctgccgaacgcgcgggtcatgatccaccagccctccggcggcgcgtcggggcaggcctccgacatcgccatccacgccaaggagatcctcaaggtgcgggaccggctcaacaagatctacgcaaagcacacgggacaggccatcgaccgcatcgagcagtgcatggagcgggacatgttcatggacccggaggaggcgcacgattgggggctcatcgacgaggtcatcgagcaccgccctgtctcgcttgtgtctgatgctgttggcggtgatccgccgaacctcggtggaggcggaaatggggagaataagggagcggaggagccatcatcggcgtgatggattgtcacaaggtgcaatcctttttgcgtttcctttagctgtcctgttggatttaaggtttcattcatacatgaggtgaataacttaatttcctggctgcttgggcttatccagtagctacactgttgttttgctacttggattaatctgttgctgataacgaatgctacgtggttttagccttcatctgtggaaaactgatgatagatgcattgttaaaggcttaaagtgtttgtctggattcaatcagttctgtttataaaggataaaaatcagtaatcacaacctcgcaacattgggttgcattttgtactggccctgatttggagtaccatttcatgattatcattgcaacaaaaa

SEQ ID NO: 31717 - DNA, 390 bp, Setaria italica
  misc_feature (352)..(352): n is a, c, g, or t
  Peptide Sequence Number=SeqID_97691
cttgcctcatcttttgcaaaaactgctgcccctttcttacattacctgaccggcaataacccttgataatggaattgtaggtcatgatgtttggtacaatacctttatcaaccatttcatccaaaaaacggaatgcatcttcaacttgtcccttctcacagtggctgtctatcaggatgctgtaggtaacatgattggggaagatttccagagcatgcatatcatcccaaagctcattagctttggtcagatcgcctttcctgcacatcccatcaatcaaactattgtatgtcacaacatctggcctcaagcgctggtgcaacaatgtgtcaaacaattgcaatgcttttcncttatgttaccctcctacagtacccatgaatcaaagtt

SEQ ID NO: 31718 - DNA, 944 bp, Setaria italica
  Peptide Sequence Number=SeqID_97692
tacgagttctggaccaacagcaacgacgagtgcgggccccggtgcgacgagcaggcggcgttcgtgcgcgcgttccggggccacgcgcagctgctggagaagggcggctacgcggccttcaccccgcactacatcacctggttttgcccggaggctttcttggacacgccgcagtgcaaggcgcagtgcgtgaaccggggccggtactgcgcgccggacccggagggggacctcggcgccggctacgacgggaaggacgtggtggtggagaacctgaggcagctctgcgtgcaccgcgccgccaacgccaccggccggccgtgggtgtggtgggactacgtcgccgactaccacctccggtgctccatgaaggagaacaaatactccaagacctgcgccgagggcgtcgtccggtcgctcgggttgccggtggacatgatcgacaagtgcatgggggatcccgaggccgacgccgagaacgaagtgctcaagacggagcagattgttcaggtcgggcatggaactcgaggggacgtgaccatcttgccgacgctggtgatcaacaatgtgcagtatcgaggcaaattggagagcactgcggttctcaaagcgatctgtgctgggttcaaggagtccaccgagcctcacgtctgcctgacaccagacatggagaccgacgagtgcctcgacaacaatggcggctgctggcgcgacgagaagaccaacatcacggcctgcaaggacacctacagagggaggatttgcgagtgccctgtagtggatggaattcagtaccaaggagacgggtacaccgactgcaaagccgtcgggccggcccggtgcgccatggacaacggcgggtgctggacggagacgagagatggcaagaccttctctgcttgctcgggttcagatttgagcggatgcaggtgcccgccagggtt

SEQ ID NO: 31719 - DNA, 318 bp, Setaria italica
  Peptide Sequence Number=SeqID_97693
ttaatttactaccacgtcgcagcattgagcgcttcctgcttgcaactttctccacaagcaaatcatgtgctgcggggattggtagtgtgcggtgaagtaaccgtcgaagcaaccaggctggtagaacctgacatcatgcaaatactctacaggctgacgagtagtattgaacttctcaacccacatgcccatattgacatcttccatcttgaatagtcttaatgcattgttatcaaactcggataaaatgttttgagcgatatctgatgaaatcacgtagccaggcccattagcataaggaggatatgcttcctctgg

SEQ ID NO: 31720 - DNA, 1200 bp, Setaria italica
  Peptide Sequence Number=SeqID_97694
agaaaaaggaaaggacaagctccaactgcaaattgcaggctgctccccaaggaccccaactcaatcccccgcgccgccgccgccagcgtcgtcttcgcctcaggtttgtatgaatggcagatgacaatatggtcactggagtgtcacctgtggctgatgaatgggatatgccacctctgacttcatcagtatatgccagcccattattccgaaaaggattggatcctattaatttgcctggatatggggatgtgaagaatagtcaggaaggcacacatactggattagtcatgtcagatggctttgtgttccctccaagtgagcatgagaatttgccaatagatcctgagcatgagattttgccaatagaacctgagcatgatgaatcaaatacaaacagtgatggtaaggaaggtagttgtgctgggagtaacgatgatgagtggtgccatgtatcacctgaagaagttgatggcatgagtaatgagaatctatctatcaacagcgacttgcctaccgacaatgaatctcctttaccagattccaaccccacagatcacatgaactgcaaggctgatcttccttgtgaaggatggtggaaaaggaaatccacttatctgtttcaccatataaagggagtgactacagtctgctcagttgtggcagctggtgccgttgtgggttttgtcgtaatgagtcagaggtggcagcaggaccatttgcaccttcatcaatttcagttcagtgtcaacggtgagagcatgagtcgagtcattggagcattcagccgtttgaaggatgggcttccaggtagtgaacagcttaggtctctgctgccaactcgcgtactcccgcagcagccgcttagcgcttgagcacaacaggcgcaggaatctggtgttagggactgcttctagtggcaatttttttttgctcatatgattttgagacagtgcaattctttcttgtgctagtacaaccgtttgattttatccttctgtaaatttatggttgagatttccatggcactgaaatattactcttcgtagtctgtagcaactgtaaaatacatggtgggaaaacacatagtatggggcacttcgaatatctgtatcgaactgggtatcatgttttcctatgttcaatggcatgcgcttgtatttttggttcgtgcctcaaaaaaatgtgaagcttcatatg

SEQ ID NO: 31721 - DNA, 924 bp, Setaria italica
  Peptide Sequence Number=SeqID_97695
aagaattttctcttgtagtccttcaaatggctcaggacatgtatctgctgagccaaaactctctgaaggaacaactgtcttgaatgatgatcacccagaggtttcatcctgtaaacgaacttcaactgataattgcaacttgccacagccacacgttcaattcgtgtagttgtcaacactctactgccacagtgactctctggaaaagcacattttataatttcccatgctgatgcatcccataaatcatcaaccacgagaaaataccttttgccttggagatactctcgaagattgtctattagaccttgcagatcgttagcgtgattagccccttgccccgaaacctttgagaacaggctgttgagaagactcatcatgtcaggtctctgagacaccgatatgatagccttgcaactaaaactcaatctaaggttgcggtagacttcatttgcaagtgtagtctttcctaggcctccaaacccaacaatagataccactcttagctcttgtggtgacgcatcatcgaccttagtcaacaacttgataacctcttctttaggggcatcgatcccgacaaggcttgatgtttctgcataaagtgcagtgatccgaggatcaacagaaacatgagcagatctagacaaacattcgccaagtctgtaccttgtgcggtgatcactggcctcttgcacgcgagtcctgagctcttcgatttttctagatatttgatagcgcgccatcagtgtcttgagaagacgagcagccctacacatccacccttgtccgtcatgtggactttcaacacggtgtctaaaatcatcgatgcaatcttccgtgtcgtaggccaattccgtcacttcatttctccacgccttggtttcgttgttcaggtcctccatgtctgcaacatcttctagagca

SEQ ID NO: 31722 - DNA, 439 bp, Setaria italica
  Peptide Sequence Number=SeqID_97696
ctcagtactacagtctttcatggaaaatcaattaatttacacacattcacattactaccagcatctgttacaacttccaacggcacttctgatctgatgtctccatctacttaaatgagaaaggcagcagtccagcgatctccacatatcattatcctaactattcaccaaccacagcacagtatttatagacattgtgtaacgccacccttgtcttcaatgcactacaggtagcagaagattcagcagctccaacctgatcaagaaacgaaagaatattatagccttgtgtgttcttttatcatacagttcttgtgcagctgcaaccgatccaacggtgtgaccgattcagtcacaaagaatatgacgcgctcagatgtacgctttcggcgggtagttttgaatgccgtgtacctacgtgttgcagctgccgccgccg

SEQ ID NO: 31723 - DNA, 319 bp, Setaria italica
  Peptide Sequence Number=SeqID_97697
tccacctttatgcgaagatccttaccatatggcacagcaaggacattcctagccagctgaagaaggatcatcgagtcgttgtcggtagaggagaaagactgacacgtcctcttttcaggcctgaagaggatgctcctgttgtcttcttcgtcttcgaagccatcgatgagcgcggtgatttcacctccgatgccaacagcgctgtgctcatcgttgaggcgcagcttgacctgcacagtggcctttagggcgttggacatcactgcgtaggtcactttcgctatgttgcccatatcgtggctcagtggggtggtttgta

SEQ ID NO: 31724 - DNA, 242 bp, Setaria italica
  Peptide Sequence Number=SeqID_97698
ctttaccgcttcttttgcagtgaacaacgggggaggagcagagcagagcagacagaagtgacgtgaacgcaagggaagccggggaagagaaggaaacctcggaagccctaatttttactttgtatttcctccgtccgtgatccgtcggccgccgggagcggcgaggctggtcgagttgctttgctcccccacgccggccgcctccggcagttgcgtgcgtgcacgtgcctcgcgtgtctgcg

SEQ ID NO: 31725 - DNA, 567 bp, Setaria italica
  Peptide Sequence Number=SeqID_97699
acaatactacaaagacaagaaactaactagtaacaaagaagtttacaaagaatacaaaaaaagaaatgttgaagtctgaacacaaggataaaattatggagaagtatgggaatgctgcatcagaagatacaatgcctcgggagttgcttcttggacaaagtgagaaagaaatcgagtatgatcgtactggtcgaataatcaaaggacaggatgtatctcttcccaagagcaaatatgaagaggatatcttcattaataatcacacgactgtgtggggttcatggtggaaagaccatcaatggggctacaagtgctgcaagcagactatcaaaaatagttactgcacagggttggctggaattgaggctgcggaggcatcagcagacctgatgaaggccaatatggcccgtaaggaggctgcagaagatgaacctgtacaacaagaagagaagcgactagccacttggggaactgatgtgcctcaggatcttgttcttgattaagtaagtcttgtctgtaggtagttcttcttaaagttaaagttaaggtatgcaaggaggaaagagg

SEQ ID NO: 31726 - DNA, 2084 bp, Setaria italica
  misc_feature (2021)..(2084): n is a, c, g, or t
  Peptide Sequence Number=SeqID_97700
ttaatttccgctgccgctcgccgtcgaaccgccgcgccgccgtcgagtcgcgccggcgaggcgaagggaagggaagcggggaggagaggagcggaagccatggcgaccgcttcagtgactttcaagtcccgggaggatcaccggaagcagctcgagctcgaggaggcgcgtaaggcggggctcgcgcctgctgaggtcgacgaggatgggaacgagatcaatccccacatcccccaatacatgtcctcggccccttggtatcttaatgccgagaagccaagtttgaagcatcagcggaaatggaagtcagatccgaactacaccaagtcatggtatgataggggtgccaagcttttccaggccaacaaatacaggaaaggtgcctgcgaaaactgtggagccatgactcatgacaagaagtcatgcatggagcggcctcgaaatgtgggtgctaaatggacaaatatcaacatagctcctgacgagaaagttgaatcgtttgagctagactatgatggaaagcgcgatcgctggaatggttacgacccatcaacctacactcgtgttattgctgactatgaagctagagaggaggctaggaaaaagtatctgaaagagcagcagctcaagaaacttgaggagaaggatagtgagaaggatggtgagaatgcgggaagtgaagatgatgaagaagatggcctcaggatagatgaggccaaagttgatgagagtgcccaaatggattttgctaaggtagagaagcgtgtgcgcacaactggtggtggaagcaccggtactgttaggaacttgcgtatcagagaagacacagcaaaatatcttctgaatctcgatgtaaactctgcatattatgatccaaaaacgcgctccatgagagaagatcccttgccggatgcagatcctaatgataagttctatgtgggtgacaaccaaaatcgacttagtggacaagctctggagttcaagcaattaaacatccattcctgggaagcttttgataaggggcaggatatccatatgcaagcagctccatctcaagcagaactactgtacaagagtttcaagatcaaaaaagaaatgttgaagtctgaacacaaggataaaattatggagaagtatgggaatgctgcatcagaagatacaatgcctcgggagttgcttcttggacaaagtgagaaagaaatcgagtatgatcgtactggtcgaataatcaaaggacaggatgtatctcttcccaagagcaaatatgaagaggatatcttcattaataatcacacgactgtgtggggttcatggtggaaagaccatcaatggggctacaagtgctgcaagcagactatcaaaaatagttactgcacagggttggctggaattgaggctgcggaggcatcagcagacctgatgaaggccaatatggcccgtaaggaggctgcagaagatgaacctgtacaacaagaagagaagcgactagccacttggggaactgatgtgcctcaggatcttgttcttgataagaagctgcttgaggagtctctaaagaaggagaatgcaaggaggaaagaggagaaggatgaaaggaagaggaagtataacgtgaagtggaatgatgaggttactgcggaagacatggaggcctaccgcatgaagaggattcaccatgacgatcctatgagagattttctcagctaagcttgtgaaacgtacaccctgctgtctcatgtaccagtagcaccctgccttgcagcgatgatgttgtgtaatgtaagttggctatgcctttcctaaccagggtgtcgctgtaagttagaatgtaacctggctatgcctttttatatgctgcgtgttgaaaatgtataatgttataattttcggatatcagaatcattgtttcagtaatgcccggtatctgtgatgagtgatgtgaagtcatggcatgcctgtttgtgagctactgaaagtttggaataaggaatatacgagctccagctgaaaagatgtgcatnnnnnnnnnnnnnnnnnnnnnnnnnnnnnnnnnnnnnnnnnnnnnnnnnnnnnnnnnnnnnnnn

SEQ ID NO: 31727 - DNA, 1440 bp, Setaria italica
  misc_feature (1413)..(1440): n is a, c, g, or t
  Peptide Sequence Number=SeqID_97701
aaattgtgtggtttgagcaaacagcagtctcagctgacagtgccattctggcaaggccggagtttagcaggatgaggatgggcggaagcctggccggcccggtggcgctcgtcgccgcggtgtgcctgctgctgccggcggcgagcctggcgcagctgcaggtggggttctacaacacatcctgccccaacgccgaggcgctcgtgcggcaggccgtcacggccgccttcgccaacaactccggcatcgcccccgggctcatccgcctccacttccacgactgctttgtcaggggctgcgacgcctccgtcctcctgaaggtgaaccccggcggcggcagcacggagcgtgacgcgccgccgaacaacccgagcctccgcggcttcgaggtgatcgacgccgcgaaggccgccgtggagcgcagctgcccacgcacggtgtcctgcgctgacatcctcgccttcgcggcccgcgacagcgtcaacctcaccggcagtaacgccttctaccaggtgcccgcgggtcggcgcgacggcaacatctccacgcaggacgacgctctagataacctcccgggtccgaacagcacggcgcataacctcaccgatggcttcggccgcaagggcctcagcgccgaggacatggtggtgctctccggttcccacaccatcggccgctcccactgcgactccttcctgttcaagaaccgggagcggctggcgagcggcaccatcagcccggcgtaccaggcgctgctggaggcgctgtgcccgcccaccaccggccagttcacccccaacaccacggagatcgacctgagcacgccgacggtgctggacaacaactactacaagctgctgccgctgaacctgggcctgcatttctccgacgaccagctcatccgcaacgccacactggcgaccctcgccaacagcttcgccgccaacgagacgctatggaaggagaagttcctcgccgccatgatcaagatgggcaacatcgaggtcaagaccggctcgcagggggaggtccgcctcaactgcagcgtcgtcaacccggcctcgtcgtcgtcctcctccgaaatcgagatgctcatgttcccgggcggcaccacctcagacgatgctccggccgaagacgtcgtcgccaccagctgatcgatggagatctatacgaactatcctgatcatcgagatgccacctactgaacgtatgtatgcttcgggcgtgcatgtttgaacgtgtatgtgcggttattatacgtggacgtaagctttgtgtttagggtgtgcgtagtgtacgtgtacacgtacggctcttgcgagctaggctttgagcgtgcgccaagatcgaaagacatgtatgataataaagttgcaggaataaaagttacatgatctaagcgaagaaaannnnnnnnnnnnnnnnnnnnnnnnnnnn

SEQ ID NO: 31728 - DNA, 223 bp, Setaria italica
  Peptide Sequence Number=SeqID_97702
gcaggtgtgagtatgactgcctggcagctcatatgtccgtaaaaggacagccatttggtaaattctaatgcatgtgattcttccacaacaccctagctagacacaaattagaggatttgtgaccacaaaatgcagttgatcatcttagaatgacatgatggatgcagaatctatacatgttccgtaagcatgtggataacggaagtttggagcttcagcatgt

SEQ ID NO: 31729 - DNA, 420 bp, Setaria italica
  Peptide Sequence Number=SeqID_97703
cgattcggtggctcgtccacttccatctgcagcgctgctttctctccgccgcgtgtgactccgtcgctcggtcaccgcttgctgctgcggcgatctgggtgtgaattgaggtttaggagtagttagtaccgaccgccagaccatggaggtcgacggcgaggcgcaacctttccgcctcttctccagcagggccaagaccaaaccgaagctcaagcctgaacccgaggtccggacccggccggagccacgaagccctgacaccggcgccgtcgaggccgaccacgctgactccgatccggcccccaccatcgtgaccgagaccggccaggccgacgacgccgaagccgcggccggcgcggcgccggccacgttctcggacctcggcctgtcgcagtggctggtcgacgcgtgcagtgccct

SEQ ID NO: 31730 - DNA, 411 bp, Setaria italica
  Peptide Sequence Number=SeqID_97704
tccatcgctttgtgttcatcctgttcaggcagtcagtcaggcagaccacctatgcgccggggtgggagatcaaacttcaacaccagggactttgcagcgatctacaaccttggcgcacccgtcgccgcagtgtacttcaactgccagagagagaacggttgtggtggaagaaggtacataaggtgatatacgaagttgctgtgtgtcctaataatattaactagctgtgtgcttgactctctgaagacagagaagcataaagaatagcatttgggctataagtacttctagcaaatgaaaaatatatcatgtgtgtttgtgtggtattagtagtgtgggtgagcattgcaaggacgatgctcgcaatcataagaactatcattagttcactacacattgtaagtctgatgt

SEQ ID NO: 31731 - DNA, 672 bp, Setaria italica
  Peptide Sequence Number=SeqID_97705
gcaccgtcgtcgttccccgagaccccctgatcgacccacgcgcgcacacccgcacccaggcccgatccccgccgcaactccgcctcccgttcgtctctagtcctcgccgcctcctgctacgggcgcggagtggagtggagaaggagatccgattgatttcttcgttcgttgtctccttttctgcaaattcataatcactgatggggaaagcaaagcgtgcctcaatcttcatcaggctggtttctgcagctggtactgggttcttctatgtgaagcgcaagaatcctcggcggatcactgagaagcttgaatttaggaagtatgatccccgtgtgaacaagcatgttctgtttacagaagcaaagatgaagtgatatcttctacctccacaatacagaacaggaataggttgtcgccttttgcaattagaaatctcttgtactgttaaggatgtagcccaacattgtcctgttctgatttccagagttccatttagataactgaagtgggtatgtgatttaaggattttatgtgttcttcctgtctgttttgttgctcgagtgagctgctgacctgcgaacggcttgtagttttttaatcatttccttttgaggtacgaaactataatcatctcctggtgaaggaaattccaagttagtatctgcacttttc

SEQ ID NO: 31732 - DNA, 760 bp, Setaria italica
  Peptide Sequence Number=SeqID_97706
gtggtgatgcaccgggggatatgataaacaagggaaatgattgttctgaagaaacagagacttcatgttcatttgatcgtcatgtaagccgcatcataacaaatgaagaagtcaaggaattgataaagcataactctaaatttaaatgggaaatgcctgctgtggacattccaaggtccaaatgggttggaacaggtgaaaaaatgcaggaagcttgtgatgatcatcttcatgatgtcaaaggaaagttgagtaaccattggaaacatacgcttgcagatcatttaaattctcgaatgggcttcttctctctctgtaatagttatcgtgacataatgcattgtaataagaagccattttatcagaaaagtaatggtgtggattccagtattatggacgcatatcttatgcatgctttgaatcatgttcatagaacacgagatgttgtcattagaaatgacgcaaagcttagaaatgatgctgacagagatatttcggatgataacacataccttgatcagggttttacacgcccaaaggttcttttcttgttaccactcaaaagttttgcacggcgcattgtgaagagattgatccagctttccccgttgcaacaaaagaatgccatgggacaatttaaaaaggagtttggtgaatcggatgatgaaatgcctgaacatagcacgaaacctgcagactttgaccttcttttgctggagatattgatgatcacttcctttttggcataaaattaacgaag

SEQ ID NO: 31733 - DNA, 999 bp, Setaria italica
  Peptide Sequence Number=SeqID_97707
cagtttctcgttcccgaggagggtcctgataccttggttgagtggagccatttatgtttgtgattttgaaggcaatcagtcacctcacagaggaagtgcagaatgccagagctttggtcaatggacatctcttttcagaagacataaacattagtacagagggcccacaccaagtcgattttcttgtgccattcaagaatgctgtacctgttgaagaatgcagtttagatggagttgctgggcttcttcgcttcgctggatctgtcagtgccttcgcatacttgggcccgaaagaatctgtttcagaagctatatctgatctgaaggcagacatcattacaagtataagaagcaggttggatatcatcctggatgacgcagatgatggctctgtcactaatgagttggagcaatcaccatctcagaaggccactcaagttgtattccatgagttgagagaatcttacagtttctcgttcccgaggagggtcctgataccttggttgagtggcgcctatgtttgtgattacctgcaacgatcagagacaacagaggatgcaacggatcgctgcaaggaagtgataccactagaaacagccgcggaaacctcaacaatcctggaaccagaaagtgccgcgacctgtggcacactagaatccttttgggacatggtgcctggagctcgtagtgaagcacgagacggatccagcaggctgaaaggtagtggctgcactggacaggatggtgatgataggagcagaaggggacaaggtggcatgaacttgaacgtcctagcagctctgtttgcactgctggttgctctgatagctggatttgtattcaccttctctgtgggttccaacccctgagcccgccttgtgttgtagcaccagtagatggcatgccaaagatgttagaaactgtgtcaaaaatggagttatttatgtaaaggaattggaaatagatggcgatttccactaaattggaggtcgtttcttg

SEQ ID NO: 31734 - DNA, 468 bp, Setaria italica
  Peptide Sequence Number=SeqID_97708
ggccgccgccacgaccaggttgggggtggggcccacgcgccgggcgccctcgccgccgcggagtcgacgtcaccgtcaggcctggaggtggcgggcgccggcgaggagaaggtaaccgcttcagcgggggaataggtgatgaagccggcggcgcagtggtcgatgcctgtgggccagtgcatcatcttgtacgccgcatagctcatcttcgcgggatggagggcgcgggcgacggctatggccccgagcttctgggatttggcagcgcgattcgatcgaaacgcgatggaatggagcggggattcttaccaaaaccctagagaaacccttggcggagcgagcaacattcgtcgcgcacttgccctggctcgatgtgagtttggacgacttgttcgtcgcgggcaaggacggcgaggccaagggcggcggcggcgtagcggagcggagctgagggcggcggcggcagag

SEQ ID NO: 31735 - DNA, 272 bp, Setaria italica
  misc_feature (199)..(272): n is a, c, g, or t
  Peptide Sequence Number=SeqID_97709
tgaaacatgtgtacaatcatttttcacggtttttttataagaatctctctaaacaaatgtaaataatactgaaatgtaaaaagaaagaactcataaacaatgtatacagagattcttataaaaaaaccgtgaaacatgtgtacaatcattttttagtattcttttcttaatatattgatacgcactcttcagctaaccnnnnnnnnnnnnnnnnnnnnnnnnnnnnnnnnnnnnnnnnnnnnnnnnnnnnnnnnnnnnnnnnnnnnnnnnnn

SEQ ID NO: 31736 - DNA, 643 bp, Setaria italica
  Peptide Sequence Number=SeqID_97710
tttttttttttttttgttgagctgaagagtgcgtatcaatatattaagaaaagaatactaaaaatgattgtacacatgtttcacggtttttttataagaatctctctaaacaaatgtaaataatactgaaatgtaaaagaagactcataaacaatgtatacagaaacaagatacagacataacaattaacaccaccgccagtgtgtttccttctccatggtaacaccacaaacaacaaaccagtaacacattgcgtatttgcagtcccaaggggtcttgtttgatccaacagatttcgtagttttgggcaatcagcaggcttagctcaggtcagccctgtgccactgggtgatcagttcttctgatgaaccgtgattcggtggacagaaattcgataacaacaatttcaagttttgggcaatcagcaagctctgctcaggtcttgcctctgggtgatcagctcttctgatgaacagcgatatggtgaatgtccatctccttcagcataaccgatcgcccacaggagtcacatggcgcggtcctggatccgcagatgctctcatgctcacacatgtttcggagccgatcacgagcatcaagtggttctccgccagcatggactgttgtcaccacagaaccggtc

SEQ ID NO: 31737 - DNA, 1419 bp, Setaria italica
  misc_feature (8)..(8): n is a, c, g, or t
  misc_feature (14)..(14): n is a, c, g, or t
  Peptide Sequence Number=SeqID_97711
aaggtaanaataanaaagaactaacttaactaagaaatagaaacaagacgaataatggtgaatgtccatctccttcagcataaccgatcgcccacaggagtcacatggcgcggtcctggatccgcagatgctctcatgctcacacatgtttcggagccgatcacgagcatcaagtggttctccgccagcatggactgtgtcaccacagaaccggcacacaatcaagcgcaaggggcaggttgaggattggtgttggaccatgtcttccttttccagaaccaccccacaggggcactgcagtggctcatggaagactttcatatgtttctccatttctctctgctggaaagctcgcccgcacttgttgcagtgcacatgatctgctgcttcttctttccggagaacaactccacagccatcatgcgggcaggcaacattgtgtctcatgcagtacgcctcatgaagatgagcagatcggctggctatatggcgcttacagttcctacacagcactgaatcagcgtcgacacttcccgaggaactagcatgctcaccaacccgttggctattaacatccttgatagctacagagagctggtacttagaagtccctttgaaaccataaaccccaatactgtaaacaccgctgaccaaactagaatcccgtggtttgagtataagaacctttgaacccatttcatgagaagaccactcatgtcggtgctgagttgggaataccaaaggatgccttgaaacatagatatcagtgtccccaccacttgcatccgtgtcaatcttaacctcgatattagcacgcccagaagctactttctcactctcactttcttcaactgtaaatttgtagtacctgaactttccttcttccacaacgctggattccacctttccaattgcaagtggaacaagcacatgttggttctcttcattgtctaaaactgaatctgatccctcaatgtcaacttcaatgtctgtctctaggacagacacacttgatgcgggcttcagttcaagaacctttaacttgtactgcagttgcccatagttcaccacaacaatatcattttcagatagcgttgcgtggttgcggagtgccgtttcaaggactgctctatggttagggagatccgaaaacccagccccttctggcttcaactttgcatatgttcctttgggcaaactgacatacttgacttcaatcaaagggacgtctggggtgtcactccggaacaggctgttccaaacatgcagcgggagttcagcagagccttcccttgcagtgaattcgagaacaccacaacaggttgcctcctcagtgtcttgtttcatagcggcacctgggactgtgtccctaaccttggacagcctgaagtacatgggaccttttatccagacgcccct

SEQ ID NO: 31738 - DNA, 310 bp, Setaria italica
  Peptide Sequence Number=SeqID_97712
acaaacttacaagaagacgctatagaaattgcaacgggcacagtaccacaagctagctgttgatcgagcacagcagccgccatggctccagtgctagagcacctcttcgagcacgcatctccacagtccctagccctcgtcttcctcctcttcgtcgtcgccgttcgcctggctacgccaaagtccaggtccgagaagctgctcagcaagctcccatcgcctccgttcaagctcccgatcatcggccacctccacctcatcggatcccttccccaccactccctccgcgacctcgcaaagaggcatggcc

SEQ ID NO: 31739 - DNA, 549 bp, Setaria italica
  Peptide Sequence Number=SeqID_97713
gaaaactactgtgcagttatatgacgaataatcttgtggagaactcaaatagtcctagaatgaaaatgccctactgatgacaagcacggagcagacacggatgtacaccctcaccagttcagactatatcaaagtccaaacgtcggtacgacctcctcgctgttgctactcattcgagtcagaagaactgaaaactatgccaagatgctaactgctgagaccaaggaattcagtgaagcttggatacgtaggctcccacccgatctcagcccgagtttttgagttctccatcctcttccccaatggaccgtcagtgccagtgaagccttcaaacttcgtgtcaaattttccactctctgttaacagcatccattatttcttgcctggaaagaggcttattgtcgcagcccaaaaatattcggctccgcagttgctttttcatgattgcaattgcaagggaagcagcatcctcaataaatagaaatactaggttagaataaataatagaatacttaggtacgttagttagttacctaaaagtttacctta

SEQ ID NO: 31740 - DNA, 1251 bp, Setaria italica
  Peptide Sequence Number=SeqID_97714
catcttgctcgtctattcattcctcagtcctcccgagtcatcgttaccctgccgccgccgcgaccccgccggccgacgagatgagagtcgccgctgcggcctccttccatctggctcccgccacgaaccggccccatcgccgcgcctccgccaccacctcctgctccctgaaacccgccccgactgctcggccatctcgccccctcacgctcgtccgccgcgcgcctgtcgcccgcgcctctctcgggatatctcatgataaagggtcggaggtctctggtgctgatgttgttggccagaatgatctactgattgtgggcccaggtgtgcttggacgaattgtagctgagaagtggcaaaaggaacatccaggctgcaaagtttatggccagactgcaagcacaaatcatcatagtgagttaatggatcttggcatcatcccctcactgaagggctccactatttctcagaaggttccacatgttattttctgtgctcctccatctggttctgatgattaccctggggatgtcagagtggcagcgtcaaattggagtggtgaaggatctttcctgtttacatcaagtactgctctgtatgactgcagtgacaacatgatgtgcaatgaggattgtccatcagtgccaattggcaggagccctcgtacagatgtacttctaaaagtggaaaaatgttgttctcgagtcagaagaactgaaaactatgccaagatgctaactgctgagaccaaggaattcagtgaagcttggatacgtaggctcccacccgatctcagcccgagtttttgagttctccatcctcttccccaatggaccgtcagtgccagtgaagccttcaaacttcgtgtcaaattttccacttctgttaacagcatccattatttcttgcctggaaagaggcttattgtcgcagcccaaaaatattcggctccgcagttgctttttcatgattgcaattgcaagggaagcagcatcctcataatgaatctggttgataatatgatctggtcgtgtgtccaaagttcctttcctcaaccaaaaaacatgagcacctctgtctatcttataaagtccagctagcctgagaacacagcctcctgcctcaagaacaacattttccacttttagaagtacatctgtacgagggctcctgccaattggcactgatggacaatcctcattgcacatcatgttgtcactgcagtcatacagagcagtacttgatgtaaac

SEQ ID NO: 31741 - DNA, 1408 bp, Setaria italica
  Peptide Sequence Number=SeqID_97715
cttaagactatgtaaagataacgacagttgtagggaaccaagcattcacaggcatgcttggatcacatcaaacaatactattgtaaaaactaaattaagtggaatatatagttacatttaattctaagcattgcaatatctaaagtaacaaatatcaattttcaacttgcttcatagactacaacaacataagcttcaggatctataggctacaaataaatttggaaacctatacaggcattctgctgagcatttgtgattcggtaaatgcaaggctattaaagaaattgtaggtacatccatttacagattttagagatgacatcgataagctcaaccatcagataaaccttttttttacgagtagataaattataaacaagtagtgcatctgagataaatctgtagctcatcttaagtactaatacctaatttaatttacttaagaacctaaggaaaagaaggacttaattagtacgacaagacgcgcacaggacatccaaggtctgtacttgttctacgtctggttgatttctcatttgttctgtggcgcaagacaggcagttgcggaaccagtctacaatgcgcagcttgactttcgaaagaaacttgcagtagaccaaagtaatccagaaccagacgttgaaaactactgtgcagttatatgacgaataatcttgtggagaactcaaatagtcctagaatgaaaatgccctactgatgacaagcacggagcagacacggatgtacaccctcaccagttcagactatatcaaagtccaaacgtcggtacgacctcctcgctgttgctactcattcgagtcagaagaactgaaaactatgccaagatgctaactgctgagaccaaggaattcagtgaagcttggatacgtaggctcccacccgatctcagcccgagtttttgagttctccatcctcagtgaagccttcaaacttcgtgtcaaattttccacttctgttaacagcatccattatttcttgcctggaaagaggcttattgtcgcagcccaaaaatattcggctccgcagttgctttttcatgattgcaattgcaagggaagcagcatcctcataatgaatctggttgataatatgatctggtcgtgtgtccaaagttcctttcctcaaccaaaaaacatgagcacctctgtctatcttataaagtccagctagcctgagaacacagcctcctgcctcaagaacaacattttccacttttagaagtacatctgtacgagggctcctgccaattggcactgatggacaatcctcattgcacatcatgttgtcactgcagtcatacagagcagtacttgatgtaaacaggaaagatccttcaccactccaatttgacgctgccactctgacattcccctagggttaatca

SEQ ID NO: 31742 - DNA, 323 bp, Setaria italica
  Peptide Sequence Number=SeqID_97716
cgagctcgtccacgttcaaggtgacattgcagttgatgggtcagctggccaatgttggactaaaatatctgaagcacaatgaccttgtttatgtttcgggctttctgaaattttatcacaaagtcagtccaagtggtgaacggaatattttctatcagattcacgtcacagagctgaattatgttcttgatcaaaataagaagcctcaggatgatgaagactcagtacatccatcaccaatgctatctgccaaccccctcaaatgctaaaagagaaaaggcacatagaccagcttcacttgtggcaagtcttctttgccaatc

SEQ ID NO: 31743 - DNA, 791 bp, Setaria italica
  Peptide Sequence Number=SeqID_97717
gtagacaggtgaaattttgcaaaacggatattaataaacagaaatatgttcacaatgtttacttattccatgttgctttgctatataaatgatttttaatgcaccttttcaatgcattgtcttttattgtttcatagttcgaaacccatatctttcagattcacgtcacagagctgaattatgttcttgatcaaaataagaagcctcaggatgatgaagactcagtacatccatcaccaatgctatctgccacccctcaaatgctaaaagagaaaaggcacatagaccagcttcacttgtggcaagtcttctttgccaatccttatgaatggtgggataaccgacaatcaaaccatgggccaactatcctgatttcaaacacaaggacactcgtgagaaaatatggctccaaccagacgaccctccctgggtacgaaagcagcttgaattacatgacctggaagtagcaaagaatggtcacaagggcaatggtcggctcttaaaaaatcatgactggaaagcagaagattttgactatgatgatgatgaagtacagcattccgcggaagcatgaacaggaacacaacatcgttcaccaaaaaatgaagaaaattcaccaggccattgaggagccgtgcatctctttgtccaatgatctcactgaattgtatagatggtaaacttagtagttaggatgtggattatttttttttaacgtagctagttattgggcttgcagggttggtgtgtctgtgtcgtttattgtaatttattacatgtagggcgggtgc

SEQ ID NO: 31744 - DNA, 255 bp, Setaria italica
  Peptide Sequence Number=SeqID_97718
cctggtggcgcagcgcggcctgctgcactccgaccaggagctcttcaacggcgggccggcggacgcgctggtgaggaagtacagcggcaatgccggcatgttcgccaacgacttcgccaaggcgatggtgaagatgggcggccttatgccggcggctgggacgccgacggaggtcaggttgaactgccggaaagtgaactagaattaatggcttcgtttgccaattttcttttgtcgatataagcagagggccaa

SEQ ID NO: 31745 - DNA, 418 bp, Setaria italica
  Peptide Sequence Number=SeqID_97719
tattactattggagtgtacgtttaccatctgatctcgtcataatggaaatgtttgtaaatctatgtggatacgggatcaaatgcttgagggacgatggagcttaaatcctatttttcttgttgatcaatagttatgcttttgctatggttcaccttgaagttttacatcacaagtgttgtgcttgaacagttgaactgctatgcttcgtaattatgtatcaaattattattgttattacaacttcacacgagaccctgtctgaatataaatataagttctaaatttgcttagggaatcaactttcacctgacattcagtatgatgtatcaatacacaaatattgctgatttcaaattatagccaaagtttgttttgacaatgtgttcacctttactgataggcacgcttgcaaagttg

SEQ ID NO: 31746 - DNA, 307 bp, Setaria italica
  Peptide Sequence Number=SeqID_97720
gagccctcgtaatttcataagtatctcaccagcagcagtaggagccaaagctaatgaagtgaaaaagattgcatcatcgccacagcaagtaatgttgttcttcaaacacactatctcctcaactagtttcagtcttgtcaactctttagcaaatataggcttcttgctacaagatagaatgtttgcaatgtcaatggaacaagcccgattctttctgaagaaagactgtcgtgtacattcacaagatttatctgccacaaatgatcctgattcacctaagcagaaggagaaactatcccaagcaata

SEQ ID NO: 31747 - DNA, 1241 bp, Setaria italica
  Peptide Sequence Number=SeqID_97721
tcggggtccttgtccgtcttggtaaaaggtcttgttcgctttgcggcatccgctcaggcgacagagggcttggatggctctggcggcggtgcgggagcctcaagtggctgcaactgcgcgcctgcgacggcactggagacgggcccgcgtcgctggccttcgcgggctgcctcgctggattgctcgcgcttgagcttcgtgcttgccgttctgtcgccgaccgtgttctcctccttgcagctgaccattgccacgcgctgacatccctccttgtttatgacggtggcagcagcgaggcccttcaccggttcatccaacagcgtgctgctggtctgcacaccttggaccttcgcctaccgctcgacctgcacaatgatcatctccttgccattggagccgagccaattcacggcggtcgggaccccaaacatagcctagtggcacttcgccttcagagctgcgtcctaatcacaggagatggactccggtctcttgcgcgaacagccactggggcgagcatcgaagagcttgccttggttagctgtgatgtcgtggaacgggagcccgggttactgacatttctcagtcaaagcatgcggcgtcttcgtcgtcttgacttgtcttacaatgagacactgagtgacaaggtgattggtgccatgctgtcatcctgccggaatctcatcgacatcagactcaggggatgccggggactgacggggggctccctggtctcgcttctcaggcactgtgggcaatcactggagatcctcgacctctcccgctgtcctagcattgctgttggcaatgtcgaactctttgctcagcgcgccactcgattgaatcatatgatcatcgaggagagcgtgatatcagaggaattgaaggcaatcgctcagaagaaaggactgaagattggctcattattgccatgcgaaggaccattctgaagtcaggtaatccccttcagaatgcaactgatgaatacttgatttcagtgtactcttacttgaatattggaataaggtgctgctgctctgtactacttgtgtatgcaactttataactatacaattgaatgtatatactatacttgtattcttgtcatggcaagcctcttggtgcctcacatgtaaactgaggaccaagaatgtgctgctgtatgtcttcaaataattggcatggaaataacacagtaaatctcaaattccataaaaatctattgcaatttaattatgttg

SEQ ID NO: 31748 - DNA, 323 bp, Setaria italica
  Peptide Sequence Number=SeqID_97722
cccttcacagaaaccttctgccttacctgccgccgccacccttccgtccaactgggcggccaccgttcctctcctctctccgtcaggatccggcttgccgcccccgccgccgcagacgccactccgcccttccttcgcttcgagaaccccgccgccctccgccgttgcattcccgtcttccacgggtacccaacgccggcgagcccttctccttttatctggaatctgggtgttcttggcgccgacgtctccgaggcagagctcagggaaaggccggccataggtgccgttcgtgaaggaccccctttgcctgctccgtccca

SEQ ID NO: 31749 - DNA, 532 bp, Setaria italica
  Peptide Sequence Number=SeqID_97723
aaagctttcaattaacacagacgagtgattttgcagccatatgttctgtactttaggatatggaaatacaacaacaaacaaaagagcaaaaccttttgcttccaaggaagttgattttttagatatgaaacccaacaagagccaccgatgaggatatataaataaaaaggaaataaaaatgcaacatgcaatcagatgctacagcgacatgtagacacactagcatttttgtgaaggacatctatggtttgaaaattattaatggttcaagagcaattaagtctttggatactgtgtaactgtttatgcagtaatgcaattctttgagattggtagctgtactgcaaaaatcatccttgtttacttcacgaaaatattttgctttcaacataacttgatcagaacattcattgcacctttaaacatcatttaccatttctattaaccttggttcactttgatattctcctgtcgtacatatgcatcagaaaatgttaccatttaacatgacaacttaactgcgatatttgtt

SEQ ID NO: 31750 - DNA, 377 bp, Setaria italica
  Peptide Sequence Number=SeqID_97724
agacagctttacaatgtttagttagccttttctacttttcctcgctcaaaagttttccctatgcggcgaaaggttctacaagcagcaatcaaggctctcgatgatagaaaagggctgttcgtcaagaggcttgttcgatgtcgacaaacatggcagtcgtttgcttaaggatgggcacgctttcagtggtctgacaagttggcgagttgcttactaggcgatcctgttgttacttgatgagtacgcacgattggattcactgcgccatcacattaggtgagagtggacactgcggattggttcatgtctgaaatcttttctttggatcagctgctaagttccgaatgttgggtgattctctgaagaaccatgaaact

SEQ ID NO: 31751 - DNA, 923 bp, Setaria italica
  Peptide Sequence Number=SeqID_97725
gttgatggatgaaaagggcgaaagaagtgcattctggacaatgtccacatcaccatcagtgttcttacccaacttgtttcctatcctcatatgatggttgttcgggagacagctttacaatgtttagtagccttttctacttttcctcactcaaaagttttccctatgcggcgaaaggttctacaagcagcaatcaaggctctcgatgataagaaaagggctgttcgtcaagaggctgttcgatgtcgacaaacatggcagtcgtttgcttaaggatgggcacgctttcagtggtctgacaagttggcgagttgcttactaggcgatcctgttgttacttgatgagtacgcacgattggtacatcttttggttgtttcaacttttaacacttgggtattgcgataccttcctaggttaattccctttccgcttgatgcacgtacacaggattcactgcgccatcacattaggtgagagtggacactgcggattggttcatgtctgaaatcttttctttggatcagctgctaagttccgaatgttgggtgattctctgaagaaccatgaaactatgggagaaaagtgcctggagttagccctccatctgggttgccatttgccagcgttgctctgtttcttgatccggaacattgttttgcaggatgcaaaaccaaattggatcacttgagaatgtaaccctggtctcgctaatgcattgcatgttatcccccctgatgttggccatgccttgacagtttagtttgctttcatgtttcgagcaggccctgagtgtctcatcaagcatggctcatacgctgtgttgtaaaagatacctaaagtaaattgcgttcatcatacaacttgtcaagtatgtgcagatccaacaatttgaaaatggctcaacctaatacaataacttgtt

SEQ ID NO: 31752 - DNA, 276 bp, Setaria italica
  misc_feature (273)..(273): n is a, c, g, or t
  Peptide Sequence Number=SeqID_97726
cgcgataggaggacgcgcctgctccgccttgtgctttgccccgccccaaagcatccgccaccaaacccagcgtcactctcgatcactcccctctgcgtcggcagctctgccctctccctcccgttcccttccccggttgcgaggcacggcgatctcggctcggatcaggccgtctcggctacctaccggtgatgggaatgggatcgcggcggcgcccatgcgtgggcggtggtgatcttctcgccgtcgcggtgctgctgctctcttgcctcnccg

SEQ ID NO: 31753 - DNA, 469 bp, Setaria italica
  Peptide Sequence Number=SeqID_97727
cgacaaccggccgcaacccggcccaggctgacacgagtcaacggcggcagcggcacgcgccccggggtgatgcgcggggcccacccctgccgcgttccttgacctcgtccccgcacccgtccacgtctccctcttcctgtcgtccgtccccaccgggggaccgagacccaaagccgcagcggccagcgtcccgttgttcaaccgctgggccccacgggcttttgactcccggactccaaatcccccggggcgttcaaatcaaatccggctctggaatagcgcgggtggagtccacccacaaagcgcggtcaaaatcccgcccacccgcaccagcaccacttctcttcgctttgccttttcctaatttacccttttcttctccgagcctcgggctaacacatctttcatcttttcctaattctattacaagctgctaaatgaacacatgaggtattgagaaatttggagc

SEQ ID NO: 31754 - DNA, 314 bp, Setaria italica
  Peptide Sequence Number=SeqID_97728
tgggcgggcgggcgggttaaagtagtagtactagattaccgcgtgtcgcgttgcttggtggtgggtggtgttggatccagcaaccgccgctgtgcctgggacggaccaaggcggcgaggaacccggacggaaagaagaagaagaagaagaagaagaagaaaagacggccgcgccgctggagaagtggagcggggagggggcggttggcggccggttgcgattgcgagcgagacggagcggcggggaaagctactggctactagtagtggcgaggcgaggcaggcaaccgatcggacggaggagggagacgatgg

SEQ ID NO: 31755 - DNA, 827 bp, Setaria italica
  Peptide Sequence Number=SeqID_97729
ttgatgaaagtcacatgcaccatgcaattgagtatttggagaacgttgttttgggtgaataggttgatctcagtgaaagattatccttgcatttcagcccaaagatgatagatggagtttatgggcaattcctttcaaaagggaaacaaaaggagagtttgaaacaatgttctctgagttaagctgctgggtgctttctaaacaaatagttaagcacaagcaggccttcctcttgctgctcagatgatgaatggagtttggattcaattccattcgaaagagaaaaagcaagacttaggtaccatgtcctctgagttaagcagctggatgcttcccaaatgaatagttgagtacaaacagttcttccacttgctgcgttaaccttgccagaattcttttcttggcaagttggcattatactcatggagatgtgttttctaatggaaactgggtggaatatggtctgttttctaaaggcctctcatcatacgattctgtcccatttgttatttgcttttgacaaggtgtgctggaaccgactggtgttgatcaactatctaaaatagtaaatggctgcaggcctttgcgactgagcttccttcaattacatataggatttctcttggtaagaatataccaagaattttttgtaatgaataattcctgtatgaccatcaatttgtcataggcataagtcacagtatattgatctgtcagatatgtaatcattctttgggtctttagtgagaaattatctctttctaaagatctgtcccaactgttattgacatgaacaattttgacaaaaggctctttaatttgttagc

SEQ ID NO: 31756 - DNA, 270 bp, Setaria italica
  Peptide Sequence Number=SeqID_97730
aaaaaaaacaacgaccccatccattccgttccaccgcgctcaccgatcgcggcggcgatggggaaggggccgtcgtcgcgggcggcgtcgcggcaccagcagttccgcgcgcgcgccaagacccgcgtcgacgacctccaggagatgttctcgggcctccagtccgcgcgcaaggactcccgcccggccgacgccgccgtcctcgaggcgcagctccagcagatgctccgggagtggcgctccgagctcagcgccccctccccggcctca

SEQ ID NO: 31757 - DNA, 608 bp, Setaria italica
  Peptide Sequence Number=SeqID_97731
cttgtcggggcattgcaagtggcgcttcaaagatgatttctctgggatcagatactccaactgacctgtctcctcattttttgtggaaagggtcatggtcatctgaagtacttcacagatgaccatgacccaacgcaagcatttccgtatcaattggaccaattgtcccgatcatgcgagcaagaatgattggtactgactcattaggaaagagcacttcacccgtgtacagttcagccaagatgcagccaagggaccaaacgtcaattttctgatcatatggcaaacccaggatgacctcaggagatcggtacgagcgtgattgaatgtataagtttaagttgtctgaacaaaaagcagctgcttccaagatcaataaccttgatttcacatctgctgtagctcttcagaaggatattctctggtttcaggtcacagtgaacaatgtttaaatgatgcaagaacaccaaagcctccaagcattgccgagcaatagcctgtattctgggcaatgaaaagtatagctcatcaccagactcttgattatatttctgaaactcatacagatttgcgcgtaataattcagtgacaatgaagagatgctccta

SEQ ID NO: 31758 - DNA, 615 bp, Setaria italica
  Peptide Sequence Number=SeqID_97732
caaaacgtagggtttctattcgaccgaaaggtattacgtaccttgaaaaaaaattcccacgaagccaaatcatgctccaaaaggaaacgtgttgttccatgagccgagtaacttcagaaactgaccctacttgtgaggatagatgagtaacttcagaaactgtaaccctatttgtgagaaaagagcttgattggcaagctcaactatatactactgaaagccatcggtgttgcaatgcttcaatggccgttggtctctttttgggatttatttgcagcaggtaagagagaaaatcaacaaacttcttgtcggggcattgcaagtggcgcttcaaagatgatttctctgggatcagatactccaactgacctgtctcctcatttttgtggaaaaggtcatggtcatctgtgaagtacttctgtgtctcctgtcccaacgcaagcatttccgtatcaattggaccaattgtcccgatcatgcgagcaagaatgattggtactgactcattaggaaagagcacctgtgacatgttgaaggggttgcaatcacatatgacttctttcaaaaagcagaacatagtctctgttagacaatgtatatgtgctgtatgcgctt

SEQ ID NO: 31759 - DNA, 1375 bp, Setaria italica
  Peptide Sequence Number=SeqID_97733
tttttttttgttcaacttttttttactaagcctctatacatagtaaattatttcctgaaactgtcacctgggatgttgctttcacatcttctgaacatgacttttcttaaacagaagggggaaaaaacttcttttctctgaagagtcaaatccctcaaattcaggtcaataaccagaaatgctctgtatctgctaaccgcagtggcgtgcctgattcactcatcatgacttgatctcaaccagctatgaatatcaagctttgcctcactgctggaaccgagcaaatcaaggatccaaaaatccccgtcagaccataagcgatggcgcagaaaggcagcgcttcaggctccttggctgacagtgctgctgttcccaatccatgagcactggacgctgttcctagtcctctggcgatggggtcgttcagaccaagtttatccatagctgcctggacaaaattggcaccaatgagcccggtaaggacaaccacggcagcggttagcgaagagtttacaccttcaaagaaagatactatgctcaaagccagcgccacagtaatacacctgggcaatatcgatacggttaatgatggctccagccctatcaggcgcccaaggatagcagttgagtacaaagagaatgttgatgcaatggcaattgatgtgaagatctctgctgcgtgcctctttacaagctttctctgcttgaacattgagaatgcaaatgatatgatcacagacccaaggaaacccattagaacgtcaccagctccaggattagagggcgcctttgtaaggtaatcacctagcacagcattaagtccagatccggagagataaccatacgctacagctgccaaatctgcagaaagtgcgcaggatatgattggatgtaacactttcttgacaccagctggtaacccagaaccaaccatgtatcccagtacagtggcagcaagcaggaaaggaaggcatgttcttgctgtggtaccaagtgctgtgggattgaaatatgcaacaccaaatgatgcaacgaagatagcagcccatgcccaggtttcaaatgtcgagaaaggcgatggcttgctcatgggctctgctggtataagctgtgtcttcacaagttttcttacagctagtgctgtgtaccctgcgaccgcgagtgaagcaaaccagccaccaaatgtaattgttaaaatcttgatgcctgaagccgccgggacatccctgacggctagcggcagcacgaccagcgacgggacgtagaacaaaggcagccacctctggatgaacagcgtggcgggctcaaaaaagtccatgaatccttggcgaggagcgaggcacgaacgtgtcgaagacgacgagcgacggagaag

SEQ ID NO: 31760 - DNA, 243 bp, Setaria italica
  Peptide Sequence Number=SeqID_97734
cgttgcatctgctgatcgacggccaccagagcgggagtgtgatcgacgaggtcgtcccgtccggagctcaggactcagatctgaggcgcggaggacatgcagggcggcgcggcggcgggggacgcgccgcggccgagccggtacgagtcgcagaagcgccgggactggcacacgttcgggcagtacctgcgcaaccaccggccgccgctggagctgtcgcgctgcagcggcgcgcacgtcctc

SEQ ID NO: 31761 - DNA, 424 bp, Setaria italica
  Peptide Sequence Number=SeqID_97735
aagaataactaatattaatggtctcccctgaacacgagatgatggcaagtgttatcgcaagggtatgcgcagtctgtgtacttcgcgtctcccctctggaagtaccagtccccgacagcttcagcaattctcttgttaccaagacgtggcgagttgcttgcgtaccatgtatcctgcctctcactctgacaatgagcaaaacatgagttgatgaacacgccattttgccttgacgcagagaaaccccttacagagtcgagcatttcattcctgatgtaaaaactgaagttggttgctattacaaaaagcgtggttcgttctacattttgaccatagaccttgggggtcagcagctttgaacaccgcctatgatgtgtggcagctcctactactagtctatccggtcggttgtttctaaaattaa

SEQ ID NO: 31762 - DNA, 454 bp, Setaria italica
  Peptide Sequence Number=SeqID_97736
aaactggagctgcctctccatgtgatttgatgacccacgacgactgcccttgcggaacacacagctgctaacatcattgcaccagcctccaccctccaggttgacaagccaactgtttgctcctgatccaaaccctcggtgcaggtggtaacccggtaagcttccatccaagcacacggctcccttggcggccgccgactggatgagtgtgaggccaacgaagacgccgttgctgccgccggagctggcggtggtgccgtacacctgcgtctcgttcagccacggctcggagccatgggccgcgctcgctcctgctcccacaaggaaggcaagaatcacggcaacaagacgagaagccatggttctttgcctcgccccgcctcggcctctccctgctctgtctcgccgcaggggaggcgtgagcacggggaggaatggatctggggaggtctcg

SEQ ID NO: 31763 - DNA, 2282 bp, Setaria italica
  Peptide Sequence Number=SeqID_97737
tttttttttgttcggtttctttcaatcttcgcacaaattctcttcacactattatcacgtttcatacatgaatgtataacattatacagtacaccaatagggccaaatgttcaggcacatgatgaatgatgtgtgcaacgaaaagaatcgatatcatggtatgtggagctaacgcagaggcctcctcgcatttgcgggcgaggcccctgccctatcaatcatatcatcgtgatgaacaagggcaagccatgacgcttgcaccctctctatatctataccttgtttctgaacttttgattctgtacccgttggggtatgttcctttcaccatctgaatcatgggtggcaaagaataactaatattaatggtctcccctgaacacgagatgatggcaagtgttatcgcaagggtatgcgcagtctgtgtacttcgcgtctcccctctggaagtaccagtccccgacagcttcagcaattctcttgttaccaagacgtggcgagttgcttgcgtaccatgtatcctgcctctcactctgacaatgagcaaaacatgagttgatgaacacgccattttgccttgacgcagagaaaccccttacagagtcgagcatttcattcctgaaaccttgtaaaaactgaagttggttgctattacaaaaagcgtggttcgttctacattttgaccatagaccttgggggtcagcagctttgggggccacactttgttgaagctgccacacatcataggcggtgttcaaaataaaagttggagtctgaatgtttggcaccacgttctgcgggaaaaagcacgaggttttgtccatgcgagaggtgcaagacctaggcaagcttcttccagaaccctgcaatctcacaatgccattgaagaaggatctcatttcccgatgaccagaaacatcaatggtgtcaagaaacattccagcatcagccaggcatttgactctggtgtttgatggaaacaatccacggaattcatcacagtgaagtatggtagaaacaccaccagcagagcatccagcaagaagggcctgattagcataacgcattccttgtgccatcaggtcatccatagcagcctgccaaatgcgctgacctcggaaataaaggcctgcagccgcattagaaccatcaccagtgaaggatccgccatcacagtaccggaccttcactctgttccagttgtagaaatcaggattctcttcaggtctgttactcattatcccagtaaactggagctgcctctccatgtgatttgatgacccacgacgactgcccttgcggaacacacagctgctaacatcattgcaccagcctccaccctccaggttgacaagccaactgtttgctcctgatccaaaccctcggtgcaggtggtaacccggtaagcttccatccaagcacactgtaagatagtatagcacgaagtaagcatcaacttatactagtctacctctgctagaggctcgaataaattttcatgcacaatcaaattctgatgtaagctgaattaaattactgatggactacttcatcagtgctattatttaattgaacatccaaagcaatggccactcagcagactttcttcaatcaagtttccacaaacaagactcccttggcggccgccgactggatgagtgtgaggccaacgaagacgccgttgctgccgccggagctggcggtggtgccgtacacctgcgtctcgttcagccacggctcggagccatgggccgcgctcgctcctgctcccacaaggaaggcaagaatcacggcaacaagacgagaagccatggttctttgcctcgccccgcctcggcctctccctgctctgtctcgccgcaggggaggcgtgagcacggggaggaatggatctggggaggtctcgcgaagtcgggagggagggagaagagcggcgagcgcagaagcggccaaggcccaagggaggagaaggaacttatacgcagagacaagcgcggcgcagctggctggcaatggagattctgtagcgtagtgctagccggaacgtgtaacgcggcgtgccgcggccctgtgcggcgttacaggtgtgaggaagtaaagcatctctccctcatttggagtgagcaggaaaggcgaggctttagtgagggtgaggtaacggaattacagcacagggagggagggtggaggaggaagaaaagggttcgagaatgggaggaggtctgtgtgaccgcatttacgctttgggagctcggcccgccattgcactacagctgtgcgct

SEQ ID NO: 31764 - DNA, 574 bp, Setaria italica
  Peptide Sequence Number=SeqID_97738
tcagagagcacaagaaggttcgagccattcttgaagatatgaaggcagaccttgagcatgagaaaaagaaccggaggcagttggagactattaacttcaaacttgttgatgagttgaaagaggtcaaaatggcagcgaagcagctactgcaggagtatgacaacgagcagaagacacgggaactcacagaggaggtgtgcaacaagctggtgagggagatagaggaacacaagtcagagattgaagccttgaagcaggattctgtcaaactgcggggtgagctggatgaggacaggaaattgctacagatggctgaggtgtggcgtgaggagcgagtgcagatgaaacttgtcgatgccaaactcactctggaggccaaatacgaccagttgagcaaactgcaagaggatgtagaggctttcatttccactttcagctcttccaaagaagacagtacagttgttgaaacggcatgcaatatcgtacaggccattggagcagtgagaaacgaagaggttgaattcacatatgagccaccgcgagcatcagaagatatattgtccatctttgaaga

SEQ ID NO: 31765 - DNA, 1220 bp, Setaria italica
  Peptide Sequence Number=SeqID_97739
tttttttccaatcataaaaatcctagatcataggagcgatttgtttcttattgaacttcctcaagaacagttcaaaagatgtgatttccagtgcatttggtgcgcacgttcactgagtaccaccgtatcagataggggtaactaaagatgctacgttcaaaacccgaccggttccacccaatgtctggtacaaggacatccacacactcagaacaaggggatgcatcatttcttctgctgcttcgacacgttcagctgctggaggttgagcagcaggtcattggagtccaggaagaccttgttggctgaggctgcgatcgtgtgcgagatctccctcgcggcttcaatctgcctcagggcaaggaaagcagggttgtttgcaatggcctggccaatcagctctgcagacttagcctctccctgagccctgataattgcacttctcttatcttgctcagctttctcgacaatgaactttgcacgctcagcttcctgtgcagcaacttgtttggcttcaattgcatgagtaaactccttcccaaagctcaggcttgtaatggagacatcatcaagagcaatgctgaagtttctggccctctcggtcagtatcttcctaatctccctactaacagtttctctctgtgtgatcaactggctagcattgtattgagctacaacagctttcagtgtttcatgaatgatagaaggcagaactctctcgttgaagttctcccccaaagtcctgtagatatggggtagcctctctggcataggccttgtgaggacacgaagaccaattttcaccatctgaagatccctgcttccagaagtactctcaacaagattggggcgagcacggacatcataaatgattggccgttcaaaccatggaatcataaagtgagtcccttcagggtataccttgtccttgatcccctggatgcggttgaagacgatggcgcggtgccctccctcgacgttgtagaggctgttcatggcggcgtacacggcggcgccgccgaacacggcgaccttgagcagcgcgctggcccccggcgggggtgccgggatccggccgccgcccttgacgttcatcctcgccgcgcgcgcgcgcttggagacggagctggaggagagggggcgcgcgaggaggcggcggagcacgttggggggcggcggggcgcggcggctagggttttgcgggggtttggttgagaagg

SEQ ID NO: 31766 - DNA, 1883 bp, Setaria italica
  Peptide Sequence Number=SeqID_97740
accctattaaccagcaatgtcacaataacagaatagaggtatgcatccagaattaactatttgttctctgccacaattctgttgtgaaactgaattcactttacacatgtaaatatgaaaacaactctcactcgaatacactgtcagtagaaaaattgttttctgtctgaattgcgcccttgggcagggagcaaaattgatgtaatcgttgcagacatcttctcaagttgcaccaagtttcatgaatattgtgtcatctgatgataaaattgttggtagtaacaccggcatgctttggctggagctgctttatgtaatacttggatccacgtgacagattgatacgttttctcctctgctcaggaatagaatcaatagagcactcggagaagccacgccgcacaaaccagtctgcagtccgtgtagtaagcaagaataatttctcaagaccaagggataacgccaccttctcgacgtaatcaagtaacttgtcaccctgacctcttcctcggcattcttcagatacagcaattgcagcaacttcaccagatttatcctcaggaaatgggaaaagggcagcacaagcgatgattgaaccatctctttcaacaacatagaacgagtttaatgcatcaagaagctctgcatctgttctccgaacaaaaacaccagaatcctccagcggtcgaataatttttcttataccatgaagatcttccgctgtagccatccttgttccttcataaacatccctagctatcattgttcctgcaccatctcttgtaaacaattctaacagcagtgatccatctacagttccatcgatgatatgaactctttgaacaccaccatggcagacatatgctgctgcagccaactcagaaagatagccatttgatctacttaactgctcttcaccaccaatggcaaacccttgctcaccagaataaataccatttccattgttaaaacccaaaccattttgaaaagcagcagcatacccgtttacatgagccctggaattcaatgatggtttatagtcccccttctgtagagaattgataccctcctcatccacaaccttgacataatttgcagcaatatcactttgcttagcacgctttctaatcaacaaatcagcttcctcaatagacatgaaatgaatgactcgtccatgctcatcaaatatctgaccatctacaacgcacacaagtttatctgcctccattgctaacgcacatgcagtagcaacctcataggtgttgcaatttaacacttccctgaactcgagtatcccatgttgctgacaacaactatgctatcactatcaagcctctctcttatccatgaaacatctattttttaacttcaccagtgaatccgtagtcaataccattaaccacccctcttctcttggcaccgaggaagttgccacttgcaacgttatccacaagaccatgccagcgtccaataacaccatgtctacggagatttagcattggaggaccaggagaaagctttgcttctattgtcagccgtattctaccagctgcctccattgcagcctctaacgaatcagaatcagtaattctatactgaccaacatacttggccttcttccctctttctgacaacagcttatcataatctgaacacatgcacctcgaggaaaataagagatgcctagatgaagaaagaaccaaaccaaccaaagttagtgaaagcaaaggatagatcaggacagaacagtatgcaaatcatatagatatagtgtactggaagctttgcaggtcaagtggagcagtcaattacatgctgcaagacaagactaagttactttttacaataatagacttaagtaagaccaatacctttaatagtta

SEQ ID NO: 31767 - DNA, 705 bp, Setaria italica
  Peptide Sequence Number=SeqID_97741
aacaaatatgccattttcggatattggagaggttctcggtgctcatctccattgcagttgtctgggcatatgcccacatcctcactgtgagcggggcacacaaacatgcttcgttgcgcactcagctcaactgccgaactgatcatgccaacctcatgacaacagcgccatggattggtgttccatacccactgcagtggggtgcgccgacgttcagcgcagatcattcattcggtatgatgtctgccgtgctggtgtccttaatagagtctactggagcatttatggctgctgcccggttggcaagtgcgacgccaccaccaccgtttgtcctgagcaggggcattggatggcagggaattggtctgctattcgacggtctatttggtactgtgagcggctctacagtctctgtggagaatgtcggtctcctaggatcaaccaggattggtagcagaagagtgatccagatctctgctggtttcatgatcttcttctccatcctagggcgatttggagcgctcttcgcatcgatcccattcacactgtttgccgccatatattgcgtgttgtttggctatgtcggtgctgtggggctctcctttatgcagttcacaaacatgaactcgatgcgcaacctcttcatcatcggcatctcactcttccttggcatctccatcccagagtacttcttccagtttacaa

SEQ ID NO: 31768 - DNA, 638 bp, Setaria italica
  Peptide Sequence Number=SeqID_97742
gcggctgcgcttcgtgcctctgctgccagatcttctggcaccaccggactcatcttcaagatcatcatcttggctggcagaacactcggcttgactcttcctcttgtgttggcgccaggactcatcatttcctattccagctccattgccggagcagactgacgaagtagcgactgcggcctcaggctccttcctggtcttgacctgtttctgcagagtcatgctgccaagtctgtcccggggcatctcttgctgcaggttaccagcggttggcgctgccgtgcatgagaaccgcacctccttgggctgtgaccacgccgtcctctggtccgtgaaaacaggagtagttcttggcccgatggatgactggagaaccgtggactccacgcgggtactcgtggtgacattggacgccttgtctgtgcctgtttgtggtggcctctgtgcgctctgcaggcttgctcgcgccatggctgccggcctagagaagagggagaagttcatcaagccctctgcgccgcctcccagccgagtctgcttggtggccgcgaactcggcttgtggtggttcaggcctggtggctggacctggaactggcatgcggtggctttccttcgagggttctggttctctgctgg

SEQ ID NO: 31769 - DNA, 338 bp, Setaria italica
  Peptide Sequence Number=SeqID_97743
cgccgaggaggtggcggcggaccagaccgttgcgtcggcgctagtggaggcctaccgcaacggcgacgcccgcacccgccacacggcggagcgcgcgctccgacacctggacaggatcccaaacttctccaccgccttccaccaagccaaagccaggggggcatgagcaagcgttctgggctgcctgctgcacatgcacatgtttgtttcctcctttgcagttccatttgtttcttcatgatgatttgtgactaatacaattgtgatcatatgatgaatgtatatgtattttgattcgtgtatgtgtttataaacaaacaaacaagcaagcaagcaag

SEQ ID NO: 31770 - DNA, 269 bp, Setaria italica
  Peptide Sequence Number=SeqID_97744
ctgagttggttattattcaaaaagaaaagacaaaaaaagcttcaggaatagcatgtaaccacccagcttggcttcagtttggctgagttgtcatatggcttaattggaaagttcactcaaatggtttaccaacagatggaaatttatcgagtactttctcatggacagctagggttgcagacaccatggcgcgggaagatcaacataaagccagcagagcatgttatgcagatagtgtaatcaaggctctgtttttcatctcccagttg

SEQ ID NO: 31771 - DNA, 536 bp, Setaria italica
  Peptide Sequence Number=SeqID_97745
cacatttggtaatggaggtggctggagcaacacggacactgggcgaatggctgatggaaggcacagtctcatggcttcgtggcatgtcgtactggtggtgatgaccagtgatgacaggagccaggtggcactcggcatccaatttcatggctgtaaggctgaacaggtccaggattgagttgtcaaggcagtaaaatgcatttcaagaactaaggtatcttgttcatgtcgtaatagcatccattacgatgcagtggcacaagtggaaatggagaggattgttttcaggtttgctctctcggtagtgcagcgggcatgtgatgtcaaggattggcatgtaactctttagttgttttcttttgaagaacagggaattttcaaacgtacttgtttttttcacttgcaagtgctaccaccattcctcagtcctagacataattgtccctgcatgttttcgctgcctttggccgctgagggtaaggggagagaataacagagtttttcaaaaaacgagtcattacaaaaaaacatggagg

SEQ ID NO: 31772 - DNA, 501 bp, Setaria italica
  Peptide Sequence Number=SeqID_97746
aacaggttctaccgtcgtgatcgaactctttctgaagctggagaaaattcatcttatcctcactaatcagccattgccatcgatccaatgactgatgctagaataataatcttatgcggttatgtatcatctccattgctttgggtgcagacttagcgtgtgtttagttcgcttgccaaacgccctgcacgatgatgaactatgtgcatgctttagatgacttagtaaaatgtcaaagatgcgcttattcctttgcggaaaaaaaattaatgacacactacaaaatttccacatctatgatttttagcagtttctattgaaactctcaattcttaatttaggttcgtatactttgaggctgaggaataatggtgcgctaaggctttacttgacagctcttcatggtcagtttgttttgatctgtggcaatatatgcattctgcaatgaaaactggccggtgttggtgcccccgatgcagggtagtggtagcaatgttggtg

SEQ ID NO: 31773 - DNA, 410 bp, Setaria italica
  Peptide Sequence Number=SeqID_97747
cgcaaatgttgtttatatgtacaggaattgatgcatctgtacctatgccattcttctccatgagagagatcaattcactttcactgaggtaatcaggaggtgtggtgcttccctcatatatgtcaaccttatgaatactaacagagtctccctttctaaaggcaggaagactattctcactgacagacagccatggcatgatagaggtaaatcctttatgagtgactcgatagccaacacagtggaaagtttctccacctgaagtaaactcaatggcagtccttgtatatctacaatcaggactaacagttccaataaagtgctggcttatgtattggtacagcctccaagcatcagttcccagagcttcttctgttgctgatctcattggagtaattggaggatggtcc

SEQ ID NO: 31774 - DNA, 480 bp, Setaria italica
  Peptide Sequence Number=SeqID_97748
aacaaagccaacagcagcatcttctcctgcttccttccttagcctgatctcttcttttccgtgcccaagtgttcgctcgtgatggagggcaagcagctgagcgcggtggcgccggccgtcgcggcggcgtcgatgcacgaggaggacgcgacgaggcccatggagcagctgaaggtggaggcgatcgcgtccacggagacggagcagcagcggggctggatgcgggggacgacggcgctggcgtggacgcaatgggccagcatcaagagcaaggcccgcaccgccggcgagtacaccatcctcaggacccgccagggcatctccatgttcgggagcccaagctcgggccattggtcaaagcagccgccgccagcgacgagtcccagtagatcgatcgatggatcgaggtgttcttcttgatccacgaagcagcaaacgagtgcgagttctcttgtcaatagctcaggtttcctgtttttt

SEQ ID NO: 31775 - DNA, 458 bp, Setaria italica
  Peptide Sequence Number=SeqID_97749
tggcacactgctcgggaagagaagataaaagcttcaaacacgttgggtagtttcaaaaagctgaagaggaattggtgcgtctagctgaggaaaagaacaactggccgtagaaaagaagcttttagaagagtctcttgatccattgtctaaaagagaaagatagcttgttgcaagagtataatgctttgaagcaaaggtttgatgaagaatatcatcggatggcagaaagaaaaagggacttccagcaagaacttgatgcacttggaagactcaatatgaagatcaaagagtacttggattccaaaagagcagaaaggcttaatgatttgcaggaaatacactcacttaaacaatctgagctacagaattgtgaggcaaaaaagcaaggcatatcagatgaattaaacaagagcaaagaactactgcagggtcagggccagttagaaaagaaacataag

SEQ ID NO: 31776 - DNA, 647 bp, Setaria italica
  Peptide Sequence Number=SeqID_97750
tttgtatgatcttttgggcgttcttgcccaagttaaaattgacagggatgcagtggaagccttgttacaaccaacggatgctattgacaggcatgcacgtgaaatacaacagctggtcggagaagtagaagatcttgaatataaacttgattcttgtggccaaggtgttaaatctttggaggaaattcaacaggagctaaactccgtccagaggacaagggacacattgagtattgaagtggatgacttagggatcagcacagaatgctaaatgaggatttggcaagtgctcaggtgagatggcacactgctcgggaagagaagataaaagcttcaaacacgttgggtagtttcaaaaaagctgaagaggaattggtgcgtctagctgaggaaaaagaacaactggccgtagaaaagaagcttttagaagagtctcttgatccattgtctaaagagaaagatagcttgttgcaagagtataatgctttgaagcaaaggtttgatgaagaatatcatcggatggcagaaagaaaaagggacttccagcaagaacttgatgcacttggaagactcaatatgaagatcaaagagtatcttatctctttccatctttcaattcccccaccttaccgcctttccgtaactta

SEQ ID NO: 31777 - DNA, 422 bp, Setaria italica
  Peptide Sequence Number=SeqID_97751
ggtctccctggcccgcctcgacctgtcgtcgaaccagctcaacgggtcgcttccaccagcgatcgcggggctcccgcggctctccggcgtgctcaacctcagctacaaccacttcaccggcgggatcccaccggagtacggcgggattcccgtggcggtcagcctggacctccgcgggaacgacctcgccggcgagatcccgcaggtggggtctctcgtcaaccagggccccaccgcgttcgacggcaacccgcggctgtgcggcttcccgctcaaggtcgagtgcgccggcgggtgaaggacgagcccaggatccccgaggcgaactccggtatgagcgaccctggcgcggcggctgaggtgggaggaggccgccgaagacggacggtacgtacgaccgtaacggttagtaccctaattta

SEQ ID NO: 31778 - DNA, 367 bp, Setaria italica
  Peptide Sequence Number=SeqID_97752
gtggaagcaaacatcgattgcattgcgggttgcagactcgcagcagccgcaccaaaccgggtaacgaactcactcatcagtacacaaccaagtgcactcctacagctttcaggtcggtcgcccatggtctccctctagtctcttccaagcgcacgctgccaatcaagcaagcgcatcgccgccttcatcggatcccagcaagacgagcagcaggagaaggcgacgcccagtcccggcgcgggattcttgctgttcctacagctcgcgggcgcgggcgcggcgcggcgcccccaatcaccaaggcgtgtgcgcggcgcgcggcgcgaccccgcccacccctctggtcttcgctcgccagctgccagcc

SEQ ID NO: 31779 - DNA, 305 bp, Setaria italica
  Peptide Sequence Number=SeqID_97753
caaacccccaaagatccaaaagaaattcaccatgaggtccccatccctgctcctcctcgccatcctgcttggcgccgccgtctccctccaatccgccgccgacacccccgagctgctcggcgcggagaagaccacccgcctgcgtttcttcctccacgacaccctgagcgggaaggacccgtccgccgtcctcgtcgcccgcggcgaaggccgcacgcccaagcccgaggacccggtgcccttcagctccctctacgccaccgacgacctgctcaccgagggccccgagccggggtccaaggtgg

SEQ ID NO: 31780 - DNA, 572 bp, Setaria italica
  Peptide Sequence Number=SeqID_97754
gcggtgcattccaaatgtcagggatggataggatggaagccgaggacaccatgtacagaaagacaataagcccgcgattggcattaccaagcaccaggtgaaacccgaaagggaacgccgcgatagtgaacaggcctgacaggggcagcaacgtagacgcacgcgccttgtgcagtacacgttgcgcgcgtggagcttccttagtgccaccatagataaggcagaaggtcgctacgatggagcagaagaaggccatggcgtccgacacgacgaatgctctgaaagcaaaccgtctcgccatcacggcagcccctgaacccgggcggtcatctgcgacgacaccgcccggcacggtgaaggctgccgcgaatgccacggtagcgatcaggaccgatccaatcgttcctgtcttggagaaatcttcttcttctttgtcagaggatgcttgttccttggtgggcttcttgtctgcaagtagagggtggaccgatttggaattgtctgttttttcctgtgctgaccgttctctgatacggtcagcacgatatggactaacttcaactccacaatat

SEQ ID NO: 31781 - DNA, 168 bp, Setaria italica
  Peptide Sequence Number=SeqID_97755
gctgaggacagagaagaggcttccttccaacgccacgccgaagcaccacccctctgccaattaatcctcttccgttcataacctcctccaccgccccaacaaagcctaatggcttcctcgtcctcatcccgtgccgtcgcgctgccctagaaccctcgccccccccgg

SEQ ID NO: 31782 - DNA, 355 bp, Setaria italica
  Peptide Sequence Number=SeqID_97756
ggagcagagggtcatggacgtggaggaagagaagggaggtagtttggctcccgcgctgcagagttctgctgaacctggcggtttgcagacgtgtcatgaggccaatggcggtttgttcaataagtcattatgtgccccctgcggcgaagctgtctgtcccaaggacacgggatgcatggatgacatgttggaggaaatggcagatggtaaccaaggtgattggggtggcaaggcaactctagaagatttacggattgcttgggatgaagcacaacgtagtcatgaaggcttgttgggttcaatgagtcatggtagcgagcaagaggcacgtgccgttgatggcataggatttatc

SEQ ID NO: 31783 - DNA, 1099 bp, Setaria italica
  Peptide Sequence Number=SeqID_97757
accttgccgttgaaggccgtgcacggccaccgagggtggttcagctggtacggcggcggcgggcgcgccgggcacgggacggagcggtcgagctgggagccggcgctcgcgcacgcgaagctgaggtagtcctcgtacgacgcgtcgtacacaaggcccgggtccagcgcgtggttgggccggatgtggcccgacccgtagtccatgggacccccgaccgagccgtccccgttcattattgggccgccttctgcgttgttggtcgttgcggtggtcatgatggccgatcggatcgcggcggcgctccagtcggggtggcggccttgaggaggaggacggcggcggagacgtgcgggcacgacatggacgtccccgacatgatgttgtactgcaccacgcggtggtcgccgtcgagcttcgtcggcgacgacgcctcgctccacgccgccaggatgttcagccccggcgccgtaatgtccggtttgaggatgttgggctcgaggacgttggggccgcgcgacgagaactgcgccatcaccggcgacggccggacgtccacgacggtcctcgacgggacaagaaccgcggtcgggctcgagctggaattgatgtagccgaggatggttttcgcatcagccgcggagaccgcggtgcccgggaggatgtgcgcgtcgacggggacctcgctgccggatgccggtgggttgccgagcagaatggccgcgccgcccgcgcgcttcacctcaagacctttcccgaccctcaggccactgcctctcaagcacacgacgatcttgcctcgcaccttgtcggccgacaaagagttcggcaagcattggttggaaacgttagcgggagtcccaggaacaacggcatctgctgcataaaccataggatacggcttgttgccggggagctggaatggtgttacagtttggcccatgatccccacgccattgccaagcttgatcggggagtcgaaggcgcggtcgatgctgctggcgccgaccgtgagcatccagggcgcgaggttggagacggtggccggcttggggcccgagttcccgccgctgcacgagacgacgacgccgcgcctcgc

SEQ ID NO: 31784 - DNA, 819 bp, Setaria italica
  Peptide Sequence Number=SeqID_97758
aagtaactaagaaataagaaattaagacttagactttactaataatttaaacaagcttagaaagtgagttggacaggaatgcttttggtttaacttgcaggaattggttgaaggttcgaaacattggtcggaaatcattaacattccattgctcttttaaccctacaatagataaggagcatgccaggtgcatcccaaacatattggcccgctcaccttgtcttaacaggatatcccttgctggacttgcagagctacctgactcagctttgaacgctctgagaatgtctggttcatctctgcaatccctttcactgtactgctgttctggaatgacagatgatggtctagcacaggtggcgattggatgcccaaatttggtagttgttgaacttcaaagctgctttaatattacagatgctggtttggaaagtctctcaaagggctgccgtgctttgaagagtctaaaccttggttcttgcatgggcatttcagacagaggggtttctgcaatctttagcaattgctcaaacatttgcacactaatcattacaggttgcagacgtctgtctggtgttggatttagaggttgcccaattacgcttcgttatcttgaagctgaatcttgcatgctttctccagatggtttgttggatgtagttagtggtggtggacttgagtatctgaacttccacaagttaggaagctcaactgggctggatggcctgggagggcatgcgtccgctaatggatccggattctgaatcacaggatgtgtcgctacctcacagatgattctgtgacagcaatagccagtgg

SEQ ID NO: 31785 - DNA, 471 bp, Setaria italica
  Peptide Sequence Number=SeqID_97759
aggtgtggggattaggggagatcacttggttatttcttacgcatggcaccaatcgatcacccattgagaggggatgaccagggggaaggatatgtatgaccttggcctcaactatgttaatactacagcttggtcttcgttagattagagtacaacttggtctgcattagattagagtgcagcttggtctcacctgtatctcgaatgcagtataccagccaccaatacccctttcaagtatgctttagcaaatcccatatttgcattttgtatacaagtgacacaggaagaagcttctttccagtagtcaagctgaaaactcttcttttacacattacgatgtccataatattcagatgtgatgtggctatttgctgcagaagtaaacagaaaataaaacagaaatagtcaggcttagtcaaattatgagtaccaaatgttatggactcctcttacttgcacgcggctgat

SEQ ID NO: 31786 - DNA, 1435 bp, Setaria italica
  Peptide Sequence Number=SeqID_97760
aaccccagcgccgacatgctcctctctctttccaccccctgcgtccgtgcgctgcgttgttggggggcaaactgccgggggcaatggcgggcgggcgggagctggtggtgagtttcggggagatgctgatagacttcgtgccgacggtggcgggggtgtcgctggcgggaggcgccggccttcctcaaggcccccggcggcgcgccggccaacgtcgccatcgcggtctcgcgcctcggcggcgaggccgccttcgtcggcaagctcggggacgacgagttcggccgcatgctcgcggccatcctccgcgacaacggcgtcgacgccggcggcgtcgtcttcgacgcgggcgcgcgcaccgcgctcgccttcgtcaccctgcgcgccgacggggagcgcgagttcatgttctaccgcaaccccagcgccgacatgctcctcaccgccgacgagctcaacgtcgagctcatcaagagggctgcagtctttcactacggatcaataagcttgattgctgagccttgccggtcagcacatctccgtgccatggagattgccaaagaggccggtgcactgctctcttatgacccgaacctgagggaggcattgtggccatcccgtgaggaggcccgcaccaagatcttgagtatctgggatcaggcagacattgtcaaggtcagtgaggttgagcttgagttcttgactggcatcgactcagtggaggatgatgttgtcatgaagctgtggcggcctaccatgaagctgctcctggtgactcttggagatcaagggtgcaaatactataccagggatttccatggagctgtcccttccttcaaagtacaacaagttgatacaacaggcgcgggtgatgcgttcgttggtgctctgctccgaaagattgtccaagatccatcctcgctacaagatcagaagaagcttgtggaggcgattaaatttgccaatgcatgtggcgcaatcaccgccacgaagaaaggggcaatcccgtcgctgcccactgcaactgaggtcttgcagctaatggagaaggcatagatcaccctattttctatggttttcactagcttcgacttctgcaaattgtattgtatgctgatctggatcagaagaagcgggtgctccatgacaccagccctttttgtttgccctacttcccttcgtgaaagggtgttttgcacgaaagggtgttttgtttttagaactctacttgcaataagcagagccttttatatcacagtgcatttgatacggtcaaataatcaatccgtaattgtagcatattttttaaattttttttagctgaattcttgttccagtggtgtatgaaaattgctttttgggattccatttgaattgtgatatctgctcctgataagataatggtattcagagcctttaaaatttaaaaaaaaaa

SEQ ID NO: 31787 - DNA, 773 bp, Setaria italica
  Peptide Sequence Number=SeqID_97761
ctggatctttggatttaatcatttgcgttcaatttcatctttgagtgaggtttccagtcgaattgtaaaacttgttgtgagaaacaacgctttaactacagtacatgggattgagaatctcaagtcactcatggggcttgacctttcgtacaatatcatctcaaatttctcagagttggaaatccttggcacgctatctttattgcagaacctctggttggaaggcaatcctatctgctgtgctcggttgtatcgagcacatgtgttcagtttttttcgtaatccagaaaatttgaagttagatgataaaggtatgaacacgcaagaatactgggaaaagcaagtactgtttgcatgcagacaaaatcaacctgctggttatggattttatttccctgcaatggatgatcatgaagatgaggacacgctaactttgaagatgagaaaaatttcccgacttgccagcatagtggagggagagagaaatctctctgatgatggtacagaccagcagtccaccccctgtgatagtgacagttctaagaaggatgaaactgcaggtgctgatcatgacataagaattgcttcattgataaacaccgctgaattgctgaagaaagaaaaatcaagtgactggctccgtgagtttaaggagtggatggatgacaatgcagacaaaacagatggtgaaaacctatctgctgatgtcacctatggcaatggaagttatgctagacaaaagaaaaggcagaaagcacacaaggtaaggtagt

SEQ ID NO: 31788 - DNA, 913 bp, Setaria italica
  misc_feature (898)..(898): n is a, c, g, or t
  Peptide Sequence Number=SeqID_97762
tattaacttgagggactgtatcgaaaaactaccctccactaaaaaagaccacggcgagccaaccagggaggctccccctccgtgccttcctcacctgcggctctgggcagcgagcagcggcggctgcgggatcccccgccctcctccacccggatccggcgaccgagagtaattgacaaacttcaacaagatgggtcgtggtgttagcagtgggggtggtcagagttccttaggctacctctttggtagtgatgaagctccaaaatcagctgagaagcctgcacctgttcaaaaagccaacacctccgtcctctgctgagaaactaaaagatatcccagctggtattcaaagtagtagatcaaacaattacatgagagctgaaggccagaactgtggaaatttccttacggaccgtccatcaaccaaggtgcaagctgctccaggtggtggctcttcgctcgactatcttttcagtggcagcaaggacggcaagtgatgccgacctgctgttagtcccaccatgagcttggaagaaaggttcctacttaaccaaaaaaaaacttgtattcccatgagtaactatcaaactgctcatggtatgtacgttgctcggattgcttgtttgcgtgcgcatgcgttcgtgtgtgttgtatgtcgatcagcagctactagtactaagagctgacctctatccttgttgatggaactgggcgtcacgactatgttgacattatcgtgagtgatgctttgatgtataaaactgttcaagttgtgtcgtattggatacgttgtttgctatttaatgctcattgttgtactaaaattgttcaaagctctgttgagcttcagaagttttatcaaaaaaaaaaaaaaaaaaacgtaaaaaaaaaaaaaaanaaaaaaaaaaaaaaa

SEQ ID NO: 31789 - DNA, 359 bp, Setaria italica
  Peptide Sequence Number=SeqID_97763
ggcgaagggtgcggttgggcacgagcgcggcgtcgccgagcggctgcattgtgacggggcacgtgcggtggccggcggcgagccaccgctcgatgcaggggcggtcgtacgtctgccccgtgcacagcgtcacggggtccgtgaagatgtccaggctgatcgggcacctgaacaggtgcgggatgctcatcttgagcccgcgcgagcacgcagggatcggatcggatcggatcaccaagaatcagcaatcaagaaacgccaagaactcatccccaactcaaggcccacacaccaagacggcgagagcagatcaagaaccaacataaaagctccaactgaaaacaccaggaactcacaag

SEQ ID NO: 31790 - DNA, 361 bp, Setaria italica
  Peptide Sequence Number=SeqID_97764
atcacagcaagattacccatggcgtttcccaagcatagtctactagctgcctttgctgctgtggccatggcgatggccctagcagcaaccaccgcctcggcccagaacacgccgcaggacttcgtcaacctgcacaaccgggcgcgcgcggcggacggcgtcggcccggtgacgtgggacgcccgggtggcgaggtacgcgcgggactacgccgcgaggcgcgccggcgactgcaggctggtgcactccggcgggccattcggggagaacatcttctggggctcggcggggcgggcgtggagcgccgccgacgcggtgcggtcgtgggtggaggagaagaggtactaccacctgagcacca

SEQ ID NO: 31791 - DNA, 501 bp, Setaria italica
  Peptide Sequence Number=SeqID_97765
agaacacaacaatatattggtactgtgttgacaagtttattttcaactccttggcaatctgtctgcgtatactatcctcaatatttagttgaataaccttgagagcaaaaaactgcccggtaaatttgtggcggaccaattgcacatttccactgctacctttcccgatcactttgattacatctagatcatctaagctcaattgactatccagtggctctataggaggagcctcgcctccctcgctctgcggaactatgcgtaggccatccttgttgacgagcagatccccgtccctgaacgtcccgctgtgcgtcaggaatttgcccatggtggactcggggggcggcagggtgagcttcatcggcttccgaggcgtcgccatcggaagtccggcggtggcgggctctgtcaccggagctctgaggagcggcggggggaaaggaggggcgtctgacgggctggctgtacagagctggtgcagccgtggaactcgaagta

SEQ ID NO: 31792 - DNA, 909 bp, Setaria italica
  misc_feature (823)..(909): n is a, c, g, or t
  Peptide Sequence Number=SeqID_97766
ctgaagcggctggcggcggtgcgcgcggtggagcaggtgcagagcgggatggtgctgggtctcgggacggggtccacggccgccttcgccgtcgccgagatcggcgcgctcctcgcctctggcaagctcgagaagatcgtcggcgtgcccacctccaagcgcacctttgagcaggcgcagtcgctcggcatcccgctctccacgctcgacgaccacccgctcatcgacctcgccatcgacggcgccgacgaggttgacccagaccttaaccttgtgaaagggcggggtggtgcgcttctccgtgagaagatggttgaggctgcatcagacaagtttattgttgttgttgacgagacaaaactagttgatggattaggaggaagtggtctagccatgccagtggaagttgtgcagttctgctggaagtataacctagtaaggttgcaggaactgtttaaggaggaaggagtcgaggcaaagctaagattggaaggtgacaaaccttatgttactgacaactcaaactacattgtcgacttatacttcaagacaccaatcaaggacgcattggcagcgggggaggcaattgcagctttggaaggagttgttgaccatgggttgttcttgaacatggcgagttcggtgatcattgctggatcagacggtgtcagtgtcaaaacaaagtgagttttgggttacttgttattttggtgttgaacttacgatttttcgttgtataagctattggtgtaaaagcactcaataagatgcttcaataaatgtttccccaatgttctactggttcaaaaaaaaaaaaaaaaannnnnnnnnnnnnnnnnnnnnnnnnnnnnnnnnnnnnnnnnnnnnnnnnnnnnnnnnnnnnnnnnnnnnnnnnnnnnnnnnnnnnnn

SEQ ID NO: 31793 - DNA, 454 bp, Setaria italica
  Peptide Sequence Number=SeqID_97767
tcccagccgcagtatcccatgtagacgtgcatgtccatgcgcccggccggagcagcgccgggtccaggcgttccttgtagttggtggtgaagacgatgatgcgctcctcgccgctcgtcgaccacagcccgtcgatgaagttgagcagtcccgagagagtaatgttatgctgctgctgaggctgcggcgtgtcccagggctctggtgtgctatcctcctcagaaccatcatccgccacggcctcgccggcgtgatctttgccaacttcccgcgacgcggcggtgaagcagcagtcgatgtcctcgatgacgaggatggacctgttggtcatggtgttgagcagccgctgcagcatcgtgttgccgcgcacctcggagaggtcgaggtcgtagaggttgaagcgtaggtagttggccatggcggcgacgaggctggacttgccggtgccggggga

SEQ ID NO: 31794 - DNA, 272 bp, Setaria italica
  Peptide Sequence Number=SeqID_97768
attcgaggtgagttcaggccttcagcttcgtgatcgcgcttgtgaggagaggagaagcagtgcggcagactctgatggtcaccgcccgaccaggcgcgaggtagtgtttagcgaagagcccacgatgtcgaaaacggaggcttcgccggctgcggctgatgatgcgcagccggcgccggagacgacgacgatgccggcgagctctcagcctgcgccggctgctcctacggccgcgtcagcggcgccggcggctgttgctgggagaggagagg

SEQ ID NO: 31795 - DNA, 1003 bp, Setaria italica
  misc_feature (993)..(993): n is a, c, g, or t
  Peptide Sequence Number=SeqID_97769
aacaatgaagggaaataaaccctgtgtcttgttacctaagctagcatacacatgtattctatttctgacagctgttgacttattgcataagtcctgtaacatgtttcttaacaatggagaaacaaaagaacatctataagaatcttgaagacaaaaaggtaccacaaagtttcttcttccttttaattattttatcacagtgggggcttcctccgctgtacagttctcaaaaaaaaaaggtaccacaagtcgtttcagcactatgtttaattttcagaatggatggtaggacttaggagttccgcccactcatcattgaaaaatggataagatttagttattataacagttcaccactataacctctttagtttattggatgttgtacccaactagttcaagatctggataatatggttctgacttgcgtgtcttcataaaaatatcattgttaaataacatttcttttatttaccataagctcattggtatgaatgcatctttgcaatcaataagtcattagggtataacaatattctgcagtctattctctcattagtcgctactcgccagaacatgtgggagcagaaaccccatttatcttcaagattagtatatcatctttgatgccctgcattgtcactttgcagaattaacttctgggggagggagattcactgtttctctttgcaatctcatggaagagtcatccgcacgggaacaaggaatacaatgtggcattggcatcagttgcggcaacttaagcatatctcagcacattcatgttgtggcattatatggcccctgcagcgcattttgctcatgctctacccatgcactcttaatcatagtcttgtctgtatttgggaattgggaagcgttaccccaatccccaacgtaactgttgtgtggaatgcagccaacgttttagttctaagtattcttggtattaattattggtttctttgttacttttgttcgtttgtttctttnttatttaaaa

SEQ ID NO: 31796 - DNA, 2202 bp, Setaria italica
  Peptide Sequence Number=SeqID_97770
atgattgggccgcctcggcctccgccagcggaggacgacgacgaggaggatgaggacgacgacgacgacatggaggatgatggcgatggtgggttcaatcggatccctctcagcaatgaaattgttctgcgggggcacaccaaggttgtctcagcccttgccgttgaccatacaggatccagagtgctctctggtagctatgattatacagtgcgcatgtacgatttccagggtatgaattccaagctgcaatcattcagacaattggaaccctttgagggccatcaagtccgtagcctaagttggagtccaacatccgatcgattcttatgcattactggttcagcgcaggccaagatttatgaccgtgatgggcttacgctcggcgagtttgttaagggtgatatgtatattcgtgatctgaagaatacaaaaggtcacatttctgggctgacaggtggtgagtggaatccaaagtcaaaagagactatattgacctcatctgaagatggatccatacgtctctgggatgtttcagactttaaaagtcaaaagcaggtcattaaacctaagctagtaagaccaatgcgaattcctgttacatcatgtgcatgggaccatgaaggaaaacggattgtgggtggcataggagatggttcgatacagctctggactataaaaactggatggggtagcagaccagatatccatgttgagaaaacacatacagaggatattactggagttaaattttcaacagatggacagattcttctgtcaagaagtatggatagtactttgaagatatgggatctgagaagaatgaaaactcctttgaaagtgtttgaagatttgccaaatcactatgctgagacaaatgcagcctttagtccagatgagcaacttatttttacaggaacctcaattgaaaaggatggcgacaatgggggactactctgtttctttgatagaaagaaacttgagcttgtatcaagggtggggatttcaccacattacagtgtgataaggtgcctatggcatccaaggatcaaccaggtgtttgctacagttggggacaagaaagaaggcgggactcatatcctttatgatccttctattagtcagagaggtgctcttgtatgtgttggacgggcaccaaggaaaaagtctgttgatgactttgaggtgcaacctgtcatacacaatccacattcattaccacttttcagagatcaaccaagtcgtaagcgtcaaagagagaagatactgaaagaccctctcaaatcacacaaaccagaagcacctgttaatggcccaggttatggtggaagagttggaactacaaaaggcagcttactgacacagtacctcttgaaggaaggtggtttaattaaggagacctggatggatgaggatccaagagaagcaattttgaaatatgctgatgctgcagagaaagatccaaagtttattgcgccagcttattctcaaacccagccaaaacctgtgtttgcagagtctgattcagacaatgaagggaaataaccctgtgtcttgttacctaagctagcatacacatgtattctattttctgacagctgttgacttattgcataagtcctgtaacatgtttcttaacaatggagaaacaaaagaacatctataagaatcttgaagacaaaaagaattaacttctgggggagggagattcactgtttctctttgcaatctcatggaagagtcatccgcacgggaacaaggaatacaatgtggcattggcatcagttgcggcaacttaagcatatctcagcacattcatgttgtggcattatatggcccctgcagcgcattttgctcatgctctacccatgcactcttaatcatagtcttgtctgtatttgggaattgggaagcgttaccccaatccccaacgtaactgttgtgtggaatgcagccaacgtttagccagtttccactttgtagcatgatgtattggttatttatttttggtttttttatttttttcttttttttccttttaacagaaacagtatttctttcccattagcatttatctggtttttttttttgccagtgctgcaacttgagaaacgctggcacacccgctgtggcatgttgctggtaatcttgtcagcggtcatctgttatgtattaagtttttccccttaaaaaaaaaaaaaa

SEQ ID NO: 31797 - DNA, 383 bp, Setaria italica
  Peptide Sequence Number=SeqID_97771
ttcacgtctgaaaaaaattacatcaggacgtaacaaagctaattaacttgcgtcagctagttctgccagcagaagcctctcgtgccttgtcaagggtaagtgggcttggaaatctgtcttgtctacgaaggttgagtaattttatagttgcaaaaaagaatggacggggaattggtgagctgaagttcatgaatcagctcagtggaaagctttctatcagatatctttacactgttaggagcgaggaagaggctcttgaggctagacttgttgaaaagcaatacctcaaggaacttgttctacattttcgagactttggtcctattctgccgtgcagtactgagaatggagtgcttgaggcttgcgtcctcattcaagaattg

SEQ ID NO: 31798 - DNA, 501 bp, Setaria italica
  Peptide Sequence Number=SeqID_97772
tttttatttccccttacttattattggttgtattttttcctaagtctattccttttagttcctaaggtcttcttatttcgcctaagcttgtcgcgatttcaagtggaccttgaattgtgcctcatctgacaaatagactggccgaagtaaagctgactggatgttagttcattggaagacttggtttcactacaacatcaagatgtcggtctgttatttccatgtatgatttctattactgtttattggttttataatgatcctttatgtgttttttaagaacagaaagccgcatatatttttactctaatttaagtttcaagtttcaactttgcctctcaaacatttagataaatggaggggcatatgccgctctgctggatctttacattgtctgtgcattcttctggactctttcatgtgtattgctatgatgttaatcattgttcgtggaagatagttggtcaattctactctattcgtttttctttagtcttgctg

SEQ ID NO: 31799 - DNA, 823 bp, Setaria italica
  Peptide Sequence Number=SeqID_97773
tgcaaagtattttgaatcaacttagagaacagcacattgattggaaattagcttgcttgagtgtacctgtgacttaagagattttgtgctttctgagttttatgttatttgcagtacggggccttccaaaatccaaccaggattttatccccacatatggtgatttttccaagcatcctttagtccaaggctctattcgcctaagcttgtcgcgatttcaagtggaccttgaattgtgcctcatctgacaaatagactggccgaagtaaagctgactggatgttagttcattggaagacttggtttcactacaacatcaagatgtcggtctgttatttccatatgggaagtcagagtgtcatattactcaagatttttacttgtgcttttagtggcaacctcaaggaatatggtagtagcactggtcgaggtggaatatgtagaactattccagactttgacagagactatatgagttattttcagttgcatgactgtttgaaggaatttgggttgaaggatggagacagtttgtattacctaaagctgggttactgtccaccgaatggccttgtgcttatttttgatgacaaccaatgcaaccaactattggcggatcatgtagcgctaagtagttgcagtctgtacattgtccctgatcctggaaggctagtcagcactgaaccagttccaaggaataatccaactcaatctgttgtgagaaccttggttgatgcattcagtccagatgagattggtggaggagaagacgatgttggtagaggagaagagatggcacagttatctctagatgatgatgaca

SEQ ID NO: 31800 - DNA, 494 bp, Setaria italica
  Peptide Sequence Number=SeqID_97774
cgcagtcaaattggaggttgggttgcatctgtagctatcatctttacagcatatattcttgttgttctatttctcacatctggccgtgatcctggaattattcctcgaaatgctcatcccccagagcctgaagacattggtgaatcctccaacttaccagattggccaggtggtcagcatggttcaacaggtttaccacttaccagggatgttcttgtcaatggcatttcggtcaaggtcaaatattgtcatacatgtatgctctaccgcccaccaaggtgctcccattgctcaatctgcaacaactgtgtagaacgttttgatcaccactgcccttgggtaggccagtgcattggaaagaggaactaccgatttttcttcatgtttgtgtcttcgactactatactatgcttatacgtgtttgcattcagctgggttaatctcaggagaattatggacatgcatgaatgtaaaattggtagagctcttttaaa

SEQ ID NO: 31801 - DNA, 239 bp, Setaria italica
  Peptide Sequence Number=SeqID_97775
tctctgtgctaggtctcgctcgcgggatctctcgcgcctcctccctcccccgcctcctccgcctccgctcccgccggcagccgctgcgggcgcaggcggtttcagagaggcttcaatccggtgacgctcgcgcctccgcgtcctctgctcttatgagcgccgatgcaagccaataacaatccaccaagggtcaactggcagcatcatgcaaatgctattgaaggctcctctagcaaaga

SEQ ID NO: 31802 - DNA, 372 bp, Setaria italica
  Peptide Sequence Number=SeqID_97776
gtgcgagagcacggcgcgcggacgcggcgcccccgcaagccccagcgcgtcggcgccgtcgccgccgtcggcggggatgacgcggtcgatgcggaggcaggcgtcgtcgacgagcgggacgagcgcgttgaagcggcgcgacaccgcggagcagcggcccagcgagcgcgcgtcggccagcttgttgaagatgatgagcaccagcgagtccgggacacggtcgaagtggtcctccccctccgccgcgaggagcaggtcctccgcgaagatccggtgcttggactgcatccttcctgccttggatattggattcttgcggcgggtggagcggaggagatggcgcgcggggcagtaggatgaggaggagtaggt

SEQ ID NO: 31803 - DNA, 383 bp, Setaria italica
  Peptide Sequence Number=SeqID_97777
acggcgatcatggccgacctccgcgacttcgccgacgggagcgccttctacgagcgcaccggccgcgcctggaagcgcgggtacctcctctacgggccgcccgggacgggcaagtccagcatgatcgccgccatggccaactacctcggctacgacgtgtacgacctcgagctcaccgaggtgggcagcaacgcggagctccggaagctgctgatgaagacgacgtccaagtccatcatcgtgatcgaggacatcgactgctccgtcgacctcaccaaccgcgccaagccgccggcggcggcgcccaagccacgcccgagcatcgacggcacgatcgaccaggacggcggcgccgggcggggcgggtcgatcacgctctccgg

SEQ ID NO: 31804 - DNA, 341 bp, Setaria italica
  misc_feature (24)..(24): n is a, c, g, or t
  Peptide Sequence Number=SeqID_97778
tgatgcttgccttacttcttgtgntaatcatgatatcgtgcgtgatgtgaatgatgatgattgttcatgcggtcttatttgcacatcatgcattgaattggaaaatgaagttttaacttttgaagcaaatgcgcgatgatatgagtgccaagttggttgagcgcaatgagatgagtgccaaccttgagaaagaaaataaactcttgcgtactacatatgctaagtgtattgaaaaggagatggataatttgagaaatgctccatgtggtacttgtgatcgtctcaaacatgaaaatgaggttttagccacaagatgcaagattcttagtgctaagtctttt

SEQ ID NO: 31805 - DNA, 514 bp, Setaria italica
  misc_feature (411)..(514): n is a, c, g, or t
  Peptide Sequence Number=SeqID_97779
gacctcaaggtggtggcgcgggtgctgcgcatgccggagatcaccgaccagcagctgcactggtgcgaggagaagatgaacagggtgcgcgtcgacctggaggggaagatgcagagagacccttcaccactcttctaccctgcacactgacagtgaacaaatcttccagttcctctttctttttctttttctttttctttttgcatgcatcttcttttgttgatggtatgtagcgatcggccaaagataaagttgcatttgcgtagacatgagaatatgcatggcacttagcctcatctggtagcactgtatgtaaaaaagagctcagagagcagagatgatgctattgtaaaggcacatatatattatatatacatagataataaataaacaaataagaacaaaaaaccnnnnnnnnnnnnnnnnnnnnnnnnnnnnnnnnnnnnnnnnnnnnnnnnnnnnnnnnnnnnnnnnnnnnnnnnnnnnnnnnnnnnnnnnnnnnnnnnnnnnnnnn

SEQ ID NO: 31806 - DNA, 1007 bp, Setaria italica
  Peptide Sequence Number=SeqID_97780
tgtctaattttttttaaaaagtaaaaaaaaattagtcctattacgcgtttgccatccaggcgtttatcccttctcccctcttggcggcgacgactaggcgagccgcgccttccgtcagtggtcgactgcggactgcctctcttctctcctccgacgattcgtgctcgtccaaccctggtgggtggtggtagacggccggcgacgaggagctgtacatggttgtcttgacgtccgaaataaatcaaggttcaagcaagatttaggagttattcaaaaaatacagggtttccagccttccagttaaatgatcaaatgacctgtagaatgtcagcaagcaagcaaaagaaacgacagataaattatactaactcagaacaatgtaggccggggagaaaacaaaagtttgactcatccaattgtctagtaagtttgaagccgcatattggtcttaaatgggaccaatatctgaggagagttgtgccaataaaggaacaagttggaattctgtggtcagacttggcccctttcatagaaagcaagaaacagcggtcaggccttgctgatgttacatatgttccttcagagatttttttctcttgagaacctgagaggtgtgctatcctacaaggtatggtccacatgtctgacagaagatgagaggaagttttctcatacaatttcttccaggcaagactggcaagagaaaatgtacgttttgttgcttactcggaaaaatcatcacttttggaaaccctctttctcagctggtcatcttctcttttgctatggtggtattcatccagatgctgtacttaacaaggagaagcacatgaaaaaggatgagaaggcataccatattaatttgcttaattaccattccaaaatggttggtaccttgaagaaatggaagaagagatggctaagttgtgctgatacagagaacttgttcagagataaccctgctgatcagaagcaaggagttatgcagctgacaactacaaagagtg

SEQ ID NO: 31807 - DNA, 242 bp, Setaria italica
  Peptide Sequence Number=SeqID_97781
ctcgccgcacttcgtgcgcccatatatctgtcccctcacttcgtgcgcccctctcgccgccatccggatccatgatgtcgtccatgctcctgcgtgcgtcccgtgtcgcggctcgcgccgcttgctcagctgtgtctgctgcatctcgccgtgcagctggggcgggttcagccggtgcgggcgcccaagatctgcttctgcgcagacttccccccccccccctcaccgctcttcgggaggta

SEQ ID NO: 31808 - DNA, 467 bp, Setaria italica
  Peptide Sequence Number=SeqID_97782
ccagggatcgatctacctgtgtgcagcttttgcgcatgcatatatcggcgatgaatgcattgggaacatcgacctgctgtggagtggataactgggtgcatggacgaggacgcgatgcagtggcagtgctcggccgctacgtccagacctggttgactctgggctcgtcttgcatcgaacacggcagacgacgctcgtgtagtgtagccgtgtaacgttgctagaggcggagtatgtggtaggactagtggcacacgggcggctggaccacccgcccgtcggcgccccatcgtccacgccatgctgtcgtcgacttgcaagggcacgctgctgtgcttcgccccgtgtgttcatgacgcacggcaccaccctctctgaggagaggaccgatcggcactgttcggttgtttttccgatggcgacacgcgacgccacggttgcgcgttgccatcgaccaatgatccacg

SEQ ID NO: 31809 - DNA, 471 bp, Setaria italica
  Peptide Sequence Number=SeqID_97783
atctcctccttggtgcggccgctggccttgtagaggtcgaggaggatgttgtcgagggagtcctgcgactgcctggggcagagatgccgcagcgacttgacggcgtcgatggcctcggtcaggtacccgcgctgcttcatcaccacggccatgtccttgagcgcgctgtccaccttgtcacccgtgttgatcgccttccagaaccacgcgatcgacgcgtccaggtccttctccaccagctggaagtgcttggccctcgcgtacggcccgtcgccggccggaatcttgtgcgcgacgtgcggcgccgcggtcgtcgtcgtcgacgggctcgccggcagagccatggcgaccagctgatgctgatgatccatgcctcgatctgcctcctcctcctccagaggtagctgcacgcagtagctagctaatgattggctcaggcttcccaccctctcgcttgcttgtccgttacgt

SEQ ID NO: 31810 - DNA, 658 bp, Setaria italica
  Peptide Sequence Number=SeqID_97784
gatgaatgcttagtttcatagatgaagctatcagctctggaggcaacgtgctagttcattgctttgctgggcggtcaaggagtgtggcaattgttgttgcatatctcatgaagaagcatcaaatcgtagccctcgaagtgccttgtcactagttagaagcaaacggcctcaagtggctcctaatgaggggtttatatcccagctggagaacttcgacaaatccctgcaaggatggggcgttagccacctccaagctcctcgccgctcctccctggacaaagacaatgccacccagagttcaagcgcattgcgagcaactagcgccggcgacgcaggggcttgtgctgacactgtaaacccagtggagctgctgcggagaatggcgtcattgcagcaacaaatcccactatcgtttactcttttgcgttaccagtgttattcgtttctatttacatttacattgcaaggctggaaccaaacacaaccttagatcttggactagatcttgtaccctaagggctttggattaagctcttgctatccgtggattcggattcgacctttttggtccatctttgtctctagaacaatatctagttcagcacgttgaagaggttccttcaacactttgtgctgtctctacctattagcacattga

SEQ ID NO: 31811 - DNA, 371 bp, Setaria italica
  misc_feature (7)..(7): n is a, c, g, or t
  Peptide Sequence Number=SeqID_97785
taagaanaaacgttaagaactaaagttaacaaattaagaactttaagaactaagggaacggtaacaaaggaagtagtagaacaattgttgttgcatatctcatgaagaagcatcaaatgagcctcgaaagtgccttgtcactagttagaagcaaacggcctcaagtggctcctaatgaggggtttatatcccagctggagaacttcgacaaatccctgcaaggtaaaacacaaacagctgttgttgtccgactttatgtaaaattggtttcagaggagggtggtatgcatatcttgcttcatgaaagattttcttattgttgttgctgttgttgttgattgcctttaattgtaagcactagcatcacacat

SEQ ID NO: 31812 - DNA, 1044 bp, Setaria italica
  Peptide Sequence Number=SeqID_97786
gaaaggggtatcattggaaagacgcaaatattccttgggagcgaggcatcgattacccggtcctcctcgctcccctcccccttccctccgcggctccgcctctgttcggtcggcagcaatcctcggggcaaggaaaggaaatcctcgatccttccccagcgagcgcgccgagaggaggagcgaagccatgtccatgccggaggcggggcaagcggcggagagggatgagcgcgggagagacgactacgagcagcagcaggcccgggtgcttgtggcgctgatgcagagcttctgcgccgcgcggtaccgcaaggccgacaacacgccctgccccatcgagcagggtctctacttgggatctgttggagcagcattgaataaggaggctctgaagagcttgaacatcacccatatattgattgttgcaagatcactgagtccagcctttccagctgaattcaattacaagaagattgaggtacttgacagccctgacactgatttgttgaagcactttgatgaatgctttagtttcatagatgaagctatcagctctggaggcaacgtgctagttcattgctttgctgggcggtcaaggagtgtgacaattgttgttgcatatctcatgaagaagcatcaaatgagcctcgaaagtgccttgtcactagttagaagcaaacggcctcaagtggctcctaatgaggggtttatatcccagctggagaacttcgacaaatccctgcaagtggagcaggaacggagaatggaatctttgcagagctaaatataggtgtagaagcatgtatgtcaataatgcaatgttaagaaccccctgactgcatgttatgttatctagatatgaatgctttggcaaaagacttcaccgctttgtgctgtaaacagcaagtgacattggtcattcatcgattgggttccgttggattagaatatgtttacatgctcaccaatcttcactgtaatttttattccaatgaatcaaatgttaataatcggtgctacttcttttttttatcttacatttag

SEQ ID NO: 31813 - DNA, 303 bp, Setaria italica
  Peptide Sequence Number=SeqID_97787
ctctagcagcagcagcagcagcaaagccatggagcaaatggccaagtactactggggcatgttgacggccgcggctggtagtagcagccccaggtcctactggccacccccggcgcatgccaccgccgccggcgagccgtcatgggaggagctggcgttcgcccgggacgcggcggggcacctcggcggctgcgtgtggccgccgcgctcctacacctgcaccttctgccgccgggagttcaggtccgcgcaggcgctcggcggccacatgaacgtgcaccgccgcgaccgggctcgcctccg

SEQ ID NO: 31814 - DNA, 281 bp, Setaria italica
  Peptide Sequence Number=SeqID_97788
agcttcaagtgctcgggctcagaagaacagcaaaagagaatatgcaagccttggccattcaaaagttgatgccatgagtgccgatgccaaatcccttaaaatggatccaagaactttatgaacagtctcagcagaaagaaaacagatttgatcctcttgatccgagccaccaagtgcagcacatagaaaactaacatgacaatctgcagcaggcaaatcacagatgacagaagttgcagtagaatctaatagatcatgctgccaatgctctggaagattaa

SEQ ID NO: 31815 - DNA, 324 bp, Setaria italica
  Peptide Sequence Number=SeqID_97789
cgacgaagagaggtctctgaagttagcagcattcaggagctgagatcaattgcctggccaacaaaggacggatcgcagcggggaacacggacggaggaaccgagatcagggcgggggcggcgagggatagccggatagggtcgaggcaacgctcagcaggttccgctggcagaagagcagagcggatcagaagggtgacggcgagagcaattgccgcgcgaatgcgagaagcggcggcgcgcgggggcggggagggagtgggggcggcgcggatcgggcgggctggagtggaggggaggagggggagacgagctggctgggttg

SEQ ID NO: 31816 - DNA, 387 bp, Setaria italica
  misc_feature (1)..(180): n is a, c, g, or t
  Peptide Sequence Number=SeqID_97790
nnnnnnnnnnnnnnnnnnnnnnnnnnnnnnnnnnnnnnnnnnnnnnnnnnnnnnnnnnnnnnnnnnnnnnnnnnnnnnnnnnnnnnnnnnnnnnnnnnnnnnnnnnnnnnnnnnnnnnnnnnnnnnnnnnnnnnnnnnnnnnnnnnnnnnnnnnnnnnnnnnnnnnnnnnnnnnnnnnnncccatccttggtagcaccagttcacgcgtatcattgcatttcaatgatccaaaccacaacaatgcagcatcaacgttacatgaattacacccgcccatcagctatcgccgcatcacagcgaccaaacgtgtgttcctcctgctgaatcggcatcgcctggccgcctgcgatgtcgtacttggcgtttgtccgcgcgaggcgaagaag

SEQ ID NO: 31817 - DNA, 249 bp, Setaria italica
  Peptide Sequence Number=SeqID_97791
ggcctccctgacaagcctgagagccaattcagcaccgggcaggtcggccccgatcggctccaactgagccacaatgctcctgtaccgcgcctcgatcctggcagcatcgtcgccgggcaggacctggaggaccctgtaccagtccacaccacggccgcggccggcgagcgtctccccggcggcgcagaggacctcgaggacggggagcatctccagtgcgccctccagcctggggttggtctgcagcgt

SEQ ID NO: 31818 - DNA, 251 bp, Setaria italica
  Peptide Sequence Number=SeqID_97792
gtgttcgacaagtgaggcataggttctgaggaagaagatgggatggagaggatgacaagtggggcctaaattggggggcaacaatggcaatccacactaaaatcggtcttttttggagctgagagcactcttctggccaaacaccccatctagaccgctccaactccacccagagctagctccacctggagttctggagtggagcagctccacccagagttggagccatgccaaacaaggcctacaagcgc

SEQ ID NO: 31819 - DNA, 444 bp, Setaria italica
  Peptide Sequence Number=SeqID_97793
tgtagcctgctagacaattctgaatgaggttgatctccaccatcttgattactgtcccatcaagagtcaagtttgggatgtattgtgtacaagaagggatttctgtgcgtatgttcttttcagccattgccttaaaccagtctcccagaacaatctgcttctttccaataactgcatcaaggagctcgggcgtcaacgaacatgattcatcagcaagaacatgtgtacattcatcgctccatttacgagtagcgtatgcaccaatagatgtcatgactgcatgcaatgatcgatcaattcgcgctgactttccaccatgaaaaaaggccactatgggaacaaatgacaacctgaatgtcgcattcccagttccaaaagtcacagtgtccccatcaataagcatcacatcttcatctttatgtagacgactgccctgagtttcat

SEQ ID NO: 31820 - DNA, 409 bp, Setaria italica
  Peptide Sequence Number=SeqID_97794
atgcactggaaaaaaataataagaccagcacaaggacatggtagaatcatggtggaatattataggatgcatgtaaatataatatgactgtaacatacaatcttgtaacattaagattctgacctgcaattcccttttccgatcgatcaccaagtctgtatttgttccatacaaccgaacagtcacagaaaactcattgtcagtgtcttctttgacagacaccttcagcacaatcatccttatgggaggtgcatctacagagtcagcaggttcttattattttctaaattctgcaagcatgacagcaggaaagatacagcacaaaggaaataccatgcagtgacggtaaggagtctctaatcccacaaagtttgtgaaaagtattaagatctgccccttcttatgcaaa

SEQ ID NO: 31821 - DNA, 234 bp, Setaria italica
  Peptide Sequence Number=SeqID_97795
ctgtatgacccatactcaaaatcaataaaatatagcttcccttccgaatcattgagcatcagatttcctgaaagcaaatcattgtgtgcaaaaaccagaggcgcatgcagaagatccgagagatcctacaagaggattgtaagtcgtataataatgacagcaaaaacacaaatattgatatagaaatctgaaggtatacagataataagcaggaggaactgctatcattgattt

SEQ ID NO: 31822 - DNA, 423 bp, Setaria italica
  Peptide Sequence Number=SeqID_97796
acgcgagcattgatgaatgactgaactactccattctcaaaaattccaagtagccgagccccaaaccctgcagctgcaattcccttttccgatcgatcaccaagtctgtatttggtccatacaaccgaacagtcacagaaaactcattgtcagtgtcttctttgacagacaccttcagcactgtaggtaagaacgaataagcatcatggacgacgtattggaagtaattattgctgtacacatgaataattgttcataccaatcatccttatgggaggtgcatctacagagtcagcaggttcttattattttctaaattctgcaagcatgacagcaggaaagatacagcacaaaggaaataccaatgcagtgacggtaaggagtctctaatcccacaaagtttgtagaaaagtataagatctg

SEQ ID NO: 31823 - DNA, 1542 bp, Setaria italica
  Peptide Sequence Number=SeqID_97797
gttttgctaatcttaaactatactttttctgccagaatgtatcaaaaagcttaaacatggatattttttatgcacaacaaattgcacggagcagaacccatcaggactgtgtttattacaaatagaagtatacaggtgttttcccgaggacccatcgtgtggcttcctaacaggccatgacgaatttctaacatcagatacaacaacgagaggctgctaccaccaccataatagagtttctgagcagcagccgaagcctacccgccatgaggggagcggatcacattcttgactcgtcaacagattatcaggttctagccatttctcagctcagagaggaagccttgtgccaaggaaatgcaggactccctctgtttcttgtactcaccgtaccttaggaagaagtacccaagatagtcgaaatcaatcggggatacatttgcctgaataagggcccataatgcccagtaaatgtgcgatgctaatctgaaagtgtttgtttcgacataaagtgcttccagatcttgtgcccgcacctcactaggtttatcaggttgcagataattcctgaagaagtgatactggacatctttatctgggtacatgttgtagtcacaatcaaatcctgcatattcgttgaaatgatttgcaatgtcataaccgcggtagctgtatgacccatactcaaaatcaataaaatatagcttcccttccgaatcattgagcatcagatttcctgaaagcaaatcattgtgtgcaaaaaccagaggcgcatgcagaagatccgagagatccttaagttcttgaacttcatcttgtatttctgtaaatgagattgtctcatatctcttctgcttctcgttatccttaaacttcaatgctgaagcttttttcaaaaacttgaatatgtcatcccacagttgcggttctttaggccctggaatgtctacttgatggaatctgtggagctccttggcaatttcagctgctattctaggttctctcatgtctgcaggtgagagtgttcgagcattgatgaatgactgaactactccattctcaaaaattccaagtagccgagccccaaaccctgcagctgagagatatggtatcgcctgcaattcccttttccgatcgatcaccaagtctgtatttggtccatacaaccgaacagtcacagaaaactcattgtcagtgtcttctttgacagacaccttcagcactgtaggtaagaacgaataagcatcatggacgacgtattggaagtaattattgctgtacacatgaataattgttcataccaatcatccttatgggaggtgcatctacagagtcagcaggttcttattattttctaaattctgcaagcatgacagcaggaaagatacagcacaaaggaaataccatgcagtgacggtaaggagtctctaatcccaacaaagtttgtagaaaagtattaagatctcgccccttcttatgcaaacaggaacaataagtagcacgaagcaggattaataaaaaaagtagaaggcagcggccaag

SEQ ID NO: 31824 - DNA, 469 bp, Setaria italica
  Peptide Sequence Number=SeqID_97798
cgttcgggaaggttcccaagtacgttgagaaactagaggactttatggccctcctggcttatgaagaacctgagaagtcacctatgtttcatctactaagcccagagtataggcagaatgttgcagatagcttgaatcgggctgtccttgcacatgctaatctgccagcatattcatcactggagagagtggtgcagcaagcaactgtggttagacaatacctacagcaggaagttggcaaggcctttctgagcaagtaaaggcgcaactggtcaattcttcagaaagagtaccacctctccaggccattgtgattttgtgagcgccctacagagtgcatagacaatgaagcacttatacaattcacagaacagtcttcttgacaaatggtgtggtactttgaatgagggatgctgtatgtgttccgtttccttcgtttacaatctgtttcctgtgtccccgcccccct

SEQ ID NO: 31825 - DNA, 1266 bp, Setaria italica
  misc_feature (1223)..(1266): n is a, c, g, or t
  Peptide Sequence Number=SeqID_97799
aagacaagacgggcaagccaacaacctccgtctccccgtcctggcgtcctccctccctgcggcctcctcctcgcatccggcgcccggctcttctcctccgtcatgatggacctggatcctcgtctctacgagaacgtctctgtcagcgacaacgatgtccgaaacattgtgctatcttatcttatgcacaactgttttaaagagacggcagagacattcctatccagcaccgggttgaagttacctattgactatagtgtgaatgtggataagcgtaaagcaatttatttaattttgtgctagaagggaatgccctgaaggccatagagctgacagaagaactggcacctaacttgctggagaatgatatggatctacattttgatcttttaagtcttcacttcatcgagctagttcgttccagaaaatgcacagaagctctcgagtttggccagaaaaaattgacgtcgttcgggaaggttcccaagtacgttgagaaactagaggactttatggccctcctggcttatgaagaacctgagaagtcacctatgtttcatctactaagcccagagtataggcagaatgttgcagatagcttgaatcgggctgtccttgcacatgctaatctgccagcatattcatcactggagagagtggtgcagcaagcaactgtggttagacaatacctacagcaggaagttggcaaggattcttacccaccattttctttgaaggcctttctgagcaagtaaaggcgcaactggtcaattcttcagaaagagtaccacctctccaggccattgtgattttgtgagggccctacagagtgcatagacaatgaagcacttatacaattcacagaacagtcttcttgacaaatggtgtggtactttgaatgagggatgctgtatgtgttccgtttccttcgtttacaatctgtttcctgtgtccccgccttagactgttagacatagcgaaagcatgtacatatgacccgttgagctattctgtgcgttcgttctggaagttcggtttgagcaggtttgttgtggactatgggtgtaattggttgccttgccgcatattcaagcagtggaggggccagtggtaggctgaagctgaacggatgccgaagggttgtttggttgcctgtgtgaggacatacatgaaaataactgtgcaacgaaagtaataaaactgtgttaactttttttaaggtnnnnnnnnnnnnnnnnnnnnnnnnnnnnnnnnnnnnnnnnnnnn

SEQ ID NO: 31826 - DNA, 1408 bp, Setaria italica
  Peptide Sequence Number=SeqID_97800
tacttaactacagctcagacattacatggtccggttcattctggacatgcggcaagcagcttcggcactatcgagctttttgtcgcaatggaaccacaatatctacccacacatttgtgctggtcttgtcagaggaagaaagtcgctatcttgcatacttggaagacatgtatgaagataagaagggacagaagaaggtcaaagtgcggtggtttcatcaaaaccaggaatttgcttgtgccatacctcctcctccccctcatccttgcgaagttttcattactccttttacgcaagtaatcagtgtggaatgtgttgatgatattgcaactgttttaactcctgaccattatgaaaaatgctccaatgcattgccaacttcttcttttgttgggatacgtttctgctttcgccagtatagcaaaaataagttcaagcattttgacttgagtacactgcgtggatattttagtcaagctgttgttctgtccttgaaaattccagctgagtcagaaaaggatggtgaaatcacacctgggaagactaagtttcaaaagcagtatgaaaggctttattcaaaatgtttgggcactaaaatctgtcgaggtccacaagcagactccataccaccttatcagatattaaataataagcaatctcctggaaagcatttctctatcaagtttatagggccccagattcaactaaagcccacatacagtgctggtgacagagtagagatcttgtctcaagacagtggcattattggctgctggttcaggtgcactgttctaaagtcatgtattaatcataacaaactgaaggttcagtatgatgatctccaaaatgctgatgatagtgggagattggaggagacagtgcctgcctctacattggctcttcctgataaattgggactgagaagcccagaccgactaagaattaggccacgccctcaacaaaatatttctgttaatggtgctgctttgatacctggaactgctattgacgtctggcaatttagcggctggtgggaaggaattgttgtcagtttagagaaccctgctgcagatagcctccaagtatactttccaggagagaatttttttcgggtatgccagctacaggatgtaagaatctcaaaagattgggtgaagaaccaatgggttgatattgaaataaagacaaatgtgttgtcacgaataccttcagatggtgtcaaaacaaggcaacctgataatttttcatctgttggcgtgctagactctagcagttctgcactgcctgagcaagagcttgcagctatccaagcaaactccaatggagataaaccagtgcctgagcgagggcttgctgctatccaagcaaactccaatggagataaaccagtgcctgagcgggggcttag

SEQ ID NO: 31827 - DNA, 290 bp, Setaria italica
  Peptide Sequence Number=SeqID_97801
ctcttgttcgcaagcgcgccccccgggccccggctggctggctgttaggcttggcagcttgttcgcctcccacagccgcacgcgcaccacgcggagtgaagctgcgcgcggttgcaggggcgccggcgcgggacagagaaggcgcgcgcggggtatagcaagggcgagctgctgatcatcaagtgatcaatggcgccgccgcctgcggatgagggcggcgccggcacaggtggccggtgcggcggcggcgcgcggtgggtgctggtgggcctggcgctggggcagttcgt

SEQ ID NO: 31828 - DNA, 256 bp, Setaria italica
  Peptide Sequence Number=SeqID_97802
ttggcaagcaactggataaagttaagtcacagatgatcatcgccaaagagaagctcaaacaaggtaaaaaaagatgtttgtagaagaaaactggagtttggaacaagtaatggctagcaaaggacaacccaatgtccatactattttcttcatttcaagttttcatgcataacataagctgagtgcagacaaagacgaaaggaatatatatacaacggcaaggtagtcatggcatcctttcctgagatacaaatgt

SEQ ID NO: 31829 - DNA, 248 bp, Setaria italica
  Peptide Sequence Number=SeqID_97803
cggcgatccagcagcaacggtcctctttggctgggggagacaaatgtcagcggcggcagcggaggcggtcagagctccgcgaggatgacgacgaccaggatgagctgcgctgcgcctgcgagtgcgacacagtaaaagcacggcgcaagcgaacaagcaaaggcaaaggggaggaggaggatggaggcgccggccggcggcgaagtaactggtgattcgggctttcgtgatgccgatgcgggaaggat

SEQ ID NO: 31830 - DNA, 1236 bp, Setaria italica
  Peptide Sequence Number=SeqID_97804
tcatgtttagtcctcctaattagcatccgaacatccaatgtgacactactaaagtttaagcacctagtatccaaacacccccagaatgatagatgcaggctccagagagacacaaaaccctggcatttctggaagaaaaattgacaatttacccaggcaaagtgaaatgtagagcgaagagctcccccctgcatccgaggacaactccaacaaacctgaagactcatgatctgcgcagctcagatgttatcagtgcagcttctgtaagaacttcctcacggcccttaccaaaggaagagggttctcaacatgcacagcgtggccgctatctgggatgatgatcacgtcacagagctcgtttccatcccgaccaccagatccacactcagcgtgctgtgttatctcgctgcacattctctgtgagatgtctttaaatttcgtgtccttttcacctgcaacgatgagtagaggcctcttcaagtgtttcaagtcttcccacagggacttttgtctccccacacttgagtctgcaagaaccttagctagagctttgatgttcttgtgtttactgcgtgtcctcactaaagaattgaactttggatgctctcgtagactggtccacatttttgctgagtaccatgtctccagaaagcaatcgagtccacaggacatcaggaacttagctcttgatccatcaacagcaatacgacgtcttctactttcttcatctctcaatccaggacttcctgatatgatcacagctccacgaatctggtgaacttgatttagtgccatatggagtgcaatccttgcacccattgaatagccaacaacaaccacctcaccatcagttatttgacctaccaactttagcaacaaatctgcaactgattgaactgtaaccagatattgttctgaattttcaacatgatgctgcagcatttgtgactcgccatgaccaggaagatcaacagcaatgacccgtgcactgggggagagagctttcatcatgggaacccagtcgtcactcgtaccaagaaatccatgaagtaaaagaacaaccttttccacggatcacatgcccagaggcagcaccgcagcaaacccacaattgaggaattcttacacttgtatggtcagtggtcaaatgcacagaataaattcatatacagcaatatgaacaaatacaccatctgaattttcaaaagaataggagaatgcttacatttgtatgat

SEQ ID NO: 31831 - DNA, 456 bp, Setaria italica
  Peptide Sequence Number=SeqID_97805
gcagtgttccatgttatcaagcgacataatacagctgctaggcaaaggagaagttgcaacatccaaaatattttgtaactgtacttgataattttggaggtccatttcttcaactgcaatcttgctcctgataccacaaccaacatgaggtgataaagccttcgcactagaagagttacagagggcaacctcagataggctggacttatttcttaatttgggagaagaattcctattttgttgaacatcacttgcaactgacatcttgcagttcattatatcattctttgtctcagacttgagagacatgaactcactgaatcctgaactccttaagaagtaacgacctgaaggttgtgatttccccgagaaattttctgcagttaccatatgagtgccaatggcatcttggtggttcgaagaagatggctttgtgtcataagaactgggaagcgc

SEQ ID NO: 31832 - DNA, 245 bp, Setaria italica
  Peptide Sequence Number=SeqID_97806
ggcgaagacccgcgccgcgcgccgcggctgtggatttgactgacggagggagtgcccgcggcgggggaggtgatccgaggccgtcggctccgaggcagggcgcgggatgaagggacccacgagcgcgggttccaggtgacgggcggcggcgaggctgatcggcggagacgcggagaaggcgggggaagcagggggcggatcgaggagacggggcaagaattggggcagccgagacagagagagaa

SEQ ID NO: 31833 - DNA, 422 bp, Setaria italica
  Peptide Sequence Number=SeqID_97807
gcagacaaggattcagagtgcaatatcagtatcctgaacatacaggttggccttatccggaaagcatggaagcacccatctgctgacagccttttggttgaggagatagatttgggagatggtaatgtgcgtcaagttgtcagtggtcttgcaaagtactgtagcccagatgatcttactgtgagtagttagcagcaagaaagaactcaagttgttttcaaacatttttgctttctgaagttgtttgtggttctgtattatgcaaaaacacctgacacttccccattcagaatcggcacgttgtcttgatcacaaatgtgaagcctgggaagctgagggatgtcatgtctgctggattggttctgtgcgcttcaactgaagatcataccgcaacaaaaccttctgctgcaaaagacaacaaa

SEQ ID NO: 31834 - DNA, 1463 bp, Setaria italica
  Peptide Sequence Number=SeqID_97808
ccgtcgccgtgctcgagactccgcgtgctaatggcggcggcggcggacctcacggtggccaagcgggccatggcctacgcgctctgcaagcacctcaacgtcgatcccagcactgtatccaatacgagtattgaagaaagtgatattgcaagcctgttttcacatattgtgaactcatctcaggatgaggtgatgaagtgggtaaaattttccagtgattttgctgggagtgatggaaaacagcatgcactgcttgataatctgaataaggatttgtcccagaagtctgtactactgggtgatggtcttaaaccatcagttgctgatattgtcgtgtttgctgctgttcaagctttcgtgagtcgtgtcagcgacagcaagttgcagaaatttcctcatgtattgcggtggatggactacattcagaacattgttgattttggtacaactttgcaaaagataaatgtggccaagtctgtctttgttccaccttgtcatccaaagaaagctgataaaggagacactgaatcaagttcaaagaaagccgtttcaggacagaagattgctgacaagtcaaatggaagtgctgactccaagaaacccgtaggggagactaaggcttcagacaataaggaaacaaaaccttctgctgcaaaagacaacaaaacctctggtgagaaaaagaaagataagtctgcagggaaaacagcagagaaagcttcagagaaagctccagagaaaactgcagacaaggattcagagtgcaatatcagtatcctgaacatacaggttggccttatccggaaagcatggaagcacccatctgctgacagccttttggttgaggagatagatttgggagatggtaatgtgcgtcaagttgtcagtggtcttgcaaagtactgtagcccagatgatcttactaatcggcacgttgtcttgatcacaaatgtgaagcctgggaagctgagggatgtcatgtctgctggattggttctgtgcgcttcaactgaagatcataccgctgtggagcctttgattcctccagaaggagccaagattggagagcgcatttcatttgctgggttcgatggaaagcctgaagatgttctaaatccaaagaaaaagcagctggacaagattaccccgcatcttcgtaccgacgagaatggaattgcaacattcaaagggataccctttactacatcagctggtccatgcagatcttctattcgcaacggcaacgttaagtgaggagcttgttaggaacgctgattgcatacattgatgttatagaacagatgtcaggtggctgtatcatttttgccttacgtcttgttttgcccgtgctaaattccatcagaagcaattctctaccagtggctgtgcacagagttttttgaagtttttatgtatacaatcacacaaaaattaaatgtccttcaggttcggttctgtgttgg

SEQ ID NO: 31835 - DNA, 1238 bp, Setaria italica
  Peptide Sequence Number=SeqID_97809
ttttttttgaagagaacaaagaatttgcattcaggctcacaatcacttcatctgcaactgcaattggtatcaagtactacataatctttcagaatcaatgttctgcggtggatctgagcatgacaagttggataaaacacttctattaaaatcctgaatcatatcagcagagacgtaattacttccatgaagcaacacatacaaacagatgaatcaaagcatacaattgaaaaggaggtacatggaggaaaaaaaaagatgtttcgaagaacaatatgctctgatttgcccaaaactccctatatagtacacagagccaatcttttcagcccgaaatcctctaagtcgacttgatcatacagttatcctgattatggaaacattgaccctccaattggagcaccaatatgaatggggcatcagttgtgattacaaactgatgccagccaagtcaaagagcttctcagcttggtccgggaaaaatgttataaacaggtaggcactgataagtacagtcccgagaactactgaaatctttccttgtacagttacgaggccggcttttcctgcattctgcagctcagttttcccgacagattcaaacgttcctggcttcactgtctgaagacctgatgtgatacatgcaatattttggaagccttctctctccagtgcatctgcagctgctgctgacctgagcccttcctggcatacaaccagcagcttgctctccggcttgaacttgtccttcaccgtcttggcgaagtccgggttgagcttggtgaagggcagtccgaagaatagcccggcgaagttgttgtgcaactggcgcttcacgatcgtcccaatgtcgttgtcttggttctcgatgaagaggggcacgtgggtggaggagttgatgtaggccctctcgcgctgcgtcctgtccctgatgtccagcaccgtgtagccctcctcggcgacgagcctcttcgcctcgtcggcgtccacgaagctcacctcggcgcggacggagacggcggcggcgcaggagcttctcctcctacttggggacaggctgactccagtgggcttgcagcccggcctgatcctcacggctatccaagaacctctgagaggagagaaagcagtggataggccaacaactgcctatttttgaccttcacttgtatttttttcttcctttcgtaattttttttggttctgaaatggtatttttttctggggatttttttttg

SEQ ID NO: 31836 - DNA, 1245 bp, Setaria italica
  Peptide Sequence Number=SeqID_97810
ttagttacgttaagtacctaagtcaatggagccgagttactttttttgctgctttatctgctctggtgaagaagaaacaaaggggctctctgtttaactctaaatcgagaggctttctctgtttagtttttgcgttactagtatggtatatttcaaatataaaaggtggaattgcattcttacccctacgtctcgagttcaattgtgatttgctccctttttcctaacattatgattttgcacctgctttttttttattgaagctaccgtttgccccttgttttggagttctattgggtggtgcagccgtgcaggattaaatgaactggaaaaaataattggaataaaaagagatcaaagtatcactcccttatcctattccaccgactaaccctacgtgttgagtggcggtggactagagggagcgcacaggtggggaaactggaaagtcatggaagaagccaaacgtgtggcgcaggcaagcattgcagtggcgatggccatgaatccagcctcccttcacaacagacgtatccatgacagagctgcaggaggcagcaaacaggtccacttgcctgcagtttgggtggcgagaaactgcatgaggctgcaggggacagcagcatgcagacgcctgggcacatataccaagctggattgagccccggtgacatagggtcacgcggttccaggctccaggaagtgccagatcctagtcacttaggagattatctttcgtggattgcctaatcaacctgatcgatccttccatataaattagatgctatcaaggttaatcgtctgcctgactgctactactccaatgcaaaagaggactggcacgtgctgtcatcactcatcagctggaaggagtttcacagcccgtgtcattgtcatggataatggggagcttgcaggcctgaagtgttgctgcactagattcagacgtgctgctaccagtaacctccacgaaagtacgacgtacgtagtctgtcaaaatacaacatctgaccatgtgtctaccatgtgatactataatgcttgctatatacagtttctccttgaatataatacaagttgtgtcaaatatctgtcaaaaaatgcttagttttaatatatgcaaattctatgatgtttcagtcaaagtacttatgaaatttgtcaaaatgcttgatgacaaacagtggcaaaatcataaagttattaggagggcaaatctgcaaaggcatacatgtctttttacag

SEQ ID NO: 31837 - DNA, 499 bp, Setaria italica
  Peptide Sequence Number=SeqID_97811
aacacaccaagaccagaaaaccagggatctaaacctgatggttcaagaggctcaaaacaaaagatgccagagggcagttggaagtgcgagcagtgcaataacataaactatcctttccgaacaaaatgcaatcgtcctcaatgtggagcagagaagccactgcagacgaacagtacaaatgattcagtgacagatcaggacaatcaggtctgtgtttcatgaccttcagtatgatcaggacatttgccgtgcccttattagaacaataagttgcatgccttattattgaaattatttttaatcattttcttgcctcatgtttgcttgcgcatagcttgatatatcatgtccttactgttacagtgagtcctagaacagtaatgagggtcaagaaggtccagcatggtcgtcaaggttcagtctgaatgtggggtccatctgtgtcagtagttgctgctgtcgttacaagtttcttcccctcgagacctttagttgagtc

SEQ ID NO: 31838 - DNA, 2143 bp, Setaria italica
  Peptide Sequence Number=SeqID_97812
gcacccccggaaatttcccaagccgaaatcgcaacaggaaggggagcacgcgaacgcaaaaccctagcccactgctccgccggattcccctcctcctccccctccctcgctcgccgcctgtctccgctgcgcccgcggctctccccctccgctccaaggagcacaggcctctcgccgcgccgttcgcccaccgccaccaccgggtcaccgccagccatgtcctctcaggtcgatagccgcagccagtccgctgggaagcgcgcgcgcaccgacggcagccggcgtgaggacgactgggtttgccccagctgcaagaacgtcaacttcgccttccgcaccacttgcaacatgcgcaactgcaaccagtccaggccagcagatcacacggccatgcagaagcctatgcagactccgccccactacgccgcgtctgggggttacatgggcccagggacgccgccgtcgatgtaccttggtgggggtgctcccccatatgcctcctccatgtttaatgggcctgcaatgccaccgcgctatggtattcctcagttccatgggagttctgcgtatccatatggatatggtggtcgcataccgattggtagcccctatgggccgatgcaaatggccgggccacctccatattctggtggatctatgatgggagcaggtggaatgtatggaatgcccatggacagatatggcttaattcctgctagtcctggtgcaatgggtacaagggctggctcatattctgatgaaggttcccagaagaagcctgcaggagctggccgtgataatgattgggagtgtccaaattgccataacatcaactttgcctttcgcacagtctgtaatatgagaaagtgcaacacaccaagaccagaaaaccagggatctaaacctgatggttcaagaggctcaaaacaaaagatgccagagggcagttggaagtgcgagcagtgcaataacataaactatcctttccgaacaaaatgcaatcgtcctcaatgtggagcagagaagccactgcagacgaacagtacaaatgattcagtgacagatcaggacaatcagtgagtcctagaacagtaatgagggtcaagaaggtccagcatggtcgtcaaggttcagtctgaatgtggggtccatctgtgtcagtagttgctgctgtcgttacaagtttcttcccctcgagaccttagttgagtcggggtcctaatggtaaacactttggagttggcaatggagtcttgcctttcctaatcactacagattttggtcaggaacatccatcttgccttttctcgctgaacttggttacttgtctttgttactggtactctgggtaaactgccatctttaaatgaatttcttctagctgtttgtgtcatagattgttactctgctgtggaagtatcgttactgttcatcactttgccttggttttgttaatgctgcgttctggtccctgttttttttttccaatttatggttttggtattttacaggtgtttttttcttaatggttggcgatagcaaccttttttaccttccaaaataatgttcataagatgttagcaacttagcaaggtgctccacttaacatatttgtgagagcccgtcccccgctagttacttttgcttgcagtaacagttaggtctgaaacaagtcaacgatggacattcagttgcatgactgcatacgctgttatcatcttccatgtcctccggagattagggtgttccaagtttcaccattctcttgtgcttggttagaagacgctccttggtgaaagtgatgtgcatcatcacattgtgcagcggtagaccatcaacttgcatgcttgtctcgattgtgactacttcactgacacagtcccattggaattagtttttgtcatgtaacattacgaagcttttatcaaagctgcgacttctgcatgaatttcaagacaacagtgaacagacacagacggatctgcctggtcatgcggctggaggagtgccgacgagttctcttgcgttgcggatggcagcactcagtgagttgcagaacattacaaactgatttgctactgtttcatattggaaaacaagttgagaaattcgcaccacgtgggtatgcttctgtattgagcct

SEQ ID NO: 31839 - DNA, 273 bp, Setaria italica
  Peptide Sequence Number=SeqID_97813
agatccatcttgccttcctctcagatgaggaaagatacaaagaataccgaacatgaagaactcagggttgaatgacacgttcgctgagacgaaacgggaggcttggtttcctctatcattctgattaagaagttttggtaccatggttttggaggtgatttagaagtaattagaaacaactgggaaaaggatccatcgttgcataatgtttgttccacatcctattcgattgttcaatggtactcccacattctcttttgattgtattaaaaa

SEQ ID NO: 31840 - DNA, 481 bp, Setaria italica
  Peptide Sequence Number=SeqID_97814
cacttgcgaggaagttcacaaagttgccctgattttctacatctgatttaatctattagctaccaagataggcccaggcaggggtatcagtaatttatctctgaatcaacagctgaaatggttgtgcccaagcctctatccatggtgatacgtcattctgaatcaaaccaaacaaaaatcttggctgctctcaaagtagcacatggatggagagagaatatatgatatatatgatatattctgatgagtaacatgttatgcaagaaacagatttgactttagatattcagaaattaatttcttggcagcaatccttctccaacgtctctaatccagtaaagaactcgataccgctatgccttggaagtgggaagaaacattatccaaaccacttcttgcaaacttttattttaaaaagaataaaaggacaaagggggcatcagtagataagtagaagaatatgttatacatcgatatgctt

SEQ ID NO: 31841 - DNA, 476 bp, Setaria italica
  misc_feature (1)..(87): n is a, c, g, or t
  Peptide Sequence Number=SeqID_97815
nnnnnnnnnnnnnnnnnnnnnnnnnnnnnnnnnnnnnnnnnnnnnnnnnnnnnnnnnnnnnnnnnnnnnnnnnnnnnnnnnnnnnnnagtttttcgtaatgtgtgtgtccataacttcatatgtaagatgcgctaagaatttcggagccccaacatggatccaagtgaccaacaactgatgcctaataaattaagctttataaaatgcagcattatcctcaagatttagtggactccacttggagccaacctcggcaaaacttagtaatctatgtgtgatctcatcgtctcaatttttattgaacgcatgtgaactcagatcactctgacttgcttgcataagcctttagttcttgaaatgctttccggcatccttcatcgaagccacctgcaagctgcagatttgtttttggctcaggccgttaattagtttacgcaaatgccaatgccattgcaaagtaattttattttggaat

SEQ ID NO: 31842 - DNA, 1743 bp, Setaria italica
  Peptide Sequence Number=SeqID_97816
gcaaaagagtacatgaaccgcattgtgaacacactgaagtcagatccatttgcaaatgatgaagagctccttctgcaaggtgtccgctttgcctttagtaaagtaatgttggtagaatttagttcgaatgtgtgtgtccataacttcatatgtaagatgcgctaagaattttcggagccccaacatggatccaagtgaccaacaactgatgcctaataaattaagctttataaaatgcagcattatcctcaagatttagtggactccacttggagccaacctcggcaaaacttagtaatctatgtgtgatctcatcgtctcaatttttattgaacgcatgtgaactcagatcactctgacttgcttgcataagcctttagttcttgaaatgctttccggcatccttcatcgaagccacctgcaagctgatgtatgcggaaggcaaagcggacaccttgcagaaggagctcttcatcatttgcaaatggatctgacttcagtgtgttcacaatgcggttcatgtactcttttgcaagcttcaaggaagccatctttagttggtttatgattccggagtcaagcatccattcccatgggatcttcagatccctgtatcttccacttgcactgtcccttactcgttcagtgttatgaataccttgttcaattttatcctgcagagcctgcatgcgcttgagagccataggtgtagccactctcctgtcatcatggaaggatgatgcttctgattctaggttcttcagatctcgaaaggtgaatgctgcttctctcatggcatctgctttcttctcaggccagttaggaaagtgtttgagcactgctctttcatccacaaggtatgacaattccccatcaagccacttcacaaactcttcaacatcagctatctctctgtatgcggcattctgaacttcacttgcgaggaagttcacaaagttgccctgattttctacatctgatttaatagctaaaacataagctgatctgttctcaatctctccaatcatctccctgctgttagttgctgctggaattcccacggatccagactttgcgtcgtttttgccttcacggcgtactaacgatcggtacaactcgactacctctggcaccctttgtattgcctttgggcttctctgcaacttggaaggtagtggaggtggtggtggaggaggaggggccatgcatccttcctttctcacattggtctttggttggatgcatgtcggactgggtggtggatttggaactcttggtgccctcgatctcactagcgttgccctcgagaattgctgcctgccgtggcacaatgagctgttgagatctacagcttcttttgcatcatcgttactctggacaaactgcttttccttggagtagctgatgctggttgcagaattctccagcttcttccatagcatcctcttatcagtgtcctgcccttcaagagaggagacctgaccttttaatcggctcacttggtgtcttagttgcttgttctcctcttccagagcacggttcctctcgatcaggccatggagcttgcttctcagaagcgcaacacatgcatcgccctccctcatcatctcttcctcatcagagaagatgaggttacagtatggtggtattggatcctctcaatatatatgtgtcctacctcctcattcatatagtggtagcattaaaggcgatgtttataagtgaggtgctgtatcactggct

SEQ ID NO: 31843 - DNA, 579 bp, Setaria italica
  Peptide Sequence Number=SeqID_97817
tgtagagttcttcttcaggcactacttattcggtaaatgattatcaagtcctttcgaaactgcagaggttgcataagaatggggccaggaagttctggatacatgggacgggcgcgctgggttgcatgcctcagaagcttgctatgccgagggatgatgacagtggtctagatgagcatggatgcatcgcaagcatcaacaatgtttgcaagaagttcaattctttgctgagtgaagccttggacgagctgcgcttgacccttaaaaagtcggcaatcgtcttcgtggatatgtttgctatcaagtatgatcttgttgtcaaccacaaaaaatacgggattgagaagccgttgatgacttgctgtggccatggaggccctccttacaactatgaccccaagaagagctgcatgacttcggatgaagacctgtgtaagcttggtgaaaagttcataagctgggatggtgttcacttcactgaatagactagacaaaacggacaattagtaggacttaccaaaagtagactacaagtaggacgaagtaactaccaattacccaagggtacaaagactagga

SEQ ID NO: 31844 - DNA, 1522 bp, Setaria italica
  misc_feature (1444)..(1522): n is a, c, g, or t
  Peptide Sequence Number=SeqID_97818
gaggggaagaggaagaagaagaagaagggtgacggggtggtgctgttcaacttcggcgactcgaacagcgacacgggtggggtggcggcggtgatggggatccgcatcgcgccgccggaggggagggcctacttccactaccccacggggaggctctccgacggccgcgtcatcctcgacttcatctgtgaaagcctgggcacgcaccatctcagcccgttcatgaagccgctgggctccgacttcaccaacggcgtcaacttcgccatcgcagggtccacggccatgccgggggtcaccacattctcgctggacgtgcaggtggaccagttcatcttcttcaaggagagatgcctcgacttgattgagagaggtgagagtgccccggttgatgagctgggtttccaaactgctctatacaccatggacattgggcacaatgatatcaatggcattctccacatgccctatgatgaaatgcttgccaatcttccccctgtaattgttgaaatcaagaaagccattgagaggttgcataagaatggggccaggaagttctggatacatgggacgggcgcgctgggttgcatgcctcagaagcttgctatgccgagggatgatgacagtggtctagatgagcatggatgcatcgcaagcatcaacaatgtttgcaagaagttcaattctttgctgagtgaagccttggacgagctgcgcttgacccttaaaaagtcggcaatcgtcttcgtggatatgtttgctatcaagtatgatcttgttgtcaaccacaaaaaatacgggattgagaagccgttgatgacttgctgtggccatggaggccctccttacaactatgaccccaagaagagctgcatgacttcggatgaagacctgtgtaagcttggtgaaaagttcataagctgggatggtgttcacttcactgatgctgcaaacggcattgtggcttccaaagtgctcagtggcgagtactccattcccagggtcaagctggccagcctcgtcagcactgcaaaatccgacgattaatggtgacacagcatcctaattggcccttcgtttggtttctcgcaaggatgatggaagatggaaccactaacaaaactgacaccccccaccaaaaaataattatttcgaggtttttatgttacagccatcatcaacaaagattttcttttctttttcttcccctttttgtataattgggtcgaatgtatagcctaggggttaatacatggacatgctggtgtctgtaccatgtattatttttcttctttctgaattttggatcaataaatagagatgaatatttaacatgcatttgtcaatttgttggatagatataaagattgatatctgacatgttgacacatgtatgtttttatcaatgtcacactaatagaatatctgacatgctttcacgacnnnnnnnnnnnnnnnnnnnnnnnnnnnnnnnnnnnnnnnnnnnnnnnnnnnnnnnnnnnnnnnnnnnnnnnnnnnnnnn

SEQ ID NO: 31845 - DNA, 252 bp, Setaria italica
  Peptide Sequence Number=SeqID_97819
catcagaccagtgcgtgtatttttgctcgtctcggtgggttcagacttgagagcatgacgagagcatacagcttgctatagctactatagtctaccactacgcactagctgttagcgatcttatctcgtcacgctgcaccgagttgttcgtgtaatctcgtgtcaaaggtttcgtctgcgtccagtccaaaatgccagccactcggtcctcggttgtgacgaccgtatacgtgtacggtcgtcgtctgtggc

SEQ ID NO: 31846 - DNA, 234 bp, Setaria italica
  Peptide Sequence Number=SeqID_97820
ggccgtgtccatgccgtccaccgcatttccggtagcggagccgccggagaggtcgatgccggcgacgccgaagcacgcggtgtcgtcgccggcgaggaagctggcagcgcagtctgctagagctggccagaaggggtcatggtcgtggaggtcgggagaagggtggaggccagcgaggtcgccgtcctgcagctgctgcaggtcctgcaggcaggaccacacttcatccatgga

SEQ ID NO: 31847 - DNA, 577 bp, Setaria italica
  Peptide Sequence Number=SeqID_97821
gtgttacctgtactactggtctactgtacaccataatcaagatcaaggcaagtctcctggtctgttttgtttttgcttttttttacctattttcccccccaaggccccaagaggcatctctcggattggcaacaaaaaaggcctcacgttgcagctgttgccttgcatcggttctgctgcctgctggagagccggattgggtggagggaggcgagcggtaccggtacggcgcctatgctcagagcctcaagactgagacactgacgaccggcctaggagacggcgaaagccaacaaaaggcgccaacgctcgcaaatgcaaaaggattcgcctgcctttcccgccttcccaaacgattcccaaactcccctcccaccgcgcgctaaccacctgctacgctttccagttccagtccagcctgcctgcccctgcctccctctgcaagcgcgcgtgctcctgacgcttgggcccaccacacctcacactctgacagtggcacactccctcgcctcgctcgcttgctcaaaaaaagctgccatggattacaccgagggagagagagatacaggagcacgtg

SEQ ID NO: 31848 - DNA, 327 bp, Setaria italica
  Peptide Sequence Number=SeqID_97822
ggttctccgacaggtcgatgtcggttagctccgtcaggttgccgagctccggcgggaccacgccctccagctcgttgtagtagagctccaggaactgcagcctgtgaagacgcgccagcgacaccgggatgcggccggtcaggaagttgccgctgagctccaggtcggtgagcgacgtcatgttgccgagccacgccgggatgccgccgcgcatcgacgtggtggagaggatgagcacgcggatccggcgcagcgccatgaacgtctccggcggccgccagatgtcgaaaccggggttctcgttgaagttgacgaactcgagggtcg

SEQ ID NO: 31849 - DNA, 269 bp, Setaria italica
  Peptide Sequence Number=SeqID_97823
catatttctttggattcttctttggaaaaacacccttgattaagctctctccgaagaaaacatgggaaggctttataggtgcttcagtgacaaccatgctttctgcatttgtggtcagtaaatacttactggccttctatattatcatcggttcccattgctaactgatggccatgtaactgatttatgtgtacatatactccatctttgttcaattgtttttttttggtggccttcttctgcaaatgtgggcatggctaattttctaa

SEQ ID NO: 31850 - DNA, 442 bp, Setaria italica
  Peptide Sequence Number=SeqID_97824
ctggatggcttcattgtgaccaggtcccatgtttacaccagaaatttataatttacgaggatggatgccacaatgcgtgagcaagcaatttgaatataactcaaattcttcaattgatagtagctcaaattccatctcctctagttagagttccaattagtttatttgtactttacagtttccctggagagaagttgcaattatgcctgttcaatggcatgccttagctcttggcttgtttgcttcaataatagcaccatttggaggtttttttgcaagtggcttcaagagggcattcaaatttaaggattttggcgacagcatacctggccatggtgggtttacagataggatggactgccaaatggtcatggctgtctttgcatacatctattaccaatcctttgtgatggtacaagacttgtctgttgagacaatcctg

SEQ ID NO: 31851 - DNA, 1840 bp, Setaria italica
  misc_feature (1810)..(1810): n is a, c, g, or t
  Peptide Sequence Number=SeqID_97825
ccgccggcgacggcacacgacaaccagccctcctcgcatccaggcctctatcaccgagtggcgccgccccctcctcctcctctgctgctggcattgcgccggcgcggagtggagatccgtccaccctcccgtacggtcctggatcgatctctccaattcttggcgactaacccaagcttgctcggaggaaccgctgcagggcccaagaaatgcagagggacaccggcggtggcgacgggacgccgggcaccccgagcccgacgcacggcggccgcctcaggcaccggaagcgctccagcgaggttctcagcgatgtgaacaagaccaatggcgccaacctgctcttgaacgaccagaacaagtacaagtcgatgctcgtccggacctactcctcgctgtggatgatggccgggttcgtcttcttgatatatatggggcatctctacatctgggccatggtggtggtcatccaaatcttcatggccaaggagctgttcaacctactcaggaaggccaatgaggaccggcagctcccggggttcaggatgctgaactggcattttttctttactgcgatgctatttacgtatggccggtttcttagccggcagcttgtcaacactgtcacttcagataagttgctttacaagctggtgagcgggctcatcaagtaccagatgtttatatgctacttcctctacatagcaggttttgtctggtttattgtcacgctaaagaaaaggcatacaagtaccagtttagtcagtatgcatggactcacatgatccttctgacggtatttgcgcagtcatctttcactgtggcaaacatatatgatggaatattctggttcctcctaccagcttcattaattgcgatcaatgatgttgccgcatatttctttggattcttctttggaaaaacacccttgattaagctctctccgaagaaaacatgggaaggctttataggtgcttcagtgacaaccatgctttctgcatttgtgcttgctaatttcatgggccatttccagtggttgacatgccctagaaaggacttgtcaactggatggcttcattgtgacccaggtcccatgtttacaccagaaatttataatttacgaggatggatgccacaatgctttccctggagagaagttgcaattatgcctgttcaatggcatgccttagctcttggcttgtttgcttcaataatagcaccatttggaggtttttttgcaagtggcttcaagagggcattcaaatttaaggattttggcgacagcatacctggccatggtgggtttacagataggatggactgccaaatggtcatggctgtctttgcatacatctattaccaatcctttgtgatggtacaagacttgtctgttgagacaatcctggagcagatactaaggaatctcacagtcgaggagcagcatgatctctatgaacagctaggcaagttactggcgagagcaaactgatgctaacatagacagtgtgcatgcaccaaatccaaaaggataatgtgccgtgcttcttccaagcctgtgttttagttaatctgcttgtacagccctaacaccccctaagaacaaaatgagagaaccacaacacttcacaggaattgcaccgctgtatgatgtttcggagcatacagagcgttcttctgagatggtttgccatcgccttttttgttttgcctctggtgttgtgttatgtttgttgctgcctcaaatccggctaacgttgtttccttgtgtaaaagtcagttgacattgaccatgtgtagaaggtattttccngtcaaagttttctcagtgtagttattatag

SEQ ID NO: 31852 - DNA, 394 bp, Setaria italica
  Peptide Sequence Number=SeqID_97826
aaccaccgcgccgccatcatcactcaccgtcccctccgctccgctccgctccacgcccgccccagcccggcgaacagaggagaggggagcgatcggagccagagggaggccgcggaggttctggggtcgccgccttcgctgctgatcgattctccggcttgttcctgcgccttctcatcgcaccccttgcggattttctcccacttcttcaattccaatggaacatagctcttcagaagattcagacattagcgattcggatattgttgaacacaaggagaagatctatgcccaactgcgagccggaaaattgaaagtaagtatggcgagagtgcctttcggtgccctttctgccctgggaagagaagcaggactataacctgaaggatctact

SEQ ID NO: 31853 - DNA, 2225 bp, Setaria italica
  Peptide Sequence Number=SeqID_97827
cttgatcactaaagaaacctgtaatattttcctactttaaccagttatacaacttgttctgcatgtaaaggaggtgtgtatgtgtcaccacaatttgcaccctacagacaagtagcaagttgcttggtctaaagaaaatgaaactctatctcctgcgttgtagtgttggatctaattgcaaagttcctacagtagtgtttcatttgatacccaactggcaatgttaatttacccccaccaatttaatccgttattgttgtttaatcggtaggtgacactgcctgcttctctgtttgctcacccttaggatttctcccacttcttcaattccaatggaacatagctcttcagaagattcagacattagcgattcggatattgttgaacacaaggagaagatctatgcccaactgcgagccggaaaattgaaagtaaagtatggcgagagtgcctttcggtgccctttctgccctgggaagaagaagcaggactataacctgaaggatctactgcagcatgccacaggaataggagctgctcctaagcgcagtgccaaggtgaaggcaacacacctagggcttgctatgttcttagagaaggatacagccagctcgttggagaaaccattgcaaattgtggtctgcaagccaaaagcgacaaagggtgaagaagaggttttgtatggccatggatgggcattgtggttaacttacactatgagttgaagggtgaagcattttcaagggaaagtgaagaaaggctaagagcacagctgtcacggttcagaccactccaagtcacaattcttggggatgacaaggaccaggcattttgtgccattgtcaagtttgctaaggactggggtggattaaaggatgcattggcttttgaaaagcatttcgtactcgagcagtatggcaagacagattggaacaaaataaattgcagaaaggacgatatttatggatggcttgcaagatctgatgattataacactctggggccaattgggcagcatctaagagaacatggagatcttaaaagtgttggtgacctggaacgtgaggggacccaaaaaattgacatgcgtgtagctcattatgctcgccaaatcgaggtaacaaacaagcacatgagtgaattggagctgaagaacaatcaaaatgccatgaaacttaataggatgatggaagagaaagatcgattggttgaagagcacaatgaaaagataagaaagatgcagaaagctgcttgccgaagttctaggaaaataattgacgaaaatattagattgtatggagaactggagactaagaaaaaggaaattgacaggaaaggtaagcaacttgaaaaattggccacgaaaagcaatactgacagagaaaagcttgaagcggcaaaagaagagaatgcaaaggagaacatgcttcttaatttagcaactcaaaagaaaaaggaagaagatgagaagctcatgcgacttgttaagaaacatgagcaagagaaagaagatgctttgaagaagctatgtaatttacaaatgcagttggcttccaaacaaaaacttgaactggaaatagaacagttgaaggggaatttagaggtgatgaagcatatggtggacgaagataagaatttgaaggagaagctcgataagttgcttgaaacactagaagagaaaaatgacgaaatggagaatattgattctcttaatcagacccttattattaaggaacgaagaaccaatgatgagttggaagaagctaagaaagaactgacaagtggcctacaaaagatgtctgcagttcgatcccttatcggtgtcaaaagaatgggtgagctcgaccacaaagctttcgttgctgcttgcaaagagaaaataacagatgcaaaggagttggcacttgtgtgctcaaaatgggaggatgagatcaggcaaccagattggcatcctttcaaagtcatcgatgttgatggagttgcaaaggaaataattaaggaggatgacgagaagctgcaagctttgaaggctgaactgggtgagaaggcacacgatgttgttgtgagggctctccgtgagattaacgaatacaatcccagcggtaggtaccccttgcccgagctgtggaacttcaaggacgacaggaaggcaccaatgggcgaggtagcagcgtacatagtgaagcagtggaagacgaacaagaggaagaacacctacacctgat

SEQ ID NO: 31854 - DNA, 234 bp, Setaria italica
  Peptide Sequence Number=SeqID_97828
tgcttgaactttgatgcgcaaatgtgcaatgctgttttccttgctgaaaggtctgctgataggaagatcattcattgtaaccatcagtgcataaccaatatttcagtccctcgctaacaaactttggaatttctcattaaccaatatgtagactattttcatctgctatgtggtagcatagattatacagatttttcctaacaacattaggatggaacataatttgcatgtgct

SEQ ID NO: 31855 - DNA, 1203 bp, Setaria italica
  Peptide Sequence Number=SeqID_97829
tcttctcaaggctttttcttcatcggaagtcttctcatcatcgacgtgcttcaacaattctccatttaatctagttgtcaaggagggagacaatggagcataaacacttcttgattgtgggatcctttcataatccttcgtcacatgcaacaagatggtaccggacaacaccacaatcaaaccacaaattccagaaatgatgcttccagggctttgaccggaccaatccttgaacattatgacacttgcaagtattgtaagagttgtgaacattacgtaatatattggagacacaattgctgtgttgaatgtgtcaagtgccttattcaaataattcatctgtgtcagcacacaagtagccacaacaagcataaagaaccaagtctctggatatattaattggtttgtcccctcaaaagtcagctttaacgatgtaccaagagctttaacactcatgaccgaaagagaacccatcaaagagcaaatggcggtgtagatcaacacatttgactgcccatatagaggggagaaatagaacaccaggacaaagacaaccacaataactgaagcgacatatagcaagaaagcaggttgcgttgccatgttccatatttccctaaccgatgtaatctcctgctcctgtggagcatggataacaatgaccacagaccctgctatgcacatcacgcagccgagcaccccgagggcatgcaacctctcattgaggatgaaatgagccagcactgcactaacaattatgctgagtgctccaagtggagtaaccaggaccgcgggggcaaaggcatatgccacgaaattcgcaacctctcccacaatcatagtgatcatgccaacccaccacaggggctccatgaggtacgagtacccgccgacacctgcgcggacaccggaggcgacggcggcccggcggaggcccttcttcttgatgatgaagctggcgccgatgaagccgctggagagcagcgccaggactatccccttgacgttgtccgtcgacagctccggccctccggaggccccttcccctcctcctcctccccccatccctcctcccactccggccgctcctctacacggacggccgggttccggcggggattgcgacgggtggggccaacgcgacacctgattgctgctccggactccggttttggggttctctaccgcctaatccgacgggaa

SEQ ID NO: 31856 - DNA, 1096 bp, Setaria italica
  misc_feature (1)..(70): n is a, c, g, or t
  Peptide Sequence Number=SeqID_97830
nnnnnnnnnnnnnnnnnnnnnnnnnnnnnnnnnnnnnnnnnnnnnnnnnnnnnnnnnnnnnnnnnnnnnngatctcacaatttgcaagaacttcactgagacaataatgatgtacagcattcgcagttgcatacaatctccgtggctcacccggtcactctaactctacacaggggacaaatgccgtggacaaaactgggaaagttaacaaaggagaaggaaacttgacaagaatctatgcacccgacttaaatctatctgctggaactatgcagccttccacctctccagatttgcacaaattgctgcaggtatccggttatatacacaaaccaacacaccataatggaggaagcaacaatcgctatgggaaggtcatcgccatatacaagcccctgctggagcatccatcgaaattacttatccctcctttgagattctgatgctagtacatctctcgtcttctcaaggctttttcttcatcggaagtcttctcatcatcgacgtgcttcaacaattctccatttaatctagttgtcaaggagggagacaatggagcataaacacttcttgattgtgggatcctttcataatccttcgtcacatgcaacaagatggtaccggacaacaccacaatcaaaccacaaattccagaaatgatgcttccagggctttgaccggaccaatccttgaacattatgacacttgcaagtattgtaagagttgtgaacattacgtaatatattggagacacaattgctgtgttgaatgtgtcaagtgcctacagtgaaaaaatacaatttactaaatcaaagtgaacaggaacaagtaacataatatttgcggtaactgtataaactaatgcacttcagtgcattgttctgtaaatagtggtattaactctaccatagcagtctacaaaactatatgccactagataatattctggagtcagggataagaggatgttgcccaaattggatctaaaatgtaggtagaaacacaattaggactaaacaaagtcagcaaatgagcttttgatgcaaatcaaataggtccacatcatgtcaacctagcatttggccaccaacttatc

SEQ ID NO: 31857 - DNA, 420 bp, Setaria italica
  Peptide Sequence Number=SeqID_97831
ggggcggagaggggaggaaggagacgaagagcaggaagccgagctgacaccaccaggacaaaaaagggaaacggctccgtcgagcgaccggtctcatcgggcgatcatacggtgagctgcggctgctgctgactgtgacggtggcagccggcggccgtggcggcggtggcgggatcgtcgtggtggtgatcggatgtgccggcggaggagtagcagtgcagccgcggagcgtcgacgggcgacggcgggtcgaggtaggccatctcgctctggagcacggagcagtaggaggcgaaggcggcgggcgtgacgttgaggtcgaaggcgatgccgaagaggaagtcaacctccaagtagttcatctccaccaggctgatgccacccacccgcgcgaagtaggcgttgttgtagcatatgtcg

SEQ ID NO: 31858 - DNA, 279 bp, Setaria italica
  Peptide Sequence Number=SeqID_97832
gctgatagaccattacagcgatggcgggagatagtgattgattttgtcatcggattggtgttatggaagctgcagagatactgtatttggcttcaaagtaggatctggctatgatgataaagttcagacaactgcactgccgaacacagttcccggggctttcaaagtacctgcatatagaaagcaatccaagcctttcagtcgttttgatgaaggcagcacctctgcaagctgaacttgagaccaatcaagcaagggttcttggctataacagaaacc

SEQ ID NO: 31859 - DNA, 447 bp, Setaria italica
  Peptide Sequence Number=SeqID_97833
ggtgtagtggtggaacatgtcgccggcggcggcgaggtccctctgatcggcggaagcggagaagaatgtggccatcctcttcagaagcaggagatcagaccagctgatagaccattacagcgatggcgggagatagtgattgattttgtcatcggattggtgttatggaagctgcagagatactgtatttggcttcaaagtaggatctggctatgatgataaagttcagacaactgcactgccgaacacagttcccggggctttcaaagtacctctgcaagaaactgaacttgagaccaatcaagcaagggttcttggctataacagaaaccacccagcaaggggacagggctgatcctaaggaagaaggaatcagcaagatgagggaagattggaataagaagaagggagctgtgtctattcttttttgttatttttcccttttgg

SEQ ID NO: 31860 - DNA, 917 bp, Setaria italica
  Peptide Sequence Number=SeqID_97834
acgatctgcatctggtggtggtagtgcctgtacttccggtcgacctgatccagcagtgccatcagcgccgacactttgttctgaaggtcttgcctctccgacggcgtcagctcggcggaggagttcccctcgtgctcctcggccttctcctcgctcttctcggcgtccttgccctcgccggaatccttattgctctggttcttgtctcccttgcgcttgatcgcgtcccggacattgaccacctcgtccagcagctccctcgcggccttcaggtacttggagttctggatgtagatgctctgcgcgctcctgctcgccgtcgtcgtctggcccgggctgagcaaggaggcggcagccatgccggcctgccggtactggtagagagacaccggcacgccttgggtgccgaggctaagcgacaggccctggtgctgcgccgtcgacgcgttcgccatcagcagctgcgtctgcaggcccatcccagcgccgctggttggcccgtccctcgcgttcacgaacgaggccggctcgtccctgccgtcgccgcaatgggcgacgtggccttcagacacgatggtggcggggaaaggcatcaggccgccggttggtgaatccgagtacggattggacgtggtgtagtggtggaacatgtcgccggcggcggcgaggtccctctgatcggcggaagcggagaagaatgtggccatcctcttcagaagcaggagatcagaccagctgatagaccattacagcgatggcgggagatagtgattgattttgtcatcggattggtgttatggaagctgcagagatactgtatttggcttcaaagtaggatctggctatgatgataaagttcagacaacctttcagtcgtcatgatgaaggcagcacctctgcaagaaactgaacttgag

SEQ ID NO: 31861 - DNA, 1458 bp, Setaria italica
  Peptide Sequence Number=SeqID_97835
aatcatccgaacacgaatcttcaagctaccaaaaataccaatctaatatcctttacagcacccctacacttaccacacctcatatacagttttgtatacccccctttccccacaactacttcacttacctcaccagtaagtatatacgtatacttagactcttgcttgtttgaaaccttgtaccatgatggacggaactgtgaccatcgtatacccgcggcggcgccggccggccatcccaggcttctgacgccgtccgccgttattccccacgcgccccagccgcggtcacgcgacaaaatcgtgcagcagctgcgacgagccgaaccgctgcctgtcctcggaggcgttcatgaactcgaagtcgccggcgttgccgtacaggaggcccggttgttcggccggcacggcgccggcgtcgttgcagtgctgcaggcccagcgtcaacgacacgctgccgccgtcgtagccgccgaggccgaccatgtcgccgtacgccacgaacctcgggtcgctgtggtggtgcgcgagcgcgtcctgcaggaggctgctgctgctgctgccgttgccgacggcgccgaggttgaggctggttgtgtaggagccaatggcgccgccggcgtccatgccaccgatggcctccgacttgaacgcgttgaggtgtccagctgctgtgccgtgcttcgcggcgctcgacgggctctggaactcgtcgtggtcctccgaagatatcgcctcgtccttgcccttgttgcccgcgttctccgacgacgagtgcgagtccatctccgcgccgaattcctccttgtacatctcctcgatcatcggcttccacaggcgaacacgcgcgttgatgaaccagttcgacacctggcccctggacaagcctgtctgcctagcgagcatcaacttctcagaatcttttgggtacgggtggaggaaatgctcgaagagccatgcgcggagcacggagacggcggactccgggaggccgcgctgggggcgccaggcgtgctgcggctgctgcatcatgccgaactgctgcatggcgcgctgctgccggagctgttggtcgatgtagcgcagccgggacagcccgccgccctgcgccgaggtatccttctcgccgaggctccgccgcagggactgcacctgcgcgccgatggcgtcgcgcagcgaccggaagtgccgggagatcgtctgcagcgccagcgccgtgtacggcctcgccgcgccggcgccggccaccgcgtcgaaggacgacatgacgatctgcatctggtggtggtagtgcctgtacttccggtcgacctgatccagcagtgccatcagcgccgacactttgttctgaaggtcttgcctctccgacggcgtcagctcggcggaggagttcccctcgtgctcctcgtacctccggaccttactacctacgactacttactacggacgtaccttaga

SEQ ID NO: 31862 - DNA, 229 bp, Setaria italica
  Peptide Sequence Number=SeqID_97836
ttatgcctgtcaggcagcaataccttcacctgaaacccagtaaggccaacttcaaagtggttataaagctcatccaactggataccaagtagcatatcatcagaaaaataactaggaagactttttgatatgcgatcaagaaaggaattgttttcttgtgtctgagaaacatcctcagcattatctttggactgaatgaataaatctccagcctcaacaaccatggtaa

SEQ ID NO: 31863 - DNA, 436 bp, Setaria italica
  Peptide Sequence Number=SeqID_97837
aggactaccggtaggaccgccgcaagggcgttcaacagcaagatcatgtgcccgtcgcttcacttcattggtgacgatgactttgtgaaggttcacagtgaagagcttgtagaagcatttgcggatccacttgttatacgtcatccctgcggccatactatacctaatcttgatgagaagggcctccaaactatgctcaccttcctagacaagattgagaggggaatatgggaacattcatcgaccgatactaagatcatggtctcaaatttcggtaggtcttctaaatatctgaagtttagaaaatgcacagaattgacatgttctaaagaatatcaaatccagagagtttggtaagacgttgagtgtcatatctaggaactttcccttacctaactccttcatatcaagaaccatccatcctgtttcaaaaaaa

SEQ ID NO: 31864 - DNA, 597 bp, Setaria italica
  Peptide Sequence Number=SeqID_97838
ttcagatctcgggggacatgatcccgtcgagtgcaagaactttgacaggtgcttctcctacctcgaggagctgatgatcagacgggctgctaggattctcccagtgcttgcagggctccaaactaggtgctcaccttcactagacaagctaaggtgaagtgcgtgatagttatatccgggggggagatccaagccaccgcaagggcgttcaacagcaagatcatgtgcccgtcgcttcacttcattggtgaccatgactttgcgaaggttcacaatgaagagcttgtagaagcatttgtggatccacttgttatacgtcatccctgcggccatactatacctaatctcggtgagagtatttcagcttggcgcgtatttcatgaagagaaaacagaagttctgagcacacacttgacaatctcagcagtaaagagtaaatacgtcggtgaatgagtagactcgatgtatgaagcgatttttctcaagcaaatgatgcaaccaagcgaatcatttttgttgtacacaactaccagctagcaattaacaagacatgcaacttacaaaagagtgtttgatttgttacaatcaaaaaaaaaa

SEQ ID NO: 31865 - DNA, 569 bp, Setaria italica
  Peptide Sequence Number=SeqID_97839
aaacgtaaacaaaagggaacgttaacaaaacaagacaaagaatacaatgtgcccgtcgcttcaacttacaattaggtaaaaatccttcaataacttcttcacactctctctgtctgtagaagaccacagatttaatgattcttggttgtctcttgtctgtacaatttttgtctgtcgacttcagtgtgtggtgagtgtccattttcctgctagcgttgtttattaaatcaatggcgataggggaaacaaaaaatagtttcgaacgcctgaacttcttcagtcgtcattactttctgctggggtttcaactcctttcatgtaaaagtcgtactcccatgttccaaacgtgctctcttttgacatacggaatactattgtgcaggtgaccatgactttgcgaaggttcacaatgaagagcttgtagaagcatttgtggatccacttgttatacgtcatccctgcggccatactatacctaatctcggtgagagtatttcagcttggcgcgtatttcatgaagagaaacagaagttctgagcacactctttactgctgagattgtcaagtgt

SEQ ID NO: 31866 - DNA, 279 bp, Setaria italica
  Peptide Sequence Number=SeqID_97840
ggccaaaccatctcggcttccatttctttctccctctctctccgtctgcgcttcgcttcctcctcgctcctcccaggcctgcgcgagatgagtaacggggcctggtgaatccaatctttaatgcgctagttactcccaggcgtccacctcggccaaccacccgcgcatccttccttcccctcgcttgctctgcctgccaaaacccaactcatcttctgcccgcctctgctctgctcgttttcccccctcccctgctctcccctgttcctccccacgccc

SEQ ID NO: 31867 - DNA, 381 bp, Setaria italica
  Peptide Sequence Number=SeqID_97841
tttctcaggaggtttttaaagtaggaaggagggtaggaataccctcttcaactatcttttagtatcttttagctggcatccgggaagcaggatcccactcaaatttgtcaatggttagagctttctttaattaagcttagcagttgccatccttgtcagctgtgcaaccatgcttcatccatgatgtgctcaagatgctggtcagtcataaatgcatctcacgacgttgagacggagaaccattgcgttagaaacatactaatcgtggcgtgttcagagtcagagtgcccacaattaccaatttaccatcacttggatcatgcccacctacccgagtggaaaccttgtttatcactgggcccgagatctgttgctggataa

SEQ ID NO: 31868 - DNA, 1254 bp, Setaria italica
  misc_feature (938)..(938): n is a, c, g, or t
  misc_feature (1184)..(1254): n is a, c, g, or t
  Peptide Sequence Number=SeqID_97842
aaactaaggaagaatacagcaaactaaagaaagcactggatgaactgagagcctcggaggttgatgctgagtacaaattgcaagatacaaaagagcttgccaaggagtgggaaatgaaggtgaaagcattcaggaaaaggctcgatgacattcagacaaatcttgctaaacacatggaccagatccaaaaggatgctattgatcctgagaaacttaaagtgacactaagagatgaacaactcaatgatacatgtgacatgaaaagggccatggagatggtggcgttgttggaagctcagcttaaagacttgaacccaaacctggattccatagcagagtaccgcacaaaggctcgcttgtacagcgaacgtgttgatgagctaaatgctaccactcaggaacgtgatgatcttaaaaagctgcacgacgggttaaggaagagaaggttagatgagttcatggctggattcaacataatatctttgaaactgaaggagatgtaccagatgattactcttggaggtgatgctgaactggaacttgttgattccttggacccattttcagaaggtgttgttttcagtgtgaggcctccaaagaaaagctggaaaaatattgccaatctatctggtggtgagaagacacttagttcgctggctctggtgtttgcccttcaccactacaagcctactcccttatatgttatggatgagattgatgctgcgttggactttaagaacgtatcaattgtgggacactatgtgaaagataggaccaaagatgcccagttcatcattataagcctgagaaacaacatgtttgaactagccgacaggttggttggcatttacaagacagacaattgcaccaagagtataacgatcaaccctggtagctttgccgagagcatgaaggtagtgtagtgttgtcctgtgggngcttcagctaaatgtaatcttttagtgcccgcatggaaccgaggttcctccggcattgtgatttgcgatgcagtttgggaagttttatgatattgtaaatttaggatcgagacatttggtcacctgagatgtgactgtatgtatatatatatatatgtacttgttgatgtacgaattgggattcgggagtggataactacgctaacttattcaagcatttcgtttcagacagctcattttctaccnnnnnnnnnnnnnnnnnnnnnnnnnnnnnnnnnnnnnnnnnnnnnnnnnnnnnnnnnnnnnnnnnnnnnnn

SEQ ID NO: 31869 - DNA, 172 bp, Setaria italica
  Peptide Sequence Number=SeqID_97843
taaggacaaggtgctcctcctcgaggaccctgccctcaaggacatgaaggcccaggccgtgcagagcccgtatcagccttttatcagggtgtaggcctggctcggtccggcttggcccgccatagccctaactgatagagtaaagaagtatcatccagctgctcttggttgg

SEQ ID NO: 31870 - DNA, 528 bp, Setaria italica
  Peptide Sequence Number=SeqID_97844
gatccaaatatttttagaaaaaccctctaaattggatcgcgactaatccgaatatttacgtatcaccccctaaatcggatctcgcgatccgaatattttcagaaacacccctgaaaacggacgcacagttttgtagcgatcaccctcgccggcgcagggggcacggcgagcaccggagggaggaactggacgccggaggggggacgtagaggaggcctccagcggcgcggagctcaaggcggcggcggaagctcgggtcatcgaggatggccgatggcgcggcgcagcggacgactgtcgcggcgtcgtcggagcgcgcgatgatcccgagcgtgagatctgcgttcaggggctccatcgccgcgtcgctcgtgccggcgacgttgggctcgcgtctggcggactcgtggctcaaagcttcccgctctcttcttggtgatgttgcccgccggcaccgacgcaccggcctccccggcgccaccaggacaccggccggcgatatccgcgaactgcggatttcgcttcgat

SEQ ID NO: 31871 - DNA, 310 bp, Setaria italica
  Peptide Sequence Number=SeqID_97845
cgcggcggttcgaccacggttcagtcctcccgggagccaccgcagccaccgcaatcgccgttgaccgggtgaaggcgccaacgccaacccacgccgatggcttccgccacctccctcgccgccgcttccgcgcaccaccacacccgccactccgcccccttccccgctcacgcgtacccgcagcaaccccgccagtgcgcccgcctccgcccctctcctcgcccccgccttgtcctccgggcgtccgcctctgcctccgccttgccggcgcccgaccacgcggcggaggagctggagcggtgcctcgccg

SEQ ID NO: 31872 - DNA, 1932 bp, Setaria italica
  Peptide Sequence Number=SeqID_97846
caacattcagtcttttgtccagttctctaagtccctttttgaagttctcaaaattcactctattctcaacttctttgtcatccacaacaatagacaggtggcgcacagaaattgggatttctatggacctcacattggaactatttatgctaatacactcgtatgatgaaactttcactgctaaattatgtagtaggtcatgtacaacataataaggagtaccatcatctttctcgttcctttttaaaaatccatgattaaccaagtcaaccaaatagctcctagcaatatcttcagttcttttattctgaccacatgtgtgtaaaatatctagtcctatccacaagtgaattagctcgtcattaagaaattcataatcttcaggaaccaaagagcaatatgaaaaacattgttgcagatggaaaggaagataatcatagctgagctttagcgctggcataatatcattgtcgttagtctgtagttcccattctttgctttctagaacacttgtccagtgatccaaagtaagttgttttcttagtaatcttcctacggtttttgctgcaagaggaaaacctttcaagttcctgacaatctttttcccaacaagacgtaattccaaacagtctttccatggctgctgataaccgaacacacatgcttcaaagaaatgcatgaaatcttcatctcctaaacgatccatttgtactgagcaatcaactgtcttaaccatttcagccacctctggaattcgagttgtcactataaccacattaccttttttctccccctcttccaaatggagctattagttttttccactcatcctcttgacatgtccacatatcatccaatacaagcaaaaaacgtttagttttcaatctctgttcaattagctcttgggcactactgttttccttttcattgtcaactttagggatttttctcacaacttcttgtaccaacctgctcacattaaaattaagagatacacatatccaaatcgtgacctcaaaatgtttcttcacttcatcatatacgtgttgagtgaaagttgtctttccaataccccctggaccaacaattggaagcaccacaagatcattggcaaaatattgtccatcggtaatgccatcgataagactccttttctgattatcccttccatacaacttaggctctataatgtctggagtcgtttcgggacggcccatagcattcttttgggttgtggtattggagcctaacaactctagcttaagaatggcagagcccaacaactccatatcaagaatggtagagaccttggcagatacatgctttagtttctctacaatgtccttcatctttttagatatatccaccctatcaaacttcaactttggtgtttgcacaacatgttttccctctttaatcttggattggcaagcactacagaaggtgccagcatccaacatgtcagagtgagcattattgtggacgcatggaaacgagctgcatgttaggcgtttaccgacatcatgtgcagcctggcgagcacaggaagcgacctttgacatgcacccgctatactggtcgctctgggtggtgggtgattttggtgttgaactgatggcaagcctgccacacgagcagatgccagagaggcatccttgccttgcatcatcttcattctcgtcatcaggatcaccacggctcccttcacgtgagcctgagcagatcttcagcttactagcaatagctctggcagtgtggcgtgcgttgagagtgagaccgtgaatgcagcccccctcgtgcacgtcggcagcatggttcttgccgtcgagcatgtcctggatacggaagtactcgagctcgtcgagcacatcgtcggcgccgtacgccagctgctgcagcttaagtagcatctccttcagcgcagggctccgg

SEQ ID NO: 31873 - DNA, 522 bp, Setaria italica
  Peptide Sequence Number=SeqID_97847
gctccctggaaaattaaaaacccagcatcacatttttatatgcgacatcataacgaaaaagatatatgcattatgtgtgcgaaaaaggtcatgaaaaatatatagcatgtaggttcaagacaggaaacccctgttgtaattaaacttccaatacttaagccaagatggcgcagagatcaagcggtaaggctgtagtcaaactgaaccctgaggtgaagctagcaaattgcgactgagaagatctgagacaagctgaatgaaaatcaatttaccactaaatcaaggtgactgagaagatatggggccaaacatacatctgacagcaaaccgatttaccactaaatcaaggtgaccccctattttgaaatttgaaatttccatggtcaagacaaaatagcttaaaccacagttgttgtaaaagaacatacctaataggtaacatataactattataactgcaggaaactgatgtgccagtactggtagaaaaggaatcgatcccaattattgttgttccatacg

SEQ ID NO: 31874 - DNA, 368 bp, Setaria italica
  Peptide Sequence Number=SeqID_97848
gagatgttaattatgcaactaaagacttcagaaaagcctttgttgacggaaacttcttcctcaataattgatttatcaagaattcggactctattgaactcatcctctagtagcttgagctgtgcatttaagtcgctctggtcatcacgaagttccatctcgtcttgtaagtcatccaatttattcttgaggttctcattctcttgtttcagttgattgatttgtgctgactgttttgggaacttgagctccaagttgacaactttatcaacaagttcatcaacattgtctgcaatctcctctgcagaggattcagatccgttggcaaaaaagttgtcaattttttcatatatgggctgcaactcgaa

SEQ ID NO: 31875 - DNA, 306 bp, Setaria italica
  Peptide Sequence Number=SeqID_97849
ctccagacttcgatcgccacgccatgtctgatggagcaggagcggggggtcgatggccatgggggccgtctacggggatcctgccgcggctgatcacttcaccgccttcgaccacgacgacttcttcttccagagaacgccgtacgccggggaaggcagcggcggcggcgatgggctgacgacgccgtactcaagcatcacggactacctgcagggcttcctggaccctgcggggctcgctgcgcacctcgacgtgccgtgccggttgggcgatgacgacgccgtgaagcaggaaatggaggtgcg

SEQ ID NO: 31876 - DNA, 372 bp, Setaria italica
  misc_feature (351)..(351): n is a, c, g, or t
  Peptide Sequence Number=SeqID_97850
atatggatgccaacaagagcgaaggaactgactctcactcttctatgtgtcaggggacatgctatacttccacagaggctgtaggatccgctttgcctgatgggcatcaccatctttcttcgtctttttctcaaagattggacctgcagatggatgtacatgaagggtcaggtaattctatgtttgtggatgaacaaacgctttgtagcacatcaaatcaagaaaactctatggtaccatttggtgttgcacaggaaatgcctgtctctgtgctatcaagtgtttctgatgctgagcagaaactgcatttaatctctgatgctgacagtctgaaatctgaactttggaaanacgtgtccttgcaaactctaa

SEQ ID NO: 31877 - DNA, 236 bp, Setaria italica
  Peptide Sequence Number=SeqID_97851
cgttttcacagacgtacaagttcgatttcctgatcctctgcgttgggaggtacgccgtcgcgaagcaccctaagtttccccacgaagcaggccctgaagtgttccacgggcaagtgctccactccatggacttctcgcgcatgccgcacgccgacgccgatgagctgatcagaggcaagcgtgtcgtcgttgtcggcgccggcaagtcaggaatcgatatcgtcgcgcagtgcgct

SEQ ID NO: 31878 - DNA, 695 bp, Setaria italica
  Peptide Sequence Number=SeqID_97852
atgtgatgtccaatgacctccgaaggcatgcaagcatcccaggagttttgtcaccaacacatagtcgtggttctcatgattctggatcggaacataatagacatagaaggcagcttacaagagagagaagtagcagcagccttacaaggggtgaccggcaggagggagaacagcttgtcattaatggtgctggtgtcattgagaggattatttccaaggttgtttcagaacctttgcatcttacaggaaggatgcttcaagagatgacagaaaattctataacatatttgagggaggccatttctgatatcatagttgatccaggtaaaagagaacaaattattgctttgcaggaggcacttaagaaaagatctgacttgaatagtgatatgctgcgaatgtgtccgcgggtgttgatggaaatacttgttgctataaagactgggcatccatattttataaagaaaagtagcagcgttgctacatctaatttggttgacatttttctcaacttgaaatgttgcaatctctcatgccaaagcattctgccagtggatgattgtgattgtaaagtttgtcaaaggaagactggtttctgtagttcttgcatgtgcattgtctgctcaaagtttgactcagcatctaatacttgtagttgggttggttgtgatgtatgtcttcattggtgccacaca

SEQ ID NO: 31879 - DNA, 4326 bp, Setaria italica
  Peptide Sequence Number=SeqID_97853
ggcggcggcggcggcggcttccacgacggtcggtatcgggagtacccctcgccgcgggagtatggaggggaccgggcgatgcaccggtccgagagcttctctgggttccgtcgggagttccccaaggggttccggtcggagcgtgaccgatcgcggcgggacggtgacggcggctcggcgtggcgtcgcccgggaagcgggtggagggacgcagagtgctttgacgagtacagggcaccatccaggctgggagcggcgtcgcttactgcgcagccgcagcgatcgcggtcaaggtcacggtcgcctagtgtgccgaggaggaggtttgaggtcacgaaggcagaaaagttgaagaagcagacggcgggcgtcagtgagatcgaggaaggggaggtcgccccagatgcggagcccaaggcccggcctgctgctgtggagcatcggaagcaggttgaaccaagccgcgctaaggagaagggaccggagcgagggaaggtgaagaaactcgattctagagtcccagcggataagggaactcaaggtaagggagcgactggtgcagctgatcctgacaatgcagggaaggaggaagtcaggagaatcgatggtatgctggcagaagcagggaaaccaattgatgaagggactatgctggcagacgcagggaaaccaattgatgaagggagtgagaagtcttcgatgaaggttgaagaggaagtcagtggaggacatgaagtgcaggcacaagatgtggttactggtgacgcaagtaagtttgggctaagcacttcacccatgcaacaggaagtgctgcaaaggggagtgcatcgacaagaagagaccactaattctgttgatgtggttgggcagagcacttcctctagtatcttgaatgaggttattcaggaagaagcacctacacaagaagaaactgtcaatgatattaatgatgccgaaaagagtgctccatccagttttagtcaaggagtggtgcaggatgaagtgatgatggcacacaagactggcagtgctgccgatgatgttgggaagagcacttcacccgtcatgcggcaagaagtggtgcaggaggaggcattggcgttagacagtacgtcctatgctgctgatgaggtcgggaagctgtctggtatgccacagcaggttcttcaggaagaagttatgaagcaagatggaacttccagtgatgtccataggattgaaaccgacacttctgatgatctgctgcgagaggcaacacaagaaaaaatgacgatgctggatgaaactgcccataatactgctctggaaccggtcagttattctggtatgctgaaggaagcaatgcatgaaggagagtcgatgatggatgcaactggcaatacaactgatgtagcagggcgaagtaattcagctgatgtggcggaggatgcgatgcccgagaaagcagctgtgcaagaaaccaccaatgctgttaatttaactggcgagagcaatacgttcactgggccgcagagagaggtgatagcttctctacagctacaggctcctgagattaaggaatttgaaaaattaactgtagagatggataagccaacagaacatgccgcatttcagcctgcagaagaggaacttgaaatggatcaatgcagaaaaggaggtgcgtcaaaggaatccatgatagttgaaaatgaggcagatgttctggatgaaagtgtcgagaaacaactaacaggatttgatatcgagaccgacgctgatggtgcccgtatgttccatagatcaacaaaagaacatgttggggatagtaaggaagatgctgccagtgcaaatgtgatgacaagggagtccatggctgaagctaaaggaaatggcatagcatttgatgtccttagtaagaaagttaaagtagatcattcaacttcagcgggaaggagtcttgactcagcattgcagcttggcgtggaaccaacggaaacatcaaattctgcttcaactacgcctgtaaagcaggaaaatgacacagtgaagctagggaaacttgatctttcgttgagcttgtcaggttgtttacagaattctgaatttaagtgttcgattcctcaaactgctcgtctagtccatgcagcatgctctcagccattaccatcatcatctttccgcacaaattcagatggtttcgcagcttccgtatcattgaccagttcacaaacatttggtcacaatcctagttgctcactcacccaacagtcattagacaattatgagcattcagtaggtagcaaacctttctttatgggagttggtcagatgagcaatcgcacaggaaggcaagctcagctgtctagtgaatctacacagaaggggagtgctaccccactccttcagagagtactcctaaatgaccatatgccagagactaacactttggctgggataaaagggcataacaatgtgatgtccaatgacctccgaaggcatgcaagcatcccaggagttttgtcaccaacacatagtcgtggttctcatgattctggatcggaacataatagacatagaaggcagcttacaagagagagaagtagcagcagccttacaaggggtgaccggcaggagggagaacagcttgtcattaatggtgctggtgtcattgagaggattatttccaaggttgtttcagaacctttgcatcttacaggaaggatgcttcaagagatgacagaaaattctataacatatttgagggaggccatttctgaaatctacattgagttagaataccaaggtaaaagagaagaaattattgctttgcaggaggcacttaagaaaagatctgacttgaatagtgatatgctgcgaatgtgtccgcgggtgttgatggaaatacttgttgctataaagactgggcatccatattttataaagaaaagtagcagcgttgctacatctaatttggttgacatttttctcaacttgaaatgttgcaatctctcatgccaaagcattctgccagtggatgattgtgattgtaaagtttgtcaaaggaagactggtttctgtagttcttgcatgtgcattgtctgctcaaagtttgactcagcatctaatacttgtagttgggttggttgtgatgtatgtcttcattggtgccacacagattgtggcttacgccactctcttattcgaaaggggcaaagtgcttcaagggcatatggcactactgagatgcagtttcactgtgctgcctgtggacatccatcagagatgtttggttttgtgaaggaagtatttcgaacatgtgcacaacattggaggatggagactctgattagagagctacagtatgtggaaagaattttttctgcaagtgatgatgtaaggggtaagagggtcaggaactttgtgaagcagatgctaattaagtcggaaaacaaggcttatcatcccgaagttgtcaaatgtgtcattgcattcttttctgatgatgatactatcttgggcatcaatccatcagtaccactgaaaggcattccatgcagcattgctgaagctatagatgggattcctagttcaagtcggaaggcagcatggacaccatttaccttagagggacttccagttttagacaaaacaaccgtgcagtctaccacagggagcccatctctgcatagaaaatcgggtgaagctgagtttcagacaattgataataagaaggctgtcactgatgaactggatagcctgatcaggttaaagcaggctgaagcgtatatgtaccaggaacgtgcaaatgatgcacgtaacgaggttgacaatctgaggcgtatcattatggtaaaaaatgcacgaattgaggaagattatgccactcaaattgatgatcttgacatatacgagttacaagagcggcgcaaacgaaagattgaagaactccaagtcattgaaagaacgcatcatgaatttctcaacatgaaaactaggatggtagcaagcattagggaattattgtcaaaaatggaggcactgaaacaaaatcgaaccatatgaagttatgaactgaggttactacttatggttcgttgcaggaatcaaagtttggtcaacttgtgtaaggaagcctgcacatattgttgtaagttttttcttttatatctattcctgcctgtctaggactagcttctggaagattattctttttctcaactattgtgatagatccttcacttttcgatcctttcagataggcaaaatgatgagctgtaaactctagatcttcctgtatataatctcaacaattacctttatgcacgtgtattgtttcctggtaaaaaa

SEQ ID NO: 31880 - DNA, 874 bp, Setaria italica
  Peptide Sequence Number=SeqID_97854
cggcggggcccggcctcgtcaagacgctcacgggccacaccaactacgccttctgcgtctccttcagcccccacggcaacgtcctcgcctcggggtccttcgacgagacggtgcgcgtgtgggaggtcaggtccgggaagtgcctccgcgtgctgccggcccactccgagcccgtcaccgccgtggacttcgatcgcgatggcgccatgatcgtgtcggggagctacgacgggctctgccgcgtctgggactcggctactggccactgcgtcaaaaccctcatcgacgacgagagcccaccggtgtcctttgccaagttctcgcccaacggcaagttcgtcctcgctgcaacactggatagcaccttgaggctctggaatttctcagctggaaagtttctgaagacatacactggccatgttaacacaaagtactgcattccagcagcattttcaatcacgaatggcaagtacattgtcagtggctcggaggacaaatgtgtctacctttgggacctgcagtcaagaaaaatagtgcaaaaactggaaggccatactgatactgtcattgcagtttcgtgccaccccagggaaaacatgatcgcgtcaggagcactcgacaatgacaagacagtgaaagtctgggtccaaaaggaggatcaatgagctgcctgatatatgcttatctggttcgattgtcatgtggtcctgactaatggtaagtaagctatttagcttcccaagcaactaatgattgctgcagtggagaatgtaattctgctgggatgtgtaactgagtgtttgtgttgtctgctcagcagcgcggcgattcaagtaactgaattgttctgtagatctgttcctgggatgatggg

SEQ ID NO: 31881 - DNA, 795 bp, Setaria italica
  Peptide Sequence Number=SeqID_97855
tttttttgctgaaattcctacctttaaatttctcaattgattcttatcaatataggtttggattgttgtcttgtggtcttacataagcagttacctaacactagcagatacttaccattagcagatgctaattcctcttgttttatacagattgtggatcttgtaaggaaagctatgccccttgcactgacacctgagaatgatccggggaaggaagagctcaaacagctccaggctcaacttgaagacatcaacaagctcgcgcacaagcaagtccggcgcatcctctggtctggcctgggtttcctgatcacccaggtcggcctcttcttcaggctcacgttctgggagttctcctgggacgtcatggagcccatcacgttcttcacgaccacgacgggcctggttgtggggtatgcctacttcctcatcacgtcaagggacccgacgtaccgtgacttcatggagaggatgttcgagtctcggcagaagaagctgatccagaggcagaacttcaaccttgacaggtacctggaactccagaggcgctgcaaggatcccctagagaaggtgtgcggcacgtccaaccctgacatggctcatctccatgagctatccatccacaaatgacaaaacaattcaccattgcttcattacttctttcattctctactagcgatgatcgcttctagcaaaagtaaccggtgtttcttgcacttgtgagatagacctacttcctctgcctgggacctttttccacggtcccctcctatgcagatgtgtaggtcagcttaa

SEQ ID NO: 31882 - DNA, 258 bp, Setaria italica
  Peptide Sequence Number=SeqID_97856
aagacactggtgttctacatcggaagggcctccccacggcaagaagactgactggatcatgcacgagtaccgcttggacgaagagaacgttgagattcaggaagatgggtgggtggtgtgtagggttttcaagaagaagaactatcagaggggcctcaacccggctgacatggcagcactggacgacgatgagctccagcccttcccagttccccgggtccccgccgccatgccaacagaccacaagcacaaccctca

SEQ ID NO: 31883 - DNA, 329 bp, Setaria italica
  Peptide Sequence Number=SeqID_97857
ttgcccgaggcagcttcctgaattttctcagctgttctcaaaatgccaacattgttcaggagatgaatccgctcaaacaaagggctaaggacagttttcttgttgagtagaatcccaagttgctcacatcggcttgatagctggttgataaactttggaacaaatgattgatgctctgggctgccaccaaagcttatcaaagcccagctcttgatcttggaaccctcagcaacatggctgtccatcaaattccattgccgatcatatctgtctggtgttatgtccttgatgccgccctccattgccgagcttcagttttggtggcaaga

SEQ ID NO: 31884 - DNA, 517 bp, Setaria italica
  Peptide Sequence Number=SeqID_97858
ggtggtggttgaaggatctgaacattggcccctccgtagaaggccagcacggtgacgccggcgatgcagcagaggatgcccgcgaatttcactttgccgtggaacctcgtcagtttcagagtctccatcccgaatataacggctaggatgaatgtgaccaccggctggacgttgtacagtgctgacgacgatgtagcagaagcgtagttgaggccaaggttaaacaagacaccacatgctgtcaccccgtatagggcgtgtatgaacatcttccacccaatcttgaacgtcaccggcttagcttttcgcctctcgagaacgaaggcagtagggatgagcaccagcgcggccgtggtgtgccggtagaacacgaacaccagtgggttcatgccctgatccaaggccaccttgctcatgacatgcatgccggagtacataagcctgatgaggacgacggcagcgtaggccttggcgctgccacccatcttggcaagcatattggtagtggtagctacac

SEQ ID NO: 31885 - DNA, 1231 bp, Setaria italica
  Peptide Sequence Number=SeqID_97859
ctcccctgtcgcattgtgaagggatgcaagtactgcaaagctggtgcagccacatcttgcttggtgcgctttggccatgacagggaatatctaattgatttgatagggaacccaggattcttatctgaaccagactccctcttgaatggactgtcatctatctcggtttcttcaccattgcgcccaccaaaacataactcagttgatattgcctacatttgcaaatcgttggccaagcaatatttccttgattgtcaatcgctaaatctcatgttcagtgatccagcagctggaacagttatcgacttagatgaggctatgggatcaaatctgggtccaaacacatcacatggaacaaacagtgattgtcaagctacctttcctcatcttaatgctggtgcacaacttggtagtcaagatgaaaattttatgatgcaaaggagtttcccagaggatactcagtctggactaagtgatccctttagtgatatgtctcttgacatagaagacttgatcatcccatggagcgagcttgttttgaaagaaaaaattggtgcaggttcttttggtactgtgcaccgtgcagattggaatggctcggatgttgctgtaaagatcctaatggagcaggacttccacccagagcgtctcaaagaatttctgagagaggttgcaattatgagaagtttgcgacatccaaacattgttcttcttatgggtgctgttactcaaccacctaacctttcaattgtgactgaatacctatcaagaggtagcctgtacaggcttttacacaggcatagtgcaagggagaatctggatgagcggcggcgcttgagtatggctttcgatgtggcaaaagggatgaattatcttcataagcgcaatcctccaatagtccaccgggacctaaagtcaccaaacctgctggttgacaaaaagtatactgtgaaagtctgtgactttggtctctccagattgaaggcaaacacttttctgtcatctaagactgcagcagggactcctgagtggatggcaccagaagttctacgtgatgagccatcaaatgagaagtctgatgtttatagctttggtgttatcctatgggagctcatgacattgcaacagccatggagtaatttaaacccagctcaggtggtagcagctgttggtttcaagggacgaaggcttgagattccaagtagcgtcgacccaaaagtggcagcactaa

SEQ ID NO: 31886 - DNA, 252 bp, Setaria italica
  Peptide Sequence Number=SeqID_97860
ggcctaatcatttgcgtgtcgtcgctgctcgccggcgtcatgtcgccgtcctgctaccgctgtccgaagtcctctccgtcatcttccttcacgagaagttcgacggaacgaacggcattgccttggtgctctcactgtggggcttcgtgtcctacctctacggtgagaacgcgcagaagaaactggaggcgaagaagatagcgccgcaggcttgccattgagaaatgtatgcgagacgtcgtcttaaaagaa

SEQ ID NO: 31887 - DNA, 167 bp, Setaria italica
  Peptide Sequence Number=SeqID_97861
ggggtacggttgcttgcttatatatgactatatgagatgttaaatgccacttgattcatgtcttctgcctgcctgagattgggatctaagttcaccgtcattctagctaatgttctcatggtcattgtacaaaaatactgatcaatatgttcctgttaagaaacttg

SEQ ID NO: 31888 - DNA, 718 bp, Setaria italica
  Peptide Sequence Number=SeqID_97862
aaatcataaggatttcgatacaaatgacccatatccaaacaggccctttgtaatgcttgtggacttacctatacagccatgttcttattccacttgaaattaattgctgaatagatggcagcatagagacttgggcatctttccaattttcaggagaaatgatatgactggtgctcagaaagcatatatgactttgttaactaaccagaaggctaaattttatatgaaatacttgaaagaatatcagttatgtttctttcacctgtcaatccaaccatggctgcttcaatcctgtggtgtttgcatgaaatgctctctgcacctcttggcggttcagatatgatcgcatatagtaactggcgcaggggtcagtgttggttacctgcaacaccatacaatcagtttgggagaagtgaatttgtttaaaatctgcgagatgacttttaccgaggcatgatgctgtcggggagcagaagcatcccagcagaaggatgcatagatgttggactgatcaatgaggcccttctcattattagctgcttctatcgcggttctacagagtcctgtgtatgttccattaaaaactgcaattttcctggactgctttgtgagtttctttggagatcatagcatgtgtccagtagtaatcgatggtcgctcttgtgttcgtgtcatcattgagaatagtgttgcaagctgtggtatgtagtggccacca

SEQ ID NO: 31889 - DNA, 763 bp, Setaria italica
  Peptide Sequence Number=SeqID_97863
atgtgtccagttagtaatcgatggtcgctcttgtgttcgtgtcatcattgaggtacgcatttccaatagcaattcctttgagattgatcatagtgatgttcatgattttgttatttgacagaatagtgttggcaagctgtggtatgtagtggccaccataactttcaccagttataaagaagctgtggcccttgtactccgggaacctctcaagccagttgatgaggaaagtatatgcatctgctgtggtgctcctgtcaccagtgttattgtaatctgatgttctgttcgaatatgagaaaccaacaccagcagggctctcaaggaagagcatgtttgccactgtcatccaggaatgatctgtcagcacagaggtattaagagtgttaactgccatatgtaaccttgtgggaatcagcctaccattgttccaggcatatttgtttctggataatgtcttgttatctctgttgacgaagaatggtccaatttcaagcatagcacctcccagagaagaacaaccaggccctgaaattttaaggatctgccaagcaagcagaagctaccatagcgactgaaactttacatggttcacgtcaattgacccacgccagaaattgaccggaatctgtaaagttaaagggcgaatgaatcaacaatcaattggccttgcatcagcatcaggtatcttgttctcttctccttttccagcactgtatggcaccacagattcgactagatatccattgaagtgcactgctgt

SEQ ID NO: 31890 - DNA, 1894 bp, Setaria italica
  Peptide Sequence Number=SeqID_97864
tttttttgccctcaaaaaaaaaagcatgcttaatcgtccaaggctggacaaaaactgtgacgagcgttacaaaatttggcatttacaacttacaacgtttgacctgaacctactactggtagtttacaacatttacacccagacaaaagggttgtgtgtatgctctgaccacggagagacgaagagcggtctgaaagatgcggctttcttcgagctttcgtgcacgagaacgctggtccaactctgccccagccgagttttcttgcacgcacgtatatgtattatgtacatcctctttcatgcacgtcatgtttgcttttcttgtcgcggagtcgctggtgctcgctgcataagcgactccactatcttcttgggcctctgctcagactgttcttttgagacacgaagtgccatgaactgcagtgagctgctctgaacttggtagatgtagcatccccatgggtaggcatctgctgatgcccatatgatttgctcctcatactcggcagcctctgcgagtctctcatccacgcagaaagcacagtcaagagggggctcctcaaaagcggacacagcaacgcacccaagagctacgtagccgccaggtggccttggaagccatattgatacaggactcttgtaatcctcagcacagtttctccaaaccaggtcgtagcccagaggcagtgcaaaatttccattggcatttttgtagacagcagcaagttgcggtggatgggtgccgacatgagcaacatctccaattgagatatacccattagggcacaaaggcctccagatgctaaacacccttccatcatccgcaacctgcttggcaactagtttacatcggctccgaatttctggttcactgctccacattttctggaagttaaccgtgtggttcatgagccgttgctcaacatcactagaagttcctctcgagcttatcaaagacctagaaagactgtgggattcccttttatcatcatctgatgcaaaatacacatggcgctggcctgatggaaccttcaagggtataactttcattgctgcctggtgagatctccacattttccgaactgacgaacaaagtgaaagagcctgaggttcacggtcttcatcaacgttgcacttaataagcctgacaaagttctcagacctcctgaaattttttagatgtatgatcacatgcgaaggcctctgatacccagctttcgctagctccaatgcaagtacttcttcccaaggaacatcccaaagtattttggaaggtttcttatccattttatctagatccaagcactgaagcagtatcacccgcttgttagttactaaagcgatcctctggtttggcaaaataaaatggtcctcatagtaatcagaccatgcatacttagaaggttctcgaaataaatccgtgcatgcaaaatatctgcttgcttctgccaggtaaagggccatctgaccagcagcttcaactttgtcatactctcttactataccatctcggtggatagcacgaggatctcttatcctctgggggacagatttgttacttagaatgttgacgcatctcataaaactagcaccaattccgtcaactgtcagcgagaaaaaatccagagccccacttaaaggctgtacaatgaaacctacaaaagcacggccaagaccaggagcaatgcctataagaccatactgtctggcactctcaactggctttcttaagacaccagaaaccccaaaagccaaaccctgagcaaatgcttctgtcccttgaattagtccatcgccaacaccagtgatcctccttgaccagacctgcatcacattccacttaagtgtttcactgagtcaacagaaacaaggaataaaagaaaccatataagtt

SEQ ID NO: 31891 - DNA, 169 bp, Setaria italica
  Peptide Sequence Number=SeqID_97865
tatcatcctcggctggttcatcgctaacaaggggcaacagcgccagcgcctgcttccttcccggccgccgtcgacatggctgctcaagaggagaagactgctacggtcaagacagaggagccttcgccgacggcccggccctgcgcgtcgcccctgctgctggctgctg

SEQ ID NO: 31892 - DNA, 1444 bp, Setaria italica
  misc_feature (1440)..(1444): n is a, c, g, or t
  Peptide Sequence Number=SeqID_97866
ccctcgcgtttcctcctctccacagcagcaccttatcgtcatcctcggctggttcatcgctaacaaggggcaacagcgccagcgcctgcttccttcccggccgccgtcgacatggctgctcaagaggagaagactgctacggtcaagacagaggagccttcgccggcggaggagcagcagccagcagcaggggcgacgcgcaggggccgggccgtcggcgccggccaaccccttcgacttctccaccatgatgaacctccttaatgacccgagcatcaaggagatggcggagcagatcgccaaggacccggcgttcacgcagatggcggagcagctgcagaagacggtggtgtcaccgcggcaggcgccggcggcgaagcaggcggtgccccaggcggcggcggcgctggacccgcagaagtacgtggcgacgatgcagcagctgatgcagaacccgcagttcgtggcgatggcggagcggctgggcagcgcgctgatgcaggacccggccatggcgacgatgctgggcgggctcaccaacccggcgcacaaggagcagctcgaggctcgcatcgcgcgcatgaaggaggaccccacgctcaagcccatcctcgacgagatcgagaccggcggcccccgctgccatgatgaagtactggaacgaccccgaggctctgcagaagttcgggcgggcgatggggtgtcggcccatcgagcgaggccgccggcgcggagcacgacgaggccgaggaagaggccggcgaggaggaaggcgagtacgaggagtcgtccatcatccaccacactgcgagcgtcggcgacgtcgagggcctgaagaaggcgctggaggatggcgtggacaaagacgaggaggactcggaaggccgtagaggcctgcacttcgcgtgcgggtacggcgagctcaactgcgcgcaggtgctcctggacgccggcgcggcggtggacgcggtggacaagaacaataacaccgcgctgcactacgccgccggctacggccgcaaggactgcgtcgccctcctgctcgagagcggagctgccgtgacgctgcagaacctggacgggaagacgcccatcgacgtggccaagctcaacaaccaggaggacgtcctcaagctgctcgagaagcacgcctttgtataggcgccgccgccaagctgctcatcaccttgcttcatgccttgctttgctcctgtagtcttgctctgctgtgccctgctttgctttctccgccgaaagaagtttcttttcttcagttcggtgtatgtattgagagtctgcatgccggattttgcttgcgtaattaaggtgggaatgggttcgttggatctctactctatggatcgttcatgaggtttttctaaagaaaaaagaagaaaatttttttttatttctaaaaaaagtaaaaaaatttttaaaaannnnn

SEQ ID NO: 31893 - DNA, 245 bp, Setaria italica
  Peptide Sequence Number=SeqID_97867
tatcagatctcgtctccgactccgactcgactcgactccgactccggcaaatgggatccctttatacctatctgtctatataaagggaagggatggattcacaggagcaagcgcgctcgcgtcgccgccaccagcgaggacatcatgggcctgccggaggtgacgggtcgctctcgctcgggggaggagtgcgccgtctgcctgcaggacttcggcgccgacgagaagctgagggcgatgccttg

SEQ ID NO: 31894 - DNA, 870 bp, Setaria italica
  Peptide Sequence Number=SeqID_97868
cttgcatgatcaatgtttttagccctttaatatctcctttcatattgctggccccatcataaccttgacctctaatttgagtcatagtcaatccatgactaacaagtaaaccctcaatagcttccttaagtgacgaagaggtagtatcatctacatgaacgactccaataaaatgttcacaaggccttccaagtttatcaacataacgcaagcaaagagctagttgttctttatgtgatatgtcactggactcatcagctaaaattgcatagggctcatcatcaagttcttcaattattttctttctagtttctatggcacaacaatgaataatttgtttttgtatctctgggctagttaaggtgcaattacctggagcattattcaagacgtacttgttcacttcatcactatttcctgcaagaaacttcaaaagttcaatgaaatttcctctgttgctagactcttcattttcatcatgtccacgaaatgccaatccttgatgcaaaagaacttgatacatctaagtgaatatgtcaaccttttcttataaagacgaagatcctcatcagtccacttctcaatgtgataatcaattgctaccttgggatttataaaactaatgtatctttcctgagctgcattgtgtgccatagaaccactatgtttgagaagtgctttgtttcctatattccaattattccatcctccaacaataaatgtatttgacccagcacccttcttgaacaagtagcatataaagcaaaacgcagaatccttcttgatactatattcaagccactcatgattaataacaataccaataacaataaattagaaattaggacgaataccctaacctaccaaata

SEQ ID NO: 31895 - DNA, 494 bp, Setaria italica
  Peptide Sequence Number=SeqID_97869
aagtgcaccatttgcacacatcaagttgtgtttcttggttttgttgtctctggacaagaaattcaagtgggcgaatccaaggttgcagcaatcaaggaatggccaacacctgagaatgtaagccaattgagaagttttcatggccttgctagtttttatagaagatttgtcaaagatttcagcaccatagctgctgcattgaatgagttgacgaagaaaggtgttgtgttcaagtcgggtgagccacaagaaaatgccttcagagaattaaagaagtgattgatggaagcacccttacttgtgttgccggatttcacaataacttttgaggttgaatgtgatgaaagtgggattggaattggaggagtgctcatgcaagatgggaaacccattgcatactttagtgagaagttgggaggagcacaactgaactactccatgtatgacaaggaattgtatgctttggtaagagtacttgaaacttggcaacatta

SEQ ID NO: 31896 - DNA, 597 bp, Setaria italica
  Peptide Sequence Number=SeqID_97870
aattttgattgtggtccacaaatcggtaagtgagagccacaagccaaatgagagagatcaaagaaaagatttttttttattcggataatgttagtcaccaaatcgagagatgtgaggcgcaacccataccaaacattcattgtacttgtgtacaaagacaaattgctttcagctaacaacataagatctcttcctagtgttatttcacatcttttgcaggactacaaggatgtctttccagagaaaacccttgctggactgccaccattgtgaggcattaagcatcaaattgatctcattccaggggctgcatcgcccaatcgtccatgtaccgcaccaatcttgagaagtgcaccatttgcacacatcaagttgtgtttcttggttttgttgtctctggacaagaaattcaagtgggcgaatccaaggttgcagcaatcaaggaatggccaacaccgtcactgctccattaaacgagttgatgaagaaaggtgttgtgttcaaatggggtgagccacaagaaaaagctttccatgaattgaagaaacggttgacgaaagcaccctacttgtgttgccaaatttcacaaaaaccttt

SEQ ID NO: 31897 - DNA, 796 bp, Setaria italica
  misc_feature (759)..(796): n is a, c, g, or t
  Peptide Sequence Number=SeqID_97871
ctgagacctattatatagtaaatgctccatatatattttctgcgtgttggaaggttgtgaagcctttgttgcaagagagaacaagaaagaaggttcatgttttgcgtggttgtgggaaagacgagcttctaaagatcatggactactcatcccttccccacttctgtcgacgggagggctcgggtgcatccaaacgttcatcaagtgaccctgatgactgcttctctctcgaccaccccttccaccaagagctctacaacttcatccaggagcaagcgctgaacatggagctcaccaagcaaggctccttacacgtgaatatccccgaccaggaccctgaggacgccaagatcgtggaggtcattgaggccgagttccacaagctcggtgtgcagaacgggtctgccattggcgtctgacaaagaacagtgcttgcctaaataaggccagcctgatttccgtagacggcgctggccacttctgatccaactgatattccttattagctttgcgacctccattggccattgctggctgtttcctgggggtgatataggggatatatagcaaaatcttttgcggttccatccatgatgcaggactgaggcaagaggactgatactgcatgccactactagatagacataatcacctgtcacctgttgtaaacctgcaatgtgttctcacatatatgctgaacttcgaagatgaagtcaataaaatcatcctagtacctgcactttgaaaaaaaaaaaaaannnnnnnnnnnnnnnnnnnnnnnnnnnnnnnnnnnnnn

SEQ ID NO: 31898 - DNA, 267 bp, Setaria italica
  Peptide Sequence Number=SeqID_97872
cggaaccagggggcattttgcaaatccccgggccggggacatgggcatccggcggcgcgcgctgccgccggtggcctccgctagccccgccgctaagcctcccgcgctccgaatgcttagcttccaagcgcatcattcccagccgcagtccgggagcgggaggtcggccaaggcacgactcgggagcgtgcgccgccgtggccgtcggccgtcgcatcgtttcctcttcacccggaaggccggctccgctcgccgccgccccgcaag

SEQ ID NO: 31899 - DNA, 522 bp, Setaria italica
  Peptide Sequence Number=SeqID_97873
gtcatctgatgagcattgtcatgatctgagatggcatcatttgccatagtttcgtgtttatgtggctttcttatcccattgttagtgactccatctgcttggtataattcatcagttggtgctctagtgctctgacaattctctacagaagaaacaatggaagaatggtccgcatgctttacgccagaaagtgctgtagactgcaggatggaataatttactggactcacagaactgctctcaatatacatatgaaagccccctgacagattgccagaactatacgttgatgctccactactctgagctttattgcataatgttgcagtttctgtatgtatgccaccagaaggcacgccatttccttccttttctacagatgaggtttcatcatgtttaacatcttcttttcgaggttcagcaccagaaggtgatttagaaccagtagcatctaaagccaatgtaccacttttgcacacagtgctgccaactttgttggtgttttgattgataacacttcca

SEQ ID NO: 31900 - DNA, 408 bp, Setaria italica
  Peptide Sequence Number=SeqID_97874
atccagccaccggtgaccttgtaggccattgcacaagcaagtgttcctccatggcggctatgctgatagcaacaggaggagggagctgcaatggcatgggttgttgcactgtcacgttcccggtgccatttcgaggatttagagtgactatcattaagaacaacgataaagtaccacaacccttcagtcatatcaccgtcaaggctttcttaagcttccgtccatataagtttagtattatggatctcttatccgatacaataaatgcaagtatcgttggttcttcatgggcatacctctcaaccgttatcgcagatgaacccaactgtaaaagggcccagttggataataaggcgcagtatgcatgcagcagtagcaattgtatggatgtacagaatggaggctact

SEQ ID NO: 31901 - DNA, 359 bp, Setaria italica
  Peptide Sequence Number=SeqID_97875
cggcctccgccacgcgctaggcctacaactcttcaactttgacatgatccgggacgtccgcgccggtgatcgctatctcgtcattgacatcaactacttcccgggctacgccaagatgcctggatacgagactgtcctcactgatttcttctgggagatggtccataaggacgatgatgtggtggtccaggaggagaaggagagcaaccatgtctccgtgaaataagaccagtgccatgattgcaaaactgcaattcttggatgtctggggactgctgctggttctggatgcagaatttgatcaggggatttagttgggtttcaaccggcagcacgtggaggtcctgcaccctgctgtg

SEQ ID NO: 31902 - DNA, 454 bp, Setaria italica
  Peptide Sequence Number=SeqID_97876
caataacgctctcattggtttcttcgtggatccacgcacagtgtgcccatatcttagaaacccatatggcgcccaacgcccagatccaaatgatccaatggtttccaagggagcctcgcgggctaggtgtccaaattcgtggtccacacatgaaatagttcctatttctagtcccatagtccggttccagcatgtctaatttcgttttctgtggccctagtcacaactaaccgttcatgccctatgataagtactttcctctgaattcaacgctggcattttaggcaattattactgttttgacttttctagatgcatagatattattatgcatctagacatagggtatatctaagtgcataacaaaatctataaatctaaaaagtcaaaacgacttataatttgggacggagaaaatacatgctatctcagacgttagtcaccaagctgacac

SEQ ID NO: 31903 - DNA, 663 bp, Setaria italica
  Peptide Sequence Number=SeqID_97877
tgatcgcttgattcaaagaacatctaagggactgagttgtcatgaattagtatatgcttgattcttttaatggtatatttatttgctagggccacttctcttggttcaattcctgtgctatggttttattatgttctgcttctcttggttcatgctcatgagctgtttttggttcctgagctttggaagttgaagcaaaaatctcaatggttcctctcgctatccggggcagaatttcttttgatgctgctggacgtcgaggaactatattctactagtctgtctcttaaaatactccgttcatcccaaattataggttgttttgacttttctagatgcatagatattattatgcatttagacatagggtatatcttagtgcataataaagtctatggatcttaaaaagccaaaatgacctataatttgggacggagggagtgatgtactttctgttttggttgtactggtacatttttcatggttgcaatttggtgtgttttgtggggtgcttgtttggttactgattgttcttacagtcagacgtcatattttgcagccgtgcattccagaggttcgctgtgaagaccaacagaactcttgagagcctatcgtctaaagctaaggaagtgaagggaaggtaagtacttaattcggtaagta

SEQ ID NO: 31904 - DNA, 650 bp, Setaria italica
  Peptide Sequence Number=SeqID_97878
tcgctctctccgtttccggaagcttcctcctcccgtgcgccatggccggcggcaaccttttcgggcgggcgctgagctacgtcgtcaacgagttcctcgtcgagggcctcgccaacaaccgtgcattccagaggttcgctgtgaagaccaacagaactcttgagagcctatcgtctaaagctaaggaagtgagggaggagctatcggagcaactgaaggaagctcgtggtcaggacgatcacttcaggcggtgaagctggttcgcacattggttcaccaagatgatgctgaccgtgcaatcttttgctgtagttttcctagtacctgtctgggtcctatttattgatgtcattccattgatggagccgttctctggtatcctattttggatgtcactcaattgaaggaacctttgtatagtatcttcagtttctacgcacctgagtatcagacgcagagcagttgatgttcatgtcccttctctcttgtgctgtgaaatggaacacaaaccactggcaaccagcattagtgtactgttaataagatatattggtgttgattatcttactttgtatgtggatttgttccggctggtcttggatcaacatggtcctatatgatatttatcctgtataaaaatgttacgatta

SEQ ID NO: 31905 - DNA, 262 bp, Setaria italica
  Peptide Sequence Number=SeqID_97879
tccggcgtccactcggggtcggagagcaccgtcgcgagcatgcttcgcaaggcagtgtagagcgagtcgcccgtgcgcgcaccggtggcgatggacccgcagaactccaagagcaccggcgccgtccacgccctgacaatgcccttccccgacggggcgtcggggcacaggaagcaccggatggcgcgctcggctacggcgcggcggtgctcgtcgttggagtggtagagctggacgagcacgccgggggcgccgctgcggg

SEQ ID NO: 31906 - DNA, 409 bp, Setaria italica
  Peptide Sequence Number=SeqID_97880
taagggaaaaacaaaacaaatacaagaccaacaaataattttactaagctccacccctggcacggcacctactaccactaaccgattccgtgcaactcgtggggctaaccttatctccatctccatccaaatccaaaatccaaaaagggctaccttttctctcctagaaaaccagttggttcatggcttctctcctagaaaaccactcttctccatcatcattacctcctgaaagaaagagtccagtgaaatgccttcacccttcctgaagaagtaatctcctttaggtccttcgccttctccttgagctcgtagtactcaatttcatcaacagcatcctcagccttctccaccgcatccctgagatgccacagccatgcatctagtgcgatgctctcctccttgatgg

SEQ ID NO: 31907 - DNA, 568 bp, Setaria italica
  Peptide Sequence Number=SeqID_97881
cctttttggattttggatttggatggagatggagataaggttagccccacgagttgcacggaatcggttagtggtagtaggtgccgtgccaggggtggagctagaaaatattgtggctgatgttgtttcccagactaaactttaatccttaaagggctacctgcaagcacatgttcttgcatgagcttacacagtcttgctttcacacaacctctctacatgactacaaagttacgatcagcttaacccacatggctttgcacggcataaataatcaactcgattatagataacagatattgtggaataataatccgtatatgcacatgttattaaaaaagggattttatatgcacaatcatggcagctcgcaaaaaaaccttttctctcctagaaaaccagttggttcatggcttctctcctagaaaaccactcttctccatcatcattacctcctgaaagaaagagtccagtgaaatgccttcacccttcctgaagaagtaatctcctatttgcacgtgagggatgtgggaaatcttgttccattcaaggcttccacgttccgaaa

SEQ ID NO: 31908 - DNA, 393 bp, Setaria italica
  misc_feature (217)..(217): n is a, c, g, or t
  Peptide Sequence Number=SeqID_97882
ccaagaagcctcaccctctcgagctacatgggccccttactaccaccaaacctggtgctgtcacctcgaattacccgctgatgaaggcggcggcactctcagggcagtggtacactgacgctgatgagctggaggcgaaggtcctgggtggccgtaagcagacccctccggccgtcgggcttcaggaaatgcagaggatagtggagcagaaacgggngttggcggagaagcttatggtgcagtacgcgagggaatatgacacggtgaggcgggggcatggtgacctgaagctcctggagatatcagcaaagtctggtacatcagctgacaaggtgtctgcatttacatgtctcgttgaggacaatccaattgcaaacatgagggcgctcgact

SEQ ID NO: 31909 - DNA, 2281 bp, Setaria italica
  Peptide Sequence Number=SeqID_97883
tttcagaaagagggcataatgtctttggcttgctaaaggacagaactgcaggagccttttcattcctagggaactcttcacatgctgaaactctaaacaaatctgcttcagaggaaaggaagcgcaaaacaagagttcttgatcctcaaggtccatttttgcagagatggaacaagatatttgtgatatcatgtcttgttgcagtttttgtggacccattgttcttgtatatcccggtaatcaatggtgaaaagaattgcctgtacttggacaagaagttggcaaccacagcaagtatcctgcgctttttcacagatatcttctatttactccatatgatgtttcagttcagaactggctttattgctccttcttctagagtgttcggtcggggtgtcttggttgagaacacgtttgcaatagggaagcggtatatgtcaacattttttctggttgatttcttagctgttctgcccctccctcaggtatttgtgttggtggtgctgccccatcttgaaggttccgaagttatgaaagcaaaaattgtactactgattattattatatgtcaatacgtgcctcgactgctccgaataataccactttaccttcaaatcacaagatctgctggtatacttacagagacagcatgggctggtgctgctttcaacctcttaatttatatgcttgccagtcatggttttggagctctttggtacattctttccatccaacgagaagactcctgttggagacaagcatgtagcaatcagattggctgtcatcctacattgttatattgtgagagtaatacatttggaaataatgctttcttacaaaatgcttgcgcaacaaatagcagtgccaatccagatccgacatttggaatatttctaccagctctccagaatgtttcagaatcgaagagtttctttgagaaactattctattgcttttggtgggggctacaaaatctaagttctctaggtcagaacatgaaaacaagcactaatacgtcggagaatctgtttgcggtttttgtctcaacatcaggcttggttctatttgcactacttattggtaacgtgcagacctatttacagtcagcctctgtgcgtatagaagaaatgagagtgaaaaggcgtgatacagagcagtggatggcacataggctacttcctgaaaatctgaaggagcggattatgcgccatgaacaatataggtggcaagaaacaagaggtgttgatgaagagggcctacttacaaatcttcccaaggatcttcgaagggagataaagagacatctttgtttgtcgcttctgatgaaggttccaatgtttgaaaacatggatgagcagctcttggatgccatgtgtgatcgtctaaagcccatgctgtacacagaaggaagctgcatgattcgtgaaggtgacccagtgaatgaaatgctcttcatcatgagaggaacactagagagtacgacaacaaatggaggacagaccggcttcttcaactctaatgttctgaaaggtggtgacttctgtggtgaagagctcctcacctgggcccttgaccccactcaagcttcgaatctccccggctcaactaggacagtgaagacgttgactgaagttgaagcttttgctttgagggctgatgacttgaagtttgttgccacccaattcaggaggcttcacagcaaacagctccaacataccttcagattttactcacagcagtggaaaacctgggctgcttgcttcatacaggcagcgtggcacagatactgcagaaagaagcttgaagagactttatatgagaaggagaagaggttgcaagcagcaattgtatgcgacggcactacttcgctcagtcttggtgctgcgctctacgcttcacgttttgctggcaacatgatgcggatcttgcggagaaatgccacccgaaaggctcgtttgcaagaacgagtgcctgcaagattgttacagaagccagcagaacccaactttttcgctgaagatcaatgatctcctcatctttgggccaccctgtaacaagcagacattattcatgatccagccggtataaaattcgtgtgattggatgctacacaagtgtacatagatagaccagatggtctaaagctgtctggtcacgtaattcaatgtgtcttcgattctttatcagcacgctgcatgcaggatgcatgtattataaagcatcccagatttacctcttggtgattttcaaaaaaacaaaacgaacgactgtaaaatgtaaa

SEQ ID NO: 31910 - DNA, 632 bp, Setaria italica
  Peptide Sequence Number=SeqID_97884
atttgattttcatgaatccagtagcatcaaccttatgttgcaagactatttggatttctagatattgatggtcaaagttaaaaaggttttacttgggacaaacctaaaactactatgtttgtgataggagggagtatctaaacttgatcgtctggtgaagtttgttctaagtatcccactttgaatacttgttttctgtatacaaagtgtttggataagttggcagtgaaattagcaatcacatgcccaaatcgtggcataagatagatcttttactattattactgctaatattttacctttttatgtattaaatttttatttactcttgtcgggtttcatctctagctctatcccaacttgcttggttcaaaagacttttgttgttgttgttgttgttgttgttgttgtatcccttggttctacctatcatttggttgatgtttttcagttatgtatttgtgcaggtgatatgttcactgaggaacaaaatgagctggtagaatcagctgcagagatgttgtatgggctgattcatgcacgatacattctgaccagcaaaggactggctgcaatgctggagaaatataagaactatgactttgggcggtgcccacgtgtttactgctgtg

SEQ ID NO: 31911 - DNA, 934 bp, Setaria italica
  misc_feature (887)..(934): n is a, c, g, or t
  Peptide Sequence Number=SeqID_97885
acgaattcttctgcgaggttgacgacgactacatacaagacgacttcaacctttgcggcctcagcagccaagttccttattatgattatgctctcgatctcattttagtacatcgagtcatctcatggtgatatgttcactgaggaacaaaatgagctggtagaatcagctgcagagatgttgtatgggctgattcatgcacgatacattctgaccagcaaaggactggctgcaatgctggagaaatataagaactatgactttgggcggtgcccacgtgtttactgctgtggtcagccatgcctaccggttggacaatcagatatccatcggtctagtactgtgaagatatactgccccaagtgtgaagacatctactacccacggtccaagtaccaagacattgatggtgcatactttgggacgacattcccccatctgttcctgatgacgtacgagcacctcaagccccagaagccctcacagcgctatgttcctcgcgtcttcggcttcaagctccacaagccatgaaaccttgtgtatcaggctattaaagctccacaaagacgcagcatgacgccggggggaggcgggagttttgcaaggtctagagacccttgaagacatatataagagcaccattggcagatcagcggatcggtaaatactatcttgctgcctcactcttgtacctaggctggcacgcctatccaacatttgaatgtagctctaaggacatccaatgttgttgtaacctaactgcagttgttctttgattagtaaaccaagacctcctatgattatgggcgctatttggggcctcgcgctggaaatcgttatctagttcaagctaaaaaaaaaaaattggttctcaataaaaaaaaaannnnnnnnnnnnnnnnnnnnnnnnnnnnnnnnnnnnnnnnnnnnnnnn

SEQ ID NO: 31912 - DNA, 1341 bp, Setaria italica
  Peptide Sequence Number=SeqID_97886
agtacctacctacgacgactcgtgctcccctcctccccgcgcgcaaaccctaaccctaccctcgcctcgccccgtcccgcggcgtcgtgccaatggctcgccccgtgtgagagagagagagagggagggagacggagaccgcggcgtggggaggggagagagagaggggagagatgtataagcaggggggagcggggttggaccggaagcggatcagcgacgcgctcgacaagcacctcgagaaggcggtcgcgtcgccgtccacgtcgagggggtcggcgggcggcggcggcgggcgggaccaccaccgcctcgtcgtgccgtcctccgcgtcgtccatgcccaagggccgctgctccgaaggggagtctgattctgatagtgaagcatcagatgttagtggctctgatggagaagacacctcatggatttcatggtattgcaatttaagagggaacgaattcttctgcgaggttgacgacgactacatacaagacgacttcaacctttgcggcctcagcagccaagttccttattatgattatgctctcgatctcattttagacatcgagtcatctcatggtgatatgttcactgaggaacaaaatgagctggtagaatcagctgcagagatgttgtatgggctgattcatgcacgatacattctgaccagcaaaggactggctgcaatgctggagaaatataagaactatgactttgggcggtgcccacgtgtttactgctgtggtcagccatgcctaccggttggacaatcagatatccatcggtctagtactgtgaagatatactgccccaagtgtgaagacatctactacccacggtccaagtaccaaggcaacattgatggtgcatactttgggacgacattcccccatctgttcctgatgacgtacgagcacctcaagccccagaagccctcacagcgctatgttcctcgcgtcttcggcttcaagctccacaagccatgaaaccttgtgtatcaggctattaaagctccacaaagacgcagcatgacgccggggggaggcgggagttttgcaaggtctagagacccttgaagacatatataagagcaccattggcagatcagcggatcggtgaatactatcttgctgcctcactcttgtacctaggctggcacgcctatccaacatttgaatgtagctctaaggacatccaatgttgttgtaacctaactgcagttgttctttgattagtaaaccaagacctcctatgattatgggcgctatttggggcctcgcgctggaaatcgttatctagttcaaagactaactaattaacctagtttaggttactaca

SEQ ID NO: 31913 - DNA, 222 bp, Setaria italica
  Peptide Sequence Number=SeqID_97887
gttctggcgcttcccccgcgagcccgctcctcgattcgattgaggtcgcgtgagcgcgcgctttggagctccgtgactgctgggatccgggccgattgaggtcgaaacagacaaacagtcgactctgaagatacatgtagcaggaggggcaacaacagagatattaggtctgtgcataagagatgataacaggtctgatcttgagaagccctctataaatcc

SEQ ID NO: 31914 - DNA, 433 bp, Setaria italica
  Peptide Sequence Number=SeqID_97888
gatgtccatgctcatctcggctggggtcgtggcctgcagctccacctggatgccgtccagctcccgcttgaaccggtccttggagctcgcgtacagcatcttgctcctcaccctcgacgtgtccggggaccaggagatgaagaagatcttgctcttctggcagttctcgtcggtggtgaagtcgaagtcgaagacggcgtagcggcactcgctgtcgggcatggaggcggtgaagtcatcgtaggtgtcgcccggctgccccagcctgtccaccaccacctgctgcgtctgctcgtcgatcttgaacgtgatgaaccggaagctccgcttggacttgaggtactggaacttgagcttgcactcgtcgctcacggccatccccgaggccgagttcgccatggtcgacgggtttgtctcgtttccacagccgggc

SEQ ID NO: 31915 - DNA, 368 bp, Setaria italica
  Peptide Sequence Number=SeqID_97889
tagacaaaaccaacggtaccaatacaataagaatagcaagcacagacgaacaactacaaacttttcgttccacaggatgaactggggaggtgcgtatcataggttgacaaaagcgacagtacatggatacagacgagttcttaagaaatggcagttgcggataccaggggactgactctactagggtttttctcacacgaaggaccagttcacgaacatgaaggcaaggcagtgcggggtgtcgtcgtcgctcaggaccttccacgccaccgcctgctcgtacgacacgggccgccccatgctcgacacgcagactccgccagggaggtatgcgaagccctgctgcataatcttggggtactcggtga

SEQ ID NO: 31916 - DNA, 566 bp, Setaria italica
  Peptide Sequence Number=SeqID_97890
gctggaggcatcactggaagcacgagtagtcccaccggatccaacctcaagagtagatgctaggtcaagtgtgcgtgtgcctgacggtggatccgtcttagcatccagtggtatgacacggaagcctgagggtagaagtggtgcgtcatcagcaaaagattcatcaatgggtgcaaagacaagctgtgcacatgcaccagctgcattttcatcaacgccgctgcacaactgcagaagatacatgtctcttgatagaacaacttcatcatggcataggctgtgtccctcaagcctaatgacctccaggaactcttcatgttctaaggtgtgtgcaagtggcagtataacctggctgcccataaaaccgctagctcggagaccaggaactgcatatggactagcccgcagagcagcagcagaataagcatcaacaccaggatcagcccattcagagcgatgctccctcagaaatcgcactagtagagcaggtggcacgttctgtagcagcattgacgcctttgcgcataagatgccacctccaattgccgagaacagctgggaggtag

SEQ ID NO: 31917 - DNA, 2946 bp, Setaria italica
  misc_feature (1)..(32): n is a, c, g, or t
  Peptide Sequence Number=SeqID_97891
nnnnnnnnnnnnnnnnnnnnnnnnnnnnnnnnagcatcaagcattcaagcatacttcatcaacccattcagcatagcacaacatcacgtaaaccatgcatggtcaatgatccatacatctcacagatgatttagtactaggtcttcaacctcacacaaactgcagcagcacttgtcttgatccagaagatacagaaactccaaacatagcaggaatagcaaacatttcaggtctcgagtcattacagcacacatgatacagcagcacataggtgcaatgcaagcaactaggtagtaggatacagtcaccatctgatggtggtgatgagggcttcgtccaaccctttgctctggcgagtgaagccgaagcacaggagcagcagcatcagatgaaggtccagttgacgagcatgagcgccaggccctgcggcgcaccgtcatcgcccaccaccttccaggccaccgcctgctcgtacgacgcctgccgccccatgctcgaccggcacacaccgccggggaggtacgcaaagccctgctgcatgatcttggggagctccgagaacagtaacttccgcccctcgtcgtcaaggaccccctccagcggcatgtcctggatgttcaccatcgtcgtctctaggatgtcgaagccggcgctgttggcgaacttgagcatgaatggaggcttcagagagcagcagagaattgcgtcactgtgcttccagaaaggcattaggggattgtccacgccttcagtgtccgaccagcggatctccgatccagtgtgcaccctgtagctcctgccaatccaagtagcaagtgcgagtgcctcaggagaccccggaggatgcgggtgcttcagttggatatgtgagccaaggcgggagggagcaattgccatggccaccctctgcacagatgccatcacacccctgacatactgcctggccattgctgccacactttcacgtaggtgattctcgaacgagaactggaaggcgatagtcaggactgatcgcgtggtgcatgaacccgacgcatcacttggggaacgtgagcctgcacctgatccaacctcaagcgccgaagcaaggtctagtgtgcgtgtggcagagggcacgtccattttatcatccagtggtataacacggaagcctgagggtagcaatggcgcatcatcagcaaaagattcatcaataggtgcaaagacaagctgtgcacatgcaccaggagcactctcatcaaccccagtgcaaagctgcagaaggaacatatctcgagacataagcacctcatcgtggctaaaaccatgtccttcaagcctaataacctccaaggactcatcatgctccaatgttcgtgcaaggggtagtataacctggttgcccataaacccaccagcccttaaacctggcacagcataagggttggccctcaaagaggcggcagaatatgcatcaacaccaggatcggcccattcagagcgatgctccctcaagaatcgcacaagtaaagcaggtggcacattctgcagtagcattgatgcttttgcgcacataatgccaccccctatagcagagaagagttgggaggagctgacatgagatccaacaagtttgtttggagatgagttgacagcaatggtaacatcctcagcaccatcactgctcatcagtgaccaaccatcatctggaaacccactcacagcatcattgaatcctctgctgagtctttgactgaatgttctgagaacagctggctggcgcccagcaccataggggatttcaccacttgattcatgtgcaatttgcctaatgtgtcgcaatgccgcagctgtcatcttctgtgccagtatcttaggagattcatagagtggtcgaagaacctcaggcacactcttagcattcagatcaacatgatccacaatgtaaatcatggagcctcctccgtcacatggtcgaatcagataaccactaggaaggacctcagctctgataaaagtcggagcattaggtccacaaggacctccagtagactgagtcaatgacctctcacagatcacaagactgccatcgtcaaggccactagtgtatcggagcgtccaaaagtcgcgcggtcccgccagagttgtcagtgcataagtctgcatatatatcagctcaatcgttccaccattacccgtagggataacatggaggatttcaacatgccgacaatcgcgataccacgatgcgcgatccttaaggatctcagcaacctttgtgggctcaaggctcacaaggccacaagctcgtgctgctacgccactgcagttgtgcgaaacagcgatgattccaacggaatccggaccaggcttcatcccaaccatttgcacccagttgacagcagttccagtcgccttcgacaggaactctgccaaggtctcctcagcaatagcgagtagacctgctgggttattcgcatccctttgtggaggatgcggaactgctgcgttttgctgttgatactgctgaccacttgtcaccacagactcacagctcgtgtctgtagtcgcaacagaaggactgtggagctgctgccgcatgtacccattctcgtaaacgagacgggacacctgcttctgcagcctgtcattctcctccatcaacagcttgttcatcgcagtcagctttcggttcacagtctgcaggcgcgaggcctccttccgctgcttctcgcggcatctgcggttctggaaccagaccttgatctgcttgggctcgatgttgctgaggatggggcagtccctgatgagctgctggcggcgcagcgagctgggcttggggcactcgctgtagacgcgctccagcgcctccacctgctccggcgtgtaccgcacgtacttgcccgtgtccacctgcggcgcggcgcccggggagagcctctccctgctcgcaaccgccgccatcgt

SEQ ID NO: 31918 - DNA, 1030 bp, Setaria italica
  Peptide Sequence Number=SeqID_97892
taaaaaaaaagggaaaaaaaactaaaaaagaaaaaactaaaactaaaactaaagggttttaactacaacaacgaaggaccagttcacgaacatgaaggcaaggcagtgcggggtgtcgtcgtcgctcaggaccttccacgccaccgcctgctcgtacgacacgggccgccccatgctcgacacgcagactccgccagggaggtatgcgaagccctgctgcataatcttggggtactcggtgcaaagtgccttccggccatcatcatcgaggatcttctccagtgagatgtcctggagagcaatcagggtcgtctccagcatgtcgaggccagcttggttggcgaaggtgaacacaggagcagccttcagggaacagcacatgatagagtcggagtgttgccagagcgctttcaaggaagcatctgtgcactgggtgtcagcgcgaagtagttcagctccagtgtgaaacctgtagctcctgccgatccaccttgcaagtgtgtgcgcctcaggagatccaggagtttgcttcatttcgagctgcccaccaagacgggagggagctatggccatggccaccctctgcactgatgccaccacagtcctgacatattgcctagccattgccgcaacgctttctcgaaggtggttctcatatgagaactggaaagcaatggtcaggactgatcttgtgttgcaggtgctggaggcatcactggaagcacgagtagtcccaccggatccaacctcaagagtagatgctaggtcaagtgtgcgtgtgcctgacggtggatccgtcttagcatccagtggtatgacacggaagcctgagggtagaagtggtgcgtcatcagcaaaagattcatcaatgggtgcaaagacaagctgtgcacatgcaccagctgcattttcatcaacgccgctgcacaactgcagaagatacatgtctcgtgatataagctgaagagttcctggaggtcattaggcttgagggacacagcctatgccatgatgaagttgttctatcaag

SEQ ID NO: 31919 - DNA, 425 bp, Setaria italica
  Peptide Sequence Number=SeqID_97893
ccgcacactggcgcaggctggcagtggggcagccgcacgccgatcttcgcggcaccgccgctgcgcctccgcccccgcctccaccccgagcatcccgacgggcgagggcggtggagaccaacctgactggcacaggagactacggcgagccctcctctccccccgcgccaacgtgtccttacagcgacacagcacctgcggctgctcgtcctcctccccaagcaaagaagccgggacaacagggagcatggataaggaggagaataaggaagcatcagtgagcattagcaacaatgacacagacaccaatgattttgaggatgacgactatgatgatgatgatgggaagcacaccgtggcgcttggtcctcaggttcccctcaaggtaccaccttgagctcgacaaggatgatgacagcctaagg

SEQ ID NO: 31920 - DNA, 370 bp, Setaria italica
  Peptide Sequence Number=SeqID_97894
catcttcttctacgcctcctccgtgctggcctccacggtgatcgtctacgtccaggacacggtgtcgtggacgctgggcttcggcgtctccggcgccgccagcgtggtggggctcgccgcgctgctcgccggcgcgcggtactaccgccggcccgccgtgcgggggagcccgttcacggggctcgcgagggtggccgttgccgccgccaggaagaggaaggtcaacgtggcgacgtcaggggagctgaagttttaccacggaccacgacggagcggtgacggcgacgacaaagctggtaacggtgagactgaccaagctccaagcgacagcttcagcttcctgaaccgcgccgcactgatcaccgacggc

SEQ ID NO: 31921 - DNA, 306 bp, Setaria italica
  Peptide Sequence Number=SeqID_97895
tcttctgacatgccagactgtatcctcaaaccctcaatggagagggcttgaggatacagtctggcatgtcagaagaggaggcaccctccaatatcagtgccaagcctattggggaattttcgtctctgcaaggaaagtctgcagagaatactcggtcccttggtttagagggaactgcaggcttgcagcttctggatgttaagcaaagtggagaagaagttgatggattaaataggcttgtctaactaatacaactactaagaatagaagtaggaatagaaggacttagaactaccggggtaagta

SEQ ID NO: 31922 - DNA, 238 bp, Setaria italica
  Peptide Sequence Number=SeqID_97896
gtacaagtggtggcatcatcggtgacctggagctcactcacatggactaggtcgagtctgctcctgcgaacctgtcgcgtcggcgcctgcgcccctgccgagagctccgggaagggaggcagctggtcaccggcggccagccggccagctccgggaagggactcgtcgatgagggggagggagcgcggaggggatccgccgcccgcctccagtctccagtctccagatagacacgtcg

SEQ ID NO: 31923 - DNA, 1249 bp, Setaria italica
  misc_feature (1)..(61): n is a, c, g, or t
  Peptide Sequence Number=SeqID_97897
nnnnnnnnnnnnnnnnnnnnnnnnnnnnnnnnnnnnnnnnnnnnnnnnnnnnnnnnnnnnnttttttttttttgttacaggaagcttaaagttaaaacgactaaatgatcatacatggcacagttggaatctaaagcacacaattcagtagactacagagcatagatgcttgaggccacacacactacagcagtcagtcagtaatcgcaactactgacactaaatttagagggatcctcaagcatcaacgccgacaatatccaaacaaggtattcaaatctgttactgccctaacctgacaatttaagcttacaactcgtcaaggctccttagagcattgccggcctttcgggtctcctagaatcaagccttggccctcttgctgcctgtgcaggaggggcacttgtactgcttgatgtgctccgctttggctggggtgatcttgacgcacttgccatggaaccatttctcacataggtcgcagcagatccagaagtcgtcgtaactttggccgcatgcaccacacagcgcggtctcatggtcttcctgtggttcgccttcctccccttcactctcctcctcgtcctttgggggtggcatcttcgggacccttgagttgggctctgcctggcgtgagggcttcgagccagatttgctactcttattgctgtttttaggagttttttctttgggttctttcttggcagttcctgtaacaacctcatatacggtgggaaggttattgatcatggtgaagagccgtttcctggattccttgtcgaaaccaaaccttgctccaaaataatatgcaactgacaataaccaagaatcactatgcacggcaacaagtgacagccaatccttttcattcatcccatcacgtgcaaaattaattcccagagctggctctgggagttcaggaggaacttcctctgcaggcaagttgacttcccatgtctcattgggaagtccatataaacataggttctccttctctgggtcgcacatcacgtagaacttctccacatcggtggtgagcgccctgatcaggccggcccggcgcgcgcggtagtcccggaagacgtcctccggcgagcggggcaccggcggcgggcccatgaatccgcctcctccgtccattggcccccgggagcctgctggggaagggaagggtagggttttgggagaggagaggaggggagctggggattgcgaggacgacgagagagtcgattggaatttggaagcg

SEQ ID NO: 31924 - DNA, 527 bp, Setaria italica
  Peptide Sequence Number=SeqID_97898
tgtgctgctcagccagcacgagtgtggtcaccaccgagcttgtgtcaatgcacccacacagcttgtcttcacacaagagcctcagcctctggaggttgaacctgtccgccgcttcaagcagatgctgcgacatggcggcttcttccttcttgtccacctccggcaccgtgtcggtgtacacgaagtgcagcacggccttgaacacccgtggctccatgtcctcgatgtgtatggcgcagttggtggtaccctccttcatggaaccgaggagctccgccttgaagaccggagaccgtgccgcgagcacgcacctgtgggcattgaacctcaccccgccggcctggagcgtgacgtccgaggcctccccggtcaagagcaggtccccgaggtgtcggtgcaggtcgggcggcggcacctccacgaaaggggcagtcttcaccgcgcggaacctgtcgaggacgacgacctcgcactggagcgtgaagctgtcatccctgaggagcccacggtgggagcgctccaggtcc

SEQ ID NO: 31925 - DNA, 1050 bp, Setaria italica
  misc_feature (1046)..(1046): n is a, c, g, or t
  Peptide Sequence Number=SeqID_97899
atgctgcagttgggttgtttgtgttccctgcacagtctcgagtgaccggtgccaagtactcctaccagtggatggcgctggcacagcagaatgggtggcatgtgatgcttgatgccggtgcacttggtcccaaggacatggattcgctggggctctcgctgtttcggccagacttcattataacctcgttctacagggtgtttggttcagacccgactgggttcggttgccttctgatcaagaagtcagtaattgggagcttgcaggggagaaatgggtgtaatgcatcggggatggtgaggattgttcctgtgtttccacagtatctcagtgactcggttgatggattcgatgcatttgatgggcttgaagatgactcgggcattaacaaagatgaaaaaccagcttctaatgctcaaaatgggtcacagctgccagcattttcaggtgtctacacgtctgctcaggttagagagacttttgagagtgatcctggtcgtgacagcagctcggatagggatggggcaagcaccatctttgaagaaactgagagcatctctatgggcgaggtcatgaggagtccagcattcagtgaggactgttcatcagagaactctttctgggttgatgttggccagagcccattggggtcagagaaatctggccagttcaagaaggggaaactgggatcaccattaccatcttcttggttcaatggaagaaagtgtaacaagaggatgtcaccaaacttaacttctaggatatctagaagcccactttatgatggccatgtgatttcctttgatgcagctgtgctatcagtctcgcaagatacagactgcctcaaggaagaccctgaagaagaaatttttgagaatggccggagaaaccatttcaggcaggttagtgagatccaagaggagcctgaggtcgaagaggtggcatgccaacatgctatgaatggtggtgcagagcacaaagaagcgcgataagggagggagacaggaaggggagttccggctgctggggagggagggatggcaacngcag

SEQ ID NO: 31926 - DNA, 474 bp, Setaria italica
  misc_feature (27)..(27): n is a, c, g, or t
  Peptide Sequence Number=SeqID_97900
aaaatgaaactgcacactgtcttctangtttttttaacgtccatgcaatttaataaggaactgcattggtgtgtgagcttttctgggtagagtcttctgagaataaatctaatctatatatcctgcttcacttcttgcggttgtggtggcaatggcagatcgggtagatctgcatctgctactagtatctttgttcattgattgcttgattgccattgtgtgcttgtgagtgtttttttgatgttgtagcagaatttattttgttttatttaaagatttgacattctgcagattatatattatgatatagccactttcagacttcatgattcattgatttgttgaggctgtgctgtgtgtttttcaatttttcatggttgtctagcatctagtgcaagaaatagcctatctccatccaggaatactactttatccttaatcgcttgtatccttgtacttttaattttctaccct

SEQ ID NO: 31927 - DNA, 269 bp, Setaria italica
  Peptide Sequence Number=SeqID_97901
cggcgccgcggccgccgccgacaggccgcaggaacgagacgccggttggccgcagcgcgcggggcggcagcaagaggaaattcgccggggacggccccgtgcgacgagccccacctgttggcgaccacgccgagcaggggaggagggtcttcggcgaactcaatgtcagcaacggctatggatcctcgatctgcggctctgcggccgggaacggctgcaactgcaacccgggtgggggtcaggccgacgggatgaaagcggctggtgcc

SEQ ID NO: 31928 - DNA, 1613 bp, Setaria italica
  Peptide Sequence Number=SeqID_97902
gtttgcggtatcttccggtctggaaaaatttattttcacccaagcgaggatgaattgctcaaagaaacagataaattgcttcttattgctcctgttcatgggaggagaagaccagtgtatacagtgctaagtacaccgaaagaaacacaaacatcaattcattactcagaatcaagagtggatcaaggatcatttagtatggctgctaccgtggagaaggaaacacggctaaagagcattgtaaagcgccccttgaaatcgctctctaagagcagtgattatatgctggggccaaaggaatgcgtgcttattgttggttggcgaccaaaagttactgagatgatacgggagtatgatagttacctcggacctggtagtacagtggaaatcttgtcagaaacccctgttaaagagaggagcagtgtcgtcaacccccttttgcagagccagcttaaaaatgttaaagtttctcatcgggtggggtgtcctttgaactatgatactctcaaggacacgataattaacattcggaaatctgccaagtctgataaaaaagttccactttcaattgttgtgatatctgacagagactggctcactggagatgctacacaggctgataaacagttggcatatacccttcttcttgctgaaaacatttgcgagaaacatggcatcacggttgagaatcttgtatcagaaattgttgacacaggactgggaaaacaaatatctaaaataagaccctccctttcatttattggagcagaggaagtaatgagccgtgtgacagcacaagttgcggaaactagcgagctgaatgaagtatggaaggacattctgaatgctgaaggtgatgagatctatattaaggaaattggcctgtacatgaaggaaggagagagaataccattctcagagctttctgaaagggcagttttacgtcgtgaagttgcaattggttacgtcaaggatggcaagcagcatataaatcctaccaacaagttggagccactgtctcttgaaatgactgattcgctcattgtgatatcggaattcgaaggtgaacagccaattattatggatacagaaacttccagatagtactttcagcttggttttttccccccgagaataaggagaagagctgcatatctttttgtttaagaagatatgaaagtttcttacaatgactcagctcctgtggagagccatgctagactgtcttacattgatgtattatactgaaaatgcaacaaccaaaagcgaagcagaaaaataccactaagtttggctggagaatgccaaggtgcttagcacccgcactgatccagagttcagctccaaagggaaagctgttgctactatgaagatatgacatatagcctgttgataatttgtttctttccgtacaaagagaaagcaaactatagtttaaaggccacgaactaaattttgttcgttccgtagctgtagaacatcttgtgcaaatattttaatcttcagttctactgcagaatttctttttatttatctgtaaacatagtgaataacaccgtcaacttgtatgatgtagatttctgaataaagaaagttgattatgtgcaagacca

SEQ ID NO: 31929 - DNA, 260 bp, Setaria italica
  Peptide Sequence Number=SeqID_97903
cccatccattgcttgggttactgcttctgtttgccggttatcttccacaaatgtcccttttgttgcaactctgcgcacagcatcggctgccccgatcaaggcattcctagatttctggaaaaatgtgaaagaaccttgtggtttctccttctttgtgggttttactttaatctcttcctctatgaactgttctggcatcacaggggcctctagccgagctaggtcgacttgaccatcgatgccaaatacttttaacagct

SEQ ID NO: 31930 - DNA, 313 bp, Setaria italica
  Peptide Sequence Number=SeqID_97904
cggcacggcgacaccgacgcggagcgcgcggcgtagtaggagacccgcggggagtggtacggcgacggcgacatggccggcggcggcgccagcttcggcgacacggccaccttggaggaggagtagagggcgccggatgacgacggggaggaggagttgtagggcggcggcgccacgctggcggagctggagctgctgctccggacgtgcttcggcgtccccgggcacacctcccacttgaacggcaccgaccccggccgccggcacgagtcgtcgaccaccacccccgccattgctatcttcttcctctccc

SEQ ID NO: 31931 - DNA, 819 bp, Setaria italica
  Peptide Sequence Number=SeqID_97905
cctagtaaaccatcctaaggggccacgatgggtaataggtaggctggagcagaacctttgcagagttccaggtccggtcggcacgggtcataggttgaggtccaaaggacctggtggtattgtatgctacgttatgatgtatctgttttttcaggatagtattcctgtgtggacgtagtacggcccctatttagaccccagtcgtacatgtggatggagttagggaatgttgtctggaaatagacgccggtgggtacgggtctcctaggtcagtaccgcctgaagttgaggtatgggctgatcgcacgtataagtaaagtgtacatctctgcacagaatataatctatctggatagccgaggcttacagttacgagcccacatagtcaaatctcccatcgattaaaatcacaacttgagtgtggtaagatggggccgcggtcctaagagggataatttagaatgaggcataagtcagtccagaaggaccctgacgttctctgatgctccttaaaacttgggaactagcagggaaggtaagattcctccctctagggccaacaacgtaaaaagaatatagtttcgtcctctccttttccaaaactcacctcacctggcatgaaataggtttattaataaaaacaaaccttatatcattttccttgattatccccagcatttaatataatttcaatactaggatttgttgagtaccattcataagtgtactcatgcttactttcatttatacatgattagaacttatctggtgccctaacttcattctgcttgtggaatgggcaaccgcaccgctctccgc

SEQ ID NO: 31932 - DNA, 469 bp, Setaria italica
  Peptide Sequence Number=SeqID_97906
caagatcgatgaccaagcgtcatttagacatagaattccttaagaatatcataatcattcataatggaaaatcttagaaggacgtgagtttagtaaaatgaaccaactaaagagttagaaacccctaaggacaaaacatgggagtaagggggcagcctcagtagaggatcctgtcccaaaagcttactccggtcacataaggaccggctcgcaggaaagtctttctagtgaaacgtgcaaccatacgtgaccttgattcacaccccaccagcagaacctagtaaaccatcccaaggggccacgttgggcaataggtaggctggagcaagactttcgcatggttccaggtccggtcggcacgggtcataggttgaggtcctctggacctggtggcattgttatgatgcatctgttttaccgggatagtgtccatgtatggacatagttaatttaggttaacttaatttaa

SEQ ID NO: 31933 - DNA, 803 bp, Setaria italica
  Peptide Sequence Number=SeqID_97907
cttcctgtgacaacctatgaggcagtgacttagtactgagtttcgctgatgcatacaaattctttttattcagcagtatatttgaacttactgaatggatcacttggactccgatgccttcctgttgaacacaaggaaattccgcaatgtcaaacaatgttatgtacaaaaatgctagcaaatatagaactagtacagtgtctcgaggtctttttcaaaacagcgaaagcaatgtgctaggaggttttattacttcacatcaactactgaatgctgctagaaaacgtgtacgcacaagaagccaacaggtatgaaaaagcaaatctgatttctaatctatgttgcaaactctatatgacctgaaccagtggtggatccagaaatcgaccgcgatgggggctggatttatgtgtggcatagaaataattcaatgtcaaaacttccctatattgtttatcacataatttcttaatgttgtcaacactttttttaccttaaatcaaagtgctcatgcattattcagcaggggttgtagcctgtagtatggactttaggtcatgcatagctgctgggcgtatggcaggctggcaccggcgagtctgggagtcacatttgcattgcatagacaaatgaggcaccaatgtgagggggtcagtaatgaggtcggggagatgtacctgctgctggtcttgtgaagcttccaacacaacccaaaaggagcaaccacagcagtagactgactcgatgccttaatagctgattttcatacacgctttgagccaaggacccaggcagcagcgccg

SEQ ID NO: 31934 - DNA, 717 bp, Setaria italica
  Peptide Sequence Number=SeqID_97908
ttctatctatgtatctaggaacaaagatcgacccacattctcaagagaagattatctactatctagctagattaaaatctaaggagattctgcgtgattctggcaatggtttggtaatttccagagattgggcaaagaaaatttgcttggcactggcgcagaagtgtgagtagtcgagggggtttgataaaattcttgcccttcttttggctagcttgagagaaaattctcctgtaataagggcaaaggctttacgtgcggtcagcagtatagttgaagctgaccctgaggtcttgggtgacaaacgtgtacagtctgctgttgaagggagattttgcgattcggctatttctgttcgtgaagctgcccttgaacttgttggaaggcatattgcttcacatcctgatgtaggcctgaagtatattgaaaaagttgctgagcgaataaaggacacaggagtaagtgttcgcaaacgtgcaattaaaattataagggatctttgtgcttcaaatccaaacacggacacaacgcatgcctttgtggagattatttctcgtgttaatgatgaggagtccagtgtacaggatcttgtatgtaaaacatttcatgagctatggtttgaagaacctactgggagtcataagcacttggttgctgatggtagttcagttcctatggagattgctaaaaagctgagcaaattgttgaatgttgagg

SEQ ID NO: 31935 - DNA, 299 bp, Setaria italica
  Peptide Sequence Number=SeqID_97909
agcggccttgcgttgggcccccttcggtagacgtcgaggtacttcttgaggtcggtgtcgaggaactcgaagacgaggtataggatgggcttgccgttcttggcggcctgctcgacggcgaggaggcggacgacgtagatggagtgggagaggaggttgaggagggagatctcgcggagcgcggtgggcgggatgccctcctcgtccatctcgaggcgggtcttcttgagcgcgacgagctggcccgtggccttgtcctgcgccttgtacaccttgccgtaggtgccctccccgacttc

SEQ ID NO: 31936 - DNA, 801 bp, Setaria italica
  Peptide Sequence Number=SeqID_97910
tgtgccatacgcaagtagatagcagaccagctactagctcgcaaatgccctagcatgcagaagttttaaggaactacagtgcactaggacatatgctttgatcacctggcgtagtacgaacttcctgggttcatgggcaggctctcaccttcttgtgtaggataaccaatactagtggcaccttctatttcaaagctagcagtcgacgctccaccgagaagactctgagcctccatctcaacatcgacttgtacccaaggatgcagtgaaagcttcctcaatctgccgagctcatcggcgatctccttcatcgatggtctgttgctgccacacatgtccaggcattgcttggctagctccgcaaggcctctgatcaattcattgttctcttgtccctttacatggctcggcaagatcgcatcaaggttgttctccttcatagcggacaagaaatttgacgacagacttctttccgtctcaggcccatccaacttcagaggctcttggccagtgagtacctctagaaggataacaccaaagctaaagacgtcgcttttctctgtcaattggcatgtcagcatgtattcagggtcgaggtagccacaggtaccttgaaccattgtgacatactgctctttatctgatggggctagtatggaggctccaaaatctgacacttttgccatgtagtttctcatctaaaagaatattggcagtcttcacatcaccatggataattgggggagatgcgtatgagtgtaggaaattgagaccttcagctgcttcatgagcaatccttta

SEQ ID NO: 31937 - DNA, 314 bp, Setaria italica
  Peptide Sequence Number=SeqID_97911
ccaacaccttttcgggagcattaatagattctctgctagctggaaccactgagttggagctcgcgccactgcctccgggaccgggcgcccccgcggcgacgggcggcgagacggttgccggaggggagcggcggccgtggcggcgtcgttcgctgccatgctgcggggtaggggtaggattgggcgcgcgcgggtaataggatcctccggtgcgttcgcgtggggagatggacatgaacccgcgcgggagctcgtggggtaggtgagcggcggctcggtcggtcggcggcgacggggagggcggtggcgcggac

SEQ ID NO: 31938 - DNA, 1612 bp, Setaria italica
  Peptide Sequence Number=SeqID_97912
gtccttggtctctcgcgctttcatttttaccacttgcatccccagtttcaactcttaggggaggcgagtcttgggctgatgcaaaacccaggcgtgtcacgtcagagaaaagctttctttcactggctggaggactcgttgatggcccagcattgttacctagagcttcagtgtaaagagaagtcaaaatcagtgccaacaggaaacgtattgggatgcgtgttaaagcagacagggaaatgggacaacgaccacatgcaaccagaaaaactgtgatcaaggatatgaactaccagcagggaacttccatcaaaagaattctggagctaaggaagcagtaatgtaaacattgcaggcatagtgccgctgccattccagttgcaaaattccttcaaagtcatctagtagagaacatgacatcgttgtgactttgtgagaaatttgtaaactcaaaccgcatagctgatgcctgcacagcggcagcaacttcagctttcactctttcactttcttcctacaaaaacacaaagggggagtgtgaaaaggagccaaaacaggccacatagacaagcgacatggaaagcaaaccatgaaacctaatggcccttgtacagaatgctggcgtaactttacagaaatggctgggttcaaattaaccaattaggtctgcaatttgttggttacaagcaatgtgaattaaagtgagtagtgagttattatccctgacgattctgcacgctcatccttgctagacatatacttggtttcatgtgtttctttgaaaatagacaagctgccaaaccagttcaaaggggcttcaccaattcccagctgggatatacttcccataggatccagtcctgcagttgccaggttacttttgggaaagaaccaacaaacagtaagataaaaaccaagcaatacaggatcagtacaagaattgcatctgggcactatacaacatcattcttaagcaatgaggaaaccaagatccaacgcgaaatttgccaactaactttcaatacttaacgaattcagggcttaatctagtgctggcaaatccaagaacagaagggcttgattgttacatagcacagctaaatcgaagtggcattcttttttagcaatcatcaattttctggatccagttttccaaatcctggccggcttacttctaaacagtttccccatgcatttgctatcctggcttatattgatgacccatatttcaaaccccaagaaatttgagtttggaattttggtaaacaaaatctgtaatcatctgctttcctactattagtacaagcgacatggaaagcaaaccatgaaacctaatggcccttgtacagaatgctggcgtaactttacagaaatggctgggttcaaattaaccaattaggtctgcaatttgttggttacaagcaatgtgaattaaagtgagtagtgagttattatccctgacgattctgcacgctcatccttgctagacatatacttggtttcatgtgtttctttgaaaatagacaagctgccaaaccagttcaaaggggcttcaccaattcccagctgggatatacttcccataggatccagtcctgcagttgccaggtta

SEQ ID NO: 31939 - DNA, 2644 bp, Setaria italica
  misc_feature (1)..(62): n is a, c, g, or t
  Peptide Sequence Number=SeqID_97913
nnnnnnnnnnnnnnnnnnnnnnnnnnnnnnnnnnnnnnnnnnnnnnnnnnnnnnnnnnnnnnaggtgcgttaacagcaaacagtggcgccattcattattattttatcaagttacatggctctttctctgagtgccttcagctcagtggttaccgatgtttcaaaggcgtcgcctaggcgaccaggcaggcagacccagctcgccttgaggaatagatccgccttatcgcctacacaatagggcatacacaggttgccttaggtcgcctttgaaacactggtggttacccttggcatggagcaagactcagtatgtaggtacaacgcgagcacaccccttacggaggaggtgggcaggcggcagaagagagacaaacatgaggggggaaacaaatgccactcggtgttacagacgtagtacaggttatgcactatacatacattcctttgatctactatggaaacagccaaactgttcgtttccaatgtgtctactccttcagtatcgacggccgccgccggttgacaagagcactctagctggtttcttgcctttcttcccaaccccatttggtttctgcatctccaagttgtcagccgctgcagcagctctactggaagatatgatgctggcgaacgataatgcgggtggtgctgatggtccttggtctctcgcgctttcatttttaccacttgcatccccagtttcaactcttaggggaggcgagtcttgggctgatgcaaaacccaggcgtgtcacgtcagagaaaagctttctttcactggctggaggactcgttgatggcccagcattgttacctagagcttcaaagtcatctagagagaacatgacatcgttgtgactttgtgagaaatttgtaaactcaaaccgcatagctgatgcctgcacagcggcagcaacttcagctttcactctttcactttcttccttcttggcagttcgttttctttgtttctcacgcttcttgatttcatccaagaatggagccaatgagctaggagatactatatcactcaggtcgatttcacagaactggaatgttgttgttaatgagaagtggctcaaaaaccggtagcgcttccttatagcctcagactgtgttacagtttctagctccaaaatttttccagttattctaggtgggagcatatcagaacctccaaaatggtttagaagacatctcatgtttagtggatgaagaattaggtgttggccatccgacacctggtaaaatgtgtatgagtcatgttcatttgaatcagtggtggtggtgcatttctcattcatcttggatattgttcctttatcgaagcttttatttgactcaggagacatggagagtgctgaaataccactgaccatatctctatctgaaacaggggaaatcttattcccattgttctggtgagaagtattcacatcaaaggagtttctagacttgtaactagatccaggagagaaactatcttttaatggagggctacaaccataacttctgtactcagtccaatatttcatcctttcttccagttgttccaaagcagcagaaacatatggaagtttctccaagtcatcaacaaagcccaagtcagccatatgcaaccaattactaagatctgattttgcctctcgaacagataactcaacatcagatgtcaaaataaattttgagaaaacattacatggatcttcatctgctgaagaacattcactggaggtgcttttaatagaaggagtgagtgaatttcttgaccggctcagaagtgtaaacgaagcaacatcaccagcacggaaatgctgaacttgagtaatatgtatggtatacaactcctttgttgataccatcatgaaacacagaggacacttcttccaacattcacctttataatcctctttgcccattgttaggtaacgtaaaatgcatggaaagcagtatatatgtccacatgatgtgatctgtgggcacaacgggctctccaagcaaatagggcattgtacctcagaagggctatagtatcttacacagataatatcttcccactgaagcatcttatcaggatccattgattcaatctggtaattcccagtatccaacacaacgaatttatagtttgcttgtaggaacaggtccttgttgtaaggtttgatctttctttgtcttctgggaggatatgttctagggcctctgggctgtggccgagaaataggatcatactggaagttcagtagatgattagcattcacggcctgactcttcctagcagccatctgagtcccattaccctgaagtccagtagaacctgaagccaagtggtcagtctgaagagatcccatcattccggttctctcaggatatgccctaactgagctgacattgtctgtagggaaacccaaattcccctgttcagaagagtggcattctgaaatattgccggtctcttgagtacatgtatcattctcttccccagagattctgaatccaactaccttttcgggagcattaatagattctctgctagctggaaccactgagtctgcaaaatatgaattgtgttatagaggttactctgaaaacaggagagcttaaaattagcaaggaatcaacaatgagaacataacaag

SEQ ID NO: 31940 - DNA, 496 bp, Setaria italica
  Peptide Sequence Number=SeqID_97914
atataaatccctttttgtctacgatcacagtgaacgggcttaagtgcaccaccgaccctattcttatccagcaaagttatatcgttgttttgattttcctctttttgccaatcttctcacgttcagtttttcttcaaataggtgcacatcttcaggtgccttacgttccttaatttcagttgattttgtgcttctgtgatgagctggcttcttccggaatttaaaactgtcgccttttctctccatcaagtcttttgcagcttttaatctggcttcagcaaattccattgcttccttcatggcagcagcagcagctgagttaggattgacatcagcatctccatgttctttgtttccatttttattaagcaattttgatggtggtattggtggtggttgcactttgattggtgctgctggaatgctgatgtcggatgcccttaagatggataatcaggagaaggtgcttcctcgcttgacactgaatggatgctag

SEQ ID NO: 31941 - DNA, 447 bp, Setaria italica
  Peptide Sequence Number=SeqID_97915
tgcaaagacaggtggttggatggggcaataaccttggccgagatagcccctaatctgttcaaaacagtcccgaaacgtactgccaaaaggaggactgtggctcaagcactacaaaataggagatggatgcatgacatcaagggaactcttactatagaggttccgaacgattatcttctcatttgggatatggtggatggtcttattctacaccaaaatgtaccggatcattacaaatggaagctaaccaagaatggttcttacagcagtaagtccgcctatgcggccttttttgtgggatccatcaagttcagcccgtggagaagaatttggaaaaccctgggctcccccacgctgtaggttcttcatttggttggtatttcataaccgagtttggacagctgatcgactagcaaagagaaatctgccccatccaaaggcttgccc

SEQ ID NO: 31942 - DNA, 302 bp, Setaria italica
  Peptide Sequence Number=SeqID_97916
cttccgtctccccctcccttccgtcttcctcccaaatcctcctgcccccgaccaagaaacgcctccgcggttcctcgccgcccctcccctcctccctgaaaaaaatctttgagagaggtttcgatcctcgaaaccgcccagggcccgccccgcgagtgcatggcagtgagcctcctggccaatgaggtgtcggacctgtgcatcggcaagccggccgtgaggtcgctcccgctctccgccgccgccggcgaactagccgccgcgctccggagggtggcccgctctggcgccgcagcctgcgt

SEQ ID NO: 31943 - DNA, 256 bp, Setaria italica
  Peptide Sequence Number=SeqID_97917
ctcctaaaataagcacacaagtagtgctgtgaacattatacagcacaagagataggttataagttctcttacgtcctgttcctattcggggtgaaatttcttaatgtatcagaaaatggcaaaaaaggatatatggtggggacgagcagaggcaatcaaaaagtcaaagccaccaccttcataaatattggcatgtattacatatcctgcccttagattcaatgataattcagtgaaattggagtgcgtcaccaaa

SEQ ID NO: 31944 - DNA, 418 bp, Setaria italica
  Peptide Sequence Number=SeqID_97918
cgttcagcgcggccctgtaccagcaagagcacgcaggaggacacgcggtcaatggatgttcgcctgaaaggctcaagaactcggtgcccgtacataaatggctgcaccggcgacaagcctgcgcggccgccgatatgatatgatggctcctcgcactcaccggaacgcggcgttcgagggcacggagcaggcgtcggagagcgacgcggagtcgacggcgaggaggaggtactcgagccagcccatgtcgccattgaggccgatccgcttgctgccgtacccgaacgggtaggccgggccggcgcggtccttgtcggcctgcgcctgcgcgaaaaacctgatggcctcggtctcggccctgtccatggtggccgcggcgacgaccgtaggttagaacgaaccttagaaagaaacccga

SEQ ID NO: 31945 - DNA, 1351 bp, Setaria italica
  Peptide Sequence Number=SeqID_97919
gtcaagaacccgtacctgaatacggatccatgtatagatgatgctgtttacggcgtgaggcaatgcaactcagcagggttttctccttcaattggtggcaatggtctttcacgctacaggactgattttcatgaaattgagaaaattggccatgggaacttcagtgttgtgttcaaagttctgaacaggatagatgggtgcttgtatgcagtgaaacggagcatcaagcaattgcataatgacatggaaaggaggcaagcagtgaaggaagtccaagctatggcagccttaggttctcatgagaacatagttcgatacttcacatcatggtttgagaatgagcaactttatattcagatggaactatgtgatcgctgtctatctgtgaatcgaaaccagccactgaagcatggggagccttggaacttctgtaccagatctgtgaaggcttggatttcattcatgaatgtggcatagcacacctcgatgtgaagcctgataacatatatgtcagcaatggtatttataagcttggagattttggttgtgctacacttattaaccgaagtttggcaattgaagatggagattcacgttatatgcctccagaaatgctgaatgataagtatgagcatcttgacaaggttgacatcttttctcttggggcggccatctatgagcttataagaggtacgccgcttccagagtctgggcctcactttacaagtatcagagagggcaagattccattacttccagggtgcccaatgcagtttcagaatttaattaagtccatgatggatcctgatccgttgaggcggccttctgcaaaggagatcctgagacatcccacattcgagaagctccacaaggtcccagcgaagaagtagaaacaccgccgcccatcagatcccaccagcaagagagcaagcgggctcagctgctattcaccaccagctgttcccaaattttgtatatctattgagatggctctccaaacgattcacttagaatcggtttcctcccagtgatggccagtatgcctgcactgatctgattttgtatagatgcttgaaaccaaggagtgatcctatcttaacgccgggaatctgagtagcgcttgtaagttatggctgtgtcatcatgtgttaaggctaccatcctttggttgctgatgttctgtcttggctgtgcttagcttttgtgctggaagaatgctcgagtcatctgtcatcctatttgtgccgtctaatctagcacggctggaggattgactctctgcacaagtacccttggatgtgtgatgtgtctatgctctgttactaagtcagcttgatcgctattttgttag

SEQ ID NO: 31946 - DNA, 245 bp, Setaria italica
  Peptide Sequence Number=SeqID_97920
ggtgtattcggtttctttcccgtaggagtcaaattgaccagttttgtagagtgttccacaggcttctgtgaaaataatggacattcttgctgactacttccatcagcagaagacccatgatcagaagtatgttttttcttctgacttgagcgtctcactgcaagaaatatttgcttcttcaaagaaatctctctcccgctcaaaaaaatcagatgctgctttaacgacgtcaccacctgagctaa

SEQ ID NO: 31947 - DNA, 489 bp, Setaria italica
  Peptide Sequence Number=SeqID_97921
agcctcctttgacctagcatttagatgaactgtaatgttgctttctgtttcaggaaatttgactgcaccaaatcccttcttaggtaggccattgagatcaagctccactgcttccatcagctccttttcagaagggcggccatctcttctgttaagcttcttaacatctttttgggtgttccttctgttagtgtcgattggagatactgatttcagcaaatgctccttctcaccagatttatcagattgctgcttcctggaattctcatcaattagactaatgccatcagcaacagcatgaatatcttttcggttcagctgtatttccactttctcagtacgacatgcaggtttagcaccatgttttcttttcacatggagcatccctttacccttctgcttgttggataaaggtgttgctagttctgctggcttgattgaaccattctcaagcatatcctcatcttgtcttccatatggaacatcctc

SEQ ID NO: 31948 - DNA, 429 bp, Setaria italica
  Peptide Sequence Number=SeqID_97922
gcggctttgcggcggggcgaggcaatggcggggatcgagaggaaaagaaggcgatgatcttggccgcaggctccgcggtcccagccggcttcctggagcccctcccgctgccaccggggaggttgctcccgcctccggcgctcgagaggaccgtaacgaagcagttctggaaggccggcgactacgacggcagtccccacctgcttgccgtggaggcggcggagcatactgattctggaatggagcatgtccgcgtgcatcccaagtttctgcattccaacgcgacaagccacaagtgggctctaggagctttcgccgagctactggataactctcttgatgaagtcgcaaacggagctacatttgtgaaaattgacatgatagaaaaataagaaaagatgggactcggatgctgctattgaagatgat

SEQ ID NO: 31949 - DNA, 256 bp, Setaria italica
  Peptide Sequence Number=SeqID_97923
gagaggccgcggcggagcatgtggcacacggcgagcaccacgtgccacagccgccgcgccagcccgggctccatgggccgccgcgccggcgtcgtcgcgagatccattacgagcaacctctctatgggaagcagatcgaataattccgaggatcaacgatgtgtctgcacaactggacagatcaacctgacaggcgaagctggatttattgatttcttggagcttgagaggagttgattaggtagatgatcttggg

SEQ ID NO: 31950 - DNA, 439 bp, Setaria italica
  Peptide Sequence Number=SeqID_97924
cgtttagttgtttttttttttttttttttgttttttttttttttttgtttgaccagattcaattcaagttgtactgcaagcaaacaaattaagatacaaaaaggctgcggagatgaacagaaagccaaactttaatttttgattcatcttgctttggagtctcgcttatttctggacctcttgttcgatcgttccttattcacatgggccacggccatgccacgccgccggtcgtcgccttccgtcccgattctagtagtcgtcgtgatcgtgtgagtcatcgtcgaacttctccccgagatagctcgctcctcccgcgagcgccaacccgcccagcactcccgccgccgcacccaccgccagacctgtccccatccccatcttgttgctcttctgcggagcagcgcccgccgccgcgggggcaccgaccaccggcgca

SEQ ID NO: 31951 - DNA, 580 bp, Setaria italica
  Peptide Sequence Number=SeqID_97925
gttaacgttcgttactcgccgctgcccagcgccgccgccgccgccacgccctcctcgatcttgtgccggtgcgcgttctccgggtccttcttcgcctggtgcttctcgtactgcacccacacgatatcgatacgcatgcatcgatcgtcagaagaaaaaaaacatgtcgtcggtgcgagagttgccaataaaattgattaaagagcgtgacggaccaaggcgaaggcgccggcggcgagggcgcccatctcgccgaggtgctccttgtgcttgtgctccttctcctccttcctgtacgtctccgagtcgtcccgggaggagccgtactcatcgtcgccggactttttgttgtactcgtcgtcgccggactttttgttgtactcgtcgtcgccggaggacctgttgtacccgccgccgccgctgttgtagtcgtcggagcccgacttgttgtacccgccggcgccgctgcggccgtagtcgtcggtgccggacttgttgtagccgccctcgtagtcttcgccggcgccggacctgccgtagccgctgcggccgtactcgtcagccatctcgatcgcgttcg

SEQ ID NO: 31952 - DNA, 645 bp, Setaria italica
  misc_feature (630)..(630): n is a, c, g, or t
  Peptide Sequence Number=SeqID_97926
aagagaatctatcagatttggctgccagggcacaaaatgagtgcccacaattacattatcagtaagttcgaccacgaagaggagtaactttatgaagttggctcagatcactcctgccaatcgttctacccttactacaaagcacaactctacatcgatgtcgcagctcttctctgaagaccaactgtcacaggatactaaggttgttaatatgactgatgatgtggcagtacatgggcatctgaaggaacataccttcaaacctttagggcttaaaaaggctaaactaatggatagatccaaagatgctgttggctcggatgacatctctgccaaatcacctcaaaatattgagtcaagaactttggccagataccagggtgaaggatctacacctcaatcaaagaaatgtaccacagaaaaagcatgtggaaagaatgagggtatctgtgaaaaatctgaaggccaggaatctaactcagggacagccttcttgaggctggctcgagaaaagcttagtggcgcagagtacaaagagtttgttgaatttatgaaggccttaaaattgaaaactatgcatatcaaagactcacttgaagcaatagcaaagcttttctcctctccaggaancttccacttcttgaa

SEQ ID NO: 31953 - DNA, 318 bp, Setaria italica
  Peptide Sequence Number=SeqID_97927
caagagactgtgcgcccactccaccccaccccacgccgccggcggccgccgcccgccatggtgaaggcctacctccgctacgagccggccgtcaccttcggggtgattgcctcaccggagtccaacgtctgctacgacccctccggccgcctactcctcgccgctgccctcgaccgcctcgccgcctgggacctcaagcgcggtctcccctctgtctcctttgcaccctcctcctcctccccctcgctcgccgtctcctgcatcgcctcctcccaatccgccgccgtctcctcctcaattgcgagcgggcacgcggat

SEQ ID NO: 31954 - DNA, 263 bp, Setaria italica
  Peptide Sequence Number=SeqID_97928
gtaaagaaaagaaataaagtgaagatagtctaggccctcacaaattccctttattatttgatagcgtgtgttccattggaatctgcaagatttgtctacggagaatatgcagcatatatatgtcaattgtcgagtaattcacaaaagaagatttgcaagaagtaaattttgttatgcgtacatgattgatcctacctttgatatacctgtcaaggctgccattaggcaggtactcggagcagaggagcaattgggcgatttgg

SEQ ID NO: 31955 - DNA, 297 bp, Setaria italica
  Peptide Sequence Number=SeqID_97929
tagtatattctcaggtttgagatccctgtgaataatgggcccagtttgctggtgaagatagtctaggccctcacaaattccctttattatttgatagcgtgtgttccattggaatctgcaagatttgtctttgatatacctgtcaaggctgccattaggcaggtactcggagcagaggagcaattggcgatttgcgtcttcccaggaccagcctggtccgggcacgggcacccgttctttttctgccacacaacagtaccctaagagccttacaatatttgtgtgcttggcctttat

SEQ ID NO: 31956 - DNA, 1262 bp, Setaria italica
  Peptide Sequence Number=SeqID_97930
tagttatttgttaaccctttcttattttctttgttctttgttagggttctattactttagtcttgcaccagagccatacttcttggaaaggtgaggccaaaatatgaagttattcactgcttcagaatcagaggagtcaaaaatatggacgttagttacatgctgaacaatgtgactggcacttcctcgcaggctttcaacaaactccatcggcatgtcagttagaaacatctgatggagtgtcctgatgtacttgatacccttgggtactgcccttatattccttaaaccaataagttccaaatgatgtagacctatcattgttccatcctccatcaaaatgcaactcagatgttccatatcagcaagttgcagatatttaagcttggggaaccatcctgcacaaaaagataaatgttccccaccatatgccccacggagccccagattaactagagttgacatgtgagagaaggagcgaataggatccttcttcagaccagtccagtccatttttaatagtgttaatttctcaaacttagaaaatagcgatgggaccgtgcctccatctaactttcctgccaaccagaggagcttcagatctggcagcggccttaacattttcaagtttagaatctcatccatatcagacgcgaaaagaagcagtctgctcaggttaggcatcttagtcagggagttccataactcagcaatgtagctttgccgcactttcataacgctcaagcttctcatcattgtcaaatttcccagctgtaagaccaaatctttattggttgaaacagtatgtaaagcttgaagattctttagaccacaaatgttgccacgaaattttgtatcactgaagcaattcaatgatctttcttgaatatcgtggactacacaaacatgtaaatgacgtaaatttgttagcatagttatttccaaaggcagctccttcacatagctgaatcggagatctaaaacttgtaggttcacaagttttctgaatgagggcgatatccatttgactttttgtgtatgaaatatccagataacgcaagttatatagttctgtgaccacatctggcacttgttcaatattggtaaatcttagacataacactctcagcagcctgaaatgtgatgagacgtcatatatccaggaagatggcactacagtgtcaaacaaaatgaatgatcgtagatgtgaacttgctaaaataattttgggaatcaacaaacttttttggacgcataaggcg

SEQ ID NO: 31957 - DNA, 536 bp, Setaria italica
  Peptide Sequence Number=SeqID_97931
gaactgccaagttccagatgaaccctcattctgctgtagggtcatacttagctgcaccagagccatacttcttggaaaggtgaggccaaaatatgaagttattcactgcttcagaatcagaggagtcaaaaatatggacgttagttacatgctgaacaatgtgactggcacttcctcgcaggctttcaacaaactccatcggcatgtcagttagaaacatctgatggagtgtcctgatgtacttgatacccttgggtactgcccttatattccttaaaccaataagttccaaatgatgtagacctatcattgttccatcctccatcaaaatgcaactcagatgttccatatcagcaagttgcagatatttaagcttggggaaccatcctgcacaaaaaagataaatgttccccaccatatgccccacggagccccagattaactagagttgacatgtgagagaaggagcgaataggatcctttcttctagtagctagttccttagtttccttatttttttaattttagttttgttt

SEQ ID NO: 31958 - DNA, 301 bp, Setaria italica
  Peptide Sequence Number=SeqID_97932
ggcggtcgtcgcttcgcctctaacgacagccacccatccacggcgatctacggcctcctcgtccttctgaaaccctaacccacgcatccaccctccatcgtcgccgcccgcttccgtcctcaccctcgccgcctccacgccccaaaccctagacccctgccggcgcggccgatgggcgcggacgagcaaccatccccgacgcgcaaacgcgaccgcgaggaggaggagctcgccgacgggagcgccgccgagaagcgcgcgcgcgcggagggcttcgcgctgcgtggggctcgcgagctac

SEQ ID NO: 31959 - DNA, 316 bp, Setaria italica
  Peptide Sequence Number=SeqID_97933
ccctcgggacaggccgccacgaggttgcagagcgcggcgagcgcacggtccgtcactggcgcgtccccgacggacgccaccagcgctggcgcgagcccggccgccagcaggtacggcgcgttggcgggcgcgatggagaggttcaggagcgcgcgcagcgcgtcgtggcgcgcctgctcggtggaggacgcgccctggaacgcgctgacgaggaatggcgccgcgccggacgcgccgatgacgagcttgttcgcgtcgagcgcgctgaggcagaggaagtttggcgaccacggcctccgtgagcgcggaggacgcg

SEQ ID NO: 31960 - DNA, 239 bp, Setaria italica
  misc_feature (234)..(234): n is a, c, g, or t
  Peptide Sequence Number=SeqID_97934
tatcgaaccgagactaaagagcactcatcaggcatggagagcggcaagaagcacgtcagcgtggtggccctgttggccgcaatggtggctctacagctgatggcagctccggcggccatggcccgcccaatgcaggctatgaaaggggacggttcccgcgccccactgccaaggcagataatggaggagctaatcctctccaagctcggtaaacttcagtactgtggtgaaacntgctt

SEQ ID NO: 31961 - DNA, 244 bp, Setaria italica
  Peptide Sequence Number=SeqID_97935
aagttgaatcagcattcatccagggtgcgtcattatatacaaggtttctagcaggtgccaaaaccccaaatgaatctggaatcaccaatgagttcagtaacacatcaggtacctgactgtcagggtaacagtcaacaaatgcctccaatacacaatgaacaaaactcagttgttccgtagatagcggctctcctttcacatcttcttgtaaacggcgaagcacattcagatagtccattgcata

SEQ ID NO: 31962 - DNA, 279 bp, Setaria italica
  misc_feature (277)..(279): n is a, c, g, or t
  Peptide Sequence Number=SeqID_97936
cacgaagcagggcgcaggcagttgccgaagtactcggcgggcagcggcggcgccagcctggaccggcactcggcggagaagagcatgtggctgcgctccgcccccgcgacgcccgcggatccggacttgaggaggcacacccacgccagcgccgacgccgccacgaacgacgacgccttggcatccgacctcgccgccgcgccctccttgatgcggtcgatctggtggcgcggcagcaggaacgacgccatcaccatcggcgtttgctcttcctgcnnn

SEQ ID NO: 31963 - DNA, 479 bp, Setaria italica
  Peptide Sequence Number=SeqID_97937
tcattgcagcattgctacttcgaagatgtctcatgagattggtgcagtaggcaatcaggtatcacgtgatcaaggagagaaaagtgtgacaaccaccacataccatcacaacagcatgtccgatcagatctgcatgcaaaacaagtacccaccatgcctttccatgtcggtacaccatcgaacacagtttcaacagcaatataacctgaagtgaaacatacgtacgtcactcgtcctggacagtagaagtaggttctgttgtccagcaatccttcatcaaaatgaaaagaaccaggagcagcagcagaaagttggctgcagatctgctgaaatggaagaactgataattgactgccaatcagcaagcacagaagcgggagcatcaactcagtccaaggaggtgcaacggccttatcacctgtactggcctcctgatcacaaccaagatcaaacaatacaaattaacaaatagtaagaca

SEQ ID NO: 31964 - DNA, 918 bp, Setaria italica
  Peptide Sequence Number=SeqID_97938
atgtcatatggatcatcctggtcccagaacgcaaggctcaacctcgacaacaatcccgcattggcatactcaagatttgctagatgccaattgaacaagttcttctcctccctgtgtggagatgcctccatctgcctcccgtaatgtctcgagcgcagcaccaagcgaaacatccactgccacctcccccatagatgtccgcaggttgctcgacttatcaagaagcttgttaaatgtaatctctactttcttatccacctctggatcaactggtgatccatccggccggtatagtgggcacttgtctctaatcttgtgcatgggcaagccgagctgcttagccacaattcccagcgggttaccaaacgttccagtaagcacgctgccgccaagatcaccagcagctgagcgcccaccgccttccatcttcttcgtgtacacacggccaccgcaccgcttgcggccctccaagacgataaccttaaatccgaacgccaccagctgccgtgccgcggcgagcccagcaaggcccgcaccgatgacaacgacggtggtaggcctcgtgggctccttggggatgcgctccttgatggccggcgcgacaccgaagttaacgtagctgtgggagacgaggaaggagtaggcggcgttgaggaggtgctcacagtggggagggatgagcgtcgcaaagggctccttggcgagccaggagtcgtaggtctcgcgccaccggcagaggaggtggttgcggatgaggatgtagttgacctgctcgatgccgccaacatcggaaaccacgccagcctcaatctcctcgtcggtgagggagtccgccgggaagcccgccgtgagcgcggcggttgtagggtccttccgtcggttaggcttcccgtatttgtattctacttattgtattgt

SEQ ID NO: 31965 - DNA, 1530 bp, Setaria italica
  misc_feature (1467)..(1530): n is a, c, g, or t
  Peptide Sequence Number=SeqID_97939
agggttttgacccctaaaccgcgccgcccccgcagttctaccaggcggggccaccgcctcccgctatgtggggccagccgccgccgcaggctgcgccggcgccggcgccggcaccgtccggcagcgggggaggggacgaggctaagaccctctggatcggggacctgcagtactggatggacgagaactacctctacagctgcttctcccaagccggcgaggttatttcagtgaagataattcggaacaagcagactgggcagcctgagggttatggttttattgaatttggcaaccatgcattagctgaacaagttcttcagaattataatggtcaaatgatgcctaatggtaatcaacctttcaaattgaattgggctacaagtggggctggtgagaaacgtggagatgatggctcagattatactatatttgttggggatctggcctcagatgttacagatttcattctacaagatacattcaagagtcgttatccatcagtcaagggtgcaaaagttgtctttgacagaactaccggccgctcgaaaggctatggttttgttaaatttggagatttggatgaacagactcgagctatgactgaaatgaatggacaatactgttctagcaggcccatgcgccttggaccagcatccaacaagaagaatatcagtggacaacaacagccatctagtgctacatacccgaatacacaaggaactgattctgataatgatccaaacaatactactgtatttgttggtggtcttgacccgagtgtgactgatgaggttctgaggcaaaccttcagtccatatggagagcttctctatgtcaaaatacctgtaggaaagcgatgcggatttgtgcaatattctaacagggcatcagctgaggaggccataagggtgctaaatggaacccagttaggaggccagagcgtaaggctctcgtggggtcgtagccctgcaaacaaacagcctcagcaagagcagaaccaatggagcagcggctactatggttatccccaaggttatgatccatatggttatgctcggcctcctcaagatcctgccatgtatgcgtatacagcatatccagggtatggaaattaccagcagcaaccaccacagcagcccccaccacaacagtaagaataatggttcgagaggatcatcattggcaagctggcagcggagtagttggggcagcaacttaggtgcattggcatgagaaattttgtgactgttgcttgtgttatattgctccaacgtccttgtacacgtagcctgtgttgtacgtgagatttttgctgaggcctagagtgacaatagtgtttcagctgtaactggatcagacatttttccattgttcaagaagttttgtcgcgaggattttattgtgctgctcgtgccacgtaggaatactgtgtcttggtttcatttttcgacttgactaaacttnnnnnnnnnnnnnnnnnnnnnnnnnnnnnnnnnnnnnnnnnnnnnnnnnnnnnnnnnnnnnnnn

SEQ ID NO: 31966 - DNA, 433 bp, Setaria italica
  Peptide Sequence Number=SeqID_97940
agatatattctcaatgtgattttgagacttgttcgcggcaccagtaggattagaagttgccatctccatttcaacatcagaatcctccacaatagtttcatccgtcgaatttgaggatgtaacaatgaaagcaggtggttcaatagaagttgcttccaagcggccagacaacatggcagcaaatagcttaacatcactgatctttgacaaaggaaatagcacacgtatcttactgaattccaaaaggataccttgcaggaactacaagaatttgttgatcagtatctccagctactgagtcctggctgtttggacaaaattcatcaatgtggagatattttgctccagttgattccagtaaatccatggagtttctcaccaaattgatacttatctgatggccccaggataaaagtagtagcctgctagacaa

SEQ ID NO: 31967 - DNA, 695 bp, Setaria italica
  Peptide Sequence Number=SeqID_97941
acactgccctcttcccaaaggggttgaagttaacacctctaacttcagttgctgcagcaggagctggccgagggagtcttttgacaaccagatcctgactaaatatgacatcacaagccccatccctgctgatgtccaaattctcatcctttggcaccttgtttataacacgaacatcctcatctctagctttggatctatatattgctgttttctctatgaccttaacatcatcctccataggttttgaagcttcaactttctgtgggtcatttggttgaacaacgctagccttagttccactgacagttacagcagcttcatcagttatatttgtgatttccttttcgtcatcagatatattctcaatgtgattttgagacttgttcgcggcaccagtaggattagaagttgccatctccatttcaacatcagaatcctccacaatagtttcatccgtcgaatttgaggatgtaacaatgaaagcaggtggttcaatagaagttgcttccaagcggccagacaacatggcagcaaatagcttaacatcactgatctttgacaaaggaaatagcacacgtatcttactgaattccaaaggataccttgcaggaactacaagaattttgtccaaacagccaggactcagtagctggagatactgatcaacaaattcttgttagttccttgtctaa

SEQ ID NO: 31968 - DNA, 286 bp, Setaria italica
  Peptide Sequence Number=SeqID_97942
ctctcgtctatgctgggagcagagaagaggctaaaattggcgataaaaatggataagacgattatcatcgtttgttcagtgatcgggtctttaggggtgttgagtgccatcttggggttctctgcagaggggacaaagctcactccatatacaatactggtgtatggcgacgagtgcatctacccgcagaacccagcgcttgggctcggggtctgcgccgctatcttcctgctggttgcccaggtcaccttctcggcggtcggcggctgctgcggttgctgcaacg

SEQ ID NO: 31969 - DNA, 870 bp, Setaria italica
  Peptide Sequence Number=SeqID_97943
aagtagaaactagtaacaatacaaacgtacgtacttaggactaatagcttgcaaccaaactcagcacacgcaaagtgacaaaacacatacataggctcattcgcatgaaggaaactggctgaagaatcagctatatacatcagacgaactcctcatgccattgagcgcttcacaagtgaaacccatttccaccaaaggtagacaacggatgaagatatcacagcagcagcaatacaaagtgctgcaatgcctgcaatcactcctctcctcttctcatcctgtcgtgcagaatcagaacttggtgcttgtggaggactgatcttcctgtcatgggaccgggtaacttttatcgctgacaccagtggcccataagctcctttgtagggaatgcagcaggtgccccttccactccaatacagatgtattaccaacatggagttgtcaacagtcacttcctgggttatgttagtggcttttctaggaccccctgcttccttagtaatgtcaaaatccttcctgatattctgatcctgcatatcaatgtcaaataagcgtcgtcctggtccatcagttatgactatctctgcaaagaagagttgtactgtgtatttcccattagccaaacctaccacatagtatcgcaacgaacttgttgatgttcttgctgttttgtagagctctggcatgtttgtttccaaaatattgcttgtatttacaataccgctggttttattaaatggatcagaacccacatgactaactacccaatgactggtggtattaatatgaaagcctgctcctccaagatcagcggagtcttcagagaacatagttggcatcggatctgaataatccatttgcttgccacca

SEQ ID NO: 31970 - DNA, 510 bp, Setaria italica
  Peptide Sequence Number=SeqID_97944
atttccaccaaccatccttgaaaatgatgcggatgatggatagtctggacaaattgtgcaagtggcatgagagtctaagcattcttctcatgacatatccatctttcttagcacttacaaaagaagacacaaaactgcagcatcgggcgttcatggcgaaagttctgatgaacaaccctgggctattgatcctcgatgaagggcacaacccaagaagcaacaaatcaaagttgagaaagctactgatgaaggtgaagactgaatttagaattctcttgtctggtacagtcttccagaacaacttccaagagtatttcaacaccttatctttggccagacctcgttttgtcagtgatgttatgacggcgctagttccagaagcggaaagggaaacacggaacaggactggtaaacatcaagaagcagtggcaaggcgcatttttgtggaaaaagtggggcaaaagattgagtctagtagcatgcatgacagagtggatggcatctcattgt

SEQ ID NO: 31971 - DNA, 697 bp, Setaria italica
  Peptide Sequence Number=SeqID_97945
tcaacgacagtcgacggcaagctagaaatttcattacctgttacatccaatgtctgtagaaattgcagcttccctatttctcgagagagttgagagatgcctgtgtctctcagtcccaggtaccttaagtcaactaaattttcaaggtacttcagactgtaaccttgtgaaaggcagcaactttgtaaatctagcacgcgtagaactctgaagcttgcaagcgctggcaatatgttaacagcagatggaaatacaacaactgacctcacttcctgcatgctcatagtagcccgatgcgtagcatgatctaccatgcaattttgaagggataaccgctgaataatctctttttgaaggaaatatgtgatgcacgtgatccaatatagaaacgaagttttctttacatgacaagtcgcagataagttcaaacaccatatcatgtacacggcaattttctgtcatgtcatagtaccatctcttatacacaggttggatcatacctctgcctatgagctcgtaatagtacctctctccaatttcaaataggctctctccttgtttttcacattggataaggtcttcagctatccatattctaatcaaacgatctttgccaatttcataaccttctggaaacacacttaaatataataagcaagtccttagatgggatggcagatcatcatagctgagactg

SEQ ID NO: 31972 - DNA, 272 bp, Setaria italica
  misc_feature (225)..(272): n is a, c, g, or t
  Peptide Sequence Number=SeqID_97946
agttactactatggagttgatgaataagtactaccggcagtcaataactccaaaagcaaccgatgtgctcacagcctcagagggaaattgcaaatttgaaacagtgcttgagccattgtaactagcttgtattagcttttctccgccctgtacttcgtgtatctgtataacagcttggctaattaagcagcaaacatcatcgtataacaaaaaaaaaaaaaaaannnnnnnnnnnnnnnnnnnnnnnnnnnnnnnnnnnnnnnnnnnnnnnn

SEQ ID NO: 31973 - DNA, 648 bp, Setaria italica
  misc_feature (609)..(648): n is a, c, g, or t
  Peptide Sequence Number=SeqID_97947
aggaaacttgatgagtccgagttccgtaatgcattttcacggtcatatatcagggtgagggagtatgatgcgaggcgcagccgctctcgctccagaggcagaagccatagccgctctaagtcaagaagcagaagccgcggacgctcttactcgagaagcagaagccacagttatagcaggagcaggagcccaagatcgagatctgcttctcagtcacgatcacctgttaaagcaagatcaccatccagatcccagtcacctcgtgcttctcctccgcgcgacaagtccgctagcaggagccctgccaggagcaaaagtctgccccgatctgattctcccgcaaaagctgagtgaatcagatcgtgcgcttgaaaccttcagaaatgtgtggctggagctgaatgattgtcgtatggattgtgaacagcactctgttctgaagtagcattgctattccttccaaaattttacaagcgtgcactgttcttttaggaggttactttgtgctactttgtaattgacatgatgcaagcactgtcattgttttttgcactcagcagaacaacggcattgatgagttccataatccagctgaatttatcaaagttnnnnnnnnnnnnnnnnnnnnnnnnnnnnnnnnnnnnnnnn

SEQ ID NO: 31974 - DNA, 687 bp, Setaria italica
  Peptide Sequence Number=SeqID_97948
tacgcctcctggttttgcttttgttgagtttgaggacccacgtgatgctgaagatgcaatttatggtcgtgatggatacaattttgatggccataggttgcgggtggaattagctcatggtggaagaggcccatcttttgatcgatcaagcagccataatagtgttggacgccgcggtgcaactaggcgatctgattaccgcgttatggttactggactaccttcttcagcatcatggcaagatctcaaggatcatatgcggcgagctggtgatgtctgtttctccgatgtttatcgtgaggctggagctactattggaatagctgattataccaactatgaagatatgaaacatgcgataaggaaacttgatgagtccgagttccgtaatgcattttcacggtcatatatcagggtgagggagtatgatgcgaggcgcagccgctctcgctccagaggcagaagccatagccgctctaagtcaagaagcagaagccgcggacgctcttactcgagaagcagaagccacagttatagcaggagcaggagcccaagatcgagatctgcttctcagtcacgatcacctgttaaagcaagatcaccatccagatcccagtcacctcgtgcttctcctccgcgcgacgaaacttaagtaacggtcgaacggaaacccttagtacctaagta

SEQ ID NO: 31975 - DNA, 298 bp, Setaria italica
  Peptide Sequence Number=SeqID_97949
cagcaaccagcacaagcaggacagcagccgcctcatggccctccggctcagcagcagcagccggctcctggcccttcagcgcaacagcagccaactcagaactgaagtacttacaagaatgttggatagtgtactgctgtaattcctctctgctagaaaatgtaccctcgttggttgccagcttctgtattttcttaattttgtgattaacagcaaaacttcgtattattgcttatctgagtttgaaaacccggaagatatactggatttatccagcatcaagattttgtgttgtcaa

SEQ ID NO: 31976 - DNA, 421 bp, Setaria italica
  Peptide Sequence Number=SeqID_97950
gacacggggaaaaaggacagcgaccgcagattgtgatgcctgcgaattcaactccaacgcagcagcagaagcagcaacaggaggaggagaccccgtcccaggacctcgcggacctgctccggcgagctgcgacggcggacaaaacggtgctaatgacggcgatcaacgaggcgtgggcgtcgccgggttccttcctggacctgttcctggagagcttccggcacggcgagggcacgtcggacctgccgcgccacctccttatcgtggccatggacgggaaggcctacgagcgctgccttgccgtgcaccccttctgctactggttccgcgtcgccggcatggacttcgccggcgagcagaagtacatgaagggcgactacctggagatgatgtggcggcggaaccggctccagcagcgcgt

SEQ ID NO: 31977 - DNA, 130 bp, Setaria italica
  Peptide Sequence Number=SeqID_97951
tctggattactagtgttgagaaattcctaaacctagggataattataggctcataccaaataccctgaaggatcaaggttatataaaggaacatgtactcatctattataaatataagagaactagttcc

SEQ ID NO: 31978 - DNA, 649 bp, Setaria italica
  Peptide Sequence Number=SeqID_97952
caccggcgacggcgacgacagcgccaagaaggccatcgtgctgtacgccgcgccgagcttctccgacgcggagctcgtcgcgcacgaggtggaggcccaggacgaggaggacagcgacgactacctgacgcacacgctgttcgcggaggaggaggacgagctggtgagcgcgccggggtcggtcatcgacgtgatgcgcgacgccagggagagggaggccggcgagggcgccgagttccgcctcgaggacgagatcgaccacgtcgccgacgtcttcatccgccgcatccaccgccagctcaagctccagaagctcgactcattcaagcgcctctgcgagatgctcgagcggggcgcctgacgattgatcaatcaagcatgcatggaggccaagattcgtactgagctgaagctaagatcaagtttatataattatcagttacttaattaacatgcatggagtggtggattaatcccgtgcatgtaattaatgtaagtagaaggaagaataaaggtgggcagggcgagaagatgctttccttaagcaagggtttacataagtagtagagggatggcagctgggtttaactactgtagtcttgttctttggttcttttggggggaacattggtcatgtgctcaaagcttt

SEQ ID NO: 31979 - DNA, 436 bp, Setaria italica
  misc_feature (407)..(407): n is a, c, g, or t
  Peptide Sequence Number=SeqID_97953
tggtagccacggaagaacataataagaaaagagtgtaaacggcaaattagatttaatcctagtggtcgagaaatgagcactgacaaattgagcacgtcaggagtagaaactagctgttggtgccccctcgggtaattttgcagatgaaagaaatctgacagttgttgatgcttttcgacattactggcttcaagttttaaagctgaagcctggcgtgtactagtcattacagatgttgtatgatagcactatgtacagttttgcaggcgccagataatgccctcaatttcctttgtaataggagaaacgagaccactattcactgaacctgtttaagtcatttacaatcttatttactaagaattgtgtcgtaagctaacctaaaaaaaaaaaaaaaaaaaaaaaanaaaaaaaaaactaaaaaagaagaaactaa

SEQ ID NO: 31980 - DNA, 330 bp, Setaria italica
  Peptide Sequence Number=SeqID_97954
agcaaaagagagagaaagctagaaagaaggaaccccggccctctcaacacaagctagcctgcaatcgaccagccggccggtagtgatcaaggccaggctgcaccgggcagagccagtagccgcagccacgccaacaccaatctgcaccacaaggccaagcccctggtcctcgttctccgcgcccccgcgaaccctattccttgttcttgaatctctcatccccaatcctacacaccagcagctgagaggagagagaattaattctggagatctagagagagagagaggaggcggggtgcgcgcgcggtggggaggggggagaatagaatt

SEQ ID NO: 31981 - DNA, 228 bp, Setaria italica
  Peptide Sequence Number=SeqID_97955
ccactcgccgccgccacctcccgagccccaggcgctccagcacccggagctcccccgctcatcgcccaccatgatcatccccaagaagaaccgcaatgagatctgcaagtacctcttcaagggagggcgtgctgtacgccaagaaggactacaacctggcgaagcacccgcagatcgatgtgcccaacctgcaggtgatcaagctcatgcagagcttcaagtccaagg

SEQ ID NO: 31982 - DNA, 447 bp, Setaria italica
  Peptide Sequence Number=SeqID_97956
ggcggcagtggcgatggctagctacgacggcaaacggcggtggcggcagcatgccagcatcgggggtggggcggggggatttagcttagcgacgccgtggcggccgctttaatatgtgcggggcgagcgacggcgacgtgggcgttgcccggcggagggggagttcgttcgcgcggtggcgggcagaggttttggaatctccccctcccgcacgctcatttgtacgccgccgcagaaagcatcctcctgatcgggatgccggaggagggaggaagctttgggcgtcgggttaaagaaatgggggcgaggagcacgccgcggttgggctacctccctcgcgcgcagccactgccatggcgggccttcccttcccggccgggggtgatcagtgatcactagtttaattttaatcgcgccattgatgctggatgctttggcggactaagg

SEQ ID NO: 31983 - DNA, 1129 bp, Setaria italica
  Peptide Sequence Number=SeqID_97957
tctttctagtctttgctgcctcagggctaaggctgtcgaagccaacggagctcggtatcctccatctccagtttcctttctgggtagctggagtgttcattctaccagaactgtcgaggccaagaatatcctgcatggttaccatggaagtcctcgcaacagaagaaagagcagcagtaatcagtgtccatgagatgtcagtattctcggcttccggtagatacttaatcacaatttgcctctcttcctcgggtaaagttttccaccagccaagaactgtatcattatcatgtgttccggtgtacacaacttggtccatttcatggttatgcggcaagtgagggttgtcagagccagatccaaaggcaaactggagaactgccatcccaggggccccaattgttttccttagctgaacgacatcttcagtaatcaccccctacaagtagcaatcatggatgagataaacattagcatgaaggaatcaaacccattatgctgatacccagcctgtgcaacggattgccgcctttgaaatgaattgctgagccataaatgtctctataaagtccttctatattttagagtatcaagatatttgtcttccaaggctccaagatggcgatttttcacaggttcaggccactcataccaggagaatgcaccaatgcttctgtcaatagcagcaaaaagtgctgcatcttcaagccaagctttgcaataagaggttctttcagatttgcaacggtgtcaaattcaacatactccacatccacaggactaggaagttcatcttccatcaatagaccatcttttacaagctcttcaagagatatcaaaagggtattaccacagttggcatcctgcccagaataaggagatccatcctccccagccgacctccctggaggaacaagtggcagaacctgccagagcgtgcagccggcgtcgcgtagccagtggaggaaggcgagcgcctcgtcgccgaggtcgccaatgccgtgcgggccccggagcgacgtcgggtgcagcaacacccccgcacgccgccgccgcgccggctccacggtgggcatcatctgatcgtacccctccggcagctcctccccgacgcccacggccgcggccg

SEQ ID NO: 31984 - DNA, 1439 bp, Setaria italica
  Peptide Sequence Number=SeqID_97958
tcatcaagaagaatgcttaatcaaattgggaatgcacatacatatgcagcacttcatgttcaagcttaacctgcaaaccaggccatcatgtacaagcacgcgaaggttccagccaaccagaacagaacgcttatcggggacaggtactgtagtctcatagaacttagcagccagaccgctcacaattggctgccatttaatgtaaggagcttctggcagtagaagataatgtcgtggccttcacagacgattgtacagcgcaagcaactccttcagctttgctgcctcagggctaaggctgtcgaagccaacggagctcggtatcctccatctccagtttcctttctgggtagctggagtgttcattctaccagaactgtcgaggccaagaatatcctgcatggttaccatggaagtcctcgcaacagaagaaagagcagcagtaatcagtgtccatgagatgtcagtattctcggcttccggtagatacttaatcacaatttgcctctcttcctcgggtaaagttttccaccagccaagaactgtatcattatcatgtgttccggtgtacacaacttggtccagttagaacaaacttaggtaccaatttcatggttatgcggcaagtgagggttgtcagagccagatccaaaggcaaactggagaactgccatcccaggggccccaattgttttccttagctgaacgacatcttcagtaatcacccccaggtcttctgctattatatttatgctaccaacagccttgaagatcgcatcaaaaaaggcattccttggtccagccctccagcttccaactagtgctacttttgcgtcagaaggtactgcccaaaaacctgcaagcccccggaaatggtcgatacggaactcatcatacaaatcaagggctcgtttaatcctctttatccaccatgaaaagccatctgcttccatagctctccagtcatacaatggactgttccatagctgaccagtttcactaaatgcatcaggtgggacaccactaacaaaagtggggaagccattcttgtccagcaaaaatgatttcctgtttgcccatacatctgcactatggtagccaacatatataggcatgtcacccattatgctgatacccagcttctgtgcatatttacggatccgttgccattgcctttgaaataagaattgctgagccataaatgtctctataaagtccttctgttttagatatatgtcttccaaggctccaagatggcgatttttcacaggttcaggccactcataccaggagaatgcaccaatgcttctgtcaatagcagcaaaaagtgctgcatcttcaagccaagctgatatatttggatctttcttgaagcagtcatattgtgttctgagctctccttgacccagtaagagcctctctgctgcctttgcaataag

SEQ ID NO: 31985 - DNA, 934 bp, Setaria italica
  Peptide Sequence Number=SeqID_97959
ggacccgaccgcgccgctcgcccccggcctgaagctcgtcatcccgctcccctgcgtctgcttcaactccaccgacaacaacctacccgccgtgtacctctcctatgtcgtccgggtcggggacaccgctcagtccatcgccgccagccacgccaccaccgtcacggatatcagcaatgtgaacgccatgggagccccattgtcgcgcccggtgacatcctcgccataccattgtccgcttgcgcatcagcaattcctagctctgcctcagactacggactgcttgtggcaaatgggacctatgcactaactgctggtaactgtgtgcagtgcagttgtgggccagagaatctcaatttgtactgcacgccagcgccagcttcattaacaacatcatgttcaagtatgcaatgccccaatagcagtctaatccttgggaatgtgactgcacaacccaccagtggtggctgcagtgtctcgtcttgcatttatggtggctatgttaatggaaccatcgcaacatcgctatcctctggtcttcaacccacatgcccaggaccacatcaatttcctcctctcacggcactgccaactgctgtaaaccatgggtcgtactctccagcacctgcaccaggacctggagaggctggcggtgccatccctggaggatccaatgtctctccggcaaatgagcctgctggaaacaccgcacaagcgcccgtcatgaatcagccgggctgtatcctcctcctttcctttctttgtatggtcttgtcgttgcggatgtgatcatgtgaattcctcctgtgcagagtattgttggctgtatttgtattgaaccagagaggcctcatttgggcccggtggaacctcaatgagaaagattgctgtagcttgtaagtccttatcttcacttaacaaaaaaaaaaaaaaa

SEQ ID NO: 31986 - DNA, 279 bp, Setaria italica
  Peptide Sequence Number=SeqID_97960
cccgcggaggccaacgaccagcgcccatcgccgattcgccgttctccgttttctcctcgcttgtttggtgctttcgatccccccaaggccacagccggcagcgccgagcgcgccgcggcgggaggattttggttggtggattgttggtggcggactggcggctccactcctatccacggcactggtccaatccaaatggcgggcaataatagcgacccgatccaggaggcgctgggggcgggcgtgaagcacgaggcggaggaggaggaggggacgacg

SEQ ID NO: 31987 - DNA, 289 bp, Setaria italica
  Peptide Sequence Number=SeqID_97961
ccccgagcaagtcgtcgtcgcctcctcccaaagctcgctggttgattcgattcctaccactcgccgatcgcttctgctatgccgtcggcgccagccgtcgtgccgccggagttgccgaagctttcgccgacgtcgcagcaagccctccggccgcgctctccgctcgccaacggctcggccggcggcgacttcgagctgcggcactggcgcaggcccaagaagcgcgcggcgccgtcgccgccgtgggcgccgccggttatccagatcccggaaggcgccgggagcgacg

SEQ ID NO: 31988 - DNA, 399 bp, Setaria italica
  Peptide Sequence Number=SeqID_97962
ccgccgccggcgtacccgccgacccaggacgccggcgcgtacggccagcagcagcagcagcagcatgagaccaccagccgcggcggcgacggcttctggaaaggatggtgagctttcttgctgatgctctagcgtatagtgtgttggttcaggggatggctgagatgtgtgcttgggtctttgctaataactctatgctcctgttgctgttgcgtgtcctctcagctgcgccgccatctgctgctgctgcgtcctcgacatgtgcttctgagaaggaggacgacgggtccacctgctcgatcgccatgaccgggggattgcatgccatggagttggatgctcgtagccgccgacccgccgtggtgtgctatgttgtgttacccatatcgataggcttgt

SEQ ID NO: 31989 - DNA, 294 bp, Setaria italica
  Peptide Sequence Number=SeqID_97963
ccgccggcggagcagagcttgcacgcgcccgaccgcggctgcctggcgtggctggacgcgcgcacgccgcgctccgtgctctacgtgagcctgggaagcttggcgtgcgtcaaccgcgccgtgttcgaggagatggcgtgggggttggccggcagcggcgtgccgttcctgtgggtcgtccggcctggcatggtcactggcggcgccgctggcgaagaggctccaccgccgttgccggacgggttggaggagaagatgaggggcagagggaagattgtgacatgggctccgacg

SEQ ID NO: 31990 - DNA, 738 bp, Setaria italica
  Peptide Sequence Number=SeqID_97964
agaagagagtacaagaggaatttccatgttaccaggatcttggtgtcgaagatagtgatggcgacactttggctcttctagtgggactttttgttagaaaggcttctgaatggtctttagtgatcaatgctgtgagcactattgatgtgcttaggtcctttgctgcaatgacattgtcatcattcggcaccatgtgcaaaccacacattctactgaaagatgatgtgcctatacttcggatgaagggtctatggcatccctatgcttttgcagaaagtgcaaacgggttggtaccaaatgatttaacccttggtcaggatttatctggcttcaatcgttttgcgttgttgttgactggtccaaatatgggtgggaaatctacaatgatgcgtgccacctgcctgactattgtgcttgcccagcttggctgttatgtcccctgcacatcctgtgaattgacccttgcagattccatctttacacgtcttggtgcaacagatcggattatgtctggagagagcacatttcttgttgaatgtacagagactgcttctgttcttcagaatgcaactgaggattctcttgtattgcttgatgagcttggcagaggaactagcacatttgatggatatgcaattgcgtatgctgtgttccggcacctcgtggagcaggtgcgatgccgtctgctcttcgccactcactaccactctctgacaaaggagttcgcctcccaccctc

SEQ ID NO: 31991 - DNA, 1783 bp, Setaria italica
  Peptide Sequence Number=SeqID_97965
ggcgaataacacaccactctgcagctatggatgaacactgggactttgatgttgccgtgatgtacagcacgattcatgatactaccagccgagcacctgcgctaaatctcgccaaaaccggcaccgtcagagtcgcggcacagaaattagcaccatggccagatgaaaccctggcctctctaacctacactcgccataagtggtttaatgcaaaaccgagctcttcaagagcgcgacgtgagttgttccctcatcgggctgggttcttgtatggtgggaggacatggtacctcttcacatggtctttcctcgacctgcagtgcgacacaaggtgcctctcatccaccttcccagtgtttgatagccgaacgccgtactccagtagcctcctcacgtccctgggaatggggctctgccactggccgtcccaccaagcgggagggaggagcggggtaagggcgcattggtgcggctggcgctggcagctgagtgggccagcgtatctgttccagatgtggccccagccgacttgcgtcgagagcccgtcaaccaacaggttgctgtggacgctgcttaagaacgtgaagttggtgcctgaaggctcttgaccatgtctgtttgctgcagccaatgctgcaatgagttgagcgtatgttgtccccacacgacgatgtgctccggtgacaactgcgtatttggcttgtgcagctagaaagaaatcaacaaatgccacccaccttggagctgatccccagtctcttgaacgaaaattcaaaggcttatcatttccatctatctctagaccagaagtcttggtaaacagcttgtaatcaaaataaagtacctctgcaaactcactgatgtctgactttatctccttcacaaatgctggtgtgtctgagaccaatgccacccgaggtgtacccttcatactgcaaatctgtagggctctcttgatacaaagaactgcagcttttcttgctcggactggcctattcgccatcatgcgcatgtgcaaaacaatatctggattcgcacccttcaaagcccagttaactgctgcttggactgtactggatggtgatatgatagctcgcataagttcaccgaatgtatttggcctggcatgtaatgagtctggcaatccaaaaagcgccaatgcagcagccttcattctaggatgaacattcttcagaaaaaactgaatcccaacagcatctgtcgtgccatcaaaccagataattggatccttccagctattccagtcactacacagaacattcgtctcagccgggttttcaaaaatgtccactcttatattcagatctcgaccatacgttctagcacagtgatgtttcctccacaaatgtttgatttcatgaatagtgaacgactggttggtataagaaatgtactcccaaaaaggatacaatcccctggtttgcccgatgattaaagaccggtttaacatgacactcaaggctcctgctgttaagatcttgtacatttcattgccaaatccagcttcagatgctttgcccaacacaaagccttgtttgcagaattcatgggcaggaagcattctcactctttctgctccttggagctcgaagtgttgccggatcatctcgcggacccgcaggctggcctgctccggcgagccccgcccctcgcccgcggcctcctcccccatcctctccaccgtcgcgcacgtggcccagtccccgacgaccgcggagtccccgacccccgcatcccgctccgcggggggcgagtcgtcgag

SEQ ID NO: 31992 - DNA, 474 bp, Setaria italica
  Peptide Sequence Number=SeqID_97966
taggtttggtaagactacaagacgtaccgttaacccctcaacaatccccatattcccccagctcgtagagagatatctcattctttgtatacatgttggtgattcaccaagcccagcttcctccagtatcctaatagactcttcagtaagggattctgcacctcttctttttccttgtacacttagcactttcgctagaaggtacatggtacttgcatactctgggtgaccaacccccataacacgtccttctatctacagatgacaattagaaagtataaattatataattcaaaagatcaaggaagagcatattgacatttccattgttttgcttgtcattctttcatcaaacaggtacaggtagtagacagcatggtgacaagtggggacatggagtgatagatgaaaagcatatattcatatagctctgagcctctgacagattatatgtaaactacttggctacttgca

SEQ ID NO: 31993 - DNA, 543 bp, Setaria italica
  Peptide Sequence Number=SeqID_97967
tatcttcctttgccagatttcagcttcagtgaaccgttttgattttattaactccgtagagagatatctcattctttgtatacatgttggtgattcaccaagcccagcttcctccagtatcctaatagactcttcagtaagggattctgcacctcttctttttccttgtacacttagcactttcgctagaaggtacatggtacttgcatactctgggtgaccaacccccataacacgtccttctatcttcaaagcacgctcataacatgtctgggcttgagcaaacttgtgctgaagatgatagcacattccaagactatgcagagctgttccaacccgtatatcatcggatccaaatgattcctccaggatctcaattgcttccaaatataatagttcagctttctcatactcttgctttaacctgtaaaactctgccagattgttaagggctgacgcgacatgcggatctctcaatccaaaacccttctttagcttctagcagggctgcctgaaataacttctcagccttgtccagttgtc

SEQ ID NO: 31994 - DNA, 569 bp, Setaria italica
  Peptide Sequence Number=SeqID_97968
acaagaacgaacggaagttagacaaggaatttagcttggtgaaatctactgtttcgatgagtaccctcaggcacctcaagtagtcctgcctgacagcctttgtcacaaacctccgcgtatcaggctcgctgtaaagtgaaatacacttgtggagagcgtcttcaatagatctataatcttgcacctaatagatctataatcttgcacctttccaaacttatttttaaaatggattcgcagtgtggtatatgagacatatatgagttttgtgctgggccatataaatggccgagatgtgtccaatatgtgtacagcatcaattctgaagaatccatgcttcaaatgttccagtggaagccttaccaagagtaccaactaccctggcgctagcacatgctttgccataatatcagtaagcccaacaacatcaagtgcttgcaaaagaatagctgttgctgcaatcttttctccatctgtagtagatgtgctttcaagtttattctgatctgtacttgaatttaatattgcttctgtaatcctgatcgaatcattgctgtgctgttgtgccc

SEQ ID NO: 31995 - DNA, 573 bp, Setaria italica
  Peptide Sequence Number=SeqID_97969
aactacaagtacgacaactaagtagacaacgactacaataaacaatagtactactgggcttgagcaaacttgtgctgaagatgatagcacattccaagactatgcagagctgttccaacccgtatatcatcggatccaaatgattcctccaggatctcaattgcttccaaatataatagttcagctttctcatactcttgctttaacctgtaaaactctgccagattgttaagggctgacgcgacatgtggatctctcaatccaaacccttctttagcttctagcagggctgcctgaaataacttctcagccttgtccagttgtcttttctggaaaaaatcccgtccattatccgtgaagattctccatttgactgtgtgttcatttgagaccactgatccatcttcaatccgttgaagaccagtagcatttacctcagcttgctcactagttgcagctgggctaactgagtcttcctgggcgaatgcatagccgttgctcagaccaaagaaaaaaagctgcttgtccaatcagtacagcaccaactgacgaacccaacttgcaggtagacca

SEQ ID NO: 31996 - DNA, 614 bp, Setaria italica
  Peptide Sequence Number=SeqID_97970
cttaggacttcagctgcatgtgcagtatgcaatgaatcccatccctttgaaagctccagagtatgcaatatcttcctttgccagatttcagcttcagtgaaccgttttgattttattaactcctccgggccttgagattgggtgcagccgccgacggtgtgcccgatctcaaatgtccggttcagcgtccgttacccctcacaatccccatattcccccagctcgtagagagatatctcattctttgtatacatgttggtgattcaccaagcccagcttcctccagtatcctaatagactcttcagtaagggattctgcacctcttctttttccttgtacacttagcacctaagagcataaaagaagttagatatgggaccaaatccagatccagagtgagaaatgtacacagtggactaatcaccatacaagttacaaagagaataattggtttcggtggaggtgaagacacacaccgtataatccagcgcaatggaaatgtacatgccagactaatcaccgtatgagttacacagaggagaattggttttggtggagatgaagaggacatgctccatatgatccaacgcaagggggatgtacatgcccggca

SEQ ID NO: 31997 - DNA, 1891 bp, Setaria italica
  Peptide Sequence Number=SeqID_97971
gtttttaaaacttttgtttctctgtccacgaaattttgcataatttcaattatatgggtaaaatattggtatcgattttcaaaacctgaatatagaaaaagaaaccccaaacaatctgacccaaactattgggtaaacccaagtgcccaaccttatcctccatgagtcctccctacatgcatctaactttacaaccaccccatattttaaaacagggaagatggaagtacatcgacctgtgcaaaatgcacaaaatcttaccaagtaaacctttcctacaaatttctcctctaggatgaataacagcttgatgttttgcgtaaccctgggcaagtgattcttgcaaccttcaaacatcgcagaaaatgtacatgccattgggttctaacaagttgatgaagtccgaggaagccctttcatgccagctttcaatgtgatttcctaatgttcgcctgtaaaatggctttcctacatatcatacttattacttcctattactctcacctcccaactcttctattatttttcgcgcctcaccaagcaaatcctgcaactccgtcgtctgctgtgtgaaatctactgtttcgatgagtaccctcaggcacctcaagtagtcctgcctgacagcctttgtcacaaacctccgcgtatcaggctcgctgtaaagtgaaatacacttgtggagagcgtcttcaatagatctataatcttgcacccctggcgctagcacatgctttgccataatatcagtaagcccaacaacatcaagtgcttgcaaaagaatagctgttgctgcaatcttttctccatctgtagtagatgtgctttcaagtttattctgatctgtacttgaatttaatattgcttctgtaatcctgatcgaatcattgctgtgctgttgtgccctagaaaggtaatatgtagctacattgctgtttgcattcttcaaatcactagcaattttgtgcaatgataaccttgccaagtgtaccaatgtaacagctagcagaaaatgaccttcaggcagaacctttttcttggtggcaaggcttctttccaatagctcttctgattccttaaacttctccaaggcttggagagttaaacttaggacttcagctgcatgtgcagtatgcaatgaatcccatccctttgaaagctccagagtatgcaatatcttcctttgccagatttcagcttcagtgaaccgttttgattttattaactccgtagagagatatctcattctttgtatacatgttggtgattcaccaagcccagcttcctccagtatcctaatagactcttcagtaagggattctgcacctcttctttttccttgtacacttagcaccttcaaagcacgctcataacatgtctgggcttgagcaaacttgtgctgaagatgatagcacattccaagacttaagtacttattgtctagttggcgttggtcaagttgcaagcttcaatgaggatttaagttccaaagaattttgccccatgcctttcaaacacaattattttgtctaattaatttgaaaatttattgttacaacaatagttaaatcaagttacaaaacatgtatagtagtgtgccagacctttccaaacttatttttaaaatggattcgcagtgtggtatatgagacatatatgagttttgtgctgaacctaagagcataaaagaagttagatatgggaccaaatccagatccagagtgagaaatgtacacagtggactaatcaccatacaagttacaaagagaataattggtttcggtggaggtgaagacacacaccgtataatccagcgcaatggaaatgtacatgccagactaatcaccgtatgagttacacagaggagaatttggttttggtggagatgaag

SEQ ID NO: 31998 - DNA, 531 bp, Setaria italica
  Peptide Sequence Number=SeqID_97972
tactaaggtaggacaattagaccgaaccaataggggcactccattgggcgttgctccatgaaggaatccttcccacatgcgatgttctttgatgctccaagtctttcaacggtgtgtcttgcgtatcgcgctcaccgctgaggacacatgttgcggattcaatgcgcagcacgtaatcgtgtcaccaaggagaaagattattgatgagaacctagaatgcagaacaattacttaaacagcaaaacgaacagtagtacccttgcttgatgctactatgttgaagaaggctatatatcacataagaaggattaatctcaagaaaataatgagaatacacaacagtaactttaagagcaaaacagcattagtactttcgctagaaggtacatggtacttgcatactctgggtgaccaacccccataacacgtccttctatctacagatgacaattagaaagtataaattatataattcaaaagatcaaggaagagcatattgacatttccattgttttgcttgtcattctttca

SEQ ID NO: 31999 - DNA, 313 bp, Setaria italica
  Peptide Sequence Number=SeqID_97973
ctctgcttcccaaggccagccagagcgggtcgagccggaccaacgccattacaaaagctgcgagagaggtggagaggcagaggaaggggaggaaggcgtagggaaggaattgaggtggggtggggctgtagagtgagtgagggacagagggtagggaggaagcgtaggctggcgatcgcaggggcgatgacgacggggggcatgccggggtcgccggtgggctcggccgcgggcggccccgcggcgccggaggtggcggcgagggacgcggtgatcgggtggttccgcggcgagttcgcggcggccaacgcca

SEQ ID NO: 32000 - DNA, 343 bp, Setaria italica
  Peptide Sequence Number=SeqID_97974
cgcccgccttctcccgcgtgggccgtggggcgccgcgcctcctcccccgcgtaggatcctgtcaccgcccgctctcccccgccgcggcgccgcggcggagcacgagaccgcgcggcggcagcggcgcttcccctagccttctagttacccagccattggcgattggtgccgcgtggagaaaaagggtggcggccggtgtctttaccgctccgggcattaactccgggctctggagccgaaccaccttgccgtgcggataagcacgacgccatgggaggacacagctgacctcggcgcaggggcggaggaggacgccgcggcggcgagatggtgcgggggcggc

SEQ ID NO: 32001 - DNA, 262 bp, Setaria italica
  Peptide Sequence Number=SeqID_97975
ctggcccgactggcctagctcctaggccccttgtgggtctcgagatgatgccagtgtgtcctgcagtcggtgtccttcattggctttcagcctttcactacccaccccgccaactgcccttcccctgcaagcgtcttcgccactgtctcccttaaggacaatcgcctcgagcactagaacaagcaccacatcaagattgctgtgggcatgatggcccacccgatggggatcttagcttcctttgtctggagaggacaacatt

SEQ ID NO: 32002 - DNA, 421 bp, Setaria italica
  Peptide Sequence Number=SeqID_97976
gtgttgttgtcctcgacccctttggccaactggcgagcgtgacctgaatttgatatcttttggaatgtttctgcagtgcatccatcaaaacttacgctgaacaacagagcatgtgacgtgctcgagttgggcaatctgttgtactccagcaggtacttgattcccatggcatgatgggccaagaggaaatcacctcggggactggggagtcttatgctggtagctagtccattcatgaaagtaatcctatgtggtacgagtgtcagtggagaagagaaccatgttggccctttgcagaggctggtacaggtaggaaatgctttactcccctcctggtactacctgtggcgaagagagccatgctgcgagttgtgttggatggggtggtacagttgttagcttccgattctctgattctctg

SEQ ID NO: 32003 - DNA, 542 bp, Setaria italica
  Peptide Sequence Number=SeqID_97977
tctattctagtagtattattggttttacttgtccttgtctaagtacctagtttgtaactttggtgatcactgcagacatcaatacttatactgggcctggaaccatatgattcaccacctaaaattaatctactaagggaaccaaccaaagaatcatcatcctttttacttggttctgcatatccttttctccagtgtgttattcttgactttattctacttttgaaaactgaatcagcaactgatgtgttttgtgatggcaacagtgggcgaagacgagtagtaaagatcttttgccttgcgaaggattcttgaacccttgataggtaagatataccatcatagatgcacatattgaaatcaaagccatcattagccatagttgataaataagatgattgacatgagaaactgtatgaaggcattcctagctgaagctcatctctaggaaataagtgaaaattgtacgggtaagcgacgagggtagagggggaggagtcatgcagccggaaggggcagacggcgatctgtagcggctggaa

SEQ ID NO: 32004 - DNA, 316 bp, Setaria italica
  Peptide Sequence Number=SeqID_97978
tccacgggacctcggcgcggcccacgagctcggaacccaggaccttccccagcatcaccgcgcgcctacgccctccccgccgcctcctcacctcgaacaccacggtgccccggtccacgagctcgcgcacgcacgccggcgagccgtcgcagctcagcgacgccacgtcgcgccacgacacggctctggcgcccgttgtcgtttctcctgatccgtccggctgctcggcgccgcggctgtcgatctggatagccctccggccgcccgccgggacgtggccaccgggaggaagagctcgcctccgctgccgccgccg

SEQ ID NO: 32005 - DNA, 746 bp, Setaria italica
  Peptide Sequence Number=SeqID_97979
ataaattgcccagccagaaatactggtggatgattgacagccttagaaattcccatgggccatcgctacatgagattggatcactctcatggatagagaatacacaagcttcattctgagggaagccaacacatcattggtgatgtctagtaacagtttgcaaccatgtgaactgtgtattctggatgggtcagatcagcctagaagagtctaggttcgaaattactggtttgtcatctggctcttcattagagctactgatcccagaaaactcgtcagaagaccagtcacttggtgcttgttcctgatcatcactttcatcctttactgatgcaccatctgagtcgataactgaagggatggctgctgcatttgatcttgtaggcttccatcatcctttccctccaaacaataatctgtccttgtcaaaagagacaagaatgcaaggaacaaggtccctgagtttgactccaatcttccgataatcactttttggtaatcctttacaatctatccgaaccaattcatcaaccaaaaaggcatcccgaaccattggcacaagactagcataatatccattcttggcaagcttcatcaaaacaggaacatgtaggcccttcttcctcatttgcttcgtctcctcaactgtgagcccctctattgttgtttttgatcaaccttgggtacacaggttcagctggcttccatagcatcaacggaataacaggccttttctttggattata

SEQ ID NO: 32006 - DNA, 249 bp, Setaria italica
  Peptide Sequence Number=SeqID_97980
tgagaagatgcttatggctgcagcagattgagggccgacagctgcttctccacccgtgcctgggaagcccccgcgagaggtgcggagagatggccaggattgcttgcccatctcttagttacttggctaataagtaagcctctccataaaaggagaggcaagcaaggattaagaaggaaaacctccttgcatccagggctgtcttccctggccagccacgatcattttccccctctcatcccaaaatca

SEQ ID NO: 32007 - DNA, 404 bp, Setaria italica
  Peptide Sequence Number=SeqID_97981
tgaatcacacatgcatgtgaacctgcaacatacatgtcacaattgtcaacaattgtaaaaggaacgtaggattcttgcaatgcagtcaaataacaagtaccaccagtcaaataacaaatattatcattgtcctatgttcaaattcaaccactagttcttcagcagcaactttaatggctataattatcaaacacaacaatatggtgcttgccgtagccaacagatgacatctgattctacttcttatctcaacagctagcacaatcggaacacccaatagcatataagagtactccaaatcatactccctccatcccaattacaattcgtttggctttctagatacataactttgctatgtatctagacatagtatatatctacgtgcatatcaaaagactatg

SEQ ID NO: 32008 - DNA, 366 bp, Setaria italica
  Peptide Sequence Number=SeqID_97982
gcagcctgagaaccacaccctgcagcctgagaacctgaagatctcttgctgactaagatcatcagcagctgaaattaggggttttgatgtatactagtttacagcaacaaaggtgcatttctggcactgtgtaacgttagttactcccgcttatgtttgatgacaggcagggcaaaaggcttgtcattgctgtaaagtaaccttcccagtgaagatattcccgtatctcaggcttccttagccactgtttatgttttaattagtttagtactttacttaattaaaaaaaaaaaaactaaaaaaaaacgtaggaacgtacgtaccgaaaccggaaccggaaccaaccaacgggaagggtaaggtagg

SEQ ID NO: 32009 - DNA, 620 bp, Setaria italica
  Peptide Sequence Number=SeqID_97983
ggccgccatcgcgctgctcgcgctctggtccatgtccgccgcctccgtctccctccgctggtcctcctcgggcgacctcgccgccttctccggggacctggacgtcccgctccttgacgacctcgactccctcgagatggaggagagggagaaattagtgggtcgaatgtgggacatgtacacacgcaccagtgatgaggtacggcttccacggttctggcaggaggcgtttgaggctgcatatgaggaacttgctggcgatgatacgcaggtccgtgatgcagctatctctgagattgcccgaatgtcagctcacaaacttgagcttgaacagacagtgaatgagaatgaggaagagaatgcagcaagcaacagaggtggtaggtcaatggggaagtagtagcttcgcaaacaccctgcagcctgagaaccacaccctgcagcctgagaacctgaagatctcttgctgactaagatcatcagcagctgaaattaggggttttgctgtatactagtttacagcaacaaaggtgcatttctggcactgtgtaacgttagttactcccgcttatgtttgatgaacaaggacaagggtactaaaaaaggtactttagttacta

SEQ ID NO: 32010 - DNA, 296 bp, Setaria italica
  Peptide Sequence Number=SeqID_97984
aaggtcgccttcttgttcctggtcaggggggaactgccgctgcggcctctgtgggagaagttcttcgcggggcaccaaggactctactccatttacgtccacgcccacccctcctacaccggctcgccgccggtggactccgtcttctacggccgctacatcccgagccagaggacgaagtggggcgacgcgagcctggtggaggcggagcggcggctgctagcgaacgcgctcctggacctgggcaacgaacggttcgcgcttttctcggaggcgtgcatcccggtgtacgactt

SEQ ID NO: 32011 - DNA, 261 bp, Setaria italica
  Peptide Sequence Number=SeqID_97985
tgaaatgaaaaagaaaaagaaatggttgcaacgcattgaactgttctaactttgatgttagttgacaacttgagatattacttcgagtagttcaagcatgcttggtttcggaattagttgttcataaatcataagcagcgggcacagttatgagttatgaccactgcctgcacttcacatcatcatatcaccttaactttaacccccattgtactgatcctgataggactaaaatttaaatgcctaggaggctgttttaag

SEQ ID NO: 32012 - DNA, 1577 bp, Setaria italica
  misc_feature (1)..(56): n is a, c, g, or t
  Peptide Sequence Number=SeqID_97986
nnnnnnnnnnnnnnnnnnnnnnnnnnnnnnnnnnnnnnnnnnnnnnnnnnnnnnnnttgatgaaggatcagaacattgaaccaacattaaccatatttattcactcactatagtccacaagatcaacgagcacgacattacaagtcatggcagggacaggcaacaaacactacttggtttacacatcaggaccggggggcagtatgaacattgctgcttgcattgcttcctgttcattccgtgagcgacatctgcctctcacgcgcggatggcgatcccgccctgctgcacctccgttgcggcgggggcctgctcctccttctcggcctccggcttctgctcgccgtcgccgagcaccggcaggtggcccttctcctggaggctcttcaccgtgtcgtacagcgactggctcaccggccggaactccagccccaggtcccggagcttctggttcgagaacctgtacggctgcttccgcggattctcctcgtcagagcacctggtggggacggggtactcggggaagagcttggcgaggatgcggacgacgtcctcgcggtggaggacacgctcggcgcagaggtggcggccggaggcggcggggctctcgaagacggcgaggtgcgcggcggcgacgtcgcggacgtcgacgtaggcctgcacagcgttggcgaaggtgcgggcggagccgtcgaggtacttgaggatgtgcgcgatgctggcgttcaccgtcggctgcagcagcgggcccaccaccagcaccgggttcaccaccaccaggtccacgccgcgctgacgcgccgcgtcccacgccgcctgctccgccaccgctttgccgtagcagtaccagttcctggttttcttgcagaagtcgaggtcgctccagcaggactcgtccaccaccacgtcgggcccgcggttggggtccatggtcacggcgccgatggaggacgtgaacaccacccgccgcaccgtgccggcctccgccgccgcgctgagcacgtactccgtcccgcgcaccgccggctccaccatttgctcggggtcgtcggtgacgggggaggcggtgtggaagacgccctggcagccctgcacggcgcggcagatggcgtcgtagtcgaggaggtcggccttgcagaggaccagccgctcggcggcgccgtccagcgccttgaggtgcgcgttcttcgggtcatctgggttcctgacggtgcccttgacagtgtatcccttctcgagcagcagcttcaccagccacgacgcgatgtacccggccgcgccggtgacgcacacggtctgcccgttccccgccggcggaaccaccgccgcggcggcggcggacacggcttcgaccacggtcatactgacgacgagacgacgacggcggcggcggcggcgatcagttcctcaatcctcccctgctagctactcctcgatttcgtcacgaaaggtatagctattgctcgcggtggagtagcagtagtgccgaagcagggaatacagctaggcgttggtgagttagtttttaggtttcccctttgcgcgggcgagcgcgatcgagttggtaggtttggttt

SEQ ID NO: 32013 - DNA, 219 bp, Setaria italica
  Peptide Sequence Number=SeqID_97987
ggtcgaggtactcccgcgcggcgaattaccgagcccgccgccggcgctcgcgcccgtgcgcggagaggagtagcggtcggggacgtcggcgagagcgggaacgaggaggagcagtataaggtggaggaggagaggcggcgcgcgtagcggcatcttgcgcggcgtcggcgaggcgaggcgatgcgagaatccgagatgcgtgagagcttgtctgcctgg

SEQ ID NO: 32014 - DNA, 286 bp, Setaria italica
  Peptide Sequence Number=SeqID_97988
ccacttggcgcacttgggcgcggtgtacatctccgcctgcttgggcgccccggtgccgacggagatgatgaggaagttgccgtactccgcgggccggaagtccgggttgtggcggagcacctccttggtgagcatggacatggcgaccatggttgggttgttggccgccacgccgccgtcgacgaggtggaactcccgggacttgccgctggggccctcggtcctgaagaagtgcgccgggaagtaggtcggcgccgccgccgtgctgatgcagatgtcggagagg

SEQ ID NO: 32015 - DNA, 511 bp, Setaria italica
  Peptide Sequence Number=SeqID_97989
ttttttttttttctttaaacaattataagctccacgtgatgattagcccagagcattctttccgtatgtacaaagaagtatcctcctagtcacagtataaaaccatttcaaacttgttgcggcgttacatggtaaaaaaggttccccaggaaggaaaatataggctggcaacgacaacagtctgatcaaactcccctgcttctatacacctcggtgggagctttactttgtatatttgtcttcacatcggcatgaatggaggcttggaaaatatatgccatggggaggacgacgcctccttgggcgaggcggagcacgcggcggcgggccagaggaggatggccctccagatcccggagaggttggtgacgaagccgacgaagaggaagacgcagccgagcccaacgacccagggcatgaggaagaagccgagcatgaaggtgacggagccgcagagcatcagcgccatggacgcgcccagcagcatggacgccacccccgcgggcgtcaa

SEQ ID NO: 32016 - DNA, 249 bp, Setaria italica
  Peptide Sequence Number=SeqID_97990
caaaaaacaattcatggatcttgttacagcggaagaaaaatatttaagatccacaagacaggtgatggcctccataaacatattgacattaaagcatataaatatacagatattgacaggcgggtacttgttatacaaatagccataaattacattaccttttgaagaaacatgacatgctagcagatctaagggtagctatatcatgtactgttcaaagattcagctccaacatccccactgccaatg

SEQ ID NO: 32017 - DNA, 400 bp, Setaria italica
  Peptide Sequence Number=SeqID_97991
taggttaatttaggtggtattggcatccaatcctctgcatttaaggataaagatatgacgtatctgctcatgccagtttgtcacaaaatctcaaacactaggctgaataatgagccaaatatgaaaaaatcaacaagccaagggctacaaggcctaaaactagacattgcacagcgtgtcgctaaatgtaattgcttgcgatctccatgataatttgtctcccttcgtcatggcactactcttgccactcctctctatttctttacattgcagcaaggatcacaactgcaaccggtatgttacccctaaagaagataatccctcatttaagtgttagacttctctgagacaataccaattgagggacgggatattgtcttttcatgatcaagcattcaaa

SEQ ID NO: 32018 - DNA, 991 bp, Setaria italica
  misc_feature (928)..(991): n is a, c, g, or t
  Peptide Sequence Number=SeqID_97992
tcctcccccatccccaatcccgatggcgcgccgcctcctcgccgccctcctcgcggtgtcgctcctgctgccgctcgcccgcccggactcctcaatctcctcctccctcccggccaacaccaccagcaccgcgtacgacgagctccgcctccggggcttcccgcggggcctgctccccgccaacgtgcgggggtacacgctcgacaccgggtccggggacttcgccgtcgacctccactccagctgccgcatcgtgctgcccgcggggagctacctcgccgccttcaacaaccgcctcacggggcggctcgacgaccgccgcatctcgggccttagcggcatccgcgtcagggccttcttccgctggtggtccatcacggggatccgtgccgacggggaccagctcgtcttcgaggttgggtcggtctccgccaagttccccgcgcgggacttcaacgccagcctcgagtgccccgccaaggctgactcataagacagcaaggtcatcctctcgtctgctccatgatacatgacatcatagaatgggcagttggactccaggcactgaagcacatcgctgtttttagcttcatctgtctttattgtaattgtatagtagatgcataagacagactggatcgatgaaagccagttgcccttaggcgccaagaaacccgggattaccacggaagtgcttctcgtgtttcattagaatgtactgtaattgcactacctcatggtttgagaaccttatgttcggttcttgtcgttggtactatcagtttctgaagtataatacctgtataagactcctggcctaagaagaaaagggggtataaaggctcctggagtcctggggcagaataagaatctatctatataataataaatgaatcgtgaatagatgaaccaaaaaaaaaaaaaaaannnnnnnnnnnnnnnnnnnnnnnnnnnnnnnnnnnnnnnnnnnnnnnnnnnnnnnnnnnnnnnn

SEQ ID NO: 32019 - DNA, 220 bp, Setaria italica
  Peptide Sequence Number=SeqID_97993
agttttagttctgcatgagtgtttatgttgctattttaccttgcaataacaagggtctcatatacttgatgaacatttccgtgaagtgggcttcgtggagcttcttttcgtatcttctattttccctgagattgaaatctgtatgtggtatcaatttcatagcattgaagaaatacatttcaacttacagattggtatctttcatacgcggaaaggcaac

SEQ ID NO: 32020 - DNA, 972 bp, Setaria italica
  Peptide Sequence Number=SeqID_97994
ccttcttcatcagttcaaggctttctagcatcactacctgtgaagaagatgatgatcttggggtcgagaccattggtgatcttctaagttttgcagaggaaaagttacaagagcagtatggagtaaatactggaacatggttatggaagattgctagaggcattagtggagaagaagttgaggatcgtcttctaccgaagagtcacggatgtggaaagacatttcctggaccaaaagcactgaagaatagtgcttctgtcaaaagctggctggatcaactttgtgaggaattaagtgaacgaattcagtctgacctgaaccagaacaagagaattgctcaaacactaactcttcatgccagggcgtctaaggaaaatgaacgtgattcaacgaagaaattcccttccaaatcctgtccattgcgctatgggactgggaaaattcaagaggatgcaatgaagctatttgaatctggccttcatgaatttttagaatctcagaacactggatggagcataacatctctttctgttactgcaagcaaaatatttgatataccaagtggaacaagctcaatcttgagatacattaaaggtcctagttctgctgcatctccagctatacctgattcttcatctgtacctgatgatccttctcttgataacaatgtacatgtgacaccaattcatgaagaacagtgcgagccatctatctcagagaaagaagacggtaaaagatattcatcgatttcagccaaacaatgcccagcaaatgaagaaaaaagaatcccaaagaagttgcctgaagttaagggaacttcctcgatattgaagtttctctcacggggtcaatctgccctccatgagaaaagaaaatctgatgtactaatttgcagtcctcaaggtccagggagttcttcggaagcaaacaaagctgaagaacacaatgtgtctgggcaagctgcagatagga

SEQ ID NO: 32021 - DNA, 999 bp, Setaria italica
  misc_feature (1)..(31): n is a, c, g, or t
  Peptide Sequence Number=SeqID_97995
nnnnnnnnnnnnnnnnnnnnnnnnnnnnnnnttttttttttttttttttttgtgccaaaacttttccttcatttcactctacaatatagtcacgttgtcagacgttactagttagtacatgaggttgaccttaacaaaatttagccttaaagaatatcctccaactgtttgagcttgggatccaacacggtagcattttcctcgatataatcatctgccggagtccggtatgcatcagcaatcgcctttcctttatccaggactgcagatggcacagtttgcaagagattgtctaatgctccaagggcgacagtgatcttgctcctcatggtttcaacggatgctgaggggtcattccgtgatgcatgtagtagcagcgagtcgagatcttccaatgctcgtaagcattcgtccacagcgtccgatgcagctttgccttgaccattgctggaagcatattgtgccactgcccgaatgttgatacgtagagatgatgctggtccagagcgaagtaatgatctggtctcatcgtaccttggtttctcaaattctaaggatttctctagatcaacgaactggtctatcgtcagcagcacagccggaacgtaggtctccagaggctccagcttcttcctcttgacgtacttgtccaatggactggccgcgtctgcccgtccggcagtagtggcgagccatgcggcgacgccggccagggagacggcgcggcggccgacgccgtccgacgtcggcgggagagcggcggccgtgattacttggcagcatcggcgccggcgcggccgaggcggggacgggcagacgtgaaggtgaagcccggcggaggtggtggggaggagcgaggaggacatctttggaggaggcggcggagtgagctgctgggaacgggcgcgcgacggcgcgaggcaatgctgcttgcggcgggcagcgaccgccgcggtcagttgattagttgggttcgttggctcggcgcttcgagcgacg

SEQ ID NO: 32022 - DNA, 582 bp, Setaria italica
  Peptide Sequence Number=SeqID_97996
tgaagaaagtattcttaaactgcagagtcttcctcctaatcttcagaatcaatctttacaaagagacctaatccaacaacatcaagtgatcctggacaaacaagcggaatttcataagcagagatacaaaaagagttgggttactgagggggatagaaacgcacacttctttcagcaggccatccttaagagggagagaagaaacaggattcttttccttgcagatgagtttgggaatcctttgacaactcaagatcagattgacacatgtttcaacaactacttcaagaatctgttcacaagccaggttgatcatcaacagttgaatatcttacctcaacagaatagggtacaagaagatttcagtagtgacttaacaagttccattcctgacaaagctgagttatggggtattctgaagaatatgaagaaggatgcagcccctggtccagatggatttaatgcagctttctatagagtttcttgggactggcttggtgatgatgtagtcaatctggttcagaattttatcgcacaggtatgcttccacatgaacttaacaaacttttattgttcttattt

SEQ ID NO: 32023 - DNA, 832 bp, Setaria italica
  Peptide Sequence Number=SeqID_97997
cctcatctaagataattgaacccattcaaagccgctgtgctattgtcaggttctcgaggctctctgaccaggagatccttggccgcctaatgattgttgtggcagctgagaaggttccttatgtgccagatgggcttgaagctatcatatttactgctgatggtgacatgagacaagctctgaacaacctgcaagctacatttagtgggttccgctttgttaatcaagaaaatgtgttcaaggtatgcgaccaaccacatcccttgcatgtcaagaacatggtgaaaaatgtgcttgatggaaagtttgatgaggcctgctctgcactgaagcaactttatgatttgggatactctcctactgacattattactactctcttccgtgttgtcaagaactatgacatggctgaatatctgaagctggaaatgctgaaggaaactggatttgcacacatgagaatctgcgatggtgttgggtcattccttcagctttctggccttctggccaagtttgctctggtgagggaaactgcaaaagcaccctgaactcgtcatgttccagatgataatagcttatgtcgagctgtgctgacacaggaacttagttatttcagttaacactactggcatggatgtcttagtgactacagccgtcatgtatctcagtctgtaagatagtaccttatgaagtaaacaactatcgtgtctatccagtgtgacacatcgagctgaggtgtggtaaccatccttatttgtacagattgtttgatgttgttccaaacgccagctgcgtttgaaactgcattgccctgtcttggaacccctttggg

SEQ ID NO: 32024 - DNA, 423 bp, Setaria italica
  Peptide Sequence Number=SeqID_97998
cgccggggctgtggaccgacgagcaagtggaggcatggaagcccatcgtcgacaccgtgcacgccaagggcgccgtcttcttcgcgcagatatggcacaccggccgcgtctccgcgccagagttccaaccaaatgggcaggcaccgatctcgagcacggacaagcaagtcccaccacaggtgagccaggacggtcacgtcagcacgttcgcggtccctcggaggctggaaacaactgagataccacaagtcgtcaacgacttccggattgccgctagaaacgcgatcaaagcaggctttgacggtgtggagatccacgcggctaacggatacctcttcgaccagttcatgaaggatagcgtcaacgaccgggacgatacatacgggggcaccctggagaaccggtgccgcttcactgcagagg

SEQ ID NO: 32025 - DNA, 616 bp, Setaria italica
  Peptide Sequence Number=SeqID_97999
ttgctctttgcgcaagatgacgatgtgatctctactttgcagtcacaatgtgcataccgctgctcgaggtgctgtgggtttgaagtgacgacgcggctgcactgggaaccaccaggtttctcgctgtccgcgtgaatggcatggagacaatgtcaccaaggtggaccaaggagccctgcacataagagagagcaatcatgtagtcttggcttatgcctagccgagtagcggtacaaatgagtatgctgttctcaattccatggacccgatctccctttctcatgtgtccaaaatgaggggtatcagaagtctcttaggcgggccagcgtatcatgttgctattccaataatccatgatgcggcaccacaaacaaaaacagttcagtaggtgccatgccacatgcaggatgcagcacactgcatctctgtccggagcaatgttatgcatgcatatggttgttagcaacttctgctgcagaggcaaggagataatggaatgcacgtgattgagaagcaacttcccgttcagcatgcaaacccacagccatgtgattgagaagcaggaaccactttgaccatggattccagcagtttggtatgaagactaagattaggt

SEQ ID NO: 32026 - DNA, 904 bp, Setaria italica
  Peptide Sequence Number=SeqID_98000
tcgagaagctcggcgcagcaaccgtgcagatgatccaccacggcattttgagggatgaccccaaggccgggtacaccatcgacgaggtcagggatatcgtgaagaccatggtgctcgacaaggtgctcgaggaggtcaagagcacaggcgagggggacttcgcggccgtcaggagcggcacgatatgctaccgtttggctggggctgctcagggagggatgatggaggggatcccgtgtggggtttgcccaagaatcgatgagtgctcgccggatggggtcatttcgccgagcacatgcgtctactacaagaagtggctggaaatggacttctaggcagtgaccagtgagccctcatcgctttgcatcatggtggagtccattgaagaattcagtttctcattgtccaattggggatgttggctcacactctgttattggattgccatggttccattcttttggtggcttcggtgtccagtatcagatttcggtgctcatatcaagaatcattctacagttatatctacttaggccttttagcttggtagtgtttgatatgtatttagttgcatcaagtttggatctctgttccattttgaaaacccaaaattctttggccacacattttagctatgatattcaagttataggttgagaatgcacaccaaaagtgtccctgtatgacaaccaaaagatcagcatagatgcacccttttttaacgactagacgactagatgtgccttcattctattaaattttctatgacccttaaacttaaatttactgaaagttgcagtatttaattgagttaagtgttgaagacccccaataactgcaaggataagcaacaacaatgttcggatatagtatgcgtgcttctcaatcgattagtttgatcctg

SEQ ID NO: 32027 - DNA, 315 bp, Setaria italica
  Peptide Sequence Number=SeqID_98001
cgccgacctgctgtcccctgtcagcatcaccgacttgatccccattgatctcagctcgcggatcgcctccgccgcgccggtccggcagtcgtcggagagcgagaacgcccccactagatccccgtcgcagatcacatagccgatcgacgcgccttttcgatcatccatttctggtactgtgtagcatgaggaccttgccatgatccttctatttccaatgtagacatgtcttccactgatctccccatagatgccttccccggggtagatgcgaaattcagtcgcgttttccggcttcggctggatggatttgga

SEQ ID NO: 32028 - DNA, 629 bp, Setaria italica
  Peptide Sequence Number=SeqID_98002
gcacaggggaggagagagacaggcgcctacaggcatacagggctagagagagaaagagggagacccattaccaatgccaagaacaagaaatcagagaggacagtcgcgaatccaatccgaatcccctccaaaaacccacctaacagcctcccccatctccaagaacaagaacaagagagcatcctaggaaaaaaagaagcccagaaagaccaagacaaaggtactagcatctttgtgccccagacacaccccgatcacaaaaccgaatccctcctcttccaatccatcccgcaagcagaacaaacaagatttgttcgatctgtactcgagtttttcttgtaaagatttcctttttctttgactgttactagtcttgagttgttgagaagtttcgagaagagtggtgggagggttgaagagctcggagaaggaaggagatggatccggccttgctggacgacgtcatacggcggctgctggaagtgaagaatctgaagccggggaagaacgcgcagctgtcagagtcggagattaagcagctctgcgctgccgccaaggagatcttcctgcagcagcctaaccttctggagctcgaggcccccatcaaaatctgcggtgatgtccatggc

SEQ ID NO: 32029 - DNA, 551 bp, Setaria italica
  Peptide Sequence Number=SeqID_98003
taataagaacttagaagaaagaatccagatggagaaaatcaagggaaaactagatgagaagaagaaaagaagatgactattctgtagaaaagtacattgttgttgtggatagtatagaagacctaactattgagcagaaggcagatgctaatgagctctttcaatctgagatgaatcgacagatatttatgatggctaaaaatcaagctgttcgactagtttggctaaagaaaaaattcacagaattagacatgaaatgtctacctgcctcgtcttgtgtgttcatctctttgctgctagcactggacacaaaggagtagagggtagctagctaagattgaacttttaatttgtgttcgtgttccatgatgaatagaactgtattatttcgactttggagctgtactttgacaataggtgcagattcaagcttctttgagaactatcttgctttgtgctaaattacctatgtaattatgctgtaattttggagtcgtaatctctattggagctgtaattttggagaaccgtaaaaaaaaaaaaaaaaacgg

SEQ ID NO: 32030 - DNA, 549 bp, Setaria italica
  Peptide Sequence Number=SeqID_98004
ctgaatacgtgtggcaacagagatcacggttctctggctctaaagttgtttgaggttactactttctctttgggctaccctgaatgtttgtagcaagtgaccaacatggtccattgttagtggggtaaagtgtaaatggcaatccacttaacaatcttagctcaatagctgggaagtgccaattccttggggttcaatagtctcttgtaatggaattctgtgtttctctatggtgaggttattgttcagcgaacgaaactacagctatgccaatgtagaacaataataatgttggtagtagtattttatgctcatttctaatttgcatatatatgtcttacagcttggtgctggaacctcactaccaggtttagtagctgcaaaggttggagcagatgtgactctgactagtcatttgcacacaacacagaagttagttccaacccgtctttggaatccttattgtttttatccttgtcggtgtttcagtgattgatttcagacattgcacacaacacagaagttagttccaacccattctttaggtaa

SEQ ID NO: 32031 - DNA, 450 bp, Setaria italica
  Peptide Sequence Number=SeqID_98005
aaataaagacaacaagaagcgcgccgcctatttcgctgtcctcctcgagtccactctgcgtcgtggtccaacgatcagagatcgtcgcgaactcgcgatggaaggcgtcgccttcggtgcccgggccgctgccgttcccgcgcgtatgaccaccgtgtcgcggcactacttcggcggcgacgcgtccgagagcgaccacgacctccgcgtggacatcatcgagaacattgaagaggactacggcatgtttgtctggccatgcagtatcattctagctgaatacgtgtggcaacagaggtcacggttctctggctctaaagttgttgagcttggtgctggaacctcactaccaggtttagtagctgcaaaggttggagcagatgtgactctgacagacattgcacacaacacagaagttctgaacaacatcagaagaatatgcactctcaa

SEQ ID NO: 32032 - DNA, 978 bp, Setaria italica
  misc_feature (946)..(946): n is a, c, g, or t
  Peptide Sequence Number=SeqID_98006
gatcgagttcattctgcctctgcccccaccacccccattggaagagcagagcaggtgggtagcgaggccactagcgagtgagaagccgcaccgcagcccagccgcgcgagcgagggttctgatccgatggccggcgccggggcggacggggagcgcaggatcggggtggcgatggactactccgacagctccaagaaggcgctggactgggccatcgccaacctgctccgccacggggacaccctcgtcgtcgtccacgtcctgcaccacggcggggaggagaccaagcacacgctctgggccaagtccggatccccgctgatccctctctccgagttccgggagcccgaggtgatgaagaactacggcgtcaagacagacgccgaggtgctcgacatgatcgacacggcggcgcgacagaagcagctcaaggtggtggccaagctgtactggggcgacgccagggagaagctctgcgatggcgtcgaggagctcaagatcgactcccttgtcatgggtagccgcggcctcggcccgatccagaggatcctcctgggaagtgtgaccaactacgtgctgtcgaacgcatcgtgccctgtgacagtcgtcaagggaaagtaaggagcaggccagcctaccagcgatatggaggatgctagcatgcagtttgtgtggactaagcgctacatgtgtcggtgttgttgctgaatttgaataaagtatggatcttctttgtttgtgatgttgcagctttcgcatatcctcctgaccttgtccgtcgtagtctgtgaacactcaacactcggtagatgctaatgtgctcgcttgtgcacatcccttcttattttagatcgaagttgatgcctcataaaccctttaaaaaaaaaaaaaaactagacaaggaaccaagaacctaaaccaaagaacgaataataagaagaataanaataataataattattaattaattttaattta

SEQ ID NO: 32033 - DNA, 238 bp, Setaria italica
  Peptide Sequence Number=SeqID_98007
tttgcccatcgttactgcccatctaaaggacctgcagcatgagcccaccaacgccacgcagcccgtgcactcgccgatgcgcagtcctgcgaaagcattcgccgacatcataccacgcgtcgctacctccagtgcacctccagggcctccacgtcgccttagcgccgccagccccgttcgtcaccccatcgtgcagccgtggtgtcctgtcggcagcagcagctccaccggtgtcgcg

SEQ ID NO: 32034 - DNA, 369 bp, Setaria italica
  Peptide Sequence Number=SeqID_98008
tagccaccatacactggatcttccgacagtaaatgaggtgtgtacagatcaacaaaactgcatccatatgcttcaagaacaattttagcggctgattcaacatatataaggtcgtgaacaaagtaatatttctttcaatttgctggctggagcaaccattatgtccgtggtcacagtatctgatgcccctccaaataatcaccacagagggatgtgaatgctgttagcaaccgcgtcaatcagtgccatctccactccgatgcaaaggcgtgtccatggaggacaccggtgacctcgtcgagcagcgcgccgagcgacgccgcgggcctcgagcgcggccggctggtcctcgtcgacgacggatggcag

SEQ ID NO: 32035 - DNA, 221 bp, Setaria italica
  Peptide Sequence Number=SeqID_98009
ttcatccggtccttcgggcgccacttggagaccaggccggtggtggagggcccggcggcggccgccgcagcctcgtcgagcgcctcgtggcgctgctcgcacagcaccaccacctggggcaggtacgccacgggctccggcttctccacctcggcgggctcgagcccattcctgggctccggcccgttcgccacggggaggtcatccgtgacgtggttgtt

SEQ ID NO: 32036 - DNA, 408 bp, Setaria italica
  Peptide Sequence Number=SeqID_98010
atatatttcttcaggtttgaacacaatactgattgctgcacttcccatgatgggtacttgtggaggccatgctgattagcgatcaatgcctgttgcctgcacgaacagaatcccaagcttttcactccttgaggattatacttgtaactgcaaatatcttgtgcatatggatatatatggtaaagaaaagattttagagaggacacacaacaagcaagcaaaattatagcattgacatattactcaagacctgttactgcaatttatatgatagcaaataaacaaatcaaaagtgattaaatagtatctttgtaccttttgggctttgtttagatgctgaaggtgtctccatacccatgctgccattccatcaagcggataaagggagatgccagagccagataccgc

SEQ ID NO: 32037 - DNA, 524 bp, Setaria italica
  misc_feature (246)..(246): n is a, c, g, or t
  misc_feature (264)..(264): n is a, c, g, or t
  Peptide Sequence Number=SeqID_98011
gagtaaaattttccatatacgtacatttccatcacttgaggcagctaaaagcaagctctcatcaagctcattgataagcaagagtttagatagccctctttcggacaacttatggttttgaaaagagttcactggtagcgcatcatcatagttccacactctgacatgataatgaagaagccaatgctagaagagaagagagagaacaaattgcattaggttgcattgctaagtgccagcgatccngtacgtggccagatatanattgatctgcattacatttattgttattgatactctggcttatttatctgtgtttttcttgttgctgaccgtgggaatagcagcttgcaagatgacaagtcaaattgctagttgggatacaaggtttgagacgggtacaaaaagcagcattattgttgccattctctccaatcgtcatcgcagctgatgaaaatgagcaaataagagtgtggaactatgatgatgcgctaccagtgaactctttttcaaaaccataagtt

SEQ ID NO: 32038 - DNA, 318 bp, Setaria italica
  misc_feature (301)..(301): n is a, c, g, or t
  misc_feature (308)..(308): n is a, c, g, or t
  Peptide Sequence Number=SeqID_98012
aggccatgctgattagcgatcaatgcctgttgccttttgggctttgtttagatgctgaaggtgtctccatacccatgctgccattccatcaagcggataaagggagatgccagagccagataccgccaccacctcacctgcacggtgtcaccccccacatctgcctcagtcctgccaaggcctgattccaccggatagtccagagagtcctggtgcaagtggttcagagttgtgaaagtcagagcttgcagtaccggccaaatcttgcggaggtagctgtcagtagcaaaataaaaaaaanaaaaaanaaaaaaaaac

SEQ ID NO: 32039 - DNA, 684 bp, Setaria italica
  Peptide Sequence Number=SeqID_98013
cataggtttaccatgtgccgtgaggagtctgccaaaagacagggatgttattaagaggttggtggccatctttcatgacaaaccctactctgagcatcattattataatctgatttgatctcaagcatatcagtaagtataaaaaaatcttatttaacaagagtgcaacaaaagggggaacaaaaaagatatgcatcgaccacaatatcttaatatattttcaaggtacctgaaagttcaaaaaataaatagaagaagctacaacttgacgttgcacataggtataggcacacatgaaaaaaataatacccactatggaatggtgagaccaaaatttagcaggatttgtacgtaggaattaaacgcagggaaattccccacaagcatcatgtgacagatgagaggaagggaaagatccctcgttttcccccaaatcagctagctacattgtcagttcaggggaaaaaatacaatgctcccacatgaaacaaggagaagaacacaatacttttacaggaagccagagggtaactaagcatcagggataactgtgatataccgattcatcgttgtccaagtgaaggaaaccaccatggcctcgggcgtttgtgaacttgtacgacagaggttcaaaggcttcatagccgccatacactggatcttacgacagtaaatgaggtgtgt

SEQ ID NO: 32040 - DNA, 722 bp, Setaria italica
  Peptide Sequence Number=SeqID_98014
tttacaagaaaaacgacttagacaataagttcacacaatatgatgacattcgtggcttaatccagacattgctctaggagaatttccacgagcacattacattcacgcgcatggaggccatcatgaactgatcgaaagtgcacatcatggcaagctaccagccaattgctccaaccggtcatgtgccgtgggggtgtctccatgcgctcgcaaagccagagctcacatagatcaaggttgggtagaaccgcagaagctgacctgcacaaggccccgtggacgtcgacgacattgtcctgggagccgcttcatggcctttcttctccaccgctcccacgaacgcggtgcacacactcctggatgcggaaaatacctcgatgcctatctgcaggtgatgacgaaattgcaaccttactacttgctagcaaaagaatcccaagcaaccgattaacattgttgacaccgttttttgacacgtgtcaaaaactgacgtcaaaaggaagcagagatgttgatgcatgacaaaatggcaacggctagtgaaaacgatcgatagagtcacaaaggtttagccgatgaaaggtgatgtagacccaaccgatgaggacggaaggtgtcagccgatgaagggtgacggagacctaaccgatgcgagcaagaggattccagctgatcggagatattagggttcgaccgttaaaaggcaagagtcttgatacgga

SEQ ID NO: 32041 - DNA, 349 bp, Setaria italica
  Peptide Sequence Number=SeqID_98015
caggttagaggcaggtccgagcagaaaacccataacaacaactataatcgagacaagaggcagaacggtagaggtcgtttgaaatccagaggcaagttgttagcagatgcatattcgacaagaatatgagcaagagtacgattataaggataaccaccatcacaaggcttcatcctgagtactccttgctccgccgccaccgccgccgctccagggggagaaacgcatgccaggagcgccgcgacgagcagcggcaccagcagcgccgccatcgcgcccttcgcagccatcgccgtcgcctcctccctcctcccccccactctctctccgtcgcctccctgcccgcccc

SEQ ID NO: 32042 - DNA, 666 bp, Setaria italica
  misc_feature (94)..(94): n is a, c, g, or t
  Peptide Sequence Number=SeqID_98016
atactatctacatcctgatcaaatgttacaggcttatagccctgaccggacttgcaagagcagcaaactgaaggctacatgctttgctactgcncctttgatttcaattacaacgatggtcatccaatggaacaatgcagttatgccatgagctgcaatgcttcgatgaagctccaggactgacaaatccgttgttaaccatcttcatttcgacccatcgttgtccaagtgaaggaaaccaccatggccacgggcgtttgtaaacttgtacagaggtccaaaggctggcgagagaatttgtatgagtcatatgaactataaactagaggcacagtttgagggttttttttatgaaggtcagcagcttgaaaggagcaattcctcaacaaagatagcggcatcaagaaataaatattacaatagatgaaataatccgagtatataaggagcataatggcagaagagatgatagctcagaataacaatactcacctgaacataacactacatatttttcacgacataagtagtttcctcaaatgaaaaaaattgagatacagaagggtttgggttcagcaagctgagtccaggaaaaaaacacatatgacacatcatacagaaacgaaagcattactgaatctttgtgggcctgaaaccattactgga

SEQ ID NO: 32043 - DNA, 760 bp, Setaria italica
  Peptide Sequence Number=SeqID_98017
ttgcactcacagtatgagcggctggcaacctaaggctcgttacaagcttcagctagatccaacagtggaggaagtgaagaagctttgtaatacttgccgcaagtatgccagatcagagagagtacttttccattacaatggccatggtgtcccaaagcctacagctaatggtgagatttgggtgtttaacaagagttacacacagtatattccccttccgattactgatcttgattcatggctaaaaacaccttccattttattgtttttttgtacttgtctcagcagctggaattattgtgaaagctttttctagagcgcctagactggagttctagctcctctgcactctgaggaagtgtttgatgtgcttcgcaggcagcaagaagaatgcaatccttctgtgaagatgcagaggagctagaactccagtctaggcgctctagaaaagctttcacaataattccagctgctgagcagtcaaaaacataaatggaaggtgtttttagccatgaatcaagatcagtaattggaaggggaatatactgtgtgtaactcttgttaaacacccaaatctcaccattagctgtaggctttgggacaccatggccattgtaatggaaaagtactctctctgatctggcatatttacggcaagtattacaaagcttcttcacttcctccactgttggatctagctgaagcttgtaacgagccttaggttgccagcgttcatactgtgagtgcaatgttttccgat

SEQ ID NO: 32044 - DNA, 487 bp, Setaria italica
  Peptide Sequence Number=SeqID_98018
aattttaacaatttacggttaaacctaggtatgattaattatacctaggttaaccgaatgaggtgactatttacatttcggttaacctaggtatgattaatagtcacctcattcgggtttgtccgctcctttgcttttgccaactgtaaaaaggtttggaggtggttgataccataaatcaggtgtggtaggggctgctgctgcctgggcaagtggggttgtgcatacgggcccaggtagaaatagaatgcatgcacatgtctcctgtattcacagatggatgttgttgaatagatagaggcattcgtcctgctaatatagcgctagatgtgattagtgtggcctgcatgaacgaatctttgtgctgcttgtattgtaatcaccggacagattgtccatttgtaaatatgaatcgtgtttgtacagttgtcaggcaatgttattttttcccttgtgtattctttctattcttagtaaaaaaaaaaaa

SEQ ID NO: 32045 - DNA, 1023 bp, Setaria italica
  Peptide Sequence Number=SeqID_98019
ggggggcaacaatcacctttctgcttcttgagtgtagaatgatgaagtctcctaggcccatcatggtttaacgtacactaaccccacttcaactacagcactcataacgacaagctctgatttcttgtagcatggtagcaaccaccattaaccctttctcatccaacaccgattcatcgttgtccaagtgaaggaaaccaccatggcctcgggcgtttgtgaacttgtacgacagaggttcaaaggcttcatagccgccatacactggatcttccgacagtaaatgaggtgtgtacagatcaacaaaactgaaacaaccaagcccagcagctagatgaccagcaaaacccatagcgattctagtctcaaccataccgccaatcatcaaagtgacattggcttttcttgcagcgtcgattatttcaagggctcaagaacccctaattttgttagcttgatgttaataacatggggcagattcccatgtattattttctgagtatcaagtaaactccgacaactttcatcagcagcaacagcgacttttgtatttctccatggcaacaatactaacatcatggacaccttcccaatcatctctgtgaactggttgctcaaagagtacaggggtcacacccatttcatttagtctatcaagaacttcaattgcttgatcagctgtgtatccctcattcgcatccaagataaatgagaagtctggatggacaaaccgtatagccttcagaacttccatatttgagttcaagtttttcccaaccttgagcttcagtgtttgaaacccttgccctcgatattttgcagtcaattgagcagcttcatttggggccacgattggaatcgttatgtccgtggtcacagtatctgatgcccctccaaataatcacgagagggatgtgaatgctgttagcaaccgcgtcaatcagtgccatctccactcctgctctagccgatgcaaaggcgtgtccagggaggacaccggcgacctcgtcgagcagcgcgccg

SEQ ID NO: 32046 - DNA, 753 bp, Setaria italica
  Peptide Sequence Number=SeqID_98020
ccttgcccattgaatagatttcaagatctcatgtcgcagagttgtattataatatgcagtataaaatccatgatggaccattgcatctggcatgcctggataagtcacatcgagctgcttccaaaagagatcttcaatccaattggagacactgcaagtaaaattccaaggcagccagtcaaagagatacaaaaattgaatgctcgtaattcgcgtatgattaagttatataagaaaaacaattttatgagctgaaattgaaacatatagtcaattagcaaggataaaaggatgatgactgagaacatatattcatacagtacaagtcttggtcactaatatgctacgcataacagagcaatttatgtacctgtgttgttgagtgcctctaaatgcaatgattatggatcgtgggtcaggggcaactccaacaaatgcctgtaaacagttctccacatctacaatgacctctatcacctcaaaaccctttgtgtgacctttgcaccttggacaggtccatgtgaaaagtgatgttaggtcagatgtatacacagcagatgcatattcgacaagaatatgagcaagagtacgattataaggataaccaccatcacaaggcttcatcctgagtactccttgctccaccgccgcagccgccgcttcagggggagaagcgcatgccaggagcgccgcgacgagcaacgccgccatcgcgcccttcgcagccatcgccgtcgcctccctgcccgcccc

SEQ ID NO: 32047 - DNA, 852 bp, Setaria italica
  Peptide Sequence Number=SeqID_98021
aaaaaactagacaagaatctcttggtgggagttgttttccatcaaacagtaggatatgtcatgtcttttacgaattctaggtgatcaggagccaaacgtgaaaattcacctactacacctcatccaggaaagagagcaccagagacacaggggaaaaactaattgaagttttgaacatcagaaacaagacgcacccactgcatatgggaagattagtccacaaactctgcaccacggctcctgcaattctcccaagccaccagccatttactcaacatccagggcatttttcatcggtcggcaagcctagctcctgttgcaaaacaattcaacagccttatcaagattttaatatcatcctagctcctactgcaggttgggtcctcaccggaatcatcactgattgtctcatttctggtaaccacatttcctcctatgatctcatgaagccaaaccttcatagccaccatacactggatcttccgacagtaaatgaggtgtgtacagatcaacaaaactgcatccatatgcttcaagaacaattttagcggctgattcaacatatataaggtcgtgaacaaagtaatatttctttcaatttgctggctggagcaacctaagcacaatgtaaaaaaatgatttcatactttcagaacaaacgcacctgaaacaaccaagcccagcagctagatgaccagcaaaaatatagagcagagtatgatgggataaaaatataccattatgtccgtggtcacagtatctgatgcccctccaaataatcaccacagagggatgtgaatgctgttagcaaccgcgtcaatcagtgccatctccactcctgcgagccgggca

SEQ ID NO: 32048 - DNA, 560 bp, Setaria italica
  Peptide Sequence Number=SeqID_98022
ggttttcttaaccaacactacagatgggaagattagtccacaaactctgcaccacggctcctgcaattctcccaagccaccagccatttactcaacatccagggcatttttcatcggtcggcaagcctagctcctactgcaggttgggtcctcaccggaatcatcactgattgtctcatttctggtaaccacatttcctcctatgatctcatgaagccaaaccttcatagccaccatacactggatcttccgacagtaaatgaggtgtgtacagatcaacaaaactgcatccatatgcttcaagaacaattttagcggctgattcaacatatataaggtcgtgaacaaagtaatatttctttcaatttgctggctggagcaaccattatgtccgtggtcacagtatctgatgcccctccaaataatcaccacagagggatgtgaatgctgttagcaaccgcgtcaatcagtgccatctccactcctgctgtagcctgcgagccgggcgagggaaggtgcggattcctcaccgatgcaaaggcgtgtccatggaggacacc

SEQ ID NO: 32049 - DNA, 1423 bp, Setaria italica
  Peptide Sequence Number=SeqID_98023
tagatgcacttccgaaagatttattttagaccctactagtatttacgtgtttattgattttcattgttattgtgaagtgatctaaacaaaggtgaattttcagacctcttccaagcacagggaattttcatttataccaacatttgagggggcacttttcatcaatgccaccaggctaatcaatgacatgtggggtctggctctacatgtcattgagacagccttgtggtatagatgaaagtcacctcaagtggtggtaaagatgaaaattttccttaagaattttcaacgaggctatcgattttttgtcccatctatgttttgtaggaaggaatccttgttttcttctgtccctttttttggacagctaaagggaacattttatggttcccctgaagtgtttagcaaggcttagaaatccttgaatagttgctagatttggcaccctaaaacacaaataaaagctggatagcaaatagttattcttggcctggccctcctgcagttttgcctgggttatccttctgtggagattctgacagatctgcaatattatatcgcactagtcagaatgtcatcagtccaaggtttgtacagctcctattgagctatctaattcattgttcatcatccaagaaaaccatagaacgacatattaggagtacaaaatcgtggaagagaaatacggaaacagttgatgcaattatatgaaggctggagctggcatttgcagcacgagaagtggagggatgtagattggatgaatatcaatattgatagaatctttattgaacagtcatggcacagaagtcgttggatttgtggcccatggtgaaaaggaaggtgagatatttcctatacggagcttttcttgatcctccccaacagaagttaaagcattgacctatgaggagggtatctatttggtggttccgcatgtacgtaccgcattgtttttgagaactgcagcaggttggagcatgatttcgagctgacaagcttacatgatacgtccatcatggagatcaccttggaggttggagcaccaaggaactgtcgcagacctgccagaaggttaaggttctgctttcaagcaactcccagtttgccgcccgcacgtcgtctccctgtcgccgcatgtcctgaggttgtacacatatattagatgagagccgcttgatgactccggttagcagatcttttgggcaccagtttgggcttcagaagagcaactgtttttggtacaagctaggagcgtgaggggaaactcagcctgttcttgatcatctcatatatagttcagaaaccaaaaaataaaatgcagctgctatggtccaattctgagtatacgcccgacccttggtcccggggtcggatgcgcccgaccccttgagggtggaactccgcctcgcccgacccttgg

SEQ ID NO: 32050 - DNA, 1321 bp, Setaria italica
  Peptide Sequence Number=SeqID_98024
aagcttttaaaacacattcgttgatcaactgaggcacaaaaaaaaaagaagcaattcatcagggtctcagtcgttgtgcctacatgctcccatccctagatggcacacattctacctgctacaactaatgttacagcaacctatctacctcgagatgccatctctcacttgatcacaccagtagcttgcactgatcaatcagcagcagagttggtaaaatcgctgcatatcattcttttctgcaacaaatccaacagctatttcctcagaaccaattcgagtagtcaaagtctctgagctttctgaaatgcttctccacgtcttgtctcgactttgcccactcttctctttggattacagtggaggcatcgtcccttttagtcttgtcgattattctaaaagactcccctccatcacgtatcagtagcaggtcgttttgcctatctcttttctttccttcagggacactaaccacaactttcgctcttgtgattgacctcgtctttgagtcaataacataaatctcctcaaaatcaaggaaaaaatctgggtcatcagcgcgcctgtttctgtagtgtttggttaagaaaaccttcattatttccctctcagtcttgtacaggggatcacgcaaatgctcaactggtggctcagtcacgttgtaacggccgaaatctttctttgtgcacctcacatacttctgtggcattggggcaagaacccttggaatggagtagatatcagtgtctggcggcgtgacatacatctctctgaagtcgaagacgtcgtcgtcggggtccggcacctttcggataaggaagtcgcaatggagcagcctgatcttgtggaactcgtcctcgtccacggtgtagtctacgacggtgtcggaggcggagtcctgcgtggagacgaagctctcggcggcgaccatggcgatgtccccctcctccccgtgcagcgaagaaggcagcggcggcttgacgggggcgaggaggcggtcgtagtcgacatcgtagtcctgctcgttgtcgatgtcgtcgtcgtctccgacgccgtccgcgtcgtcggcgtcgaagtcgccgaagtcgtcgtccatgtcgtcgtcgccgtaggccgcggtgacattgcgccggcggcgcgggagggggacgaggggggcggcggctgggatggcgcagagggagagggagaggagagggggcaacgcgttaggcttgggcttgccggagaagcgacggcggcggtgtggataagggcggcggcagccgttgcaggaggagaccacgacgagtggagtggttgtcgccaaatgcacaaattt

SEQ ID NO: 32051 - DNA, 2409 bp, Setaria italica
  Peptide Sequence Number=SeqID_98025
cagtgcggtgaaacttcttcaatgaaaatttggcgcacgaagcgaatgagtattgaagatatattcctgccgacgtaaaatatatctgattgccctatgatgcatggcgtatagctttgtttaattaaattgatggttttattatcatttaataggtaccaatttgtcatgtgcaggcttcataggagcaactggattttttgaacaagctaggagcgtgaggggaaactcagcctgttcttgatcatctcatattgatgaaagaggctctggaatcgaaagatataggtggtggtgcagaatctgaaggaggaggtggcggtttttcctgtgtggtggcagtggcttaggaccgtcatcacggcagagtgaggccatcatcaaggtgcagaggagcatgacagtcctcacagggccatcatacagcaggcaggcataaacatcttttgattcagctggcattggcaacaccggcatataggtctgctacgtcctcgcatacccgttggtgacagtgcgccattggtcatggctcatggtgcatctgcagcgagccaagtctaattgagtcaggttttatagtgtgaaagattcttgcttcttgggaacgtcagcgacatccatggatccatcaaagtctacccgtggtagacatccgcttgcagacatcaccaacacaacacctcaagctaaccaagcaccacgtggatggcggctagatgatgtcgatcctaatgctcgtaagaggctgagagatagagaacggtctgcaacaatgtctgatgaaaaaagaatggaaaggaacaaaaagcatcgtgaacgctatatgattaataaagttgtagacaaagataattcgcacctagctatgcagttggaggttgtaggtggcggtatatccatggtgaaagataaaaacgatgactggctacataggggacatctggatgactatgatgaatggctatatgagagagatttggatggaaatgacgacttgattcatgtatcaggtgggcctccagatgtacaaagttcttttgcatcttgtttgcatttgtttaatttttgtcaattttcatctataagcatcaaatattttcatgtaaaatatttacttctacaaactcagacacatgtgaaatgccaaacaaaaaatgacttggtgggagttgttttccatcaaacagtaggatatgtcatgtcttttacaaattctaggtgatcaggagccaaacgtgaaaattcacctactacacctcttagtgcacgtgagatacgcacatgttttcaaaaaatatagtaaacttaccagggcatttttcattggtcggcaagcctagctcctgttgcaaaacaattcaacagccttatcagattttaatatcatccgagctcctgtgcaacaacaaaacaattgaacagccttatccaaaattgtgaggccatgtgaggcagatagatacctactgcaggttgggtcctcaccggaatcatcactgattgtcttatttctggtaaccacatttccttctatgatctcatgaagccaaacctgatgggaaacaaatgcagatgaaatagataatgtaagagtagtccggaaaaaaaagcttcagcagccagatgctatttttttcaattccttttatgcatacctctctagcacaatggtgatatgtccattgacctaggtaataatagtatggtggcaaatgtggcacaatatcattctgatgggtcacgcagattgttctagggacttgagcaccaaagttacattctaattcttacttaaccaacatatgaattgtattcccactataacaagtactgctaagtccacaactgaaaaatcatagcgccaacagaaagaagttcaacaaaaggaaaggaaaaggagaaagtacaacatgttcgaacggctgagtcaaggaaaaaacacatatgacacatcatacagaaacgaaagcattactgaatctttgtggacctgaaaccattactggacctaaaactgtagtttcccatttttaataaaagtagacatgaatgtggtcgccagtagccactatctttaaaaaggaactgcagacatataaagagttttgtgcaaagagtaagactaccttcatagccaccatacactggatcttccgacagtaaatgaggtgtgtacagatcaacaaaactgcatccatatgcttcaagaacaattttagcggctgattcaacatatataaggtcgtgaacaaagtaatatttctttcaatttgctggctggagcaacctaagcacaatgtaaaaaaatgatttcatactttcagaacaaacgcacctgaaacaaccaagcccagcagctagatgaccagcaaaaatatagagcagagtatgatgggataaaaatat

SEQ ID NO: 32052 - DNA, 1260 bp, Setaria italica
  Peptide Sequence Number=SeqID_98026
gcctgtcatatattttttttattgtacatcatcgaagcgtgcatacaatgttatggagcttacatgtacagttctcacttgagcaaaaggggcacgtttaaaaggtgagcctctgcttatcctcaggagagctccgggagggcccagtatttcatgagctgtacacaaatgaaaataaaatactgtacaggggtgtgtttcgtggcatacaaagtcacatggattctagggcatgtggttcttgcgcatatcttgacaagatgatggttccatcaacttcacgaatgtagctgtatactgagttggctgcacccatcacaaattgacaagttccccttgaatcggaatgcagtgtgacgccatagtactcaagatgatctgccacacttattccatagaccgacctgctgcaggttgggtcctcaccggaatcatcacagactgtctcatttctggtaaccacatttccatctatgatcacatgaagccaaacctctctagcaaagtggtgatatgtccattcacctaggtaataatagtacggtggtaaatgtggcacaatatcattctgatgggtcacgcggattgttcttggaacttgagcaccaaagtatgcagcaaaagcaggattgcctatccgaggctgtccaaaagtcatgagctcaacttcctgtgatccaaacttaacagaaagatcaagggcacagaatgaagctaacgcccctcccatggagtgacccacaacatttatgggtagttttccatatgttttccttgcccattgaatagatttcaagatctcatgtcgcagagttgtattataatatgcagtataaaatccatgatggaccattgcatctggcatgcctggataagtcacatcgagctgcttccaaaagagatcttcaatccaattggagacactgtgttgttgagtgcctctaaatgcaatgattatggatcgtgggtcaggggcaactccaacaaatgcctgtaaacagttctccacatctacaatgacctctatcacctcaaaaccctttgtgtgacctttgcaccttggacaggtccatgtgaaaagtgatgttaggtcagatgtatacacagcagatgcattatttcgtactaagtaattattgagcaagagtacgattataaggataaccaccatcacaaggcttcatcctgagtactccttgctccaccgccgcagccgccgcttcagggggagaagcgcatgccaggagcgccgcgacgagc

SEQ ID NO: 32053 - DNA, 1673 bp, Setaria italica
  Peptide Sequence Number=SeqID_98027
agttttagtagaacaaattgcattaggttgcattgctaagtgccagcgatcctgtacgtggcagatacattgatttgcatttacattattgttatcgatactcttgcttatttatctgttgtttttttcttgttgctgaccatgggaatagcagcttgcaagatgacaagtcaaattgctagttgggatacaaggtttgagacgggtacaaaagcagcattattgttgccattctctccaatcgtcattgcagctgatgaaaatgagcaaataaggtgaaattattattgcaatttgaaattctagtgcttgaaatgcactgctgcagttgtgctaaagttctgtctcatgtcagagtgtggaactatgatgatgcgctaccagtgaactcttttcaaaaccataagttgtccgaaagagggctatctaaactcttgcttatcaatgagcttgatgagagcttgcttttagctgcctcaagtatgcctctcttctctatgtttttccttttatgcatatcttcctccattgcactatctaatttttatgttgcaggtgatggaaatgtacgtatatggaaaaattttactcaaagtggaggacaaaaacttagtaactgctttctcatcggttcagggtcatcgagctgctggtcgcagtattgtgatcgactggcagcagcaatctggttatctggtactattctgttattttcccagtcgttcggacttcggtttttattttatgcattttaggttgttctaacttctgatacatctgggtacttgcttccttttgttgcccaatagtatgcatctggtgacatgtcttctatcctgatatgggatcttgataaagaacaacttcagacataaaaactgtatcagtagcagttcgtttcgcctatctcttttctttccttcagggacactaaccacaacttttgctcttgtgattgacctcgtcttcgagtcaataacataaatctcctcaaaatcaaggaaaaaatctgggtcatcagcgcgcctgtttctgtagtgtttggttaagaaaacccactgcatatgggaagattagtccacaaactctgcaccacggctcctgcaattctcccaagccaccagccatttactcaacatctttcatcccttgaagttctcatgaataaaataagatgcagctctggtgccttcatgtctttttctgctttgctaatcttcccttctaattcggctctcgagtgtcttctcctttgcccagggcatttttcatcggtcggcaagcctagctcctgttgcaaaacattcaacagccttatcaagaattttatatcatcctagctcctactgcaggttgggtccgtcaccggaatcatcactgattgtctcatttctggtaaccacatttcctcctatgatctcatgaagccaaaccttcatagccaccatacactggatcttccgacagtaaatgaggtgtgtacagatcaacaaaacattatgtccgtggtcacagtatctgatgcccctccaaataatcaccacagagggatgtgaatgctgttagcaaccgcgtcaatcagtgccatctccactcctgctgtagccgatgcaaaggcgtgtccatggaggacaccggtgacctcgtcgagcagcgcgccgagcgacgccgcg

SEQ ID NO: 32054 - DNA, 1755 bp, Setaria italica
  Peptide Sequence Number=SeqID_98028
tttttatagaacaacaaaagcttaacagggctgcatgtaatatttacaaccaggtatatttattgcatagcagttactggaatattttgataacaacaatgccagctgaaacagccttataaatatactatctacatcctgatcaaatgttacaggcttatagccctgaccggacttgcaagagcagcaaactgaaggctacatgctttgctactgctcctttgatttcaattacaacgatggtcatccaatggaacaatgcagttatgccatgagctgcaatgcttcgatgaagctccaggactgacaaatccgttgttaaccatcttcattgcctgaatgcctcgtatcattatcagttcatctaccacaacacaagacacctcattgtagatgtgaccactagagcagcgggaaaggcaagaagcaatccaactcaacggttgactgtctttgtacctcggtgcagttttttattacaaaaagggaagaggggcattcataggtgtagcttacagcaccggtcaacttgaaaccaaaaccaagaaaatcacgggtgggtcgggcaataatgccgcaaggattatcgtcgatcaagcctacaggaagtttctgatgtccaacttcttgacatcaggcatctcctcatctttaaactcctccctctttagttgagtctccatcgcttcaatgcattccttcttaagttccgttcagctcacttttggcaatttccatttcgagctcttcctcgatcttgggaagatcttccttcccaatgccaagctttttgttaatcttgtcaaactctgccaagaggtggccatgttcttcttgtcactcctcaatagtggcttcttaatgtccttctcgatcttctcgagagcttccatcatcaaaggctcaatgccaagatgatctataaggccactctttactctgatctcctggagagtgttcaggtaagtccgtgcatcagggatgcccttggtaaaggtctcaatagtatatttgattctttgagaatcagagagaagatctgccttttcccttacagtcttcataacttgagcataacgagaaactgccgctgggtcatctggatcaatagtgatcttttcctttttaaggacaccaagtgcggtctcaaacttcttctttacctcaaagaatatgcccttcaggagatcagagtaaagagtggccttatagatcatcttggcattgagcctttgatgatggaagctctcgagaagatcgagaaggacattaagaagccactattgaggagtgacaagaagaacatggccaccctcttggcagagtttgacaagattaacaaaaagacttggcattcggaaggaagatcttcccaagatcgaggaagagctcgaaatggaaattgccaaaagtgagctgacggaacttaagaaggaatgcattgaagcgatggagactcaactaaagagggaggagtttaaagatgaggagatgcctgatgtcaagaagttggacatcagaaacttcctgtaggcttgatcgacgataatccttgcgaatgccaagctttttgttaatcttgtcaaactctgccaagagggtggccatgttcttcttgtcactcctcaatagtggcttcttaatgtccttctcgatcttctcgagagcttccatcatcaaaggctcaatgccaagatgatctataaggccactctttactctgatctcctggagagtgttcaggtaagtccgtgc

SEQ ID NO: 32055 - DNA, 2825 bp, Setaria italica
  Peptide Sequence Number=SeqID_98029
ttgtcctgggagccgcttcatggcctttcttctccaccgctcccacgaacgcggtgcacacactcctggatgcggaaaatacctcgatgcctatctgatccgaatgcaaacaccaaccgaatgcaaacaccaaaccaacctgcatccaacaagtcgtggggggcaacaatcacctttctgcttcttgagtgtagaatgatgaagtctcctaggcccatcatggtttaacgtacactaaccccacttcaactacagcactcataacgacaagctctgatttcttgtagcatggtagcaaccaccattaaccctttctcatccaacacctcaaaacataaagagatcaggaaaagatctgataattagaatctgaacaaaatgattcagttattagagatcattgaataagtagtagttgcaagtcacaagctcctttggcaagcaaaaagctgacacacacatgacccaattcaatattacaggaaaagtagcatctatccgtggaagataagcagaattccccgaaaattcacatagacaaagaaaacctatttaggtcctttctaacaagcaagtcttctataaataactgataaacctgactttgttcagatagtgagatattagcaatattattctgaagcagattttatcaatgtgtacatagccttacttgacaaaactatagtcccacatagaaagatgcattataacctcagcaatcagtattgttcactaaaaaactaagggtgcagtgctaaaaaatttagagctgttggtacataggagtaaataaagctctgaagttttaagcgtcgactccaacttatcgaaaattaaagttctgaagttcacagtttattgtaatctggtgaaggcagtttaatagcatcctgacagtatatggaaatatcatatatatatgggaaagaagatgcagactccaaattggtccctgccatgagctgtgcagccacccagccatccccatatattttcttcaggtttgaacacaatactggttgctgcacttcccatgatgggtacttgtggaggccatgctgattagcgatcaatgcctgttgccttttgggctttgtttagatgctgagggtgtctccatacccatgctgccattccatcaagcggataaagggagatgctagagccagataccgccaccacctcacctgcacggtgtcaccccccacatctgcctcagtcctgccaaggcctgattccaccggatagtccagagagtcctggtgcaagtggttcagagttgtgaaactcagagctcacagtactggccaaatcttgcggaggtagctgtcaatagcaatatgctcaaaccgcttcttcactttctactttctaccagcgctgtgtcactgttgcctcatttttctcgaacatgcgggagagctgcgcatctatatattaagaagaaaattcaccgttgcctaattcaggaattaaagacccctcggggcaaggcaccgatcatgggtaaatacactgaattttttcacatgatcaaagcatgaagtgacatgatctgttagcgtctacaatttaaatttcacgacaaatacaatagtcagatatcagaaaataaatatcaagaaaatgggagaggtggcctattttcgtctgcccagagttaccacaaagcattattgcgctccattcctcacaatgaacatgacctgtgaaattgatagtaatcaagatgaagcatacaatattacaaacaattcaaatcaaccacgcagaaactaatcttcaagaatcacttcaggttaacctataaatgggaatgcctgacatcatcctagagagttctggcattcaattggatacagattttcatatagctttgtgaccttgaagcaataattagtttggaactgaaacaggtgaattttcatggtaatcagtcagttcatgtgcatgggcaatgtcctggagacagacaaaactaatggcacacagtccagttttcagatcccaatgtaaactcggcaagtaataaggctgaaaacatgtttccatagcagcaagccaacagtccagttaacaactgaatgtggcctgctcaactttctcttggctttacaagtacattgaaaatcaatgctctgaatttaccttgaccaaaggacctctcactcaaaaccatcatctttgcgttgttcactgaatatgccagcgatgtaagtgaaaacgctcaatgaatttgccacatgtcaggaggcaagaaggcaattacacagcatattgctacttttgatttaaaaaatatcatgtattgcaaatatgttttccaagaccttctactggacatgataagaaacactaaaggtaccacaagactccataggaaatttcaacagactttcagatttagaatatctatgtttgacaatgaaatgaaagaacatagatagtgaacctccagatcagttagccagccttatgttgtacatttgcctcacgggctggctaactgacctacatgaggctggctaactgatctggaggttcactatctatgttctttcatttcattgtcaaacatagatattctgaatctgaaagtctgttgaaatttcctatggagtcttgtggtacctttagtgtttcttatcatgtcgagtagaagttcttggaaaacatatttgcaatacatgatatttttaaatcaaaagtagtaatatgctgtgtaattgccttcttgcctcctgacatgtggcaaattcattgagcgttttcacttacatcgctggcatattcagtgaacaacgcaaagatgatggttttga

SEQ ID NO: 32056 - DNA, 3921 bp, Setaria italica
  Peptide Sequence Number=SeqID_98030
gaattcctgctgatgtgtttacagcttgcctcacaacacccatcaagatggcattgcactggttttgtaaacgatcattactccgaggttctatggatcattctcttatagaccaaatccccggaaggcaaaatgaccgtaaaactcttcttggagagctgaattggattttcactgctattacagacactattgcctggaatgttcttcctcatgatctgttccaaaggcttttcaggcaagatcttctggttgctagtctctttcgcaacttcttgcttgctgagagaatcatgcgatctgctaattgttctccaatttcttatccattgttgccgccaacacatcaacaccatatgtgggacgcatgggacatggctgctgagatttgtctttccaagcttcctcagttaattgctgatccaaatgcagagtttcagccaagcccattttttacggaacagctgacggcttttgaagtgtggcttgatcatggttctgaggacaagaagccccctgaacagttacctatagttcttcaggtcctgcttagtcagtcacatagatttagagcacttgttctgcttggaaggtttcttgacatgggaccatgggcagttgatttggccctgtctgttggaatcttcccttatgtgctcaaactgcttcaaacaagtgcaatggagttgcgtcaaattcttgtgttcatatggacaaaaattctctctcttgataagtcgtgccaggttgacttggttaaagatggaggacatgcatattttatcaggtttcttgacagtttggatgcttacccagagcagcgtgctatggctgctttcgtattagcagttattgtggatgggcatagaaggggtcaagaggcctgtattaatgcaggtcttatagatgtttgcctgagacatctgcaacctgaaaatccacatgatgcacagacagaacctttgcttttgcagtggctttgtttatgccttggcaaactctgggaagatttccctgaggctcggttacttggtctgcaatcaaatgcaccagaaattgtagcttatttgttatcagagacacaacctgaggtcagagcttctgctgtttttgcattagggaatctcctggatatgggatcaacatcattaaacggtgtcgatgatgattctgatgatgacgagaaattaaaagctgaaacaattgtcgttcgaagccttctgcaggtctcctcagattgtagcccccttgttagatctgaggttgctatagcgcttactcggtttgcattgggtcacaataagtatctcaaatctgttgctgctgagtattggaaacctcaaaccaattcattgctgaagtcactgccgtcactagccaatataagtagtccaaacaatgcctacagtcccaacaacattcgacaaggcagcagtggccttggttctcatattggtcctgtgctaagggttggcagtgatagcagtgccactggccgtgatgcaagaatttctacgagcagcccgattgcaacaagtagtatcatgcatggctctccccagtcagatgattcttcccaacactctgattcaggcatattactgaaagagaatgcaagtaatggtggtctcagctacaacagatcgagacctgttgatagtggcatttattctcaatttatatcaactatgtgttctgttgctaaagatccttacccaagaattgcaactattggtcggagagcactgtcccttataggtgttgagcaagtggtaatgaaaaatagtagatttaacagtggaggtacacatcaaggagagacatctgcacctccatcaaactttggcatggcacgctcttcttcctggtttgatatgaattctggaaacttctcaattgcatttaggacacctcctgttagcccccctcagcatgattatcttacaggattacgccgagtgtgttctatggagttcaaaccacatcctatgaattcacctgagggcttagctggtccccttttaagctctgttgcggctcccagtaatgctgaactaagtatacttccccaatcaacaatctacaactggagttgtggtcacttctctaggccacttttaactggttctgatgataatgaagaagccaatgctagaagagaagagagagaacaaattgcattaggttgcattgctaagtgccagcgatcctcagcttgcaagatgacaagtcaaattgctagttgggatacaaggtttgagacgggtacaaaagcagcattattgttgccattctctccaatcgtcattgcagctgatgaaaatgagcaaataagagtgtggaactatgatgatgcgctaccagtgaactcttttcaaaaccataagttgtccgaaagagggctatctaaactcttgcttatcaatgagcttgatgagagcttgcttttagctgcctcaagtgatggaaatgtacgtatatggaaaaattttactcaaagtggaggacaaaaacttgtaactgctttctcatcggttcagggtcatcgagctgctggtcgcagtattgtgatcgactggcagcatcaatctggttatctgtatgcatctggtgacatgtcttctatcctgatatgggatcttgataaagaacaacttctcagcaccattcagtcatctggtgatggtgcaatttctgcgctgtctgcatctcaggtccgctctggacattttgctgctggttttgctgatggttctgtcaggatctttgatgttcgttctcctgataggcttatctatacagcaaggccacatgccccaagaacggaaaaggttgtgggcatagggtttcagcctgggtttgatccatacaagattgtaagtgcatctcaagctggagacattcaatttcttgatgttagaagggcagcagagccctacctgactatcaaggcacacaggggttcccttacagccttagctgttcatcggcatgccccagttgttgcaagtggttcagccaagcagatgattaaagtgttcagtcttgaaggagagcagttgacgataattcggtaccagccgtcatttatgggccaaagaataggcagtgtaaactgcctttctttccacccgtataagtcactcttggccgctggtgctggtgataatgctctagtctccatctatgctgaggaaaattacaagtaaggcgaggtctacatctcttgacatgcatcaacaatgaaaccagtaggccttatgtttttggccaagcgatgggtccacgccatggtccagctacaagattaaaaaggatgatgtgaagcatggtcaccgacatggtggtgatatgaccggggctctcggtgcatattgcctgttggacgacgtgtgcagtgcagtttgtaagataagagtgaagccaagattcattagcctccttgcacaaggtttgttaacccctaccctggtcctgtcattgaacttggaggcttccccccaaataaattaatcatacctaggttaaccgaaatgtaaatagtcacctcattcgggtttgcccgttcctttgcttttgccaactgtaaaaaggtttggaggtggttgataccataaatcaggtgtggtgtaggggctgctgctgcctgggcaagtggggttgtgcatacgggcccaggtagaaatagaacgcatgcacatgtctcctgtattcacagatggatgttgaatagatagatgcatttgtccagctaataacatagcgctagatgggattggtgtggcctgcatgaacgagtctttgtgctgcttgtattgtattcaccggacagattgtccatttgtaaatatgactgtacagttgtcaggcaatagtaattaagtaaagttaaacttaaaaccttaaaaagtaaaagtaaaa

SEQ ID NO: 32057 - DNA, 4629 bp, Setaria italica
  Peptide Sequence Number=SeqID_98031
ctccgtcgccgtcgccggccgcgcccccggcgccgctgccgaaccaccaccacaaccacgtcacggatgacctccccgtcgccaacgggccggagcccaggaatgggctggagcccgccgaggtggagaagccggagcccgtggcgtacctgccccatgtggtggtgctgtgcgagcagcgccacgaggcgctcgacgaggccgcggccgccgccgccgggccctccaccaccggcctcgtctccaagtggcgcccaaaggaccggatgaagactggatgtgttgcacttgtactatgtttaaacataagtgttgatccaccggatgtaattaaaatttccccttgtgcaagaatggagtgctggatagatccattttcaatggcacctcctaaagcccttgaaaatatcggaaaaacattgcactcacagtatgagcgctggcaacctaaggctcgttacaagcttcagctagatccaacagtggaggaagtgaagaagctttgtaatacttgccgcaagtatgccagatcagagagagtacttttccattacaatggccatggtgtcccaaagcctacagctaatggtgagatttgggtgtttaacaagagttacacacagtatattccccttccgattactgatcttgattcatggctaaaaacaccttccatttatgtttttgactgctcagcagctggaattattgtgaaagcttttctagagcgcctagactggagttctagctcctctgcatcttcacagaaggattgcattcttcttgctgcctgcgaagcacatcaaacacttcctcagagtgcagaatttcctgccgatgtgtttactgcttgccttacaacacccatcaagatggcattgcactggttttgtaaacgatcattactccgtggttctatggatcattctcttatcgaccaaatccccggaaggcaaaatagaccgtaaaactcttcttggagagctgaattggattttcactgctattacagacactattgcctggaatgttcttcctcatgatctgttccaaaggcttttcaggcaagatcttctggttgctagtctctttcgcaacttcttgcttgctgagagaatcatgcgatctgcgaattgttctccaatttcttatccattgttgccaccgacacatcaacaccatatgtgggacgcatgggacatggctgctgagatttgtctttccaagcttcctcagttaattgctgatccaaatgcagagtttcagccaagcccattttttacggaacagctgacagcttttgaagtgtggcttgatcatggttctgaggacaagaagccccctgaacagttacctatagttcttcaggtcctgcttagtcaatcacatagatttagagcacttgttctgcttggaaggtttcttgacatgggaccatgggcagttgatttggccctgtctgttggaatcttcccttatgtgctcaaactgcttcaaacaagtgcaatggagttgcgtcaaattcttgtgttcatatggacaaaaattctctctcttgataagtcgtgccaggttgacttggttaaagatggaggacatgcatattttatcaggtttctcgacagtttggatgcttacccagagcagcgtgcaatggctgcttttgttttagcagttattgtggatgggcatagaaggggtcaagaggcctgtattaatgcaggtcttatagatgtttgcctgagacatctgcaacctgaaaatcctcatgatgcacagacagaacctttgcttttgcagtggctttgtttatgccttggcaaactctgggaagatttccctgaggctcggttacttggtctgcaatcaaatgcaccagaaattgtagcttttttgttagcagagacacaacctgaggtcagagcttctgctgtttttgcattagggaatctcctggatatgggatcaacatcattaaacggtgttgatgatgattctgatgatgacgagaaattaaaagctgaaataaatgtcgttcgaagccttctgcaggtctcttcagatggtagcccccttgttagatctgaggttgctatagcgcttactcggtttgcattgggtcacaataagtatctcaaatctgttgctgctgagtattggaaacctcaaaccaattcattgctgaagtcgctgccgtcactagccaatataagcagtccaaacaatgtctacagttccaacaacattcgacaaggcagcagtggccttgcttctcatattggtcctgtgctaagggttggcagtgatagcagtgccactggccgtgatgcaagaatttctacgagcagcccgattgcaacaagcagtatcatgcatggctctccccagtcagatgattcttcccaacactctgattcaggcatattactgaaagagaatgcaagtaatggtggtctcagctacaacagatcgagacctgttgatagtggcatttattctcaatttatatcgactatgtgttctgttgctaaagatccttacccaagaattgcaactattggtcggagagcactgtcccttataggtgttgagcaagtggtaatgaaaaatagtagatttaacagtggaggtacacatcaaggagagacatctgcacctccatcaaactttggcatggcacgctcttcttcctggtttgatatgaattctggaaacttctcaattgcatttaggacgcctcctgttagcccccctcagcatgattatcttacaggattacgccgagtgtgttctatggagttcaaaccacatcctatgaattcacctgagggcttagctggtccccttttaagctctgttgcggctcccagtaatgctgaactaagtatacttccccaatcaacaatctacaactggagttgtggtcacttctctaggccacttttaactggttctgacgataatgaagaagccaatgctagaagagaagagagagaacaaattgcattaggttgcattgctaagtgccagcgatcctcttgcaagatgacaagtcaaattgctagttgggatacaaggtttgagacgggtacaaaagcagcattattgttgccattctctccaatcgtcatcgcagctgatgaaaatgagcaaataagagtgtggaactatgatgatgcgctaccagtgaactcttttcaaaaccataagttgtccgaaagagggctatctaaactcttgcttatcaatgagcttgatgagagcttgcttttagctgcctcaagtgatggaaatgtacgcatatggaaaaattttactcaaagtggaggacaaaaacttgtaactgctttctcatcggttcagggtcatcgagctgctggtcgcagtattgtgatcgactggcagcagcaatctggttatctgtatgcatctggtgacatgtcttctatcctgatatgggatcttgataaagaacaacttctcaacaccatgcagtcatctggtgatagtgcaatttctgcactgtctgcatctcaggtccgctctggacattttgctgctggttttactgatggttctgtcaggatatttgatgttcgttctcctgataggctcatctatatggcgaggccacatgccccaagaacggaaaaggttgtgggcatagggtttcagcctgggtttgatccatacaagattgtaagtgcatctcaagctggagacattcaatttcttgatgttagaagggcagctgagccctacctgactattgaggcacacaggggttcccttacagccttagctgttcatcggcatgccccagttgttgcaagtggctcagccaagcagatgattaaagtgttcagtcttgaaggagagcagttgacgataattcggtaccagccgtcatttatgggccaaagaatagggagcgtaaactgcctttctttccacctgtacaagtcactcttggccgctggtgctggtgataatgctctagtctccatctatgctgaggaaaattacaagtaaggtgaggtctacatctcttgacatgcatcaacaatgaaaccagtaggccttatgtttttggccaagcgatgggtccacgccatggtccagctacaagatccaaaagatgtgaagcctggtcaccgacatggtggtgatatgatcggggctctcggtgcatattgcctgttggacgatgtgtgcagtgcagtttgtgagatacaatgaagccaagattcattagcctccttgcagaaggtttgttaagccctacccctgtcatcgaacttggaggcttcccccaaataaattaatcatacctaggttaaccgaaatgtaaatagtcacctcattcgggtttgtccgctcctttgcttttgccaactgtaaaaaggtttggaggtggttgataccataaatcaggtgtggtaggggctgctgctgcctgggcaagtggggttgtgcatacgggcccaggtagaaatagaatgcatgcacatgtctcctgtattcacagatggatgttgttgaatagatagaggcattcgtcctgctaatatagcgctagatgtgattagtgtggcctgcatgaacgaatctttgtgctgcttgtattgt

SEQ ID NO: 32058 - DNA, 1245 bp, Setaria italica
  Peptide Sequence Number=SeqID_98032
aagacaagcccagcagaaatcgcaaaaggttcctttacaacgtgatgaaataacaacagaattaagaccgaaatagatctttactccaaacgaagagaaacaatctcttaggcgatattaaatagaccaaaataaaaagttaaaaaacaggtatcatcattgcctgaatgcctcgtatcattatcagttcatctaccacaacacaagacacctcattgtagatgtgaccactagagcagcgggaaaggcaagaagcaatccaactcaacggttgactgtctttgtacctcggtgcagttttttattacaaaaagggaagaggggcattcataggtgtagcttacagcaccggtcaacttgaaaccaaaaccaagaaaaatcacgggtgggtcgggcaataatgccgcaaggattatcgtcgatcaagcctacaggaagtttctgatgtccaacttcttgacatcaggcatctcctcatctttaaactcctccctctttagttgagtctccatcgcttcaatgcattccttcttaagttccgtcagctcacttttggcaatttccatttcgagctcttcctcgatcttgggaagatcttccttccgaatgccaagctttttgttaatcttgtcaaactctgccaagagggtggccatgttcttcttgtcactcctcaatagtggcttcttaatgtccttctcgatcttctcgagagcttccatcatcaaaggctcaatgccaagatgatctataaggccactctttactctgatctcctggagagtgttcaggtaagtccgtgcatcagggatgcccttggtaaaggtctcaatagtatatttgattctttgagaatcagagagaagatctgccttttcccttacagtcttcataacttgagcataacgagaaactgccgctgggtcatctggatcaatagtgatcttttcctttttaaggacaccaagtgcggtctcaaacttcttctttacctcaaagaatatgcccttcaggagatcatccccattgatgggaggacgatcagctggagctgcatctttggcaaaggaacgaacttgagtggcacctccattcaccaaagccgtttgagccgaatatagctgacgggaccgcgagaccatgcgagcggccagcgccatggctgatgcggcgggacggcgctagggcaggagcctccgcttctcttcgatctccgcgagagcgagggggagagcgagagatggg

SEQ ID NO: 32059 - DNA, 320 bp, Setaria italica
  Peptide Sequence Number=SeqID_98033
aagaaatggagcggcagctctggttgctatgggcagcccttgccgttcctctcctctactgccttaccaacctaagacgccgtctaggcaccggacggcggccactgcccggcccaacgccgctcccgctcatcggcaacctcctcgacctgcgtcgtggcaaccttcaccacacgctcgcacgcctcgcgcgcacccacggcccggtgatgtacctcaggctcggattaaccgacgccgtggtggtttcctcacgcgacgcggcgagcgaggccttcatgaggcacgaccggcgcctcgccggacgtgccatcccagac

SEQ ID NO: 32060 - DNA, 463 bp, Setaria italica
  Peptide Sequence Number=SeqID_98034
acgaagaaagagaggtcaaagcaacggtaccccttgtgatccggggagtacccgaggaagacacactgagtcgaacggggagccagcttatgaggagcagtggctgctaccgttctgtcctgcaggtactgctccgccgtggttctcctcgggctcgacgtccaccggtactgtccctgaccctgcgcccagcacgggttcgacggtgccggcctctggtgctgcttcttccccttcgccctgcgcggaaccggtggcaccgcccgcagcacctgctgtccggtttgcgcagcccgtccgtgtctaccagcgccgggcgcggccggctccactggacctgcagccggccccgccaccgccgtcgccgcctcagtcatcgccggtggactcttctccgccggcgacgcctacaccaccaccacctccaccggccccgaccgagaccgtcgcgccgacggtgtac

SEQ ID NO: 32061 - DNA, 1229 bp, Setaria italica
  Peptide Sequence Number=SeqID_98035
tttaagtttaaagtttaacggggttaacttaagggaaggaagaagaaatcagggtcggaggtggaagaaggtggggtggtggtggagtaagggaagacggactcgtcaaacaccacgtggcgagagatgaggacccgccgagaagagaggtcaaagcaacggtaccccttgtgatccggggagtacccgaggaagacacactgagtcgaacggggagccagcttatgaggagcggtggctgcggtgttaggataacacgcacacccgaagacccgaaggtgatcgtaacggggggaggtaccgaagagagcgtggtgtggagtgggagcggggcaggcaacagaaggtaggcggttaaggagataggtggaggtgtgaagactctcagcccaaaaaggggcagggagagaagactggaacagaagagagcgcatggtgtcgttcgtggtacgaatcatgcgttcagccttaccgttctgggaggaggtatagggacacgacatgcgtaggtgcacgccgtgagagaggaagaaggcacgggaggtggtgttatcaaactcgcggccgttgtcacactggacggccttgatggtgagaccgaactgagtggacacccaagcgaagaagtggagaagtgtggggaaagtatcagacttggcacgcaagggaaaagtccaagaataatgagagaaatcatcaaccacaataagatagtacttgtagccagaaatgcttagaacaggagatgtccatagatcgcaatgtacaaggtcgaaaacatgggtcgcatgtgaagaggaggtaggaaaaggaaggcgaacatgacggcccagttggcacgcctgacacaggtgctcatcaggagcccgagtacatggtatatcggaactacgactaagctgtgtcaggacagcacggccaggatgaccaagacgccggtgccatgtagtggaagaagctgtggcggcaaaagcggctgaagaagcggagggcgaagcggaagaagtggacgcaggaaatcggagggagtaaaggggcccggtgctgtcacagcggagaagaggtcgccgggtagccacatccttcacagtaagaccagaggagtcaaattcaacagaacaggaattgtcagctgtaaaacggcgaatagaaagaaggttgtgaaccatggagggagcaacaagaacatcaggaatccgaaaagaaccgtgagtgtgagcggtacccac

SEQ ID NO: 32062 - DNA, 298 bp, Setaria italica
  Peptide Sequence Number=SeqID_98036
atgactacatgaaccttagttgtggaaaggatatcatgttggacggaaaatttgcaggaagctttggcttagagagaaaacttgatcttactaattacattcggtggtggctacccaagaagacacggcagtcagatacatctaaagcagaagagattgctgatgaagtccgagctattgaaagttcaatgcaacagactgaaccgtataagttgccttctcttggcctctgttctccttcaaagccctcttcaatgggcttatcagcatgtggtatattatctcagtctgatgcctt

SEQ ID NO: 32063 - DNA, 356 bp, Setaria italica
  Peptide Sequence Number=SeqID_98037
tggtgccaattggtgcagatccgaagaagtcgtacttggggaggagggccggtaactacggccacaattgttgtgcatgcaacgggtgctcaagaactcgtcgggcggcgggtatggaatgggactcacttcgtcgacgttgggccttatgcgcttctgactccagcgatcagtgatggcgtggtatgggacgcgccttgtcgactcttggagctgtgttgtggtgtggtatgggacgcgccttgtcgactcttggagctgtgttgtggcgtggtatgggacgcgcctcatcgactcttggagctgtgttgcggtgggctagggtgcaccggcaaaaatcatggcgacgacgtcgt

SEQ ID NO: 32064 - DNA, 466 bp, Setaria italica
  Peptide Sequence Number=SeqID_98038
tatcttcaaaatatttgttacattactcctctgatgatcctttttcgagcaggatatatccagctgagagtcccaggaggtgatacttggaggaaaagcagcaactacctcgtcagcttcccaggaactcatgccaaattcattttgagtaaacacaagattcatatcagataggtccacatgagaaaacggattcttatcaaggagcatgcatactgaatagctgagatgcatgttaatcccagccatgtcaaatgagcttattattgggcgaccttcaaaaagatctgggtggttacagacctttctaagttgcataatgatacttatcatgccaaaataattcccacttgctagtgttgtttgtgtctctgagctagcaataaaatcttcatacaaattcctttgtcttctagaaagtcggcaatatatgacatgctcgtgcttctttggtaactgtttctcg

SEQ ID NO: 32065 - DNA, 274 bp, Setaria italica
  Peptide Sequence Number=SeqID_98039
gctactattaataattcacaattcagactgtcgattcttttttcttacgccgtacaaagcaaagcacgcatgcaaagccttgcatccctccggacagatgcttattcgtctcctagaattgaatttctacaagatgatgatcagattcatacacacacacacacacacacacaggtcttgatcgcgtaggtacagtttggttcgtgcaacggggtcaggtcagcatcggcgacgcatccgatcctcacaacttcctgctgctctcgagcctgga

SEQ ID NO: 32066 - DNA, 260 bp, Setaria italica
  Peptide Sequence Number=SeqID_98040
ttgaatacggcggcgaggggacgacgcgatgccgggggtgccgtccgcatcgggatcggggatctggtcgcggcggcgggacgagatcacgttcgatcgcctccaaaagttctggaatgatttgcctcctcaagcacggcaggagctcctcaaattggataagcaaactctcattgaacaagctcgcaagaatttctactgctcaaggtgcaatgggctgtttctggaaagtttctcacagatagttatatatgggaagt

SEQ ID NO: 32067 - DNA, 1615 bp, Setaria italica
  Peptide Sequence Number=SeqID_98041
ttgatcatattcaactggatattattctccagtaactttaaaaccaggttggaaagaaaccagaatgcctatttgagtagtgttatgcttatttgaagttatagagacttgcgtgatagctttattgccaaaaaggaagctgattactttaggctgtgaattgatttttcttttccagttctggaatgatttgcctcctcaagcacggcaggagctcctcaaattggataagcaaactctcattgaacaagctcgcaagaatttctactgctcaaggtgcaatgggctgcttctggaaagtttctcacagatagttatatatgggaagtcactgcagcaagaagcatcagatattagtcaacttaggacaactactgagtcaaggattacgcaaggggaacaagatggggctcaggacccatcagttcatccttggggaggtctttcaaccacaaaggatggtgtccttacacttctggactgctttataaaagcgaaatcactacgggtacttcagaatgtctttgataatgcacgagcaagggagagggaacgggaaatgctttatcctgatgcctgtggtgcaggtggtagaggatggattagccaagggatggttaactatagggggcatggaacaagagaaatgtgtgctctgcacactgcccacctgtcatgtgatactctggtggatttctggtcagcactaggtgaagaaactagatcatctcttctgcggatgaaggaggaagatttcattgaaaaacttatgtacaggtttgatagcaagagattttgccgagagtgccgaaggaatgttattcgtgaatttaaggagctgaaggaactgaagcgcatgcgaagggaacctcactgcaccagttggttctgtgttacagatactgcttttcaatgtgaggtatttgaggatgcggtcatagtcgattggcgccaatgcttatcagagccagatggatcttaccaccactttgagtgggctattgggacagatgaaggagaatctgatatctttggctttgaagatgttggaatgaatgcacaagtccacagaaatggaattaatcttgatcagtttgaggactacttcataactctgcgagcttggagacttgacggccactacacagagctgtgtgttaaagcacatgcattgaagggtcaatcatgcgtccaccacaggcttgtggtgggtgatggctttgtgacaatgacaaagggtgaaagtattagaaatttctttgagcacgctgaagaggccgaggaagaggatgaagatgatgccatggatagggatggaaatgattttgatggtgatggctcccatcctcagaagcatgccaagagccctgaactggcaagagaatttctttggatgctgctgctgtgatattcaaagaacaggttgagaaggccttcagagaaggtacagcgcagcagaatgcacatagtgtttttgtgtctcttgcattaaaacttttggaagagagacttcatatagcatgcaaagaaattattactttggaaaaacagaacaaacttcttgaggaagaggaaaaagagaagcgtgaagaacaagagcgcaggatgaagagga

SEQ ID NO: 32068 - DNA, 309 bp, Setaria italica
  Peptide Sequence Number=SeqID_98042
gttaaaggaggttatcatgcattggaaaatataccagcattgcacggttttacaacgagggcaaacatcacaaagaaacacgagcaaccagtgtaagattacactatggctatatctcatgccagatgaaaaggaagtgaagttttgaggcacatacgtgcacttctccccttcgaagcacgagtctctgtgattatttttcttctcctcgaaataacagtacaggaacactgaatgaaacaccagccaatgcgaacggtcgagtcaaacgagcatgcaaaccggtggctcctctgattcacaaatccg

SEQ ID NO: 32069 - DNA, 1492 bp, Setaria italica
  Peptide Sequence Number=SeqID_98043
ctatccagcatcgctggagcaaactgcgtatcaggacggcaccatgtggcgcgctgcatcaggctcgtagtcgtggatcgtgtcggttatcttcgatggaggccagtaccggagcaaagatctcccgacaatgttccttgccggaagcggaccccagatatgggaatcgaagctgttgttgcggttgtctcccagcacgaacacataaccttccggtacaagcaatggtcccaattcgtagttgtgtggctcgagcacaaattcctcatcctgaactactccattgaccaacagcttgccatcacgcacttcgacatagtctcctcccttggccacaactctcttgatgaacacatcccctgagctgtagccgtaagcctgaagagctggaggagcccggaagattacaatgtccaaaatttccggttcccggaatatgtacgagaccttctcggcaagaatccgatcgccgatgtcgaaagtcgggtacatggacttggacgggatggaccttggctcggccagggacgagccgtagaggagtggcacggtcacagctgcaaacgccgtcttggcctcatcggagcaggagttcatccacctcgacaaccagttactcctgctcatcgctgcactagcaccactgctcgtcgcaattcccgcaggaccagacgcaccagcaccagagctagcaccaccaatcaacgccttcttggaggagggcgaaggcgccagcgaacggggaggggaagagggcgccgaagacgacgaggtggcaaggtcgctgcaggggagccacttcgccgtctgcaggaacgggaggaaggacgtggggttgaagccgagggaaatcgacgacgaacctgacaggggcgccgccgacccggtgatcccagccgtcggccctgttgcttgcgtgagcaccgacagcagtcccacggcgagagacggcggcggcgacttggacgacaggcacgcccgcgtgagcagcagcgagtgagctccggcggcgatcgcctggggcttggggtggttgtggtcgccgccgtcatggcggtcgttgccgccgccgccactgcggtgctgctctggttggcgggtggaggtgaagatgcagaaggggcgccaggcgccgtcgtggaggaggcggccgccggtggcggaggccgaggccgagcagaagcggtgtccgagagaggcggcgaggttctgcaccacgtagccggagtaggacacggtgatgcggatcgccatggcgaccaggcagaggagccgtagcgagagcgagaggaggcggattgggctgtcgaggaagcaagcggagaccggggcgcgggagagttagaagccggcggacattccggagggttacagggtgggaggttgcgtcggggaggtcgaggtggggggtcttccggcgagctgcctcgccggaagacggggtcaagggtggcggtcgaaggggggaggcggcgaggtgagggcgaattgg

SEQ ID NO: 32070 - DNA, 644 bp, Setaria italica
  Peptide Sequence Number=SeqID_98044
ggcacaccgtgcacctgcacagcacgacgctgagtgagtccacgaaaatcctctgcattagacttcttcttttgctgattcgtcagactagtctcaatggaaatgttacggaagtttcgtgaacattaattttatgtcattgacaagctatttatgaggagagaggagatggaagttttatccctatgaaattcacttggcacaggtaccaagttcaatagaatccaataaaacttgcactgaacatgctatggtttcatggcatgacatatttggtcataggacaacgcggaaattaatgatttagactacctataaaactgtgtaattaaactatgcactgagagtgacagtttcatttcgtttcaactgacttgacattcttaataatagtgtaatgaaatcatacactgcatgagattaagcttacgtacgcatgttgattgttaagacagccggtcgacagaaatggcagcactgttgcagggttgctttcactgcctctctgtgcacacgtcaaacctcaattttacaagcccgaaattggcaaccaaaatggcctttcaaatggtgtgataatccagtttcagaacggcgaatgcactgaagcttctttgctattttttcaacaattaaacctcttt

SEQ ID NO: 32071 - DNA, 524 bp, Setaria italica
  Peptide Sequence Number=SeqID_98045
agaccggcgtcccgcgcgtacagctccagggccttggggaggattaccttgtgctggccccggccgcgcacgccgacgttggcgcggatgtactcctccttcgcggcctccagctgctggaacaggctcttcgggttgtacagccgcaccactgggtccgagtagctgccggaggacagcgcgaagtgcaccagcggctccggccggtccacggcgaagccttgcagctcgtccttgtccctggacttccatttcgggtagagcagcagcctaagccactgtccagaagaatgcgctcggcaacacaagatctggtactctatcagctccgcgtttactctttggccactaatgatgtaggataccttggttagcaggattctcttgctgttactctgtggaatcccgtattcgatatgggcctgaaaacaacaaatgtttagattgaactccatctgttagaaaaattgagtaagatgtcaaggtacagggcatgaaactagttacatgcatcatcattgcta

SEQ ID NO: 32072 - DNA, 246 bp, Setaria italica
  Peptide Sequence Number=SeqID_98046
ctggtgcgcacagtcgaggttgagcccggcgtcgacgttgaagatctggcagtatctctggtagaaccctatccggttgttcaccctggcgtcgtcggtgcggttgcactcgagccccccgttgacgatgttagtgacgaggccgaagcccggcgtccggttggcggcgaggtcggcggccgagggacggtactccccgaccatgacctcgtggcacgacggcttggccggcgcggcgtcatccag

SEQ ID NO: 32073 - DNA, 704 bp, Setaria italica
  Peptide Sequence Number=SeqID_98047
tgtacgaatgttgatttgcagaatcagcgttgcggtattcaaaaagcaatcaaagaatcagattgtcaggtttttatcaatatcatgaaaaagaagcaaagcttcaattcagaattcttctttgattaccaactagatgagaagggcatggtaaagcatattttctgggcagatggatcgtgcagaaagaactacacgttgtttggtgatgttattctttttattctacatgtgacaccaatcagcatggcccaataattaccctgttcactggagttaaccatcacaacacttgtgttacatttggtgctggatatctagcagataacagaattcagtcatgcacgtggttatgtcaagcttttctcaaggcaatgggtggggtttgcacctaaagttgttataaccaatgaggaccctagcatggaatgtgcaataagagatgtctttcaaacaactaaacatagactttgtacctggaaaattcttatgaaactctcagataaagttggccctatgttaaacagcaatacgcagtttagtaatagaattagggcatgtgttttgggttcagaaactccagaggagtttgagttgaagtggtcttcaataatttccgaatttggtttagaaataatgcttggctgactgagaagtataacatgcgtcaaacttggatacctgcttactttcatgatctgtcc

SEQ ID NO: 32074 - DNA, 284 bp, Setaria italica
  Peptide Sequence Number=SeqID_98048
actgcagaacgtggagtccggggaaggtggacctggagctggagtggatacctctaactcagtaaagttcacttgtcaggtcagggtagctcgcaccggtggcaaaatgatgacttatgtatgtgtttacataacacattctgcatgtgagtatgtgacaagatggcgaagtgcttttaggggctcctaactaaggtgaacgtttactaaataatttctagcgaacaccccctcaacatttcttaaatttgacattgttaaccatataaaaaaaaaaaaaaaaa

SEQ ID NO: 32075 - DNA, 415 bp, Setaria italica
  Peptide Sequence Number=SeqID_98049
tgcttgtcgatggcatgccaattggggatcaacccacagtgggggccttcgattgtgccttcaatacccctctcatggctgtgtgttcttggaagcagaaagatcagacaatcatctgataggaggacgatattgatgtttgggaagagatgaagcacattgatatttcccatctcatggtcaaatctgcctcctaaggcaccaaggacaaggatgcagatgttagatttgcctgcaacaggtgaattcttagctataaaagctatacacttgtgtaaatcagtggtgtcctgatcgtgtgactcatcaacaattttggtgcccaagttggaataatattccttcacttctggtcgtactgagtccatatcccctttgattacatctggcttgtacctctcgcggacctcgacgg

SEQ ID NO: 32076 - DNA, 337 bp, Setaria italica
  Peptide Sequence Number=SeqID_98050
cgatgagcaacatcctgcccgccatgaccttcgtcatggcagtgatcttcaggatggagaagctggacatcaagaaggtgaggtgccaggccaaggtcgccgggacgctggtgacggtggccggcgcgatgctgatgacgctctacaagggcccgctcatggagctggcctggaccaggcacgcgtcccacgcccacgccggcggcgccgaggcccccgccgccgcggccatcagcggcagggactggttcctcggctcggtgttcgtcatcatcgccaccctcgcctgggccgccctcttcatcctgcagacgcacaccatcaggcagtacccggc

SEQ ID NO: 32077 - DNA, 575 bp, Setaria italica
  Peptide Sequence Number=SeqID_98051
cctaaccggccggcgagggggtagaaggtgacgagcgcctgggacagggcggccttgaggacgtccggcgagaagaaggccgggccggggctgggtcggtacacgtagatggtgggcgtgtggctcctggccacgaggaggtcgaggttggagagccacacgccatgcttgggcgtggccgcgtcgctaggcgtcaccatgcaagactcgaggatctccaccaccgccatttctgctaggagagggaggtggatcgatgtcctcgctcctcagaggctaactttgcagctcagttgtctgtcggggcctctgctgggtgttcttattcttcacgcgtgtgtcgtcataaatcgagaggatttcatcagtacggcggacatgcatccaacaaccgatcgagttgttgcctacgcatgcaccatggcaccatgtctctagatcttgatgctcatgaatggagatcgacgctattgcgtccatgattttgctgtgacgattaatctcgagttcggttgctcagtatatggaggtggactgactgaatactcgccgacagattagcaacgcattggtag

SEQ ID NO: 32078 - DNA, 272 bp, Setaria italica
  Peptide Sequence Number=SeqID_98052
gcttcctctgctcctgcgaccgccgccgacggccgatcccctcccagccacccacaagccgcgatcctcctccatcccgagctatttaatcctgccgccggcgtcttcgcactcgccggccgcaaaaaacggccgcgtcggtatcaccgtcgctgtcctcggcccctaaccgtgcctcctcgagaccgcatccaccacggcggcgggccgcggttgctggccccgtcgcgtctgatcgatccagcattgggttcatctcacctttccctagg

SEQ ID NO: 32079 - DNA, 525 bp, Setaria italica
  Peptide Sequence Number=SeqID_98053
accccactgtaggtttgaaatctgtcagaaagtgcactagttagaaaaatgtgatctaacggctgaaccagtacattttaacttatcctttttaggagtttttcaatatttactagtttttgtttgaagagagcgaattatgtatcccggggttctagcgcccccactaacaaaaacaacatgttgtaatgtttcaaaaatctaaaaaaatcatgtatttagcacacattaaattaaataaacctgcagaaattaaatgtcaaattcattctacatgtcagggaaaaatacaacttgtgttttttgaatcttgttatcagagatgaatttaaaattggattatcatagtttcactaatggggatcagaatcagaacccctggtaacaaatgaatttcctatatcagaaagtgtgcatgagaacattcagcagaaatcagaatggatatgtaccactagacataagtatatgtgtatgcattccttcaatcataagcatttctcaaagtagaaattatatatgcat

SEQ ID NO: 32080 - DNA, 320 bp, Setaria italica
  Peptide Sequence Number=SeqID_98054
ctgctcatacacacacgccgcgtatggtactgcatacaacacctcgtgctgcctcttcatcttcttcgtcttcagttcttcttgctccctttctggtagagttctagcgcaatccatggagtagcagttagttttgcaatccttctgttttctcctcccttttttttccttttccttttgatgaggattgggtgtagcatgtagagctggagataaaggttgttaataatctgtccaaaggggagattttgtgagagatgatgagggaatgaatatgaactagtgtgtttgcgtgggatgtgaggtaatcccctaggaat

SEQ ID NO: 32081 - DNA, 564 bp, Setaria italica
  misc_feature (22)..(22): n is a, c, g, or t
  Peptide Sequence Number=SeqID_98055
tgcacgtctgcctgagactgcntataaggttgggattgtgttgcacacatacaatgagaatgtggactttacatgaatttcatacttccagactctaagtcaagcagcctaaggcatttctgaagaacacaaataataagaggctgaaagctggagtgccttcaaactggcctgatttagagataagtttgcgtgtgtgctcttggtatttgtacaagttgttaccaactactgaaatagcatcacagagaaaaggaatcacaatgtatgacaatttattaggtgctccaactaattggttctctcttatacaccatttggcctcataaccaggcaagaaaaccaaccatgcatcaatctccgtgaagttctgatcaaacgcaccagaactcgccatagcagctttaactaaaatgtatgcttgatcacggatgttcttaatctgtgaatccaacatgatgtaaaacaaaggttgtagatacttgtacattgattccggaactctttctaggtcccaacatcctccagattggcctgaatactcgagtaaaagagataacaggg

SEQ ID NO: 32082 - DNA, 561 bp, Setaria italica
  Peptide Sequence Number=SeqID_98056
cctccattcagcaagataaatcgaagagttcatttcttcagatgaaaatttatcaaatctctcatttagaacagcacctataagatcagataataaatgcacgtctgcctgagactgcataataaggtggatcgtgttgcacacatacaatgaaattgtggacttctcatgtaatttcatacttccagactcaagtagcctaaggcatttctgaagaacacaaataataagagggctgaaagctggagtgcctgtacattgattccggaactctttctaggtcccaacatcctccagattggcctgaatactcgagtaaaagagataacagggactgttgctcatccttggatagatccaacgggttaggtggtataatcctaaagaagtcatatgatccatcaaaagagctgggcatcacccccaaataaaacctgagaacatccagcaacttcgagtggaagacatcttctacaacttttgcatctttcatctttggcatcttgattctaagtcccactatctcacacaagtggttgtgtgatcttgtttggtactcct

SEQ ID NO: 32083 - DNA, 982 bp, Setaria italica
  Peptide Sequence Number=SeqID_98057
cagcatggcgtcctgctccattgtcccagttgcccgtggccatccagcacaccgaagagtaacatgaaggatgcccatttgtgagtctcttcagcttgaggagaattccaatgactgttgcataggtcaggctcattgattcaagccaacagtacaaaaatgagaaaaagggaaggaaaatccaaggttaaaacgcagagctactaaacaattatatacactaaactgaagtttatttttctcagagacattgtggctcacctggtaaaagacttgggaattgcaataatgtattatagatgtcttttgtattatagatatattttcattattagtcgatcacacaagtaacagatacattttttcttcaagaaggaaattaagttatattttccaaagtcataccagcaatgcctcaaataaaatctgatgcagcaacacaatgcagaaaaaataacagttacgtatgggttaaccggagctgcttatttacttcaaactcattagatcggtaaattggcaagctagccattcccttggtgtatgtttttttttaaaacacaatataatgttagtggaaagaccaacctcatatggaatacctttttgctatataaaggcagtgcatgaccatgtgcaaggcaataatagaaataaaggtaaatatcatattacatgttctaaatatttaaagaaagttttctgggaacaaaaaccatttcttcatcctccaatgctagaagcctagaacccttttatgattcctcatcaggagaggaagtctacaagggaaagatgctgaatgccccaacaggaaggtgaaagaaattttcaaagtattcaggacagaaaatcctataagcattgtcaatttgtccaaagagtgcacttcaagtttgttaatccatttctacagttcagtaaattatcttttttgacataaaaagtagatgcttatccatttgttttaaaatagcaaaga

SEQ ID NO: 32084 - DNA, 432 bp, Setaria italica
  Peptide Sequence Number=SeqID_98058
acaagcatactgattagtgagtacctcagggttgaacctcataagatcaaatatgcgttctaacgctggttctccttgcttatattcattgtatgccttccccaaatcctgaataggctccacaacaagagcaagcgctgtcagaaaagacagaaaaccttcagcatcaaaggatgtgcctgaaacaaccattgacccagcacagagcacaagcaggcctccaatgtatgttgctcgaacagcctgaggtatgagagtcttcattttcttcttatccaaattattttttagattgtcacgagctaacttttggaatctcaatatctccttgagttccccattgtttgccttcacagtgagcatcgacggaactacctaaaaagaagataactaaagttgtagtccctccttggacatttgatgaagttgtta

SEQ ID NO: 32085 - DNA, 431 bp, Setaria italica
  Peptide Sequence Number=SeqID_98059
aacaattgtatattgagcacggagaacacagcatccgcgacgtcgtccgcctcgtcggcgatccggtgcgcgaggtcgcctgcagccacccctcctctgccctcgaagaacgcgaggtcgcgctccaggagccgcgcgaaggcgcgctcccgcagccgccccgccgcccgcagcgccgcctcctttcttcagggctgcaacaggaaggccatgaatcagcgaatagcgaggcccgcatcctctcttccatgtcccccagccgggtcgaggattcggcgcaggtggggcctgaaccgcctccggcgtcggtgctgcccagccgtccgctcgctcccccagcccatctgggcatggatgggtggcgcctcctttgggttgtcgacgccgaagaagggaccaccgccgcaacagtagcttttccccgttgcgcc

SEQ ID NO: 32086 - DNA, 1093 bp, Setaria italica
  Peptide Sequence Number=SeqID_98060
agtagaaatcagcattgctaaacaatgcagtacgcgattagctcattgctgagagaacctgctcctattttggatacggacattggaatagtactacaaatgctttacatctcattaaaacaaatagaatttttctctagtatttgtaaaacatggaaattgcatacttcaagaaatgcaagaaacatttacaaaggtacatacattcttctctggaagcgcacatctagtcgtctgtctatctcttttcttgattctgcatatttctgaagtcaagcgaatgcagaaactgttctctgaatttcattttgatggcccacctccaatgcagccagcttacttctgacttcttcatccacttgatgcctgctcatctttgcacatctggaacatgctcctgtcctcatcacacatctaaacacgcatatacagttcagcatggcgtcctgctccattgtcccagttgcccgtggccatccagcacaccgaagagtaacatgaaggatgcccatttgtgagtctcttcagcttgaggagaattccaatgactgaataggctccacaacaagagcaagcgctgtcagaaaagacagaaaaccttcagcatcaaaggatgtgcctgaaacaaccattgacccagcacagcacaagcaggcctccaatgtatgttgctcgaacagcctgaggtatgagagtcttcattttcttcttatccaaattattttttagattgtcacgagctaacttttggaatctcaatatctccttgagttccccattgtttgccttcacagtgagcatcgatggaactacatcgttgagataggctgtgagcatggcaaggctgagatgcgcctccacctccttggacatttgatgaagttgtttaccaagacttgctatgacagcgcacatgcatggaattaccgttgctgcaagcaatgagagcatgggatcgattgtcaccatctgagtacccattgttatcaactgcaagcttgtcggcacaattgtatattgagcacggagaacacagcatccgcgacgtcgtccgcctcgttcggtcgtattccggtttgttcgttcgttagtt

SEQ ID NO: 32087 - DNA, 1619 bp, Setaria italica
  Peptide Sequence Number=SeqID_98061
atataaagcacactgaaaagcaagttccagatgcccttgtaaatgcatacacttttcactttggaatatagaataaatgaaggcagaataatttaacagagaaatcagcattgctaaacaatgcagtacgcgattagctcattgctgcgagaaccggctcctattttggatacagacattggaatagtactacaaatgctttacatctcattaaaacaaatagaatttttctctagtatttgtaaaaatatggaaattgcatacttcaagaaatgcaagaaacatttacaaaggtacatacattcttctctggaagcgcacatctagtcgtctgtctatctcttttcttgattctgcatatttctgaagtcaagcgaatgcagaaactgttctctgaatttcattttgatggcccacctccaatgcagccagcttacttctgacttcttcctgaagaacaaacatcatagatgatgaagaggtttttaaaaagataaacaatggggttccaaaaatagtcaatgctgttctatcaaccaaggaaaataatgtcatcagtgaacctagtgccctaacatggtgaaaggaaacacaacacatgtataagtgctattgctactaaagtatgatgataagtaaattacaatatgaaatgtcttatgtttcaaaacaattttcagatcaattcaccaagtcttactcttcatccacttgatgcctgctcatctttgcacatctggaacatgctcctgtcctcgtcacacatctaaacacgcatatacagtttagcatggcgtcctgctccactgtcccagttgcccgtggccatccagcacgctgacggatgcccatttgtgagtctcttcagcttgaggagaattccaatgacttttgctatatggttgtggcctctcgcaatagctactaaacaattatatacactaaactgaagtttatttttctcagagacattgtggttcacctggtaaagacttgggaactgcaataatgtattatagatgtcttttgtattataggtatattttcattgttagtcgatcacacaagtaacagatacattttttcttcaagaaggaaattaagttctattttccaaagtcataccagcaaacaaagcagaaaaataacggttacgtacgggttaaccggagccgcttatttatttctgtcattagttcggtaaattggcaagctagccattcccttggtgtatgttttttttaaacacaatataatgttagtggaaagaccaacctcatatggaataccttttgctatatggttgtggcctctcgcagcaccgccaagatccaatcccctctgtcggaaacccaatccaatcttcacggagccatcaccccggaactagtcacagccatccaccatccagcaagcagtccgaatcaccaagagacgcggagaacgcaaaaccaggaaggcagggcctcccgcgagatccaagaagcgagacccacccaccgaacggcgccccgccgcgccggcgcggcgaggtgagcgagctgctgcgcgcgaagggaggagggcgggaaacagcgggcggatttgaaggccgtgcaggggcagggtggtggcagcgc

SEQ ID NO: 32088 - DNA, 1999 bp, Setaria italica
  Peptide Sequence Number=SeqID_98062
ttttttttttttttcttttacaaaatttagtgtccagcacagaattcttcaaaaactgaaggcgaaattgccctcaagtcctcaatagtcaatacaggtggcggaattggcctcgatacagggtacagacatacaacatacagtgaaacctcaacctatgctatacacgtctttggccggatacatgaggagaatttgtaataaataaataaatattgttggggatgatttgatgctggtattcatgtaggtcagttcctcttcaaagcctgattgccactggaggctcaactgtcaactggagctaatcacatgcgacgaacgtgcctgatgggcgtactctacagccccatgcccatgtgtgttttgattttcacatgaataactctttggataaaagttgctgaacgaggtactgcccttctggttcctggaggtagattttgtcattcagataattctttagattgttgacagcctcggactgcattttgttgccttgatctttcagagctggtaaaaagcaccgcgatatcacatccaggattttcaggaattgtgatccatatttcttgtggagtgcaaaaccggccatcttgaggaaagcgtgaagggcataagcagtggctgtggtagctggcagagcattgagaaacatcgcaagccatctccatccctcagctaagccatgaggatgacgtacacctttgatttctgtctgaatcattgccgcatacagtttgacgtatgcaacaacatatgttaaataactttcagtgctctcaagttgtccgttttcttcctggtaacctatcagtctgtaataatctctacttcgtgcttgtgcatttaaagcatgaagatgctttggaactgtgtatatgcaaactctgttaaactcagctagaagataatccattgcatctggtacctggtttgtgactaatagcatgacatatccacacgcaaaggctaaatttccaaaggttttgtcctttgtatttctactcttgacaattgaaataatcttgtttgcgaatataaaacaagcaattggacggggacaatcctgtccatctaaagctttaataagctcgctagcccttgctctgacactgtcagtagtcggcataagtttacttatggatttggcaatttgtcggtcatatttgccgaattccttgctgagatgaatgttttctggcacttgatcatgtactaatgcacgcctccgtgattccgcttctaatgcatatttatcagcaaaaactttgatacctgcaatattattctgagaattttgaccagattgggaagctgccgcttccctcgatttagcagcttctttttctgcagcttccttttctgctgcttccttttgagcagcctcaaatgctgttttccgtgcttcggctgctaattttgcagcttccttctgcctagcctctgcttcttgccgggctctttcctgccttaacttttcttccttgatagcttgctcttttcttttagcttcttcaagagctgcatcatctcttattcggcgttctacaatctgggatttctgctcatgatccctttggaccatagataagtgtttatcgagtacttctgcaattcttctctggaagtgcacatctagtcttctgtctatctcttttcttgattctgcatatttctggagacgagcgaatgcagaaattgttctctgaatttcattttgatggcctacctccaatgcagccagcttacttctgacgtcttcttgaactttgagatgatgctcgcgttccagctcaagaagaatgctcttctctaggttccttttctccattaagtggtatggttcaatctggccatctaattcatcctctgaatcactggattcaagatcattacaaaaaaaccttgctccattgaccacgagagcctgggactcccaacactgataccgtcttcatcttctgtgtcgtcttcgtcatcaatccgcatcacaaag

SEQ ID NO: 32089 - DNA, 336 bp, Setaria italica
  Peptide Sequence Number=SeqID_98063
gtccgtgaggtggaggaggtgggcgtggtggacgaagagcccgtcgccggcggcggagaaggtggggacgagcggggacgccatgaatcggtggaagaagtcgagctgcttggggcgggtgacgcgggggccccgggacaggccgagcggcaaggggtcccccgggactgggcgcgccgtcccctccatcgtcaccggagtctccgcgtccagctcccaccgcccgtccccctccgacatccatcgcatccgccgcagcaacatcgccgccgccgccgctgccgcgcgtcgcttttttggagttggtggtctcgctttcgcgtccgcgtcggagtg

SEQ ID NO: 32090 - DNA, 499 bp, Setaria italica
  Peptide Sequence Number=SeqID_98064
gtcctatttaacaccatttgcatatgtacagagaagactaaagagaacaaatgtgtgtcaggctgaataactgaaatggttcgcatgtacttttgagaaactgaaatcaggaaaaaaggcccagctcattaggaagaggaagagctaactaagatatgggtttctctttgtataatatatgtatgcaggtttcgtcctatgcatccacatggtttccagcatagactagttgctaatggggatctcgaggtagatcatatgggcgtcatcatacacgaaaaaaaggaacgtcaacatgttaagtatactgtacgtgttgggtgtataaagcagcacatagttgatttgcaattaattattgtatggccaagaacagaacagagtccaaggcctcaaagttgtcaacaaaatctgtacctaccaattgcggcagcatccttactaaactgagcatacggcaagcaatatcaagctagtaggttattaggatcaagaattg

SEQ ID NO: 32091 - DNA, 562 bp, Setaria italica
  Peptide Sequence Number=SeqID_98065
tcgtttgtttaaaagtacttcttgttagtttagttttgtacttgtattgtattgtccttcaatgtactcacacatgagtcattcaatgctgctattgctgaagaatacccgctaataataatggtatactcaaaaggtagtcctcggtgtgctcaatttattgagtactggaagcaaattggcattcgattggatggtatcgccaaaattgctatggtagaagttggtgattcacagctggctggtcatttcactgaaaaagggttctccaaacagccatttttccgtaatggtgtaccagcaattgttgcgtacccagctaactgcagaagtccatcctgttacatgaggtacccaggtgggctctttgtggattctgttgttgattgggttgcaacatcagttataggattgcctcggatcttgttacttatttctaaaggagacattggggccacaattcattgggaagagcggcaatcataaggtcaaagctatctttttctcaagtaactggaagaagacgtagactagacgaccgttaccttacgaccaaagacta

SEQ ID NO: 32092 - DNA, 2584 bp, Setaria italica
  Peptide Sequence Number=SeqID_98066
gataccttcgccttttccgcccgcgtcgcgccgtccgtctccgtcgatggcgatggagattccggcggaggtgcgccgctactggctgccgatcctcctcttcactgctggtttcctcttccagctcatcgtcctgcccggccacttcccgccctcccactacgacgcgctgggaatcgagaggtttgcgccagtggagcgggtggtcgaggcctacgagcggctgtccaaggaatggctatctgaaacgaatcaccaaccaactgttgatattataaagatccgttatgcatatgagctgttgacaaatccaattttaaagagggattatgatctttttggactggatgagcatatggatgtccttgagagagtcaaagaacaatatcaaaaggagcactttctgaaaatagatctcccgttgttaaaagactctgtagttagtttgactgatgatgccttcaatgtactcacacatgagtcattcaatgctgctattgctgaagaatacccgctaataataatggtatactcaaaaggtagtcctcggtgtgctcaatttattgagtactggaagcaaattggcattcgattggatggtatcgccaaaattgctatggtagaagttggtgattcacagctggctggtcatttcactgaaaaagggttctccaaacagccatttttccgtaatggtgtaccagcaattgttgcgtacccagctaactgcagaagtccatcctgttacatgaggtacccaggtgggctctttgtggattctgttgttgattgggttgcaacatcagttataggattgcctcggatcttgtactattcaaaggagacattggggccacaattcattgggaagagcggcaatcataaggtcaaagctatctttttctcaagtactggagagcgtgctgcgccgttccttcgccaagctgcccaagagtattcgagctatgtatcatttgcatttgtcctatggagagaagatgagtcccagatttggtggaactcgttaggggtggagtcagctcctgcactagttttcttgaaaggaccaggcacaaagcctgttgtacaccatggaacttttagcaagtcagagttcacagagatgatggaggagcacaagcaccatgaactgcgacagctaagaagtgacacatctttggaactgggctgtgatgctagaggccattcacgtgctggcaatgatgcaacaatttggtattgtgtaattgtcgctggtcgtcctggtgtagaattaagtaaaaagagacaaattttgcgtatggcccaagaccaactgataggtgctgttgacggaagtacttctgggaatgtggatgattcagtggagatatcaagtgctgcaactgcccttaaagatgaaaggttgacctttgtttggttagatggagaagtacagaagcaaatttgtgccttttaccttgccactgattatagtggagcctgtggtcctagaggctttggagatgacaatgagaaacctgaagttttcattgttcgattccaaagaaatgcaacatatgaggcgctgaaagctgaaaaaaggaacaatcttatggaggctcttcagggacagcatacttatgcctcccagctagtggcaaggcacaagggtccagatgaaattcaagagataaacaggtggatctctcagattatcaaagatggtgatactcgagaaattccttattttacttcaaaggtgccagatcttgtgcccgaggaaacaagcaaggaatggctaagaagtaccaaaagtatccgttcagcagggaaaagtctaaaagagaactttggtttccatttccaagattacctaactgacccaaggattggttcaactttgcttatgtgcggatgtgtttctttgggaataatatggctgaggaacaacaaaccagctcagagcactcgacaggaaaaagctccgaaagacaggaccaagaggcctcgtccgaagcttagcacgtccctctttggtcagccttctgaatctatcgcagacgttgagccaaaagatgcacgtcagtgggagatgtcagactctgattcagactaatgacttgaaaactgaaaactctaatgagtaatgacttgataattcagacttgacctacttcaagaatgtgtcgaactttaccaaactctgtacaggtctgcgctagcagtagccctagtttaggctagtgccggcagagtataaccaatacggtgaaaacagttggatcactgaagtactcgtgttgccatcttcctgatcgacacatttttgttgtgacttgtgtctatacacctgcttgtaaactgacgaggctggtattggtcgcacgcgtagtatgttaaccaatgatctcagtacggagtaaaccgtagtattatgttcagtatgacaggaacataccttgtctctggattgtgtaaatgatgcatccccaaacaacgcacatgccgatttgattttcctttttgtgcttggccaaaattagctaatataaagaatttcggcatttgttgcatagaaaacctaaaaaaaaaaaaaaaaaaa

SEQ ID NO: 32093 - DNA, 330 bp, Setaria italica
  Peptide Sequence Number=SeqID_98067
tgatatcaaacatcaaaaacatttcagccactccataattatacatcaaacataaaggcagttgaacccaacaagatttctgtacccacagcttctcactagtctttcctctgataatctgattcgaataaccagcataccatgacaagaatgtttggatcacatagtaatggacatgtttccaaatcccaacattttatactgagtctaacaaaaaataacacacatgatccccagcgcccagtcccacatgttccattgctggacttttctgaactctgtcaacacaggatagaatagttttccagcgcgactgagtaactagaagta

SEQ ID NO: 32094 - DNA, 1829 bp, Setaria italica
  Peptide Sequence Number=SeqID_98068
attacatgcattgtgaatgaattaccaaataacaagaggaaagatctcatcaggcaggtatggaatattatgcgcacgcatcattggaatgatatcaaacatcaaaacatttcagccactccataattatacatcaaacataaaggcagttgaacccaacaagatttctgtacccacagcttctcactagtctttcctctgataatctgattcgaataaccagcataccatgacaagaatgtttggatcacatagtaatggacatgtttccaaatcccaacattttatactgagtctaacaaaaaataacacacatgatccccagcgcccagtcccacatgttcctaacaggagtacaagacatagtaaaccgcagttatcctgctaattacaagcattttataaacagaacaagagaatctcagttccggtaaaagtcttctaccatgcacagaatagattaaacataagaaaaaaaggactacataccagtctagttttttttttttacttttttcttagataacttgcaacttgtcacatagttccagtatattgtacatactgcatagggattgccccgttacatacagtgcctgccttttcatcatcgcaattcgcaaagcacgcttgaagatactcagaaaagactttaaatgtctcgtgtatctcaaagacaaactagggcaaaatttctctactcttgttagtgcttgagttaacgctgcagccacatgtgccgtgcatgtaccctgcagttcacacgaactactcaaatgacacatgataaggtgtaacctgatccctaaggcctacccaaacgtacaaactcgacatgtcttccaccagctcccgtacaaacccacccaaccacaacacatactgaacatcacataaattacaaggcgctatgagctcctccagactttcatgtacagttaaaacttatggtcccacaacagaaaagcctcaaggaagcttgtaattaggaggatgtaatcttcacgttatcattgctggacttttctgaactctgtcaacacaggatagatgttttcgaaggcagtgtacgtctcctctctcaccttagcgccagtcaaaacaatcttgccagaaacaaaaatcaaaagaacgatctttggttgtttcatccgatagatcaggccaggaaacagttccggttcataacttgagaaggcaccgtgcgaatatgcaagtccctcaagcctaattggaaacttgacgtcacaggagccaacgatattctgaatcttgaagtccttaaacttagctggaaagccaagtttctgaataatacgagcatactttcttgctgcaagcttagattgttgttcgctctttgctccagtacagaccattttacccgatgcaaatatcagtgctgtggttttgggttctcttattctcatgatgactgcagcaaaacgctttgggttatactcagcattgcgtgcttgcaaagctattgctttgaggtcaagcttgcaatccaaattaactgttgatacgatattctggagcgtggggacgatgccggaggggtgcttggacagatccaccggctggctgccctcgagccccggctccgccatccgaatcgcgcgcaagggacgccgcggaacccgcgccgatccggggccaaatccggggccgaaatgggcgggaaggagcgcgcagatcgcggcttcgaggcggggtttcgaaattcggggtcttttatagagatcggtggcggggttggaggaggggaaggaagaggggaggggagctagggttatctatctcgcgaggagggagggagagagcgg

SEQ ID NO: 32095 - DNA, 325 bp, Setaria italica
  Peptide Sequence Number=SeqID_98069
ccggccgcggcgctgtcgccggacggcaaggcgctgctgtcgctgctgccgggcgcggcgccgtcgcccgtactgccgtcgtgggaccccaaggcggcgacgccgtgctcgtggcagggcgtcacgtgctcgccgcagagccgggtggtatcgctctcgctgcccaacaccttcctcaacctctcgtcgctgccgccgccgctcgccgctctctcgtcgctgcagctgctcaacctctctacctgcaacatctccgggacaatcccgccgtcgtacgcgtcgctctccgcgctgcgtgtgctggacctctcctcgaacgcgctcg

SEQ ID NO: 32096 - DNA, 277 bp, Setaria italica
  Peptide Sequence Number=SeqID_98070
gacgtcctcggcgacggcgccctgctgcgcccgccggatccgtccgcatctcggaggtcggccttgatgtcggtgagcacgcgtgcggcggcggagtggatcgcggtgcgcgcgcgggacaccagcgactgcggcgccggcgccgacgaggtggacgcggcggcgggggccggtggaggcggctgctgcatggtggggcctacctggcagtgacccggggcagcgcaggaggacgcattcgcaggaaggggagccggagcagtgggggaagggagct

SEQ ID NO: 32097 - DNA, 482 bp, Setaria italica
  Peptide Sequence Number=SeqID_98071
gtcaaatgcctgtgcgtcctgatgggatcatatggaagacactactgtctgcttgtaagatacagaaaaattttgacatggccgagaggatagcagagcgcgtcattgagttggatcctcatgattctgcctcttatgttcttctgtcaaatattcgagctaccagcagcagatgggaggatgtcagtacagtaagagaaaccatgaggaaacaaaatgtgaggaaagaacctggagttagctgggtggagtttaagggtcagattcaccaattctgcaccggagataaatcacattcaaggcaactggagattgatgaatgcttggaagaaatgatggccaaaatcaggcagtgtgggtatgcaccggacatgagcatggtgttgcatgacatggaggatgaggagaaagaagttagtttggctcaccacagcgagaagttggctatagcatttgcttttctgagcttacctgaaggtacg

SEQ ID NO: 32098 - DNA, 333 bp, Setaria italica
  Peptide Sequence Number=SeqID_98072
gaagatctgttgtctgattctatgaagtagtctacagaatcaaagaatgtagattcttcttcacagatcaattcacctccgtcgttcttttcaaactcatcagattccgttgtgctatattcgctaaaatttccatgccgagaactagaaaagtcattccttgtcaacgcctcctgtgctatacttccatctttaccttcctgcacaaatatgtgtgtaatacactatgtaaaattcctcaaaatggtgtctgcaggacccaaacaagcttaagtaatcctcataacgtcgcttcagttgcttccggtagcttgagaactcagaaagtacaat

SEQ ID NO: 32099 - DNA, 467 bp, Setaria italica
  Peptide Sequence Number=SeqID_98073
ctcctgtgctatacttccatctttaataggtagtactagacaactgacccaaaacaaagacttaagtaatcctcataacgtcgcttcagttgcttccggtagcttgagaactcagaaagtacaatctgttcacattcctgtataagattctcgttcagatcctcctgatgcattcgatctcgaagccttgcagtagaaatcgaaacatcgcactgcacgaaagttactctcccactgagtgacctgagagagtaaacacttcttgccaggatcaatgcctcaatccaggcaacacggtcatctttcgaatccgtcttcaagtgaagcgtctttgtgggggaaaatatgtagaatctcctatcgtcagacttactctctcgaaatgctgacaccttgaggcttacgacgccggcggcttctcggtgcggcgcgagccgccgatcctggagccgatcaggcttaggttc

SEQ ID NO: 32100 - DNA, 836 bp, Setaria italica
  Peptide Sequence Number=SeqID_98074
ttttgattgataacacttccatttgctgctacatttttatcacttctgccatcttttttcagttgggttttctgctgctacctgagaaggctgtgcaccattagtcatacaagtatttggtacaacaatagttcttgaaaccttgccatattttggagggaggggcttgcccttactatgtaacacacatgttggacaataccactcaggtttttgcagaccttgattcccataatactgaagacattttacgtgcgcacccctctcacaggcatcacaaacaagcaaatttccgtattgatgataggaactttacatatctgacagtccagtcttttattcatatactcagttgaaggcacactccagctggggtgattagcaggttggcgcagaatccgtgccaacgttttttcgctattgccttgtgattggagaagattgtttgtttttgaacagagagctcctcctttggagcttgatatcccataacaacacttcctgtcccagggcaaatagcaggctccttttcatccacagatttctctgcttgactggaactctgtaaggaacttcgattggaactattagcagtgtgatgacctgatttatttgactgttcaatagtttctgcacctccgttttgtgtgaaatttgaaccattaacaacaatttccatttcgacatctgcagagccaataggtggcagtgaaacagctgaagggatgtcaggtgattttatagaagatgctcctgctactgttgcatttagcatgggctgctttgagataactggggatgtcattggggttgacagattcctgggtactccagtg

SEQ ID NO: 32101 - DNA, 491 bp, Setaria italica
  misc_feature (475)..(475): n is a, c, g, or t
  Peptide Sequence Number=SeqID_98075
ggagtggagtggacaactgtgcattggtcatggtcatggcctgagagcacaaggaccggtttcaataagcttagtaaaaggtcagaagtctctttagttagataattctggtagctgcaacaaaaaggttgtcttatgtcactcattattgcttggccaatattggaacaagttctgaaagtcaatagtagtttttgaactggtatgaccagaagtaattttacagaaaatgcattgagaaaaaccagaatgtgaaaataataggctgtttgcttcccagccttgacttgccacgccaagatgcggcgcgccacaacatgcgtggctgttgattggttggagcaaaagattcagcagccacagataaaacaaagcactcccgccgcagagtggcgcctaattttcggcgcctaagctgtgacaccgccacactgctgcgtggcaagttgtggctggctaccaacagcctctaagngacctcagtatcaatt

SEQ ID NO: 32102 - DNA, 1691 bp, Setaria italica
  Peptide Sequence Number=SeqID_98076
atgtgcattgctctatagatatcaatcaatctccgaattactggaaggactaggctctgacatacttcaatggtcaatccagtccttgaacagaagcatcatgtacagggggacattcagggcggcaatgacaactatcgactgaatgacacggaacagccgttggagcaccttccttacttttgatttgctagggcgggccaatttcgctccatcttctgatgtcatctcggaacccatctcgacaagaatagacgaatcgggctccagttggtgttttcccgctgctgcccttgcaaccacacttccacgtcctacagttctggagtctgagctagcacttggggcctttgccacagcctttttaacgaggtgcatggacccttccgcatcaaaaaccatttcatattcaccatcttcctcgtcatctttttctttggttcttgaaaacagttcagcacccaccgacctcatgaagcttacgaatgtgttcatgcaaggaacagaactgagaccattggttggccagaagactaaaagaaggatggtcactgcaaactggcagatataccagatataaatatgggtttgtttaggcagaaaacaaaggttcgtcatgacttcaggcttcagatcagttgaattctgtgacatcttgggcccagcagatagcagcataaaagatggatagagatttccttgctgccaacttattgtccccagtgtatgctctgttactggcccaaaaggagtggagtggacaactgtgcattggtcatggtcatggcctgagagcacaaggaccggtttcaataagcttagtaaaaggtcagaagtctctttagttagataattctggtaggtgattccttggtctaaggcagcatatgattccctctgatttatgacaggtgaagaacgatgtgggccacaaggagtgttatcaggtcggtagagtggaatatgtgttagtagaacctttgggtttgatgcattacctggagatagagttttaatgaactcccaagaggaggacctttctttgctctttttagatccatcaagtgtttgagcatcaatgacaacaaagtccaccttcccagcagaaaattggtagtttcttgatccaaattctttttcataccgactgagaacctcaggatgaacagagaaaaatgctgagtaaccaatatcatgatttcctgaaaggtagtagattgggacatgtggctttgacctctgttcattcaggctgaatatatgcttaaatcgaaataatgattcctgccactcttcatcggacatgtatgggcctccatcaaagtgatcaccaagaaataagaccacatcaggtttgaatggcagtatagcagattgaaaggaccttctcatgttcaaatctgtgtaaaactcagcagcttggagagcaattgagcttgatggaagaccaagggacgtgctgtccataagctgtggatcagcaacaacagcaaccttcacatggttattcggcggcgaggaggacggcgacggcgagggccacgagcacgcgaggtaggaggcccagtaggcgcccatctcaccgtagagcaccgtggccgcccacgccgcgcacagcagcagcgtcagccgcgtggcgctctgcatctccgcctcacccgactctcaccgctccgctggcggggcaggtg

SEQ ID NO: 32103 - DNA, 1270 bp, Setaria italica
  Peptide Sequence Number=SeqID_98077
tttcttagtatttgttcttcttgtctaaaaaattggggtaggttgaacttatgcaatagatatgttgtacagtatgactgcgaaaggttgcacacctgacctttcatcttataacactgtcatgtatggccttgttaatgaggacagatttgaagaggcgttcggaatgttttgtcaaatgaagaaggttcttgctccagattatgcaacattgtgtactctcctcccaagttttgtgaaaaatggattgatgaaggaagctctgcatacttttaaggaatacatttttaaggctgattctaatatggataagtcttcattccattcacttatggaagggatactgaagaaggctggtgtggaaaagtcaatcgagtttgctgaaaatatagcatcaaggggaattctcctgaatgatttctttttatgcccattgattaggcatctctgtaagaacaagaaagctcttgaagcacatgaactctcccaaaagtttaagagtcttggagtttcactaaaaactagctcatacaattctcttattcgtggccttgtggatgaaaacctgattgatgtcgctgaaggcttgtttgctgaaatgaaaagactaggatgtggcccagatgagttcacttacaatttgattcttgatgccatgggaaagtcggcacggattgaggagatgttaaaagtccaagaggagatgcatcgtaagggatttgaatcaacttatgttacttataatacaatcatttcaggtcttgtaaaatcaaagaggttggaccaggctatagacttatactacaatctggtgagcgaaggcttctccccaacaccatgtacatatggtcctcttcttgatgggttgttaaaagctgggaagatagaagaggcagaaaatcttttcaatgagatgctagagtatggttgcaaacctaattgcaccatctacaatattctactgaatggacatcgaatagctggtaacacagaaaatgtttgtcagctctttgataagatggagtagttaaagttaaacccagatataaaatcctatacagttcttattgacgccctctgtacagcaggaagattaaatgatggtttgtcttattttagacaattagtggaattaggacttgagcctgatcttatcacctataatttgctaattgatggccttggcaaatctggaagaatagaggaagcaatttctctcttcaattgtagtattgtaagtactaaaaggtaattgctgcgaactttgtta

SEQ ID NO: 32104 - DNA, 410 bp, Setaria italica
  misc_feature (408)..(408): n is a, c, g, or t
  Peptide Sequence Number=SeqID_98078
gtacaaactgggtgcgtgtaatggaatatcttgatcatgatggcttcaatatacctgatgaagcagccttttatctattgatgtctatatatgcgcgtgcctgcaaggatccctttccgcttcatgctgtttgtgggtcattgtggaagaatgcagcaggccagatatcttttttaaagcatgcggtttctgctccaactgatacatttacatttgcacattcttccaggcaactggcatttccagacttggcaggtcctagtcaaggtaatcatgcatggttctgccttgaccttctagaggttttatgccaacttgctgaagttggatatactgtgtctgtacgatcaatgcttgagtatccacttgagcattgcccagacctcctacttgttggtgttagcaacntc

SEQ ID NO: 32105 - DNA, 1981 bp, Setaria italica
  Peptide Sequence Number=SeqID_98079
tacttacccgtacttacccttaaaacctaataaatacccttccgccgccgctttctccctccgcacgcgcgccgccagctccggcgtccggcgatcctcccgccgcctcctccctccgcacgcgcgccaccagttaaggcagttcggagagccgcttcgccgccccgaccaccgtcagaaggttcgcgggaaccctacggcaggctttcgccccgcggcccgctgattgctttagggatggcgacttccgcgctgctccgggctctgcggcggccctcgtccgaagccgcgctgcgattggcaacaagcgcaaatgtgcaagcaattactggatatagacatttgaataacaggaatttaagtgttttcaatgagttctcgaagcaactaaagggggaggccaagagtaatcctgagttccaaaaatccatgaaggagttcggtgagaaaattggtgtggtaaaggaagacctcaaagtaagaactaagaaaacgactgagacaatatacaaaagtgttgatgatgtttggagtgaagctgaggagacatctaaaaaggttactgcaaatataaaagagaaagtgtttgctgctaaagaagaggtaaaggaaaattttggacttggaaaagaagagagtacaagttgcaaggatggttctcctggagcttcaaaacaggagaaaactgagtcatcctcgcattcagatggcacgtctgaagatgccacaagcagctatacattgtttactaaattgaagtcaacaatctcatctgcttcaccagttgtatctggtgcatttgcaaagttgaaggatacaagagcctcaactttagctaagcagggatatgaaatcatcaaggaagagttaagctctacctctagcagaaagaagaaacatcaagctagacatgcttctgctaaagtagaaaagagtacaagaaccgatttagttattacgccaacaaagaagtcggtgctgggtgaaaaatgggaagcatttaaggataagatccgaggtcatccagtctataagagagtggatgaatataccaagcctgttgtaaccaagggacaagaggtagctgaggatgtccgagaaagatgggagacaagtgacaatccagtagttcagaaaattcaagatttgaacgaatctttgcttgaagaaaccacagctgcggtgacattcagggaaattcggcaacgagacccgtccttttctctaactgattttgttgctgatgttcaagaaacgatcaagcctgttctcactgcatattcaaagggtgatgtggagactttaaaaaaataattgcaccaaggaagtgatcgagcgctgcaaaggagagagacaagcgtatgcatcacagggcatatttttcgatcacaagatcctgcacatttcagaagctgatgtattggaaacaaaaatgtttggatcttcacccatgattatcttgcgcttccagacgcagcagatatactgtgtccgagatagagaaggagaggtcaccgaaggaggacaggataccattcaaaccgtcttttattcgtgggctatgcaacttctggacagcgacgaggtgccagaagaagaatcatattacccagtttggcggctgcgtgagatgcaacaagctggcgtcaaagccctcatatagagcagatcttctttttgttcttgctcatccatttatcagctatcgctctaccttcaccactgctcaatgagcaatgtgcgagaacgttgccccctcggcgcaaagcaattttccacagattgtttcttttgatgtgtcctgatgatagcagtttgttcttattctttcctctaacgcgtgtgttgctcgttttaacgtctgctgagaaacggttgtcggcagcgcagtggtgacattttgttccagatcggaaatgaaacacccccgagttgtaacagacgcaacagaccagggcaatacattcgttgactcgccctt

SEQ ID NO: 32106 - DNA, 277 bp, Setaria italica
  Peptide Sequence Number=SeqID_98080
ttgaggtaatccatgatgcggttcttgatgtcgtgctcggcggtgcccttctcggcggagccgtagagcgcatggttgctgaggttggcggtgatctccgagagcgtgaacgccgccgacgggtcggcagggttgcagctctggaggtaggagaagagaccgaagccgcagtagtcaaggcataccttgtccaggtgcgggtactcgtcggcgcggaggcggtccacgtccgcggcggacgcgtacttgggatacatggcgaggaacgtggcgagcg

SEQ ID NO: 32107 - DNA, 1532 bp, Setaria italica
  misc_feature (1495)..(1532): n is a, c, g, or t
  Peptide Sequence Number=SeqID_98081
tccggcgagctataaaataccctcccgccgacgcaatccccactggcatcaccgcacggttactcatgctcctcctcctccgcgaaacgcaaccgcccttggcagccccctccgcgccgccgctgtacccgacactcaccatggccgacctcgcgcccgtcgagatagggcccgtctcgtcgccgaccgcgggcgaggacaccgggcccccgccgtccgaggacgtcctcctccggatccccggcgcgcagctccacctcatcgaccgcagccggagccacccgctcgccgccggcgacctctccctcctccgcatccgctccggcgacaccaacctcgccgccatcgcgctcctggacccggtacagtggccgctcgcgcgggacgtcgccgcggtcaagctcgacccctgccactactcattctccctcaccgtgccggtctccgccgacgaccccaaccctgacccgctccactacggcctcacgctctcccaccccgacgcgcgcctcgacggcctcctcgccacgtacaccagcttctccgtccactccgtggttgggaccaaggagttggagagcagggtgcgcgacgaggtcgaggccgcggcgtactggacggcggtggcgccaaatgtggaggagtacggcgggaaggtggcgagggccatcgccacgggcgccgagcacctggccaaggggatactctggtgcggggaggtgacggtggacaggctccgttggggaaatgaggtcctcaggaagaggatgcagcctggcgacgccaacgccgaggtcagccccgagatgctcaggcggatcaaaagggccaagaaggtgacccaaatgtctgagaaagtggcaactggaattttatccggagttgtgaaggtcactggctatttcacaagctcatttgccaactcgaaagctggcaagaagtttttcaacctattgcctggagaaattgttcttgcttcacttgatggatttgggaagatctgtgacgccgtagaagtgtctgggaagaatgttctgtccacatcatcaactgtgacgaccgggctcgtatctcacaagtacggtgacaaagctgccgctgcaaccaacgaagggctggacgccgccggccacgccatcgggacggcgtgggccgtgttcaagatccggcaggccttgaatccgaagagcgttctgaaacccacggcgctggccaagtcgaccatcaaggccaatgttgctgaagttcgtgccaagcgcagcaagtagttcacctttgtagctgtactgatcatgagaagcatgttcaccgagaggcgaaagatgtttcaggcccaaagcaagctttttatgaatgcttccgttttgccacgactgtcggacgcactgctgctgtcagtagcagcagcgtttgcttgtaaatttgtatgctgaaaacaagagcttgctgccttacaagtgataggtagtaagaacatggaaacaataaggaaacnnnnnnnnnnnnnnnnnnnnnnnnnnnnnnnnnnnnnn

SEQ ID NO: 32108 - DNA, 588 bp, Setaria italica
  Peptide Sequence Number=SeqID_98082
caaattcgccgacgccgcataggtctctccaccggtcgccgacgagcagcgctagggaggagtcaaggagaagatgggtggcgggatggaggtgcacaagaaccggtggatcgaggagtggaacgccggccgcgagaacctcgagttcaacttccgctggacgcgccgcagcctcgccgtcgtcggcctcttcggtctcgccgtccccatcctcgtctacaagggcatcgttcgcgaattccacatgcaagatgaggatgcgggaagaccgttgaggaagttcttgtaacctgaagaatcatgctcattttgtttcaagaaataaatgttttggccagatcttggcaatttcaacatgagaaacataattatactcagttttctgtaagcacttttttaagttgttgtgctttgttccaagtgtttctttcaagaacctatgtaccatctttatgtcaaactatgcctatgggcatccattattcttttcctcccaaaaggagagtatgtaattttgtggttgtgcttgtgggttctggttcttcagtaagctcttccaaccgtccttaaggtcaaaaaaccaaaaaa

SEQ ID NO: 32109 - DNA, 640 bp, Setaria italica
  Peptide Sequence Number=SeqID_98083
taccggaagaaagacgaaggaccaagtacttcccccaaatcctccaaaccaaatcactctctcgccgtctcgctagcaaccagcacccatttcgcatcgcggcggatcgaaggaagagaggaggagaagatgggtggcggcatggaggtgcacaagaaccggtggatcgaggagtggaacgccggccgggagaacctcgagttcaacttccgctggacccgccgcagcctcgccgtcgtcgggctgttcggcctcgccgtccccatcctcgtctacaagggcatcgtccgcgaattccatatgcaggacgaggacgctggccggccgtaccggaagttcctctgagcggcgcgcctgctccctcggccgggctgcgaggagtcttcgctcggtttgtgcccgtactgctttagtctgaatctgatggagcattctggaatgctgaaccgttgtgtgggatcccaatgaataaggtgtaatgacttgtcttttcaactgctgaaacttgatatgtttgaattgatttgataatgttctgctgtcaatagcagtgggtaccagtgttattcatgacttcggtggaagggatatactcagggtattatatactcgaaaatgaactgaatgagtgattttagtc

SEQ ID NO: 32110 - DNA, 272 bp, Setaria italica
  Peptide Sequence Number=SeqID_98084
cggcggctaggcggcgggaggtgaaggcgagggaggtggtggggcgcgagaggaggaggcgcttgccggcggcggtggcggcggtggcggagagcgtggcgagggcggaggtggccatggaggcggacgggcgatgcggtcgaggaattggcctggaggtttctgttttgacttttgggtgggggggtgagccctaggaggtgggggatttgggctggttgttgggagtgtgatggctgagaccggcggggcttggccgatgtgcggggagg

SEQ ID NO: 32111 - DNA, 242 bp, Setaria italica
  Peptide Sequence Number=SeqID_98085
cgggggcgccgccctcggcgtcgtccgtgtccgccgcggcgtcgcaggtggggcgggtcctggtctcgctctccgagctgctgcgccacccgcaggcgcaggacccgctgcgccgcctggcgcggtcgcggctagcggagcggctcctcgacgacttcctccgcctcgccgacgcgcacggcagctttcgccaggcgctcgtcgcgctcgcgtcgctccaggccgagacgcgcgccgcgctg

SEQ ID NO: 32112 - DNA, 678 bp, Setaria italica
  Peptide Sequence Number=SeqID_98086
aaagaaaatagttagaacttgtattgacaccaagcatcgatcaacagtttgatgtggtgacgtatgacagccagccaaggggctcgtccccgatttatgcagcagtgcgggatgaagtttcaaaaacgaatgcgtttctggcactcagattctattcacagatgccatgcagtcgataacattcacggtgtcgggagctcatgctggtttggccacggcctggaccatctcatcatgtcgaggacgcgcgtctccagcttgcgagaggctctccctctctactcggcgttttcctcaaggtggataagcttcccgctgattttcctttcatggagcggcttctcatccgacagaaccttcatcagcctctcctcaaacggtgtggcatgccaactgactttctggtcctctttgtactttgttgtggtgtttgggatgccgttgccgtcccacgccttgggcaacacaggggtaggattatcaatgtcccagttgaaagctgatgctggaaagataggcacatcaaagacactcttctcgtagcatggctccttctcaacgttgtcttcggtgttggtgtcaccgtggctctcatcatctgcagatgatggcttcagccaataagcgaggcttgaaacgccatgctttccatcttctgaaccttgttccggtagttct

SEQ ID NO: 32113 - DNA, 2055 bp, Setaria italica
  Peptide Sequence Number=SeqID_98087
taagtgtaaattgaacgaaccgcgcgattgtgagtcaggagggaacgaggaacaaccgaacagccatcgtctcggcctcggcgcctccgcggcgactgccttgagatctcgtgagcgatccgactcccccggcggcggctcgtgaagccctcggagcttcgattcagatccgggcgggcgccccatggtgtggctctggtgccattgaaccgcgggatctagggttttcgcgcgccgcgggagtgggagcgatggggcgccggaagatgtcagcggcggcgccgccgtctcggagctggtccaacgtgggcgggagcgtcatccccgaacttcgagcgaaacacaaaatggagttggaaaatttgacgctgactaaacagccaatcagaacattacattttttcatgttggccttgttaaaatacttgaaaagattagccacatatatcctgagtaagggtagtttgtttgttcttctaattattctggtggtggctcctggaatcttactcgttgtttcagacggcctgcacaagaagcatgtgcaggagttcattaattatgctaaatttgcattgtggtgggtttcattaggtgtggcttcgtcaattggactaggttctggtttgcatacatttgtgctgtatctgggccctcatattgctctgttcactattaaagctgttcaatgtggccgtattgatttgaaaatggctccatatgataccatacagctaaaagtcgggccatcatggcttgacaagaaatgttcagaatttggaccaccagtttacccagcatcaactcattcagttaggatcccagtcttcgacttgctacctcagatacagctggaagcagttctttggggcattgggactgcacttggcgagcttcctccatattttatatcgcgtgctgctcgcttgtcaggaagtgagtcaaaagcagtcaaggagcttgatgctgctacttccaaagaagatggccgagtagcatccactcttaatcgaaccaagctttggcttctttctcacgctcaacatctgaacttcttctctatcttgttacttgcttcggttccgaacccactctttgaccttgctggtattatgtgtgggcaatttggtgtgcccttctgggagttcttctttgcaactttgattgggaaggccatcatcaagactcatattcagacgctatttattgtgtccttgtgcaacaatcaactcttgtatctcatggagaaggaattaatctggatatttggtcacattcctgggttttctgccaccctgccatctgtgattgccagactccatgctgcaaaggacaagtatttatcgccaccagcaacagcctcatcgtcctcacaaatggaggacaaacagtggaatttctcttttacatttgtctggaactctatagtgtggcttgtgcttctgaacttcttcatcaagataatcacgtcaacagcacaggattatctcaaaaaacagcaggatatggagatggaacttgtttctgattccccggtctcagaccattctaaagctaactagtggtgtaactggtggtgtttattcagctgctagctgcgaagattctcctctgtagcctcgactcctggctaagcccttgcagatgatacccaagttcactcaattggtaattattcatctgtacagtgaacaaaaacctggcacctggggttggttaacttgccaggtgacggctgcgaccttttgtcattgagcctgtgctggcttttcctggaggggagttgtcctgttatttttcggacatcaacacggataagtagtaggaattgtttatgaagcacgattgctttgcctagatgtatcactggtacctgtttctatttaatttggaaatgcaatagaaacttgggaggattcaacaacgatattttccattatgcttactgtgtacaatgtggatttacaatcggtgctagcaaagagctagcatgattcttcggcaatttcctttgcaaataaatctatgtgctcataacagtaagaaaaaaaaaaa

SEQ ID NO: 32114 - DNA, 767 bp, Setaria italica
  Peptide Sequence Number=SeqID_98088
ctgaaggcaattcttcacgttctccttccctattgcgccattcaagtagtttgtctaatccgggttctgccttgtattctttgtatgcctcacaagatatgaaaggatggcactcaatatggcacttggtacagatctctacatagcaagccccacagacaaaaggtttgccttctgcatctgcagcagctacttggtaaatggacatgcaatcaggtgtggggcagaaacggtacaatcctgcactggatgcaacaaatgcatttaaggaagctctgaaaagctcgtcaagtctgtcaggcaggagagacttcagatctgcaaggaggaggagcttcttgcacccatttttaaggcaacaaagagggaagccatcttgtgatttcatggcagattcacactgatccaccaaacaagccttacaaaacatgtggccacaggattcaagcttaaaaggatcttcgagctcacaaaagcaaataggacatgcattctctgacaacaattgacccagagaattgtggtcgctagaggtcatcagttcagatatcatctcttccaccctttgcttctcttccttgctgcctcgaacatatagcacatggcgtcgtgtgtttagatgaagctctgcagcaggcgcctctttcttaaatccttctagatccgctccaaacctttttattacttccttcatcaagtttggtgggaggttccggccacgaagacgaacttcatgaggcttcttctcatggagatgtagaagtgca

SEQ ID NO: 32115 - DNA, 538 bp, Setaria italica
  Peptide Sequence Number=SeqID_98089
agacttccagcgaagcaggagaaaaaatacgtctcgtctcttctcttcttcccgcagtccggattcacgatcaggttccagagaaaccccgtctgatccgcgagatggcggagcagcccaacccccagccccaagtggtggagaaggaggtggtggtggagcggcagcaggaggcgaggagggccccgaagctgaggtacctggatttcgtccatgtggcggcggcgcaggccgcggtgtgcctcgcggggctctacgggctcgccaaggaccacgccggcccgctccgccccggcgtcgacgccgtcgagtccacggtcaagggcgtcgtcggccccgtctacgaccgcttccacggcgtgcccctcgacgtcctcgccttcgtcgaccgcaaggtggatgacacggtgcacgaggtggagaagcacctccccggcgcgttgaaggccgcgtcagcgcaggcctacgcggtggcccgcggcatcccggaggtggcgcgcgagctggccgccgaggcgcagcgatccggcgtgaaggg

SEQ ID NO: 32116 - DNA, 929 bp, Setaria italica
  misc_feature (917)..(929): n is a, c, g, or t
  Peptide Sequence Number=SeqID_98090
taaggaaagaaccggtaaggaaccaaagggaacctagtaacgtagcgactacgccgtcgagtccacggtcaagggcgtcgttggccccgtctacgaccgcttccacggcgtgcccctcgacgtcctcgccttcgtcgaccgcaaggtggatgacacggtgcacgaggtggagaagcactccccggcgcgttgaaggccgcgtcagcgcaggcctacgcggtggcccgcggcatcccggaggtggcgcgcgagctggccgccgaggcgcagcgatccggcgtgaagggcgcggcccgcgcggcgctcgccaaggtggagcccgtggccaaggacgtgtacgggcgcgtggagccggtggccagggacctgtacgtgcgctacgagccggcggcggagcacctcgccgtctccacctggcgcacgctcaacggcctcccggtgttcccgcaggtcgctcagatcgcggtgcccaccgcggcgtactgggccgagaagtacaacaaggtgatcgccgccgcggccgagcagggctacaccggggccaagtacctcccggccatccccaccgagcgcatcgccaaggtgttcgcgtcgtcgccggaggccgaggcccagtagtgtgtttatgccgttagcgcattaccatcaccctgatgatgggttaagctctggattgccctcgaactgaaacttgaataagaaagtgagaacccgggggcttaagtttggtggtaatgttgtactagatatggtggtgggacgttgtcacggaccatgatgatgtagtccactagcgctctgctttgtgtggtgctctgctttctctgcctttgtataaaagtcggtcgatgtcgcaatctttggaaaaaacgaaaaaattaaaggatcctaaagaagaactagaccaaggacacaannnnnnnnnnnnn

SEQ ID NO: 32117 - DNA, 268 bp, Setaria italica
  Peptide Sequence Number=SeqID_98091
caattttccagggatggaacaagataatgcagaggcgaagcaagttggagagcagagccagagctcccaaaagggtaaaaacgctgaaccagaaagcccaaagcttagtgacacaaaaaagcttatcgagttcatggaaagtcactatgatgaattcgtcgcccgtgtacaaacctttgatgaattctaccacgccatttttgaactcatcgaaatgttttgcgaggaacgcgggcagctgcagtacaggataccggagaaaaggatt

SEQ ID NO: 32118 - DNA, 281 bp, Setaria italica
  misc_feature (279)..(279): n is a, c, g, or t
  Peptide Sequence Number=SeqID_98092
gcaaaccccagtatcccactgccccatagcccacagctcttccccagttccctttccatccatcgcccttgcgtcgccggaagaacgccggaaaatcgccccgcggccgccgtgccagaggcgtcaatcggcgcggcggcatttgttgctagctagtaggcggggaggggggcaggatgagcatgtacgggagggacccgtggggcgggccgctggagatatgccccgactcggccacggacgacgaccgcagccggaacctggacatcgaccggggcncg

SEQ ID NO: 32119 - DNA, 504 bp, Setaria italica
  Peptide Sequence Number=SeqID_98093
gacacgcatggcctcattcctcattgtccactcttcaattacactcttaagggaagcattgctcatcactgtcttactttgcattggcattttttgtgacagggcaatagacaggttcagaactgactgaaaacctctcaatatactcttctattgctctcctgtcacatgtcacaccactctcaatggtcacaggatcagtcattatctcatttgtcaggggacagaagaatgcatcataaagtggctcaatgtattctgcaacctccggcagggtgttgaacatctggccaccatattcatgtgattcatggtacattccctgcagaaagtccaccagcttcggagtatcattatcacagagagacctcctcctgggcctgttgcccattacattcatggatatatcagcctcagagtaacccctcattgattgtgatttgataagcacattcatgtaagcattactgccaaatgctgatgccggtatcctgccaagatcga

SEQ ID NO: 32120 - DNA, 317 bp, Setaria italica
  Peptide Sequence Number=SeqID_98094
gccgtcgacgccggcggcggcggccgcattggcggcgaaggaggccttgaggcgctcgaccgtggcctcccgcggcggcggcgcgagcgggggcacgatcttgcagatgccgtagcgggaggcctcggcctcgatcttgaggatgtaggcgatggggtccacgaactcggcggcggtggggtggtactccggcgccacgggcaggttgcgcaaccactccggcgtctccaccgccggcggcgacatggcggcggcggcggggagcacgaagaggtcaggggggccttcctcaggcgaggactcgcatttgggagggg

SEQ ID NO: 32121 - DNA, 396 bp, Setaria italica
  Peptide Sequence Number=SeqID_98095
ggtattctcgtttgtacagatcaagaactgtaccaaaaatttactctgaaaaacttggagaaggaggctttggctgcgtttttaaagggatgctgccaggttgcactgctgtggctgtgaagaagctaaaaggccttagacaggaagacaagcaatttcgagcagaggtgcagaccataggtatgattcagcacatcaatattgtccgtctgcttgggttttgcgctgaagacagtagaaggttcctggtgtatgaatatatggcaaatggttctttgagtaaccacctgttttccaagagatcctctaagttaagctgggagctgcggtactcgattgctcttggaattgcaggaggcctggcttatctgcacgagggatgcagggactgtattg

SEQ ID NO: 32122 - DNA, 293 bp, Setaria italica
  Peptide Sequence Number=SeqID_98096
tcggtcgtattcgacgtcggcttcttcgagaggaacggcctggtcccgttcaagctcctcaacaactcgctggacgtgcagctgggctggttcgaggagctcaggtcgtcgctctgcaacaacgccacggaagctgcacaaggatcggggggctgtttcggcaaatcacttttcatcgtcggggagtttggagtcaacgactactccttcatcttctcggcgaacaagaccgaggccgaggtgcggtcgtacgtgccgaaagttgtcaggaccatcgcctcggccgtggagag

SEQ ID NO: 32123 - DNA, 869 bp, Setaria italica
  misc_feature (1)..(41): n is a, c, g, or t
  Peptide Sequence Number=SeqID_98097
nnnnnnnnnnnnnnnnnnnnnnnnnnnnnnnnnnnnnnnnnatttctcaaatcaaggtaaagccaacagtggattatgcagtgtgcatatactgcagtccatagaacactgttttccacttccaacacatggaagtgtttagatgacaactaagttgcaccctatcaacctatgttaattgttatgtgccccttggcttggcgaaaactggcagggggctttacaaattccattattgcttcaaaaagggtgctagtattgtcaattagaggtacacatccgaatttagccggcttttgataagtgggacaccatcttccctccatacaatgcggtcctcgcacaaagcagcaactgcttcaacatagacttgatgctcctcatgaaggactcttgcagccaataactctggtgtgtcatctgcaaacacaggcacaactctttgtgctaatgttttccctgtatcatagtgctcatcaacaaaatgtacggtcggacctgagtatcttgccccagaggcaataacggctttgtgcacctttgaaccataaaagcctttgcctccaaatgccggaaggagagaaggatggatatttaatatggaccttggatattcctggatcaattcagctggtataagcttcaagtaaccagcaagaagaacaaagtctacaccgtatcccctcagcgtatccagcagttcagcgaccgaaatcccctcgggcgcagacttggacttggggaacacaacgacaggaatgccattgctcctggcgtgctctgcacctccgcagcctggcttgtcggtgacaagcgcgacgacatccccgtgcaccgtcccgcccagcgcagcctcgttgatcgcccgg

SEQ ID NO: 32124 - DNA, 258 bp, Setaria italica
  Peptide Sequence Number=SeqID_98098
tatccatacaatgaatataaggttgttgcataataaggtgaaaggactttggtgtgttgacaaagctggacctgatggacaaaggaacaaatgctcttgatgttctcgagggaagggcctatcggctgcagaatccttgggttggaattgtcaatcgctcgcaagcagatatcaatagaaaggttgacatgattgctgcaaagggaaaagaaagggaatattttgaaagcagtcctgattatgcacattagcaagccg

SEQ ID NO: 32125 - DNA, 387 bp, Setaria italica
  Peptide Sequence Number=SeqID_98099
cgcacaacggcacggcccagcgcgacgccgaccccaactccacggtgcgcggctacgaggccatcgaggccgtcaaggccaaggtcgatgaggcctgcccgctcgtcgtctcctgcgccgacatcatggcgatggcggcgcgagacgcggtcaactacacccagggccctgcgtacgcggtggagaccgggcggcgcgacggcaacgtctcccgcaaggaggacgccctgcgcttcctgcctcccgccgacggcaacgtcaccgtcctcacccagtactttgccgcccagaacctcagctacaaggacatggtcgtcctctccgccgcccactccatcggtgtcgcgcactgcccctccttctccaaccgcctctacaactacaccg

SEQ ID NO: 32126 - DNA, 402 bp, Setaria italica
  Peptide Sequence Number=SeqID_98100
caggagaaggcggcggggtccggcggctggacgccccggtggcggcgccccgggctgggccgcacgagcgggctgaggcagacggcgaagcccgacggcaagctgttggtctggcggcgccggcacggggtcttccgcatcggggacggggaaggccgccacggcggatccgcgttgggcgagctgctctcatcgccgctcccgtggctgtctcgctccggcgagagcccccggttgctgaccacgcggcaggagcgcctgggcggggccgacggcggcgaggaggaggcggcggccggcgcctgcttcttgcggcggcgcggtatgatcccggcgaaccaagaatatttcttgcgctccttggcgacgcccccctgatgcttgtcctcctccgacctgtgg

SEQ ID NO: 32127 - DNA, 992 bp, Setaria italica
  Peptide Sequence Number=SeqID_98101
ccagccgctctgcatggggcgacgctcctgcaagatcgccggaaggaaggatgcccagaatttgaaaaagatgaagcgcaacagcaaaattggaaaagaaattgtttctgccatcaagaagggtggcccaagcccttcatccaacacagctttagcagcaatattggagaaagctagggaacttgatatccccaaagaaattttggagcgtaacatcaaaagggcatcagaaaaggaccaagatacttacacagaaaaggtttatgaggtctatggttttggtggagtaggtatgatcgtggaggtccttactgacaaaattacaagatcggttgctgacattagaaatgtggtaaaagactgtggagcaaaaattggctgatcctgggtctgttacctttagattcagacaagctcgagtggtgaatataaaagttactgatgcttgtaaggaccaactgctctccattgcgttagatgctggtgctgacgatgtccttgaaccaaattttgatgatgatgatgactctgaagaagaaatagaaaggttctacaagatagttactacatcagacaactatccagttgtgctatcgaagctacaggaggaaggactaaagtttgaaactgataatggctacgaacttcttcctctgaacccaatcgaggtggatgacgaggccatggaactaaataaggagcttgtatcaaaattgctagagcttgatgatgtcgattcagtctatacagaccagaagtgagtgaattcatgagctacagatttcaattcaagacacttgatgaccatatgcgtaatccaattcaagagcgtcttcacttctcatcattgagaattactagttttacagttccaaaaattggagcagatgatacagcattgtttcgatacctcggcatgctagcattatctcaaacactttatctttgtgccttggtattttttgtcccatcccttctttttctgaaaattt

SEQ ID NO: 32128 - DNA, 984 bp, Setaria italica
  Peptide Sequence Number=SeqID_98102
cttttgaagggttgtgtgaagacacacatgaaggttcatggagcagaagtgccacagacacagagttatctggtgcttgtcgcaaacttcatttcaacgcgtcttctgttcctgacctaaacgttggggtgcctgtggccatggactacaccactgcgaagcattatcattcaaagaagggacttgtaagatcaaatgacagtggtgactctgaaacgtgtgcagttggccggagtgcagaaccacctgctgttgaatctcggccagtaggcaaggtgaatagcgcacacattgatagatgtgagcagaatggtgcttctgctatttgccataaaaaacagctttctggaacgacaaggcagttggatggggattatgagcattgtgtgaaggtaattaggcagctggagtgtgatggacacattgagaatggtttcaggatgaagttcttgacttggtatagtctaagatcgacagaccaggagcgtagggctgtgaccacattcatcaagacactaagtgaagaaccaagcagcctggctgagcagctcatcgattctttcggggaaatcataaactgcaagaaggcgagaaccggttactgcaacaagctatggcattaggataaaaggatgagagttcaagatattgctaactcgctgattatccgattttttccccagatcagtgcagtaaaatctagtttactccaccaatttgacagcaacaaaaaggagcgttggcaaaactagaaaattattttaggcagcaaatagcttgcactagaataattctttttccatcaggaagtagtggaaacttatttttcattgggttactgggtgggtcctggaattgttgtagaatgttctcttgttgtctgttgtggctccatggataaatttttggagatggttcgttgactagtctggccattatcgtaaatggaattcaattggtggtaaaaaaaaaaaaaaaacaaac

SEQ ID NO: 32129 - DNA, 365 bp, Setaria italica
  misc_feature (321)..(365): n is a, c, g, or t
  Peptide Sequence Number=SeqID_98103
cgcggcaacgccaacggcggccgggagggcggcaactacggctgcaatagcacccccggcggcagtggcggcggcggcaggaggaacaggaggtcgtgatcgttcgcggagccgccgcatcgggaaacaagaagttttccccaattagtattagtatcatcagtagcgctccaatgattaattatgtcgtcgaaagaaaaagaactgctccagtgtaaccatgatatatcatctccgccgccgccggcgacggcgaggtggtaaccgtggtatatcacggatacactggagagaaatggaacatgagatcattcgtgactnnnnnnnnnnnnnnnnnnnnnnnnnnnnnnnnnnnnnnnnnnnnn

SEQ ID NO: 32130 - DNA, 909 bp, Setaria italica
  Peptide Sequence Number=SeqID_98104
caacatcacaagtaatgtatgactgcgtgatttggcatccgcccaaaagacattccttagctgcccttgctcattcatatctaaactgtaaaagaacaggttttggtcttgcattttgttgagaaaattcaacagttcctctaagtctccatctgcaagcttcaatttcctatttctgtctatcttggttctgaattcagcctgtgtagatgaagttacaccagtatcaccacctctacctgaaagtgcaacagctgagctgctctgtggtccctcagactcagacatacgaggtggatttagagagaaaggagagttcttcaaatgcctcttaaatttaagcaagctcggatccagtggatggttgtgctccaactcaagaacaattacttcccagcggttctgaaaatgtgcgtccttcacgatcatcttagccttgcagccagtcttcatgcctcgctttcttgcaggtcttgtcacaccagatctcagtctagactgccctcctttagaacatatgaatgtagagcgataacggaaaccatcaaaggtattgttagatcttcttgtaataccaaaacctgcgtgacaaccgtatgtcacatagaactgaaaggcatcttcctccgagtcaaatatcatccctacttttggcaaacatgccggatctatatcaactggtttgaagacatcaatctcagcagcatttccttctttctcaccatcttcttgcaaatcttcttcattagatgattcagtgctatactcttcctcttccattggtccaaaattttccaagtgaaccttccaactccggcgaggggaggcgcgcgtacgtcgaggtcacgatgacgccggtcgctgctaggtgagcgcagcggcggcgaggcgaagcagatgcggctcgag

SEQ ID NO: 32131 - DNA, 701 bp, Setaria italica
  Peptide Sequence Number=SeqID_98105
tggcggcgaagggctcgccgcgggagatcctgggcgggatatccgggtcggcgtcccccggcgaggtgctggcgctgatgggcccgtcgggcagcgggaagacgacgctgctgagcatcctgggcgggagggccggcggcggcgccgtcgagggctgcatctcctacaacgacgagccctactgcaagtccctcaagcgcaggataggatttgtgactcaagatgatgttctctttacccatcttactgtgaaggagacgttgacttatgcggcactacttcgtctcccaagaacaatgacaagacaacaaaagaaagaacgggcaatggacattatatatgagcttggccttgaaaggtgccaggacacaatgattggaggatcttttgtgcgtggggtttcagggggtgaaaggaaaagagtttgcattggaaacgagattcttatcaatccatctttattgtttcttgatgagccaacatctgggctggattcaactacagccctaaggatcgttcagcttcttcatgacatagcggaggatgggaagacggtaatcaccacaattcaccaaccatctagcaggctgtttcataactttgacaagcttatcctcctgggcaaaggaagtttactatactttgggaaggcatctgaagccatgccctacttccagtccattggatgcaccccattttcg

SEQ ID NO: 32132 - DNA, 318 bp, Setaria italica
  Peptide Sequence Number=SeqID_98106
cttaatttgagtctctatccaagccaggaaccatttggacaagatttttgtagcggtcatatgaatagaagctgatggcagaataaggtaagcgatgaacaattgtcactagatttcctttccaaaaagctcgaaacccttcttctcgaacaattcgtgaagcctcgtgccatatgctgtacttctttagagctgcagcatctgcatgcatacctgccacctggaagaggatggtgagccggctcgtataagaaattttagggtcaaaaaacggtgttgactatttcttatacatacagatcaatgccagattagaca

SEQ ID NO: 32133 - DNA, 612 bp, Setaria italica
  Peptide Sequence Number=SeqID_98107
cgcacatattggaagagttcgcagcactaatggattcttcctacttaggtaaaaggttctcgttcccatgaatcttgatctgcctcctggcattgatagcgattgatcgaattcctactctggtttgagaagcttttctgttttccttatctctcgtgcctttgaactgtcctgacttaaaagaattcaaaataagtatattgattagtaataaaccgccttcgctggctactccctatgtcttggtactctaccctcccattcatatgagagtggtagctgtcaccggaagcaggtgtgagttgcataagtcattgtgttttggcggtggagaagtacagaagtaaacagtgtgcttaagtgcaatattagtccgaatggaacaataaatgtccaaattagtatggatcattgctataccccaagaaagtgggtgtcaactccaggctgtcttgtagggctaaagttttaaggccttgtacaattagttgtgtaaaaagaaaatgacacttttgtaaaagtctgccttactatgctatatgctatgtaagacttaattttccattattgtggctaaccttaaagtcttaaacacaagaaaacgaaacacaa

SEQ ID NO: 32134 - DNA, 608 bp, Setaria italica
  Peptide Sequence Number=SeqID_98108
agtggctcacactataatatcatcagctgagagaacgagcttgttggctatgcggacttcattctatgaaataatgcagaagaggcatagacaacctttcagaataactccttgggcaacatttggctgcagcatggttgcatgcgctggtctcgtgatgcatggagatgggattgagtgtgcagctgaggtggcaccttctgttcctatgattgcatctctaggtcgtggccttgagagcttgcgtctcacatcacaggaggtgagacaaacaaagggccagaatgtgaaagaagctatgcgagctttaatgaacagcttgaagaaatcagcaaaataaatggccagcactttacaactggagctgtatagattttcgtcatgcaattttggaacaagacttaattatcatgaactgtaaagtgtattttcttgttttgctgagatagtgaaattctcaaggtttttgtgcttgtgcgtgatgctagcgcgaacttagggagcacttgagctagataagtttgttttttatgaccttctgtacatacatacaagatataacactgttaacacattgatatgaatgacaatatagtttgaataagatt

SEQ ID NO: 32135 - DNA, 389 bp, Setaria italica
  Peptide Sequence Number=SeqID_98109
gccgctttgctggccctgtgagccctcggcaaggttgtaagagccagttaggctcaggatctcatagaacccctgccatcatgcacatcatggaacgagttattataagctgaaaagcatctggccccatttagaaagttcatatgaattccaccaagtttatatgaaatgcatcgtcccagacaagcctttaagtagtttcattagttgcattgctttgtgtttacctcgtagatggctgggttcctgtaaggctgcgacgtgtgaacccttgacatgggggaggtgtctccgggatggcggaggtcgacctggacacggaacccattgctgagaggacgcacactgcccgtgatgactggttcgcaaaggcaatgatcttcgcggac

SEQ ID NO: 32136 - DNA, 317 bp, Setaria italica
  Peptide Sequence Number=SeqID_98110
tctgaaggagatgccgtgatgatgtgcggcgtgaagctcgttccagctgaaccagcgaacgcattgcctgtaacatgaaatggcatacacagaaatcatgatcaggcgacagaatagaaatccttatcttcagtttctcccatggtctgttttatcattgatttctgacctgactgacaaaacgtgcttttcagttgcctgtttcgcagatggccaagtaggccgaacatgttctgcatccagacaatgagttgacattggtctgtagctgagtttgacatggtttttccaggtgtttcaagttcagaagacagaac

SEQ ID NO: 32137 - DNA, 1753 bp, Setaria italica
  Peptide Sequence Number=SeqID_98111
tttttttttttttttttcgaagtatagtttgggtattcttgtgcaaacagaaaattctcgagagagagagagagagctggaattatcgacaaatgagctagcctctagatgagttgatatcaatgctggaacttctggtgtcaaatatcccggaggtcggccagcctcctgttacggagggtggcgttagattttgttggttgtgcccggagctgggcgacgcttcttgcccgccggtgagcgagtcggggctgaaggctgcctgcttcgctgctttcttcgactttgatctcgaccctccctggtgaaagctccccagcaccacctgcacggtactggcagctaccagtgctccgcccaaaacacctccaatcacattcctttcggggctgcagagcgtgacactgagcccgccgctttgctggccctgtgagccctcggcaaggttgtaagagccagttaggctcaggatctcatagaacccctcgtagatggctgggttcctgtaaggctgcgacgtgtgaacccttgacatgggggaggtgtctccgggatggcggaggtcgaccctggacacggaacccattgctgagaggacgcacactgcccgtgatgactggttcgcaaaggcaatgatcttcgcggcgacatcctctgaaggagatgccgtgatgatgtgcggcgtgaagctcgttccagctgaaccagcgaacgcattgcctagagagggcgacgtctgctgcttcttccccgtgcccggcggccggccacggcgcttcttctgcgccgggtcctccatcccctggccgccgagcatctcggctcctgacatggacgagcccatcctcggcggcgcgctgaccaggtgctgctgctgcgcggccgaggcggcggccttcatggtgccatcgggcccgtacttgcgcggcctccctctcttgcgcttgacgggctcggcgggtggcggggcgggcggcacggtgcctgaggcggagccggagacggagcccatggcgttgttgtgcagcaatggcggcggcgcggtgtccatctggaactgcatgccggcgagggagcccccgccgatggagttgaggatggcggtggcgctcatgttcatgttgggcatgttgggcatggggcggatgacggagtgcatcccggccagcgaggacgggctatgggcgccgccgccgctgccgagcgcagccctgtgctgctgctgctgctgctgctgctggtagaatgactggaggtcggacggtgagatgagttccttgccatccatgcatggaacgaatccttttttttctctgctgcttgctctgtttctctccgatcacgaccgatcgccggaagaaggctgcgtcgtctcctccggtttcttcttcctctggcggaggtccgtgcaggtgcaggtgcaggtgcagccgccgccttgctggagatgatgagtcgtgcaaggcaggaggagcgcgcgcggtgcgacggacatgggcagaggatggaagatggggaggagagagagaaagggaaggagatgagacgatagatcagatgaaatgatgggagagagataagatgacgcggttggctcggctgggcttggcctacacgagcggaggggaagggtttgcggcgaggtggtgacgagcgagagaggcagggcacgagggcaatcgatcggcaatggcaagtagcgaggcgttagcggcgctgtgtttttcaggatgggcgcatcgccaaccccacc

SEQ ID NO: 32138 - DNA, 323 bp, Setaria italica
  Peptide Sequence Number=SeqID_98112
aggcgtcggtggggtggatggtcggggagtagccctgcacgtagagcccccggttccacaccaagtggaccctggtgcggttcggcgacagccggatggtggcggcgatggtcaccttggcgccgtcgcggacggtgcgcgcgggggcgaggagcgacgccgaggacgccagcagcgggatgtccagcggccgggacacgagcggcgacgcctggagcttgacgtccggggagaggacgaacgggagcgcgagcagcgcgcccgtggacgggtcggagaaggccgcgagcacgcgcgccccggtcatcgccggcgcgcccgcg

SEQ ID NO: 32139 - DNA, 549 bp, Setaria italica
  Peptide Sequence Number=SeqID_98113
cgcgaggaaggaggagaggcggcggtgggcggcggcgtcggggaggcggatcttgatctcgacctccatgcctagctaggagggtctgtgggggttgggtggggatcaggtgcattcattcacagtaacatagtggcggatcagcaagctacttgtcgatctggccgagcttgccgaggccgttgcagttggggcagacgatctgggcctggtccttcctcgccgcgttcgcccgcagcgtcgagcccgccttgcggatgaacccggcgccgtcgcactccgggcacctgatgatgaattgaaggatcgaaaacattggccatggatcgacgacagaagaacatatgggatcgatttactcacgtgtccttgcgcgagaagaggatggggaaggccgtgccgacgagcgcgacggccaccgcgccggcgatgaggtacgtgttgccctccgccgccacgtcgcccacagcgttcaccgccaccagccgcccgcccgctcttgacctcgccctcatcatcatcgacggccgcgccgccaccgtgcaacaa

SEQ ID NO: 32140 - DNA, 937 bp, Setaria italica
  Peptide Sequence Number=SeqID_98114
acaagataagattgatagagaggtattacaaagagtagtgcttgttattggattacaaagtgatcaccacatgcaactacacacttgcagcgagagattgatcattagaacagaggaacaggtactatagcacatacaacaccgggagcaataattgtacacgctaacgtctcctgacagaaaacattacataccaaagcaatactcattcaacatatatatacgttcagaacctgtcagaaaagactgatggatgagcacgtacacggtacacatacatgagttgaagaaaaacgaaaggagcaataatccggcggggcattcatcacatacattgtctagtagggattgagggaggatggggatcaggtgcattcattcacagtaacatagtggcggatcagcaagctacttgtcgatctggccgagcttgccgaggccgttgcagttggggcagacgatctgggcctggtccttcctcgccgcgttcgcccgcagcgtcgagcccgccttgcggatgaacccggcgccgtcgcactccgggcacgtgtccttgcgcgagaagaggatggggaaggccgtgccgacgagcgcgacggccaccgcgccggcgatgaggtacgtgttgccctccgccgccacgtcgcccacagcgttcaccgccaccagccgcccgcccgctcttgacctcgccctcatcatcatcgacggccgcgccgccaccgtgcaacaaccagctggtggcgcgttcacgacggcagccattgttggtggatgtggatcggatgcctactgatcagtgttcactgaagagcaagatggagcaaagaatggatgatccagcgagcgagcgagaggaagctggtgtgaagctcgtgacgacgagggcttaaagctgtggaggtagttgcgacgaggatgaagtgcgacctcacaa

SEQ ID NO: 32141 - DNA, 1389 bp, Setaria italica
  Peptide Sequence Number=SeqID_98115
ggggtgggggactcggatcatgtttactttgaagtttgaactagcgcatggtattcgaatagatgcaacaagtttatattccattccagtgctgaactactcgaattgatagccgtccatactaggtcggtatggaaacaacagtgacatcctgtagtgattcctcgatatctaattcatcttcatttaagatgtgaaatgaaatgagggaagtgatggatccaaaagttgatcttttgtacagatccacacagaaaatatgaaccaaatatgccccaatgataaaacaaaacactaactattgtataatttattttcatacagataaaattgctacgggaaactggcactgtgtgtccatgaaataatgctgaaacaacttgttgcagaactaacagagttgacatgaaagtgcgagcatcccagagccttggaactaatcatgactcaaacaaccaaaaaaaaaggtgcattgcattgctcccatttcatcattaccatagccattggactaaagaaaagctcacaacacaattttcgaacagatctcagcaagaagtcacatatttccttgaccaaataagtattacacccagcagcaaagaccaaagctttgcattgtagcactcagacttgaaaaagtattagtttgaagcaaaccaaaacatgatgtaatctaaagtagaggtcaggaactaatgggcaaaggaccaatgtaatctaaactcagatcgggacacactgagcagaagtgccaagcttttgatacactttgtaaatttccattacactagaatcatactatacagattgcactttaaggctgacaatattatgtctactaacatatcatagcaagccattggcgccaccaacaaaaaattgtaagcatgtcagcattacattgatactatggcattgcagctcatacacattaaccccatgtctacatatcacaaaagtaccacatgccctgacaagccaatagagttactattgtaagcagattatcactcatgcaagatgctcacgcgataaaaatattgttactgaaaccttgaacagcttgaataaagagctacttagtaggcaccgaacaatttaaaaaaaaagcataattgataagtgtgtaccagatattgaccgtgggacatcagttgaaagacatatatttgcacaggtcaatgcaacaagcaaaaaaaaatgttctcatccgaaaatacagtgatattcttgcacccttaacaacagcaaggttacaagaatttcaatgtacatatactataaatgcggggaaacattccttaaatcaaaaccctgaccaacaaaaaacaactttacctagtgttctatgctttggcataactatgcaattgctagaaacatgat

SEQ ID NO: 32142 - DNA, 390 bp, Setaria italica
  Peptide Sequence Number=SeqID_98116
tatgtttgaagataataataacttaaaagaatttgtatttaggagaaacagaagagagttagaaacagagtaacaaattttattttctgggtgcaggagaaacctatattaagggcgtactagtacatccaaggacatataattgaaaatggaataaaaagatacaggccacacatgatacaaacacaccattttgttgggatatggatcaagcatgaagcatcattcatttatgttatatttttattgactttttttgaggacatacatattaactgattcattttattctgccatgtccaagaagaaaagcaaaatatgaacataccagctttttttgtgtgatacattgtcatttcgtgagacagaaaagtgctcagtttaaagcag

SEQ ID NO: 32143 - DNA, 1584 bp, Setaria italica
  misc_feature (28)..(28): n is a, c, g, or t
  Peptide Sequence Number=SeqID_98117
cttagtttttttttttttttttttttcnggaactggatggtgtgcgatgcgaaaatggcacactactgctcttttgcaaccggagaatgtgttctgaaactatcaggaaaaaaggtgggaaaaatgtacagggttttctcaaattacacagagtataattgcaatgcggcaacaaattcaatcaacgaacggccggacacagggcggtggagagatcgcagggaaaatggagtatcgtgtttggtgaaggaggcgaagctgttgtcaggcgacaacggatgcgctgccgaatgttcagctccatcacaacaacagggaggccagcacgacggagcacgcggcggcggcgagcgcgccgatcggccgcgacgcgatggcggacgacggcttcttggtcttgtggtcggccgcatggtccgcggctaccgacggggcgtccgccggctgcgacgcgggcgtctccgcgggcgacggctccggcgccggggcttccggtgcgccgacgtagagctccggcggcacgaggaggctgtccagcgtgagcagggagaagggcacgctgtcgacgacggtgtccgcgacgcgggacctggccttgccggtgtcgagggagacgtcgtcgcccttggcgaccacggtgacgccgtccttgccggccttggtgctggccatggtgcggagtgtgcccttgacgaacttgagcgacgtcttggtgttgtaggacggcagcgcgttgtactggaggagcctggtgaggttggcggtggacatggtcttgacgtcgggcgcgtccttggcctggaacgcgtcgtcgttgggcgcgaacagggtgagccccttgtccatagcgtcctcgtaggtcttgagcacgccggtgcgggcggcgagggacgcgaacaccttgcatccggcgcgctccaggaggcgggtgaggttggaggtggccggggtgtcgaagaggccgtcgaactcgatgggcgcggtgacctcgaggatggcgaacttgaaggggtgggtctcgacctccttggtgacggtgcagagcctggcgccgggggtggcagcggagaaggcgtagttcttgtcctcctggtcgacgaccttgacgttgcccgtggtgctggcggcgtcgccggtggcctggtacagcgtggcggcgctctcgtcgccgtacttcttgaccttcttgcggtcgtagtagtcgagcaccgagtggaggcggagcgcgttcttgatggccgggagcgagtcgccggcgtcggaggcgagcgtggtcatggcgtcgttggagagcacgaggatggtcatcgacgtcgactgccgcgagttgatctcgtcgcacaccttcgtctccgacaggtacttgttgtacaacttgtactccttgtacccgtccaggatggccgtgatgttgcgccctcgcaccggcgacgccgccatcgccaggcaggccaacagcgccgccgccgccgcaacccgctgcatcgccatggccccgccggcaacacctcccacaccttaccccgatgagctgagcgaggtagctagcttagcaagaagagtgatgctggtgtgctgctagcc

SEQ ID NO: 32144 - DNA, 1467 bp, Setaria italica
  Peptide Sequence Number=SeqID_98118
aaattgaatttcagtaataatttttaaatctttcaacacaaaaagcctgttaggctataccactcaccaatcttaagcgagcaaataacctttcccccctacaacactaacttttaacgctactacattataaatctattagctatttatttacagctgaactcaaaaggtacaatgatgaatcaaattatatgcaaacacaaaaatactagtcatctcatgatttcaaaaagatgtatgcaacttccattgctgtatcgccgcttgcaacgaatggttgggaattatggatagatgtggaagcctctgattgttgaccggggataccttgtgtttttttagccaagctttaattgccctgtgctcataggtgtggccatcagcagcaacataaggattttccattacctcctgcaatatagggcagatgaagtggcttggtgcgatgatgttttcgagcttcagagaagcagttaccctgctcaggatattttccaattcaggaagtacctccgactcaagatttggtctgtccctgcattttaaggctgtacaccgcaacccaagttttgccagcatctctgcctcagcaattggccaatcagtttgagaccggtcaagaatatcagacaaaatccccttttcaattgcctcttctacactgcatatcagcccatgtggacgtttgccggttagtagttgaagaatgatgatccccaatgcaaaaagatctgattttggtcgaactgttcctgttaattggtactcagggtccatgtaaaacagtgtgccggcaatgacagtttctctgtactctgtaagcccttcaggaacgagatctgatatgagcttagcaaaaccaacatcaccaattttgcttacataattcttgtccagcaagatgtttccaggctttaggtcacgatggacgataggctctggtttcgttccatgcaagaaagcaagcccacaagatacctcaaagataatttggaatcgcagaaaccaatggagtggttgccctttattgttgataagttggtcttcaagactcccattctccatatattcatacacaaggcatccgatttcaggacaaaaaccaagcagtaaaaccaagttgggatggtgaagtttgctaagaatctccacctctctcaagaattcatcgatcttgtcactggaatcttgttgaataaccttgacagctacttcagtgtgatcaagggtacacttgtatacagtcccatagcctccctcaccaatcttctttgcatcagaaaagtaatctgtggcaagctctatttcatgtttcgagtactgcctgcaactttttcctgttgacaaaagagcatccacgaccttagccttctcagtagacaccatgttagctacaaattcagccttgtgtttggaataggcctcgcgagcaaatgattctttgccatctcaactgctccaattgca

SEQ ID NO: 32145 - DNA, 1261 bp, Setaria italica
  Peptide Sequence Number=SeqID_98119
cgctcgcccacccgcccgccaccaccgtccaccggatcgagacgccgcgccgataggatgaggccgccggtcagcagggcagccttcgcgtccgtgctgctggggcgccgcgccgtcggggcgtcgctggtagccgcccgctgcgcctcctcggccgcctccccgccgccgcagttactgcctacgatcatgcatcgtttgttaaggaaattgccgcaacggatcccccagagcatctcaactctctcttgaatgtgcttcaggcacgaggtgaaaagattgtttctcctggagcgaagagagggttgattccggtcgttgttccattatcggaaagtccagcaggtaacttgacatccctacttagatggccaactgctccaactgggatggaaatgcctgtggtggaagttggtaagcatgggttgtggcttttggctaagaatgtgaaacaatatatccacagaatacttgttgaggctgacatcaatgctgatactggtgacgatgtatgggatgccgtgggcgaagctggtgaaaacctttacactaaaggtgacttcaaagagtcacagctggcagatcttgatgtctatttattgaagaaggttggacttttccctgatgttatagagaggaaaacattacgccatctagaaaagggagataatgtctcagctcttataactggagaattctacagtagagatcaatttccaggattcggaaggcccttcgtgttcaatgcagagattttaaaaagagtcggacgtacatctgaagccaaagattcagctcgtgtggctttgaagtcaccatggtggacactaggctgcagttatgaagaggctgctgaattagctgggtgggaggatgagcagatcgagtttataagagagaaggtaaccgaggagggtaaacgtgaggatctgaagaaaggaaaagctccagaacaggtggtccttgacgaggcagcctttctaatggatttagcatgtgtggatggtaactgggatgatgtggtggatcggattgcagagtgttacagggaagctgggcttgatgacgttgcaaagttcattgcctatagggaatagatggtagattccctacggtttacaactcgattgaagaaattttggctctttcatgctgtgactcctttatttattcataagagagaaacttcccgtccataataaacacggcattagttcatggatttgtgtcatcatttagtgaccggcgccataatagacta

SEQ ID NO: 32146 - DNA, 537 bp, Setaria italica
  Peptide Sequence Number=SeqID_98120
gccgtctacaattggacaaacattatgtcaaaactgataagtgtcatgtaatgtgaccaaagaaacatactgtaagctacagccacagctacagttgaataagaaaaggaacactccagcacctgttttgctcatcaaagaccggaatactgttctagtggtcagcaattatggtgccggtatactaaataactaccatgcagctatttccagcaacaaaacatcttctacgaacaaatcaaacatgatagcagcacagcaatcaaataaaaaaaccttctaggaacaacatgactgtgcacagtaatcaagacgaacatcgaaacatggctagcccctttcaagcagaagttaaaccagctggagatcctaacaaacagcctaatctaaaccttctggtcatcactatgaacttcagcagggggcacaaccgtttcagcaatcggcaatacccctttcctgaagcatttcttgtggcaaaccaccccagctaaattgctgtgaaaattcccaccatctcggtaaccaaggtcttct

SEQ ID NO: 32147 - DNA, 951 bp, Setaria italica
  Peptide Sequence Number=SeqID_98121
tttttaagtatttattgacaatgcaatgaagataacagttgatcaataactgcctgaaaaatgttcagttgctgtggtacccagccagttccaacttccaaggcttcgaacggatgagcaaataaaatggcaattctaatcgaccattagcattacaacattatctgctgattttgcgacgtcacactatacttaatctatgtatgcacataattttgaaaagtagatttggtggcgatacacagaaacgtcgataaatggtcgccagggatgtcaccaccctttgccaatgagccagagccaataaagaacatctccaaatgttaagcccaccaagagggatagcacgagcaagttccccccaaagcattctgctcggctacctaaccatcactctaattgagatatgtgtcgggtgcgcagaatcttgtattaccaagaacccaagttgtgtgatccagtgtcttcgctagaaaccctgggaaaattgagagtgacagggtgtagatcaggaacatgtccattgagtagtccaggttttgcagtaagaactgcttgctgcttaaacattcaggaaaagaagggccttcttcatccaatggatttgaacttccctcgatgccaccagcagcaaggtctgaatgaactccggacacatcaaggacagatccctggccattgccccttcagcatgaccttctgcgatgcaaaatactgcagcaacggtacacacaccagcaaaggttgcagcaccacctcttctgttatcagtccaagcgagcgcaacaagaacagtgagtaccccactaaggtgcgagccctggtgtttatctttgcatcgtggtatgtgaataccacagttgtgcataggacaaatggtagataagcaagagttagaactctcgttggatggtaatcaaggaagatgtaaacaaagtaatcgtccatagt

SEQ ID NO: 32148 - DNA, 237 bp, Setaria italica
  Peptide Sequence Number=SeqID_98122
aaaccagtatcagtgatttgggtgcagtagcgtagatttagcatcctgatcttcttgcaaccatgcactagggccgccagaccttcatcagtaatagcgctgcaacggtacagatcaagttccacaagctttccacagtttgaaccaatataaacaaggcctttatcagaaatgcttgagcagaggccaagcttcaagatttgcagttctgagctagtttgctaaatgccgcagacg

SEQ ID NO: 32149 - DNA, 1107 bp, Setaria italica
  Peptide Sequence Number=SeqID_98123
agacatgcaatgcatgtgctccctgtcaacaggagatgtacctggcctctcaatcaattaatatgatggtgttttggtatcatacattacccattggtacgtatttccattaattaattattgttatctaaaccaatacgtacgtacgttgatcactgtatgcctgttcggctggacttggctgaaaaactgaaacggctgatttgttctgagagaaaaacactatttggtggctaataagccggctgataagctgaagcgaacaggttgtttatggttaaaaaaaaaataggtgctttatctttgtaacaaagctgctatgatatagtatatagtgtcaaagcacgcatacatgcatcatcctgctagtgcaaggcagaggagctttaatttgttcattgcttaggttcgaaggtatcggttcgcaggaatatatgctgtcggttaattattttagcttttctttttctaatatgcagacttataaataaataaataaataacagagttagttacaactaagtagtactagtaattggtttgattgtgccggagcctcggcaggttgtgcaggagcgggtggaggagcatctgttgcagtaggtccacttggtgggcagccctgctgtgtatcttgtggccatgttcttggcggccttgcgtgccttggtggccgcctcctcgggcagctgcttgaagacgaagccctcccctttgcagagcccgcacagccccgtcccgccgcagtccgggcactccgactgctctgcaaccacctcctcctcctcctcctcctcctcctgctgctgctgctctcgccggggagaagagcgaagcaggattgtggccgcgaccccgactgtcccggcgacggcaagtagcgccgcagcagcttgggggtctgggagagcacaaggcggcggatgccctcgccgccgcttctctgcatgatgaccatggccgaggacacgaatagcagcggggggccgaggccgcgacagcaggtggaggaagagggccggtgggtcgtcggcgagcaacaagcagcaggggaggacgaggaggccatcatggctgccgctgtttgccttggagcagagcggatac

SEQ ID NO: 32150 - DNA, 738 bp, Setaria italica
  misc_feature (632)..(632): n is a, c, g, or t
  Peptide Sequence Number=SeqID_98124
ggctcctcggtttcctggcagtgtcattctgaatgtccaatccaaccacagagggcaatattgaatatactaggatgcctcagcaaatcatcaacacgtaaacatttcagaataagggatcgcaatagaacagcaaagaaaagcttagaaaagtctgaaccaaaccagcagtgcatcattatgaagcaaaggcccccaagtaaagtggtggcacactgcacacaacgtctgctgttttaagaattgtccaagtgtccttatggaacaagaaattatccaagtgtcaagtcataactgtggaaatctgtcaaataacaccaaaacttaaaaaaacaggggcagaagattggattctaacaactcaatatccattgaaaaaaaaaacagaacacattctctgaatcaacagttcaagatcatttccgcataatctcccagctatgtatgatactaatttctagtggtcatgtcaatggtcgttttcaattacaggtaagcagcagatcacatttcacaagcaaaaataaggcacacctaaggaaactaaaggcaactcaacaccattatcaatagcccaaagtaaaatagttgcacaccacatttgcagctacggtatgctgtatgcctaaccntaacccgagagatctgccaaacaatattaaggaatacctcaagtattcattgaaacaataaaaaaacaagaaggaacacacaacggttcacttaatctgcttgagg

SEQ ID NO: 32151 - DNA, 376 bp, Setaria italica
  Peptide Sequence Number=SeqID_98125
tggaatctctgaagctgatggccattggtgatccttggttctgatttcgtggtgtctggtgtggagtgaggagtgagagcagcaaggggggaaaaaatcgagaggtggttcagttcactcttggcgtgtcaagatgaagtacatgaagcttggatcgaagccggatgtctttcagacagatgggaacagcatcaggtttgttacaactgagctggcaacagatattgttatcactgtgggggatgtcaagttctatcttcacaagttccctcttttgtcaaagagttctcgcttacaaacattggtggcctcaacaaatgatgaaagcaatgacgaagtagatatctctgatatccctggcggtccttgtcggtct

SEQ ID NO: 32152 - DNA, 453 bp, Setaria italica
  Peptide Sequence Number=SeqID_98126
atatttcaatagaagtagcaaccaactctggaatatgttcaacaccgactgctcgcccttctgatccaaccatcagtgcgaagcaagcagttaggtacccagtacctgagccaacatcgagagcacgcatccccggctgaagattcttctccaggagctccaggcatgccgcatgcatgtgcggtgccgatatcgtggcgttgtacccgatcggcatggggctatcgaagtatggcgagccgccggatggcacgaacagccccctgtcgacggcctgcatcacctcggcgaccttgctcgaccggatgatcccgtacctctgcagctgctcgaccattgtcttgttcttgtcgctggcgccgctcgaccacagcccgtgctccatgtggaccaggcgcgtcgagagattgggtgcctcctcgattcttctctgggttcgggcggccggcggtt

SEQ ID NO: 32153 - DNA, 1145 bp, Setaria italica
  misc_feature (1096)..(1145): n is a, c, g, or t
  Peptide Sequence Number=SeqID_98127
gcaaggcttacaagtgattcactttctctatcagaatatgctgatatgagcagcgaagatgatgaaggaagctcaagtgaggaagaatctgagttgagtgacgatgctgatcaagaggatggatgcgttcaccagggtattggccttttagagcctgcaaatttcagtggcattcagacagacaccgtgatctttgcaaaatgggagcaccacaccaggggcgttgcctccaaaatgatggcaaaaatggggtaccgagaagggatggggctaggtgtatctggccagggcatgcttgatccaattccagtcaaggtactaccgccaaagcaatcacttgatcacgctcttgctgcaagcgaggctgatggaagtgttggcagtggtaaaaagcgcagtcgaggtggtaaaaggaagcgtgagaaaaaattcgcagaacaggcgagagctgctaaagctgaagaagcagagagatcagtcttcagctttatcaacagccatctagtgaaccaagatatgcctgaaggttcagccattaaagttaagaagggggcatcaggtgaggctaatgggcatgctaagaaggaggacagaagatccttagtcgcatacgatgaggaagtaaaagaactgaggattcaagttgagagactggaagagatgaagaaccgaaaccgcaaagacaaggcagtgtttgaagctgcttcaaggaagctggaagagactcgaaaggcactcgcggatgctgaagctactcacgcttcagcaactaacgcggttgccagaaaggagaaagagaagaaatggttgaaattctgatatagctttgatatagctactcacgcttctgtctatttatcttctgataagaatccggcgtgatgtatcgacttgcaattgttccttcagccagctggtagccccgttacacatgtatgtctatcaggttttaggagatctgttgtagaagtattagtaatatacttaattattacatggacatggtatttagggctcgtttggcagggctgcggatgtgattaaaatggctgcggctgtggcttcttcgatggagcagctttttttggcttaaacnnnnnnnnnnnnnnnnnnnnnnnnnnnnnnnnnnnnnnnnnnnnnnnnnn

SEQ ID NO: 32154 - DNA, 543 bp, Setaria italica
  Peptide Sequence Number=SeqID_98128
actgttcttcataatcagttgtggtacgtgcccatccaaccagaagaaatggttttgggatagaggaaggtcaactgtagtcctttggattggaggcaaaagaactaacttacctgccaatcctaccaggggtgaagctacactgactgtccctggttcactgtgcacacgcacaagggtgaagaaaaaaatgcttgtagttgactcaatttgaccatgtactacttcagtactgagtacttctaaaattgtatacatttctttataggagtatacgagtacaatggacagtgtgcaccacggtcatttctgatctagatttgcccaacataattgagtttttttatctgaaaaagccatatgggattgccatttgaaatccaatctattgggacagtggatgattgaattatattttaattttttacatactccaaagtccaaacatatgtacttaggcaaaactatgagtttgatatgcttgggatgatggctgttgtaacttgtaagtatactatcaagatagaattccattctggaaac

SEQ ID NO: 32155 - DNA, 318 bp, Setaria italica
  Peptide Sequence Number=SeqID_98129
atgagtggagtttcgccatcatcatccttggggtcgacggggaggccgagctggtcgatgaggaattggcagacgtcggtgcggccctcgcgcgcggcgaaatggagcgcggtgcgcttgttggcgtcccgcacggcggcggcgaccgcggcggcgcctgtgccctcctcgtcgagcgccgcgacgaggttcttgagggaatcgaggtcgccggcgcgcgcagcctctaggaaagcttgcaccttgctccgagcttcgagggcggcggtggcgtcggccatgacgagagcaaccctgggggacggcggcggaggggcg

SEQ ID NO: 32156 - DNA, 325 bp, Setaria italica
  misc_feature (5)..(5): n is a, c, g, or t
  Peptide Sequence Number=SeqID_98130
acagngcctgttgcatgacttggagttggaggtgccagtcatcagaagaaacctgaccagaactgaggatgctggcccggctgcggctgccggacatcatcctcgatgtccatcggcgccgcctggtctgcggtcgatggtgcctctgaagatttgctcccagattcagtgctcacagtgatgccatgagcattagcctcttggccctgagttggcggcgacagtaagggcatgatcatggttggatgcataccagctggtggagcacctgcatctgaatctgcatctgcaagtggtttctcttcttccatcatttccggaatca

SEQ ID NO: 32157 - DNA, 284 bp, Setaria italica
  Peptide Sequence Number=SeqID_98131
cgacgaagcagccaaccagaggaagcaagagcggcgagccaagcatggacggcggcggcgcggtcgaggtgcggcactggaacgcggacgtcaacggcgtctccatccacgtcgccgagcaggggcccgcggatgggacggtggtgctcctcctccatggcttcccggagctctggctctcctggcgccaccagatggccgcgctcgccgcccgcggcttccgcgccgtcgcccccgacctccgcggctacggcgactcctccgtccccgccgaccccgccgcc

SEQ ID NO: 32158 - DNA, 269 bp, Setaria italica
  Peptide Sequence Number=SeqID_98132
ccgtcgctccggtcgctcgacctgtcacgcaacgccctgtcggacgccggccttctcaactactccgtcgccggctgccacggcctgcaccacctcaacctctccgccaaccagttcgccgggcggctgccggagctccccccgtgcagcgggctctccgtgctcgacgtgtcctggaaccacatgtccggcgaactccccgccgggctcgtggcggcagcgccggcgaacctcacgcacctgagcatcgccgggaacaacttcaccgg

SEQ ID NO: 32159 - DNA, 314 bp, Setaria italica
  Peptide Sequence Number=SeqID_98133
agcagaagaatgcaatccatcaccacggctgcagctgcgcctaactactatgaagtgcagagttgtggatttagaggggtgaggcataaactgcattacgttcttgtttgtagttcttgttgccaaaccccaatggtgtggtgtcactggataactcccaatgatctcctcgtgacagacgaaaactgcacgattcagggtaagggtcatgggttgagcttgagcctgaaaatgactgcgattctaggtagaaaacagttggatggcttggtgatcatcactttcagaatgggacagcgtgttcggatctttcg

SEQ ID NO: 32160 - DNA, 383 bp, Setaria italica
  Peptide Sequence Number=SeqID_98134
gctcccgcatcgccatcggcgcctccatctcgccggtgtcctcgcccggcggcgcgcagtacgacatgacgctgctggtgtggaaggaccccaagctcggcaactggtggctcagctacggggaccagctcgtgggctactggcccgcccagctcttcacccacctctccgaccacgccaccatggtcgagtggggcggcgaggtcgtcgacaccaggcccgccggcgtccacaccgccacccagatgggctcaggcagattcgccgccgagggcttcgcccgggccagctacttccgcaacctcgagactgtcgacgccgacaacagcctggcggaggtggccctcgacgccatccagacgctcgccgagaacgtccgtcct

SEQ ID NO: 32161 - DNA, 477 bp, Setaria italica
  Peptide Sequence Number=SeqID_98135
aaggcgcttggcatccaagaacttttgcctcacaaattccagatcagcctccaagtttctcagatactgctcctcatttcgaggctccaacaccttatgcatcgccatgttctccatctctgtcacctcaaaaacatccttcactgctggcagctcatcagaactgacgttgcatggctgatctccagatgaagcatgggccacttcttgaacaactccaaacaagtgtcgttgcagattagcctgggtgtcactctgacaccggtcaagaacgttttttggggcgaggcacggtgtcgaggcccatcagcctagcaacgatgccaggcgagcaatgggtgaactccacctgcttcggtgcctctttctcgcaggacagtattgacttgttagagaagccctctcttatgttgtcttcgtctcttggcgcatccataggcggcaacattgtccttctttcgtcccttttaaatcctt

SEQ ID NO: 32162 - DNA, 237 bp, Setaria italica
  Peptide Sequence Number=SeqID_98136
tacttacactagtgtgaaccgaactaaaaatgggaaatttaactaccaactgctgtaactgtggtgtcggggacggcggaagactccggggacctactatggctgaggctccctctggtgacttctcccctgatccatccatggctcgtgcctcctctgttcctcccccctccaagaaacgtggaggtaggtggggaacgaacgggagctcgggcgatcaggcctgggcctcgagct

SEQ ID NO: 32163 - DNA, 623 bp, Setaria italica
  misc_feature (36)..(36): n is a, c, g, or t
  Peptide Sequence Number=SeqID_98137
cgcgcttgatcgcaccctccctgccgcttctgcagnttaaccctcacttcttccagtgtcccctgactgtcacaccatccttcctcggcttccctgaggatatccatctgggtgcggcgcgcctcgagcagcttctgcacggcctggccctcggtggacatgcgcacgcggcgcgcccggatgcgtgcctgcacccgcaccagagcctgcatgcaccgtagcgtcaccgccgcctgcttcctcacctgccggccgcggacaatcgcctggagccgtacgagccccttgagcgcccgcagcgcccgccgagccaggaatccgcggaacgcggtctggatgcggatggcggcccactcttgccggacggccatgaagtccctcgccggggcgcgggcgaccgtggcgacggcggcggtgaacgggtcggcgggggcggcaaccgaggaggtgtcgtcggaggcctccgacgccgccgagcggtggctgccgcctctcgagccgcgccacaaggagccgtggtcgccggaggagctccgccacagcttccacttccgccccttgcctcgcaatcctccatggacagaggggatttgcagcttgtccttgccgtcttccttctccgg

SEQ ID NO: 32164 - DNA, 590 bp, Setaria italica
  Peptide Sequence Number=SeqID_98138
ctcgcacgtgccggccttccccggtccccgcctaccttcctctcgcgcgcgctctctccgcccgcatcctcgtcggaggctgcgacgaccgccccagcactggcggcggcgctcggagccccgtgcgcccgacgaacaggtttattggctttcgatcttcagggacttgaattagatcagcatctgatcaacatcgaggagccagataggtcctatgctgccttcctgggatgaaaggtggatgtctgcataggctcctcgtcaacaagctatgcttcggcctggtggttctcctcactgtaccgattattgttttgttactggaaggtgccccggtcctcacaatcttcagtacaagaccagagcaattaaaagttctctctcatggcatcccaggttcagcttccaggagtgacacacacaaaattagggggcaaagtgaataaggattgtaactatgcaaaggggaatgggtagcagatgataagcggccactgtattctggtaatgaatgtaagcagtggctgtcaaaaatgtgggcttgtcgaatgatgcggcgcgcacatttctcctatgagagttatcggtgg

SEQ ID NO: 32165 - DNA, 395 bp, Setaria italica
  Peptide Sequence Number=SeqID_98139
gcttagagtgagataatgtgagatttttcatctatttgtaccaatactatatcatggtgtctgacagtgatgtagaaataggaaactgcaacttgctacatctaaatcgcactcttctaaggtggatgggggaatcgttgcatgcagtactgatcagtattgcttattgaagcttcagacttgaatacgataacaactcattgtggcaataattgaattacaatttaacccacatgtagaaatgttcacaataaccctaagttttggtttcactctgactgtagaaatgttcattgaacggtgagttgtgacagtcccttttcttctatatgttatggccttatatcatttgggcacaactttaaattagtccttgttattacttaaacttacct

SEQ ID NO: 32166 - DNA, 352 bp, Setaria italica
  Peptide Sequence Number=SeqID_98140
caagcacagagtcgattcaatagtacagaccaacgtattcctataccaagataatagtaagttgcagctgtctgttgatataataggtagccgcaagagatagttttaactaataccaataaatcaccatagcatatagttgacaaaacttggaagtaccattaagcattgaagttctaatatgacgacttctacacagccacacaaaagaaaaatagaaaccaacattgctgagatttgcagagtgaacactagtaatgatacaatcgcatatactgcaaggaagataactcgccaggtgctggagttggtgaatggtttggtgctcagactaagaaatgcatcgaataat

SEQ ID NO: 32167 - DNA, 530 bp, Setaria italica
  misc_feature (295)..(295): n is a, c, g, or t
  misc_feature (502)..(502): n is a, c, g, or t
  Peptide Sequence Number=SeqID_98141
aaaagtaaaactttaaaaaagtaaaaaaaacctaaaataaacaaataaataactaaacgacaacttacaaggtaagttaagactagcacagcatcacaccatgatctccaggggatgttcaacaattgttttgttcctattgtttcatctgtacagattccttttttgttgcagtttgcatgatatcttaagttgcaggttcaactttgcacagttgtacctgttcgatggcatggcctggggcttttacatcttgatcaacttcttaattcatgtcatgaagcctgtgtctctnttgcataagatgtgtccgtatgctggactcatgcacctgcagttttgcagctgtagccaagagttctctgcattcatctagcatgaccttttcttgtcctgctatcacagaaagttctgaaaccaaggattcccggctgagtgccactaaaacaagaagatgccacatcaccaagtcttggtccggacatcagcaactgaaggcacnccagcacccaaaagagcgcaatcagcag

SEQ ID NO: 32168 - DNA, 1292 bp, Setaria italica
  Peptide Sequence Number=SeqID_98142
ttctaggcggcgctctcgaggtacatatttgttacttcagtgagctgatttcctgaggtccacattgatgtggtttgttctgggattttctattcttcatggatccccttaagaacgaagtgaagaaggctactcttgttgatgagactctaagaccaccattagttccatcagagaagcacaatgctttccgtgggagggatgttgcatccaggtacaaaactggtccggctgatgccactaaaacaagaagatgcacatcaccaagtcttggccggacatcagcaactgaaggcacaccagcacccaaaagagcgcaatcagcagatagaagaagaccgtcaacaccttcaactcctacctctagggtgtcaacaccctcaacacctacgccaaggtccattacaccagttcgtgatactgccagagacttacacaagaattccaagcgtatagcaagcacaaaggctcctgatggcttgtggccagcgatgcgtaacttgtcttcctccttccagtcagaatctgtgtctacacctgctactagaaaagataaggtaatctctgcctcgtcgttggattgtaccaagggtcagggaagtgtgctaaccgagaggaagagaagtcctttcagaaggaaaaacactggtgaacaatgtgaaaatgcccaaccttcagaagaaccccctaagagggtaattgagcaacacagatggccagccatgataggtgggcaggtgccaaagaatctcatgtcaagaagtattgacctttctggcaaaactaccagaccagtcccttcggcaaatactcaagaggcattctccaaggaagaccccttctgttgaatcttcagacaaagggttgagtccatcattggatgaagtggcaagaagtttggctatcaggcaagcagaagagatggtaaggcagattcacagaaaacagagagatctaaatctgtgagccgaccaaacagaacagctacttttcctgttccagttctacagcgttcatcgtcaccaaacaaggcattgccagctgcatcctcaacttccagggcctttcagagcccatctcggacaaggccttcaacaccctgtcggtcacaaagtgctggagctattcaacctagtgttacatctcctcttattaattacatggttgatgcgagaaaaggaaagaaaaatgccagccaaatcgaatacatccaccaactgcgtttattgtacaatagacatttgcagtggctctttataaatgctaatgcagaagattactcttattctttt

SEQ ID NO: 32169 - DNA, 962 bp, Setaria italica
  Peptide Sequence Number=SeqID_98143
atctccacctttgcccatccatttcatctatgtatttctttccaaatgtcaaaaattacaatgggaaagaagagggctctactctatacaaggaacaaaaataagaaaaggactagaaatgctgggagtgcactatatggtgaaaatgatttacatatgatgaggtcttttaagtaaacctatcatatctacgcacttcaggtagttagctgcacagcatcacaccatgatctccaggggatgttcaacaattgttttgttcctattgtttcatctgtacagattccttttttgttgcagtttgcatgatatcttaagttgcaggttcaactttgcacagttgtacctgttcgatggcatggcctggggcttttacatcttgatcaacttcttaattcatgtcatgaagcctgtgtctctgttgcataagatgtgtccgtatgctggactcatgcacctgcagttttgcagctgtagccaagagttctctgcattcatctagcatgaccttttcttgtcctgctatcacagaaagttctgaaaccaaggattcccggtctgtgatctttgaaaacatgcagcaaacagatgaacccaaaccttgcatgacatcaacagctgagcttacagcattcttaagagcaattgcatcagccttagctcccgatgtaactggcaagcgcagtgtgcttgctttcagagcctcagttgccccaaataaagagatactgttctccctttctagtgtcggccactgttcaaggtaagcaatctgttctttcagaatgttgtacagcctgagttcttgctgaaggtgttgcaccattattcttctcacattaacagaatcccgcagatctatggtattcctccaaacattataaatggcattctcaacagtgaccttttgaaaagatagagtatcttctgcattagcatttataaagagccactgcaaatgt

SEQ ID NO: 32170 - DNA, 547 bp, Setaria italica
  Peptide Sequence Number=SeqID_98144
ttgtttcctcaaggattcgcttgagcctcgtatttcggttagcttgtgcattgctgacaagcttgtccactatcgccttcaggtagttcttgtacttcttcctcaacattactgtgatggagttcatttgctctccaaaaacagtgttcccacttgttatggtaagatatgctgcccatgacttgagaatgtcttcaactcggcagtgtaacatatctagcatccgtttaactgtgttcatgaatgctcctaactgacttggcacaacatagggagctatagattgtcttcttgttagtctttgaacctgcttctcaagatattttggtatgccgtctctcagaggcatcagagtctccatgtattgcttctccagtgtcttcataatttctctttccacatcagcaacagcactctctaaactcatcagatattgaggccatctattgataaccactccatactcatgtatgctctcttttatttgctcatacatttgttcgacaaatggtgagattgttgacactgcagggcatgatgtcttctc

SEQ ID NO: 32171 - DNA, 318 bp, Setaria italica
  Peptide Sequence Number=SeqID_98145
tttgagagaatctgatgacgacacaaatggaagcaggtggtctcaagttcgcaagggcactaaaattatggttcaggttgtcaaggaaggattaggttcaaaaggtccaacacttagtccatttccgtgcctgcgaagccgattttggatattggtttcccgtggtaacaaagttggagtatccaaaaagattactggtatagagcgcaccaggttaaagggaataacaaaattattgcgacctcctggatttacattgacagctcgtacagtcgctgctggtcattcttgggaggaattgcagagggaccttgatgg

SEQ ID NO: 32172 - DNA, 1393 bp, Setaria italica
  Peptide Sequence Number=SeqID_98146
tctacggtggcgaggggcgaccccaaccgcttcgccggctacgacacctccatcccggcctccgaggacgacgccgcggaggacgacacggaggccgccaaccccgcgccgcgccgcctcgcggcctacacgggccacgccatcgccgccgccgacctcccgcgctcggccgacgacgacgcgctgcccaagaggtcccagcgcatcatcgaccgcgaggacgactaccggcgccgccgcctcaaccagatcatttcgccggagcgccatgacccgttcgctgccggggaggccaccccggacccctcggtgcggacctacgccgatgtcatgcgtgatgcggcgcttgcgaagaagaaggaggacctgatgcgcgagattgcgaagaagaagaaggaagaggaggagaaggagaaggagaagaaggctgcggcacctgagcagcctgctgccaccacaaagcggcgcaacaggtgggatcagtcgcaggacagcgatgctgctgctggggctaagaaggcaaagacatcctcggactgggatgcccctgatgcaactcctgggatcgggcgttgggacgcaactcctgggcgtgttggagatgccacaccctctgtgagaaggaatagatgggatgagacaccaaccccagggaggatggctgatgctgatgcaacgcctgcagctggtggtgttaccccgggcgcaactccttctggggcttgggatgctactccaaagctgcctggtggtgtcacgccaacccctggtaagaagcagagatcaaggtgggatgagacgccagcgagtatggggagtgccacccctggtggtctcggtgctgcaacgcctgctggctatactcctggaccgacaccatttggtgcagagaaccttgccacaccaacgcctagtcagatcgctcgtggcccgatgactccagagcagtaccagctcatgcggtgggagcgggacattgaagagagaaacaggcctctcactgatgaggagcttgacgctatgttcccgcaggaggggtacaagattcttgagcctccggcttcttaccagcccataaggaccccggcaaggaagcttcttgcgacgccaacacctcttggaacaccactttatgctattccagaggagaatcgtgggcagcagtttgatgtgcccaaggagctgggtggtggtttaccactcatgaagccagaggattaccagtattttgggacgttgctgaatgaggaagaggaggagcagctatcgccagaggagcaaaaggagaggaaaatcatgaaactgttgctcaaagtgaagaatggcacacccccacagcgtaaaacagcacttcggcagtcttgtaacaagtaaactaaaaagtaacccgtaa

SEQ ID NO: 32173 - DNA, 1054 bp, Setaria italica
  misc_feature (1040)..(1040): n is a, c, g, or t
  Peptide Sequence Number=SeqID_98147
agccgacgctcaacagcgcggaaggaagaaacgcagcgggagagcaaaaccctagcacggtcgcttgcatccatggcgctgcccatctccggcgccggagaggcccgcgcgctcctcgccccgtccgcgtactcgatccgcccgccgctccgccgcggcgccgccgccaaggctcacttttgtacttttcctcatggagcatctagcagtcatatgcttacaaatagccggctaatcattgaacgtcaaagctgttcacatagttccacccagaccaatgctctttcaaggaaggatttttctcctataactcaagaggtggaaggcttccttcacaatgttgttaacatgggatttcttgaccgtctgaaattagcgtggaagataatctttcctgcgccaaccataaaggagaactccaatgcaaacattgcaaaacagaggcttaagatgatcctgttctcagacaggtgtgaagtcagtgacgaagcaaagaaaaagattgtggagaatgtcattgaggcactatctgagtttgttgagatagaatcacgggataacgtccaagtggatatctcaactgatgctggccttggcacagtgtactccgtaaccgttcctgtgcgccgagtgaagccagagtaccaggaatcagaagagcagtacagagggaaaattgttggcgtcgacttcaaggacactggagaaacgtctggtagtgtcgatgtgacatttgacttctttgtacccaatgagaactactgattccttgtgctgctattggagtgtgctcctcgcaatgtttcatttgttcgttgcatttgtgaaccctttgggtagaaagctagaatgtttgttctctagagtgatgtaaatatctaggatccctgttcgctccacatttcttgtaacttgattctggaattatgtcgtagacctgaggtgtccatgttctttgtaaaaacaaaattctttttttgtttatgagaagataacgtccagttgctctgtctttgaactaaaaaaaaaaaaaaaaaaanaaaaaaaaaaaaac

SEQ ID NO: 32174 - DNA, 352 bp, Setaria italica
  Peptide Sequence Number=SeqID_98148
aggtgctgagttcaggtgcttgatctctcaggcacgacggcgggtgctagctgcagatcaagctgatttactcgtatgagactggtgacaaggaatttaattggttatccccacaggatcctattgtgaaattggatgtagatcgtcccatcatagggtaaagttgatgcgttgtttgtcttttggaaacaaggaaacgatattggaatggagctcagctccctttcaccgacctgaacaatctgctgtcgtagtaaagtcggtgctgttcgtatcactattcttttttgttgtaagccatatcagtcgttgacgtattcatggtacttccaaaaataaaaaaaaaaaaaaa

SEQ ID NO: 32175 - DNA, 242 bp, Setaria italica
  Peptide Sequence Number=SeqID_98149
tacagatatgaactgcaaagcttcttgccaagtaaattccacatgaaaacctagaccaatatccacaaaaatgtgccttgtatctggtacttctgcctgcatgtacacttccgagccaagattgaccatggaccgcatgctggtgaccccattcttctccaaattttcaatgttcctcttcaaatccaagaaggtcttctgctgcccgaacaccttgtcgcgctggttgatggcgttggcga

SEQ ID NO: 32176 - DNA, 313 bp, Setaria italica
  Peptide Sequence Number=SeqID_98150
accaataccaaccgctccaagccaagctccaccccacgttgaactccgcctgctccggccgcgccgaccgcttcttcgtgccgccgcagctccgaagctgctgcgagaacgcgtaggcgagggctctctcgcgccgcgtcgtcgcctcgatccggctctggatcctcatcctcgacacgttggagctcaccgtgctgtcgtcccactcctccttcactctgaacgctggcagcggcggcggccgcgacttctggcctcccccgctgctgcaccgacgcgctgtcctccccgcttagccggaggttgctcaccg

SEQ ID NO: 32177 - DNA, 771 bp, Setaria italica
  Peptide Sequence Number=SeqID_98151
tccaatgacttttttcagtttcgttgaatttgggagctgggaagttctagtgcagactgcagacctcatgcacctgttacttcgtggcacggtcgagcgcgcctcaaacaagaacaggctcgctccaaacgacgaggatgaaagcaaagattgacatggtagatccaggatgccttggttttattctgttcttgattcttccagtaatcactatattgatcagaagaacgatgccgatggttcttgtttccaccatgttccaaatctctgcctgcccgtgtgacttcgtactgccaatattcactccattgcaggcagcgagcaagctaactcgccacagaatcacccgagagttcaggctgctagcctgctacgctactgcgagaggtggcacatgcgcgggtgcagcgggcaccagagcggctggatgggctcggcgcggatgccgcgcgccaccatgcggtacctccactcgttgagccgggccgtcgcgttggcgtagcgcttcctcccgctggagtccttgttcccggcccagagcgtctcggcggcggcggcggccctgggccagagccttccgtcgagcacggcggcgtccgactgctccgaccacagcgccacctcgccacccagcacccgcgtggcctcgtcctccgtcagcccgtgcagtatgtcgtagtcgtagatgcgctgccacgtcttgaagggcgcgcaccaggacccgccggtgccgcccgggtcgttgaacagcggcgtgccctcgcgctcctt

SEQ ID NO: 32178 - DNA, 570 bp, Setaria italica
  Peptide Sequence Number=SeqID_98152
ggctaccagatggggcacctccacgtcggcttcatcaccaccgccaacgtcctcttcgcacgcaccctccgcaggggcgaggtcttcgtcttccccgtggcctcgtccacttccagaggaacaacggacgcaccccgccgccgtcgtctcggccttcaacagccagctgccgggcacgcaggccctcgccgcgacgctcttcggcgcctcgccgccggtgccggacgatgtgctggcaagggcgttccagatcgacgccggcctcgtcgaggccatcaaggccaggttcccacccatgtagacacgcgcatgcagccatgcatgcatgcagatggtgatttcgagttccgatcgatacattgtgtgctagctgtaataaagtgtgatgggtcaaataattggttgggtcgtttggtgtggttatgcatggtctgatctcgacacttcactgttgttgcttttcaatttcggcgtgaaccatttgtgtgaaggtgtggtatgtgtatctgtgaactcaaggaaatgaatgctctgattgcctcttagttggtttttttgttcttgtattaa

SEQ ID NO: 32179 - DNA, 497 bp, Setaria italica
  Peptide Sequence Number=SeqID_98153
aatacccgatccatccttacgtgcttaactgcctagtacaggctacagctcagtagctcactcgtgcaaatggcgcacaagctcccgtccactctcatcgccgccttcgccgtcctcctggccctcgcggcgccgctggtcgtcgtcgccggggaccccgacatgctccaggacatctgcgtcgccgactaccattccctcaagggcccactgaggctgaacgggttcccgtgcaagagggcggagaacgtgacggcgcacgacttctcctccggcctgctggcgaagcccggcaacaccaccgacaacgcggcggggtcggcggtgacggcggcgaacgtggagatggtcccggggctcaacaccctgggcgtgtccatggcgcgcatcgacttcgcgccgtggggcgtcaacccgccgcacacccacccgcgcgccaccgagatcatcttcgtgctccgcggctccctccacgtcggcttcatcaccaccgccta

SEQ ID NO: 32180 - DNA, 1164 bp, Setaria italica
  Peptide Sequence Number=SeqID_98154
ccagccactactactacttgcaagtgttaactgcaacccacagctagctggctcgctgctgctcacaagaaccagttggtcatcgtcgggcaagtgaatcctagctagttgttgaccagcatggccaagctcgccgccacttccctcctcgccgtcgtcctgcttgcgctcgccgccccctcactcgccggcgaccccgacatgctccaggacatctgtgtcgccgactacaaatccctccagggcccactgaggctgaacgggttcccgtgcaagaggccggagaacgtgacggcggacgacttcttctccggcctgctggcgaaccccggcaacacgggcaacgcggtgggttcagcggtgacggcggcgaacgtggagaagctcccggggctcaacaccctgggcgtgtccatggcgcgcatcgacttcgccccgtggggcatcaacccgccgcacacgcacccgcgcgccaccgagatcatcttcgtcctccagggatccctcgacgtcgggttcgtcaccaccgccaacaagctctacgcccgcaccgtctgcaggggcgaggccttcgtcttcccgcgcggcctcgtgcactaccagaggaacaacggaaacaccccggccgcggtcatatcggcgttcaacagccagctgccgggcacgcagtccgtcgccgagacgctcttcggcgcctcgccggcggtgtccaccgacgtcctggccagaacgttccagatcgacggcggcctcgtggagggcatcaagtccaagttcccgccaaagtaggcgcgcgcgcgcgcgccgccgtgcagttgatgactccattccgatacattgcgctttaattttgattcatttcatactcgtgcagtacatcatcacgttaatgtcaattggttgggttgtttcgtgtggtcatgctcatgcatggcctcgagccctcgacactttcactgtttgttgcttttcaacttctgagtcagccatttgtctaaggtactaaggtgtggtatgtataatgtatctctgtccactcgagaaaatggcattgtctctctattatagatgttcttttttgtcacagctaatattcatatgataaacctgtcaatgggcccttgataatatttagaatttggttcgtctaaattttgttaaaaa

SEQ ID NO: 32181 - DNA, 237 bp, Setaria italica
  Peptide Sequence Number=SeqID_98155
acaatcacaagatgaggaagctttagtcaatgctgcattaaacctgaatatggtgcttatcagtaaagacagcagtactgctgaggtttgtttcaatgggtcaaagtttcggtacgagttgttggaaattttggaattcacttctgatcgcaaaagaatgtctgtagtggtaaaggaagggcagactgggaagatccttcttttatctaaaggtgccgagggagaatagcttcatcg

SEQ ID NO: 32182 - DNA, 269 bp, Setaria italica
  Peptide Sequence Number=SeqID_98156
tagcccggggcgagcggcggcgccaggcgcgcgcgcatgtcgatcatggagtagagccgcgtctcggcgtcgtccggcagcgaccgcgcccggcacgcgcactgccacaccagcgccaccaccgcgcggaacgtggacgcccccgcgcaccgcgccttgagcgccgtcacctgcgccttggtcagcgtgatgatggcgctcgcgtaggtggaggacggtgccgtgaccgcgtgcgccggcgccggctcggggcttgtactccggggtgg

SEQ ID NO: 32183 - DNA, 1617 bp, Setaria italica
  Peptide Sequence Number=SeqID_98157
tgtagtactagtagacctatatctagtcgccaaatgctaagttatgtttcgttcttcaaagacaatagctttgcaagacttgaattggaggcacgagaattactcgagctgttatcggataagctgcaggaacaggttggactggtgaaatctgaacatggtatcctccacccaactgaaacaatgtacgccaagcttgttaaagcttttctggaagcagataagatcagtgcattggcttcgtttcttgtgaaagcaagcaaagaagattctcctgtgtctgttgaaaggtcctttgttgttcaagtgataaatgcgtgcatttgtcttgggttattagagcaagcgcatgatcttctggatgaaatgagattctctgggattagagttggttcatccatctattcatcactcctaaaagcctattgcaaagagggccaacatgaagatgacataactgcacttttgaaggatgctcaacaagcaggcattcagcttgacgcaagctgctatgaggatttgatacaatctagggcgagtcacagtaacaccccaggtgctctccatctttttaaagaattgaagaattcaaatgttttgaaatctggtcacaaggaatttcagactttagtgcaaggctctgatgaaaatgaagctgttttgacgaccaggctagtggaggaagtgagaagtggtcatatggttgatcatgctgttcatgactggaataatgtcatccatttcttctgcaagaagagattgatgcatgatgctcacagtgcactgaacaagatgcgagcttctggccatgtgccaaatgcacaaacttttcattctttaatcactgcttatgctgccattggtggcaaatatgtggaggtgacagatttgtggggtgaaatgaaagttctggctggttcaagctctatgaagtttgatcaggagctcttggactctctgttgtattgctttgtgagaggtggtttcttccttcgagccatggaagttatagagatgatggagaaaagcgatatgtttatagacaaatacaagtacaagtccttgtggcttaaatatcacaggacattgtacaaaggtaaggctcccaaggtgcaaacagaagcacagctaaaaaggagagaagcagcaatacatttcaagaaatggattgggttgacatgagagcataagattcaactcatactctatgatatttgatcaggagctcttttatcatctgctatgtggatagatctttacaaattcctgaaaatcataatcattgagttcattagaaggcacatatatgaagtctactttgcttcaaacagaagtaccgaagttgtaatgggctaatggctgaaacaataacttcctctacgtggtgcaagggtgcttgttgataaagatggtagtttggtacaaggggttgattgataacaaaggtatttatttgtacgcttgctacccagctcacactttcaatgcaatgtatcatcctttaggtgacatgtttatgcatcagtatgttataaatgttttgctgatggtttctaatccagtctattatttctttggacaataatcatttagtaccgcactaaatctttatctata

SEQ ID NO: 32184 - DNA, 328 bp, Setaria italica
  Peptide Sequence Number=SeqID_98158
ctgcactgaatctcctgtggccaccaccatcatcagctccaagttcatgttgtgcacccaatgctcctgccgcaatccaccaccaaattgtcctcctgcggcaatgccaggcgcctggccaccccagatttgtgcgcgagatccgcgcccgcatgcagcagcttacccgcctcgcgatccccgccaccgccggggtcgagccaccctcggctcctcgccgcattctgcggcgtctgcggcgaggtggatgtggtcggatctgagcccagctgcggagagggctgcggcctccgcctgatcctcatggatgagagagagagagagagat

SEQ ID NO: 32185 - DNA, 335 bp, Setaria italica
  Peptide Sequence Number=SeqID_98159
ggagcgagtacccgcggccgctggtcttccacgacggccgcctcgtccgccggccggagccgctcgctttcctcgccatcctcctgtgggtccccctcggcgtggtcctctccgtgatgcgcctcctcctcggcttcctcccccacggcgccggcctcctcattgccgccgccaccggctttcggataagaggcggcgggctcaccggagcgacggggccagcgggccgccgccggggcacattgttcgcgtgcaaccaccagacgcttatggacccagtgatcctctcgacggtgctccggcggaaggtgacggcggtgacgtacagcctcgcc

SEQ ID NO: 32186 - DNA, 261 bp, Setaria italica
  Peptide Sequence Number=SeqID_98160
tggtaaagcagtccaaatgtatgcacgcctccatgaagtatccacccaatttgcgtccaatacttccaatttcagtgtactcgtcacaatttcattacatatagccaatatccatgtagatgtggatccggccccagccctttcccctacggtcccatcaagttgtttgccataaagaaaaaagttttatttgctcaatcgatctacaagattgatttcagtgtctggatggatcgatgctaaattaacttagctttacgg

SEQ ID NO: 32187 - DNA, 644 bp, Setaria italica
  Peptide Sequence Number=SeqID_98161
aatagatgctcctgatggcatctcaacaacaaaggcacctatatgctgagtgataccaccagcttccttggctgcaacagatgtttgccggagagcatccaaaagcgatgttttaccatggtcaacatggcccattaccgttacaacagcaggacgtggttcatttttgccttcaccagtgtgcattcttctggtattaacaccaagttccatagcaaccaactcagcaagatcaatgctgatagagtcaaactctgattcaaccttttcaccaagatcctgccagtatgccttgaagtgtactaatatatgcaccggttcgtttagagaggtcaagcaatgtcatcccgtcaaaaatctcaacagttttatctggtgatttggtagctatcttcggttttggtgcaacataaggtgcttctacaggaggttgtgttctattttctctcttcactcgcttctcctttttaggagctttcagccctacaacgtcctcctttttccgactccatgctaacatataaactcctgcatgaaaattcctgataatgaaatggttagagggcacgcacctagcagcatgattgggcctctcactgcggtagaactgtgccagctttccaactgctccatcggagaaatgc

SEQ ID NO: 32188 - DNA, 397 bp, Setaria italica
  Peptide Sequence Number=SeqID_98162
taactaccgaactacaatagtagaagtaagtacctaattcaaggtctgagtgcagaaagtttataaagataattcaagagcgggttttggactcagattcaggtgatatagatactggtgggtttgctcttacaggtgctcgaaaggttggcagacaagcagttgatggatattcttcatttagtccaaccgaatcctcacccgcaacttcaagtcttcaaatgcatcgctgtgataatagcgttgctgtgggcacaattccaaaattagctgataccgaccaaagccctttcatccagaattctaagaacatacagcctgttctcaaacgaaattactctgttagagaggatgcttatggggaacttcgaagagttagccaaagatcaatggaagt

SEQ ID NO: 32189 - DNA, 325 bp, Setaria italica
  Peptide Sequence Number=SeqID_98163
ccataagcgcgcatcaacaaacaagagcctcgacctcccgcggcgtacctctcctctccatctctcttctcgcctcccgcggcgcccgggttcccacggctggaggagctgcggcgaggcctctgcctgtgcacgcgacggccggcggctggtcgtcggagccgcgtgccgactgcggagaggaggcgacgtcaggacgagatccttggatgataagaaagtcaatctccttcgtcctgcagagactctgatatcgccatcgaagcacacgctggatctccctggctggcaccatcatgctgcagtacctggacttctctcatgc

SEQ ID NO: 32190 - DNA, 247 bp, Setaria italica
  Peptide Sequence Number=SeqID_98164
gttgcacttgcctccgagtacagtgtagtcaatcatctgttcagaggaaggtaaagaaaaactcaaattagcgatgcacatcaaaagcactagctaacagaaactaacagcaagcattctgctcaaagaaccaaattccgtttaagtgtctactattcattaataactggcagggcagtttacattcaactgcagagcttaataatcataagctctgctcttgttttaactgcaattcacggttcgt

SEQ ID NO: 32191 - DNA, 287 bp, Setaria italica
  Peptide Sequence Number=SeqID_98165
ctgctcgatcctgcgctgcagcgccgcgttgtgcacccacgacagcgtgttgagctccttgatgcagccggtccggccgccgtacatccccggcggcttcgggaacatggacaggtacatcgggaagcagccggtgggcatcgtccccggcaccaccaggtccacggcgccctccgcgatcagcttctcgacaccccggccgatggagtcgacgatgtgcgggaccagggcgtgcacctccgatagcggccggaacgcgaacagcgtcgagccgtagtcgttgcccg

SEQ ID NO: 32192 - DNA, 357 bp, Setaria italica
  Peptide Sequence Number=SeqID_98166
gcggccgcaggtccgcggaggggagcgccccgccgaggtcgaccgacttgatgctcagcgacacgacgtcgccgcgcgcgtcgcacgacacgctgagccaccggcacggggtcgcgtcgccggcgttccacgagtccagcgcgccgcgcgtcgcgttcgtggacgccttccatcgcagcagcgcctggccctgctcgttgacaccgtggcacggcgcgagcagcgccggggaggagaagcacaggaggagcgcgaggagcctcgccgcgatggtggcgcgcaaccgtggaggcattggtgtggagggagtgggcgagggccggggtcagccgaggggcctggagcggtggcacctcc

SEQ ID NO: 32193 - DNA, 1311 bp, Setaria italica
  Peptide Sequence Number=SeqID_98167
ggcgagcgcggcggcgacgatgccggccacgagccccgccttggcgccgctcttcttgctgtgggcctggtcgggcacgatgcccacggccagcgcctggttctggcagaacagggacgggtgctgccagccggcggcggcggcggcggacaggcagttggacgccgcggcgactgcgggcttgcgcgggccggcggctccggtcaagcaggacgggaggctgccggtgaggaggttggacgacacgtcgacgaaccggaggttctcgccgcaggacatgttggcggcgagcaggccggtgaagcggttcccggcgatgctgaggtactcgatggacggcagcgcgagcagcgccggcgggaacgggccaacgaaccggttcctcgacacgtcgaggtgctcgaggaggtagaaggaggcgagctcgccggggagcccgtcgccgaagcggttgccgctgagcacgacgctggccaccttcctccccagacgcgggaacgccggcccgagcgagttgttggcgaggtcgaccacctgcaggttcttgagcgcgctgaggtccggcacgccgccggtgaggttgttggacgcgagcaccagcgacctcagcgagcccatgtccctgacggactccggcaggggcccctgcagcgagttgttgcggaggctgagcacggccagcgacggcagcctgccgagccagccggggagctcgccggagagcatgttgtcgtcggcgatgaaggtctggaggttgtcgagccgggacaggccctccgggagcgcgccgtagaggtagttgccgctgacgttgacgatctccagcgacgccagccgcgacaccttccccggcagcgggccccacaggccgaggccggtgagcgtgagcacccggaggtcgggcagcctcgtcagcgtcgtgaagaaggcgtcgatgctgaaggtcttgggcagcggcggcgcgccgccggggccgatgatgtggagctgcgtgacgctgtcaccgtagcactcgacgaaggcggaggccgtcttgtagtcgccgccgtagcagaagtcggtctggttgccccatgtgctgagcacggccgggtagttgagcagctgctggatcttgagcagcgaccatgtctgcgacgactgcagctgcgtggactcaggcaccattgcgagcagcaatggcagaaagatgagcagaggatgcctgcaacttcctctagccattcctggacctcgcttagcttgccacaaagatttcttcctcttttcttgagaaaaaatgccgaaaatttcttcagccttctgaagatt

SEQ ID NO: 32194 - DNA, 1695 bp, Setaria italica
  Peptide Sequence Number=SeqID_98168
gccgcctcctcccgctcttcctccgccgcggcgccccgccgcccgcgcgctctccacggccgccgcgcccgcggcggcgttcccctcggaggatgaagaggagtccgtcaccgtcaagggcgtgcgcatttcgggccgcccgctctacatggacatgcaggcgacgacccccgtggacccgcgcgtgctcgacgccatgctccccttcaacctctcccgctacgggaacccgcactcccgcacccacctctacggctgggagtccgacgccgccgtcgaggaggcccgcgcccgcgtcgcctccctcgtcggcgccgacccgcgtgagatcttcttcacctccggcgccaccgagtgcaacaacatcgccgtcaagggcgttatgcgcttctaccgcgaccgccgccgccacgtcatcaccacgcagaccgagcacaagtgcgtcctcgactcctgccgctacctgcagcaggaggggttcgaggtcacctacctccccgtccgcagcgacgggctcgtcgacctcgcgcagctcgaggacgccatccgccccgacacggggctcgtctccgtcatggccgtcaacaacgagatcggcgtcgtgcagccgctcgaggagattgggcgcatctgcaaggagaaaggcgtgccgttccacaccgatgccgcccaggcgctggggaagatcccgattgatgtgaacaggatggggattgggctcatgtctctctcggggcacaagatttacggccccaagggcgtgggggcgctctaccttcgccggcgtccgcgtatcagggtggagccgcagatgagtggtggtgggcaggagcgtggcatacgcagtggcacggtgcctacaccgcttgttgttggatttggtgctgcctgtgagattgcggctcaggagatggattacgaccataggtgggtcaatgctctgcagcagaggctgctcgatggcatccgtgctcaagtcgatgaggttgtcatcaatggaagcatggagcaccgttacccaggcaacctcaacttgtcatttgcatatgtggagggggagagcttgctgatggggctgaaggaggtggctgtgtcgagcggtagtgcctgcactagtgccagcttggagccctcatacgtgctgcgggctctcggggtggaggaggacatggcgcacacctcaattcgatttggtattggccgctttaccactgaggaagaggttgacagagcaattgagctcactgtgcgtcaggtcaaaaaactccgtgatatgagcccactctatgagctggccaaggctggtattgacctcaagagcattgagtggtctcagcactgacacagttttcatgacaatcagtcacctgaaagtgctgtagatgtacacgacggatcgcttatgcttaatgtatggtacggtgaagatattccagttggtggaatcatttcgtacctctgtttagactattacatgattcacatcatgttatacaggaacaatccatcgtttggctctcagacgggctgagatgtattctggagggttagctatgttttctgtaaggtagagtatcttgacacaaaataaggatacttcaaatacttggtaatgtatcatctgaaatacagtttgaagttgtgagaagtgaccgtgctgtaaatatattttggtgctgatataaattgctgtta

SEQ ID NO: 32195 - DNA, 373 bp, Setaria italica
  Peptide Sequence Number=SeqID_98169
ctcgtcgtggaggacctcaagtgggcggccgagttctgggccggccacgtccagagcgggcggagagggtactactgctccgtcgagcacgtcgtcaccgagctgcgcgccctggcgtgcggcggcggcggcctctgctggctcctcgggtttgggacgtaccagggctacatgaagtgccgggcggggcagccgtcgctggagagcctgttggggctccagacgctcaccgtgcccgccggcagcctcgcgctgagcctcacctgcgccttcgacgacagcgctctaggcacggtcaatcagtccatgaaagcgggacctgacacgaatgggaacgggcggcgtcttgctggccgctttggcggcaggccag

SEQ ID NO: 32196 - DNA, 431 bp, Setaria italica
  Peptide Sequence Number=SeqID_98170
cttataatctatagagactacctagtaaccatgattatgttgtaacttgtaactgactgcatctcctaaaggcgctttgtatttaccaggtaaaaaaccacgtaggtaaatatcttgttggccttccagttcgtggatatcattctttatgaatttgtggttcgcggccagacgaacaatgataataaatttgtgaaccctgtcgaaactagctgctagaaaagtttaactattcctttgcttgcagttgctcatagcatcctactatctccatgcgaaaactgcctgtcagccgaacacagtccaggctctacatgttgtgatcattgacgatgtgggtcatgattacgttttaagaggagctgagatcacgccaacaaaaaggaaaaaaccttggtgccacatctaagctttacatggtcagcattctg

SEQ ID NO: 32197 - DNA, 950 bp, Setaria italica
  Peptide Sequence Number=SeqID_98171
atggttgataccttgcctacatttctattttgcatataagagctaccttgttttgcagttgtaggttgcgatcaatttttttgttcatacttagttgtacagtttttttttagggcaagttgtacagtttttctttagcagaaaaatgtagttggaagtagctgctaactgctggaagctacatccacatcttagatatacagtttatgttcagagcttctagaagttccatcacatcttaggtacatagttttttcttgagcagatgaggtcccttgaatagttttatttcttctattatacaacttttatttcttcctgtttatatggtttttgttatggttggaaacaatgattcctcaactctgtaatggcattactattcctcaactcgatgttttctgtggcttctctctttcctaacctctggactttgctaaactagatttgctcatattgatttagtgaataattggaagctgtgaacataaattgaccctgtatgttactttcgtaccagagctcagttacatttgaggcacagatctaaaaataaattaacccgaaactctgtaacctatagcctatgggtcttataatctatagagactacctagtaaccatgattatgttgtaacttgtaactgactgcatctcctaaggcgctttgtatttaccaggtaaaaaccacgtaggtaaatatcttgttggccttccagttcgtggatatcatttctttatgaatttgtggttcgcggccagacgaacaatgataataaatttgtgaaccctgtcgaaactagctgctagaaaagtttaactattcctttgcttgcagttgctcatagcatcctactatctccatgcgaaaactgcctgtcagccgaacactagttcctaggtcttcttactattgtttgttgtattctatttgtacgtattgttgggtt

SEQ ID NO: 32198 - DNA, 329 bp, Setaria italica
  Peptide Sequence Number=SeqID_98172
aagggttacaagaagaaactgggttgggggaagagcaaatggctgaatgagcaatggcgtcaagaaacggccagttgtttgaggagcggagcctaatggcttctggaatggcagggtttggatcctcctcgaagcaaaaagaacagagtacttcagaggacggctctaatttggcagataaactaatggcacctgggatttcacgaactctgacgagaagtcattgcagatttctagatgctgattaggcgatcagctaactgaccattgacgaaaaaagagggggagagggagagcgtaccgatggcagggagaggtcctctgcaaat

SEQ ID NO: 32199 - DNA, 392 bp, Setaria italica
  Peptide Sequence Number=SeqID_98173
caataggaagaacagaagatactttactttgtgaattgaatactgagcatatggggtcagctataagccatcccttgtacttgatcagtaatgttgatattacgacaccaacgcttcccattgtgtcagctaggacatgcaagaagattccttccatgttgtgatcaatgtgatgccggtgttctgacttcttatggtttccagattctgatgagctcagtactgcttttgaagagtgaccttctgcgccgtgagaatgcatattgctaagaggaatctcaagaagctgttggtcaacaccaatactgctgcaattttgatgagcatggtctccactctgatggcaatgtcctgaatggtcatggtgatgatgctcatgctcatggccatgg

SEQ ID NO: 32200 - DNA, 1033 bp, Setaria italica
  misc_feature (1023)..(1023): n is a, c, g, or t
  Peptide Sequence Number=SeqID_98174
agcctttgccgagtcgatcaatgggtaagacttctccggcagatttgtcatggacaggctctgccccttggcctttgtgtggttgaagacgatgtaggacgggaactcgcggtccatggtgctggcgccggtggtgaagagccacggcgcgaggttggaggcggtgccgaggccggggcccgagttgccagcggagcagacgacggcgatgccgcggcggacggcgtggaaggacccgatggcggatgccgtcgtcgaagtagttgctggggtcgccgcccagggagagagacagcacgtgcacgccgtcgtggatggcggcgtcgaaggcagccaggatgtcggcgtcgaagcactcgctgccgttgattggcgggaagcacacgcggtaggccgccacgcgcgcgtgtggtgagccgccggacgccgtgccgttgccgaacccaaacacggaagccccgggcaccggcgagccggctgcggtggacagcgtgtgcgtgccgtggccgtccatgtcacgcggggtgttcatcgacgcattcaatatacccgctgccgaggcgtagcccttgttgaagtagcgtgcgccgatcagctttctgttacaagagaacttatcatcttggcctttgtcgcatgctcctttccattgggatggaactggtcccaggccatcatccctaaagctctctgattccggccacacaccggtgtcgaagttgccgatgatggtgtcggcgccgtacttcgccttcttccacgccccgcgtgggggacgccaccgggccggcgagcccgaggaactgccatgaccgggtcgtgtgcagcttgcggccacggttggggaacacggagatcacgccgggttgcctggcgatctcggcggcggtggcggcgtcgaggttggcggcgaagccgttgatgtgcttggtgtacgagtagaagatcgcatcccgcgccttctccttgtctccaccgaggacgccggcgaggagctcgtagtgggcgtcggcggcgtcccgntccagcgccg

SEQ ID NO: 32201 - DNA, 390 bp, Setaria italica
  Peptide Sequence Number=SeqID_98175
tcaatggagatcatctcgagctcctccagaatgctcctcacgcgctgatcatagtccaactccacctcctgggtggccacagcaggcgcggcactgccactcccctccgcagccgctgactctgacttctctgggacgtccgagtccaaatctatgatctcgggctgcgctcggagggggcgaggacgagccctccacggcctccccctcctcaatctctccctcctccttctccccgtccgaggcgtccacggcgtgctccacctcgtcctcgtccgcctccagggccgggtgcgccacgagcggcttcttctgcacggcctgcagccacgcgaagctgtggaacgcctgcccgtagctccgcgccatgtaccccatggccggcgggcc

SEQ ID NO: 32202 - DNA, 254 bp, Setaria italica
  Peptide Sequence Number=SeqID_98176
ctcccgctgcggatgtcctcggccaagctggcgggccaggaccccgtccgcggtcgcggggagtggctggtgttcaccaagggcaagggggtacggaattacgtcgaccagctggcgcgcgtggtgccgctccgcggcggcgtggtgcgcacggcgctcgacatcggctgcggggttgcgagctttggggactacctgctgaactatggagtactgaccatgtccattgctcgtggagcacaagcgcagctcgg

SEQ ID NO: 32203 - DNA, 249 bp, Setaria italica
  Peptide Sequence Number=SeqID_98177
gaattctgctgcctcttgcatcgcaaggagcgcttggggggtccagcgcgttaccttgccctttgagtagaagtcagtgatctccctcaccagacgggcgaatggcgcaaaggggataagcagctcagtggatttctggtacttcctgatctctcgcagtgctactgtccctggcctccagcggtggggcttcttcaccctctgctgctgccgccccggcgtacctccagccgctgctccgtcccccgg

SEQ ID NO: 32204 - DNA, 297 bp, Setaria italica
  Peptide Sequence Number=SeqID_98178
cacaggttgaagtctgatctgcggttcatcttagtatgcccttttgtttcagttcattattatgctactttgtgtgtacctggcaaactagggtttgtacgcccaattatccttggttgtagtgttcattatcacaagccatgttagttctctacttgaatttggtcactgtgagttatcttttgcataatgttgtcagactggttgaatttttgtactttattatttaggtttcctgagtagttgatttacttttttttactgtttagaatctaaaagtatcattcagatagcaga

SEQ ID NO: 32205 - DNA, 271 bp, Setaria italica
  Peptide Sequence Number=SeqID_98179
gaaggacagcggcggcggcaagctggacttcggggtggggctcggcgccggactggtgagtggcgcgatcagcgggattctggcgggcgacatggtgtctgaggtggcggcttacaactacgggtaccgcgccgggttggccgacggcggagccggagccaccgtttacaagaagaattctcactatggtgttccccagggcaaagttgaaccaaaccggacgatggtgtgactcactagaataaaagaaaaacagtgcatgacatgataa

SEQ ID NO: 32206 - DNA, 495 bp, Setaria italica
  Peptide Sequence Number=SeqID_98180
cacagcctgtggaaaacggagcaaggaggatcactcaacagtgcagcatttgttacttgtggaaattgggatttgaagacgaagatccctgagcagtgcaaggtttcaaaaataaagctaccaacttatttatggaatggattaatttgaaggatatctacctcaacttctatagcagaagggtaactaagttgcacccgatgcttttatttatgagaggatcaagacttgataattttgtgcagttcatctttaaactgaagtgtgtaccttatagattactccctccattctcttttgatagggctatttgtaaaactaaaattttctcttttgatagtcctatttaagttgccacctcgtgtttgacacatatgactgttcgatttctgtgcagagtaactcttcgaaaaattaattggtgcatgtatatgataacatcaataccgaaggtcccaatagtaataatagctaacatggagtatataatgacat

SEQ ID NO: 32207 - DNA, 1422 bp, Setaria italica
  misc_feature (1367)..(1422): n is a, c, g, or t
  Peptide Sequence Number=SeqID_98181
taggaggagccggaaccggaaccacaccatttgggaatttgggatggcgctggctagggttccgccgtcttccgcagcccgcctcctcccctcctccctgctccaatccttcctccgccctttctcctcctcggcctctcccctccgcagttcccgccggagaagctctcccattgcggccgccttctcccacgctgtgagggaggggcaggtgatggaggcgcccattcccatctccaggcggccctggaagcccacgtgcttgtactacacccagggcaagtgcaccatgatgaatgatgctatgcatcttgagaagtttagtcacaatttgatgatggaccttccagtgaatgcatcagctgcagacaaagtgaagcctcaaaaactggattatcttttgattcttgatttggagggtaaggtcgaaattcttgaattcccggtcgtgatgattgatgctcaaagcatggaatttattgattcatttcacaggtttgtgcgtccaactgcaatgagtgagcaaagaataacagaatacatagaagggaaatatggaaagtttggggttgaccgtgtatggcatgacactgctatccctttcaaggaagtgctgcaagagtttgaggactggattggaaatcacagcctgtggaaaacggagcaaggaggatcactcaacagtgcagcatttgttacttgtggaaattgggatttgaagacgaagatccctgagcagtgcaaggtttcaaaaataaagctaccaacttattttatggaatggattaatttgaaggatatctacctcaacttctatagcagaagggcaactggaatgatgacaatgatgagggagcttcaaatgccaattgttggaagccaccatctcgggatagatgattcgaaaaatatagcaagagtggttcagcgcatgcttgctgacggtgctgtgatgcaaattactgcgaagaggcagtcagctactggcgatgtgaaatttcttttcaaggaccgaattaggtgattgaaaagtgtaacgttcccagttttttgacatggcgctgctgaatttgtgactggccatcaaatttcgacgctgttggctgctctggtgatattctatcgaagtttgaatggcatgttaaagttatggagcaaactgagaatgctgaaaagatttattgcgtggcaggtcaagtgttcttaagttaggattttctttttcttttgactattcaaattaattggtgagttatatatgcagataatgttgttcctgcggtggtcataaatgctgtactaaagtattgttggtgctagatattatttgcatttttgaactaacaggtccagaatgttgataaatnnnnnnnnnnnnnnnnnnnnnnnnnnnnnnnnnnnnnnnnnnnnnnnnnnnnnnnn

SEQ ID NO: 32208 - DNA, 462 bp, Setaria italica
  misc_feature (395)..(395): n is a, c, g, or t
  Peptide Sequence Number=SeqID_98182
aggggctccgcgcccgatttcctcccgcgtcgccgatccacccgccgcaggtgcgcagctcgccggttggagccggcaggatcctaccgcggtcgggaccttcgttccgagctggttcgtgttcatgcggatcggtttgatggggatgggagaaggctgtgtggggatcaggagtgtgtgggtgcctgggaggtgagagccgccggttggcactggaggattagggtttggttgaggaggggcgaaggaaatggggggcctttgctccaagggctcggcggtggacaagtcgcccagcgataccactctcggccccggcagggtggttgaccaccatgaccgtctggtggtgaaggaggagaagaaggctgtggtgggggaggctgctgccaagnggatgcaagagagcaacatcagcagcagcagctgcctgtatcggtgtcgcaaactgcagtgcctgga

SEQ ID NO: 32209 - DNA, 619 bp, Setaria italica
  misc_feature (532)..(532): n is a, c, g, or t
  Peptide Sequence Number=SeqID_98183
gtatttgtaacattgatcactgagctacaatacaaaacaaggtccaccggtatcttctttaaggacaaccaaccactccattacgaaaccaataatcaagtgccgtgtcattatttgtacttgtaactgataaattgatcactgagctataatacaaagaaagacccaccagtaccttccctaaggacaacctactactccattacgaaaccaataatcaagttccatgatggtgtaaaccacactcgccaagcatgctattcagaaaaacaagaagcaaccaatgtaagttttactaactaaactatttttctatttaacctagtaaggcatcaggcctcttgaatgacaattagctgttcagcatgtgggagtaaaaattaaaagccagctctgcacatattcgatgaacagaaggtccccccaaagtcatgtgcccatctccatccattccaattcacatctcagcatctgcattggtgtcgcaaacttcacataacttttaacatggtactctaatgtttgatcaacngaactccagccgatggtattagcaacaactgtgacaaacaataattcaatccgcttaagctgaatttcctctctgcatatacacgac

SEQ ID NO: 32210 - DNA, 278 bp, Setaria italica
  Peptide Sequence Number=SeqID_98184
gccgcggccggccatggcgaacgacggctcgccgggcgggcgcgccggcaggaggtgcggctcgctcacgcgcgtcgacctcctgaccctcctcctcgccgcggctctctgctccgcgtcctactgcctggggatatggcaacaacaagaccgacggcgccgcggacagtagggtcctcgggccgagcgcagcgttagccgtcggggcagcgtcgtcatgcgggggcgacgccgacgagccgctcgacttcgagacgcaccacgctgccgaacaccgg

SEQ ID NO: 32211 - DNA, 377 bp, Setaria italica
  Peptide Sequence Number=SeqID_98185
agaacggtagagtccgtgcatcactccctcaaagagtaaaataaataaaaaggcctccaccgaccaccttcaggtgtccatttccacatcctgcggacttggaggagtaggaggatgattcatgagttattatttcatacataatgaactttgatattattgttgctctataaaatattcccccttaaatgtacatgtattctcctctatgtattgtatatcttcatctttgctgttctattggactcattttgttggaacatgtaaatcttacttcttgaatttgaaaacttgacagccccgatctccaatgtatctcaacttactattcttcaaaatatgcagctaagatatttgcagttttggatattgttccc

SEQ ID NO: 32212 - DNA, 1828 bp, Setaria italica
  Peptide Sequence Number=SeqID_98186
cattggatcatgtgttggagaataattgcgcatgccagttacttgtggagtcgatggcgctgttcggatgcatgattctgctaatggaacacaaaattggcgggttgctgcgtgagaagctccttgtggcgcacctgcggtatgaccgctgttttaactacccaaatctggagcggatatgtgagctatgtcgccggcacgtgcctacccctgctacgtctgctacttttggttcatcaccatttagctcggatattatttctattcagaagcctgaggacctactcaggaggtttccttttcccgagcctgttgtggatgctgtcataacttgcttgaggaacggggatgtctacaacaacatccggttctatcctgatccgcagcatcgaactgcagctctgtccttgcaaggtggacatctgtatgtcatgttgttttattctgatgaccttctgcatagaggtttggttatgcgggagattgttgaccggttcttcaaagacaactgggtggttcccatattcttgcacttctcagtggatttacttgtctcttgggatgcatacaaagaagcaaagttatcattagtgtcctgcctttctcccacctccattcgtgatattagtctacaccattatacgaaggttactcattttctagctgatttggatattcacatacatgccataaacaaggaatatgtgcttgataattctctgagtcttctttctgtcattagagaatgtaatttcgctcttcgctggcttttgcttcaccgcatgaccagtgataagaaggcaagggacctggtgatctctgtagggtcatcgcagcaagtggatgaaggaaatctgttacaactcttattgaagactgccagacttgagtatgaggtgaagcaattgaatgttgaactattgaaaactagagaaagtatgtggtatgaaaagaggcatgatgctttggaatgtatcaaggacttgtctcagaactatcttggaacttgggctgcatcgtgcaaattcaagaacaagaccctgaaagactggctggagcacctgtcatcagagcttatttccctgaactatacttcaattggaagctgtggcaggacaattcatcgagtgctgtctacacttaaagatattgagatgctccaccagatcaaagagagcgtgcagataaagcaaggcttctccaaaatacagaagaatctccatgatatgataaaaatccttaacctaaaccaagaagcaataaatattttgtcagtgattactgatgctaaatatgcatgggtttaccttacattgtttgagacacttcttaagaagaatatcagtcaggatccatcggaaacaatatttttgcatacggtgtttcttaaatttcaatcatggctgagtgcacctctccaaagaaccaagcagtgtgaaagccccgatctccaatgtatctcaacttactattcttcaaaatatgcagctaagatatttgcagttttggatattgtcccggaaatattgcttaaaatttccactgctgtggattatgtaaatgcagagcagcctactcatccagtaaatcgcatcaatcaggaagcactgcaagagctcatgcagatggatcagcaactatgtcaagcacggcaggctgccaaattatgcattatttctgagggccttgggaacatgtcaaataactttgatgaccttatgaacctggtggatggctcaagcaggcgataaaaaaggactagcgattcagctagaaagaaactgaaatacttatcatcttatggtgatatggagagcaacctcaactc

SEQ ID NO: 32213 - DNA, 250 bp, Setaria italica
  Peptide Sequence Number=SeqID_98187
ataccgaacgtctccctctctccatcatccattcatccttccctctggtagtcgtctcgagttgttttccgtttggcgatcctcgaggattggttgcaaataaagtaaccatacgcggaccgctcgcgtgctcgatcgggagacgttcgatatcatcgtgatgatacagacagggtttcgccttctatggctggctcataaccgcacgagaagagagctcatcggggccgacaagtttgcatccgatcga

SEQ ID NO: 32214 - DNA, 514 bp, Setaria italica
  Peptide Sequence Number=SeqID_98188
ctggaagtacaatctacaagcaaaccgatcgagattatcgatgttcagtacacaatttattgactgtacaaacacgacgcaggagatacataagactagctgctgctagccggatactgaatctatgaatcatcgatacggaaaggatagtgctagtatttgatttaagcatgcgaaagatcgtctccgtcatcattggctaccgtggacgggtgggtgccggatgccggatgatgcaccatctccatggcgccaatgcccttctccttctgcatctcctggtaacgctcctccgcctcgggcatggcccccatgatagccttgaggcgcaggttcatgtcgtcgaggcgctcgtagacggcgtcgttggtgaacatgccctcgcacaccttgcagatggtgacccagctctccaccagcggcaggaagatgatcaccgccgaaccgtgccccagcgatcgcgatcgccgcctacctagtcggtctaggtaagtaattagtaattctaaccgta

SEQ ID NO: 32215 - DNA, 504 bp, Setaria italica
  Peptide Sequence Number=SeqID_98189
cgcaacatgagcactgcaccgcgccgcagaagccccgtcggaggcatgatcctgaaggcggcggatgaggttgccggcaggcggcctcgaactgcgtgttcccgttccggctgctcctcttctgacacgggagccccatacgagacgagcaacccgtaccgcccggccggtttcgcgcgctcgcgccgtccagatcctcgtggatgcacatggccggcgcccggcggcaggccagcgtgtagccatccgaatcgcagagatgtggcacggagatccatggcgctgggccgagcgccgccatcacgaaccaatacgtacggccgccgccgagcgacagaatccacctcagctgcagcttggaaccgttacccaccggcggcgggacggcgcggcgtgcagtggtgccacctccggcgaagacgcagcgcgaacggccgccggcggggaccgagaagcacgagtcgaacgatccagcttctacgtaccttcttgctcttgtacaag

SEQ ID NO: 32216 - DNA, 153 bp, Setaria italica
  Peptide Sequence Number=SeqID_98190
catcttcatgtcaaataatagtgcataagaatgcaatatcttttgccttatatcaattcgtgtctgacatacaggagtattcattatcatctaagcagcagttacgacataggtgtcgttttacatgcttgcataactaatgggaaaaaaatg

SEQ ID NO: 32217 - DNA, 262 bp, Setaria italica
  Peptide Sequence Number=SeqID_98191
cggtgtgtaccatcacaccatgaaagccatggagttgagggtggcgaagcgggtccagatgtccgcggtggcgagcctcggccgcgccatgatccggcggagctcctcgagcctggacaggagaagcacgatccggcggcacgggacgaggacgagcgtcagtgggatgaaccatacgcccaagtccaacaccagcatctctccgaccctccggccttccgctcacggagatggctctgcaaatcttcagggtgatgtgctt

SEQ ID NO: 32218 - DNA, 921 bp, Setaria italica
  misc_feature (866)..(921): n is a, c, g, or t
  Peptide Sequence Number=SeqID_98192
ccaatctggccaacatttcactatctgacatggatgcaagctctgtgatagagagagtttatgtcgtcgggggacacatcagagatagcgatcatgacaagggaaatgtgttcactgtcccatcgaacagatatgcagagtttaacatgttccttgatccactggcggcaaaaacagtcctagaatccagactggatatcacactcattcctcttaacgtgcaacggaaggttgcttcattcgaggatgtccttgcagctttggagcaacgcacgcagcatactcccgaatcaaggtttgttcatggtttgatctcgatgctacaggaacttcagaggaaacagaaattgtatcaccacatggacatatttctgggagaagttcttggtgcagtttacatggtccaaggatctgacttggaaccctctgtggaagcaaaggcagtaagcattgttgccaacacaaccgaaagcacggatgggcagattttggtcaggagaaagagtgcaaacgtactcaagatactgtataatttaaacaatggagtatactacaaccatttggcaaattcgttggtaaacaataaacaatctgccattgttgggagctttgaagagcaaaaagcaatttggagcaggccgcaaaaacaattcatggcggacataacaaaggatatgaaataagtaattctatgaagcaatactgttgcgaaaggattaagattagataccaaaaggtcaaaacagtttacagtatatttcaacagttcagattccaaaaatagaaagagatatctgacagagttacacgtaaagggaattaatacagaaaataaaatatatatttctccagaaaaaaaaaaaaannnnnnnnnnnnnnnnnnnnnnnnnnnnnnnnnnnnnnnnnnnnnnnnnnnnnnnn

SEQ ID NO: 32219 - DNA, 717 bp, Setaria italica
  Peptide Sequence Number=SeqID_98193
ttgttactgcagcaatatgctcagacataagctagggacatccgagtgcagacacacattataactactatgctactagtattttacagcaccatgatctcccggaatctacatgtcaggctacaagagaactctcatcagcaatcagctcagcgcttagtttttcaccacttcatacggtcagcgaggcgccattatcgtcgagcgaaaggcttagtatcatcgtagctgctttggggtgcccatgtttcagttgtttggtacaatgcagcagagctcccaaagcaagaagtaagcatgtcagtattcacaacaccagggctaagagcaatggctgccaatcctggaggcagctccttcgctaaggagcgtgtcaaaccttcaatcgcccactttgaagcacaataaggagcaacctctgcagcagcagatcttccccaaccagaggacagattgactataatcccgtgtctcttctctatcataagtggtacaaaatggcgaagcacatttgctgttcccttgatatttgtgtcaaccaccatatcaaaatcttcagctggaacattccatgtcttgttattcttgtttattgtaccggcattgtttactataacatctggaacttgcttcctttccacagcagcctttgccaactcagccacactgctgtcagacctgacgtccgcgacggtgaggaagtggcgcgatggcgcg

SEQ ID NO: 32220 - DNA, 808 bp, Setaria italica
  Peptide Sequence Number=SeqID_98194
ttttttttgtagaatcacaaaattggtgattgactaattgtcgcattgtaagtacatacttattacctagcccaaaacatatgcaaagatcaaagagtatgcacacgcacacaaacttccggagaacaggaacgacacacagtatctattttacagtttcttatttcggagggatttctgctactttttcactcacttgagcatccttagactctaggttggcggcttcagctcttttcattgcgatttctctttgcatttttatttgctcttgcataacttttgccatctccttcatttgcttttcttctttctccatctgcatatctgttatgatcttagcattcttgtcgattggtttgaaatattcatctatggcagtttcagcttcttcaagatgctgattgagagcttgcatctgctgaaccacttgacgaacctccgataagataactttttctggctgtttctgcagctcttccttcctagcttgggccatctcgaggcgcttctgcagctgcagcctgtaggaccggatcctcctctcctcgtagccggacatcacccgcacgatgaaccacgccttcctcccgaactgcaccagcttgtccatccttccgtgagcggtaaggtagcacgcgcccgccgacgcccagcaccttgggggagatcggccttgcgcgctaggaagaagagcgaggaaatgggggagccgatccaagtccgaacggatccccaccccacgccggcgcggtccaagaagagggcgggaggaagaggagggcggaattgccttgacgaggaaaaa

SEQ ID NO: 32221 - DNA, 2553 bp, Setaria italica
  Peptide Sequence Number=SeqID_98195
caactgtacacactgaattcctgtaccttttttttggttaatatcagtcatgtactgtaattgtgcaaatctaaataatcaggaatacttcatgataacctctggctatctgaagggagatcagttgttctagaacagagttgcagttgcatgaacagtacccataattacagtattgctgatccagaccgagtacaactctgactaacaatcagaaaaaggttaaatttaaaaatgaatttagtaatgggatgtaaatgcaagggcataacacacacaaaatgaagaatctttggaaaacttacagataaggatgtagctacaaactatgaatcacattgcacttgtcaaatactggctgactaccttataaacattgctaagcaggccttttacaaatcaagaaaagactacctagctatctgtgtcattatacatcccagccatcacctcggctgttaaagaaccttttcaaagttaaattcccatagattcctgaaaatatagaaaggcacttgctcctaatatggtaatgtgcctgtgtgtttcgactaatggccactcctgagaacttagacatgtcaattgcccaagctggttttacatactccactgtgctcgtcgagcttgcatttgcaaacaagaaatttaggagaacatcctcacaattaaagaaattatcaacaatctgccttcctatctcagcctctttgctccagtacctcttaaaggccagctcatggtccataaatgctgctcctgttagtatgatgttataacctccttgttgtcgaacatacctctcattgcggtattccagaggcctgccctcagcaaggcgtggatagtaaccaacaatcctatcagggtgctccctccaaaccttgaatccacgctctaagtcatcacacgtcatcatgatatcatcatcaagctccataacagctcttgtcttaatttctttgtctatgttaaatctgttgttcagtgtgttcttattttcaactctgatcctaacaggtaccatcgacttcaattcaccttgcgatgggggtcgacctttgttccagaccactacaatctccctcactgatgcacatttggagtaatgctccacaaacatcttcagattccaaagtcgggcatcatatgtcatggtcaacaatgtgaactgtgagtaactgcccttaacaggatatggatcttctgcaccattgccaccaaagatgtagtgagtcccaaaacaggttaggattactaatatcaatattattacagctatataaattctgcctttcccagctctgtaattaattcttccaccaataagagatcccaacttgttaacattgcatataagcaaaccaaatttatggcacagaaagacctgcttctcgatattgacggtgtcgctccgtttctcagtatgtggtaaataccatctgagtggtaagatgcactttattgcaccaattaagcgctacaagaagcagaactacaatggaagcaacaccataaaacatgtagcctatagtcaggcgatgaaccgagtcacctgagggcactttgtctccatccattactccaatccaaagctgccctaacggaagctgctggatatcaaggtgatgggacctcgccccatcccatgcatttcggcccttgaggggtttatcaagaacaaatgggaccgcaacttccttgtatagatttactgtcaggacttcaactttgaacactttgatactatagcaagatccaccaccacagtctttacctatgcgataaagattgccattgtaaatgaatggcctgcctccatttctggcactcggcctgttgtcattattattatgaactggattctgcttgtgtgggttccatggaccaagaggagagctactataccaaatacagagtcctctctgcttcaagccataagaacttatatctgatccaagaagccaataggtaccctggaaatttacgatgactgcatctacaagtggcctctccagaaggactttttctaatttccacttaaggggaaaatccacggcgtaatacaacataaggttccctttttgctgctttcaggcatcatgtatgtcttgttttcgtagctaaacacgtaaggataagaaaggtgccactcctcatccaatactacacccagctgctgccatgttgcaccagcgtctttgctaatggcagcagcaatgttcccttgtgatgtaacagggtctttcatctcgaaaaacatataaatggcatcccccctggatgaagagaaaggggttggcgacgaagctgctgggaaatccagccccctccaagtccgcgcacgtcaccactgggttcgccaccggccacgccgctccaccgccgctggagatcccccagtgttcgatgggcttgagggagaagggggagtccccgaggaatacgccggccgaccaggagccctcggcgtcggggcggcaccggcgggtggccggagggtgtgggaagtgggggaaggcggcgcgggagtaggcgagcgctgcgagaacg

SEQ ID NO: 32222 - DNA, 1522 bp, Setaria italica
  Peptide Sequence Number=SeqID_98196
gagagagaggagagagagagagggaagggaggatggctctgctgccgtgccagagcctgcccggcattggctgcggcagcatcgccctggcacgagcgagggtgcagcaatgtctggcagcggcgtcacacgcgccctttctgcctccactcctgcgcgccaatggcggcggcaggacgggccgttcccctgcctccgttaaggctggcaatgcgataggcttcggccggcggagacggagggacctgcgcgtcgtcgtcgcggaggcgagcgcggcggcggcggccaaggtcaccccggcgtcgcctggcggcgtcagcatcagcgacgtgctctggccttccgctggagcattcttggccatggcagtactggggaaaatggaccagatggtggcgttcaagggagtctccttgacgattgcgccccttggagcggtctgctgcgtgcttttcagcgctccagactcgcctgcagccaagaaatacaatatgttcgtcgcccagattggttgtgcagcattaggcgtattagccctttcgttgtttgggccaggctggttagcaagaggtgcagctctttctgcctgcatagcattcatgaccatcacaggcgcttcacatcctccaggtaaaactacgatgagaaatatgcagtctggttgtgttgcccaactgtttgtattttatctgtggcttcctgaactcttgttttaactgctgcttatatctgaattcttgcagctgcaagcttgcccctcttatttattgatggcccgaagtttcacaatttgcaattttggtatgcactttttcctggagctgcaggctgcgccgtcctttgcttgattcaagaggtggtggtttacctaaagaagaacttcaagttttgattcaagcagcatgacttgatggcttcttgtggcagtgattctactaattattcaatcatgtaccataaattacatgacctgcatttgcaagaagatgagaaaaatgtaggcttactgtcacttggttaaagaagaaagaagaccttccttgatactttgtactgatcaaagtgcagggtacaaacgtgaagacataccaatctctcattgaatgaagtctgacaactgtacacactgaattcctgaccttttttttggtaatatcagtcatgtactgtaattgtgcaaatctaaataatcaggaatacttcatgataacctctggctatctgaagggagatcagttgttacagaacagagttgcagttgcatgaacagtacccataattacagtattgctgatccagaccgagtacaactctgactaacaatcagaaaaaggttaaatttaaaaatgaatttagtaatgggatgtaaatgcaagggcataacacacacaaaatgaagaatctttgaaaaacttacagataaggatgtagctacaaactatgaatcacattgcacttgtcaaataactaggactagaactaaccttaataaaacaattagactaaagacaaggacctttta

SEQ ID NO: 32223 - DNA, 2646 bp, Setaria italica
  Peptide Sequence Number=SeqID_98197
tgcgcgcggtggcgcgcaagttcgccgaccagcctatccaggagaccgagccgggcgtctgggccgtcctcaccgccatctccaagaaggcccgcctccggccccagggaattaatattcttttgagtggtgaggagcactacctaggacgtggtcctcaacgccgcttccagatttctgatccacaaataagtacaaggcattgccggatatacaaggacactgtgttgggggagctgaaccgccatgagcctgtccctgttttcatcaaggacacaagctcgaatggcacttacatcaactggaaaaggctcaagaaaagttcatccccagtcaagcttaatcatggtgacgttatatcatttatatcagttcacaaagattcttcgtattcatttgtctaccgtgaagttaatgcaatcagttgcgtagagaatggggctaccattctcaaaaggaagtcagaggagggtggttctggaagcaagaggctaaagggtcttggtattggttctcttgatggtcctgtttcactcgatgatgtccggagactagaaaaatctaatgccgatctcagggaacaacttgaagcacatgttgtgacaatcgagactttgagaactgaaataaaagtggcccaagcgcagcatggaaaggaacttgaggagctgagagaaactacatcaacttcttatcttgatcaaactaaatctctccggttagcacttgaggagaaacaaaagcaacttgattcactcagtacatcaaatacagagttacagaattccattaaagacctggatgaaaggcttagtgcatctaagcaatcacgtgccgatgctggtgagataatttcgagccagaaagcaattatatgtgagcttgagggacagctaagtgaggagcgtaacttaagaagagaggagcgtgataaggctgtgcaggacatgaaatctgcattgcataaagtgcaagctgaggctcaagaagaaattaaaagacaggcggagtcttaccttagacaacaaagggaacaaaaagaagttattggcaaacttcaggaatcagaaaaagaaacccgtttgctggtggaaacattgaggtccaagctggaagatgctcgagataatcttgtaacatccgagaaaaaagtaagagagctggaagctcgacttcaagatgagcagctagtatcggctaacaatcaaaagaaatcagataatctggaaactgaactgaggaaactgaagaaagaacttgaaaatgagaaggctgctcgggaagaagcatgggcgaaggtttcagctcttgagcttgaaatagctgcaacaattagagatctatcaattgagaaacagaggtatcaaggagctagagaacgaattattttacgagagactcagctgcgtgctttctattcaactacagaagaaatctcttctctgtttgcaaaacagcaggagcagctgaaagctatgcagagaactttggaggatgaagagaactatgagaataccttaatgagtgttgatctcaataaagttccattggccactgatgatgcccatatgaaatcagtagggtgctcaaaaaatacagtggaagctccaagtgcgtcaacacagaatacccaagtaagtgaacatagttctagtgatgaagatgccaacatgactgagcagcatgctggtggtactgctgaaggtggcagcactcaaggtctagagtgctctagtccagaaaggtcagaggatagattaaggtctgattttcacggaaatcctgttcctacagctcctgagagggaggtaacagatactgagcaagttcctgagacagaaagtcaagctggtaatgttggttgcgatgaccaaagatgtgacaatatgggagagactatgccgcttgaagatgaagcgcagcctcaagaaaatgaggaagctaaagatggggaccagccacatgcaaatgaggatcctgttccaatccccaaagatggcattggccactgttctgaagataaacttgagtatgattgctccgagagcaaacgggaggatgctcatgctggagctattggaacagctgatctgttgacctcagaagttgctggaagctgggcagtggaaacagctccatctgtcaatggtgaaaacgaatcgcctaggagcgtggaagatgctggtgatgccgtggggcaggatgaggaagatggtggtagcatggcggcggatgctttgctaactctggtgaactcggagggccaagcggctgggagtcagaataatgctgaacatgccgtttccaaaataactgaccaccatcgtgtccttagtgccatgattgaaattgttgatcctgaattcaaaaaacaaatgtctagaagtggcggtggaaatgatgaaccaatgtctgatgccgagacggatgaaggcagcgaggaagttgatacagatgatgacagcgaggagcctatggttgaggattctgttgggtaggttaaaaggagtcgactttccttgtgaatagttagaactttttattcctgtacttttcgcatgtgaggttgtaccatggtgttgcatgtatgcattttattttccatttctttctaatttatatatatatatatatatatatatatat

SEQ ID NO: 32224 - DNA, 581 bp, Setaria italica
  Peptide Sequence Number=SeqID_98198
acaattaaacattccaattccattccacttcatcttcaaaaaaaaaataccattccacttgggaaacatataatagaactgtatcctgtgcagaagctactcgaattgccgatctgctggatttaccagaggaactctctgaattcttacgggttgatcgacgccatcgacagaaggtttgatgtacaaattgaacatgacgttggtgaatatcgtgaggataacaagtgccagtgtcgagaatgccacatatgttggagagaattccggcagttcatcagttgacccccggctgttatcatgtctcggtccaagtaaaggtctggaggaggaggtggcatcggtggccgcatcttgggctcgaccagcccctccagcagcgcgtcgagctccgccaaccgccgccgcgcctcctccggcgtctcgcccggcgccgccgactcctcgccccccttccccgacgacgagaagctgactaccttgcgacacgtcctccccctccgctcacgcaaggaccggggaagaaccgccaagaacccgcctcctccgacggcgctcgtggcgagcgggtggactggcag

SEQ ID NO: 32225 - DNA, 1132 bp, Setaria italica
  Peptide Sequence Number=SeqID_98199
gagggactggaccagggaatgccttccagcggctgtttgtctcatttcgtgcatccatttatggtttcctaaatgggtgcaggccccttctggaaattgacaaggctgacctaaaggggaagtatcttgggacgttgctatgtgcttcagctgttgatgctgatcacatgatgttccctctagcgtttggtattgttgattctgagagtgatgacaactggaggtggtttgtatcagaattgaggaagacgctcggagttaacacagataagatgcccatcttgacaatactatctgagaggaatccccaagtggtcaaagctgttgaagataacttccctactgctttccatggattttgcttgagatatgtgagtgagaattttcgtgatgagttcaagaatcctaaacttcttaaccttttttggagtgctgtttacaccctcacggcagcagaatttgacgcaaaggtaaatgaaatgatgcaagttcaagatgtgatgccatggttacaacgttttccaccaaatctgtgggcagttgctttctttgagggtattcgatatggccattttagtcttggaataactgagatattgtacaacttgtcccttgaatgtcatgagcttcccattgtgcaaaccatcgagcacatcaggcaccaactgacctgctggtttgctgaacgtcagaacttggcacaatcatacaactcagttcttgttccatcagctgagaaacttatttcagaagccatcaccgactcacgatgttatcaagtccttcgagcaaacaaggtggagtttgagattgtgtcatcggagcgaacaaacattgtggacactcaagctaggttttgctcatgccgtcgatggcaaatttatggcattccgtgtgcacatgctgctgctgcactgctttcatgtggtgaagatccccgcctctatgctcatgactgcttcagtgtaatgaagtaccgggaaacctactcccagccaatctatccgataccagacaggagccactggaacagttcatcgtctgggttacaaggtgtggtcagcagagcagatgtgatgcttagcccaccaaatatccggaggcctcctggtcgtcccaagatgaagattct

SEQ ID NO: 32226 - DNA, 512 bp, Setaria italica
  Peptide Sequence Number=SeqID_98200
tgtaagtgttggacttctcggttggaccaagcctgcttcctctccatcatctctatgcgcccagacaactctttaactacatctatcagcttagcttctgcacatgattcagagtctaataactgcaccagcaaattagaatgccccagggagagctgattaacttcagcatctaaggtttctggcaaattagagtgtccatccagaattgcgcatttgtcctcttgggcatacttacagctataagcatcgtttcttcagtctcagtaacattggcatacagataaggattccactgctgcgcaggcaaagctgcatgcccttctaacacccagttgaagctaagcacttttccctgcttatcagaatgttgttgctgtttcatttcaaccgcctggtctgatagttcatgctcctccctctctggtggtgtgtccccacaatccagatcatcaaaaccattagaagattcatcacctgagcttgcatgttccgcatccacatctcctttc

SEQ ID NO: 32227 - DNA, 691 bp, Setaria italica
  Peptide Sequence Number=SeqID_98201
ccatgaattatatgctgctatatgagcagatgcttgccgtttcacgggcccaggatgcaaaggtatactgtacacaatggtacagctcacgtgccgtagaaagaaaaaaaatgttgaagcaaaggtaagtacggccatacgggggctcacagttctgtgcctgccgtttggccccattcgggcattgctgtgccacggcatccgtgacatcacattggcgccaatgcgacgcacagcacaggtagctgcggacgcagacaagcagagatatttgtcgccgacgactatagactactaggctctgccagtttatggccgcgtccgctgcataggcgcgacacctttggagccttgtgcatgttgatcgatacggtggttcggccatcggggccattaagccatgtacgcgcgtaacgtgcgtgcacggtcggagatctgcgttttaatgcgttgctccgttctggtggcgcccgccgcccggatgaggcgcgcacgggcacggcgcggcggatccgccaaaagttctggtcgccgatcggcgatgccgggccgcaccgcacgccaactaacgtgcgggtgccgtctgctcggccttgcaggactacgggctgtcggttgcctactgccggagcacctacctcgtggacatcgtcgaggagtccgtcggccgggtgctcaagctcgactccat

SEQ ID NO: 32228 - DNA, 2238 bp, Setaria italica
  Peptide Sequence Number=SeqID_98202
tagcatgccgccaatgttaaaaccaaagggcatcgagatgcacatgtaaaaaatgaccgatttgcgggctcattgacaaacctgcttttcagtgtgtctgatttacccaatttagtgctagttcattcctctgtccagggccatgaagctagatctatagcagatgttgcactgaactaacactgcactagaaaataatgtagccaacggcgtctatttcgggtctgttccttgcatcggacgtcaatgtagcattttcagatggtctggacagcccaaccactccttcctgtcgagtgggatgccagtcgtcctcgccaataacctcacctcaatccttttcctatcatgcatggctgttcgcaactagaccagaacgggagaacgtactcacatagacagtccacttcgccggggatcgattgccaaccaatgatcaccgccatgaattatatgctgctatatgagcagatgcttgccgtttcacgggcccaggatgcaaaggtatactgtacacaatggtacagctcacgtgccgtagaaagaaaaaaaatgttgaagcaaaggtaagtacggccatacgggggctcacagttctgtgcctgccgtttggccccattcgggaattgctgtgccacggcatccgtgacatcacattggcgccaatgcgacgcacagcacaggtagctgcggacgcagacaagcagagatatttgtcgccgacgactatagactactaggctctgccagtttatggccgcgtccgctgcataggcgcgacacctttggagccttgtgcatgttgatcgatacggtggttcggccatcggggccattaagccatgtacgcgcgtaacgtgcgtgcacggtcggagatctgcgttttcttgcctttgtccgcggccgtcgcgtgctccctgctgcgcgcgtgcggcgccgccgcggcgagcaccggcacgctcggcctccgtcaccacaagcccgcgaagaagcacaacagcacgcggcacgggggtgggcgcccccggggaggcggcggcggtggcgcaggcagtcccggcaccggcatggcggcgtgcaacttattccagggaagctgggtgtacgacgactcgctgccgatgtacgacacggcggggtgccccttcgtggagccagagttcgactgccagaagtacggccgccccgacaagatgtacctcaagtaccggtggcgcccggcgtcctgcgagctcccgaggttcaacgggcaggacttcctgagccgatggaaggggaagaagatactgttcgtgggggactctctcagcctgaaccagtgggagtcgctggcgtgcatgctgcacgcggccgcgccggcctccaaggtcgcctacagccggggcaaccccgtatcaaccatcacgttccaggactacgggctgtcggttgcctactgccggagcacctacctcgtggacatcgtcgaggagtccgtcggccgggtgctcaagctcgactccatcaccggcggcgcgtggctcggcgccgacgtcctcgtcttcaacacgtggcactggtggacgcacaccggcaaggaccaaccgtgggactacgtgcaagacggagggcaggtgatgaaggacatggaccggctcacggccttctcaaaggggatgaccacatgggccaggtgggtcgactccaacgtcgacacctccaaaacaaaggtctatttccagggcatctccccgacccactacaacggagccgagtggggcgagggctcaaggaactgcgcgcagcagacgcagccgatcgcggggtccgcgtacccggcgggtcccgtcccggcgcaggccgcagtgagggccgcgctcagcggcatgtccaagccggtgtacctgctcgacgtgacgctgctgtcgcagctcaggcgggacggccacccgtccgcctacagcggcggacacccgggcaacgactgcagccactggtgcctcgccggcgtgcccgacacatggaaccagatactctacgcgtcgctccttgcataggataggacccgggggggaacagaaacacataccatatataccggtgattcataatcttgtatggggaatatttaaattggtgattcagtttttgttcggttcaaagtaatgtactatagatgatggattttctttgttcttcgataatatcatgaacagccaacaaattggcaacatgaaaacaaaaaaaaaaactaaaaag

SEQ ID NO: 32229 - DNA, 515 bp, Setaria italica
  Peptide Sequence Number=SeqID_98203
attagatcatatttagtcctcgtgattagagtccggtgtgacgtgctgcacccccgaagtaacgcacaaacctgttcagcaatccgcatggacattggacactgtcgcaacagctaaaagaaggccgcgtgccatccatccgaccgtctatttacatctcaagaacactcgtatcagtccactcattgccccctcgtactgatgaaagaaaaggattcgttataccaggctcccctccgggctccggcgtaccgacggccgcatcaatcccaaacaatggcagacttcttcggcgtgaccatctcgctgtgcggcgccagtcctcccctcgagacaggccgggcaggaggcgccaccggcgccaggtagttgcccacccggacgtacccgcgcgcgtcgtaccgcccggcatggtgtggcacggccaccggcgccgccgcgtactggtgctggtagtggtggaagctgttctgcagcacggccggcgtgcctcggcgagctgctcacgtaacgta

SEQ ID NO: 32230 - DNA, 226 bp, Setaria italica
  misc_feature (223)..(223): n is a, c, g, or t
  Peptide Sequence Number=SeqID_98204
caaggttactagtagacacgcaattatgctcttcaggcatcatgctaatcacaacagctggtaggcccggcatttgcgagccacaattctccagggacagcctgttgccttgcactcagctctatacctagtcttatcagtcttcactttgtgcacctgaaaccccttgtttattccatgctgtctcagtgccatcctgaagtcctccatcgtaaggaaaacnttc

SEQ ID NO: 32231 - DNA, 172 bp, Setaria italica
  Peptide Sequence Number=SeqID_98205
cacacaccagttaaagagccaagaaagagagaacaatctgaggctggcgggctgaactgtgcagcaatacctgctcccattcagccatctgggaatcaaagcattgtttcacagaattcggtgccaagaaaaaaacagtgaaatggagaggcatgcacataagcctgcatac

SEQ ID NO: 32232 - DNA, 335 bp, Setaria italica
  Peptide Sequence Number=SeqID_98206
ggcggcagcaataatctcctcctcatttacttctccttgttttccgtatgctatgttggcgtgaattgtgtcgttgaaaagcacaggttcttggctcaccaatcccatttggtctcttaaccaactcagttttagttttttgagctctgctccatctagtgagattgtgccagaatctggatcgtagaatcgctccagcaaagcaattattgttgacttaccactaccactctctccaacaagtgcaacagtctgcatatcacaattggtttcaaatccatcagtacaattgtagaggaaaatacgaacactaggattattaattatttaatttt

SEQ ID NO: 32233 - DNA, 2252 bp, Setaria italica
  Peptide Sequence Number=SeqID_98207
tgcccacaagagattcatgctttcccttttcagcaaccttaccatctttgatgactgcaatggtatctgctcctttaactgtggacaatcggtgtgccacgacaatggttgtcctgctgaccatcacttgatctagcgcatcttgaacgatgcgctccgcttcagcatccagggcacttgtggcctcgtcgagtagaagtattcttgggtccttcaggatggcccttgcaatagctacccgttgcttctgcccaccagagagctgcgttcctctctcgccgacggtagtgctgtatccctgaggcaagctagatatgaactcatgagcattggctgccttggcggcagcaataatctcctcctcatttacttctccttgttttccgtatgctatgttggcgtgaattgtgtcgttgaaaagcacaggttcttggctcaccaatcccatttggtctcttaaccaactcagttttagttttttgagctctgctccatctagtgagattgtgccagaatctggatcgtagaatcgctccagcaaagcaattattgttgacttaccactaccactctctccaacaagtgcaacagtctttctggctggaatccccaaagtaaagtcgctgagcacttggacatctgggcggaatgggtatttgaagtttacatgtctgaaatctaaattgccatcgactttttctagcattacaccctcatcactaatcgagttgattttaggcttcctgtctatgatagctagtatggaaacggtggattcttgggcttttgttgaatctgttgccattccacttgtttgggaaactccaaaagctgtgaaaatcaaagcgaagtaaactctgaagacgtctttaaaagttgatttgccttcatgtacaaacagtgcaccaacatagaaacaaagagcatatgcgagatacatcattaagtttgagaaactgaaaccaaggcctccaaccgttccgcttcgaatgccctgtttcatggaagcttcacatttttgagtgtatgatgtaattactctcttctctgcacagaaagatgctacggtacgaatacttccaattgcctcagttacgacttgacttgcatcttcactcaccaccttagcatcttcactgaaccctttcaagaatttcacttgaatataattttgtgagccgactacaggaatcacacatatgacgatcagtgtgagtttccagtcagaagcaaatgctatggaaaaacccgctattactgttactatgcactgcactagtatggccaagttatctccaacgaggcgtcggatgttcaaagcatcaatatagagcctggcaccaagtgctccactggagtttgaagggtcatcaaaccatgcaacttcttgatgcactatgctttggaaagtcaaagagcgaacacgctgaataagtttcccaccagccatcccaaatagaaaatattccagttggattgaaatcaaggaaatgactgcgaacagaaggcacatcaatgcccaaaacctagaatctttccgaagttggtgtggtggatagtagaaagtccttataccaccagacatcattatactgaacgatgggaacagaagaccatgcacgaaggcagctataacagctaataggagaaccggtgcttctggcttatttagtttaaatagtcgtctgattggtgctttcttagggaccttactatcaccagattcttcgtgttcctgtctgtctgtaataacttgtctgttcggttcatcagatccggataacccattggagtttttgaaggaatgctgccctctgttcctgggagaatctctggctattgattgttccaaagataaacttctacttttgtatattgaacctgaaccttcagtatttggaaccccatgcatttctttagtgtgtgcctgttgtagcctaatgagttgagaataagctccatcaggatccttaatcaactcgtcatggacacctcgttcaactactttcccttgatgaaccactgctatgcaatctgcgctcctgatggtgctcaggcggtgagcaacaatgagtgtagttctccctaccatgatcctatttagtgcttcttggactaccctttcagactctacatccaaagcacttgtagcttcatccaaaagaaggattttggattttaaggatcgctcttgcaatggcaatcctttgcttctcgcccccagaaagctgagcaccacgttggccaaccat

SEQ ID NO: 32234 - DNA, 456 bp, Setaria italica
  Peptide Sequence Number=SeqID_98208
ccctgcctctaggagacagaataggaaagcagacagacaacacaaacatatagctaagcaaaatcacctgaactagaacagtgtggagtttgccaactttgctccacttcaatgtaaatgagaaataatccaagtccactcttccaccaagattattccctgatactgctgcggctccagaaacagcaactgacactgacatgcaggcaactggaactatcttgccaaaatccaaaacattaactgtgacatctaagtcaactgtggcatcaattctgcccacactaatcctcacagagggaggtgaagttgcagaaatattcaatagcatactatcatctggatattttcgatacaattgaggaaccaaaaacctccagctagcagtgttcaaaagaactgatcaggaatcttgtctaccatcctttgcagcaaaccagccttaaagtagagagc

SEQ ID NO: 32235 - DNA, 1208 bp, Setaria italica
  misc_feature (1)..(65): n is a, c, g, or t
  Peptide Sequence Number=SeqID_98209
nnnnnnnnnnnnnnnnnnnnnnnnnnnnnnnnnnnnnnnnnnnnnnnnnnnnnnnnnnnnnnnnnagagaaaaaaaccaataggctgctgtattgactggtcatatcgtggttacaagcgaaattcaggtaaaattacagaaccaaaagattacatacaattgggcgtattatgtacatgcaccccgattgctgttcatctgaaaagagtgataggtgcagtacaactatccacttctcatgttcaaacctacatatatacattgcataattatatttacataaaaagatatgttacattgctacactactagttccatgatggttgccacgattttgttgaacctactttatacaagaaatcttccttgggtttggacaaggaacagggcctctggttcaatgaaggcgacatcgcagctaacaatcatttttgagtaagaagtgaggatatatgcatctctgacggagaaccccttgatgatgggcaactggaagccttgctcgagatatgagttcacatagggtacaaacaagtttttcagtaaaattcgcagcacagtctgaactagaacagtgtggagtttgccaactttgctccacttcaatgtaaatgagaaataatccaagtccactcttccaccaagattattccctgatactgctgcggctccagaaacagcaactgacactgacatgcaggcaaccacaacagtacagtttggaacaatcttgccaaaatccaaaacattaactgtgacatctaagtcaactgtggcatcaattctgcccacactaatcctcacagagggaggtgaagttgcagaaatattcaatagcatactatcatctggatattttcgatacaattgaggaaccaaaaacctccagctagcagtgttcaaaagaaactgatcaggaatcttgtctaccatcctttgcagcaaaccagccttaaagtagagagctgaaacagagttgaaaacatcttcatccaatgaaatccaaagcattttcgaggagctcccaagaggcaatgcaaatttgatgtccccaagaagcatgcctctcggaacagcagtttcatcagatggaataaataagccgtctatatcaaactcaacagaggatctcttgaatattggatcgttaacaaaagtaacattcattgcagcaacactatcaagatcgattttctttggaaggttt

SEQ ID NO: 32236 - DNA, 494 bp, Setaria italica
  Peptide Sequence Number=SeqID_98210
tctacatcggagagatgactgtgagggagacgcttgcattctcagcacgttgccagggtgttggctcccgctttgatatgctgactgagctatcgaggcgagagaaggcggccaatatcaagcctgatgctgatattgatgcattcatgaaggcatctgcaatgggcgggcaagaggccaatgtggtcactgactatattctgaagatattaggactagagatatgcgcggacacaatggtaggggatgagatgctcaggggcatatctggtggacaacgaaaacgtgttacaaccggcgagatgctggttggtccagccagggcgctttttatggatgagatctcgactgggcttgatagctccactacattccagatcgtgaactcactcaggcagtccatccacatcctcgggtggcacagctgtcatctccttgcttcagccagcacctgagacatacaatctgtttgatgacatcatcctcctctcaga

SEQ ID NO: 32237 - DNA, 266 bp, Setaria italica
  Peptide Sequence Number=SeqID_98211
ttgtggctcacccgcccgagaaatcgtgacgaacctgtgcctatccggatctagcatgccattgtttaacaacgtgccaagcatgccatttgtttaacaacgtgccaagcatgcccttgcactcacctaccggtcccaccgcatcatcgaagcaccaatatatccagtgacatagcattgccggccagctagaacatgtcttgtttctgtatggaatataccaatccagcttttgaaaatttgaaaacaagccaaagacatctttg

SEQ ID NO: 32238 - DNA, 971 bp, Setaria italica
  Peptide Sequence Number=SeqID_98212
aatagggtagaaactttaccgaggaagttaatttttccaataccaatacatgattttcttaaaataatataaaatcatggaaacatggaagaagtcaagcaatgaaggggaaaacagatcttcatcagttgcaactgcaagtatattaagtaattgcaagaatgaggtggccaaaaatggtgaacccctgtatggtgaccactgcaatccacctgaaatgcctaactaatggaaatttatagactagaaaaaaatcccacaaattctgaatttttcttaacatgccaattttcattaaaataaacaatatatctatcacaacggatcatgcacattatagaaaaactaatagggaatcaacaggaaaagaacttaatggacatacttgcaaaaaaaacatatttatttcaatttatcataacagcaaagtgcgatggaaagttagtcagaagaaagggagaagaacaagaagttatctgcatgacaaaacctacaaaccttcctgtagcacatagatatcaaaccagaaacatgcacaaacaaaggtgccaagataacttacttcctctctctcaaactctggggagagaagctctaatgcatcagccacatcaattgtttcccactctgcaatcaatttgacagcttgtttggcttcttttatgtcactccaatccactgaacggccaaattttgtgaaacatttcttcttagacatcaaagagaaacgaaatttccacactaattgcttctccttctccagtaaagggcgtgtaggaggaaacttgatatataattctctgtagtaacctggaagacaactctgtggtcaaagctgtaaaattcgactatcaggctagaatacaaattcactgtcctcttgcgctctttcttcacagctttctccaatctatatgctgtatttttcctctttcatacttgttaatgagtcccttaagcgctctatctca

SEQ ID NO: 32239 - DNA, 941 bp, Setaria italica
  Peptide Sequence Number=SeqID_98213
gggtagtaccggtttttttcttagtagtgggtagtaccgattttatccaaccggtaatagaggaacccttctagtagttggtagtaccggttattccaaccggtactagaggaacccctctaatacagttcctctaataccgattgtgcaggcacaaccggtactagaggggggtttgggactggtattagaggctatcagttatagtccttttctagtagtgggtactatagtcttgtattttctgcaatgaaacacactacttgtgcatcgttctttcaaaaatgaacactaatttccaatggaaatttcagaatagcgtcgctgacagcataaagcacacagcacgcatagcatagggaacgacatcaggttctcaagtagggagcaggaagacgcaatacccaccctttattcctcgtacaaacagatactagtacctgatcgagtgatcatactcatgcagacatgtgcatctatatagagacacaggtgatggcacacaccaataacatcgcgggcatggatgatggagcgcagcgggcggggctgatagcaaaattagcagcgcgggacggtgaggccgcaggaggcgaccaccttcttggcgttggggctgttgatgtagcgcgcgtaggtggggttcttggcgtacgtgcagaagcacccctgctgcgctttcaggctcgagcagcacgacgccgacggcgtcgcgcccgtcgccagcgccgacgcgcatggcgtcagctgacccacgttgcaagacgccgccgacgcgacgcccgccatggccagcagcaccagcactgcgcacaccaccacctgctgctgcttcatcgtcatcttcctctctccggtctgctcactgtcactggtggtgctatgcgagctagctagctacgctgatgaatgatttttaattaagtaacttagtaagtaca

SEQ ID NO: 32240 - DNA, 224 bp, Setaria italica
  Peptide Sequence Number=SeqID_98214
tcagacatgagcttgtccttgttcttgttgaacgattgttgacggcaagacgccatttcggggcaaacgtgcgtctcgggcaagcggtgagtgccgcagaagctgtgcttgcagaaacgacagtcgccgattaaagcagccgtgcgtttcgagcattcggggaagaagcacttgcctccaccgcgcaatcgcaacaccaagtgaagggtggactccttttggat

SEQ ID NO: 32241 - DNA, 304 bp, Setaria italica
  Peptide Sequence Number=SeqID_98215
ctgttctcagtcactgcgaggcacgtccgccggcgccgccatcacgggaatggctgcttccgccggtgaagctgccggcgcaacgaccccggaggcgccctcaccgttctctgacgactggaaggagcggatcatattccctgccgccggcgccggcgtggttggagccgcgttcgggctgctgtcgcggcaccgggcacgccttggcgccgcccgtgccgctgtcacctacgccgctaaccttgccatcgtcgccgggtgctacggaggggcacgtgaactcgcaagagatgctcgagccaca

SEQ ID NO: 32242 - DNA, 418 bp, Setaria italica
  Peptide Sequence Number=SeqID_98216
gaagcccagaggcggcgagcggcgcgcatgcggttcccaatcccacctcctccccactactacaagtaggccgggcgggcaggcgggtccctcccaacaaacccctcgggccctccagtactccgccgcccgtcgtccttccgccgccgccgccgcctcgtcgggacggttccgtgcggcgccgggactccgagaattccgtccggctgatcgatccggtccccaacccacgagacccgaggcattggtaattcgttgcccggttggttgcgccgtccgcaatccggcctccgcacgccaactcgcaacagaaaaggatctcctcgacgcggctttcgcggccaccgcagggggcacagcaccgcgcggacgtacatacttgctaccccgacttcgtagaagcgatccacccgccgcc

SEQ ID NO: 32243 - DNA, 576 bp, Setaria italica
  Peptide Sequence Number=SeqID_98217
atacttgcagacagtcttacatagtccagcaactctacccagggtagctcttagtctctcaactagcgagcgaggctcagcatcatctttgagtggagcaatagcgttgactacgtcctgagcagcactagtcaactcttggagatcaccttctaacttctccacagttctagcatggcctctacaggacaccatagccaatgccagcatcactcccgtctgatcctttctatccctctcacgctcataggccacctgagtttcatccagtgacgccttaaggcgggcagcctcatcggctacccggtcgttagcatttctctagtcaagcagttggctactcgtagtggcctccttacctttgagctcttgatatctctggttcatagatatatagcgactctccagtcgctcctgaaggacatcatagtcactcctttcaattgcaaaagatttagcggtctcctcatgaactctcaaggatccataagacagcgacactcttgctccagttgcgctacccactatgtggcttcactgcgctcctgaagagctcgagttattttttgggcctta

SEQ ID NO: 32244 - DNA, 1077 bp, Setaria italica
  Peptide Sequence Number=SeqID_98218
ttttttttagcataaataattttgcaaactcattgaacaaatatgaacatggtcaaagttcaaggcaagaacacaacaaatgcacctataaaacttcgatggcaactttacacaaccaaacaccaactgccaatgattatcacagatactattaccagccgatgcatcattctacttctctccacactgacatcaaaccatgggagctatctaggatgcaaccatgctaggactaacattcacagcgacaaggatcagaaatatctccagccgtgcatgatctaaaatgcaatcaggctggcaattacaagcacgccaactaccagaagcagcaccttcaagtacacatcaacctgctggccttgtggcgcctggcgcgggaagccatacccatgccacccatggaaagaatggccatagccataaggaaaacctgcagcaggcccataggcagtggcctgcgggaaaccatgcacttggaagctcagcaaaggaaacagccctccaatggcggctgagaaagtgtaatttccccaccggccgccagccacaggggcgccaccagcatgagcacccatgaaccaggggttctggtgcgggtaatggttgttgtggtcaggctgcggcgcggtggacggccgctgcccggtcggcctgctggggatctggacgccggccacagacctcgcccgtggagcggcggaggtgccaccgcggccgtagagggggacgagcttcccctcctcgacaacggccttgcagacggggcactcctgtgagtgcgcgtggacgtggagccactcgtagaggcagggccagcagaagaggtggccgcagagggtgaccacggggtcctgcgccaggtccaggcagatgttgcactcgaagctgcccgagtccttgctgccgccaccgccgccgccgctgttggtcctcgccactggctcgctggcgcggctcgccatgccgctggactccgatccaaacccgtgcgaagagagtggcgaccacgcgttaccgccggacatcaccggaggccgacgaggagcccgcccacgggagcgaggagccggcggc

SEQ ID NO: 32245 - DNA, 1081 bp, Setaria italica
  Peptide Sequence Number=SeqID_98219
tcttgctcacgccgctgccggttcccgaggttcccctccccttgggttcaatctccagagttcagcgtcctccctcctccgggttcttggctttgggcggaggcaggcctgcgtgatgacggccggttcttgagaagcaagcacgcggcttctctctctctcctcccagcgaaggcgttctagccttcttcggtttgggttcggggctcttgctcgtgagctctgcggaattgggactctggcaggagcggattggaggaaagttgttgcttgggaggattttggtcgtccagtgactcgtcggtcgttcagaattgggagctttggaggaaaagttgagtcttggcctcttgtttggcttggaggaggccgaggaagtcgccgccaatggagccgccgagtgggttctgggcctccctcttgagcttcctcaagttcctgccctactcttgcggcctcctcatcctgggcttcatcaaaggtgttctgctgtgcccttgggcatgccttattatggcaattggattatctgcacttattgtgggcttatggcctatgcatctgatttggacatactactgcattatcagaactaagctggtgggatctgtcgtaaagtttctgcttcttattgctgctactgcaatcttaatcatatggctgataattggcatcccgggaagtgtatttgctggattagtatatggttttctagcacccataatggcaacatttggagcagttggagaaggcaaagaaaagccattcattcattgttttgtggatggagtactatcactggaacatggagtactatcactggaagttgtacagtagtcagggatgtgaaagacttgctttttcactcctatttttcaattatggatgatctgcatctgcagaagcctcctgatggaaagccatatgagataagttgacggggctaatcaagatcaagtgcttccaagattcatccacaaggccacaccagctagattgatgtgccgagttcgctcctcacgtaatttccgtcaacgtgtgggtgcaatagatgctatcaacgaatggagattgcccaaag

SEQ ID NO: 32246 - DNA, 532 bp, Setaria italica
  Peptide Sequence Number=SeqID_98220
agatatcatcactaggtagccaacaagccctccgaagacaacaagcacatatttgacatctaagaattgaagatttcccaagctgctttttccggggatgacattgctgtaccaactgttgctatgtgagtgttgttccaggtattattgtctacaatcacagttcttgtcgtcaacatctgtgttatggctcagccatgcataagcttcacggaaatcatcaaaaacatgcaatccatcacgtgaacgagatgtcagcacgattgaaggtgcggagtacgcttcagctgctgcccatacacaatggactacatagaaaccacctagcacaatcagcaacaaaatacccataatggataattcaaaaggcagaaccaaaagcctcttttcttttttaggctttacaggaacactctctgccacttctttttccttctttcggttcttctttgatggttttcctttggagctgtttcagatttttcattcctaatttcactttttgttgaatttgtagaactctctgggccac

SEQ ID NO: 32247 - DNA, 376 bp, Setaria italica
  Peptide Sequence Number=SeqID_98221
agaaaaaagggcgcgaaaaatttgctcaggtctatcaaaaatttcatcagcaccccgctggccggttccaagaacatataacgagggtcaaatacaacaacagtgcagatatctctaatctagtcctgtggttttctggttcacaagcttagtgcagttgacctagcaacagcaatagatgaagttaacaatagtgtcatttacttgatacttgctgttgctaggtcaactgcacgtatcaagtaaatgacactattgttaacttcatctattgccacgggttcttctttcggcctgccacaagggtggaactagttttggcattagatttcaacttcttcaacttgcctcgaaccctgttcttctctttcttggt

SEQ ID NO: 32248 - DNA, 602 bp, Setaria italica
  Peptide Sequence Number=SeqID_98222
cttgaaatgcttctttccaatttcatatcctcttactctgtcgaagccttttccatcagtctccacaaacctgtaatagcaaagcttgtacatgaggcaattcagcatagtaggagtggcttgagcatcaacacggtactggccatccctaagataatctggctccttgatgtgtgggaatacaccacctcctatgcgaaccatccaagaaacttattgatatcatcactagggtagccaacaagccctccgaagacaacaagcacatatttgacatctaaagaattgaagatttcccaagctgctttttccggggatgacattgctgtaccaactgttgctatgtgagtgttgttccaggtattattgtctacaatcacagttcttgtcgtcaacatctgtgttatggctcagccatgcataagcttcacggaaatcatcaaaacatgcaatccatcacgtgaacgagatgtcagcacgattgaaggtgcggagtacgcttcagctgctgcccatacacaatggactacatagaaaccacctagcacaatcagcaacaaattatccattatgggtatttgttgctgattgtgctaggtggt

SEQ ID NO: 32249 - DNA, 2787 bp, Setaria italica
  Peptide Sequence Number=SeqID_98223
aaagcaacccatcaaatagttgaattgaaatttttaaggcgtgtgattcaacgttaaattaatggcagcaaatacacccacgaccattctgacctcgttctaacagacgcctttcaatcttgcatcttcagtgcaaacgacacgaacagtataccagaaaaagggcgcgaaaaatttgctcaggtctatcaaaaatttcatcagcaccccgctggccggttccaagaacatataacgagggtcaaatacaacaacagtgcagatatctctaatctagtcctgtggttttctggttcacaagcttagtgcagttgacctagcaacagcaagtatcaagtaaatgacactattgttaacttcatctattgccacgggttcttctttcggcctgccacaagggtggaactagttttggcattagatttcaacttcttcaacttgcctcgaaccctgttcttctggggtttcagtttataaatacggaccatccaatggtgggttgtgaatacctcctcaaaatgtgttagcttgaaatgcttctttccaatttcatatcctcttactctgtcgaagccttttccatcagtctccacaaacctgtaatagcaaagcttgtacatgaggcaattcagcatagtaggagtggcttgagcatcaacacggtactggccatccctaagataatctggctccttgatgtgtgggaatacaccacctcctatgcgaaccatccaaagaaacttattgatatcatcactagggtagccaacaagccctccgaagacaacaagcacatatttgacatctaaagaattgaagatttcccaagctgctttttccggggatgacattgctgtaccaactgttgctatgtgagtgttgttccaggtattattgtctacaatcacagttctgttggccattgcagttgtttggtaaccatagtcccaccaggaagcaaccttgtcgtcaacatctgtgttatggctcagccatgcataagcttcacggaaatcatcaaaaacatgcaatccatcacgtgaacgagatgtcagcacgattgaaggtgcggagtacgcttcagctgctgcccatacacaatggactacatagaaaccacctagcacaatcagcaacaaaatacccataatggataattcaaaaggcagaaccaaaagcctcttttcttttttaggctttacaggaacactctctgccacttctttttccttctttcggttcttctttgatggtttttcctttggagctgtttcagatttttcattcctattttcactttttgttgaatttgtagaactctctgggccactgtcaccagaagcagaaacagcagcagagctatcatcaaataattttgacagctgaaatttaatggatcgtgtgaggacaccgaaaacttcagagagagcaatcccagataaaatgcacgcagcaggagcaaggacaagcataagccgcaccattactccagaaaaatacactgcagtgactaagtacaagaccatgaaggagcttgcgtcagacaaaggcaagaagcatgaaataatcccagcaggaatcaggaaggccaacacattgatgtccataaaataagagggccaggtaggaggttggtgttcactgacactggcaatgatggggatgtacttgcttgcataagttgggtcaagtagactcaagctgcggccactccagccttttgttggactagatgccaccaatgcgacaagtacagctactactgcaaaacaaacagctaagccaacagatatgacaagagtcatagcaactttgaacagcctaggagtcaaaagccctttgatgtaatacacaagagcaaccacgtgaaggattatgaacaccagaaatgatgcaaagtgctcagaggtcattactgcattaaaaccaaccacaggtactaaggctgctagaagtgttccaagtataacaaggggagcatatgcaatgtagagccgcgaagaataacgaccagtaacaatgcacaagagaacatgcattgggataaggttgataatgaatgtgtagcctccccaagagcagaccatgtagaaataggaaagagcgttgagcgttgcataaaagagcgaccctgtgttcagtgtctttacatacagataaaatgtaaatatcaaggcaaatattgccacagcttcattatcatagctgcctgcaacagatcttgagatatatgaggggaccattgccaaaatggctgctgccattaatccagctcctgtgccctttgcttcctttgttaacaggtaagtagcccaggaagcatttgccgagaaaattggagcagtgaacacacaaactgtctccacagacaatgggatgttaagagcgttcaccaaccaccacatagttccagcagtcaatgtcaaaccaggatacacagtgccaccaatcacacggccaaggggataccatgtcctatcatcaaaccagttccagaactcgtaaattccattcttcgacagaaactgagtgacgcggaagttgaagtaggggtcgaactcgtggatcacgctctcgtacttgattacggagaagaggcggatcgagaacgcgacgacgccgatgaggaggagcgtgaaggcgcagagcacgccgccgaaggcgttgcggagtctcccgccgccgctggccgccgcggaggagaccggctccgccattgcggcaacgtcgttggctgtgtgggtggagggcgcggaaatcccagcgctggacccaggcggagacgaa

SEQ ID NO: 32250 - DNA, 383 bp, Setaria italica
  Peptide Sequence Number=SeqID_98224
aaatgaacgattccatgtgcgataatttgttgttagctgtttgcttcagaaaccatgtcacaattatttcactgaaaacggcgtaaaggcaaaagatttcatttcgacgacgattttggatacagcaagaacaagaatgccgcgttcgatgattcgatcatctccgcatggtctgccagcaggataagatccaacatgcaagctggggaccgcaagaaccactatgcaagaccggcgcgatcgatcaattattcccctctcgatccgccgtcgacggcgtccgcgtcaccttcgtcgccgtcggtgtacagatcgccacccaccaccagcagctcggcgggatccgccggcgagccctcgaagtcgaacagctgcctccggag

SEQ ID NO: 32251 - DNA, 259 bp, Setaria italica
  Peptide Sequence Number=SeqID_98225
ttgccaacgtcctcatctgcttgcattatctttttgatccgagcctaccataacagagaaaataattaggggataacttcacaccattagaactgtgcaaatatttcaaacattcctcaaacacactgtataatacagaattagtgcaccacatacaatgaaagcagtgaggcaaacgctcaaaattatctaggaaagatatccaaaaaggtgaaacccaaaactttcactaatcaacacacactgatagacaccaaag

SEQ ID NO: 32252 - DNA, 565 bp, Setaria italica
  Peptide Sequence Number=SeqID_98226
ttctttttgtttgtttgtctattttgtcgtctagtctaagtcggtccttgtaacctttgtatttagtacttttgttgttgcatttgcgcagcaagcggcctgaaccttgattagccatgcttgaataggagtgcatggaatgtgcctgaacctttgattagtggctcctgttgggtttcaactctagcctataccaacttgcttgggactgaaaggctttaatgttgatgttgttgcatttgctcagcaagtttcccttcctttgatagaagtctactctaattgatacctgttctatacaagccaacagttccacatttattctttaagcacttcctgtggcatatttccacacttccccactgcctctgtgttcaagattagaccttgtttgtgggctagtaaactactgaaaattacatatccctttcaagcagctataaagaacatttgagtacacatggttctatgtcctcataagataaagcaatatgaaagaattgtgataaggcaatctaagagtattcaactttattatcttagggaatcactattctattttggt

SEQ ID NO: 32253 - DNA, 430 bp, Setaria italica
  misc_feature (91)..(91): n is a, c, g, or t
  Peptide Sequence Number=SeqID_98227
gatgttggtggacttcaagtcttagagatggcgtgtggacacaatgtcccaactagtccccacaggttgttggttaacataggagacttcncggagataatgagcaatgggatcttcaagagcccagtgcacagggttgtcacaaacatggggaaagagaggatctcattggctatgttccatggcctggatcctgagaaagagattgagccggcaacagctctgttacatgagaagcaactagcacggtacaggaaaatcaaagccaaggtgtacctggctaggttctatgaacattttgtagaggaacaagatttatcgactctgaagatctaagggaggtagcttaggttcgaacagagtagcagcggtgggttctttaaatcgtgatgtgcacattcctttgatgatccctattgtttaattaaag

SEQ ID NO: 32254 - DNA, 635 bp, Setaria italica
  Peptide Sequence Number=SeqID_98228
gttcccgctgccgccgtgccgcctcatctcgatctccgactcctcgccggcggcggtgccgcgctgggatccctgtacggcggaagcttcggcggtggcggtgccagcgattgaatccagtaattttcgcgataagaggcgcaccggtcctagatccgaaaagtggcagcctggcaagctcatcgcgcgctcatagttctctttgggcatcgccttccaccgcccctgcaactgcccgcctgcctctagcatttccgacagccgctcagatcacttccattcgtgtctgatttcggctaaccctattccccttgtgtgcagataaggtgcttccacaaaagcaactgcgtgccatgtgtggggagcacagttgaagcaacaaatcaaccactgacagagagtgactaaatgaagctaatgtaccaagtattttttcaacaaaagaactcttaactagaactgtgctttccagaagtccaatttgccaagcgaagttggaccttaagccccttgtaagctagtgaagtctatctagcaataaattcaaggaaaacactccacgagagcactaatggcgaatgaatcatggaagattcctatgttagtgcaagaactggcagccaaggtgcaggacg

SEQ ID NO: 32255 - DNA, 547 bp, Setaria italica
  Peptide Sequence Number=SeqID_98229
ggagagaatttcgaagcacctcgctcttagcattttcttgcagcatgtgcatttgcagaggacaaaacgagaaattgtactgaaaaccttctgccaaaggaaaacaaaagtgaagtaccgctcagtcatatgatagtttaattgtaagttgatattccttgagaaaaatctcaatccaaaattgactaaacatgtactcttgtagtgttatcctttttccagttctgatggatctagttggtttagtgcaaaattgtttgaagctggaatttcttgtcaagctgtcatcagatgaattaatagccaatattttatttatcatattctatggttcagatagtgacagcaatgcctgtatgtggttggtggcccatctattctttgacagtgactaaatgaagctaatctattctttgacagtgactaaatgaagctaatgtaccaagtattttttcaactaaaagaactcttaactagaactgtagctttccagaagtccaatttgccaagcgaagttggaccttaagcccttgtaagctagtgaagt

SEQ ID NO: 32256 - DNA, 237 bp, Setaria italica
  Peptide Sequence Number=SeqID_98230
accgacgccgacttcttcgacaagctcgtcgacgacgacgacgcccccgccaacgacgccccgacgccgcgttggctcgcgacgtctccgacgtcagccgagccgacgacgacccacctgccccgccacccgccaccgaggcggcgcctccggagggtggctcaccaaggccggcgccggcctccacaccaccgtcaagcaggtgcagtgggcctccttcggaggtgggccggacga

SEQ ID NO: 32257 - DNA, 270 bp, Setaria italica
  Peptide Sequence Number=SeqID_98231
gcgtcgtacgttccggcatcccactccagcaactccacgacaacccctcccctgttacctgcattccaacacagtcgagtccattatttaagacacgataaccatatgttgggatcgatcaggcggtctcgctgcccgacccgagccgaggaaagggctcggtggagaacacgacctcgaccgccacctcgaagtacgccgcgatccgcaacgccaggtgcaggctggggctgtactcgccgcgttcgaggtagccaacggtctgatagg

SEQ ID NO: 32258 - DNA, 631 bp, Setaria italica
  Peptide Sequence Number=SeqID_98232
acttagtagtcaggagcttatttgttctgaaattccaacattgcattcaatatttttggatttgcttgcttccactattatactctactgcagctcactcgtaccacatgctggtactgtcgtaatgctcatagctgagtacttcaaaaaagcaaaactgcctgcattaagaagaaaactctacaccattgtgcagttattgctgagttccatgggtgtcggtaggtggttcttggttcataccagagcatagttagagcccagcatatgtaagtagtagagacaaactagcacattactcagtgggctaaaaaagaacagagagagaactagagttccttatcttcttgttgtctacaggctatgtatatgtgatatttatatgttttgtgctgctaactgtttgagtcacattgtgcaaattgggtgaaacatattttaggaagacatttagttgtatgctttactatttttgctgttatgatgtgttgcctgtagcgacttgtgagggaacccttatgcatttacatacgcatgtgcatatagatattacatgtgtgcatgtacgctttctatattttggagatgcaaatggatacaatgaaagtcaaggtactggtagactcccaaa

SEQ ID NO: 32259 - DNA, 432 bp, Setaria italica
  Peptide Sequence Number=SeqID_98233
gctgttgtaggtcttgatccgacacgctaggattagtaggtgtttgtatggccacaggtcttgctgagcataaaggacgtctaacctcattcaagcgcaaatcatgaccaaatcgtagttgtgtagttgaagtgaagatatgttccatgccatcctcaatagatttagatacagaatctgaatcttcagaattcaaaacttctgatgtagggatgtcagatgcagtcgttggtatggttacaggttgcagatgtagcatataagggactgacattgatgtcaaattatcattgttccacaacccattgtctttcctaactgaccccatctttgccatagctagatcttccctgccaacagaacataagctgttgcaggccagtcatcaggaggagagtcacgacattttgccagtgcatggcgaagcacaag

SEQ ID NO: 32260 - DNA, 415 bp, Setaria italica
  misc_feature (411)..(411): n is a, c, g, or t
  Peptide Sequence Number=SeqID_98234
ttggaggcggaggaggattccttctaggcatcacatgtgttcttttatgtgcaccttcatcttgcaaactcatggaaatggctgatgaaggaccatcaggtaaccttttctgtaactcaagcggcagtagctcattaacacgaaaccagacctgcgtgatgtctggcctgacatttggagaggcttccagcatatctttgatcaaccctgtgacagcagtgctatacttgggttgctccgggatacgataattgccattgagtatctgcaacttggattctccatcaaacgctgacttgaagtagcatattctatataaaaggcaccccaaggcccaaatatcgactttctcgctaataacttctcttctgtagagatcccacatctcaggggccctgtaggctggggttntatg

SEQ ID NO: 32261 - DNA, 2719 bp, Setaria italica
  Peptide Sequence Number=SeqID_98235
tttgtgaaatgattgcagctttccctcgttgaaaacgtaagatatgactgttgctcacttgctctccagtttcatctcgaaagaggcaaaaaaagagtagcacatgaagcggccattgatgctgctatagcagtcagtcatcacatggtcatactgcatacaggaaatacgtacagcaccgtaaatatttacttattaacaggttgatgtcaaacgatcacatgaatcaatgtctaagttggctcaaccaacgatgaacacactcaagataaccaatttcgacctcctttggcaggaaagataaccagcttgccttgcctcatccatccgcacgcgcaggagcagaagcgtagggcactttgcaaattccgaacaagaatgatggttacggcatgttgctgttatgttaaaaaccagcccatccagatggttgctctactttcttcgccacaccagtgctgaatctctgggatgagctgccttgagcagtggtcctgttgatctgcgtagcagtgcttgctgctgctgctgacgttctgtaattatcggtgccaaaaccccaggcatcgggtgaaggacctgggtttgtgctcttggttaggttttgcctcccattagttgcatgatcaacctttggccgggcctgggcctgggtctttgtctcagggaacacctgccatgttttggcatcagaactggctgatttagagttgcttgcaagcattccatgttcaagctcccacaccgttccttcaatcttttcctttcgctgaggtccagagtcttgtgttctagagctgactttgtttgacggaggtgttgtctcagcaagggcgcgcttcagttcttggagctcctgacgctgtgatcggcatattgcagatagcttttcatacttggctgtcatctcgtccttctccaatgtggttttcttcaactgctccttcagactggacaattcgagttcaagttcagatgccttaccagcagcaatgttgagattgtgtgtgtcaaaatctgcaacaaagctgttgaatggatctttctcacattttggcttgggctgagcttggtttgctttaactttcacagaactttgtgtctccttgaacaaatttgtgtcagagacacctgcaaatccattattaggcaaggagttacttggtgctttacttgttcgtgacgactggccagaatgaccatgcctatccccagggatagagatgctggtgtccaccctgctttggttctgctttgatgacagtgatggtttaattggctcctcgtcaaacaaaggtttcctattatccgcaccttgtgcatgctgagttgcccaaaatgcacctaaaggtgcatctcctgcccttgagcttccgtgcgataaagaactattagattgctctcttggaggcggaggaggattccttctaggcatcacatgtgttcttttatgtgcaccttcatcttgcaaactcatggaaatggctgatgaaggaccatcaggtaaccttttctgtaactcaagcggcagtagctcattaacacgaaaccagacctagtatcatggagatgaatggccaatcaatcaaagctcttgcctgcgtgatgtctggcctgacatttggagaggcttccagcatatctttgatcaaccctgtgacagcagtgctatacttgggttgctccgggatacgataattgccattgagtatctgcaacttggattctccatcaaacgctgacttgaagtagcatattctatataaaaggcaccccaaggcccaaatatcgactttctcgctaataacttctcttctgtagagatcccacatctcaggggccctgtaggctggggttgtatgtttcctgatgatatcttcctcaacacccatctcttctggtttgttaaagcatttatgatttgttgatgtgcttccaaaatcacatattttccatgcaccgtcaaaaccaagaagaacattttcagctttcagatccctatgtgcaattggtggtgactgtccatgcatggcaaaaacagcattgcaggcatctctgaaaattaaaagcaccttcttctcctcatagtaaccactacctctgctctccattgcactcaccaaggacttctcacagaactccatcacaagaagtgcctcctttgtgcgccccatatcaaaaacatcatgtgcaacaagtgtggttgttgtacctactactttgaggaggttcataacctgaatttccttcatgacaagatcaagtgattctgaatcattgcaaataatgtgcttcaatgcgtacagcttcgatggatgtactgtgtcacatgccagatatacacaagagaaacctccttgtgcaatggcatttcgtactgtaatcttcacactaccaacatcaacggtgcgaccttccaacccactctgtgctttccccccaaagggattgagcctccacattattgtaaaacccaagacagaatgaatgaaatcccagtgcttatttattgagtaaagcttctccaaatgttcctctagatcggtagcagaacgcggcgctcgccgaggtgggctccggcgccggcggcgtcggatgcgggggcgcgatctcgtccggagattcggcgcccgggcgcaggctgctgctgcaaggcgctggagggaaggagggaggaaggaagcaaaaagccgagacgtggagtggtggagccgtgggc

SEQ ID NO: 32262 - DNA, 234 bp, Setaria italica
  Peptide Sequence Number=SeqID_98236
caggaaaaggaggattaacctaaagcagaagtaagcctctcttttgcaccatcttctttaggcccgggaccatctccaagatggcctaattcctatctattgacctccaatgtaacttgtggcatataattaccctgccactgctaagatatgtccagatttgaatgatggatcattgcattgacaacctcattttcttctgcagagtatgtagagtgcaccccatagcataca

SEQ ID NO: 32263 - DNA, 247 bp, Setaria italica
  Peptide Sequence Number=SeqID_98237
gttccccttccttccacccgccgacgcggctcggaccggagggtgagctgagagagaggaccaggaggaggcggaggaggagatggatcggatcgtcggcagcaagtacaagctcggccgcaagattgggagcggctccttcggcgagatctacctcgcgacgcacgtcgacacttacgagatcgtggccgtcaaaatcgaaagcagtaaaactaatcacatgtctctgctcctgcactgctaagtt

SEQ ID NO: 32264 - DNA, 1055 bp, Setaria italica
  Peptide Sequence Number=SeqID_98238
agatcagcaaacaaactaatagggaacagttcaaagttccgaaggatgtgaacaaccagattcttgatccaccaaattggagttattctgacaccaaatgaattcaagagcttgaaggtatcaaattgctcttccctcgggaaaaaaaacattgcacttcatgtctgctcctgggatcatttgtaaagttttattctgaaagcacaccaggcagctggtcatgttattaaatcaacctcgcaggttgatgctttgcccataacactgccacctaagaagaacagagttcaatttttatgcatagcattacacaccaatctattggccttatgttcatagcatgttttgatatgtttcacagtaacaaatttgtcagcacctccaggatggttatcatggaaaaacaatacggttagaacctcaagatattgaagcctgtatatactcttgggaagtttgttaattatactgcacaaagctaggtaatggagatgaaccaactgactaatggaatctggtaattctgcaatatcagattcacttagatccaagactcgcaagttcttaaatttggccagaagtttaccagggaaatgactcgaggataacgacgagcttccaagaactaataatgtccgcagccttcccaacctgtatttgctcttcagctgtggtaaataatcagttgagacagataggtgacgaactgttggtggaatcacaacagggatgtcctcattaattttcatgcaatcttgagcagaaaaatgatgcgccaaaaatgtgcattaggtcatccaggaagtaatatgtttgctgatctttatttgcagacccaaagaaggaccgtgataagagatcatcaaagtatttgtaccctaaatcttccagccttttcccttctgatggtgtttgaacgaaaccgagagctatccacattttgaccaacttatatcgattaaacctccaagtcgttggaaaaatgctgcagtatgcaaagcagcgctggagatgacctggcaagtgttgataactgagttggagggaggagataa

SEQ ID NO: 32265 - DNA, 303 bp, Setaria italica
  Peptide Sequence Number=SeqID_98239
agatgcttgggctaactcccttcctcttcatctgatcaaaatattcctgagccttatcaagcttactaaaacccaccagacgatcaacaagtttatgatatgcagttgcatcaggcttcagctccaatccatccattttggcacgaatgaggagacacatgtactacttatggaagcatgcttcagtgttgattgcatcgatgatggtatctcttactttgacaaaatggatggattggagctgaagccctgatgcaactgcatatcataaacttgttgatcgtctggtgggttttagtaagc

SEQ ID NO: 32266 - DNA, 894 bp, Setaria italica
  Peptide Sequence Number=SeqID_98240
ttaccagcatccatcgctccaccagcagctcctgcaccgacaacagtatggatctcatcaatgaacaagatgatttgcccattagaagcagtgacctcctttagaacagccttcaatctctcctcaaattcaccacggaatttagcaccagcaagtagtgctcccatatccaacgaaataagccttctattcattaaaggttcaggaacatctccccgcacaatacgctgagccaatccttcggcaatagcagttttgccaactcctggctcgccaataattacaggattgtttttagttctcctgcataggatctgaatgcatctgcgcacttcatcatcacggcctataacaggatcaagtttcccacgcctagctgattctgtcaagtcaataccatacttctctagagcctggtactttccttctggattctgatctgtgactcgctggcttcctcgcactgctgaaatagcttctttaagatcattctccataattttcagatctttaaacagttgttgcccaaaccttttatctgaagtgaatgcttgcaggatgtgctcaactgacacaaactcatcaccatattcttttttatgtttctttgcactatccaatattgaaacaaaacttgaccctataattggcccggacgtatcaccggaaacctttggctgcctagatataaactcatcagtagcttgtagaactgatgtgttgtctactcccgcttttgaaaatatcctacgggccaatccatccttttgctccagaagagctttcatcaggtgctctgactccactatctgctgttttgataatcttgctgcatcaactgcaccaacaataccctcccaggccatttcagtgaattctcctggtgctaataca

SEQ ID NO: 32267 - DNA, 333 bp, Setaria italica
  Peptide Sequence Number=SeqID_98241
tccttttggtcggcgtccggccgtccgccgatgccggcctgccggggctgcggaggcggcagcctccagtcggctgaggcggtgggagcgaaccggcgaaagcggctgatgttgtgggcccggccggtgtcgagtcgcagccgcgcctccatctacggggaagggaactcaggattcaggaagagaacaagaggcgccgcccttcttctcgtcgttgtacgccttcacgggccgttgccgccgatctccccatggctattcggcgccacggttcccatcctcattcctgaggccaggttaaacaggcatggcgttggacaagggactgcacgg

SEQ ID NO: 32268 - DNA, 776 bp, Setaria italica
  Peptide Sequence Number=SeqID_98242
tcgcgtgttgaagcaactgaaatgcagaagcaatcgaaaggttcaaagtcctctacacatacattatgtttcaccatcattctgggcctggaaaggtggtgaaagcaggctctcgaagttgcgtgattttgtcgaccacatgttgtgtattcttccatttgaggaagaaatatgcagattaaatgggctgcctgctacttatgtgggtcatcccttattggatgatgctattggcttaaacatggaactggaattgtcttctgacaagtctagacatcaaagaagttgtgaatctttccggctggaacatgggctttccccagatgccacaatcataaccatgctgcctggaagtaggatgcaggaggtagttcgaatgcttccaatctttttgcgtactgtgcaaaacttaagacatacatttaatgaactgtcactagtcatcccagttgctccacatcgagatgtgaggacctatgttgaaaagactgttcagtcaggtccttctccagtggtgttgatacctgggggatcgcttaaggaaagatatgatgcattcagtgctagtagagcagcattatgtacttcaggaacagctgttatggaactaatgcttgcaaaactaccctgtgtggtagcttaccaagctcatttcattacagaatgcttgatttacttgagaaagaagataaactttatttctctgcccaacattctcttgaattctcctgttgtacctgagatcctttttcgagcttgtacagctaagaatctag

SEQ ID NO: 32269 - DNA, 431 bp, Setaria italica
  Peptide Sequence Number=SeqID_98243
cagcggccgactgcttgcctcccacctcgcgcagcctctgctgctcacatgctcctcctcccgttggtgttgccatatcccttgccccggccgccgcctcgcgctccacctctggctgcgtctgtctgctcctcctctagcggcccacctccgcctgcccccgtcaccagagttcgaggagagcccgcgcttctcccgcgttgtccgttctcttacacaacggcgcgcacggcttgagcggtggcggagcgcggtccccctcctcatgtggtcgtcgggtgacatggtggcggccgagcttccccaggcacggcgggtgaggcctcaccacgatgtccctccctgggtagatccagcctccttcatcggagctcgttcatgatggtgatggcgtagacacgcgcaccgctattggcctttgcggctttgcg

SEQ ID NO: 32270 - DNA, 278 bp, Setaria italica
  Peptide Sequence Number=SeqID_98244
cacactctcacggcgtctccgctgcccacccacctcctcctcctcccctcatcacgggatcacgagaccgcggagatctgtgccgcactgagctgagctagcgtagcgtactctgctcatgccgccgaggtagagtccgcggcgggcgggggaaggaggcacggccggccgaagcctcctcggccggtcgtcggaatgaagccgcggaggctcggctacggctacggccggggcaggcgcgcggcggcggcgctgctcctgcttctgctctgcctctg

SEQ ID NO: 32271 - DNA, 534 bp, Setaria italica
  Peptide Sequence Number=SeqID_98245
gtttctgatacttgatgttttcgcattgtagtccattcaccaccccttctcttttccagcaaggaaatattcatgagctgtattactggttaccacttaccacgtgttatctaattggtcaatgctgcatcaggaatagcaaagtgaacagttgatctcgtttctgacttctgattgcaagggttaggcggtgcgagtgggtgctgcacggaggtccaacaaggaggaattcttctcttggagtgggggttaaagtggcttatcttaatttgcatctgatcctctctcggacctgcgataagaagattcaaaggatgtcgtataatcgatattgttcctgtttcgccgctttatccatgaaaaaaagcaatgcttcctatctaccacccaagaaagcctttgcaattgaatttccaacatggaagagtctctcatgtcatgtggggctggtaaatatttggtttggttctggtctgttttcggcttaggacacactgatgccataatcgaaatatcacatgaaggctggcaggc

SEQ ID NO: 32272 - DNA, 634 bp, Setaria italica
  Peptide Sequence Number=SeqID_98246
ccaaacgacttgccatctcaccagtctcatctccccactcgctctatctcgccgcatggggcgtagctgttggaagagaagcagcaggaggcggcttctgctgcagcttctctgccggtccttgctcgtgcttctcctcgcgctcttgctgccaagctgctgccaggcttcgagaggcttgcagccgttcaagggccggccgctggagggaggggcacccaacaacttcctcgggttcctgccgaggggacccgtgccgccgtccggcccctcgcggcagcacaactccgtcggcctcgagagccagcgggagaagaagaagccgtgaaggtgaagcagctgcaggccggccagccgacgggagggcacaggataggcgcttgtagagggagatagaggggtgggtataggatagaaggcaagaagctgtacaggatcacagatacgtatcatcatacggttggttagttgattatagcgtgtgtttgttatggattaactttaactgtatgtagcatgcatgttgcagtggttgcatatacttttggggaagtagggggaggagagagtggctgggatagatgatgtgtgtgactgactaacttctcgttgaagcagtgttgtttgatttctt

SEQ ID NO: 32273 - DNA, 330 bp, Setaria italica
  Peptide Sequence Number=SeqID_98247
ggaggaggggcggcggcgaaggtgggagctcttggtaaccgaggacccagtaggcggttggtcggctcggcggttgaattgaaacttggaattcgtcgcggcgcacgcgccctcctccgtcctcctcgactcgggcggcgacggaaggcgcggcgctcacgtggactagtatggccgcacgagagttgaggtgcgggccgcgtatagctgagcggcggctggggcgcccggagaagaggcagcgacgacgagccgagggacgcaggaggtggggtatcaccgacgggaggacggcgtggtcgcgtggaggtgcctgagactagtgcgact

SEQ ID NO: 32274 - DNA, 1097 bp, Setaria italica
  Peptide Sequence Number=SeqID_98248
tggttagttgtctttttggtagtactattcttctagtctagttattgattacgttttggtttttacagctgcagaatacgctcgaaaacaagcatccaaggaacaaaaagagagaccatctgctataccaggtcccatacctgatgaattggtggcccccactacaaattcaattggtgtgacattgctattgaaaatgggttggcgccaaggacgctccatcagggactcacatgctgattccttatatgaatcacgcaggaatgctagaaaagcttttcttgctctctctgggtccaaaaatgatgaggatcaagatcaaagttccggcaagcctagcttagatcaagctgttgtggggtcaaccgaggaaatgcgtgtatctggaaatacacctgtctacgtgcttcatccaaagcaggatttgcatggattaggttatgatccattcaagcatgctcctgagtttagagacagaaaaacattacagaagtcaagagatagggaccacaaaagaaatgatgtttcaatgaggggaagtcttctgacttctaactcaggacattatgcacctggctttgggattggagcgctcgaagagcttgatgttgaagatgaagatatttatgcatcaggatttgcttatgaacaaactgaagtggacattgaaccttcaaaaacagccagcgacagtaattacaaacttgataacagaaaaagaggtttccacctgagcattaggattgcctcaaattctgagtacaaacttgaaagattccttcctcctgagattccagatgattttgatgctcgacacaagtttccaactccagttcagtctgcagagaagttttatgattcagctcctcttgaggttcctcctccagaagacactagcttgacgctattgattgagggttgtgcagctatggttgcacgttgtgggaaacatattgaagatttctacaaggagaaaagtaagacaaaccctcagttcatgttccttagtggaggagatggctgtaaatattatatgagaaagttatgggagcatcagcaaaaatatgttggtcagcaaagacctgattctgcaaagt

SEQ ID NO: 32275 - DNA, 2598 bp, Setaria italica
  Peptide Sequence Number=SeqID_98249
aaagcaggatttgcatggattaggttatgatccattcaagcatgctcctgagtttagaggtatcatgttcctataatatactcttatcagtgtcatttcattcattagtgtccgtcgcacctgatttcttttgtagacagaaaaacattacagaagtcaagagatagggaccacaaaagaaatgatgtttcaatgaggggaagtcttctgacttctaactcaggacattatgcacctggctttgggattggagcgctcgaagagcttgatgttgaagatgaagatatttatgcatcaggttttgcttatgaacaaactgaagtggacattgaaccttcaaaaacagccagcgacagtaattacaaacttgataacagaaaaagaggtttctacctgagctttaagattgcctcaaattctgagtacaaacttgaaagattccttttccagatggggggcggtttggagggggttggaggagatggctgtaaatattatatgataaagttataggagcatcagcaaaaatatgttggtcagcaaagacctgattctgcaaagtcaaagacttctgaaaaattgacagcagagaatcgtgggagaattcttggcgaaaggcctcttgatagaagtaccaaattacatagcccatcgctttctgcgaaggaagcagttcaactgcaatctaatctcgttgacacatttgtcaagccaatatcccttgatgccctaccagagtctgagaagccttttagcaatgatcctgccaaacaagctaggtttgagcaatttcttaaagataagtataagggaggtctacgctctgcaaatgttgcacctacaagtactatgtcagaggctgatcgcgctcgagaaaggcttgattttgagactgttgcagaggcaattgaaaaggggaaggggaaaaggttattgatcattcatcattgttctctttgcctggaatgaatgagcaacgttttgttgcggcgactcaagtagagagctctgtagtgcctcaagatgagaagcccatatatccacgaagggagcagtttgaatggcggcctttaccaatactgtgcaaacgttttgatatcgttgaccctttcatggggaagccaatgcctgttcaaagaccaagaacgaagatagacaaccttatctttatgacagaatcaaacaagggaacaaaggacgaagtggagagctcaagcaggagttcacagcatgcttccatggaagggataacagaggttgagtcacagggaactgctaatgaccctgacattgagcttagcagcatgcaaagacctgttgatctttacaaggctatcttttctgatgactcagatgatgatgcagatgaaattcttaataatcaaccagtggatccactgaagacaagtgaaggcgccaacatggcactcaatcggcttgttgctgaggatttcctagaatcattgggtaaagaactgggattagaggttccaccggaaagacctaatgttttatctagaccagaaacacttgcagctgctggtgcaagtggctcacctcagtatgaaagaataacaactgctctcgcagaagtaaaggagagtcagagctcttttggcatggtgcaagttggcaatgccaatcaagatgctccattagccagtgctgaaaagcttgctttgaaatatgagaagcaggagaatagaactgaggaaaacaggtctcgcgatatgcatcggcaaagccagaatcatagtccgaggtccgattcatctagtgaacggcataggagtaggaaaagaagatcacatcatcacagctgggatgggactccagaatctgactctgctagtgaacgccataggaacaggagaagtaagtctcattcaaggcacaggaaaggtaggagtagaactccggaaactgattctcgcagtgacaccaaacatgagagaaaacgcaaggagaaaaggcatcaccgaacttgcacatctgatagcgattctagtgatcatgaacacaaggaaagatataaatctagtagtagaagatcatctgataaagacagaagcagaaagcattctaggcaccacaagcacagaagaaaggatcatgaagattattcatgaatatatgactatacaaatgagggatgacacagggaagagctattggttttgcaaaccatggaagtttgttgaacactgggggagatacggaaaaaaagctcacattgaatgtccatattactacgcaccacagaaatatcaacttgaccaccagaagcttgatgcatgatgcaagtcgaagagaagatagaccgcagatgctttccttgtatgccgactgatcgtgcatcaagctttattgtttatgccagtttttgcacctttccagctcggtgaccaccctatcagatgttcagactcacagatgacacaagcatgtattgagctttcctttgaagatcatcccagatttgatgtccatgtaaatgttcggataggataggacgcaggtgtattcaaccgaagcacagccgtgttgaaaactgtaatgttgactgaatgcgtattgacatgtagccgtaggctgtta

SEQ ID NO: 32276 - DNA, 425 bp, Setaria italica
  Peptide Sequence Number=SeqID_98250
aaacaaaaataagccaagagatgctcagagtttaacgcgtaagctgatacagggtacactggaatcaatagatgttatatgagaacttgtgtcaacactacttcagatttctttaaatgtagtgtgaacatttcgaaactattagcaaattaaaagtcaccacctggtgatcaggattttggaagacgtagctgcatggcccatttatatacacagtaccagccgatggatttagaaaacctgctaaaaccttgagcagcatgctgttagtatttatttccagtgacactaatattgataagcaacattctcaaagggtgcctattattaccttccattagttatagtaggaatattaggacttgccacagccgttggggccgaggagcatccagagctgcccgggcggcacgtggagggagcag

SEQ ID NO: 32277 - DNA, 514 bp, Setaria italica
  Peptide Sequence Number=SeqID_98251
tggggcgcctcctcatccgccttgctgttctgctgcggcggcagctccagcccgggtttgctgccgccggcggcgctgatcttggtcaggtcgtcgcgctcctcgatgctcttcccccagaacacgttgtacaggcctcccaccagcagtaccccggcaaaagatgcttcctaggctgacggcgtccccgatgatgaaggaggatatgacgatggtgaacacgaaggtgagaggcatcgacatggccaggaacaccggccccctcttggcgatcgtccacatctgcatgtagtacgacagcgccgtcacgatcacgcctctgtagattatcgcggcgaggccaacgttccatcccagcttccacttggagaagtccctctcggttgcaacggccacgaggaaggcttggaccgacgcgcacgagatctggagcgtcgtgttcatcagcttggaggtgtcctctatcagtggcccctggagcaccgtccacaggcctgctagaacgttggacagt

SEQ ID NO: 32278 - DNA, 2061 bp, Setaria italica
  misc_feature (1926)..(2061): n is a, c, g, or t
  Peptide Sequence Number=SeqID_98252
gttttggtctcgccattccgcccgcgtcttcgcatcggccgccgcggtcgcgctccctccccctcgtttccgcgccgctcctcgtcgccggaggtaccgttccggggcgccgggtgcgcgtcgggttcgctcggctcgggagatctcggggcctgctggctgctcggtcctggagagggcgcggaggaggagggcgctgcgtggggggtgaggcgagctaacgtttgctgctctgcggaggggtagcaggtggagggcggtcggggatgtacgggccaccgtcccgcggcagcgggggagccggtgcctccggcgagcagcctagggtttaccaagtctggaagggaagcaacgagtttttcttacaaggccggttcatatttggacctgatgtgagatccttgtttctcactatattcctcattcttgcaccagtggtggtcttctgtatatttgtggccagacatcttatcaatgactttcctgatcattgggggatttcaattatggtcatagtgattgtcttcacaatatatgatttgacgctgctgcttcttacctctggtagagatcctggtatagtaccccgtaacacccatcctcctgaacctgaagccattgatatgaacaatgatgctggaaatggtcagacaccacagcaattgcgtttgccacggacaaaggatgtattcgtaaatggagtccttgtaaaggtcaagtactgtgacacctgcatgctgtatcgaccacctcgatgctcgcactgttctatctgtaataactgcgtggagcgctttgatcaccactgtccttgggttgggcaatgcataggattgcgcaactatcgattcttctatatgtttgtattctctacgacattactctgcctatatgtatttggcttctgctgggtgtacattgtcaagatcagagacgcagaacagtcatcgatctggaaagcaatgttgaagacaccagcatcaatcgttctgatcatctactgcttcatctgtgtgtggtttgtgggtggcctgtctgtcttccatttctacctgatgagcactaaccagacaacctatgagaacttcagatatcgctatgatcggcgggccaatccatacaacagagggattgtgaacaacttcatggagatcttctgcactgcagtccctccttccaagaacaatttccgagctagggtcccagtagagcaaggtctacagcaatcacgtgcaccggcaaggggtttcatgagcccaaacatgggcaaacctgttggagattttgaactgggtaggaagccggtatcctgggatgaacctcggtcggcagctgatatcagagacctggaggttggtctaggcggccttttggatgagaaagaaggcaggatagcccatgcatccccagatttgagcagagaagcccttcctgagttcacggaaggtagggctggtatgcattcaaggcgatcaagttggggccacaggagtgggacttccgagtcaatggacagtatcgcggtgcagatgggaaccgcagaatctcactggggctcgattagcagtgtccatggtggtacttccagtggagctcactagcaaaccgcagcaagtattaactcattgtttcatgacccgcctctgataccaacaacaaagaagcaacgtccttgtgtgttctccttgcgcttgtgctttcgcttcacctaggatatacttcagtgctttcttactcgcgtctctgttgtttcatcccgtaagcccatcagttcttctgatgttgtccttcctgtttggtgttctaagcaaaaaataacagaagagctcttcaactccctagtggtttggatgattatctgtctctgtatatatattattggaagttggaatttggctagtaaaaaaaaagtcaaaaaaaaaaaannnnnnnnnnnnnnnnnnnnnnnnnnnnnnnnnnnnnnnnnnnnnnnnnnnnnnnnnnnnnnnnnnnnnnnnnnnnnnnnnnnnnnnnnnnnnnnnnnnnnnnnnnnnnnnnnnnnnnnnnnnnnnnnnnnnnnnn

SEQ ID NO: 32279 - DNA, 696 bp, Setaria italica
  Peptide Sequence Number=SeqID_98253
aattttgcatttaccatattagccccccaggacatgagttaggagctgctccaatttcgccgaatgctcctataccctctgttgatgacttggcagatcaagttgcagatgtcctcgatttctttggattaggctctgtcatgtgctttggtgtcactgcaggtgcctacattcttactctgtttgcgtcaaagtatagggagcgtgtgttaggtcttatccttgtttcacctctatgtaaaggccccacttggactgagtggttatacagtaaggtgacttccaatttgctgtattattatgggatgtgcggattggtgaaggagtgcctacttcagcggtacttcagcaaggaagtgcgagggttctctgaattacccgaatcagatatagtgcaggcttgtaaaagcttgctagatcagcggcagagcatgaatgtatggcgctttgtacagacaatgaatgagagatacgacttgactgaacaactaaagcagcttcagtgtagaaccctgatttttgttggtgagaattctcagtttcacactgaggctgttcacatgacatcaaaactcgacaggagatattgtgctctagttgaggtccaagcatgcgggtcactcgtaaccgaggagcaaccgcatgcaatgcttattccgatggagttacttcttctattggtattacggtacctta

SEQ ID NO: 32280 - DNA, 620 bp, Setaria italica
  misc_feature (517)..(620): n is a, c, g, or t
  Peptide Sequence Number=SeqID_98254
tgttaccagtattaagtgaaatagcagctccaggatgattccgcaacctagcaactcctggaatgtctcggccatttctaggaagttgttcagttcagcatttttccctgctgtaatgagagttgttgaatccaatataccagtgttggccaccataccgattcctagaaatggccgagacattccaggagttgctaggttgcggaatcatcctggagctgctattttcaccttaaatactggtaacagggatacgatgagagaaactatctacaatcagttaagcagtttgttgcagaagaggtgatttgctaaccaccctatgtgccctcattttgttagtctgacataaggcatgaattaaagttttcttctatgcaaaatctaaagtagaagttttctttcagtacttgttccatatagcctatgatagaacgtatggtcaagtcttatggtgttgtacctgaaataccttttccaagtttaccgaccaatgagaagacagtcagattaactnnnnnnnnnnnnnnnnnnnnnnnnnnnnnnnnnnnnnnnnnnnnnnnnnnnnnnnnnnnnnnnnnnnnnnnnnnnnnnnnnnnnnnnnnnnnnnnnnnnnnnnn

SEQ ID NO: 32281 - DNA, 760 bp, Setaria italica
  Peptide Sequence Number=SeqID_98255
cgaatccgtccgcccccacccggaatcccctcttcggccgcctcgccccgccgctcccccgcctcggaaccttctccgaccttctcgggcctcacgagtccgccccccgcctcgcttcccagaagcgtctcgccccgagcgcaccgccgcgggcgccatggcggcggagaagctgcgggatctgagccggcccatcgacgtgccgctgctcgacgccaccgtcgcggcgttctacggcacgggctccagcgaggagaggcatgctgcagatcaaatcttgcgggagctgcagaataatccagatatgtggctacaagtggttcacattctacagaactctcaaaatttgaataccaagttctttgctctccaagtacttgaaaatgttatcaaatacaaatggaacattttgccagttgaacagcgtgatggaataaagaattacatatctgatgtcattgttcagctctcaggaaacgaggtttcctttcgacaagagaggctttatgtaaataagctcaacattatcctggtgcaggttttaaagcgtgagtggcctgccaggtggacgaccttcattcctgaccttattgcagcagcagcgactagtccaacaatatgcgagaattgtatggcaatattaaagctcctaagtgaagaaatttttgatttctcaagaggcgaaatgacacagcaaaagattaaagagttaaagggttcgctaaattggttgatccgtcttattcatgagctttgctta

SEQ ID NO: 32282 - DNA, 402 bp, Setaria italica
  Peptide Sequence Number=SeqID_98256
ataggagtttggagttaggacgatgcgagggacttggaactcgccacggtccggaaactggatgggtgcaggttggtctccagattggatttgaagggactgcgcaatttttgcggaaaatgcggcaaccgagttccttagaccaaacggggtgagggaaggaccttgcgccgaccttgttgggcgtagtgccgcctcagagaaatcgatgcactcggcaatagtgttgctgatgcgatctaaccccgcgatcaggtcggagggcgtgggtgggcgggttaccgcaaggatgttcggaatcctcttagagagagagagatcgtcgacctgctgggcaagcggcgtgatgatcctcaggtgaagatcttgctccatcgaagtagatccgacggatgctgagtt

SEQ ID NO: 32283 - DNA, 523 bp, Setaria italica
  misc_feature (216)..(216): n is a, c, g, or t
  Peptide Sequence Number=SeqID_98257
tttaaggttagaatagaaggtagactgaatcgtgccatagattcaactggaacgagttttccatcaacctgattggtgaaaacaaagaaacctcatcaccagcagaactctgcagtatagtatcaggtaccgttgatggatcacaatgatgtccccaacttcctaaatcttcttcagaaggtcttccaatctgatgatgtgaactattcattttcngcaaacatccagaaatctctccaaatccaccaatatcaatataatcttgcactcctggcagcgaagacttatgctcagttgctcctaaatcaaaaccattaccatctaaaagcgaattcccatccttgttacagcggctacacttcaaattttcatgtatttcagacctgacttgttcatgaaaagtaaaaagatcacgtaggtcttctgttgaaagagaactcccctgcattttgttgtccgtttgctcctgctgaataactttccttgggcctttcctttgacatttgacgttgatataccttct

SEQ ID NO: 32284 - DNA, 318 bp, Setaria italica
  Peptide Sequence Number=SeqID_98258
cgatggccttcttgtcgttgtagaggttgagctcgagcgtctcggaggtcattgcgtccgggtcgtggacgaggaactcgaggcgctccccccagtgcgggttgaggtcccgcgggcgcgtggcagtgcggcggcgctggccgtcgaagtcgacgacggcgtaggcgcacgccgtgccctggccgtccttgggcatcaggttccgcgcgttgcagacctccaccaccacccgccgccgcgccccctcctccgccaccatcgcgaaaaggctactcgatcccgatcgcctggaagcttctccctcctccacgggggttg

SEQ ID NO: 32285 - DNA, 477 bp, Setaria italica
  Peptide Sequence Number=SeqID_98259
ttaggccacatatattatgacatgtactgggacgagaaaccagggtggaaaccacaccctccagagactagggaacaggaccatccaccttggtcatgacaactaacaaggtgaaagaaagatgctaatgatgatctgagatcttgtaagcaaagcaagattgattaccacatgaaacatgtttacttgggtcaccggagcagcaacttcgtgcttcaaagaagagaaatggaccggctttgtagttttgttcttccctagagtgattcaaagaagaagcatggggccctattgatttagatcgaggcaacatttggatcgcggcttatttattttttctttatttttgttatcatgttcatagaagtatagttgatgcaggcaccagctccaaaggagaagagggcattgttgttaactgttgtgcaaacttggctgtcgctgatgctataggaactgttagccggttgtctggct

SEQ ID NO: 32286 - DNA, 1512 bp, Setaria italica
  Peptide Sequence Number=SeqID_98260
cagctgtcaatttatcaaatatatatatgggaagaagatacctgataattaaccaatgcaaaatgagattcaacagtatgagcgccatctaatagcaaactttttggaatgttaggtttaaatgacaggtaacctcctggagagtcataatatgacggttgatcaaagaaagcattgcctctcgcaatctatggcgctttccttcagtacccgcatattggaaagtggtatgaactgcgtacggttccaaatgaagttgcttatacatgccctgcacaaagcatgtatggccgctgcaaaatatacttgccggtagtacacccaacttcagttttccatcataagaatatacaagaggttacctgtcattcaaacctaacattccaaaagtttgctattagatggcgctcatactgttgaatctcattttgcattggttaattatcagctgaaacaaataagaactgcacttgcaattgcgtctttgttaaaacggacactggtaatgcctccattatggtgcaggcttgatagaatgtggtttggacatcctggagttatggaaggaacaatgaccagacaaccttttctctgcccaatggatcatgtgtttgaggtgcatgttatgctaaaggacttgcccaaggaagagtttggcccgcacattgatttcagagagtactcctttcttgagaatccatcattacctaaagaggtgaaagaatcattactcgaggttcaactctgtgatgatcatagctccagatgctctgcagttaatggaactgataagcacagaccccttcttttatctagaaatagcactgaagaaaagctgttgaatatcttctcatcatataagagtgtcaaagtcatacaattctcatctatggttgatgcctttggtggttttgctgatgcagatgtggagatgaagttccggaatcgcgtgaagaggtatgtgggcctgtggtgctgtgtagagttgcgtgaaattggccacatatattatgacatgtactgggacgagaaaccagggtggaaaccacaccctccagagactagggaacaggaccatccaccttggtcatgacaactaacaaggtgaaagtgctaatgacgctccttttgtagtggagcttagttttattttctaacatgtatttttttctaaaacctgagacccatactgccacctcagcttctaacaatggattacttcatgctgtgaagttggttctatagttcgtttgtggtgttggcaatccatcactggttgtgcttaaatggccatgcatgtcatgtttttcctctcccctcccttcatccctctcaacccttgtagaaggtccaaacagaatagttaactgatatttgtaaatcagttatgaaacaaaatttccttgatcaataatttcatggcacaggtgcatgttatgctaaaggacttgcccaaggaagagtttggcccgcacattgatttcagagagtactcctttcttgagaatccat

SEQ ID NO: 32287 - DNA, 929 bp, Setaria italica
  Peptide Sequence Number=SeqID_98261
ccaggatgtccaaaccacattctatcaagcctgcaccataatggaggcattaccagtgtccgttttaacaaagacgcaattgcaagtgcagttcttatttgtttcagctgataattaaccaatgcaaaatgagattcaacagtatgagcgccatctaatagcaaactttttggaatgttaggtttaaatgacaggtaacctcctggagagtcataatatgacggttgatcaaagaaaagcattgcctctcgcaatctatggcgctttccttcagtacccgcatattggaaagtggtatgaactgcgtacggttccaaatgaagttgcttatacatgccctgcacaaagtatgtatggccgctgcaaaatatacttgccggtagtacacccaacttcagttttccatcataagaatatacaagatcaccttgtccttcaactggctgtccaaaaactttgcgtacaagatcattaaaagcattctggtcccacaacttatcatctgataggactaagtctttccaatcctttgacagtcttttagcaggttcagttggtcgccaatggaaaataccaatattgaatgcaccagtaacttccctccagttctccaggctgtcgtcggtgacggtgggtatgacctgatcactggacgtgaggagatccgcgtcggggtatcgggcgaggtagggtaatgggttcttgagccacaccatgtccgtgtcgcacatgagcagctcgtacccgaatggcaggagcgcgttgatgagcagcaccttctccctgcccatcttgtggaaggtgggggagccccagccagcgtcctcggtggccatcctgctgcccatgtcgaagacgggcacgccccggaggtagagctcccgcagcagcttggtgtccatggcgccgacgaggaggttgtcgacgcc

SEQ ID NO: 32288 - DNA, 906 bp, Setaria italica
  misc_feature (789)..(789): n is a, c, g, or t
  Peptide Sequence Number=SeqID_98262
attttaacaacacctcttggtagcttctctatttttgttgcctttatgtccagtgtttggaggttggagagctttccaaacgaatctgggagtgatttaactcttgtgcgacgcagaccaatgtagcgtagattaaacatatttcctatggatgctggcacttcacttatttcagaatcttgcaactcgagaactgtcaggtacgtggattcagaaagaactgaagataacaactgaggggaggatccaattattccgagtgcaactgcggttctaaggcgtggcagttgaattttaactttcagtgaagttttgtcctgccatccacaggaagacaggcgacgaacacccttgtccatcttcaccaatgtgccaaaatcatacgcaaaacaaaacttctcctctttagcaacagaaagtgccaggtcacgtacaaggtcatgcatcttacaggtgcggacccttcctagctcatcgttctcaacagcttccagcatattcctttggatcagttcccttaggtatctgtcggccacctcctctggtgtgctttgttcattttgaagcgcaaaaccttctgcaacccatagccaaacaaggctctctcgtgacattaggtgatcctcagggaacaagctacaataaaagaagcagtttctaagatttccaggtaagtcgtggtagctcagatttagaattgcacgaacatgatcattgttcgtcagctcatcctgaaattgcttgtatgtttcgttccaaacttgtttaattggtggcagtgcagacaanaggccaccatggttacgattgcaagtggaagtccttgacacctatccactatattgttggccagcttctcaagttcatcggggcagctgcaatttatgctgttatagaaagcctttc

SEQ ID NO: 32289 - DNA, 975 bp, Setaria italica
  misc_feature (956)..(975): n is a, c, g, or t
  Peptide Sequence Number=SeqID_98263
cggggcgcccggcccgcggtgaggcggatggacgcggtcaggcaggcgctgctgctcttcgtccacagcaagctcaccatgtgccccgaccaccgcttcgccttcgcctccctcggcgagaccgtctccatggttaagaaggacttcagcagtgatgttggttctgcaatggaggcaatccattccttgtctgcttcagaatcaagatatgcaacagctgatctcacacagctcttcaagatagcttgccaggaagggaaaatggcagaatcgcaaggccggcttctcagggtggtactcatctactgccgttcctctactaagcctcaccatcagtggcctgtaaaaccaaagaatttcaccctggacataatctatctccatgacaagccaactgctgataactgtccacagaaagtatatgatgccttggttgatgctcttgagcatgtcagccagtatgaggggtacattctcgagactggtcaagggcttgctcgcgttctctttcgtcagatgtgcattcttctgtcccatcctttgcaacgttgcatccaagatgaccttgatattcccaaacaagttgcaaagaaaactccagcaattgaagctgtgcagaatgaagatggagcgccagtctccagccagcagtaaggtcttctagttgaatggtatgcaaacatgaagtacctgcaagttctttagcattaccattgtactagatccgaatgcctgttctgtgtgatagagatgccatatcagaattttgtgtactatgctgtaactgtaaatggccaaggagatttccttttgtcgatgtgctttgctaggctgggcatgcggaatgtaacttcgcatgatacaaatagctcaaatctttggcagttaaatttcctctgtttgcaaagttcactaatttttcgtcttatgcaaggggaaccttttctgtcatagtnnnnnnnnnnnnnnnnnnnn

SEQ ID NO: 32290 - DNA, 310 bp, Setaria italica
  Peptide Sequence Number=SeqID_98264
aaaacctcgagcatcttctgcctcccattttgtctatacccaaggttgtccatcatttacatctggttgcaaccagcaaaagagggcagctatgagatatatgatcaccttacccattagaatccccaagggaggttggggaaaacaccgatctcgcacaggaacttgatcctcttttcctcctcagtccgtttcgctgcttcttttcgattattggagctgtattggaggggatctagagggggaagggagcagtagagaggaggaggtgtgctggggaagagatgtcgtgaggaaggagaagggacga

SEQ ID NO: 32291 - DNA, 1215 bp, Setaria italica
  Peptide Sequence Number=SeqID_98265
aacaacaattttgtcaacatccaaaacctagagaaaacctcgagcatcttctgcctcccattttgtctatacccaaggttgtccatcatttacatctggttgcaaccagcaaaagagggcagctatgagatatatgatcacctgcaaaatacaataaaataaaagggtcagacataatgtagccaccctactgctatttgtttagtatgacttaactagacacaccttccatactattgtgatgctcagcaaggatcaaggtaacaggctttaaaaaatcagcaaggaatctcatattttctttttgagcaatttttatctgaaattattactgaaattattagttctgtttgctaaggaccagaacaagctcagatgcatggaaccaacatataactgccagaattgaaaagcatgttgtatatctgtgctcaactgttgagcttaggttacaatggaaagtatgactaatttgctcttggagaacacaaagcaggatgagcagcaatagtaagtaaacccatttagtaaaagatagatcactggggaaaagacttctgctgtaacaactctcagcaatttggtaaaaaaaaactgtgttgcaacctaataaatgtatatgccatatcagagtccactatgtactgctctgccttgctacaaaaaatgagttgggtattagaggaatgggcactgagcacttatcagttctgttaagaacattcatgcaatgcagtaacttactttaggaaattgcactgttttgaaataaagcgttgagaagtagatgatatactccatagcagcatatccaatactcctaatgggagttaaaaacaggtctagtatcattggcaacaaccaggaaatcatgtaattcagatagaaatcatgacaagacttactaagcgcatctctcatgcttggtgagtcaaagtaaaacagtacaccaatcctaatggaagcagaagaatatggagatagcagagtcaacaatgagttctatcattgtatccatgcattgcaaaatgacgaaagacatacatttggtcaacgagtctgcttgcagttcaatttcatgtacaaaacattcgcgagcaataacccagccatatctggagttctactccaccgaaaactgcaattaagtacaatccagaaagtttacaaaatcctctacgagtttctaaactattgcagcaatcaattcagcac

SEQ ID NO: 32292 - DNA, 464 bp, Setaria italica
  Peptide Sequence Number=SeqID_98266
caaactaaaatgctattgtccgatggcttacttcatgaacatcttggtcttggttatctctcaaaagatattgttatatctgataatttatcaagggctctaggtattcatgactacggaccaaacattttgatagatgccatctcatctatttgccgaattgatggctgtatcgagtcattgggcctggagtggctatgcgcttggtttgttaccctttatttgacgttgctttctcattcttctcgaaatgtttccttaacaagaagcctcgaagatgatctgttgaatacggttagaaaaatacgatgcatcccactttcagacggttcattcagctctgttgaagatggtcctatatggttaccatatgatattgtcaattccattcctgaaagtagcattcagaatttcccagttatgtatagtaatcttcgaactgtaagtcctgatcttctctctgc

SEQ ID NO: 32293 - DNA, 1840 bp, Setaria italica
  Peptide Sequence Number=SeqID_98267
actaccgacccgaacccgaagacccgaccccggcggcatcgagagcggcggtcaaagctcgcgccgcgtcgccgcggtttccacggctgcctgctctcgggagctcggatcagagggcgggctagggttccacagcaagcgagcgagaggtatctgagcgcgctgccttcctgcgccgccggcggcgggggagttggagagagtgggagagatggacgagttcctgcagaagctcaagcggctggacgcgtaccccaaggtgaacgaggacttctacaagcggacgctctccggcggcgttgtcacgctcgtcgccgccgtcgtcatgctgctgctcttcatctccgagaccagatcatatttttattcagcaacagagactaagttagtggtggacacatcaagaggagaaaggctacgagtaaactttgatgttacttttccgagtatcccttgcactctcctcagcgttgatacgacagatattagtggagagcagcatcatgacattaggcatgacattgagaaaagaagattagattcacacggtaatgttattgaagcaagaaaaggaggcattggtggaacaaagatcgagaggccattgcaaaaacatggaggaaggcttgacaaaggtgaacaatattgtggcacatgttatggtgctgaggagtcggatgagcaatgctgtaattcttgtgaagaagtcagggaggcgtataagaagaaaggatgggcccttacaaatcctgacctaattgaccagtgcacaagagaggattttgttgaaagagttaaaactcagcaaggcgaaggctgcaatgtccatggctttttagatgtcagtaaagttgctggaaatttccactttgccccgggaaaaggattttatgaatcaaacgtagatgtgcctgagctatcagtacttgaaggtggtttcaatattactcacaaaataaacaaactgtcctttgggacagaattccctggtgttgttaatccacttgatggtgctcagtgggcacagccagcatcagatgggacataccagtatttcataaaagttgtcccgacaatatacactgatataagagggcgcaagattcattcaaaccagttctcagtgacggagcactttagagatggaaatgttcgtccaaaaccccaacctggtgtatttttcttctatgacttctcacctataaaggtgatattcacagaagaaaatagatccctactccactacctgacaaacctttgtgctattgtgggcggcgtgttcactgtctctggcatcatcgactcattcatataccatggacagaaggcactcaagaagaaaatggagctaggcaagtacagatgatcaacatcgaccttatgcgggccctcaccatttccaagttctgtggcatgtaaggagggatgacgagaagccacttacgttgctgaggtttcaaggccaacaaactgatgttattgcacgtttgctgatcagatattacctgtaaaaagacaaggaatagcctggtctaggggttgggggagtgctttgatgtctatctcattgttggctgtccttaatgggccgaactggtgaggtggggtaatttggactcgggcggtggatagatcatagatcacacggaatgtttctcgtgaaagtctgttgaaggaaacagcttcactcatggtgtcgtgcatctaactttgttgctgctgcttttcaggacgaactagaacgattccatttgattatattgcttttcacctccttaaaaaaaaaaaaaaaaaaaacaaaaaaaaaaaaaaaaaaactaaaaaaacgtagaacgaaccg

SEQ ID NO: 32294 - DNA, 180 bp, Setaria italica
  Peptide Sequence Number=SeqID_98268
cgctcgcgctgtcgtcagccgacccatggtgttcacggctcgccgcgccatgtccaagttcggcgacgatgctgcctatgagaagggcaaggagcgcgggaacgccctggaggctgagtggttcaaccgccacgagcgcgacgtgctcaagaacctgctcaacaagatgaacgaccacca

SEQ ID NO: 32295 - DNA, 557 bp, Setaria italica
  Peptide Sequence Number=SeqID_98269
atcctcagcggcgcgacgacgactgcgcctgctgcggcggcggccaagaagaagcggcagcagcgaccggccgctattggctggcgccgcccgatgccgacgtgaagcggaccacgccggtacgttccgcgaacgccggtgtcccggcttcccccagcgccgtcgaatgccaccaccgcacggaggttgacgaggagcgcgaggaagaagacgatggcgaggacgaggacgaggacgagtcgtcgaagaagcagctgagcccggtatccgtgctggagcggcgcctgttcgagcacttgccgccgccgccgcacgcgcagaaagccttcgtcctcttcagcgagctcctcgaggcagcctgcacacccaccacgctgctgtccctcctcgccaacgccaaacagttcagaaacagttccaaagacggcggcggcggctcaacgccgacgacgactccacgccgattccggaagaagaacaacagtcatgcgcgacgggaagacacgcttccgttcgagagagacctcgccacggcgaccgcgctcgtatcgtccgag

SEQ ID NO: 32296 - DNA, 348 bp, Setaria italica
  Peptide Sequence Number=SeqID_98270
aaacgaaacttaaacggaactaaccttaacggctccttcgacgctgcgggctaacaccaacagcactacgcctacggcgcccagaatcccctgcccgtggccaccccaccgcagcggccgccgccagcgactgcgccaccttcgccgccgaaggcgagctcgtgggactttctgaacgtgttcgagaactacgactcgtacgggtatgacagctactacgactacgattccgccgcgcctgctaccgcgtacacgccgagccggagctcgcgggaggtgcgcgaggaggagggcatcccggacctggaggacgacgaggaggaagacagtgtggtcgtgaaggagttg

SEQ ID NO: 32297 - DNA, 291 bp, Setaria italica
  Peptide Sequence Number=SeqID_98271
gtaggtgtaggcgaaggagtgggagaggagcagagtggagcacgggccgaagctgcccggcggcggccggtgcggccggtccacttcgaagaaggtggtcggctgatcctgcggcggcggcgcgaccgcttcgagcgccgcgacctcggaggcggagagacggagcttgtgatgaggcgaagcaatggaagccgggactaggcacacgacgatgacgaggtggaagagcacgcaagagctggccatggctgatccccgagactccgagagtggagggagtcagggagagag

SEQ ID NO: 32298 - DNA, 455 bp, Setaria italica
  Peptide Sequence Number=SeqID_98272
tcttcaagtggggcaattgatgatgatggccgttcttcaagtatggagcactaaggacaccaacttggtcgtggaggaacttgatgtactcgatggtctcatggagcaccgatgcagtatccgtctttccaaaaggggcgactagttgttggagtgcagtgatcctgtcccctagcttctccttcctaaccttgaaggttggcaatggcgacggcgtctccagcctcggtttcttgaacgccggctcgccgctcgccttcttcttgctgatgattgagctagactctcctactccttccaacacagtctttaatgtaagggttgctgcacgcggcgccggcgatggcttgacagcagaacgtacgctagcttggtcaggcaccgccgccggcacgccgaacccggcagcagacgagttccagaagggcgcgtcgttggtgaactggagtggctcc

SEQ ID NO: 32299 - DNA, 457 bp, Setaria italica
  Peptide Sequence Number=SeqID_98273
tggagttgtattgtactagtatcatgtaggtcactggtcacagtacgtagttgcgccaagttttttttcgttactacaccatacgagcagagaacgtgatccgcgaggcagccatcaaggatgtaggttctctccgttggattgtgcagcgggtgtgctagggtagtagacaccaggcccgccgccgggacggggcgtgtagggttgaccacgacctgggcacggtccgatgcacgcaggatggttggggtccaaagctccgccggaacctagcccaacgccacggattccatggcagacggagctgggcatgatcaccgcggagacgacgagcagtgcgagcacgaggaaacgggcggttttggtggaggacgccatcgcgcgtgctttggctcgcagcgagctgtttgcccctggttgggtttatttcctgtgaatgggagctatgctagctgct

SEQ ID NO: 32300 - DNA, 541 bp, Setaria italica
  Peptide Sequence Number=SeqID_98274
gtgccagaacgtcgtccatggctctggcgcgtacaaggaacaaaaaggacgacgacgaaccaatctcacaatcgcgaaaagcagacaagcaatggcgaagcaggcaagcaggcgcctatatgaatttatttatagctcatcatcatcatcatcatcggtcagttgtcagcggcgtgcttcttggcgtccttcttctggtggtgctcgtggaacgcgaagccggcagcgcccagcgccgccaccgccgccgcctcctccttcacccggtgcccgtgcgcgttctcggggtccttcttcgccttgtgcttctcgtgaatggcgtaggcgccggcggcgatggcgccgagcccgccgagctgctccaggtgcttgtggtgcttctccttcttctcgtagtccacctcgccggcgctcgcctcctcctcgccgtcgtccttgctgtgtcggtggaacaggtggtggtgcttcttctcctcagccatggccggtcgtcgagaaactagtgatgacagctgtaagacctttcgatggtgtctttggt

SEQ ID NO: 32301 - DNA, 399 bp, Setaria italica
  Peptide Sequence Number=SeqID_98275
aatgaaatgcaaggatcacattatatgaaatattctagtttggctttctggagttccgttttatcttcacgctgacctgtaacagtaaaatttaacaataatacaaagagtggaggcaaattcaattactcatcaccgcacatccgatccttgcccttttgattcgagatttgatgaatgtggtatctctcctatgacggtccaagcgcttactgatgctgggtatgtacagacaactgtggtgcaagaagcagctcttcctatatgtcttgacggtaaagatgttcttgtcaaggccaaaactggaacaggcaaaagtgcagctttctgtcttgaatgctatgaagaacaatacaaatcatcgagtatctccaactatttgtctcttgtcctctgccc

SEQ ID NO: 32302 - DNA, 1782 bp, Setaria italica
  Peptide Sequence Number=SeqID_98276
aggaaaacaatgatctcgcaggtagaatccgagagctgcgggaggagatcaaaaatagggaggttctgggtactgagaggaggcgttacgagtccaagggcgaatctctgcttaccagtaaaagatttgatgaatgtggtatctctcctatgacggtccaagcgcttactgatgctgggtatgtacagacaactgtggtgcaagaagcagctcttcctatatgtcttgacggtaaagatgttcttgtcaaggccaaaactggaacaggcaaaagtgcagcttttctgcttcctgcaattgaatcagtcttgaatgctatgaagaacaatacaaatcatcgagtatctccaatatttgctcttgtcctctgccctacaagagagcttgctatccagcttacagccgaagcaaatgtcttgttgaagtaccataaaggaattggtgttcaatctcttattggcggcactagatttaagcttgatcagaaacgtttagaatctgatccatgccagattttagttgcaacacctggtagactgctggatcacattgaaaacaaatcatcattctctgtccgcttgatgggattgaaattgcttgtgttggatgaagctgatcatttgctagatttgggtttccgtaaagatatagaaaagattgctgatagcttgccacgtcaaaggcaaacattgctcttttcagctactattccaaaagaggttcgaagggtttcacagctagtattaaagagggaccacgtttttgtggatacagtgggcctgggagctgttgaaaccccaactaaggttcagcagtcgtgtcttgtggtaccacatgagctgcattttcatatggttcatcacctacttcgagagcatattgatcgtgaagttgattacaaggttattgttttctgcacaacagccatggtgactgaatttatgtatatcatgcttcgtgatttgaagttaaatgtcagggaaattcactcaagaaaacctcagctttatagaactcgcatatctgaagagttccgggactctaatcgcttaattcttgtaacatcagatgtttctactcgtggggtgaattatccagatgtcacccttgtgattcaggttggtgctcctcctgatagagagcattatatccatcgacttggaaggactggaagggaaggtaaatctggtgaaggaattattttgcttgcgccatgggaagagtatttcatgaatgagataggtgatcttccaattgagaagtatccagcaccagacattgatcaggagatgaaacagaaggttgatgattcgataaaaatcgttgacatgagcatcaaagaagcagcgtaccatgcgtggcttgggtactacaactcaatcgctgacatcggtagagacaaaaccatgcttgctgacctagcaaaccggtttggtgcttcgatcggtttggagaaaccaccagcgctataccggaaaaccgccctgaaaatggggctgaaggatgtccctgggattcgaataaggaaataacctgttcctctgttgagcgcagcacgtatttctttctgtattcccgtagcttttatcctagtctacaaatttgactctcatggatgtgtagtatatgctgttttttttttcaccgaagtgacatttgtgcactgagcttcctgttgggcgctataccgtttgaataaaacgggtctagtggcattatgtatatcagtcggcgttctagtcttgtggcattatgtatatagtccagtgtgaatgtgaaagc

SEQ ID NO: 32303 - DNA, 310 bp, Setaria italica
  Peptide Sequence Number=SeqID_98277
accgagactagctccgagaggcagggagatcatggctaggctggcctcggtggtgcggtggtgcggcgggtggagggagcggagggcgcggcggcagaagctgctgcgccggcggcagcacagcggcggcacggtgtggcttggccggcgcaggagctgccggctgtccgtgtcacggctggtgcggtggcgcctagtggcggcgctgctgcggcccatcaggaaggcgcgatggagatagtcgccggcgcggcggccggcccggccggccggcggcagctggtgacgctgccgcagctcaacttccccg

SEQ ID NO: 32304 - DNA, 464 bp, Setaria italica
  Peptide Sequence Number=SeqID_98278
tttttcaaaactttcattatacaattgacatattcaactgctgagtacaacttaataggaatatggtgctattctttttttttttcttaatttagcttatgcagatattttgttccaacgacatccttatcatgatgccattcatctaattaatgactattaattaaagttggaatttacactgtatgcatgttctatggttccttttttatggattgtttttgacaacttggtatgaaaaaaaatcaactgaagagctaaaacccaaaaatatatgctctcatgtacaatgtatggtaaatgtattcagaattttatgaagtgcttactttctggtggtcagatttgttcttattttcatattagggtttctaagtttgacatttcttgtggtcctttgctgtagcaattgctttctatttctttcatgttttgtatgtttgtgaacttttaattgctatatg

SEQ ID NO: 32305 - DNA, 327 bp, Setaria italica
  Peptide Sequence Number=SeqID_98279
aaccaaacgactagtggttgtggggaacagtgaagactgcatcccgaacaggggcaggtggaactacaataacaagaggctattggatcctgtcaagattgagcgttgggctatcgttaatttttctgctcgttgtgacatgagcagaatctcaagagagttgataaactgtggacgaagcaaaggcatttttatgaacgtcctcacacattggtggatgaggacagtcaatccaggagatgttcacctgttgaaagggttgagaggatgttcgaaaaagtcaaaaccagccttcctggccctccggagtttctgttgtgtgtttta

SEQ ID NO: 32306 - DNA, 2145 bp, Setaria italica
  Peptide Sequence Number=SeqID_98280
caaaatttcatccagacagaattttaagctcacaggcgggaaaaacattggggagtctagcttaacggtgcttttcttctaaaacctttcatccaaacagaacaggccctaagatttgtattctacagaatatgacgtaactttcaagaaaatgagcagagttacagataagagaaaggcagtcatacaacacgggaatagagctcagtcagatgagaaaaagcgactggccactaatcatttggaagcagcgctgcaaaatatatgcaaggaaaggaaaatatgaaacctcagcaactgtaacagaactgctgctatgtcagatccaagtcgtcgggtatagaattcctcaacaaaaggatatggtacaaatcaactgcatgcttgactcatctgcggtggtggtggtgcctgctctcatgcctgtctctgtctctgtctctgtctctttctctggaatggcgcgacgacatctcggagctcgagctgtaatggcccgagtactgcctgctagggtatgagtgtggggtccaagcactgtcatctgctggcagattctcataacgaggtgggcttctccaccccctgtctgagtgcgacctccctaagctcgggctcaactgcccatagtcatgggaaaggtatctcgatgaataatgatcggtaccaggaggacctctatcccggtaatcccttgaatccgatgagtgatggcggccagatgactggggtggggcgctgccccacagccagcggtctccattctctgggatgggggcatttattccagggaattccactgtcatccttttccgaggcggggatagttcaccttgctctggaagctctccctcctcgtagtctagtttcacctcgctgtctccaaatatggtgataccagaaggtttgtcttcatcatcgaccacatctaggtagcctggaggataacctaactcacgcattctatgcagccaaggagggggatcattttccccaatccccaagcactctctagtttcaggtcccagtactccagctttcagatcatcaaatttgccaggtgttttctggtaatatcgattctgtacacggtgagcattagattggtttcttttcaaattatgctgcttccgggcattgctaattgcaacattgtcccgaggctttgggcaatccttcagagcatggctataagaaccgcaattgaagcagcgagaatcatccttatctgcccggctttcagtgtttgatgaatcgcccagaggagttgagcccaaggtaaactctcgatcatacagtggaacagaatcatcatccatggtagtattctcccttgcttggttatccacccaaaatgacacagcacaagacttctcagaaccaacatgtaatgctggataataagtctcttcgccactttctaagatctcttccgcagcttccttcgatttgtgctgccttctggcctgccactgagaccactgttgcatcagttccataagctttcttttgctttcccttgtcaagtcactgaagatgacacgaactgaaggctcctttgattccacacgagctcttttaactcctcttgctgggctttcttcaagagagatgctgtttgactcaaaaactgatgcattttcagccccaccacccttgtccagcttgacctcaaaaccaattacagtctgtacagctgcaacactgacctcgggctgaatggaagcatctaatagctcatcctttacaaccacatcatcatcatctgcgaggtccatatcttccacttgcccctcttcaagatctatgttcccatcagacggcttgggactactagtactacccacagcacaagcttccacttctggttggagttcagacgccagaggccccgcgttgcgtgtctcaggagcttcaacctgagggtctcccccttcacccttcgcatcagcctcgcaaggtgcctcaaggctgatgaactcgtctgatgccatcttttcgcggggaaattacactatttatattcacattacgagtcgaatctcgtgggtgctcgttgccggcgaagggcaagacgaagacggcggcggcggcgctcgccagtcgtcgccgccgggaaaggaaggcagaggcgggggtgaaccg

SEQ ID NO: 32307 - DNA, 723 bp, Setaria italica
  Peptide Sequence Number=SeqID_98281
cttctgaccgagcttctcgagtatgtggccaaggtaggagagcacgctgtcactccctgcttgtattcaactgaagtccttgatggtggcgatgccaatggaagacgcgtgaaaccaagaatctaatggctgcccagatgagactagaagaggagttcccgtttttttgttaaagtccaatcatgactccacagatacatttcattgcatttcatcatttcaattgaatacagtcaatagttaaatacagacgactacgaatcgacaaatctggactagcacaaggtgaaaacttctgtgaaaagaacattctgcgccgtcattcccactcgatcaaaccttgcgccagaccagctttgccatgccacctgtgtgcaacttatgatcactagctgcaaagcaactgtgcttcatagcaatacaattggagtacacgagtcagtaggatatatattagccatagctcgctccacagtagaagcaatagggccaggaagagggatggaagtcacaacacacacaaacacacacgctaagcattcatgatatggcaccacaaaagcaccgatgtaggaaacactttacaatgaaaaagaaacaaggaactcctcttctagtctcatctgggcagccattagattcttggtttcacgcgtcttccattggcatcgccaccatcaaggacttcagttgaatacaagcagggatgacagcgtgctctcc

SEQ ID NO: 32308 - DNA, 705 bp, Setaria italica
  Peptide Sequence Number=SeqID_98282
ctaagaaattggatgtaacatgcggcaaaggtgcctaatccttagaacagtgtaatatataaccagttgttgatgcatcataggcctctccaatctccaatatagtgttatgcctaatatttccaagaccagtgcagacaggcaataatatattgctacagtttatttttcagcgcaccacatgaatgtgatcctagaataaggatggctattcatctgctcataaaactacatagcaactaagacaggtacatcctcaatttaaccttctagagccaacagcttccatgagaaatcaatgtaaaataagtcaagatttggaaaattggtacttacctttcaaattctcaggcagagccacgaatttcaagcaaacagtttttagctggtaacagtggtgctgttcagccagcgccaaagtgttggcaactgtatttatagcaacatcttcacacagcttaagttcacagagcaactttagtctctccaatgcataacggtccgcagcagcaagtaaatgctgagccatcaaggtggacacccaagttgtatttacaccagtaagctcttcaatatccggcaactcatcccaatacatgaaatggagtaaagccttgaatactggagcctccatgtcttcgatctttatgcacttcatattcttatctttcatgggaccaaaaagttgtgccctgaataccggag

SEQ ID NO: 32309 - DNA, 688 bp, Setaria italica
  Peptide Sequence Number=SeqID_98283
gcatctccggcgaagatggtcgccgtcaggttcagggtgaggtccacctcgctccattcgcccttgcttgtgcttcgtatcagtcgtgggcgtgggcgtgcagtgcagtcccaccagcaccaggtgccaggtggaggggaggggtcatgcgaatctgcgatgagcaccctaagatctgccgcatgaagctttgagccaccaacgaagtccgcgccaaggctatgttctgtgcagatactttctccgcagatgaagaatagcaactatcagatcctcgacatcaatgagattctttgaagggaacctcacctcctcacctctggttgtgtaatcaaaacaggactggctgccacaacatggtacaagaagtaactcaccttcagtggtgacggcttcatgccagtgtcaggtcctttgcatttagatcatcaagactgcaatagtccacttcaagctgttcaaagcagtgcaagcgtgaaaactctaagcagttccacatgaagaacgtcaggttctctctggtgtactgcaaccgaccacctgccaggaagctgaaggccatcttgtttatgtgatctgactcatccttcctaatctgtatgcccacatagtttggaggatgaggattaaccttagatttattgttttatttattattcttattattttaaccctcccccccccccct

SEQ ID NO: 32310 - DNA, 290 bp, Setaria italica
  Peptide Sequence Number=SeqID_98284
cacgtacatctccgcgaggtcgtcgtagtacgccatgccggcgtcggggagccggatgcgctcctggaacgcgatggccgtcctgtagtcccccgcgccgacctcccgcgccacccggctgttggcgccgtccgcgccgacgacggcgtccacctccagcacgccccggccctggcccccgcccccggaggaggagatgtagtggacgcggtaagggtcggagggcccctccggtagcgagagcgaggtgacgaggcccgggacgagctccgccccggcgtcggcggcgc

SEQ ID NO: 32311 - DNA, 557 bp, Setaria italica
  Peptide Sequence Number=SeqID_98285
caaaattccccagatgctttctgatttttcagagtttggggatgtgtatgacctcaactttggtctgggagaagatcatccacctacaagcatggcactaagaaaggagtaccagcgcacaattctccagctccttcattgttaacatctgtgcaggactccacacttgcttccattctgctgcgcccatttccagccgtgcttagcagttgaagctggagcagcaggaggccatgattcgtcgttggccaccaagaaaggtgatggtcatggacactgaccacagtcctttcttctctgcaccagagcgtcttttggagctgatcctcgagtcactgtgaccggtggtggtgaaccgtatccgcaatcccagtggaggcttgacctgagaacgagattgaattgacatttggtgcagcagcagatgatcctccaataaccgttgccttgagaccagaattccagcgtgatcgactatcccagcaaagccctgtaaggaagcattctgacattggactgggaaaaggatcttggtcatgataatcaatctcatttca

SEQ ID NO: 32312 - DNA, 357 bp, Setaria italica
  Peptide Sequence Number=SeqID_98286
gctccaacgaatggcgccgccgctcctcttctacgatctcagcctcctcccatcctcctcctcgtccattggcggtggcggcgatgacagctcaaacccctcctcctcccgcctccaactcttagccgccacggcccgcgctctcgagctcggttacgccgccgtcgctctcgaccgcacccaccgcggcctcctcgccgactcccaccgctgccgtaccgaccttttcccgccactctcctctctcccgctcccgcccccgccgctctccatcgccgccacctcgcctcccccgcctccgagcccttccgccagtacacccgcatcaccctctccctcgactccgctgccgccgcc

SEQ ID NO: 32313 - DNA, 407 bp, Setaria italica
  Peptide Sequence Number=SeqID_98287
ggaggagagggggaagccgaggagaggacggacacgggcaccgcaagcgaagaggggaaggcagggcaggctgccaggcagcgcatcgccgccgactcgccgagcacgacacccgcctggatcctcccgccccgtgcgccccaccggccgccactcgcctctcggttcgctcccttccttcctggagcatggaggattccaacttgagaggtttggtgggtgaggaaattgtcatggagacaggcaaggctgcaggcattggtttagctgctggcagtgtgtggggtgcactattttctatgctgcacgatgggcctcaggttggcagtaacatcaagtatcctcagctgatcagaactggcaaggtgtgtgggcattatgcagctaactttgcagttattggagct

SEQ ID NO: 32314 - DNA, 502 bp, Setaria italica
  misc_feature (475)..(502): n is a, c, g, or t
  Peptide Sequence Number=SeqID_98288
cagggattgtctcaagccgtggtacactttatcccaagtttctactcaattgcggcaatggatggccaaactgcagagcatttgcaaaaggcaatctgtgaatattcgagcgacgagatcttaactgtgatgtgcatgggtcataataaaggatgggaggaagctgcctctatgttttctggtgattcagttgtgcttaagacatgtaacgctgctttgctagaagctgcagggaaatcatgggttgaggctttttctctcgctggtcttgggggatggaagcttcatggaattgtaaagccatgaattgttgtaactaaaaagttagttgtaatttttgtagctgtttcttgattctcagtttgccccttggcctgtgtagctgttcttacatgccattggagctattaacatggatagatagatgagattaattcatttctaaagttttaaaaaggtaaaccaaaaaaaaaannnnnnnnnnnnnnnnnnnnnnnnnnnn

SEQ ID NO: 32315 - DNA, 490 bp, Setaria italica
  misc_feature (273)..(273): n is a, c, g, or t
  Peptide Sequence Number=SeqID_98289
gtgaaagtacacacccgactgttcagtgcccatgcatcgggaccacttggtgggccgtggagttggagctatccgtattccatatcccacgtacatatactctctccatcccaaattactattcattttagcttttctagatatataacttttgctatgtatatatatctagctgcaaatcaaaagctatgtacatagaaaagctaaaacgaatagtaatttgggacggagggagtatataacatctcttgtcacaaacgtctggtggcttcngttttgttaccaactctcgtcttcatgctcaagtgagccatgagtcgtgaagattccttttaaattcgacaccgtctgcacatggcttagattatctctaattgccggacaaagaatctgctggaacacgaggtcgggacggacggcaagtacttggtccagaaatacatgttgtctacttaattggtactaagtaatttaggttcttatttagtta

SEQ ID NO: 32316 - DNA, 495 bp, Setaria italica
  Peptide Sequence Number=SeqID_98290
caagggcgccgccaagaccaagttctccaagtcccaatcctccaagaagctcttgtcttcctccaagccggcgagcttcgtccagagcatcctccccaagctgcgccggagccacaccatgccgtcacggtcaccgtctgcggcggcgccaacgtccaaggagggcgcgcaggtgcagtgcacccggagccggagcaggctgctggcgagcccgcgctcgtccttctcgtcgaactcgaggggagatgacgaagatgacggcggcgcggcgtcgtcgccgacatccacgctgtgcttccggacgcggcactccggcgggggtaccgggaggctgcacgggctgctggcgtcagtggtcggagggcaaggtaccaccgcttcttgattagggttcgcatctcccggtgttcttgatgacatttctgatttctcagggtagtgtgtgggtgcttctactatgtccgtctcggcgtcgtcttctacacttaccttgag

SEQ ID NO: 32317 - DNA, 483 bp, Setaria italica
  misc_feature (441)..(441): n is a, c, g, or t
  Peptide Sequence Number=SeqID_98291
cagcaatatttggcatcgatgaagcacggcgtgctgcgaagcatgacaaaccaaaagaggatcttgttgacctcatcaaccaggagggcaaggatcttagagttatcgcagtatggggaaccagtggtgatcttgggcagacaaccattgtcaacacggcttacgagaatccagttatcaaaaagaagtttccatgccgagcatgggttagggtctttcatccattcaatctgaatgacttcatccaaagcttagtgaagcagtttcgatctgccatggggattgatgttttgttggagaccgagaagacagggaaagagttggctaaggagttcaccagatatataaacgagaatagttacctaattgtgctcaatgacatgtccacctttgaagaatggaatgggattaaagcatgtctccccaacacaagaatggganccgaatcatagtttgcagcccacaagttgaagttgcaagctt

SEQ ID NO: 32318 - DNA, 631 bp, Setaria italica
  Peptide Sequence Number=SeqID_98292
ccggtatgacagggtggagcaggatgaagatgccagccgtgccgtcgtggaaatgagggatctcagaagaggccaatcaaacattggtgagatgaacagatcaagtggttctgtgcttcaaatggataaccttgaaagggaggttccagtgacttcaacagagctgccatcaattcagggtgggagttcacagcatgctgtcattcaaattgaacagcctgaggaagaagagacggcgcctctggtgtcggcagcatctaccaacaatgcagcttcggatgaggagcagagacaaagttcatcctcagagcctcctctggattttgagatgtttgagtccaccaggggcatcaagctgggccttggtgattttgttttctacagtgtgcttgttgggagagctgctatgtatgatctgatgacggtgtatgcatgctaccttgccatcattgctgggcttggctgcacccttatcttgctgtcaatatgccggcatgcgctgcctgcacttccaatctctattatgctgggagtgacattctacttcttgacgaggttactgatggagccatttgtggttggtgcttcgacaaacttggtgatgttctgacttctcattgatctgatgttg

SEQ ID NO: 32319 - DNA, 448 bp, Setaria italica
  Peptide Sequence Number=SeqID_98293
gattgattgtttcctccgtactggttgattgtaaaaaagctcccgaacaacaactgtggtgccaacaatttccctcttgtcatctattcccagatgtaggcatttagatccctttattatcttgcaatatgcatttggtctcccacgggctttcgtcctgatttcaaccacggagatatcagaaagtgatgcgagtgcttctccatttagtccaaaacttctaggactaagttccccatcgcccatcacattatgaaatttggatgttgtatatttttctcccaagagaaccaattcatctcgtgtaataccacaaccatcatcttccacttttacataacatgctctgatgtttattgcaatgtcaatcttgctcgctattcaacaatagactactagaatagtttaattagacaaatagtacaaatacttagactacgacaattac

SEQ ID NO: 32320 - DNA, 237 bp, Setaria italica
  Peptide Sequence Number=SeqID_98294
tcgaagctcacgagtgaaaggcgctggtgcaaagctatattcagaagcatacaataagtctagtagatcagatgactagataagtagagcagtgcaaaataatttttgttgagcagtgcaaaataatgagattctcttgtcatctcattattttgcactgctcaactaggctattggataaagttgttatgcatgtctatattttaatttgtccaatttttttatttcaggagacga

SEQ ID NO: 32321 - DNA, 259 bp, Setaria italica
  Peptide Sequence Number=SeqID_98295
tataaatggatatatactaaaattactatcagtttgcgacatactccctccgtcccatgaagagtgcaattctagtttttctaaggcagattagtggtggcatgaaaagactctaataccctcatttgttggcaacttggctacatgcggatacattaagaaaggcagatgagatctttggtccagaaaacaaggacctgtacaccatctttgagagtctaattactcgtaatgttcaatagattcctcgaggctaaaa

SEQ ID NO: 32322 - DNA, 1401 bp, Setaria italica
  Peptide Sequence Number=SeqID_98296
gccggagagcacagagcagaagtccaagaagcgcggagcaggtgaggggacgcatggcggaggaaggggaggaggcggtgccgccggccgcggtggtgggggacgacgacgcgggggaggcggcggagcagcaggacttcgggctgcccggggagctgatggcggtgctgccgtcggacccgtacgcgcagctggacgtggcgcgcaggatcacctccatcgcgctgtcgtgccgcctcggccgcctcgaggccgaggtggcgcgcctgcgcgcgcagctcgccgagcgcgacgccgaggccgaggacctccgtgagcgcgtcgagcagctcgacgcctcgcttgccgtcgccaccggccgcctccgccgcgtcgaggaggagaaggagacgctggtgcgcgagaactcttcactgtccaacactgtcaggaagctgaacagagacgtcgccaagttggaagttttcaagaagacacttatgcagtcactccaggaagatgatggcagtgataatactgctcccagtgcaagagttgctgcaagtccgaatttctcctctgcgccatcagatgaagattctgcacttccaacttccaaatcgtcacagttctcagaaactgcaagttcagtttcagaggaaagtagcaaagttgatccagatgcacctaggccaccgcgtccgcatgtctttttgccgtcatacaacaacacaccaaggatgacgccgccaggctcacctccaaggggtggttatgcgtcggtatcaccgccaaggcgacattcgatctccgttacatcaatgaatatgtttaatgacaggccctcaagctattctggtcactatagctctccatttgacgcagcaagtcaaacagggcggacgagagttgatggcaaagaattctttcgtcaggtcagaaaccgcttgtcttatgagcaatttggtgcattcctggctaatgtgaaggaactgaatgcacagaggcagaccagagaggatacattaagaaaggcagatgagatctttggtccagaaaacaaggacctgtacaccatctttgagagtctaattactcgtaatgttcaatagattcctcgaggctaaacatttcccatgactacttgcgacccatgttctaccggtatattgtgattatgatgttggtcgttttttgtatttgaagtctgtagtccattgaaggttcttggtatatagtttcctcatttttttttgcttatgcccatatagtcatgggttgtctgtaagctacaatttatacacttcaatacaaatggagaaaatattggaataaaaggaaatgtgttataggtgtgttatatctcgaacataatagacaagttgtgactttgaaacaactgcagaatataagtttctcaca

SEQ ID NO: 32323 - DNA, 262 bp, Setaria italica
  Peptide Sequence Number=SeqID_98297
gggcggcagtcgctgctgtgctcagtgcttgctctcatcgattcatcgatccccacctgattttcatcgatgggcttttaggcaagccaaaagattacaatactgaatttcagcagtttttgtagaggtaaaaggaggttttacgggcagaattttcgcggagctcaagcaatcaggaggtacgaggaggatccatcatccccatccccatctcatgcaagggggtgatagtgatggggtcgtcgtcccggtctacgaatcg

SEQ ID NO: 32324 - DNA, 1346 bp, Setaria italica
  Peptide Sequence Number=SeqID_98298
tttccttatttctttggttattcttggttattcttctttttagaacggcgaggccaggccaggcgaggcgagccgcttactccatataaataatttttgtagaggtaaaaggaggttttacgggcagaattttcgcggagctcaagcaatcaggaggtacgaggaggatccatcatccccatccccatctcatgcaagggggtgatagtgatggggtcgtcgtcccggtctacgaatctggcgccgaggtcctgcagaagctgcaggacaacaccaacaggtcgacgtacccggccatgtactccagcgtggtgggcggcatcatccttgatcccgcgatgatggtcctccccatcgatgaccacatggtccaccgcggccacggcgtgttcgacaccgccatgctcctcgacggctgcctctacgagctcgacccccacctcgaccgcttcctccgctccgccgccaaggccaggatcgacacggcgcccttcccgcgcgacgccctccgcagcatcctcctccagatgaccgccgcctcgggatgccgcaagggctccatccgctactggctcagcgccggccccggcgacttcctgctctcctcggccggctgcccggcgccggccttctacgccgtggtcatcgccgcggactacgaccagtgccgcgacggcgtgcgcgccgtcaccacgtccgtgcccatgaagccgccgctcttcgccaccgtgaagaacgtcaactacctgcccaacgtgctctccatcatggacgccgaggaccgcggcgccttcgccgccgtctgggtggacgaccaggggtacgtcgccgaggggcccatggtgaacgtcgccttcatcaccccggaccgcgagctcgtgctcccggccttcgacaagatcctcagcgggtgcacggccaagcgcctcctggcgctcgcgcccaagctcgtcgacgccggcctgctcacggcggtcgccaccaggaacatcaccgcagaggatgccaggcgcagcgtcgagatggcattcgtcggcagcggcctgcccgtgctgcccgtcgtggagtgggacggcaaccccatcatcagctgcgaggttgggcagctgatgatggcgctgtcggatctgctctgggaggacatgaagtccggaccggacaggatcgccgtcccctacagcggctaagtaccggttgtattggatttggatggatctcctatatgttatgtattcctgactgatgaatggctgcggagtgcattaataattggattggatgaataatatgcgctctgcatcttttcaacctctgttgttattgaatcatacatggatcaatcatac

SEQ ID NO: 32325 - DNA, 414 bp, Setaria italica
  misc_feature (23)..(23): n is a, c, g, or t
  misc_feature (50)..(50): n is a, c, g, or t
  Peptide Sequence Number=SeqID_98299
ggcgccgctggcggcggctggcncgggggcgtcatcggggagcggagggngtcccgcccgtcacctgcgtcgtgctcagcggcctcgtcagcttcgcgctcgacgccgccgaggaggccggcgtcccggcgttcgtgctgtggggcaccagcgcatgcggcttcgtctgcacgctccggctacgccagctccggcagcggggatacacgccgctcaaagacgagagctacttgacgaacgggtaccttgacacgcccatcgactggatcgccgggatcccgccggtgcggctgggcgacgtctccagcttcgtccggacgctggagcagctgctgcaccaggacttcttcaacggcaaggagctgtgcaagaacatcaaccctgatgaggctgttgcctacggtgctgctgtcc

SEQ ID NO: 32326 - DNA, 412 bp, Setaria italica
  Peptide Sequence Number=SeqID_98300
ttcacctaatctggagaagctcaccttgcggcactgcaagttcccaaaatatcctgaggaaaagaaagggaagaccaaactcaacaacacctcatcttctgagttccgtcgcctggatttcatgtgcgagaacctcaaggttgaaatcatatataaagatggcgatggccaccaactcgtcaagcttctgctgcacgcatcaagttttctgtcgaagaacaacattaaactcaccaaaagttaattaagttattgtgttagtgtccaggccttctatgtggttcatgtggattttgccgagcacattgtaggctcccttcagatgcatttaccatatactttctgactcgtttctaagtgatgcaagcctttgctctggcgactatttatgctaatgatgtttactcctttt

SEQ ID NO: 32327 - DNA, 614 bp, Setaria italica
  Peptide Sequence Number=SeqID_98301
ctgcagccgacgactgtccaccgccgcggactccgacgccgactaccacagctccgacggatccgtcatgcccgacgtcctcgccaaggccgggaggcctgctacaaggcacgggacgccttctacgcgtgcgtggagaagcacgcggacaagaggcccaccgagatcgccaccatggggctcctctaccccgccgactgcaagaagtcccgcgccaacttcgtcagcaactgccgccccacctgggtgaagcacttcgaccggcagtactgcgccaagaagcgggttcagaggctgctcgacggcgacgaggaccgacggggtcccatctcgcttccccagccctacactttcaagcaataggtagtcgtttctgcggttctgatattggtattgagctgaattggatcaagtactattttggtatccagatgctataggtttcaggcttgatatcggttagatcgatgcttatgtgatgtgtagcagtacattgctccgaatgttaatggataaacgaatttgtatgtgaattcctcaatatcaagatatccctacttggcatgtgagttgaaatacaattcttctcacggcatgcaggttgccggaatctt

SEQ ID NO: 32328 - DNA, 518 bp, Setaria italica
  Peptide Sequence Number=SeqID_98302
gttgcctcgtctattggtcgagttcgatccccattccttgctgggattgggaacccggagtccccaaccctagcgaggcgcgagggaacgagcaagcgggtcgacgatgccgagcttccctcctcccggcgccgtcactgtctgcgagatcaaccgcgacctagttgcggcagattccttgtccgacgaccgcgccaaggaagcatacggggatgtccttggaatggtcttcagccccatccctttccagccagacgctcttccccccatccgcgagccccctgctgctgagcaaactgagtccaatgagaatgtacccgcagctagtgtgacttcctccatatcagagttcttcaaacggatgatcttccctccacaagaaccaaatctgctacaaaaatttgacacccagaaaataagttggaatccgcacaagcattgtctagcatttgtgtccgggaagaaccaggttacagtacatgactttgaggattcagatgctaaagagccgtgcattt

SEQ ID NO: 32329 - DNA, 807 bp, Setaria italica
  Peptide Sequence Number=SeqID_98303
tagtaattagttaacccgtctagtcttagttgttgtactttccttcctattattctagtagtttctttctaaacggtattgcaaacggatgatcttccctccacaagaaccaaatctgctacaaaaatttgacacccagaaaataagttggaatccgcacaagcattgtctagcatttgtgtccgggaagaaccaggttacagtacatgactttgaggattcagatgctaaagagccgtgcattttgacaagtgaccatgttaaggcaattgagtggagaccaaatagtggcaagatgattgcagttgcctgcaagggagggatatgcctctggtcagcatcatatcctggcaatgctccattcatgaaagctggggtcacctcttcttcccttagtgccttccgttctggtgatcagtggatactggtggatgttcttcgtgattcttctgctgagcaagttagtgcactttgttggaagcctgatggaagatacttggcatctgcctcctgcaatagtccatcttttacaatttgggatgtttctcaagggttgggtactcctatacggcgtggattaagtaatatatcactactgcggtggtcacctagtggagattaccttctagctgctaaatttgatggaacttttcacttctgggagacaaacacatggacttcagaaccttggtcttcatctaatggatatgtgtctggagcgaattgggatccagaaggtcgtgtcgcattgttatccttttctaactcgacaacacttggctcaattcacttttcatctaagccacc

SEQ ID NO: 32330 - DNA, 1137 bp, Setaria italica
  Peptide Sequence Number=SeqID_98304
tgggctaactgcataaaattcaatttttgctgaattcctgatgtctacatccactgtgcatacatgaaagtttacaagtagtagtagttaatttgtggggaagaactaaccacttgtatatatagtttccttgacaaatctccacatacttggcatctgcctcctgcaatagtccatcttttacaatttgggatgtttctcaagggttgggtactcctatacggcgtggattaagtaatatatcactactgcggtggtcacctagtggagattaccttctagctgctaaatttgatggaacttttcacttctgggagacaaacacatggacttcagaaccttggtcttcatctaatggatatgtgtctggagcgaattgggatccagaaggtcgtgtcgcattgttatccttttctaactcgacaacacttggctcaattcacttttcatctaagccaccatctttagatgcccatctcctaccggttgaacttccagaaatttcctccctgattgtaagccgaggcatagagaaattagcatgggatgcttcaggggagcgtctggcattgtcgttcaaagatggaaatgaaatgtaccgtggccttgttgctgtatatgacgtgaggagatctccacttgtctcactatcactagttggattcattagaggacctggagaaggagcaaaaccacttgcttttgcttttcataacaaatttaagcaaggacccttgctttctgtgtgctggagcagtggctggtgctgtacatatccactgatacttcattcccattaactacaatcgactagtgtggcgtcttgtcagttcaggactgaatgttttaactagtgctgtcgacctggaagattgaatgtttcacttacaggtggaagacaatgtttcaagtactgttgatgtcttgtatagtgcactgcagccttgctttgttaagcaggtgcagtttctatatatgcgcctaggagaaatgcaaagcatgaattgcatcccgtgggtgtaacattgtaacttgtgaaagggagtctattaacggatttgtctccagatgtatttgacctgtattacatttgatttatgttgaatttaccggtttggtttttcaagttaaaaaaaa

SEQ ID NO: 32331 - DNA, 480 bp, Setaria italica
  Peptide Sequence Number=SeqID_98305
tgatttcctcaagggagttgacgaacagaagggcctcttgttcctttgtgaagcattccagcaattgatcctcgaaaaaatttaatgtagtgagcgaggaaaggagaaaactacatatgggtgtagcagtggctgcagctacatcatctatgctgagctcctgcagtttggaggaacgggattggtgttcttgttcttgcacccatgagggctcgtgatcaaaaaacaaagcgggcgttcctgcgacgtataatctggtgagacaaccttgagcaacgagagacaacaatccctcgcctcttagaggcacacatccggctgtggataaacttgtgagagagctgaggtttgatagaggttccagcgtctccatgcccaccgtgccttcaagacggatgtattcaagagagttggggaagggaaacaagaggaggatgaagacgagtaggagagtagcttggggcaattcatgacgcttaa

SEQ ID NO: 32332 - DNA, 331 bp, Setaria italica
  Peptide Sequence Number=SeqID_98306
ccgccgcgcaggccgcggcggccggggtgctccgcaacctcgcggccttcccggacctcctcccgtggttccgcgacgagggcgcgctgccgctgctgctccagctggtctccctcggcaccccgcgcgcgcaggagctggcgctcgggtgcctacagaacctcaccgccggcgacggcgacgagggccagaggctcaaggtcgaggccttccaggagggcgcgctcgcttgcgtcaaggacttcctcgacgccagccgcggcgacgagccgggcctcgcgccggcgctggggctcctccgcaacatggcctccttccgttacatcgccga

SEQ ID NO: 32333 - DNA, 450 bp, Setaria italica
  Peptide Sequence Number=SeqID_98307
gagttcatgaccagattataatgcttgaaagtgcaaaggcaactactgatactgttgatgctttgcgctctggatcatctgctgtcaaatctattcagcaatcactgtaaggtcccatttccctattattttgactacaatggctaattaaattgtagcacaccgcaactgaaaaggttgctattttctacatctctcttaatacaatgaaagtatattctcaatctagtagttatgtccaagctagctcaggggctcagccactcagggccttttgttacgaagtttgtgcccattctgaagttaactgaattcttgtattgctgggtcccatctagtaggccatatatactataatgttaataataactggtagatggatgaactggctgctgtaattcttgtgcaggaacatcgatgacattgaaaacgccattgatgaggcaaacg

SEQ ID NO: 32334 - DNA, 905 bp, Setaria italica
  misc_feature (865)..(905): n is a, c, g, or t
  Peptide Sequence Number=SeqID_98308
ccccggtctgcggtctctctccccacctcctcgcctccctccttccccctcctcgggcgcctcccggtcctcgttgccaccgtcgagagcgcgctgggctctagggcggagaaggcgaagcggcgaccatgggcttcatctcgttcgtcggccgggtgctcttcgcatccctcttcctcctctccgcctaccaagagttcattgaatttggaaatgatggtggaccagcggcaaaggccttgaagccaaaattcaatctctttatcaagcaagtgtccaagaatactggattgggggtgccgcatgttgatataaaaactgtcattgctgctaccatgtttcttaaaggctttggtgggcttctgttcatcttcagcagctcatttggagctttcctactgtttatttacttggcatttataacccctattgtgtacgacttctacaattatgaaatggagtcagcacaatttgtccagctgttcttcaagttctcacagaacttggcatttattggtgccctgcttttcttcctgggaatgaagaactctattccaagaaggcgctccaaaggaaggacagcaaaaaccaagacaaattaaagtcggcaattgtaggatgggaggctattaagctccttatgtttgcatactatacagaagtagatgccccacttttgttcttggtgcgccaattgagttgtgaattgggggggacttacagaacttagcatgtaggatatttaagttgtcttgcacaattctattttgtatgtcgccatgtgttttttatgtcatgatacattttgctacaagaactgctttggcagtgaaaaatcgaagttacatagtgtcaaaaaaaaaannnnnnnnnnnnnnnnnnnnnnnnnnnnnnnnnnnnnnnnn

SEQ ID NO: 32335 - DNA, 395 bp, Setaria italica
  Peptide Sequence Number=SeqID_98309
ttgtttctacaataggcatcgtatcaggttcaccatatgttgcacaagtactcgagtaaatcagagtatttacattatgtgccgccattgcttcaagcactgtcagtgtatttgatgttatgttgtggtagtacctgagtggctctattgtgctctcaccaacataagcaacggcagcaaagtgcattacagcatcaaatgcattctccgaaaatattttgttcacctgactattggttaagtgcaaaacagatctcagctgtgcagaaatgtagacacacacaaaaaaaacataagctcagacaaaggatacagctttggcatcgcctaaatcagcataaataaattgaagccttccaggctgtggaaacagccgttgcagaactcttacagct

SEQ ID NO: 32336 - DNA, 805 bp, Setaria italica
  Peptide Sequence Number=SeqID_98310
ttaatagttagtaggtaagtaacctagaagtaggactactaattgtgctctcaccaacataagcaacggcagcaaagtgcattacagcatcaaatgcattctccgaaaatattttgttcacagctttggcatcgcctaaatcagcataaataaattgaagccttccaggctgtggaaacagccgttgcagaactcttacagctcccatgttacctctggaaagattatccacaatggtaactcggtagttgtccttaaggagacgaagagtagcatgcgagccaatatacccagcccctcctgtcactaagacatgggttaccccaatttcatggcgagagaacacactggtaccgctgaaactaggcgactgtttcagcacaattatgcacatgaccgtgagggcagcagctacggcgatcttccccgtgaaattaggcttccgtctcgtatcagtgaagtccatccctggcaagatccaaggcctagtggtcctagcctggcttctactcctcggggttgctggcatgtgaagtcggctcccaagaatgaaaccagcaagaactcgacctctctcgtcttaccttgcaacctcgcggccgctcgctcgcagatcgacgacggcaggcggaggaagggagaggccggattcaagcggcgattcagccgcgccgcagcgagatcggtgcgcgtccgcgagccgcggaaacggagggaggcggcccaggtgtccaggccaagatggggagcgacgcggtgcggaggaggagggagggggaaggggagggaggtggcaaacaaaact

SEQ ID NO: 32337 - DNA, 289 bp, Setaria italica
  Peptide Sequence Number=SeqID_98311
ttttttttttttttctagaaacatacaagacactccaagagaagaacagaatgaccgtacaaatctgtattctgcgagcctacagaagtacagaacatacatgtttgagcatgaaactaatcacacatcgatcaactgacagatgcaggccacaaactcagaccaccgtagttgtttcaagcccgggcggcattttttgccatcagcatcctgccgtgctcgaccaagctgtcaacgtcctgcaagaccgccttggccgtctcgagctcgccgaaccggtccatccacg

SEQ ID NO: 32338 - DNA, 460 bp, Setaria italica
  Peptide Sequence Number=SeqID_98312
tgacacacttgtttgttcagagcctgatacaaaccaaggcatttgcaaagatctcagcagagctgaagaaaaagagagttgcatgtctatttccgtgcaacactatgaaagtggagggttcttgaggtcgagccacatgaaagattgggcaatgtcagcccagattgatttgtcagatgatgcccgtcttatgaaaggaatactggtgttgaggaagtgctttgtgaggaaaaaagagaaaagaaagtctatgcctacttcagatagtgatgttctccatgaaaaatcacgctccaatgaacatggaatttgtcgatctcatggccagaagcatattgttgaaattaactccaagcaatcgagttgtgattctgagatgatccatcaagatcataaagaagaaaactatgaacctaatgaaagacaaaatccttgaaaacggtatgtatgaagatgcccc

SEQ ID NO: 32339 - DNA, 726 bp, Setaria italica
  Peptide Sequence Number=SeqID_98313
ccccatgaagcgaaattacagaaacgcccaaaacttgctgttgctcccactccagccgtaggttccccgccggtacggtcagaggtccggcggcggctgcggcgttggcctcagcgacggacttgagcttctggaggttgagcctgataaccgtgtcggcgaagaggcgggtgtcatcctcggtgttgccgtcggggacgtcgacgacgtaggactcgagcacgacggtgcagatcccggggccggcgagctcgttgacggtggtgacggagcggtagttgcggaggcggtgctcgccgccggtgatggagaagccgaagaccctggcggcgtcgtcgaggaggtcgaggcgctcggtgctggtgctggcggggaggccggagatgacgctgacctcgcggaggcggccggggcggaggttgtcgccggcctcaggatccgggcggagcgcgcagctgcggatgaagtgcttgtacacctgcgggcagtcgaagcggcgtacgatggcccagacggcggccggcggcgcgtggatgcgctgcgccagcagagaggagcattggcccgcccccacggcgtagcggtggtgcgcctccaccgtcgaccgcagctgctcgtactccgccgccgtcaaccccagccccgccggaacctcaccgtccgcccccgcgccctgctggtccatcgccttgggctcgattggattcgctggggcgatttgggaag

SEQ ID NO: 32340 - DNA, 251 bp, Setaria italica
  Peptide Sequence Number=SeqID_98314
ccagcccggcatcccggcccagccacagccagggccaacgccctcttcgacccgacgccagccagcgccggtagcgcaggcaccgcgcccccgctcaccccggcgatgcgccgcgccccgcgctcgtgacccatggcctcgctctccgttcctcccacgctcccgcgggcctcgccagcggtggtgggcgcggcgaggtggaggagggccgcggtgcgggtgcgcggtcgcactgccgccgcggcattggg

SEQ ID NO: 32341 - DNA, 304 bp, Setaria italica
  Peptide Sequence Number=SeqID_98315
gccgcccgtcagagtgcccatccacgccggcggcagcatccctgtctgctcgtgcaccgtcgtcagcagcggcggcagcatcttgtacacacccgccagctccttcatcgcgccgccgccgctggcatcgccgccctctccaccggcgccgccgctccacacgctgatcttgggctcgagccccctgatggcgtcggcgttgatgcgcgccatctcctggtacacgcccgagctgaccatcaggtagtcccgcagcgcgccgtagctgccccaagcgcgccgagcatcgccgtcaggtacgccg

SEQ ID NO: 32342 - DNA, 275 bp, Setaria italica
  Peptide Sequence Number=SeqID_98316
tatagaaatgtttagttttatgtcgtccttatgttctggagagaataatattccttagttgttcaataacagttaaaatgtttcaaatatttgtcaatcttatttccttagttgttcagctgtttcttgattcaaatagtagaacagatgatatatctgtttagtcacatcagcacctttttaactgttaccctgctgtctgtaatcttcatattgatgtgatctttgtgctaacttttccagagttcgattaaactatcctgtagtttcacatg

SEQ ID NO: 32343 - DNA, 289 bp, Setaria italica
  Peptide Sequence Number=SeqID_98317
cgccgcactgctcgccttcacccgcaccgccgacttcctcgccgagctgcgctcctacgtccgggaggaggacggcgagatcatcctcaagctcgtcggcgggcttggcaccgccatcttcgtcctcgagtgggccgcgctcgcgcttgcctttgcgctccggctcgacgacgatggcgccgaggaagccgatcaggttaccaaacttaccatgtccgattctgctctgatccagcattgcagagcctgaagactggggagatactaaagcagaaatcatgaatgagag

SEQ ID NO: 32344 - DNA, 468 bp, Setaria italica
  Peptide Sequence Number=SeqID_98318
ggcgtttcaaggaagcgatgaaggatatcatgtctcagtgctgcagtcctgatgaagtcatctttggtcccgacttccatcagtctttatactgccatctattatgcgggttaatctactcagatgaagttcagtttgttttctcaccatttgcacacagtcttgtccatgcattccataccctcgaggaggtatgggaagatttatgtgctgatataagagatggtgttctctcaaagcaagtcaccgcaccatctatccgtcaagctgtttcaaaaatcttgagaccaaatcctgagcttgctagttcaatttacagcaagtgccacaatttgagtaattggtatggggtaatcccagcattgtggccaaatgcaaagtacatctatggtataatgacagggtccatggagccatacctaaagaaattgagacattatgctggacacttaccactgatgagtgctg

SEQ ID NO: 32345 - DNA, 311 bp, Setaria italica
  misc_feature (284)..(311): n is a, c, g, or t
  Peptide Sequence Number=SeqID_98319
tcaagctttgttgccgttgtttcttcggggtataacgttgggtgcatcagtgcatgtctctgcatgcatgatggaaaagagaggttcaggagggagcgttttatgtatccctaagtatgttcatgtaaccatgctcatggtactgattaccgaattggcatgtactgggaaaaaggtgatatgggtgtacaaatgcacaatctatggggtataatgcaaggtggaattggtggcatgttttttttcattccacttctgaatttaaagaaaaaaaaaaaaaaaannnnnnnnnnnnnnnnnnnnnnnnnnnn

SEQ ID NO: 32346 - DNA, 472 bp, Setaria italica
  Peptide Sequence Number=SeqID_98320
aactcaatgccaattccagttccaccggacttggtaagaaagggaagaagatcaggagcttcctccctgaccacatcaactgcagcttggtaactcttacttgccttgctaccaggtgtcaaagcagcaatagcagcatcgcattgcatttttccacagaacaatcaatcaggaaggttcttgcaacatttgagcaataaccactgtacttagcccccatcgcacacacaataaggcttccataatcataatagagatcatcatcattgcttaaagcaccaggcctaaggtcatatttggctccactttggaaaataggagggtaacaaatgtccacatttccagccttgagcttgacgcttatctttgacggggaaagcattattttctctgtcagatccatcagcttagaatgtggaaccttcttttcatccatgacaatattctccaactttggaactacatccttcct

SEQ ID NO: 32347 - DNA, 2108 bp, Setaria italica
  misc_feature (20)..(20): n is a, c, g, or t
  Peptide Sequence Number=SeqID_98321
tcgcactagttttttttttnaaagcttgcgttcaatccatcagctatttataattttatcttatccccgcgaattacatatcaatatcaactcatgtaacaaggtagcacatcgaaacttattgtcgcataaacacaggatttacaaagcaatattacagactcgcaacgattgcggtctgcaaatgtagagatgtgaccactacatgttatggggttgtttagtgggcgtccctgatcttccctccagtatctgcagcctttgcttgagatggaacacttcaacctgaagatggaatgagcgtgattgttctcctaccaaaactctgcgagtggaatgcagctccttctgggtctcatctgtgacggccttcaggaacgccacttcacgctcaaggcgcacattatcagcatggacagtgtttgagaggctgttcgattcttcctgtgccagctctaggcctgctatcttctcttttaagatctccgcctccttatccttgctggcgagcatcttctccagctgctccctgctgtgaatgaccgaagataggctcttctccagctggtctttgcttgccaatgctgccacaagctggtcttcaagcatggcgtttcttcgtatcaaatccgctatctttgtgttgtatagatgactctggctcacgtctgaagagcatctagcgatccttcttacatttgatcccccagtcaccatagttcctacctgtgccatgtcattctgaataccagctccagtccttgtgctccgatgccctttcggagtgctttcttgacaggaagaagagtcatcaccatcatcatatctgtcatcatcgatctgtttctgcagtttttgagctaagctgcactcttctacttgatccaaatgcccatggggtgaagtgcccaaatcaggttgcttcaacaatgactcggagaggggttcgcttctaggtgggtgttctatcacagaagtgagactatgccttgcgacagaactgttagagtacaagggggcacatttgttgagatgatcaacaagctccttattgcttggggaatactcatacagcacgcggtctacttctggggctgaccgccaactaaaagaatgctcattttgcagtaccactaatatttcaaccttgttgcatggctcctttttgttcccaccaaaagcaataagagcaatcttgtccctgtggtagaaaggaaccatgctgaaacctttctttgaagttattgatgaactagggggtactacacaaacagaccacttatattgtaggatatcaaaaacccaggtttccacgtgtcgttttttcttgctcgcaccaccagctatgtaccacttatttccacacagagctccgctgcaacctgctcggggtgatgggtgatgaccatgagtcttcactcttgaccataccattgtctcaaaatctaaagaatacaagtcattaagggtcttggattttgagtggcctccaaatatcagaaggatcctatcatcatacagtgcagcgacatgattggatctcggagaaggcccagcgcctttatagttcaatggaagccatgttgatgacttcaggtcaaacatgtgaaggtcatgccgtttctttccttttgtgtcctcacctccaaaaagtatcaatgtagcaccagctctgatcactgtgtggccacttcttgctgcagggatgtcacccttggcttcaacatgcgaccaaagttctgtttcagtattgaaaatccacactgataaacgatcagaagcaggctcagttttacctccgacaagaatgacactatttccccatggaaccagacaatgacctttacaggctggcaacttcgcagaatgtccgtttggtgatgggcggactttaggtggtgcaggatcccagataagcttctctaaattcagtatttttgtatcatctaacaagtgatgaccagaatcaccaccaaacactaccatcttgctacttacaattgccgccgcatgatagaaacgaggaataggtttctctccctctgtagacaacacagtccaattttcagaaatattgaaagaacgaccatcgagatcaaaagtatcag

SEQ ID NO: 32348 - DNA, 224 bp, Setaria italica
  Peptide Sequence Number=SeqID_98322
tgttgatgaatcggagtagcagcgtggaggcatggggttcagttgaacccaggggcagaccaagtatcagaaatgggtgtacacatgtacaccttcgaaaagaaaatcgtacttagtaggtataatacctgtaattgggtccagatccgaatacaaacaggtttaggggagcgccccgatcccctaaacctgtttgtattcggatctgggcgctccgtttccaa

SEQ ID NO: 32349 - DNA, 935 bp, Setaria italica
  misc_feature (44)..(44): n is a, c, g, or t
  misc_feature (83)..(83): n is a, c, g, or t
  Peptide Sequence Number=SeqID_98323
tctctcttcccctctcccttccagctcactccctctgcctttcngctggcaacaagagacaactgcgtgcacggccctaaagngggtgcctggccacaattccggcccaagcctcatagtgctcgccgcgagccatctccaatgcaacacggctacgtctccatccccattatgccttcgcctagccatataaatttcccactcttcctcaattgcaggcttccaagctggattctatatttcggactgcgtctagaggatatcagatgcaggtaggtcgttgccagaaagcacacttctgtaaaaagcctgaaaacaatcaatgaagccagctctttttcgaacagccaagccatcatcttgtaagcacaagtaacaaatcaacatgtttagcgcatacaacacctcattaccgtttcactgattgagtaaaaaccttcatatcagacgttaaacaatccttcaaccaccacaatctacctgttactcagtgctggataagactattcagtttaaggatagtgctgcaggctatacctaaccatggtaattacagggcaggatgctattgaagtaacaatgatgtcatccctcatcagcacaagcttctttactgagttgaaaatcagaaatttctggcacagtatggcatcggaagaaactacttcctgtttctgaaagaaactacctgacccaggttcagttttttaccatcatcacactgcatcactctttgcttctatgctactcctgacttcatgtttcaattttgtattttgtgaaattgggtttcagcctgccccaagattagtattaattgggccaggtacagtttcagccaagctgaaccatgctcatgctgattccaagactgatggtcttgtcggcccaaccatatttgcagcacacaccactaaatcagcaagagatcaatt

SEQ ID NO: 32350 - DNA, 628 bp, Setaria italica
  Peptide Sequence Number=SeqID_98324
caggagtagcatagaagcaaagagtgatgcagtgtgatgatggtaaaaaactgaacctgggtttcagcctgccccaagattagtattaattgggccaggtacagtttcagccaagctgaaccatgctcatgctgattccaagactgatggtcttgtcggcccaaccatatttgcagcacacaccactaaatcagcaagagatcaattgatgcaaagatcaagtaacttctcttggtaaaatgtcctctgtttttagactaaagatgactcagatcaaactgaaccatgtgttgcatgaaaaattgctatctcatggtattggcatggtcaaggaaagcaattcaaaacgtccatcctcaacattcttctcaggattgatcaaaatctggaagcagaatggactattgctgccttggttcagcagacatttgatcataataagccaaatttgatggaaattaggcttttgttcagtttttctcctttttgctatctctttgttgccagcgtcatcaattgtacaagaagcgctcatgctacctgagttaacataggtttctaacagcatttggctcttgtagcattcagatacatcatctgcaatgatattggcaaataagatctccgc

SEQ ID NO: 32351 - DNA, 2595 bp, Setaria italica
  Peptide Sequence Number=SeqID_98325
atctccccgcccgcctccgcccaaaaatctaaaccctaaccctaacgccggccatggcgctcactacacgcggcggcggcgccggcggcggggatcccgcgaaggcgccgtccgcctccgaccccagcctcggcttcctcaccaagcgcgacaccgaggtcaagctgccccgcgccacgcgggtcaagaacaagacccccgcgccggtccagatcacggcggagcagatcctccgggaggcccgggagcggcaggagcccgagatacgcccgcccaagcagaagatcacagacacccacgagctcgccgagtaccgcctccgcaagcggaaggagttcgaggacgtcatccgccgcgtgcggtggagcgtctcggcgtgggtcaagtacgcgcggtgggaggagcagcagcgggacttcgcgcgcgcgcggtccgtctacgagcgcgcgctcgacgtcgcccaccgcgaccacacgctctggctcaagtatgccgagttcgagatgcggaaccggttcgtcaaccacgccaggaacgtctgggaccgtgcggtgtcgctcctcccgcgggtcgaccagctatggtacaagtacatccacatggaggagctgcttggcgcggttgccaatgcgcgccaggtgtttgagcgctggatggcgtggcgacctgacacagctgggtggaattcttacatcaagtttgagctgcgttatggggaggtcgagcgcgccagggctatctatgagcggtttgtagctgagcatccacggccagacactttcatccgctacgctaagtttgagatgaagcgtggtgaagtagagcgggcacgacgggtatatgagcgtgcggcggacctgcttgcggacgatgaggatgcagaggtgctgtttgtggcatttgcagagtttgaggagaggtgccgggaggttgagcgtgcacgtgctatatacaaacatgcgctggacagggtgccgaagggtcgggctgaggaactgtacaggaagtttctggcatttgagaagcaatttggtgaccgtgaggggattgaggatgccattgtggggaagaggagatttcagtatgaggatgaggtgaggaagaacccactaaactatgactcatggtttgattacatccgcctggaggagagtgttgggaataaggacaggatcagggaggtttatgagagggccattgctaatgtgccccctgcagaggagaagcggtattggcagaggtatatattcctctggattaactatgcactttatgaggagcttgatgcacaagacatggaacggaccagggaggtttacaaggaatgcctgaagttgattccacacaagaagttcacgttcgcaaagatatggctcatggcagcccagtttgagataagacagagaaatctaaaggctgctcgacaaattcttggaaatgcaattggaatggccccgaagggcaagatatttaagaaatatattgaaatcgagctgtatcttggaaactttgaccgttgtaggactctttacgagaaatacattgaatggtccccagcaaactgttatgcctggagaaagtatgctgaattggagaagaaccttagtgagactgatcgtgctcgatcaatatacgaacttgctattgcacagccagcccttgatacgccagaggttctgtggaaggagtacctgcaatttgaaattgatgaaagtgaatttggtagggcaagggatctatatgaaagactgcttgagagaacaaagcatttgaaggtatggatcagttttgctgagttcgaggcctcagctggcttgggcagtgaagacagcgaaagtgaggagaaaaagagtgaagttggttatcaggagcagcagatggagcggattagcaaatgtagagctatctttgaaagggcattcgactacttcagaaccagtgccccagagttgaaggaggaaagagctatgcttcttgaagaatggcttagtaaggaggtgagcttcggtgatcttggtgatgtcagcttagtgcagaagaaggctccaagaaaagtcaagcggaagagaccaatccctacggaagatggatccaccatagcgtatgaggagtatatagattacattttccctgatgaagttgctcaagcaccaaacctgaagatcctagaagctgcttacaaatggaagaagcagaaaactggcgatgatgatgagtgatcttgacatctgagtgtggcattgtcatatctattttgcggcagccaaaatcagatgtaaagcatatgcaatgctgtggatagagttacaagaacgggaatgatcaatttcttgatgtcacaggtgctaaggatgctcttgctgtggaaaagaatcccgagaatccctttagtctaaaacagcactgggatttcctttgacgtgtgattgttttggcaaaactagggggaaaatgaccatattcttctcgtaggcactttttgtaaatcttgtaaactcacaagtagtgctgtcatagtttttcccatctgctattcatattgtatcactttttgtattcaaatatgtatttccgctgaaccaaaaaaagaagtgg

SEQ ID NO: 32352 - DNA, 375 bp, Setaria italica
  misc_feature (49)..(49): n is a, c, g, or t
  misc_feature (73)..(73): n is a, c, g, or t
  Peptide Sequence Number=SeqID_98326
acctttatgaagctagccgccaaccaacgctctttcgtgcccacgtgcngccttgttgttgactgtggcttcncttttcacacatgcatcccctgtgcttcagaattttactctaaactatggtgtgcggcgtatggaccttggtggcaaggcccttacaaactatctcaaggagcttgtctcataccgttcgcttaatgtcatggatgaaactcttctcattgatgatgcaaaggaaaagctatgctttgtctcccttgatgtccctggtgatctgcgccttgccaggttatctttcaaggacaacccttttagatgttcttacattctccctgatggtataacatacaagaaagggtttgtcaaggacatgga

SEQ ID NO: 32353 - DNA, 1913 bp, Setaria italica
  Peptide Sequence Number=SeqID_98327
atttcacaatgtccgtctcatcaccagaagagttggaggagggtttggtggaaaggcaatgaaagcaatacatgttgcatgtgcatgtgctgttgctgcattcaagctacagcgtcctgttcggatgtatctcgatcgcaagacagacatgataatagcaggcgggcggcatcctatgaaggtgaagtactccgttgggttcaagtcagatggcaagatcacggccttgcaccttgaccttgggatcaatgctggaatatcaccggatgtaagtccattgatgccacctgctatcataggcgctctcaaaaagtacaactggggcaatcttgcatttgacgccaaagtttgcaagacaaatgtctcatcgaaatcagcaatgaggggtcctggagatgtgcagggctctttcattgctgaagccatcattgagcatgttgcctcggcactctcagttgacactaacgccatcaggaggaagaatctgcatgaccatgagagccttgcagtgttctacggagaaagtgcaggtgaagcttctacatacagcctggtcaccatgtttgataagctggcctcgtctccagactaccaccgcagagcagaaatggttgagcacttcaacagaagcaacaagtggaagaaacgtggcatttcttgtgtgccaatcacatatgaggttaatcttcgaccgactccaggcaaggtgtctatcatgaatgatggttccattgcagttgaggttggaggagttgagatagggcaagggctgtggactaaagtgaagcagatgacagcgtacgggttgggacagttgtgtcaggacggtggcgaatgcctccttgacaaggtacgggttatccaggccgacacattgagcatgatccagggagggttcactggtgggagcaccacttctgaaacaagctgtgaagcggttcgactgtcgtgcgctgcacttgttgagaggcttaagcctatagaggagagtctgaaggctaaggctggcacagtggaatggagtgccttgattgctcaggcaagtatggcaagtgtgaatttaacggcgcatgcatactggacccctgacccaactttcagaaggtacctgaactatggagctgccattagtgaggtggaagttgatgtcctgactggagcaaccacaattctaaggagcgatctcttgtacgattgcgggcaaagcctgaacccagctgtggatttaggccaggtggaaggtgcatttgtccaaggagtgggcttcttcacaaatgaggagtacgcaacaaactccgatggcctggtcatcaacgacggcacatggacatacaagatccccacggttgacaccatcccgaagcagttcaacgtcgagctgatcaacagcgcccgcgatcagaagcgtgtcctctcttcgaaggcgtcgggtgagccacccctgcttctcgcgtgctcggtgcactgcgcgatgagggaggccatcagggccgccaggaaggagttctccgtctgcaccgggccagcgaactccgccctcacgttccagatggacgtcccggcgacgatgcccatcgtcaaggagctctgcggcctggacgtcgtcgagaggtacctcgagagcgtgtccgctgccggcccaaccaccgcgaaagcatagatccagcacgcgcactgcccacgacgaacgagggtgatcagtcagtgtaaaatagtaaatggcgtgatgaagacatacgtaaactgtggtgtgatgtacagatagcaatggcgagctgcgaactgtagttttgtgaatcaggagtggcgaataatacagaggggaaattaaactaaataattgggtgcagcgaatccgtggatggaatcatgtgtatttcgactggtatttttgaagaaacaaaaaaaaaaaa

SEQ ID NO: 32354 - DNA, 302 bp, Setaria italica
  Peptide Sequence Number=SeqID_98328
ggcggggcgaacaaggagccaagggagacgaacaggctgcaaccatggccggcggcggcggcgaccacggctttctggcagtaccccacggtgtcgacgccccgcagcgcgtcagtgaccgggttgacgaggaaaacgcccctcgagcccgcgaacgccaggcggccatgcggcgtggcaccgatgaaggatacgcaccggcggtagagatcggccaggcgcccgcgccggcggatcgccgccgacgggtggcgtgctttgccgacgccggcggccgccccgtccaacgggacggagacgat

SEQ ID NO: 32355 - DNA, 539 bp, Setaria italica
  Peptide Sequence Number=SeqID_98329
tcacatgaactatcccactctaaagtacctactacaaacgcacaaaagaaatgcattgttgcaatgtaatgactaatgacaataaaataaaagataataacattagatatcaatgcttcgtaggaacagacatggagagctaatgcatagcatataagatattttcataaatgcaaaatgttgtgatgtgctagtaacatggtgaatacaagcaaggtatcatcgagctaattctcttcttctgaaataatttctgacatacaaaactaattatctacagagcatgagcttctgttgtatttaataattgttgctacctgtaagtaaggaaccataggtcaagttggcattcatctgctattgatatctgttcgttacgtgaaatcattcatgacatataaaaactaattatctaatgtagcatgagcttttgttgtatttaataattgttagcgtaccgtgtatgtaaggaaccataggtcaagttggcattaatgtgccattgatatcaggattggggaaagatccagtcgtgccag

SEQ ID NO: 32356 - DNA, 411 bp, Setaria italica
  Peptide Sequence Number=SeqID_98330
ggaagaagaagctgatctttctctctctatatctccctcagcgcgctctatctcctccatggctccatagatcacagcttgcagagagacaagagttaggctattctacctgatcatatgcccctcctgcaattcctccatccacatacaaattgaaacaagaattgcttgcatatatctttgtttgtcctttcctctatttttttctcctcttttatttccattgtgcagcttgttagatagacagatagtagctttggatatatcatggaggaaacaagctagagcagaagcagcagcagagaggagaaaggggattttaaaaatccttcaacatagtctctgcctgcttcttcatcagatctgtcctctgtgtgaccttaaagaggtacggtagcccgcccggcccgg

SEQ ID NO: 32357 - DNA, 1170 bp, Setaria italica
  Peptide Sequence Number=SeqID_98331
acaaggctctcccatgtactacgaacatgttatacttcgagtctcgaaatgcactacacggatgagcttcttaagtcattcagtcatcacaaaggcacacagacgatatgtatttaccttatcaataatctaccggcggtattatacaccaaagcacacgctgattctgaattactagcagctaatcaggtcgactcgtctccaagcttctggtccttgacgaacctgccccagtaccagtggcgcgcgaagacgtggcccatggactcgagcggcacgcccttggtctccggcacgagcgccacggcgaaggcggtcatcaccaccagccacgacgcgtagaagaggaacgcgccgtacctgaagcagcacagcatcgccaggaagaactgcgcctgcaggaagttgagccccaggttgagcgccaccgccgcgccctgccccgccgaccgcacctccaccgggtaaatctcgccggggaccgtccagtacagcgcgccccacgaccagctgaagctcgccgagaacacgaacgtcgcgatcagcaccgccaccgcgtaacccttgggcatcttgctcccgttgccgaggtgagagccgatgatgctcgccatcgtcacctggcacgtgaacatgagcgcgccgccgatcacgaagagcagcttccggccgtagcggtccatggcgaagcccgacgcgaggatgccgccgatgttcatcacgcccaggatgacggcgcccatcagcgcggcgtcgctctcgaacccgacggtccggaacaggatcggcgagaagaaggcggtcacggccacgccggtgaggttcaggaacaccgggaacgccacggccatcaccaggtacggccggtactcccgccgcaggatccgccggaacgcgccctcctcgttccgccgcgcgtgctccgcggcggcaagtatgtcggcgaactcggcgccgatgtccacgcccttgccgcgcacccgctggagcgcggcgcgggcgtcgtcgtgcttcccgcgcaggacgaggctgctgggggtgtccgggatgaacacggcgcccgccaccatgacggcggccgggatcgccgcgaggccgagcgacaggcgccacccccagcccgggatccgcgacgtgccgtagttgatcaggttggcgacgaggtacccg

SEQ ID NO: 32358 - DNA, 392 bp, Setaria italica
  Peptide Sequence Number=SeqID_98332
ccattgtaatgctaaatcttctgaacggacacagtagatacctgtcattacaattcctcatagctataatgatgttatattctggaatcaagaggtctggtatgactgttactataatttgcaggtcttctgtttggtggctatggaaaagacctgtctctcttaaacccgagcacattagagatgaaaaagtcaaggtccttacttctttcatccttctatgttatcaactgacaataaaaactggcatctagacgcttccttgatgtgattttaatttatgaatcccgtgtcatatatcatttgttgttgcttgctagttgcaaatgcattcatttttggttttttactacacaatgccaggttctgcaatcagtggagcctataaagca

SEQ ID NO: 32359 - DNA, 377 bp, Setaria italica
  misc_feature (132)..(132): n is a, c, g, or t
  Peptide Sequence Number=SeqID_98333
taagccggcggcgcccctcctccgcctccaacccacgttggcgcgcccctccctccgcctacgaatcgagccggggctcgccgtccaggcggcgttcttgtccgctaagctggtgtaccagacggagaaggngaaggcgttctcgccggcctccaggaagccgcaggagaaggtggcgtcgggggacacgaggaagggccgcgcgtggtcttccacggagagggtggagccggcgcccagctgcgacggcgccggcgccgacgagcacggcgaaagtgactgaagaaaaatcagtaagcttcacatgctggttggacaagagttattgttgaaaagccctttggaaaggatttggactctgcagatgaactaagaca

SEQ ID NO: 32360 - DNA, 807 bp, Setaria italica
  Peptide Sequence Number=SeqID_98334
ttttttttttttttttttttttttttctgaacatgaaagattttatttcatatcgtaaacggtacacactttcaacaagaagtttctcttattacgtgacccgcggattacaagggctattttcctcaagtgcttgtttgcaaattcagacctttctgccgtggttacacggcaactaccaaaacagctaaaacttagcgagggttggcggcacccatatgtagccatgggtctgcacataccccatcctcctgctcatatcatcggcctcctgtggtcctcgggttcctggttggtatggaacggacttcagcttgccagcatcgatgtcgtgaagcaaaggagtgaagatctcccatgcagccctcagttcatctcggcgaacaaagtgctgctgatcacctcttatcgtgtccaagataagacgctcatatgcttctgggatttttacatcttggtaccgcatcccgtaggatagatccagttcgctttgttcagttgccatttccagtccaggtttcttgactgttaacttcatatacatggcttctgatggctgcaggcgtataacaaactcattccttccttgtttcttgcatctaaaaatgtcaccaggagcatccttgaattgcacacgtatctctgctttcctagaatttagagctttaccagccttgagaatgaatggaactccctcccatctttcattgtgtaccctcagtacaacagatgcataagtaggggtgttggagtcatctggcacagtagggtcatccttgtagccatcatattgtccaatgactacct

SEQ ID NO: 32361 - DNA, 387 bp, Setaria italica
  Peptide Sequence Number=SeqID_98335
gtccacacgaggtagtcgcaccgggtgccggagggatcagcgccgtcgccagaggcatttgcgcggaggcgtccgagggcgcgcgcgtaggcgggagtgccgggggcggcagaggcggtggagggactcgtagcggcggagcgcggagacgaggtgtggggagagcgcgtgccgcgacgcccggcggtagcgtgcggcgcggtagcggctgaggcaggagcggtcgtcgaagtccggcgagaggaggccgcccaagagcctgtcgccggggtccggcaccgtcgccaacggtacggccgcgccctggtcagacacggcgttcatgacgacgcggacaccggtcgagacccatgtctcgccggcgctggagggcgtccaccgggcgcc

SEQ ID NO: 32362 - DNA, 164 bp, Setaria italica
  Peptide Sequence Number=SeqID_98336
tctacaggggaagcgacgaggagcagctctgcgccatgacaccgatcagggagctggtctgaaagtagttgataactgggaggaaatcagagagcatgtcgttcagaggttcagacgcccccaagattgatattgttttctctgaaatggtagcggaagctaag

SEQ ID NO: 32363 - DNA, 811 bp, Setaria italica
  Peptide Sequence Number=SeqID_98337
ataatatcatcaaaaaagctcataagtctctggtgctggttgaagaagtgagactagtatggtagactctgagatatgagccatctgttggaggcaagaaacaatttggaaggttgtggagctatccaacccagttgatatttcatccatgaagagcgctttcgatggtcctactatcatttctcctgtggttagtctcttcttctcaccacctgaaatacctcttctcattgcatctcccaccattatatcagcgcatatgtcaagtcccatgatcttcataatgtaatctgtttgcatactcctttctaagccttccatagatatcgccttcatataagtgtcgacatcagggtcaggggtaatccctgcctccttctcccttctaatcacctctttcatgattgctgttctgttgccaacaccctggaatcttgcagagaagtcaatggtctctctgacggtcatctcggggacatggagatcgtactgatcgatgtaagctgctgtcttctctgggacgaagtcactcagcttcacaccattgtactcgatttctcctgtgaccttgagattagcactgagcttccctgcgagcgccttgaggagggtgctcttgccgcagcccggaggtcccaggagaagtgtaagcttggaaggcttgacgacgccactgacaccattgaggatgcggaccttggcatgctggcggttgaagcccagcattctgctcgctgcagagaggttggagatggcggcgttccagatggtagggaggggcttcccctgcaccacccggcattccgcctcc

SEQ ID NO: 32364 - DNA, 338 bp, Setaria italica
  Peptide Sequence Number=SeqID_98338
ggatgactagaaatgacattacaccacccactgaaccagccaccattgtttgacagtaagaggcaacacatctaaacatcgataatgacccagtgtggattaggaaaaggacaagaagatgacacaagaatctggatgcctccggcgtgtagccaatgaggaagtatgatattgatgtccaagctattgactcaactaatgagattggtaccttgaggataaaagctggtactgcataagcccatgcaggatagaagttgtagtctctttgtttgtaaaaaactggtagtttgctaactgccatggcaagctcagggaatccattaaccatcagcagg

SEQ ID NO: 32365 - DNA, 445 bp, Setaria italica
  Peptide Sequence Number=SeqID_98339
taggggcatcttttggctagactattgggaaaaatgggcatatacatgagatgtgtggtttacctcttggttcagagaagcttatgcagataaaatgttggcacacaaagcattagtaccaaagctgacaacagaaatgtgatgtgattgaatagtcgcaacaaaattgcaattcctacctggatgcctccggcgtgtagccaatgaggaagtatgatattgatgtccaagctattgactcaactaatgagattggtaccttgaggataaaagctggtactgcataagcccatgcaggatagaagttgtagtctctttgtttgtaaaaaactggtagtttgctaactgccatggcaagctcagggaatccattaaccatcagcaggatgagtgcatagaagagcgaacccatgtaatagtttgcatgaactctatcaacacccat

SEQ ID NO: 32366 - DNA, 1060 bp, Setaria italica
  Peptide Sequence Number=SeqID_98340
aacacatctaaacatcgataatgacccagtgtggattaggaaaaggacaagaagatgacacaagaatctcttggttcagagaagctggatgcctccggcgtgtagccaatgaggaagtatgatattgatgtccaagctattgactcaactaatgagattggtaccttgaggataaaagctggtactgcataagcccatgcaggatagaagttgtagtctctttgtttgtaaaaaactggtagtttgctaactgccatggcaagctcagggaatccattaaccatcagcaggatgagtgcatagaagagcgaacccatgtaatagtttgcatgaactctatcaacacccatatgagtgcgcaaaaataccgtcccagtaatagcagcaagtagcccaagctgaagagtttttgttatgtggatgaaggcatttcgtttcatcaggagaagctctctggcaaaacatgctttgaggagttccaacttggataacgagtagatactgtaagacaaggcatttttatgcccttctgatttttcgtaaggtgttgaaatctccccagcaaggttctgaccaatttgagatactctgaacttgtcacagaactggtcagcggtaacaaaattgtatgtttctgtatggcggctccaatattgctgttggtcttttcttgacaagacctcttgtaggaagtcagcagcacctttcctttcagggcacttgaatccacatgattcaaagaaactcataatgcaactcttagatccatggtatacaatttttccttcagccatcaagataatatcatcaaaaagctcataagtctctggtgctggttgaagaagtgagactagtatggtagactctgagatatgagccatctttggaggcaagaaacaattttgaaggttgtggagctatccaacccagttgatatttcatccatgaagagcgctttcgatggtcctactatcatttctccagctctgcaagctgccggaaaaccgccgccgcgcggtgcgcgagggcgcggcgcctgcgctcgccacctaacgctcct

SEQ ID NO: 32367 - DNA, 366 bp, Setaria italica
  Peptide Sequence Number=SeqID_98341
ccgtaacccgggcagcaatgccgcgagtgcgccggttctatcctggtggatttcagggggaaatgaacaggagagaggccgcgttgatccttggcgtaaggttgattctttttcttaaataatctgcgcttgtcaactggatttgtctttagttattctgtcgaataagggagagagctactgccgtctaccatagttggcgctaattatctatatcctttccttgttgtttcagggaacgtgctacaatggacaagatcaaggaggctcacaagagggtcatggtagctaaccaccctgatgctggtggcagccattacgttgcttcgaagataaatgaggcaaaggatatactaatgggaaagg

SEQ ID NO: 32368 - DNA, 829 bp, Setaria italica
  Peptide Sequence Number=SeqID_98342
ccaagaagaagacgaccgcggaaccgacccaacttgcagctgggacccgcctcggcctccactcctcccctttcttgcaccgcaagaacgcgcgccgcttttatctaccgccgcatccgcccgcccgtccgcagaccagtccgtccaccgcgcgccgtcactttcctgttggctccttgcgacctgccttcccagcatcccggcggcgtcttaaccaccctttggtcgcttcctccgccgcctccggagctggaaccggacaccggccgacccgcggctcgatccatcgagctcgacatggctactcccctgatcgctgggttgtcagtggctgctgctgcaatgagtggaagatacatgattagaacatggcaagccttccgaacccgggcagcaatgccgcgagtgcgccggttctatcctggtggatttcagggggaaatgaacaggagagaggccgcgttgatccttggcgtaagggaacgtgctacaatggacaagatcaaggaggctcacaagagggtcatggtagctaaccaccctgatgctggtggcagccattacgttgcttcgaagataaatgaggcaaaggatatactaatgggaaaagggaagtcgggggcttccgtcttttagttgatacaaatgaatgatcattttgtggtgatcgatatgactgtaacttttttgaaaggaatgacagcagcactttttcacctttttttaacactgctgtgctgattgtaccataaaagtagatctgaacaaggttacctgttcaagaattgaagtaactttttgtctggatcataattattgtttgggctga

SEQ ID NO: 32369 - DNA, 509 bp, Setaria italica
  Peptide Sequence Number=SeqID_98343
catcaatttagataacatgtccaaaaatacgttgtccagagaataattttgcggtagtccatgaagccatgaggttgtggtggctgtgtcatggattcaataccctattctccttctctcaaagccgtattcccatattgacatgtaaaagttaaattaagtaggaatgagaaaatgtatgactaccactacatattggtataagccaccagcagttatttaatcatgacccacagcaggaagtcactatcaacaaagagcggcagtgtggctaatttatatggcatctgctcatacacagtggccatgagatccaccggtaatcagtttctacgatgcgcggcaacaaattactacatagacctaaccatcagcatggattcgccttcacagagaattaaactacgacatagcaacatagttccgcatacaaactaatgatggtagcaagggtacgcatcaggtaggaaggcgagggagagttttctacacttggagttcctgagagt

SEQ ID NO: 32370 - DNA, 940 bp, Setaria italica
  Peptide Sequence Number=SeqID_98344
taaatggaatgagcatttatatttgaagttccagaacaggcatcagctaatttagagattgaggtgacaaatcttgcatcaaaaactgggaaaggcgaagtaattgggtccttgtcaattccaattggacgaggagcaacaacgttgaaacgagctccttctatgaggatccttcagcaatcttctgatgttaaacgagtactaacatgtcctcttacaaagaagggtcaggtgcctagttttgaagacaggaaaaactgtggtgttttagtactctcaagctgttatgtagaacgatctactcattcaaacttccagaccttgaaagacagcatgagcaatgcagagagtgacttctggataggactcagcccagatggtccatgggaaagttttactgcagctttgcctgtgacaatccttccaaaatcgcttaacaataatcattttgcatttgaggtcagcatgaggaatggaaggaaacatgcaacattgagaggtcttgcggttattgtaaatgatgctgacataaaacttgaagtatctatatgtcctgtaaacatgcttaatagctctgtgttgaatactagatcagtgagttccaccaatgctattgatgaagtatttgaaaatcagtggtaccgaccaattatggggtggggacctaacccttctaatgatcatcgaaacgacttaaagcaatggagcacaagggactgctcgtactcatcaaaggtattttttgagactgatcttccatcgggttggagatggacctcaccatggaaaattgaaaagtcaaattttgtagataatgatggatgggcatatagtgctgatttttcaaaacttgaattggccgtcatcttcctggctatcttctaaatcacctcatgactttgtgaggagaaggcgttgggtacgttcgagacagaagctg

SEQ ID NO: 32371 - DNA, 514 bp, Setaria italica
  misc_feature (498)..(498): n is a, c, g, or t
  Peptide Sequence Number=SeqID_98345
tggaaggaaacatgcaacattgagaggtcttgcggttattgtaaatgatgctgacataaaacttgaagtatctatatgtcagcatccttgacagctcttgtgggatggtcacaccactttttgacactacaattgcaaatataaatcttgcaactcatggaagatttgaaacaatgaatgccgtattgatctgttcaattgccgcatccacattcaatagacacttggaggcatgggaacccttaattgagccatttgatgggatattcaagtttgaaacatatgataccagcgagcaccctccttcaaaagttggtaagaggattcgtgttgctgcaacaagtcctctaaatgccaacctgagctctgcaaatcttgagcttcttatagaaactttagtttcatggagaagacagattgatctagaaaaaaactcatcaatgaaaaatgcggacactgttgggaatatgaaaaaagctagatgactcttcctgctcngcattgaacgagatga

SEQ ID NO: 32372 - DNA, 336 bp, Setaria italica
  Peptide Sequence Number=SeqID_98346
tacttttcttctaacaggatcttatgttatggggagctgtaggaaaacaaagaattccatctacatctcactgttggtatgccttgtactagcttatgttgtcgtccatgttctgatagcaatacatgttatccccgaagggtggaaaaaggctctggcaggtaagattgagaagttgtcctgcagatatatatggacaaaagaaccttcatttgggcacaaccagagaaatgctgataacgacatggactatgagcttgggcacggccaggaggggtgatgctgatgacaaatattgggagcggaggcgtaagctgctgttgatgcttgctgttc

SEQ ID NO: 32373 - DNA, 1054 bp, Setaria italica
  Peptide Sequence Number=SeqID_98347
gcttcctcttcagcctcctcatgcgcttcttcttccactgaaagttgatacaaatgagaatgcatcagcgaacagagcatcggctaaagacaggaaactaatagcacgcacagcagaggaaacaatacactaagtaacagcaaaagaatgtaataacaggataattctaacacaggacgaatagcatgttaataatggacaaacaatattcaaggcaatttgaaatggttcattgtctaacagaaaatttggagaactctccacatgcaagaaacataaggtcctagctgcttgttaatgttacatgcttcttgcttgtgtcactacgttactaacaaagtggaaaaagctaacaaatccaagtaggtgaaggtaaacaacaaataaattaccaggtgtaagtagtaatgggatcaggcttgactactgctaaacacatactagaagcttattcaaggcagtacaacaggaatgaaatgctacccacaattttacagaagtatcacatcaacaggaagaaaaaccctagttcatacaccactggaaaagtctacgcataaacatactgttggaagacattcacataattccagcgtcagatccaatcttatgcaagcaaattatgtaacaacataccaaatcttggatcatacccagctttataaagatttaacttatcaatcagatgctgcaaaacaagtggtacaattcttaactaaactgcacaaagcaaaataccacactccacagggctcatatcaagtgtatgcgataaagaaaccttcaccgtggcagggggggaagccctactaccaggcggcggagcaccacgcgcgcgcgagctacccctcccgaccgcagcgggcaggacgacgcggaacgggaccgtggagcacgagataccaagcccgcgcgacaagatcgatctcagctcgctcggctcggctcagctcatgtcaaaccagaaaggccctgactcgcacaaggcggcacctcgcagcccatggaacgatcccaaaccgttcgtcccgcagcctactaggttaggggtagt

SEQ ID NO: 32374 - DNA, 260 bp, Setaria italica
  Peptide Sequence Number=SeqID_98348
agttaagatcttttcgttcattatcctttagagggcctaatgctgaaattttcacttcccgtttatcctgttggctaatggatccttcacgtgtagaatcacccaaaaggagcccatttgaatcttcaggagatgattctttttgcttttgtaactcaagcttcaactgtgaaaggtcttctttggctagtcgcagatcatactctgcaagtgcaagtttttcttgtgctgctattttctcttctaacaaactctgtgga

SEQ ID NO: 32375 - DNA, 280 bp, Setaria italica
  Peptide Sequence Number=SeqID_98349
tcttgtgcgcaccggcccggcgagcacgaagaaggacgcattggccgcgctgctgtcgctggccggcgagcgggagaacgtcgggaagctcgtggacgccggcgtggcgcaggcggccctgtcggcgatcagcgaggaggagaccgcggctgcggtgctggccgcattggcgaagcgcggcggcgcggaggcgatcgtgggcatcgacggcgccgtggcgcggctggtggccgagatgcggcgcggcacggagtgggcccgggagaacgcgacggcggcg

SEQ ID NO: 32376 - DNA, 607 bp, Setaria italica
  misc_feature (1)..(16): n is a, c, g, or t
  Peptide Sequence Number=SeqID_98350
nnnnnnnnnnnnnnnntttttttttttccttaggcaaatcttggtcatttttattcataagaaattctgtcagacggggaaatgtgatgccaaataatactggcaggagctcacgcacaaaattcaggctgtttgaaataataagttcacttaaaaaatgagttctgttaaaaacttggcgtggcccttgaactctccaaaatcaatgtacccaaccatccatccattcagttactccaccacatcttgcaatcacctcccgagttggcacaaggtgttaatagctgcttcacatctcactagtttcaacttccagcttgattcacagatgcttgtgtcctattgttcagtcttattgtaatacagttcgcataatgcgcagaacaactgggatggttttctccttcagtcgctcaatccatcacgctcccgatgcggacgacgtctcagaggagatcgatctaaacgaaacaccgtcgaaattgccgtagttgcagaggacgaactgggggcaggagcggtagctgatccgaacgcctatctttcccctccgctctcggtacctgatccagcacctcgccggtgccaccacgccgccacagccgca

SEQ ID NO: 32377 - DNA, 229 bp, Setaria italica
  Peptide Sequence Number=SeqID_98351
tgagtgttaagacagcctgctgcaacaatggaggtggtgcgcggggttctcctaggaaggaagggcaaggttgcagggacgatgcaaggtgttgttccggtggtgtctcaactcccaagtgcaagtgaattactgagggtgcgtttggcacagctaccagagctgctgaatccaacaggagatctgcaaactaattttttaaagaaaattgattcttcgctgactgtgt

SEQ ID NO: 32378 - DNA, 260 bp, Setaria italica
  Peptide Sequence Number=SeqID_98352
cgtctcgtgcttctccaggttcttgagcgtgttctcggctttctccacggccacgaggttctccgatttgctgctccccatcccgaccaagagaagtattgccccgtagaccgcaccgatcctttggcatatggggtcgagcttggagagctcgtacagcagcgacaccgccagctccctctcctggaaatggtcgttggacaagaacttgatgatggtgcggatggtgtcgcctttgccgagctcttccttgttgtcgt

SEQ ID NO: 32379 - DNA, 485 bp, Setaria italica
  Peptide Sequence Number=SeqID_98353
ggcggtggcaggccctttagtacagattatttcaaccggtactaaaggacccactctagtaccgaattgccagtactggtacttgaggggcttccgaaccggtactaaacgatctccttccgcgtcgactccgacgtcgtctcgctcgccgacgccgccaagggggagctcgaggccgacgcccacgtcgccgacgacggccggatgcgggtcaccgtgcgcaagtccacctgctcccgctccgaggccgcctgctcccactcccattcacactcccagtccatgcagcagccgcgggtctccaacctctccggcgtcgagatctactcgctgcagtcgtcgcgaaaccccacgccgcgcggctccagcttcaaccacgccgagttcttcaacatcgtcggcgccaagggagcgggaggtgacgaggagaagggcgccggcggcgggtactcgccgcagccgcacgcgcaggcggccaagaggaa

SEQ ID NO: 32380 - DNA, 250 bp, Setaria italica
  Peptide Sequence Number=SeqID_98354
ggcgtggaacccgtccgtggcgcccgccaggccgaggtcgagctcggtgagcgcggcggcggcggcagggtgcgccgcgagcgctgggccgatgtcctccgtccagcagtagaactcggagagatcgagcgccctgagcgcggggcagtcccggagcagcggctcgagatccgcgccggcgtcgaggccgggcgggcgctggtgccagcgcacgagcttgacgctgcggaggcggccccgcactgcgggt

SEQ ID NO: 32381 - DNA, 584 bp, Setaria italica
  Peptide Sequence Number=SeqID_98355
tattccaaatggtggagttaaagaggggcattgaggaagacagactgggagagggagagagtttgctccactgatgtctcctccaatatgtgcaggtgctggcagaaacttgtatgccgcatattggactgcctggtactatgcaagtctggtgtccaattcacttctggggagataagccaaatgaagaagcaatttctaccaagtgctgccctgttgaatttgttatgaatgctataggcacaacaggctgaaacatgaattcatcatcctctagttggaggtcatagcatgttttgagctccaatgctttagattctgcagcttcagcttctttgtgcagtatctcaacttcttcattatcatccgtttcagttgcagcagtcaattctgctctagcagcagcagaatctaaccggagtcttttgtaacttgtcatagcagattccttttccttttgtagaataagcccttcgcattcctgtatcttgtcagtagttgctacaatatccttttctattatctccagatcagtagcagctttctccaacatagtgtgcagttcatcctttcagaattaagag

SEQ ID NO: 32382 - DNA, 232 bp, Setaria italica
  Peptide Sequence Number=SeqID_98356
gcgttgtgtacaaatgtgtgaatcaataaccgtgtgttttctatcatgttgcacttggttgcttggacatgtgtaattagcatcacaattgacgcaggaacagatcgaattagtgtggatcgtcatcagctagcacctctatctaacttcacattgaatgcgttccgagttccgccctcttgccgtcagtgctcccacagcagcaacggctcgtcccaggacaaatcataga

SEQ ID NO: 32383 - DNA, 261 bp, Setaria italica
  Peptide Sequence Number=SeqID_98357
ggtctcctcacttgtctcgaatcctcatccagggtttatccccctcagccaagctttcgtggaaaaacaaatccatcgcctgcgattcgattagatcgtaccagaggaagcccacatggatctagcttgatttctagcggtctcagtgcgaccaatccgtggtgatccgattcgctctggtgatttgtgggagtcgtcccgattagccatggtgaggaagctcaggcgcgaagggggacgcctccggcggcgccggccgcc

SEQ ID NO: 32384 - DNA, 1995 bp, Setaria italica
  misc_feature (1)..(72): n is a, c, g, or t
  Peptide Sequence Number=SeqID_98358
nnnnnnnnnnnnnnnnnnnnnnnnnnnnnnnnnnnnnnnnnnnnnnnnnnnnnnnnnnnnnnnnnnnnnnnntttttttttttttttgtcaattatcaaaccactcttaacttttttattgacatcaatttccagtacataaataattaagtctgcccattgccacttagagcaagggagtaacactggatctcatcaataagatatgtcgtcactactatcataattcttctcattatagtcaagaatcactctctcgcaacttttctcctgacatcaatttccagcaagtaaattaatgatgtgggcacttcctgctttagcctagccacttaggtgatggcagatcatcatcttcgtattcctccttttctttacaagtcttcagataataaagttgccgccttagatgcattatctctcgtttaagatcatcaggtagattatctgtcgaaacaagagtctgaagttcagctttaagcttctcatctttgatacccaaccatgtgctgggatgtaaagccagcagaagaacggtcagaacatctgcacttgatggatatttgacaacattgttcttcaagtttgaattgcacgaactggcaccaggtgaagacattggtaaaagcatatcaacaccgtgttcattgccttcagaaaccacagaggctgagataacagtcttaagcccatcaccattcgcttggatacattttaaacatgtttctttgcagcagaaaccatgtcttgatgcaaggtttcctgatagcattgcagctccctgacagcatacagcagctgcaatcctagtaagggaatcttcttcgcttgacgatgagcaattacaacatgggttattagcatattgtagatcgtggactatggcaaatagcctggtatcacgaacttgctgtagaacattttccttcaagaaaagcctttctttctcctctttgcttaagcttgggtccccttcctctttccttctaacttcaacaacccatttgatcaaagcttcagcttcagctggaagagattcaattaaacgggacaaaagtgtttgaacattgtctagattatctcccttcaaaagatttggtaaatcttcaacacaatactttgccatgcttttccagttctcatctctgcagctcactgtgtacaatgacgaaggggctgcagtctttcttgatataagcatgaaccccctgagaagtccagttgagtcatcagtcatattcatggcatcccaaagaagtctcagtggaacccaatgtggagggtatttgaagcgagcgacatccaagatgagcgccatatcctgtccggcatggtagccaccgattggggagaaatgcccagttccagtctgtttgaaagcctgcctatgataggaggcgataagatggcagtcctgggaggagacgcatcggacgagatgccgtcgtaggtcgtcgatggtggccaggttggcgcggaaggattgaacgttggcgccggagcagcgtgcgaggcaggcgaccttgccgaaggtgatgccctcggccttgaccttgtcgaggggctcgcagcagtcgagcatggactcgtcgaaccaccgccacggccccttccaccggcggcccgggtcgatggagagcgcgttgaggacgacggcgagggaggcgaggccgcagaaggccggctccgactgcgtctggaagcaggacaccagagggaagaacccctccatggtgcccgccgccagggcctccgcgaagaggcgcttcccctccggcgaggcgaagtccaccgccggcggcgacgggaggacccgccggtacagcgacgccacggccgccgccatcctcctcccccccggattgctcgcttgctcgatggctctagtggctttctcggtgctgatctgattcctccgcgtaaacgcagcggcaatcgggccaaattcgcgtcctttctctgtttctcgctgtggtgacctttgctttcgcttcg

SEQ ID NO: 32385 - DNA, 1513 bp, Setaria italica
  misc_feature (1)..(19): n is a, c, g, or t
  Peptide Sequence Number=SeqID_98359
nnnnnnnnnnnnnnnnnnntttttttttttttttctaattctaagccaacaggataggcaaccaaatttcacaagattgcattacatccaaaggcaggcatgcaaagtgttccgcagaacgcgattggagaggtactagttctcagttctcacaatccacaccatgccaaattaccagcacagaaacacacgacaagcagatcgccggagctcgcacgatttcctccgtccgaccagcgagctactaaatccgccgcctacgccttcacggggaggggcacgactttgacctgatccagcacggggccgcagagcgaaacgccgtcgctggccttggtgtggtagtaggagctgtagaaggtgagccgggttctgacgccgctcgccacgaacctgaaccccgccgccttgaacgcgcccttcccggcggactcgaacggcaccttctgcgtcacgttgccggcgaacgcctccaccagcatggacccgtggcagccgttcttggcgtcgccgacggcgaaggacaggttgtaggcgcggttggggaccgtgcggatcacctgcgcgatggcgctctcgcgtcccgccaccagctccacggcgtactgcccctcggggaccgagaagtgcgccgcgtcgatgaagcgcaccgccttaagcgactcgatgatccatcccgggagcggcgacgtcgtgtccttctgcttcggcggcaggaggacgcccaccgacgagttcttgaacacctgcggcccgatctcgaagccggcgttcttgatcaggttgtctttggtcgggtacggcgtgggcagctccttgatggcgacggcgtcgagcagcgggccgcacgcggggtcctcctggacgccggggttggcgaaggtgacctgcgcgacaggggaggaggcgcggaagccccaggcccaggtgtcggcggaggcgccgctgtagagcgtgcggacggcgacgtcggcgggggccgagagcgacggcgccaccgcgatgcggaggttctcgtcctgcgcgcacgtacgcgtggccgcgaacgtgagcgcgtagagcgcgccggggcgcaccgtcacgttctgcgacgccgacgcgcggctgccgaggcggagcgcgtgcacgccatgcggcaccgcgaagaacatgcccccgggctgcggcccgccggagacgtactcgacgtggccgcgcagcgtccaccccggcagcgagtggcggcccacgatgagggtcttgttcagcttcctcggcgccgtctcgaagttgccgttgatgagcaggccttcagcgtcttgagcatggcgaggcgcaggagctgggggcggagcactgactgcgagtgtggcaacagccgcggaggaggaggacgaggaggagacggagaggaccagcagcagcagcattccccatggaagctccattgctcgcttctgctctcttccgcctcgctttggcttcttccaatgaagctgccccttcctttaaacaaaaggagcggacaacttca

SEQ ID NO: 32386 - DNA, 474 bp, Setaria italica
  misc_feature (25)..(25): n is a, c, g, or t
  Peptide Sequence Number=SeqID_98360
atgcgtcacacaggctcctagtagngtccagaatggcttcatcacgcatgccctgtggcatactgtcgacaagttccttggcctccctaacataccctgctcgacctagaaggtcaacaaggcaagagtagtgctcaatgcttggctctattccgtagccatggtaaattgatttgaaaatcttgcggcctttctcgaccaagccaacatggctacaagctgacagaatggacgtaaaggtagttgaactgggcttatacccatgcctcaacatctgagcaaagccctgtaaggcatggtaaccacagccatggttcgcaaaagcttgcattatcgacgtccatgttatggtatccttcacttccaatctcttaaaagtgagctgagcagaaagcagatctccacttcttgagtacattgtgagcaaggcatttcctaaatcagtttctgacaggagtccaagtgtgacaacca

SEQ ID NO: 32387 - DNA, 275 bp, Setaria italica
  Peptide Sequence Number=SeqID_98361
gtatgaagttggtctcaagcagaggttgttgagatatgctgccagtgctttgcttttactgaaagatgtgtggacccatatctggtttcatggaaccggattgtactcttgcatggtccacctggaacagggaagacctccttgtgtaaagcactagcacagaaactttctattcgcttcaaatcaaggtattctatgtgtcaattgactgaagtgaacgctcattcattgttcagcaagtggttttctgaaagtggaaaactggtagccaaact

SEQ ID NO: 32388 - DNA, 342 bp, Setaria italica
  Peptide Sequence Number=SeqID_98362
ccaccatctgcagccgcagcaccactaccagcagccgccgctctcgagggaggaggttgaggaggagcggtggcgctaccctgcccaccagctccgcgtgtcgccgcccggcgcgcgcaagaggtaccgctgtgccatgcatgactcaggtgacctggagagcacgtcaagctctggcccgccaccccgccgccagaggcagcagctgcacccgagctactccccgcctccggaaggcagttttgtagatagggaaattagctattctggttacagcagccacgagggctttgtaacgcatagcgacagcaataatgggaacagaaagatgccgatgtccac

SEQ ID NO: 32389 - DNA, 689 bp, Setaria italica
  Peptide Sequence Number=SeqID_98363
ctcgcctgcaacagctcgacactacccatccgacatctgttctcatcttctccatctgttcgggcttcagcaccacctctagctagttaaccatggaggaggagacgcagccgaaggtggaggtgccttgctacttcttgtgccccatctccctgcagatgatgcgcgaccccgtgactctccccagcggcatcacctacgatcgcgacggcatcgagcggtggctgctcatcgccggcaacctgcccgctcaccaagcagcccgtgccggccgactgcgagcccacgcccaaccacacgctgcgccgcctcatccagtcgtggagcgcgctccacgccgccgcgggcgtcgagcgcgtcccgacgcccaagccccccatcgaccgcgcccgtgtcgccgagctggtctcgcggatcgccgccaccagcaggacaacggcgccgcaagagctcctcgccgcgctgcgcgagctcagggacgtggtggccgagagcgagaggaaccggaagctcgtcgccgccgtccccgccgcggtggacgttttggcgaccgtgttcgtcgcgtcggcggcgacaaaggcggaaagcgttgccgtctgtgacgaggcgctcgagatcatctcctcgctccagctctcggaacagtgcctggcccgtgtcatcttcgagacgaacgaggcgctcgtcga

SEQ ID NO: 32390 - DNA, 1666 bp, Setaria italica
  Peptide Sequence Number=SeqID_98364
gatacgtcaaccgtagttgcaaaaacaggaggaatgccaatttcattaacagccaagtacggatctggagatataacagatcggcatgcataattaaccctcttccccatcattttctgtcgaagaattccttctttcttttccaataattgtcgtataccatgagcattcttctcgcttttcacgatgcctttgctactatcatacaacacatttacacttcgttgtagatccatccatcttctaagaacatccatatgattagaactggcgctattatgctgtagtgcaagattggcttcttgcactttacttagcagaacattttgtggatgttccataattccaagactagagctagttgatggacggaatctatttggtgccacaaggagactattcaagaaaaacatctcatagccctttctcttttctgatacacttagcgtatcctgctggaagtcacaaagtaacatgcagaacctggcttcatttttccacaaacccttgagaatagattcaacctctgtaggcaatagatgcttctttcctgatgatgccacgaattctttaattgtgtcatcagaaaggtgtctaacttcattgattgatcctttggactgaggtgaagtacgttcttcgtcaaaaccagaaaccccagtttcccctgagctgtgagcaccgccatctcccttcagtttaaaatcggcaattgcatttgctcttacagcagaagcacttgtgtccttgaccagccagccaaatatagggcttgagaatgttgggctcttcatgtcacattttgcacacttcttctgtctctttttcattatcttggaaaaaatagacagaacctctttcaattggaccgatgtccaggttttcttgtccttctcaggagatggcttatcacatgaagtggcttcagtaatgtcttcatcttcctctgaaggagatgctcttttacctgagtcttccaaatttttagcacgggcaacatcaccctttactaacaattcaagttcattcacatatctgtcaacctgttccttgttcaagcggaacttgtgacaatggaagcatgtgacatggagaaggtttttcagacttgtaaacagcaaaggattgaacaatggttttgccaactcaatatgaccgaagtgaccagggcagcgaacagaatgctgaccacaactcttgcaggtatcagtatcattgattggtcccattgcagggtccagtaatccacctggcacaggaagatttttggcatcaaggcgctctgacttggttatctttttaacgctgctcctcttaatttcatcatcaccgtagaagctgaaatggattgaatccacttcctctgatgctgcctcgataccccgcaggtcggccatcccagaccccgcgcgtgcgcccttcctcctcgccggattcccgagggcacgagaagggcgaagctacgagggacggcggacgtccgaggcggcacagcggcgagccgagcgccgggatggcagcggcccgggagtacggcggtgtgacgcggggagagcggcggcggcgctttcgagtcaaggcagcggcgtttagcgttaaggagggtggtgggcggcggaggcggcgggcgcacgcagggactcgccggagggatttgggcggacaa

SEQ ID NO: 32391 - DNA, 466 bp, Setaria italica
  Peptide Sequence Number=SeqID_98365
gtgaagaatatagtcagcttgtctatggggtcttgtgtgccctcgaattggggccctcgtcaacctggtataaaggtgtctgcttttatggatgatgatgcattaggatttgtccttcccgctattttgaagccaaagcccttatggacaggaaaacaggttataacaaccatcttgaatcatttgacaaaaggtcgtagtccatttactgtggagcagaagggaaaaatatcagaagaacatctaacccctaaaaaattcgaagtttctaaggataaagatcctcccactcaagaaaaaaagataaagatccttccgctcaagaaaaaaaagataaagatcctcacgctcaagaaaaaaaagatgaagatgaagaagaagtagaattagtagaaaaaaaagaagaagaagaagaagaagtagaattagtagaagatgatgatgaaggagaagaagaagaagaaga

SEQ ID NO: 32392 - DNA, 1164 bp, Setaria italica
  Peptide Sequence Number=SeqID_98366
gacaattattggaaaagaaagaaggaattcttcgacagaaaatgatggggaagagggttaattatgcatgccgatctgttatatctccagatccgtacttggctgttaatgaaattggcattcctcctgtttttgcaacacggttgacgtatcctgagaaagtaacaccctggaacgccaaaaaactccaagaagctgtaaggaacggtgcggatattcacccaggtgcaacacattacagggacaacagtaacatttataagttacaggcggcccctgccaaacgccgtgccattgctaagatgctacctgcatcaagaggatcaatttctcagcctgggaaagaccctaattgtgaatttgaaagcaaggttgtatatcgacatcttcaagatggtgacattgtacttgtgaataggcagcctactcttcacaagcccagcatgatggctcattttgttcgagtgttgcctggagaaaagacgatacgaatgcactatgccaattgcagcacctacaatgctgattttgatggagatgagatgaatgtacactttccacaagatgaaatatctcgtgctgaggctatgaacattgttgatgcaaacaagcaatacattggtcctaggagtggtgatgctgtcagaggtctaatacaggaccacattgttggtgctgtactactgacaaaacaggacacccttctaagccgtgaagaatatagtcagcttgtctatgggtcttgtgtgccctcgaattggggccctcgtcaacctggtataaaggtgtctgctattaaggatgatgatgcattaggatttgtccttcccgctattttgaagccaaagcccttatggacaggaaaacaggttataacaaccatcttgaatcatttgacaaaaggtcgtagtccatttactgtggagcagaagggaaaaatatcagaagaacatctaacccctaaaaaattcgaagtttctaaggataaagatcctcccactcaagaaaaaaaagataaagatccttccgctcaagaaaaaaaagataaagatcctcacgctcaagaaaaaaaagatgaagatgaagaagaagtagaattagtaaaaaaaaaagaagaagaagaagaagaagtagaattagtagaagatgatgatgaaggagaag

SEQ ID NO: 32393 - DNA, 195 bp, Setaria italica
  Peptide Sequence Number=SeqID_98367
atcggcatatgctgctgtgttgagagcgttctgtgctcaatcagacctcctctctagggccaaacacggatgtctcgcggaactgagaaatgagcttaaaatattggagagtgaacacagagaatgtcttgggaaggccagatcaaataagcaaatcaatttctttgagtactggcttgcactaccaaaggaaac

SEQ ID NO: 32394 - DNA, 291 bp, Setaria italica
  Peptide Sequence Number=SeqID_98368
ggatgtcgtcctcctcatcttgcctgtcgagcatctccattacccgagcaggaagcttaagctgctctgctatcgccctctgcactgctctcctgctctcccactttgagcagtcgatgtggatgatgtgatgaaactgcacggcgtccggagctggttgctcatcagaggttgatgcggccaggcgttgggcaaccgttcggaggacggcggatcgcccccaggccgtcccagccgtcgaagtagatgacattctctctgcttctgctgcttcgcctcgtagtgtccttg

SEQ ID NO: 32395 - DNA, 434 bp, Setaria italica
  Peptide Sequence Number=SeqID_98369
accaaatcaagtcaaaatggaaggcaataagctcttagctattggctttgtcgtcctcttgggcattaatttatccaaagcaagggagttcgactgggaacacccaacaaccggtgccaatagtcagggagggggaggaggggcagggggagggtcctcaaatggttatggttctggatccggttccggttatggatcttccggggctagtaacagtcccggtgggctctatgggaccggcgactcgatggctaggggtgaaggaggaggtggtggtggtggtaacaatggaggttatggagctggttctgggtctgctgtaggtaatggaaacactgttggcttctatggtggtggattttcaggtgctggaggtagtggcggtgggggtggccaaggaggcggtcccctcaatggtgatggttccggttcag

SEQ ID NO: 32396 - DNA, 1955 bp, Setaria italica
  Peptide Sequence Number=SeqID_98370
taccctggaaaagatttcgctccaaagggagcataatccgaggagagcagacaaggggggctgggagaagacagggcgatggcgttgcccgagcaatcattctctcttctcgggagctatgcgctgcctctctgggctaccatcatcgccggcgtttttgtcgtcatctcgctctcgctgtccctatacctgctgctcaaccatctgtcagcctacaagaacccagaggaacagaagtttcttgtcggcgtcattctcatggtgccgtgctatgcagtcgagtcgtacatatcattagtaaatccatcaataagtgttgatattgagatcctgcgagatggatatgaggcatttgctatgtactgttttgggcggtatctagttgcttgcttaggtggcgaagataggacgattgaatttctgaagaaggagggtggctcaggttctgatgcaccacttttaggccaagcatctgaacaacgatatgtacaccatccttttccaatgaattacttgctgaaaccatggcctctaggcgaatggttctacttggtcatcaagtttgggctagttcaatatatgataataaaatcaatatgtgctattcttgcggtgattcttgaatcctttggggtgtactgtgaaggagagtttaagttgaactgtgggtactcttacacggctgtggctctcaatttcagtcagtcatgggccttatactgtcttgttcaattttatgccgcgataaaggatgagttagcccatataaagcctcttgcaaaatttctgacattcaagtctattgtgttcttaacatggtggcaaggcatagcaattgcactgctcttcaattggggcttgttgagaggtcctattgctcaagaattgcagttcaagtcaagtattcaagacttcattatctgcatagagatgggtgttgcttctgttgtccacctgtatgtctttcctgcgaagccatacgagctaatgggtgatcgtttcgttggagatgtttcagttcttggagactatgcttcagttgactgccctctagatccagacgaagtcaaggatagtgagcgcccaaccaagtttaggcttccccagccagatgattgtgtgaggtgttccactggcataaaagaaagcgtccgtgatgttgtacttggaggtggtgaatatattgtgaatgacttgaagttcactgtgaaccatgctgtggaaccaatcaatgaaaagctgcacatgatatcccagaacataaaaaagcacgagaagggaaagaagaaaacaaatgatgacagctgcatcaattcccccacatccatgaacagggtaatcagtgggattgatgatcctctcctgaatgggagcctgagtgacaacagtggtccaaagaaagcgcgaaggcatcgcaagaaatcagggtacatgagcgcagagagtggcggagagagcagtgatcacggcctaggtgggtatgagatccgagggcacagatggattactagggagtgacaactaagagcaatctgtggagataaaatatgaatcttccatgcccgcaaaaaaaaaaacttccgcaagagttggcttgtggtgataggaggaaacccagcaaagtaaaggtaccacggatctgtagagggttcaggtgcaagatgagatctctgccatgatgttttagtgcggcgaatagagatggacaatcagcctgttgattctttcagctgaccatttcagctgctgtggccttgatcatgtatttaggatacaggcttgcttggagcaagggttggaaggaagcaatgtgcctgttctgaataaacttacggagcatagctagttcccacaacaccacttgtaaagcacacaggctagaactagttacacaaataataaatagatgcctcagagttgaggcctgagatgatgctcttccagtctatttgttt

SEQ ID NO: 32397 - DNA, 341 bp, Setaria italica
  Peptide Sequence Number=SeqID_98371
acaaggccttcagtggaaaaccaatcacgtattagtttcatcagtttggtgttttgctaaaccagcagaggatgccagtgggcaaagaatcaaatttttgtctgaagagtaactttggaagttgctacacatttaacaaatcatcactacactaaactgaatgtatcatgcaaagtcaagacctggaagtcatgaacattaagtgggtgtttgatgagagggctgactttgagagtttttacgatttattagctaaccctaaggatttggattcaaatcctctatccaaggtgtggtctacataacaaattatgaaccttgctcatcttaaactgcaggtt

SEQ ID NO: 32398 - DNA, 889 bp, Setaria italica
  Peptide Sequence Number=SeqID_98372
ggtgggagctggcggcggtggcgggagcgcggtgcaagaagaggcggcggcggcaggttggtagtagtacgaatcttgaggcaaagcagagtggtagacgtaagggtaggagaagggggaggtggtggtggaggtggaggaggtgggggaagaagcactccggataaaaggttcgagtgctttcatgagctcctggtccgaggaggacgacgaggaggagctcagctggtttgtgtccaaatctatggctgccattacgaagatgagcaaaagactagcaagagctaaaaactggcgaaaaaaatcgaatctttttttgtccaaaaactgaactgaaaaagaaatttgaaaaaaggggcctgtttcttctgtaaaagcgaagaacagggatggtttggttggtgcagcctgaaaggggggcttaaaaacgacccttttccagcttgctagatgaagaaagcaacaaaacaaaaaggaagctaaaagaaaacagaaagttctacgagaacagacaaactaatccaggagagaaaaaaaggttctccggatctctgttcttcttccctaatgcaaggaagaggaagacgaaagggtttgaaatcaaagctcgaatcttctccgggtgacgcttccttgctcgatcaaatagcaccagcaagaacggctcccggaaaaggcctccttttcctagctagcgtctacgagaagggttcagagaacaaacctgtcgccaccgtgttcgcggtggctcgccgtcgtcgtcgtttgtggtggtggtggtggtggtggaacgctcagcctcaccggggaagtggagtgggttctgggttgggtcgctggggaaggggggggatggggaagggaaggcttgtgcgtgtgggagtgggtg

SEQ ID NO: 32399 - DNA, 730 bp, Setaria italica
  Peptide Sequence Number=SeqID_98373
cctactcctcgttcgagaaggctgccagcgcattcctgcaggagttcaggaactgggagacaccgtgggctatggaggcgatgcacacggtgacgctcgagatcaggctgctcgctgagaaggcagatagcgagcttgtgacgaccggaaagaaccccgacaagcttcaggctgctgggtccttcctgatgaaggtttttggcgcactagcggtaaaaggacccaagcgtattggagcactctatgtcacctgccagctattcaaaatttacttcaggcttggaacagtaaacctctgtcgtagtgtcataagaagtatcgaaaccgccaggaatttcgattttgaagatttccctgtgaaagacaaggtcacttatatgtattacactgggcgcttggaggtgttcaatgagaactttcttgtcgcagatcagaagctaacttatgctttgatgcattgtaatcctcaaagcgagtcaaatttgaggagaattttgaagtttcttatccccgtaaagctttcaataggtgtactgccaaaaagaaccctcctggagaggtacaatctgcttgagtatgcagatgttgtgacttcacttaggagaggggatctcaggcttctcaggcaagccctagacaggcatgaagaccaatttttgaaatctggcgtctaccttgtattggagaaacttgaacttcaggtctatcagagattagtcaagaaagtaaa

SEQ ID NO: 32400 - DNA, 609 bp, Setaria italica
  Peptide Sequence Number=SeqID_98374
tcgcctccctccgtcgccgtctcctccacgcgcccggttccaccccgctctccgacgccctcgccgccctcccggacttcccgcgcctcgccggcgaccgcttcccgcacctagccgatttcctcgtccccctgctccgcgccatccactcccactccctgcagcgcttcgccgacgcctactcctcgttcgagaaggctgccagcgcattcctgcaggagttcaggaactgggagacaccgtgggctatggaggcgatgcacacggtgacgctcgagatcaggctgctcgctgagaaggcagatagcgagcttgtgacgaccggaaagaaccccgacaagcttcaggctgctgggtccttcctgatgaaggtttttggcgcactagcggtaaaaggacccaagcgtattggagcactctatgtcacctgccagctattcaaaatttacttcaggcttggaacagtaaacctctgtcgtagtgtcataagaagtatcgaaaccgccaggaatttcgattttgaagattttctaggtctttggtaactagttaaaccttcttgttcgttagttgttcttatttaagttaagtttatttcgttaaaccgtt

SEQ ID NO: 32401 - DNA, 403 bp, Setaria italica
  Peptide Sequence Number=SeqID_98375
tagtaagaatatgtcctcccagatgatcatgtaatcttggaagaggtgtgctatattatgtgattcttaacttttacaataactatgaattatattttattttacttttacagtggcattgattaatctggtgacctacttgcttgtgtgccagttcgaagagagagttccagaagatctatgtccttacctcctggtgattatttcgtgtcctaatgactacacagtggaaggcactgttctgataccctgtcggacagcaaatcgagggaagtttccactgaatggtacctacttccaagcaaatgaggtttttgcagatcactcatctagtcgtcacccaataactatacctagggaatgcattgggatgctggatagaagcatagtatacttcggttca

SEQ ID NO: 32402 - DNA, 496 bp, Setaria italica
  Peptide Sequence Number=SeqID_98376
taactaacagaggcctctttacttccgtccgggcatccgagcaggattaacgccagggccggagtggggacggtggagtagcccccgcaagtccgctttcctcgtcctcctcggcttcgtctcccgtgcccggcggccgcggcaggggttgctgcccccgccaaggctctgcttgccatggcggcagtggcagaggcagaggcagatcttggacccagaaaattctctccgtggggaggatccttaattgattctgtggttggtactttccttacacaaaatgttgctgataatttatcaagcaaagtttcctccaaggaagagatgccataaagctgaagattgttcaaatacggctccgttagtagatggtgttgatgaaaacttgaacccaaatgaagcatatgatacttttgattcagtggattcagattttggtgaatacattgattctgaagaagaagatggccatgatacagaggctaaagggcattat

SEQ ID NO: 32403 - DNA, 464 bp, Setaria italica
  misc_feature (418)..(418): n is a, c, g, or t
  Peptide Sequence Number=SeqID_98377
agaaacaccgacacggcgcaagaggagcaagagagggaggaagaggaagcagatgattttggctcaccaaggaactctaactggtgcatcatcctctgcacttgttcctctttggggttcagcacaacttgatattgcacgctatggaaatcatgggaagagattgtggaataaggtgttgggccttactgaggagacattgcgggtgtgtgatgttctggcgaagtgggatgggagcgacagtgagagttttgaagggtttgatattggcagcggacctgaatgggatcaaacacggcatgtgtttgaacgattagtggatatattcattgctgcaatgttggatctactgggacccagaaaattctctccgtggggaggatccttaattgattctgtggttggcactttccttacncaaaatgttgctgataatttatcaagccatgcttttatgaacctag

SEQ ID NO: 32404 - DNA, 592 bp, Setaria italica
  Peptide Sequence Number=SeqID_98378
tagggaaatacggtaactaacacgcaccgattgctgaggtcgcaaaatgcattgaactcagaggacaacattacattttggcattgcggatacagggtttttatgcccactgaagctggtatatgaaatcttaaaaggaaaaaagaatgaggagtctccctgataagccgttgaagtgtcgatagagcaatgttatgccttcattgcaaaatttgacaggcactataattgtcatatagttacaaaatacaactgttggaaggcatattagagatcttttgatacgtgccatgtcacatgactataaattttggaagtagcactacctgttcaatattctgtaattctaaataaaatgactgaggtaatcctgtatcatctacactggagtcattgaatacagtcaaatgcatttgtccatttcacaaccagactaagtgtgtgtgttttaacaatagtgtgattgaaatattagctttatcacttactagggtcttttattcttagtgctgttgtcatatctatcttttttgttcactggatgcaagtgctaagagtgttattttaccatttttcaggttttcctcatgaa

SEQ ID NO: 32405 - DNA, 3183 bp, Setaria italica
  Peptide Sequence Number=SeqID_98379
caagaagcagcagcagcagcaggaagaaggtgttgccagtggcagtgatgctggtggtgcggctcctgttcctactccggagaaagtggagcctacacctcgaaggcggtggaagaagtcgaccaagggggttctccggttcaaggtggtgaaagataaagtggtgaagccgaaggtgacccctaagacggccacaccccgtaaagtgaagaaggataagaagcagcaaatgccggaggatggtagccatagtgctggtgctgccagctctaatagcgcaaggcgcaagttggatttggattcatcccaaagtaaaccctgcttcagcagagctgagttgatgaataatttgaagtgccttgccaagagtcatgctttaaatgctgaaccgacacggcgcaagaggagcaagagagggaggaagaggaagcagatgattttggctcaccaaggaactctaactggtgcatcatcctctgcacttgttcctctttggggttcagcacaacttgatattgcacgctatggaaatcatgggaagagattgtggaataaggtgttgggccttactgaggagacattgcgggtgtgtgatgttctggcgaagtgggatgggagcgacagtgagagttttgaagggtttgatattggcagcggacctgaatgggatcaaacacggcatgtgtttgaacgattagtggatatattcattgctgcaatgttggatctatgcaatgttggatctactgggacccagaaaattctctccgtggggaggatccttaattgattctgtggttggtactttccttacacaaaatgttgctgataatttatcaagccatgcttttatgaacctagcagcaaagtttcctccaaggaagagatgccataaagctgaagattgttcaaatacggctccgttagtagatggtgttgatgaaaacttgaacccaaatgaagcatatgatacttttgattcagtggattcagattttggtgaatacattgattctgaagaagaagatggccatgatacagaggctaaagggcattatggtgaagaatacaatagacttatagagaattttattgataatctaaaagagaatggtatttctacttgggacagtgaccttatgaacttagtgaaggataaatctggaaatccaatatgcactgaaagaaccttaagaaagtttgtagcttcactacgaccagtcccatcatctatctggaaagagttacgggaggaagcatatcgaaaaggatacagtgacacaagtcgaacaagtgatgctgtagattgggaatcggtactacacgcaccgattgctgaggtcgcaaaatgcattgaactcagaggacaacattacattttggcattgcggatacaggttttcctcatgaatgtaaagaaagctcaggatggaagcttcgacctggattggcttagatacatatcacgtgaaaaagccaaaaattttcttctcagtatacatgggattggtgtgaaaagtgctgactgcattcgtcttttgtcgttgaggcataaagcattcccagttgatgtcaatgtagctcgcatagtcacaagactaggatgggtcaaacttcaacccataaatggtgctgagttccatttaattaactcatatccaatcatgcgtgatgttcaaaggtatttatggcctcggttgtgcaccattgataaggaaaaactgtatgaactgcactgtcttatgataacttttggaaaggtaatgtgcacaaagataaatccgaactgcagtgcctgccctttcagtgcacaatgcaaatattctaatagttcacttgccagaaagtcacttcctcctccagagaagcatgaacatgaacacggagaacagcaatcaagcatggttgcttctgggagatttcttttatcaaatgatagttgcatgccaagtgctcaacatatgtatcaacatcaaattgaaataagcaggactgcagaaacaccacccatccataactgtgagccaattgttgagatgccacaaagtccagaatacgaatatgaagcacccaatgagcaagaagatttctacgaagatcatatatgtgatcttgaagatatcataccaggagtacagtatgatggtgagatagatctttgttcaagtaagcatgtgctgaacagcagatcttggacaccaaagtgtggaaaggacttagtcgtgatgaatccaaaatccagctttggcccaaataaaaagctgaaaaatgttggccgtcttaggacggaacacaatgcatatgtcctcccagatgatcatgtaatcttggaagagttcgaagagagagttccagaagatctatgtccttacctcctggtgattatttcgtgtcctaatgactacacagtggaaggcactgttctgataccctgtcggacagcaaatcgagggaagtttccactgaatggtacctacttccaagcaaatgaggtttttgcagatcactcatctagtcgtcacccaataactatacctagggaatgcattgggatgctggatagaagcatagtatacttcggttcatctatacactcaatcgcaagaggtcaaacaaggcatgatatcgaagagtgcttcaagaaaggatatgtctgtgtacgaggatttcatcggaggacaagaacaccaatgcgcctatgcagcacgctgcatgccaacaccataaagaaagaagctataaagaaagaagccatgaagaaagaaggtggcgagacgcctacgaagagggccaggacgtcacccgaggggaagagcaaggagaagaaagcatcctccgcgaaccaggtcccgatggctgcttgatatagctgtgtacaaattgtagctgggaacaatgccaagctagctctgtaaaccctgtattaggaagataatagttgttactagatgttagttatgatgcctagagtaggagcgaataaatggtggtggtctctcttgagtggcggttactttatttctactctttatttcctgtacagctgagactctgcttaccttcatgttactgctagattattagtctttggaagtaccgagtctgaaagatctgaagacggaacatgtaaaggcctgtttagaaatgtggttttcggttcaaaaaatttctacgattgagtat

SEQ ID NO: 32406 - DNA, 447 bp, Setaria italica
  Peptide Sequence Number=SeqID_98380
tagccgtcagtatgggggtgatccagtcactccttcagttgatatacccggatcttccatactcatacaaggcaagggaggttggctcttgcagccattttggttcttctgcttctcttctgcaaactccatagatgacctcatcagctcggatgtccttggttggctgctcttctacctcaacaatggcgactatgctgttctagaatgcactctcaaaatcctgaggcatctctctgaggtttccgaggagtacaacaggatgatgggaagagcagggtatttgagtgccctctcaagcttgcttggagcgaaatcatgtcgtgttcgtgaaatggcagctcaagtgctttccagcttactgctacttcacccatcgcaccatcttcgttcaagacagtgataatttggacaggctgctgcagctgcttgatccagctaggaggg

SEQ ID NO: 32407 - DNA, 933 bp, Setaria italica
  Peptide Sequence Number=SeqID_98381
cccgccgacatccgaggagacggtagcggcaacggctgcgtcatgtggaaggataacattgttgatgtccggtatatagacaatgggcaggatctctatgtgaggttgggaaagtctgaatcagctacagggaagaggaacattgtggcaaaaatcttccttccagttatggcgtctgcgctcgcacttacatccgctggcttgtaccttgtttggatctgcaagcttagagccaaacgtcggaacagggatattttgaagaaagcgatcctaggatactcgaatgcgccaaacgaacttggtgatgaaaatatagagcttccatttgtcagctttggagaaattgcagctgcaacaaacaatttttcagagaacaatatgctcgggcaaggtggctttgggaaagtttacaagggtactctgggacagaacatagaggttgcaatcaaaaggctcggtcagggttccggacaaggtgtagaggaattcataaatgaagttgttctgattgcaaaattgcagcacagaaacctcgtcagacttcttggttgctgcatccatggcgatgagaagttgctgatctacgaatacttaccaaacaaaagcttggatttctttattttgatgctgcaaataaatatctccttgattggcccacacgtttcaagataatcaaaggaatatctagaggacttctttatctccaccaggattcaaggttgactataattcacagagatctcaaaccaagcaacattttgttggatgccgatatgagtcctaagatatcagatttcggtatggcaagaatctttggtggaaaccagcaggaagcaaatacgaaccgagttgttgggacatatggttacatgtctcctgaatatgcaatggaaggcgccttttctgtcaagtcagatacatatggcttcggtg

SEQ ID NO: 32408 - DNA, 949 bp, Setaria italica
  Peptide Sequence Number=SeqID_98382
tttttttttatgcacaaccacattgcaattaattgtgtttagtggtataattattacaaacataactttgatttttcacaatcaagagacgaggcaacaaataaaagttacacaatatacatataagtgcttcttagaagcatgctgattggtacgagtaggtgatttatatagtaacacacgtgatgatttggcaacacaaactaaagtaaagcaggccaactgaacatatcatgcctgctacacgcattgatttaatttatgcttagttatttatagcgtcgatgatagatcaacagggccacggccagaccagtagctccagctgatattggagccatgcatgaaggggtctaggggattaatgagaaggcctggggggcggaggttgaggatgccgctaaggatgccagtgaggatctggatgatgacgctgatgatcccgccgaggccgaggtcgccgccgccgccgccgctgccggtggtgatgcccaggaacttcatcggcgacaccagcttcccggaggcgccggccagggacgcgtcgcaggcggccagtggggtggtcacgaccaggttgcactggttgctcattatagcggtgagctgactcctgctggcaccgggaatggtgatgacgaagttcccgctcgagtccgctgtggcgccggccatcgccttgccgtagcacataaactgcacggttgcgttagggaacgccggcgccgtggccacattgatgttgttccctgtggagcatggcaccgcgccggagatgacgacactggcgttggggctcgcccccaacccggcacagcgggtcacctggccggcggcgacgacgacggtgaggagcgcggcgaggacaaggctcttcggcgccattatattgctgcccgttgctagtactctagctcactcctcgatctcactcgatctgttgttcgat

SEQ ID NO: 32409 - DNA, 1229 bp, Setaria italica
  misc_feature (1)..(22): n is a, c, g, or t
  misc_feature (1227)..(1227): n is a, c, g, or t
  Peptide Sequence Number=SeqID_98383
nnnnnnnnnnnnnnnnnnnnnnaatggaacagtattaaaaaacaagttttggatcaaatattagtaatgtaaaaatagctgcctttgcaatgaggaaactttgatccacccttcaagcgaaccttattgttcttgtttgtacaacacagccacattcacaaggaaaccagtcaagcagacaacaaatcaattctgaatggcgtgacttcttgatcacgcacaatcccaaccctacaacagttttcatgtcacctaaaatgttttctgctattcctaactgccaatgaaaactagggaaaaacagaaatctaaagaaaacaagaaactctgtaacttctaagagatgaagagcatcagggctcagggtcatttttctaccattccatggagttggttcttctaagatcttgtggcagttttttccttatgactggaactgccctttccatcagctccgtaagtctcttttggcgtcgctcctcctgcaaaataataatggcaaaataagatcaattgaagggaagaccaaatagcctaaagttaagagacaagtacatatactgatatagttagcagtgtttctcatgtaaaactcttcatatttttttccctatcctacactctgcccttaatctaatttgttcagcgacacacttctgcacgaaacttctataagtaatcgatacaagtaacagaaaacctgaaactaggatacacgaatgaattgatggacaaggacatctgataccatgacaattcaaatgaagatcaattttcagatatttgacatttcacccagcaaatgtatgcaagactcatttctccttctctagtggaaacatgtttttccccccaagaactttttaaattcttgataaagcctctgaatgcaatgctaaaagattcagtgctgttaagatacatcacacttccaaataaagaaactaaaataagagggagggggattcagttcattaagtgtccagttcccattcgttttggggtgatcatgtgcctgatggtatcttaggaatactgtgaccattgtaaagggcatagcattataccatgactcgccagatgccttacaatttcaaatttcgagcagagcagtacattatggtcacacaattctgcactttccttttttccttgtctgcccaactactacagctggacactgtgctctaacaagatgattcatggcatcaccagctgacgagttanac

SEQ ID NO: 32410 - DNA, 281 bp, Setaria italica
  Peptide Sequence Number=SeqID_98384
gacggtggttggtgtcgtcgccggaggcggcgagggaggtgatgaggacgcacgatgcgcattgctgcagccggccggccatgccgggggcgcggcggctcacgtacgggtttaaggacgtcgccttcgccccctatggcgatcatgttcgcgagatgcgcaggctattcatcctcgagttgcagagcatgcgccgcgtgaacgctgcctgggacgccagggaggcccaggttgacaagcttgttgaaaacctgacccgtgccgggccaaacccggtgaag

SEQ ID NO: 32411 - DNA, 648 bp, Setaria italica
  Peptide Sequence Number=SeqID_98385
ccacaccggagcctgtgggcgctagcgaggcagcatggcccggtaatgctgctgcgcctgggctccgtgccgacggtggtggtgtcgtcgccggaggcggcgagggaggtgatgaggacgcacgatgcgcattgctgcagccggccggccatgccgggggcgcggcggctcacgtacgggtttaaggacgtcgccttcgccccctatggcgatcatgttcgcgagatgcgcaggctattcatcctcgagttgcagagcatgcgccgcgtgaacgctgcctgggacgccagggaggcccaggtattgggttaatttatgacagtgaggaagcaaaacctgtgaagcttctgaagtattacctacgtgtctcaaacacttgttaggttgacaagcttgttgaaaacctgacccgtgccgggccaaacccggtgaagctcgacgagcacatcttcagcgccgtggacggcatcatcggcacggtggtgttcgggaaaatctatggcacggagcatttcaagatgcagttcctggacatgctcagtgaagcgatggacatgcttggcagcttctccgccgaggatttctccccacaacgctgctggacgcctcatcgaccgcctgacgggtctcatctcccgtcgtgatagg

SEQ ID NO: 32412 - DNA, 1292 bp, Setaria italica
  Peptide Sequence Number=SeqID_98386
ccgtagacacaagcacagcagatgctctgctcacacctgcgcggcctccctctcccggttccactgttcgatccttgccctccgctcctcgctgccttccctcaccgggcttcggctcctcgaacgcccgcgccggcggcggcttccgtcgctgtcgtggctgcggtgcctctcgctgctcctccggctgccactgccactacggtagtggtagtagtagtcgtagtcgtcgtcgcggtccctcgaccgcgacgagctccggcggtagcggtacgggctcgggctgcggctgctccggctttggctccggcggaacctatgcaggtggccaaacagcttccgccgcaggtccctccggatctgcttcacgtgcatgaagttgcagtagccgccgcggttgcagctgtgttcctcgaactgtcggcaggtggcctcccggaagtccgtcaccggcgagaactcggcgatgatggggcggcccgagtagtagcggccctgcagcgcctgcagcgcccgcgccgcctgctcctcctcccggaactgcacgtacacgttcccgatcatgtgatctgcgaggttgtcgcagacgtggaggctctcgatctcgccgtgcttgctcagctcctcgaagatgtcctcgtagaagtcctcgaagtcctcctggatccgctccgggtcgatggagttgccctgcgcgtccacgcccggggtgatcatgtccgggcgctggtacatgttgcagagcagcagcgtcggcgagatggacggcttgttgtgcaggcgggagcaccggtcgccgtgccggcacgcgccgatcttgaagtagaaggggcagttcacgcggtccttctccgtgccaaagatggaagccaggtgctcagccatggccgcctgattcctcctttacctgctcgattcgattcgtcgcctagaaatttctgcaggatcagaaattgaaggcgcacagacgcaatagctaggattagcacacgaataacaagtccggtaattgtagggtccgaaaacttgacagataaccgcatcagaggcgactgcaatcccagtcggtttcgggatttgaatttttccaggagaagaaaccttcaaaatagcatccgcttaaatttggggaaaaattaacaactagcataactgtgaaagaaatttaacagaaaggaaactatctttatcctcaaatgcttggatttgtagcggaagatccaacatcttccgacctgataacggagagcagcgccgccgtggtcggaggggaagcagagtacggacgcgca

SEQ ID NO: 32413 - DNA, 271 bp, Setaria italica
  Peptide Sequence Number=SeqID_98387
gtcggtgataggtgtgggcagagggttcaaggaagggatggtgatggtaggatttgtggaaggcacggtgataatcgtgggcgttgggttcgtggaggggaccgttgtgatggggttggtcacctggaccggattcaggtcatcatggacaatgtttggtttacctgcagcagcagccgtcgtctcctctgcgaagggagaaaggaggatgtggagaaagagcagcgccgccatcgacgccctggccataccgccagccccagcaagaaat

SEQ ID NO: 32414 - DNA, 568 bp, Setaria italica
  Peptide Sequence Number=SeqID_98388
tccattaataggttcactcttcagcagctgtaataattttgccaatgtagcacttactttcccgatttctatcatttcaaagtcttccaggaatgttttattagtcatgctataagtcaccttcctatcgatttcattgacaatattccgatcattagaatctagtagaagattattaagtataatcatcaaggattcgtagcattctataactgcattatatctgtctcgatctagtttgactttttcaattagctcatgctcatccccttctttggagttcatggccatatgaagagctgcgggtaccttgctagcaacgaggaatggtggccactgagtgacagataaattgattgaagatgatggagccatcaatatgtgcttctctctatcgctgattaagtcttcctctcgtaaggaattgatgaatgaattccaaacacaaaagaaactcccctggttaagtgcttgctctctctgttttgcagcaatacatttactgaaagcttctggcattgatttgaacctggccctgaacatgccaagggtccgtatctcgcccaca

SEQ ID NO: 32415 - DNA, 291 bp, Setaria italica
  misc_feature (256)..(256): n is a, c, g, or t
  Peptide Sequence Number=SeqID_98389
gagcgaggaaaagggcaaaagcgataggaggaaatccatgcccagatcccatcgacccccaattcatcgacgcgctcctccaatcacagcccaaatcatagatcggtgtccgaaccgcttgcttcgtcgcgggatcgagcgggaggcgggggcaaccaggcgaggcggcgggcgcgcagacgcagggttgagggcacggagcggcagcgcctgccgggcgccgtggatctccgccacggcgttgggtggtggggtnaagcttcgggcgggcggcgatgggaggcggtgctc

SEQ ID NO: 32416 - DNA, 209 bp, Setaria italica
  Peptide Sequence Number=SeqID_98390
tcgaagcaccacgcagtgagggtattttttgccaaggacgaacggaggtggaggtggagccacggggagccggttatttgggctccggctccatcggtaggcttgtcttagcgggttttccggggctccagatggcttcggcagtgaagccattttgacttccccgtttggtagagctccttcagaagctggtgaagaagccctcgacg

SEQ ID NO: 32417 - DNA, 268 bp, Setaria italica
  Peptide Sequence Number=SeqID_98391
taattggttagactcgtcgtttggcccattcggtagagcttggggaacaggaggagccttagtgagcatttgctcatggatctgtggttgaaaaagtacattgtcaaagatacaaaaatggcatgcatttttgagcctgaggttgggctgggaatttacctcttcaattagtttctgacgttccggggagccaaattttggtggtgcttcacgtgattttatagcaagtgctcgtctatcttcctttttgtagtccagtgagcccaac

SEQ ID NO: 32418 - DNA, 354 bp, Setaria italica
  Peptide Sequence Number=SeqID_98392
ttcttcgcatcgaaatcaaatggatcactgcaccaacggccaaataaaattgcgcactacaaacaagccatagcacagtaatacggtatatacagtaacagatgatgcaaagccttagcaatttcatcagtgtcctacatacaatggggtaacataataagatcccactttgatttcatctataactagacaacagccatttacaaaccttacggggttataaaaattataggaccgcatagcaaagccccttagacgaggaatggggcatctcttatccaaagtatgcacaaccctactcagaacttgccctcaatgaaacctgccaggccattgattttcaagaacttcttg

SEQ ID NO: 32419 - DNA, 483 bp, Setaria italica
  Peptide Sequence Number=SeqID_98393
cctaactgcccacctaatagcgttacaaacttccatgctcacaaacaaacagaatctaaagactgtagtgttgagacatagatacacacttggcctcacgtaacggcctaactgcccgcctaattgtgttacaaacttccatgctcacaaacaaacagaatcttaagaatgaagaaatgtgtgtttacttttgacctagccatggtgggtacttgccacatgggaattccaaagaccaaaagaaaacaaagtaatttctttagcaccatgctcgtatagcccacaagactatatcagagtggactacgaataatggtgcttttcagcttattagaggggtccttgggtgaacctgcaagagcacatcagcagtcacttaacaaaaaaaaaatgcctaaggctactcaccactccatgatggttgccagtgctcagggtggtaattggatatgctcaaacaaatcttcttctgaatctacaaag

SEQ ID NO: 32420 - DNA, 593 bp, Setaria italica
  Peptide Sequence Number=SeqID_98394
tggtcctattaattagtcctagtagttctagtccctaaattgtcggtcctaaggttcaacagcctgtcatgctttggcttctggattgcaacaacaggattctgcggtgccaagggaactcttggaatgttttctctgtggctcgcttcaggcagatgagggttggtaacctcagctactgggggttcagcagtgttttctgcaacacccgactcagattgaggctcagtaaggtcactcgagactgacacagacccaccttcatccgccttgtctgcatgctcaccaaaagagtcagctgcaggtaattggttagactcgtcgtttggcccattcggtagagcttggggaacaggaggagccttagtgagcatttgctcatggatctcttcaattagtttctgacgttccggggagccaaattttggtggtgcttcacgtgattttatagcaagtgctcgtctatcttcctttttgtagtccagtgagcccaacgcaccaccagggtttgttggcatgaatgcaatcagggctactagcgctgtgagcatatccaattaccaccctgagcactggcaaccatcattggaaga

SEQ ID NO: 32421 - DNA, 2653 bp, Setaria italica
  Peptide Sequence Number=SeqID_98395
ctcccctaaacgttagatgggaaccatcaaccatgactgaatcaaatcccatctcaagagcttgaagcaagtctgatttggaagtgccatgatcatagtgaacagttataggcacactggattgttctgcagcagcaatgcaggacgctaccaatgggactccaccttgcttcagagcactgggatgaatctgcaggattgcaggactattttcagcctctgctgctgcaacaacggcttcaactccttcaaggttatacacattaaaggcaccaatggcataaccacccttctccgcattaagaagaagttcttttgtagaacttctagatggggaagcccaattttttaccactttagcaagagcactgttatcaccaacattaccaggaaaaacaatgtaaggtacaccggggaatctactctcaggaccaagctgccacaatggtacaccagctaatgcttgtcccattactttggcacgccgagcttccaaagcttttgtagcaatatcagatgacgtgattcctccctttgcgatgatgtaatgaggtttactatcaatccttttcacaatctccactagcgctgaactcactttacaattaatttctaagctttcttcaggagtttttccagtaatgagctggcggctggtgacaactagagtgtcttttctggattgtatgtaagcatttcctagttcaacaactcggctgatttcttggtctctgtcctccgttgatttcattgaaaccatctcaacagacacctctattactcgaagggatgacccacactgtgaccgcaactcatcaacctgctttgtagtttttggcacataggaaccaacaactatgaggcctccagttaaagctctttttaagcctaggtcaattggacagataggtggctttggcttgatcccaatccttgcacttacaaaacttgcagcagtgcggcacagaaatttctttcctttcaattcagcctgaatcattccagaagcaaatacggccatgtccttctcactagcagcattgacgatgcacacagagcccttctccaagctacagagctgctgacagactgcatttggtccttgtttacgcaagagatctatggaaattgttgataattgtttctcggaaacgcgtcctctagtcttctcttcaacccactgtctgagattggaggatttatagccaaaagttgcatccttggcgaactcagtttcaccagcaggtattaatctgtcagagtctgcaacatagtggatgtcattaatagtgtatcgtccaccttggaggaaaaatggacagattatccaagcatccatctcccctaatactgagacagctgcatcaacttcctctgggaaatgaccacgtagagttgaatcacctctcaagaccactgtataactaacaccagggacattctttgctgcagcttcgagatttctgcagatagtttgtactagcaacatgaccttatcagcagtcattgaacgggagtttgtcaaaataaaaaagcaagttggtagcttcagaaactgttcgacaagagcttcaacaggccattcagttaaaacttctatatcatgtactgtttgcgtcccagttggatcatcatctaaaactacaagaatctttttgctactacaagatgtaatagaaacaatatcatccattggatcttctggccattcagcaggaagagaacgaaggacatcttctttactaagcatgggaggcttcccttctactttaacaccagttaatgtctcatagaccttgacaacagcagcatcatcatatcggccccacccagaagcagatcctgaaataaatagctgatgagcaatattagagacatgcactgggatcctcgaattggaactttcacaagatactataccaagatccttgacaaatatatccactgcagaatagggtgtataatcattatcgagcatgtgtggcacacgatttccaaacatccatgaataacctcttgagtgttgcataatttcgaaaactcttcttgttctcaaatttagtcgagcagcaaatgccatggcttcagctgctgaggctatatgaaccccagcaagaagttggttcaccatcttaacagagcttgcagctccacatcctcctttgatgatatacaatttctcacttagtgctgatagaacagcacccgtgccatgcagagcttcatctgttcctgaagccattatagttagtgtcccatctgctgcccttttgacaccaccagataccggagcatcaaccaactttatatctcggcattcagcttctaatctcttgttgaggcggatcacaaatccaggagaaactgtagaagataggatgacagatgttccagctgacagcactggtacagcaccagcatttccataaagaacactatcagcttgaaactcatttgcaaccatgataataagtatttccacatcttttgctacttcctccggagaaccttttgttgatcctcctaaatcttctaccctggccattgttggcttgtagacatcataagcaacaacatggaaccctgatttcagcaaatgagatgccattccaaagcccattagtcttcctaagtacctaaattagttaaagtt

SEQ ID NO: 32422 - DNA, 1078 bp, Setaria italica
  Peptide Sequence Number=SeqID_98396
ggagttgaagccgttgttgcagcagcagaggctgaaaatagtcctgcaatcctgcagattcatcccagtgctctgaagcaaggtggagtcccattggtagcgtcctgcattgctgctgcagaacaatccagtgtgcctataactgttcactatgatcatggcacttccaaatcagacttgcttcaagctcttgagatgggatttgattcagtcatggttgatggttcccatctaactttaggggagaacatcttatacacaaagagcatatcttccttggctcatgcaaaaggtttacttgtggaagctgaattgggtagactctcaggatctgaagatggcttgacagttgaagaatacgaagcgagatttactgatgtcgctaaggctgaggaatttattgatgagacaagcattgatgctctagcagtttgcattggaaatgttcatggaaaatatccatcgagtggaccaaatctcaggcttgacttgctaaaggaccttcgtgcattaaccttaaagaaaggagttagcttggttctccacggagcatctggtcttcctcatgagcttgtacaggaatgcataaacttgggcgtgaggaaattcaacgtgaacactgaggtccgaaacagctacctggagtcccttaaaaagccagaaaaggacctcatccaagttatggcatctgctaaagaagcaatgaaagctgtcgtcgcagagaagctacacctctttggatcagctgggaaagcctgaacgcagcagaccccacacaaataagtggcgccggcaacccacacgacagcttcctctgtttggtactaacgttgttcagccgcagtaccttcaagcgaactgcagttggagcctatgtaatctgaacttctgaatttgggacattggctcaagtgtttcatgggatattctgtcattgtgcatacctgctacttcattgcaagtttgcaacatgatgcagatggcacaatcaaggcctttagtaataatgttttgtggcaaaatgctccttcgttaataaatgctggcgtgtttattgccgttcaattgatgcgtcttt

SEQ ID NO: 32423 - DNA, 413 bp, Setaria italica
  Peptide Sequence Number=SeqID_98397
gacgccgccgaggagctcgggctcccggcctacctgttcttcacgtccggcgcctcgccgcttgctgcctacctgcacatccccgtcatgcggtccgacgtctcgttcggggacatgggccgctccttgctgcacttcccaggcgtccacccggtcccggcctccgacttgccggaggtcctgcttggtcctcgcaacgagcagtacgaggcaactattggtctcttcgagcagctgcccagagcgaagggcatactggcgaacacgttcgagtggctggagccccgcgccgtgaaggcgatccaagaggggagccccccgccctggcgagccggtgccgaggctgttctgcgtcggcccgttggtcggcgaggagaggcgagggggaggggaagcacgagtgcctgacatgg

SEQ ID NO: 32424 - DNA, 404 bp, Setaria italica
  misc_feature (358)..(358): n is a, c, g, or t
  Peptide Sequence Number=SeqID_98398
tccgcggcggcgggcaggaggactacgacaaggcgtctgctccggcgccgtcgcgggtagccgggtggtggtgtatagcattggtgtacctactcctacttccgctacgtctggtatgagatccggccggacgctagcccattgccgttcctctttcttgtgctcaattttgctcttgcttttattttctcttcttcttctttttgcatttgggtttttgctagaatctgtacactgggaggggggagagggagagaggtgaagattgaagaagatatgattgagctgcaaaaaacaaaagaaaacgcagcatccttttaggaaggaaaaagagttggttatacaaaaaaaaaaaaanaaaaaaaaaactaaagagactagccaaggacgacacagggagtagg

SEQ ID NO: 32425 - DNA, 334 bp, Setaria italica
  Peptide Sequence Number=SeqID_98399
gaaaacaagcgaggtccccgcacgggagttgtgggctggtgccgccgccgccgagctcctcgcttcaagctgtcggccggacacggaaggctccgagcgagcgacgcagactgcggcccggggcatgggacgccatggtggctatgggggcggcgcatcgtgcctcagccggcttccccgcggcaagaagtggcggcgggtcgtggcctgaggagaggcacggtgacatcctgcaccacggtcgggatccctgcggccccgaggacggggagcgccggtggcggcgtgccggagcaagtcctcgcgtaagcaccgggaagagacggtcgaacga

SEQ ID NO: 32426 - DNA, 373 bp, Setaria italica
  Peptide Sequence Number=SeqID_98400
tgcctccggaaatctgaacccgaatgtcctggcttagcttttctcgatgtaccgtgaatggcaagaagagaatgccaaaagaattagccaaaagcaggaggaaatagaaacaagatagaaacggctgatgcattggctgttaagcttctccagcggtttaattattcactctacagtatgagatccacctcccacaaccttgctgaagttcatccgctgcagatcgaagttggtgaattgaagggcaggttaactgaagtcataagcaactgcgatgcattgtgcaagagaatcgctgcggaaggaccagaaagtctgcgatcatccgttgaacctttcacagctggaagagcggaggcagaaggtagcggtt

SEQ ID NO: 32427 - DNA, 683 bp, Setaria italica
  Peptide Sequence Number=SeqID_98401
taaaaacgttaaaataaaattaaggtactaagtaagtagtaattgtcctaaagtaatttagtcctaaaagtcaggaggaaatagaaaacaagatagaaacggctgatgcattggctgtcttgcttctccagcggtttaattcttcactctacagtatgagatccacctcccacaaccttgctgaagttcatccgctgcagatcgaagttggtgaattgaagggcaggttaactgaagtcataagcaactgcgatgcattgtgcaagagaatcgctgcggaaggaccagaaagtctgcgatcatccgttgaacctttcacagctggaagagcggaggcagaaggtagcggttcacttggctcaaaacaagagcccccagtcgaaaaatctaacagctgacagcgtcaatggcgtgcggagaaactttactatgctgctaaataggtcttgaggaaatacacggaaggcttgtccatgtatgtactttgctagacaggtcagatgtctgaattagtccatactctctcttgatgtagtgcttgtcatagacatgcctgtgcattggaccgcaggtgtttgcgactaatttgtgtacatcagaaaagcacgggtggttttagctcctgtgcttatgtgtacatgaatcaatgttccttttcaagtttacacgacattaatttcttc

SEQ ID NO: 32428 - DNA, 623 bp, Setaria italica
  Peptide Sequence Number=SeqID_98402
aagcacaaagaagtggctaacaatacaaatgctgatgaagatcttgtttctgataggaaatctagtctatcaattagtgcctccccaagtctatcaccgatgcaagatccaacattgtgctcttctccgaagatccacaacaaggcaagaaagagcatcacttcaccagggttatcgccaagcaagcttagagtatctgagagcccaggtgatggaaatgttgaagtgtgtagaaacagtgaagttcgttcatctctacagtcaagcaagcttagccccactgactcactggctgcaagtctccaacggggtttgcacattatagagtaccaccaacagaatccagccccacgaagatcattcgttggcctttcatttgatcatttcgcggtgaatccacgtcaatcaatagcaaatgttagttcagctgttcaagtgctacctgaggaccgaggaaccatgctttgttcatcctgcaagaaaccaatgaatgcaaatgaaaaccagacagaagacataaactcagcaaagcagatagtgttggccttgggtgccacatccaatgagtcagatagtgcttcagttaaggatgacaacaacactaaagcaattgcttcgaagag

SEQ ID NO: 32429 - DNA, 1135 bp, Setaria italica
  Peptide Sequence Number=SeqID_98403
ggtcggaggagggggcgggtgggatgaccaggtagctggagctggtggctgctggtgctctgctcccccttttgcttggtcatagctatgatttggttgttttgaagacgattgccatatgcgaatatggggtccgtgttgtatctgctagatacataatgaaatgtgatgatgatacttttgttagacttgaatcagtaattactgaagtgaggaaaatccggaacggtgaaagtctctatatagggaacatgaattatcaccacaagccattacgcaatgggaaatgggctgttacttacgaggaatggccagaagaggattatccaatctacgcaaatggtcctggatatgttatatcctctgatattgcagattccatactatcggaatttgtaaaccataaattgaggcttttcaaaatggaggatgtgagcatgggcatgtgggtcgagcggttcaacaacactagacttgttaaatatgttcacagcgtcaaattttgtcaatttggatgcatagatgattattacactgcacactaccaatcaccgaggcagatgttatgtttgtgggacaaactgcaggctggaaaagcacaatgttgcaatatgagatagcaataatggaggtggtggtacttgaacatttaaatggtagtggcgcccatccttatttgcagaggagttagatgacctggaagacccaagattcaagaaatgctgacgataaattaagccctccagatgactaacaaatggccatttaacggattttttggtacagctgaccagactctgtttcagctggaaacaaagggaatgggtgtagtgcagcctgtaacgcctttcatgactgagcttctggtgctcgttttaatctcaacacatggacgaaagttctgtgggcagtatgagcgctgctttaggacttcttttgtaaatgcgaagggtagaaagtttagttaaattatacttctgcttttggtacgattggctgtggttgcaatcataaacaagtaaacaacccagctgagctggtacagatgagcgatcttggtagtgtaacagaattttgctgtgcattctctttaacatggtcataagtaatgacttgatttagcaggcaaaaaaaa

SEQ ID NO: 32430 - DNA, 526 bp, Setaria italica
  misc_feature (518)..(518): n is a, c, g, or t
  Peptide Sequence Number=SeqID_98404
taggtacggtaaaattagttcatcgagcaggagcggcgtgcggaggccgctgccgtgaccgtgggcgtcgccgaggagagcgtgccgtacacgacggtcatcaccgacgcgagccgcttcttcgtcatcttcaagcggctcttcgtcaacctcatcctcagcttcctggagcgcacccggagtcaggccacgttcctgcggctcacgccggagcaggcgtacaagatcatcgaaatcgagctgtcgctcatgtatgacaccctgcattccaaggccgcggtgattcacacctggtacggccgcctgttccggtgtctgacgctcctctcgacgtcgacggcgtgcctcctcttcaacgtgcaccacaagggtaaacaccaatcgtacaacagcatcgatgtctgcatcacgaacatcttgtttggaggagctctttgcttagaggtgtatgccataggaatgatgctcatatcctactggacatacgccgctctgcaaagctgcaacttccgtttccngagcaata

SEQ ID NO: 32431 - DNA, 431 bp, Setaria italica
  Peptide Sequence Number=SeqID_98405
ttgaagggcaccatcttaggttcccagcaaccatactacttcaatcagtacttataaggtctctgacatccatcaccatttcagagtgttccaacacttccagatgaagtccagaacacggttacagcctacacacaagttaccataccatatgaagtaccatgagtcagtctcccaggcgacctgttacactgattgcggcacacaaccaaccacctaggatgtcgtccccttgccctcagcgcgcttcatattgaacaattcggtgggtccgcttcttgtagaggatgcggtagccgcagtcgcggcactggatcacatctcccggcttcagcgtgttctcggatccacaatctccgcagaggtagctgacgggttccggctgctgagggtccatccggtgagccgcgagctagggtttctctctctct

SEQ ID NO: 32432 - DNA, 1026 bp, Setaria italica
  misc_feature (697)..(697): n is a, c, g, or t
  Peptide Sequence Number=SeqID_98406
actacccttacgtagacaactagtaataagacagaagtaccaatataaataactaatcgcaagcctcatgcatgccgtcccagctgcgccgcccgtggcaaaatatgctggactcacgggaatgatttattcagtgctcagcaggaggatggtagatcggagttggctttggctgcccgtacaccggggtaggagggtggtattccggcgtcggggggtggtactctggtgtgggagggtggtacaccggcgctggcttgtgctcaggaacggggtggtactccggcactggcttcttgtggaaatggtcgaggaagtgcttcttgatcggggcgcagaggaacgcggacgcgcactccgcggacgggtagtgcgtcttgccggggatggcgacgaaggtgccgccagacatgggcgcgatcctggagggctcctggccggggcagggcgcgttcgcggcgctgcggagctgcgcgtggcagtcggcgccgtggaggtcggcggcgagggggacgctgaaggctccggagctctggagctcgctgacggccttggtctcgtactcgccgttggtgtccttgcacttgatcgccacctgaagacctgtggacaacgagacacagtttactgaagctggaaagaagtcaagggtcctgccagttttgcttagacatttgtatatattcagctttttacnggtagtttcaaattctaacggtgtcaacggcaatactagcgatttttttgctcgttatcgtttgtatatattcaagatttccatttgaaattcaatgtgaatttaggttccccatttcttgccggtgcaggaaaccctggccgtgccaacaacttcaccatggaactgtattgcactagctacgcacgcatgcccgcacgttaattactggagtacctttgaaagccgtctcggccttcatgttcttcctggtgcagtcggcgcacctggccaggccgacgacgaccgacgccacctggccctccgcagcgctagcgacagcgatcgcc

SEQ ID NO: 32433 - DNA, 876 bp, Setaria italica
  Peptide Sequence Number=SeqID_98407
acctgtcctctgccccctcccacagcgcttcgctttctcccgtcttctccgccttcccgtcgctgcctctcgctgccggattcttcttcgcaaccctagcagctagccatggccgggagagggaaggcgatcggctctggcgccgccaagaagtccatgtccaggagctccaaggccgggctccagtttcccgtcggcaggatcgccaggttcctcaaggccggcaagtacgccgagagggtcggcgccggcgcacccgtctacctcgccgctgtgctcgagtatctggctgctgaggttcttgagctggccgggaacgccgcgagggacaacaagaagacccgtatcgtgccgcgccacatccagctggccgtccgcaacgacgaggagctctcccgcctgctgggcacggtgaccatcgccagcggtggcgtcatgcccaacatccacaacctgctgctccccaagaaggctggcggaggcagcgccaaggccgcggccggcgacgaggactagatccccgactaccgtgcttccggtggtggtggccgtttcttgtggatgatgtatcacttgtgcttgtgtagtactgcgttctagactcgcctaggttttgccttctagtagggaggttgtgtgtgcctgtaccgatgctaaagctagtttactcgtgttcgctaaggattagttctgtctatttgttgctatgtctctataaaaggtgcatctttctgatgacttattaatcacatctggtgttcttatctcagtttgagtcagaatggatttgaacttctggacaatcgatttgaattgttgcagtgctgtgcggttaatccacttagattctgaatgagccatctagaaaaaaaaaaa

SEQ ID NO: 32434 - DNA, 785 bp, Setaria italica
  Peptide Sequence Number=SeqID_98408
cgcgactcgcacccaagcctcccgcatccgtttcccctcgcccctgcctcgcgaagccgtttcgtcgtcgtcgtcgtcgtcgggtggtgagatggcgggccgtggcaaggcgattggcgcgggcgcggcgaagaaggcgacgtccaggagctccaaggccgggctccagttccccgtcggcaggatcgccaggttcctcaaggccggcaagtacgccgagagggtcggcgccggcgcccccgtctacctcgccgccgtcctcgagtacctcgccgctgaggtcctggagcttgcagggaacgctgctcgcgacaacaagaagacccgaatcgtgcctcgccacatccagctggcggtccgtaacgacgaggagctgacgaagctactcggcggtgccaccatcgcgagcggtggtgtgatgcccaacatccaccagcacttgctcccaaagaaggccggctcgtccaaggcctccagccacgacgacgacgacaactgagtcggcctgctcccagccgggatccgaccgcctatggttgctgatttcgtaggagtagcagtttggtgtcttggtgatacctggggaggcctcgatgtggttggcaggggaagtaggagatgatttcgataggttcttgggttggtttgttaggttctttgaatgggatgtgaatacggctaagtttttgggttgtgaaactcagggatgtaagccagataatgatgttttaatcgttgaagaagaaatgggaagaagttgaaacttttgagcaactttgataaag

SEQ ID NO: 32435 - DNA, 1209 bp, Setaria italica
  Peptide Sequence Number=SeqID_98409
ttttttttttattttgtaatccattgacatttaaaacaaagcgattgctaatttcacatataacgaggacggacgaacaagtcgcttacactgacgaagaaacaagatacgcatcccgcttttaattaaaagctaaacaacgatcacaagtacaacctcacaactactcaacatttattctcccttcgtgcactagtaataagacagaagtaccaatataaataactaatcgcaagcctcatgcatgccgtcccagctgcgccgtccgtggcaaaatatgctggactcacgggaatgatttattcagtgctcagcaggaggatggtagatcggagttggctttggctgcccgtacaccggggtaggagggtggtattccggcgtcggggggtggtactctggtgtgggagggtggtacaccggcgctggcttgtgctcaggaacggggtggtactccggcactggcttcttgtggaaatggtcgaggaagtgcttcttgatcggggcgcagaggaacgcggacgccgcactccgcggacgggtagtgcgtcttgccggggatggcgacgaaggtgccgccagacatgggcgcgatcctggagggctcctggccggggcagggcgcgttcgcggcgctgtggagctgcgcgtggcagtcggcgccgtggaggtcggcggcgagggggacgctgaaggctccggagctctggagctcgctgacggccttggtctcgtactcgccgttggtgtccttgcacttgatcgccacctgaagacctttgaaagccgtctcggccttcatgttcttcctggtgcagtcggcgcacctggccaggccgacgacgaccgacgccacctggccctccgcagcgctagcgacagcgatcgccattagcgcggcgcagacgccgaggagccacccttcctgccatggtgctgctagctagtcgaaggcttacttggtatggtagctgtgtgtgtggtggccgtttcttgtggatgatgtatcacttgtgcttgtgtagtactgcgttctagactcgcctaggttttgccttctagtagggaggttgtgtgtgcctgtaccgatgctaaagctagtttactcgtgttcgctaaggattagttctgtctatttgttgctatgtctctataaaaggtgcatctttctgatgacttattaatcacatcttggtgttcttattctaa

SEQ ID NO: 32436 - DNA, 323 bp, Setaria italica
  Peptide Sequence Number=SeqID_98410
ccaacacgcgcctctcctgcaggttccacccttccttcttcgtctgccgccgccacgacgaccagaagaggtactacgagctccgcgacggcgatccccctacgccgccaagttctacgactgctgcggcgccgaggaccccgatgctcccggatgcaccaccgacttccaccgctcctacgacgacgcccaagactagaagagcagagaggaactgctcgtgcccgtcactccatcaggcatcagagcatgtatgtacaataaataaggtgaacttgcttgactccaatcagtaataatctaaccaataaatacaaaccgac

SEQ ID NO: 32437 - DNA, 713 bp, Setaria italica
  Peptide Sequence Number=SeqID_98411
aaaaactaaaaacgtaaaagaaaagaaaaaccaaaacgggaacccggtttaggttaacccacagagcagagcaaaaccaccaggcaccagcaaaaccaatccgatacgcttcctctccccctcgcagcgcagcaggccagcagagagacgaaaaggaatccaattcgcccggccatggattccggcgtgacgccggcggccgagaagttgtgccggcggtgcaaggggagctacgatccgtcggccaacacgcgcctctcctgcaggttccacccttccttcttcgtctgccgccgccacgacgaccagaagaggtactacgagctccgcgacggcgatcccccctacgccgccaagttctacgactgctgcggcgccgaggaccccgatgctcccggatgcaccaccgacttccaccgctcctacgacgacgcccaagactagagtaagagtagcagcctcttctttctttcttttttgtttggttttgagagatgcagcctcttctttctcctgtagagagcagagaggaactgctcgtgcccgtcactccatcaggcatcagagcatgtatgtacaataaataaggtgaacttgcttgactccaatcagtaataatctaccataatcaaccgcaaattggaatccctgtactgtgactagtgtctgataatctgctcttgcacaacctgattggttacattcacagtaac

SEQ ID NO: 32438 - DNA, 562 bp, Setaria italica
  Peptide Sequence Number=SeqID_98412
agtgctggatatagatttttggatataaaatgaatctgtgccaatgacgggatcagtacttttagttccttcatttacttctaacacgcacacgtctgaaatagctgcacttagtattttaatctcatcaccaacatgtcgttccagtgagccaaataacttgcaattgttccatgcttgctcagaatcgttgtctgagtgattatcactggcatctttttcactgacttcaggcttctccgtctttgtgccattgtgatgtcgaagataggtagactgctttaaatacaagttctcatgtttcctacgctgtgccgatggaaagcgcaagcgaggagtccatgtttcctgcaaacggctgtcacggtccacaatgtggtcaaatggaatatcaaatggttttctccaggggagtagaacagatggtgctgaatcaggaatttgtggtaactctactatttcctctgaaccatttgaaggatcaaacggattaggccttggtgtagaaatggagggaacctgaacacggaagcgtgatgcctcctccattttctgaattgca

SEQ ID NO: 32439 - DNA, 469 bp, Setaria italica
  Peptide Sequence Number=SeqID_98413
ggaaaaaaaagaagaagaagtaaacgaggaagtacaaatcgagcacctccaactccggcgacctcctctactccagcgatcttctatctccggcgtgcacctcgtcttctcatgcgagctccgaattgggttaggatttgggttcatattagggtttgggggtttcgggttgggtaggggattggtggctgtcgggcttaaaaggatggtcgtggaggctgccgaagtgacagtggtggacgggacagcgagccaccacccaccacaagttagaggaggcaggttggggaggctcggtgtgttggtggcggtcgcgtgggtggcggatccggcaatgatggccccccaaggccgggagggacggcgggagattggaggcagggaagctcgggtctgactgcgaggggggcgtggtctagctggtggtcagggatagatgcactaccatgcctcgcgacaacggaataga

SEQ ID NO: 32440 - DNA, 327 bp, Setaria italica
  Peptide Sequence Number=SeqID_98414
actatctgcaaccccagggtattgtattttcatgacaacatctgatccatccttcaaaaccgctcgatggacctgcccgatgctagctgcagctagcggatcatagtcaaaacttctcaacttggaggaccagttagggccaagctcagcatcaaggactgaatttagctgcttcctcggcatgacatcagcaccttgacgaacaatatcaagagctgccaataccggtgggggtacaagggattcatcctggatgctcagcatctgtcccaccttgagtgccgctccccgcatccggcagagtgcaagggcaatacgctcagcatt

SEQ ID NO: 32441 - DNA, 753 bp, Setaria italica
  Peptide Sequence Number=SeqID_98415
ctttaactaaaccagagagttccaagtcttggcaattgtgtgtttgagaataaagtattagaaattttgagccacagttttccatattacctttagtttttgcaatggaatatttgcagttcaaccgattataatggaaacaagatttgcccttctaatttttgctatgtagcactgaattgagtagtgcacaataccttgtctcatattagtaattagcttccatcatttactttgaaatccagaataaataacatgatcatgctcagaaaagatagcatgaagttatatatcaaaagagtagcaatatgacaattttgccgtgtttacaaactttctaatgaagtcaaaagaactacatctaaaagttggttaatggttatcttgtttccttcacccaagatgaatgttgcacaaaattataagtgcatatgacagaaatacagaatcatgatgcaggttttccattgatccaaatatattctctccatgactaaatgcgtaccattctgccttttagattgtccctaaatagatatcctcccatgattttgaggtggcttttgtcaagttctacattatatatccttcccatattaataatccattttattagcagcttcatttactactaagcactagactctagagaaacacaggctatcaaagggagacgtaactaagcacatgaaagctttcaatgaaagctaaaaacttctttcgttacgttttatttggtttgtttgttgtcta

SEQ ID NO: 32442 - DNA, 593 bp, Setaria italica
  misc_feature (546)..(593): n is a, c, g, or t
  Peptide Sequence Number=SeqID_98416
gctatctatcatcaatatcttgagcctcttgcaaagtgcatgcacaccttgcaagtatcaaaaagggctattggattgcagctttctgaaccctggctacgtgaataccaggtgcttccatcacggactcatccgcacatgcaaatgaatgcatttggtggttatatcttgagcggcataaggatacgaagtgaaccagtgagtcatcaataaggcatgcttctgttccttaaggaggaggagcatggcattctgtaacttttatgctaccggagaaggtggacaattttgtagttgagagtagccaacttgcatgttgaaaaggagacgttatcagatagaaattgggtagtatgaataacactggagtaggacatgagcattgctgcctggatgtacccaattccatgtaacatgtaatatcatatctgttgtacttttaaaatttagatgactcaaactgaacttgtacgtgtttgcacatttaatgcgttcagttgtatttgctggaaatatagttgtgttcggtaactaaaaaaaaaaaannnnnnnnnnnnnnnnnnnnnnnnnnnnnnnnnnnnnnnnnnnnnnnn

SEQ ID NO: 32443 - DNA, 309 bp, Setaria italica
  Peptide Sequence Number=SeqID_98417
gtttcgtaggtaggtaggtaggttcgtaggtagtcttggagcggaaggaggtcgcattcaggctgatcgtgcatatgcttggggccgagggtgggctggagaccgagcaggtcgggaaggtcaggaatgctgctgcacggcaggtccgatcactcacggatttcctcaagattagaaagcgggactggagggagcagggtgcccagctgagggcaaggataaacaccaaattgatgtgctgccaagctgcagtagtggtgctggtgcgaagcgtttccaccattgatactaatagcaagtcttccaagg

SEQ ID NO: 32444 - DNA, 2298 bp, Setaria italica
  Peptide Sequence Number=SeqID_98418
tgtagtctaggttcgggtaaggttctaggtaattgtcttgttaatgggcaggtcgggaaggtcaggaatgctgctgcacggcaggtccgatcactcacggatttcctcaagattagaaagcgggactggagggagcagggtgcccagctgagggcaaggataaacaccaaattgatgtgctgccaagctgcagtagtggtgctggtgcgaagcgtttccaccattgatactaatagcaagtcttccaaggatatgctccagcagactctagcttggttcatcgaggccaccaagtcatgcattctgtcatcctggcggaaactgaagatctgcgaggagctattttgcaccctgctcaatgggatcggccagataactgtctcacgcgggggccagctcctgccggtgctgctgattcccttaaaaccgcttgttgtgagcacgtgttcgcaggctgacatgacaggcagtagccctggggctttatttgaggcagtggtgaagttgagctgtgagattatagagtttggctggactaaggatagggcccttgttgacacattcattatgcgtctagctgcatatgttcgcgagcggaatgactatgaggaggaggatggtaaaggaaaagaggcagttccagttattcgacttaatgtcatacgccttctggctgagttatgtgttttcttgaaaaaatgggaagttgtagacatgattttgccccttttcattgaacatctagaagagggtgatgcttcatctccaagttcattgcgtttacgattattagatgcaatatctcgtgttgcatgcttgggttttgaaaagtcatatcgtgagagtattgtcttgatgacaagaagctatcttgacaaagttaaagctctaggggtttcagaaaacaacacagtgccatcagaagcaacaactgagcgtacagagactcttcctgcaggctttctgcttgttgcctccaacctcacaagcacaaaactcaggtctgattatcgtcataggttactgtctctatgctcagatgtggggctagttgctgaatctaaaagtgggaggagtggtgctgatttgatgggtccgttacttcccgcagttgctgaaatatgctctgattttgatccagtgtcaactgtcgagccatcattattgaaattattccgaaacctttggttctacattgtattgtttggcctagctccacccatacagaaaaatggggcacctacaaaaccagtttccacttcattaaacacaatggaaagcagcagtgctatagcccttcaagctgtagctggaccatacatgtggaatagccaatggtgtgtagcagtgcaacgtattgcgcaaggaactcctcctctggttgtcagttcagtgaaatggcttgaagatgagctagagctaaatgctctacacaacccaggtagtcgtcgtggtagtggtaatgaaaattctgctgttgggcagagaactgcactttctgctgctttgggaggtcgagttgaggtagcggctatgagtactatttcaggagtaaaagctacgtacctccttgctgttgctttcctagagatactgcgttttagttgcaatggtggcatactttcagctacatctacattgaatacatcaaatagtgcattcagctgtgtatttgaatatctgctcactccaaacttgacaccagcagtatctcagtgtttgacggcagtcgtgcatagagcttttgaaacagtattgtcatggctggaggatcgcatatccgacataggtgaaggagctgatgttagagaatcagttctttctgttcatgcttgcttcctcataaagagcatgtctcagagggatgagcatgttcgtgatgtgagtgttaagctattaacacagctgaaggaaaagttcccgcaggtcctctggaactcttcatgcttggatttacttcttatttctgttcacaatgagttgacttctggcccagtcagcgatcctgcttgggttgcaactgtacgatcactatatcaaaagatagctagggaatggttaacaagtgctctttcatatgctccgtgtaccactcaaggccttatacaggaaaatttttgcaagccaagcggagtacaaagaacacagcatacagcagatgttgtctcacttttatctgagatacgtatttgtagtggaaagaatgattggaacggcattaggacggccaatattcctgcagttatggactctgcagcagcagcatcaggagaccaaaaaaagaagcacctgacttca

SEQ ID NO: 32445 - DNA, 569 bp, Setaria italica
  Peptide Sequence Number=SeqID_98419
cgccctcccctcggcgctcctctgaggggcgacccgaggtgcaccccacccagcagcccgtagatccccgccggccgttcctcgcgggccgccgccgctgcagccggccggcagcggtggcggcgaccagtggcgggaccaagcggctcccgtcgcatcttcttcctccctctgcatccttacctgtgtctcctctccatccatggtgctcgccggcgttgagggactggtggtgcagctgccgggctggccgccggatctaccccttgcctgcatggatctgcacgtcggtgggtaggagtgctcgctgcaatgctccgcgtgcggttcgggccagcgcggcggcaggggcagctggacctgctcgtcggggttcgctctcgtcatctcgcacggaggcaacgcgggtgaaccagcgcccctcaccgtgaggcccgccggcggtggatccgcaatccgctgcaaccgtatctggtctcccatgaccggctggccggtttccttccggatctgcgctgggcccctaggggagcgatggtgcgcgactgcgccgacgtgcggccatacat

SEQ ID NO: 32446 - DNA, 262 bp, Setaria italica
  Peptide Sequence Number=SeqID_98420
ggcgtcggaggtgtggtacgcgtcccagaacacgaagtccctgcggtcgtcgcagagggtcgccgtgggtaggcacaggccccccaccgtcgtgtccacgtcgcagcacgacgtgtgcgacgtcttgaacccgtatttctgggggcggtcgatgagctccatgacgatggagtagcagtcggagagggacatgcgcgcgccgggaagcttggcattcagctcctggagcaggtccttggccgcggcgttgaactggagggcg

SEQ ID NO: 32447 - DNA, 1747 bp, Setaria italica
  Peptide Sequence Number=SeqID_98421
taattacgaaatgaaccatatcagcgcaaggaactgcaagggtgattacttctgtttacagaaagtaggtatccacctccacagtattcttaatgaactacattcacactggatgaatattttctcaattcaaatgcttacactatgtgaatctatgagtacacttatgtaaatgatctgaatgtgtcatattcaaacaaaaaagtggtacatattggactagcaacaaatggactaagtggaagcaaagtaccagcactaacagaaaaaaactaaccattctatgaagttcatgtagggggccaaatcaaacatccagcccccaccgaattgaatcaccgccatcacaatatacacatcgtatgccaatccatccataaactgtatccatctttgtggcaccatacagatccaactcatgcttgaagtggcaaaactatggcagtttggccatcagaccactcaaatccaggatgctgaggtttcttcctagtcatcaatatcccaacttaggtcctcatcgtcttcaacggaattaagacgttttcggagatcctccactttgttagtagagcttgaccgtgggctggcccctttcttctcatcttgatcgcccacatcctcaatctcctcccagctaagatcttcctcctgtgctgatggttgagacaccactgaaaaatcgctctccttagatgagtcaccagcttcagccttctcttcctgtcccacaccattgctcgactttggtgtcaatgtttcaacactggattcaccattaccatcctttgcttccgccgaagctacctccttatcttctgtcgaatcagtcccaactgccgcttcttgtttcccactgccctctgtttcatggttaaagggatctgctgatttctcttctttcttatctaccatggagtttgtgccttctttgtgatcactggtatttgcatcttcatcatcgtcatcaacatcccaactgagttcttcatcctcctccttcgacatggccctgctcacgagtttggtgcggacatcctctgcctgcctgagcttatcgaccgcaaagaaataccgagaccagaatgtctcataatcaacaactgacggcacaagcctctccacaaagctctctagtccagggctttctcggagcactccctctatctgctccttcacctcatcaattgagaacgagctattccatctggcaaagccctcggagtcctctggctcctcggtgaacgtggcaggatcagcgcgcagcgccaagacctgagcctcaaacctggtgtacttcttggatggcagggaggcacgccaggaagcacctgaagcagaggcatccgaggggcgggaggcaccgtcaccatcctcaccatcgccttccgcagaccggagggcctcgttggcatgcgagaggaggccggcggcggcggcaccaaggtcgtcgacggcctggcccacggactcgagcctgtcggaggcagcagacgcgctggcctccagcgcgccggggagcgccgaggcggctcgcgcggcggcggcccggagcgcggctgtctcgaggcggagccccgacccgaggtcctggaggtcgcggcggtagcctcccagcactgtctccgaccgcgacgcgaacgtcttcaccaggcccccgaagctccacccgccatctggaccctccccggcctcatccccctcctccccttccgcagccgccacttccgcatcggctcctcgctct

SEQ ID NO: 32448 - DNA, 1314 bp, Setaria italica
  misc_feature (67)..(67): n is a, c, g, or t
  Peptide Sequence Number=SeqID_98422
cagagatacactacgcatagtcatctgtcattctcataaggttaatgtcacatgggatgggagactnaacccttatgttttttaactcaaaattttgcacagtactatatctcagcattaccagtaacaaataaatcaaatgttctaattatacagccacagaggatacactacgcatagtcatctgtcattctcataaggttaatgtcacatgggatgggagatcaaaattcacctgctaatacagtaaaggatgtcgcatactgccaacaccgtcatgaaagcttgctcatgaaaaattagggtgtgaaggcatggactggttgggattgctggagagtcaagagggagggatgagcctccgtggtcattgtttcactcgtttcatgccaccattactaaaggggctaggaggagcaccacctggatgtggactctcctctcggaggggtgaatttaacatggcaagttcccggagttgctgtctcttgtagtagtcttgtgattcgtccactggcttcaatagctcttcaaggatctcttgtgcctttgcaagtcttgcatcgatcacattagcaggtaactcagcttcaatcaagatatggaggggctcactcaagtgttcatagccaggtcttcctttaagttgttcctccttgccagaatctttaattgagcccttccctctgatgaaaacacgacaacctgtagaggcttcaatcctcttcaaagaatttccccttgggccaagaagacggccaataaaattgaaattagggtatgtatctgttggtacttccaaccgcaaaatcttcttgacaatgtatgaagagggactttgtgggggtccttgccaacccatagctccttgtggaacacctactctctctgaatgcatcccattccatggactataaccgttcccgcaaaaatttggcatggggggtgacggatgcatctggtttgggctagcgattggaaacttctcgaactccccagcaccatgttggcgccgcatattcgacacccgcattatttcttgattcagcagcctgctgcagattgggagcacctgcataaacggccccagcttctgatgctcctgcagcaagtccgccaggtactgactgcctacgtccggcggcccggggggcctgacctgcggcgacatggccctcgcgggggagaagcaggcgtccgtaccgtgcaggccgtccatggcggcgcgcggcggccgggtcgggatggggccgccccgggtgccaatcggggggaagccgctacggggagaggaggaagaagaggagaagatgg

SEQ ID NO: 32449 - DNA, 214 bp, Setaria italica
  Peptide Sequence Number=SeqID_98423
ttcgctgctgttagcaatgggagcggaaataagcattcagtgaataatgtgaataatttgaatcgtggtgcaagcgctgcatctgataataaaattaagctattgaaagatgcccacagttgggctgacagtaatttaatcgaggatgtattggctgctgtgaataataatgtcagccaagcatctgatttgttgaaagctatggtctctcctg

SEQ ID NO: 32450 - DNA, 1503 bp, Setaria italica
  Peptide Sequence Number=SeqID_98424
acacaggctgcctgcacagtttcagacgcatcatctcctccagcatacagtcggttcaactgcttgaatgacatttctacctaggcatgccttctacctaataaatgggctaccatcaaaagggagagcttgcggtacgcacaaaatttcctgaattatttccagcgcaatacaagcattttcaatcataatctactctacactaaggattggtgccttagcaactgaaatttcctacggctgaataatatacagtctggcaacttattcaggggcacttcacggcagcccatcctctgcttcagtggccctggatcaggagctcctgtgaaatgaattctaatgcatactagaaacagatgcatcttgaatcattgcactgaagctttgaagcccatggtgatttgcagccggagcagggacattcaatgatgatccattagcatttgttgcattgccttcgttgtcttcatttgtagatttggcagtcctcctccatcgcttcagcagatatttttgaggtagctctttgatatttctgtagtccagcaccttcagcatgtgacaacatgggatgcccataaactcaaacttcctacaagtgcacacacaggagcaatcacttgaatcaaatcgaacaaagtgttccttgggtttctcagatgaagcaaccttgtactcagatgttgtcccagcctccccacaactgaataacacagagtccatgaatagctcaaactctttacgaaagatctcaaacaccactggtgtatatgtatgagcagcttgctttagcatcttggctgggggtattcttggatagctctgactagcttggaagtcagcttgcagctcagcatagcgatgttcatccactgctctttcatagtgcttgaagaaggacagtagttccagttgaggactcaagaacttcttcaaaatactactgaaactctcgacttgaagtgcacttatgatgtcagcacaaaatatatgcctatcatatgccaaggcccattgttccttctcatcaaacactttagacagccattcgttatgtctaagatcatacttttccagcatacttctccatgcaaacaagaattcatctccatcctcatagccaaagacacatttgctaaagtcctttgcaaatgtctttgaaccttggaagacatgattgagatgcttaagagaattctgatatacatgccaagcacaaattcgttgtgtggtatttggccaggctgctgccattgcactactcaatggaatagattgatctattaaagctacagtaggctgttttccatgcatagcaatcttaaaactctcaaaaagccacttgtatgattcaaatgattcatcataaagcatagctgcaccaaaaataattgtttgtttatgatgattcacaccaaggaacaatgcaagtggcctaccatatccattttattttgtatgttgtgtctaagcagagtacatcaccgaagtagttgaagt

SEQ ID NO: 32451 - DNA, 1334 bp, Setaria italica
  Peptide Sequence Number=SeqID_98425
aagaatagaagagaagatggagaggagagggcctctagacctgagagggatgggaaaagatatgaagctatttgcttctgagtggaatgttgtctggttcaaggtcttgcctgtgatttgaggatgaatctcttgtgtagttttcattcctcggatctgcgggatctcggaccaggcttcattcccctcagagatagcttcaaatgatatcgatctagcggccggggctattctaaatctgttcttattctttgattttgatatatttgtgaggatttttttgcatgagattcctggttgttcttggtgtggagcacagtactctctcctgactcctggatcttatctcgaactccactgtgccttctttgtctgttcgtttgttgcggatcgaggagaagcaagattggtgtaatgatggcctgctttgactcctctttcctctgcgcatctgcaggtgctgaaagttttcatcattaccttttgattggggagaatcttcactttctctctcctctctccagtttctctctctttgcttcttcgattccgattcttcctctcggttttcccatctctctctatgcatgcatggtgggcatggattgcttctggtattcgcaaagttttcgagaacatgttattgtcaaagctgctactagaagtacaaagttatctgtatcgatctgagtattcttgctttcagatatttatctgttctaggtttgaagatagttttctcggtgcagaacctgcttcaaaaagtttgggagggtgtatgtaattctctggacgagatgcagtatatgtgtgtattctcttcatgctatgttgggacctggaacttgatgtatatacatacatgaagcgagctcatcataacattttattgatgtatgactgtatgagtactccaggtgtgtatttgttcttctcagaggcgtttctggttctactatatgttgtttcttgatgcggctggagctgctgcgtctggagctcgcttgatgttttgtaccttgatttcaatggttccatccatcttctgcctccggatccaggcaagctggtttgaagtgagaagatgtatggatgtaaggagtaatctgatatgtgttccctgcctgatatatgatgcatggatggttctctataatctcttagctaccaagcaacattatccgatgcgacacatatgtactttgttttgagcaaaggcaaataatgtatccttctgttgaatgaacacttcttgatagtgtctctgttaacaattccgctgtctaatattttgtgcaacttggtctttcaaggcaaaggttttaggtttttat

SEQ ID NO: 32452 - DNA, 494 bp, Setaria italica
  Peptide Sequence Number=SeqID_98426
ttacttcccccaatcaacggagcttcccgtttgatgaaaatagacgattccagtgttgaccagaaagtgctctttttctttttcttcgagaccacggagatttaattccaccccggtccacgttgggagaggacggcgccagcgagggcgacgaggcagctgccgccacatgcgccggcgccgaatctgaaccatccgcggccgaggtccccgaggtcgccagagaggacgccgccgccgaggccgacgacgtgactgggaggggacctgcgatggatccacgaatacgaccgcggggacgagggcgccctcggagacggcgccgccgccgtggccgaggaggaggtgctggatcgccgcagggccttcatcgccctgccccgcgcctcgtcctccctcccacctaccgcctattgactacaaagaacccaagctcctagtccacccctgactgcttcccgcgccagggcgacgagcttccccatcaacgccgg

SEQ ID NO: 32453 - DNA, 270 bp, Setaria italica
  Peptide Sequence Number=SeqID_98427
atatgccactatttaaaactcgaccatgagaggagactccccccaggctttgttctaagaaggtgccgtgcttcgaacccgggttgggacaggagtttcaacgactcccggagttcaacatattcatggataattaaggatctattggagcttcaattaaatgaagaagcagtgtcttgccggttccattgtgagttgaaattaataaatgcaaagtgcccatttattacacaatatacatcacagacaagaaaacagactcgtaaaatg

SEQ ID NO: 32454 - DNA, 863 bp, Setaria italica
  Peptide Sequence Number=SeqID_98428
gccggcgccgcggatctcggttccccgcgcgcgccggcccggccggagcctttgatcaccgtgccgggccagcccgcctgaatagttaatggcacacacgcacctagctagctagctacagcggcggccgccgccgccggcggccggccaggtcacttcctgacgcggcgcagcgcgagatacgccagaagccggtacccgaagaacatggcgacgagcgccgcgacgcaggcgcccgggccggcctcgccgtcgacggcctccggcgggagcagccgccggaggtggccgccgtactgcacggcgatgaggaggcggtagcagtagtaggtgaaggaggtgtacttggcccacaccatgaaccccggcacgttgtgcacgtagaatcccccggtgaggaggtaggcgagcatgatcaccgtcaccagcgtcgacgcgcgcttggcgtccatcatgatggcgccgacggcgaggcccagaccaccggcgacgagcacgtaggagaggatcaccgccagggtgagcgcgaacgccgccggcgacgggttgagcccggtcatgaggtagacaaccacagtgaacgccgtcggcagggcgagctccatggggaggtcgccaaccatccgcgacatgaagtaggaggagagcgcgtacatccccgacgcgcgctcgcgggcgagaacggggcgctcctgcgggaaggcgaagacggcgttgaaggaggcgaagacgccccagaagatggagatgaagaagaggaggccgagccggtcctggacggccactggcgacgaccgccaccacatggcgccggcgaccagcgccggcgcgatgatctggaacatgcgcagcgacgtgaacgt

SEQ ID NO: 32455 - DNA, 459 bp, Setaria italica
  misc_feature (293)..(293): n is a, c, g, or t
  Peptide Sequence Number=SeqID_98429
aaacaactagctagctctttttttgtcacttaattatctagcacagccgtggtgccggaaaggattgagatatgagagatttgcaccatgaacgatgagctgtagctagagagagagatcgaccgagacatgagacgtaccacacggtcgaggtcacgtcgtcgccgccatggtcccaacaactaggaacctgttgcaccatgacggcaatagcagaggcaagccgtgctacccaccccggccagtactgcgtcggcatcgccgcccaattggaggcctcggcggcggccgcncggcaacaagaccaccgcaagccgtcaagatccactcggctcgccatggccgacgacgagccggcagcggcggccggcacgagctcccagggcggtgccgccgcaggagacgacgaagactggctccagctaagcctcgcaggcgtcgccgtggcgtcgtcgtcct

SEQ ID NO: 32456 - DNA, 251 bp, Setaria italica
  Peptide Sequence Number=SeqID_98430
gctggacccctacagcggcgcgtacctggtgctgacctccccgacgtgcaggtcgacgagttctgccgcgccgtgtgcggcttccactacttcaccttcgcctccgtggtcggggtcaccgtgccgtacttgtgggtggggaacagcgccacgcagtgccccggcaagtgcgcgtacccgttcgccgccgccgagtacggagccggcgccggcgccgggggaggaggaggggggagggggagggcaggcga

SEQ ID NO: 32457 - DNA, 343 bp, Setaria italica
  Peptide Sequence Number=SeqID_98431
atggacgggcgtcgcccgcggcgcgccgtgacccgcgacgcgaggagcacggcggtgagcaggccggcgatgtagagggacgaggtgaagagcgtcagcagctggctgtcgaacttgcagtagttgctgacgcgccccgtgccgcccttcatgcggcggtacacgtccgggaagaagccccgcaggaacgggtccatggacgagacgccgcccgcggtgccgatgtcgtagccgaagatggcgccgcccatggccgccgtggcgcacgacagcgccacgaacgccgtcaccccgccgccgtaccgacggcccgcgtcctcctcggcgccggcgaccgcgaaag

SEQ ID NO: 32458 - DNA, 276 bp, Setaria italica
  Peptide Sequence Number=SeqID_98432
ccttgtgctaaactttagcacagtgctaaagtttagcaccctgaaataaagtgctaaagtttagcacttgaggttgtttggatacagtgctaaagtttagcaccttgggtgagaaatgactacattgacctcatttatgactggcttggtgaaaagtggagaggagagagagggggcaaccagggaaaaagtgggcttgggaccacttttagcacccattagcaccttttagcaccccttaggtgtgctacgccggcaccgcaaaaccctgcggga

SEQ ID NO: 32459 - DNA, 408 bp, Setaria italica
  Peptide Sequence Number=SeqID_98433
tgttttcagagttttaacttagctatatggttaagatattgtgcattgctgaaagttaaagatttcattcgtttgtgaggctgctccctgaagaaccttttagatcagttagaaagtaagcatgtagtaggattcggccaagcacaagtgatgccaagcttatataacataaggctactttgataccaattaagatgtattaggaatctctgttagtctactgtattgccatgtcatttactcaatctaaagttttatattcaatcttgggagtcatgctgatcgctggaccatatcaactttacagtttctagatttgtgaattatgggattttttttgtctgcagttgtttgcaggaaatgatgcagatgaattcaatgcagttctaaaacagcacataatcccaa

SEQ ID NO: 32460 - DNA, 1618 bp, Setaria italica
  Peptide Sequence Number=SeqID_98434
gggtaagggcccgggcgacctggccacgagcagccagccaccggcgctctctcccgcctccctatcccctaaccctagccgccgccaccgacgcctaaaccctcgccgcactaaccgcagcgacctctcggcggcgatggcgaaggagaagaagcggaaggagcctccctccgacgcggcgcctcctcagggcggcgagggcgaggggaagagggagcgcaagggtaagaaggcgaagaagcataaggcggaggcgatactgccgtcgcagatcaagaacaaggagaagcggagcgagctgcacgccaagctcaagcgcgagaagaaggccgagaagcgcaagctcgcccgcgagcgcagccaggccatccgccgcgccgaagagctcggggaacagccgccggagaggcaggtgccgcggacgatcgagaacaccagggagcccgatgagactgtgtgccggcctgacgaccaggagttgtttgcaggaaatgatgcagatgaattcaatgcagttctaaaacagcacataatcccaaaagtattgattaccacatgccgcttcaattcagggaggggacctgcctttattgaggagttgatgcaagtgataccgaattctcattatgttaaaaggggaacatatgaactcaagaaaattgtggaatatgcacagaatagggacttcacctcacttattgttgtccacacaaatcgaagagaacctgatgccctacttatcatggggttacctgatggccccactgcacatttcaaactatccaaacttattctacggaaggacataaagaaccatggcaaccctaccagtcataagccagagctagtcttgaacaatttcaccacacgccttggtcatcgtgttggaaggatgatacaatccctttttccccaagaccccaatttccgtgggcgccgtgttgtgaccttccataatcagcgagactacatatttttccgtcatcacaggtacatctttgagacaaaagaaagcaaggttgcttcgaaggacaagaaagctaagacatctgaaagcaaaagccaacctgagaagcaagtgatttgtcgccttcaggaatgtggtcctcgctttactctaaagctgctcaccttgcaacatgggaccttcgacacgaaaagcggggagtacgagtgggttcacaagccggacatggatacaagcaggagaaggttcttcttgtgatggagcgtggatgcccaaacgggtggaattgttctgttgagtctttgaaatttgtgtagagaggatgctttgcacgtagaatccataaatcggtgtgacggactttggccatgtttggaacagtttaaagcttaaatcttgcttatggtcaatatatggtcaatataatctgaaactagtaggcaaacggctcatttttttcagctttttctggccgtgtttctcccaaccgcttccatctgtactaaaacgcgcagaagctggatcaaatctgctttttagggaagcatttttttatttttgtgcagccttatttgaggggcggttttccccaccgccgggcctttgatgcctgtcgaagcaattttgtggatccaacccagatgatctaat

SEQ ID NO: 32461 - DNA, 373 bp, Setaria italica
  Peptide Sequence Number=SeqID_98435
cgccctgtctctttgtacactggatccatgtaaggcaagcaccctatgacattcatggtataatctttacccgccataaaaatctttgataacccaaaatctgatatttttggtaatgagcccacgatccaggagtatgttgcctggtttgacatcggcatgctgaatgccattttctgtgtatgagtgcatgtatgctaaaccttgaccagacccaattgcaatgtccaaacgcgatcttagtgttagtggctcaagttgctgattttctttgccgtggagaatgtcttcgaggcttcctttagcagcatactcgtacaccagcaatggaacatcgacgcgcaagcaacaacccaagagcctgagaatgttt

SEQ ID NO: 32462 - DNA, 390 bp, Setaria italica
  Peptide Sequence Number=SeqID_98436
tattatctccagcgggtaaccttggccttgcgcaatgtccatcggcgaggatcgggggagagaagaactgaagacgcccggtcggacgggtctatcgctggagtggagcagagagcaaagcaatgcgatcgatcgatctgcgaatgtatccctttgatttgcttaccactactatacataggctgccggcggaggccggatcggaggcggtgattgaggaccggatcggatcggaaaaggaacacatcaccgatccatctggatactccgactccgatccttgtagcagcaggcgactccgattcctggtcgtcgtctactcgattcgattccgaaccgagtgctgatcgacgggagctctcctaggctaggatgatgttcccacggagt

SEQ ID NO: 32463 - DNA, 486 bp, Setaria italica
  Peptide Sequence Number=SeqID_98437
cgataccctctgcccctcccgttccccttcctctcgtgcatcgtttggagccactcagtgccgccgcctcccaggctgccgccttctccaaactcaggtgcctcctccgaccacagatccggcgccgtccgaggatggaggccgtcgtggtggaccggcgtggctgcaggcggagcggcgcagcgggcagccacggcggcccagcggtgcgagcaggcagcagaggagagcggcggctggaaggtcctggcgagctgctgtgcatcggctcgggcctagatgcgcgtgctccccttccgcccgcctcctccctggcctcgacccctgcgctcccacctcccgctcctggtcccgcctgttgcctcacgccgtcacgcgggaggagctcgacctctcctttttctctttgatttgtgtgcttgcttgctctgtgtgtgttcgagcaaatggttcaacgagttcttgcgtactcttgcagatgcatgg

SEQ ID NO: 32464 - DNA, 860 bp, Setaria italica
  Peptide Sequence Number=SeqID_98438
atcagctgtaggaaggaaagacacttcacgagaatcaaaataggaagaaagtagagcctatactactattctatggataaagctgaaattgatagagaaaacaccgtaaagatcaattagtgagcgactgggtcgatacaactaaaaaaaaaactgcttcattataccacaatatgggacaaaatttaggaatccgcttatgtaataaagccgatccactaagggattaagcagcggtgtagtatcagatcccaaagatagtaagttcttttttctttgttatgggaaaaagtctttttcgaggattctatagaaatttcatatatgaaagaaacgaaaccgagatagttacctttcagaaaattggaacgaaggatataggtctatctatgcttcattcttctgaaggtgggagaaaagatcaaactgattattgatcaaaattagggtttgaaacttaggtaattaacttcttctgcttaacccaagaagaaattggattgatttttgagaaatcgaattcagttaatataggggaaattaagatagcaatttctgagccgtatgaggtaggaaactctcaagtacggttctaggggaaggaactgcctattccgaccgaggagaacaggccattctacagggcgattcggaaattgcggaagcttggtttgatcaagctgctgagtattggaaacaagctatagcgcttactccgggaaattatattgaagcacagaactggttgaagattacgaagcgctttgaatttgaataaaacaactctccatttccataaaatgggtggtttggttgttgatccattaatcaaataatttaggtaagaagatcaaatcaag

SEQ ID NO: 32465 - DNA, 700 bp, Setaria italica
  Peptide Sequence Number=SeqID_98439
agttctttcttatgtggtgcctgtgttcatagctgaaatagcaccaaagaatctccgagggggccttgcaacttcaaaccagttgttgatctgttctggaagctcagctacctacataataggggccctggttgcatggcgcaatttggtactagtaggattagtgccttgtgtcctcctactaggcgggcttttcttcattccggagtctccaagatggctggctaatgttggaagggaaaagaattccacatctcactgcaaaagctgcgaggagaggatgctgacatatctgaagaggcaattgagattaaagagtatattgaatcactccatagctttccgaaggccaggcttcaagacttgtttctcagcaaaaatatatatgcagtcattgtgggtgttggcttgatggtttttcagcaactgggagggattaatggtgtcggcttctatgcaagctatatcttcagttctgctggtgtgcaaatatctctgatactgttgtgtttttctaacagtcctttatgaatttgttggttttatcgcaacttcaggattttctggaaaacttggaaccatcttgattggcattattcagattccaattacattgtttggggccattctcatggataagagtggaagaagggttcttctgatggtataaatgctacaaagctgaactgatgtatacaaa

SEQ ID NO: 32466 - DNA, 370 bp, Setaria italica
  Peptide Sequence Number=SeqID_98440
aagcccttcagcttgcttgcaagttgcaacttcgtcgtaccagagctaaaagaacaaagaacagcgagaacagacagcggaagagtctgtagctgctaatcgaacctggcgcctaccgttttcctccgacgatccttccttcccaaaatcactacttgctatagctagtgtggttacaggatgggcgaggtgctcgaattcctctcgcacggcgtcgcctggggaccgcggccggcgacgaacgtctcgacggcaccagcgccgatcccggccatcccgactgcgccgccgattggctggatgaacgccgagaaccctctgcttgccgacgcgccggtcgggctcatgccaagacccaggaagtctagta

SEQ ID NO: 32467 - DNA, 356 bp, Setaria italica
  Peptide Sequence Number=SeqID_98441
aggttagggaacgaacgaacggcacgttcctgggcgcgggttgccggacttcgcagatgcctttcggcgtcaacgccggggccgtgtcgtgctcaccatccaggcgttcgccagctcctgtttcagggcgcctgttgctcaaccagctacagctgccggattggtctccaaataacttcaccaagactgcaggatcctgtaccttcggaagcttcaagtttatgtggaagcttaactgatgcttctctgctcgaacattaaaattcttcagctatctatttctcagctccagcacacccaaacaaagactttgccactgtgatccaaagaggtagcccaatttaattcatgaaaag

SEQ ID NO: 32468 - DNA, 568 bp, Setaria italica
  Peptide Sequence Number=SeqID_98442
agatgtcacggtgactaggatcaatcagattggggaacagattccgcctcacaaatatatcaagctagtacgttaaaccctcgaatgtacagcatcgtcaatttagcactgaatcatgaggcaaaggtagacatggtgggcccagcaatccataatagaggatcgctacttatgggcatgcgtgcgctcaaaggatacaaacagggattcgcaaacaaaaaagaaaattcatagtcataggttaggtcgcaacaatactaattccttttattccaagacgaaatggagatttcttgcctaaagagacgggatccactccaccaactataggttgttgagaatccaccgaagaaagtccctcctgctgtgcgccaacaatctatcaattgggccaaattaaaccgattttttcttaagaaaaaattaatagacaaagagggtccatgtccattttagtttttttttgcgggtagtccatgtccatttagttgaatttgtggaattttaactagtacaatacctcgtacgcagaagagtaatcgcgagtgacctcgccatctatttcttg

SEQ ID NO: 32469 - DNA, 869 bp, Setaria italica
  misc_feature (863)..(863): n is a, c, g, or t
  misc_feature (869)..(869): n is a, c, g, or t
  Peptide Sequence Number=SeqID_98443
ggcaaacgctggcactgcgctgcgcgaaacctctcgccgtagcggacgagccccactccggccatggcgcggggcctcgtcgctgctgctctctggtccccagcgcgcctcggcgcgagcacgtcaccgtcgtataccggccagcctgttcgggtcaccgcccggtcggtgggaggtcgcgggcggcggcgtggcctcatggtcgtgcgggccggcgggccgccgagcaccaaccagctcatcctggccttcgtgctgccgctctccctcttcgtcggcaccctcgtcaccgccgcccgcgtcgccgacgacctcgacgagcgcttcctacgggagatggagatcaacaaagcgataatggaagagaacgaggcgtctgatgaagaggaagacgacgacagagagtatgatgaagaggatgatgaggcgggagaggatgacgagcaagccccggtggaggaaaaggaacccgttgttgttggcgcagcagctgctgcaacacgcaccaggaacaggccgagaagacaagtataacaagacccaggaaagctgatgctgatgtgatcttcccctgttctgattaagtctggcgatcgactctctcgtctcttggagtggaaatatgcttgcaagtgctacagtttgactggggaagcacgcatgttatagtcacacacctgcagtgtagtacgttgaaacttagtcctatacacatgtatttgcaagagtatatgcgatcacggaatgtagcattacctgttagatgaaccctggagtattgcctgtcattctgtcaaaccacaatgatccgaatcatgaagaatgcagatatccttgtcatgccgcaaaccaaaaaaaaaaanaaaaan

SEQ ID NO: 32470 - DNA, 426 bp, Setaria italica
  Peptide Sequence Number=SeqID_98444
aaaactttattaagtcgttggccagtgaccaggacatcatccaatgcataaactactaccattcaagagacgttcttgacttttaggcctggatcatgccggctatacagcgactgacaaaccaacacatctctctgttcaaactcagctgccacctctctccgaagtcctcttcctgttcctcttctttgactagtcacttgtagaagcaagccatgaggttaccagagagcttcaggttcatgctactgctactgctactcacccttgtgctcgtcggagcagagctgatgacaggccgcctctgccatggccggcgaattccaggcccagaggtggtggtggtcgagtcgccgccgccgccgagcgagggctacggcctcctcttctccagcaattacaagtacaagcagcagaggaggatgt

SEQ ID NO: 32471 - DNA, 265 bp, Setaria italica
  Peptide Sequence Number=SeqID_98445
ccgaggctgctgaaccagacttaaatcgtatcaccagcagcattagaacttgtcaccaccacagcaataggatcaactgattgagaaggaccattgggaaaaccacttgacgaacttgccatggaagtagaaactttgacatccatatttgtattgattgtcagagtagaaccactgcctttttccatgacatgaattattccattctcctttccagaaatagcacttcgtccagaagaatcattagaactggacaaactgcgtg

SEQ ID NO: 32472 - DNA, 319 bp, Setaria italica
  misc_feature (313)..(313): n is a, c, g, or t
  Peptide Sequence Number=SeqID_98446
gagcgctggtgggtccacgccggcttggcgctggcgggctggtgcgtccacgaggcgccggtggccggcctgggtggaggtgttggcggccgcgctagaagcttccagaagcgccgccccgcgagagggaggcctgaagcacgggggagagatccggcggcagggcaggtcggtcggagatgggagtcccagcgttctggctatggctccggtggtggacactactaaactcagtttcagagccgactacagagtatatagttacaaatgtgtcatcggtgatgtgagtttgtctcgcttagtttaaaaaacngtctta

SEQ ID NO: 32473 - DNA, 272 bp, Setaria italica
  Peptide Sequence Number=SeqID_98447
cgaaccgaagagggaggaggcagcagcaaccaccgcacgccactgccgcgctagaagcttccagaagcgccgccccgcgagagggaggcctgagcacgggggagatccggcggcagggcaggtcggtcggagatgggagtcccggcgttctaccggtggctggcggaccgctacccgctgacggtgtcggacgcggaggaggaggagcccgtggagctcgagcccggcgccttcgtccccgtcgacctccgccgccccaaccccaacggcat

SEQ ID NO: 32474 - DNA, 566 bp, Setaria italica
  Peptide Sequence Number=SeqID_98448
cacacttgcaccgagctagcaagagctagctatcagccaagatggcgaccaagcatttggctcttgccatcctcgtcctccttagcgtaggcatggtggccaccgctgctggaccccgcaagctgggctatggtcccggaggaggtggtggtggcggtggtagtggcggaggtggtggctatgggggatcaggctatgggtccgggtccgggtacggtgagggcggtggcagtggaggtgctgccggtgggtatgggcatggtggtggcagcggcggcggccaaggcggtggctctggatatggctccggttctggctatggctccggtggtggacactactaaactcagtttcagagccgactacagagtatatagttacaaatgtgtcatcggtgatgtgagtttgtctcgctgtttaaaaaacagcttatttgagtgtgtgtgtgtaacactaaaagcatgcttgacactatacatgtaatgctgtacctagcttgccgctttattatgtactttgcaaggcctaaggaataaataaaaggatctgttggcttggaattaaaa

SEQ ID NO: 32475 - DNA, 281 bp, Setaria italica
  Peptide Sequence Number=SeqID_98449
ccctatgcgatgttcgcagctcatgcagacggtccaggatgatgagcttcacattgttgtcgctctgcgaggagagcagctggcagtatgtgttggcggctgcgcgcacagcggtgggcgcggaagagagggacacgagcgcccccgcgcactcgtacacgacggcggaactgggcgctgagaggagggagatgatgatcttgatatacctgcccttgtcgacgcggcccttggagcggcagaccttgcggatgaggtcgacagcggccatctgcagcaga

SEQ ID NO: 32476 - DNA, 540 bp, Setaria italica
  Peptide Sequence Number=SeqID_98450
ttaattaacaaaattaaggcataattctatagtatgcagtgatatgcatgatccagattcattggaacttacggtggtgttagacacttcatgtttgttgacttaataatatgatttaagaactccttctcttcctgaatcacagtattcactgccaccttattttcccactcaaattctgcccacatattccggaaagcaacatcagcgcatgtagcaggtgagatgtagtccatgatatcaatgtgaatatcatttaggaccaccactgatcgttccatcacatttgaagtttcataaactatgttaccaaatatgactccagtctctgttgatgaaaccttgatattcgctcgaatttgcttgcttgactctggagccaatgtgtagttttgagggcggtcaacaagttttaggtcgcccattgttgctaactccaagcacaagttctggagtgtttcttttgttcggtttatgactgtaacatctaagttactaattattcttatttaatttgttatttgtttaactttagtttta

SEQ ID NO: 32477 - DNA, 575 bp, Setaria italica
  Peptide Sequence Number=SeqID_98451
ggatgaagtggtgcctgtgctcgaggttggagagcacggacggcacgagcggctcgagcacctcgggctcggagagcctgcagaggaaccgcagcgtgacgccgcggatgtactcgttggggctctggaggttgttgcggaggttctggcagatgaggatcatctccggcagggcgcggccggcggggtcgcggcggtcgatgatctcgaggtagaggaggaggagcttctggacggtgtggtcctcggaggggagcacgtagcggacgatggtgatgaagagctgcgggagcgtctcgccgttgagcaggagggagatggcgcggcgcatggcgtcggccttggcggggccgtcgccgccctccagatccgccttgatctcgttggccatcgcggccgagcccttgtcgaagtggaccaggagagagcatggcttctccatggcggcggccgcggccgaggcggccggcggatccgctgtgggaaggtggtggctggatctggcccgggggggaggaggcggcggcggatcgggatctgggatgggtgggagcgggagcggaggcggagggaga

SEQ ID NO: 32478 - DNA, 877 bp, Setaria italica
  Peptide Sequence Number=SeqID_98452
tcacctgaatcctgtcagttgaagaatccggttcaatttgttggaatcatctgcatccttggtaaattgaccagttgcggccatcaaatcatcttgaactgcatcttccaactcaagttggctcattcccttcctgctcttttaggtggtagaaatcaataagatcatctggtataacggatgatatacatgtggcacggctcggctagctgccacccttttgttttagggtaatcttgtctcctaagctgagcgcgattccttgggtcttgctccttattctaatgtagccgctcaacttgccatcagcctgcttctcaatgctgatgttcaccagagcgtcctcaccaaacacactcttggcataaaggtttgcagcgaggaacccacattctccatcaagtgcagatctgaaattaccatatacaaaagccagaaaaatgagcaatgcattagcaaacttaaactactcaaatgtaaagaaacaagttttcacaggttctcagaacctcccagtaaaacaatttcccagttttccaaccaaattagcaccattaaaaacagttcaagtgaaaacaaatgcaaggcacatatgtttgttatgacaagttaagcaaccatgtacttccaccaaggcaagtacatatcttttgcatatcctgtattcctgtgcatgcaaggctgccctttttttccttgaaccagcaagagagtagcctcgtcattatgttaagaaagaataaaatgtgaaatgggtaacaagcgtacaggcaatgaaaaagaacagagacaaaaaagaaaaaagaaaaaaaggatgaagacaacaagcccacaacttcctccccccagcccactaaactttgtcttgttgtcttgt

SEQ ID NO: 32479 - DNA, 1919 bp, Setaria italica
  Peptide Sequence Number=SeqID_98453
gaggtgtctttgcaatcctggtgtgggaggtaagatgactgtcccaattccagaatggacaccatgatcaacaaggctccagtacaagccttgtttacttcaacctttgatggctgaacctcctccagcctcaacacaagcttggtcagattgcaggcaacagcagcagccaagaagaaatcaccagacagaatgagagatctgagattctgactggaagccaatgacccgagagtcgctgccggagctgaaatagcggtctcagtggcagcactctgtgtggcataagtgccatccgcaagaacagcaggcctcctcgaggacacagtgacacagttcaccacaggctgggatggcttggaggaatcagttgactccccttcctcagagacagtgaagaacgggagatcccaaggcattgcttaatggtggcaattgcgctctcaacctctgacaacgaaagggagtactctgcaaggatccagagagcacagatgcagacacgggatgctcggatctgagagaatgtgtcaattaacctctggataatggacacacggagcttcggatttgtctcaatgatctcacgcacaaacaacacaacatcaactgctgcagcaacattggtgtcaccaaggaaatccataaggaggtgcacaacggatccagccacttctgggtactcaacagcacaggcatgaatggtctgaaccagcatctggcggtactcgccacccttctcgaggtctcctgcctgtgtcttgaccacctccttcttgagggaaagcacaacctcctcgacattacgcggggtgagcagatcaagcactagatcaagcaccttcctcttgacatcgagattggggctggcgagcgcacgaagcacatccatcaccaccccaaccatgacatccctgtgcgaggtacgaagctcatagaggcgatccagtagaatgagcttcacattgttgtcactctgcgacgagagcagctgacagtatgtgttggcggcagctcgcacggccgtgggtgctgacgagagcgacaccagcgcgccagcacattcataaacaaccgctgtgcttggcgcggagagcagcgaggtaatgatggtgatatacctgcccttgttggcgcggttctgggatcggcagaccttgcggatgagatccaggacggccatctgcagcagatcgggccactcggtaacgcggtcggcgttggagagcaggtaggcgacggcacgctcctgcgcgcacgcacagagcatgaggaatgcgttcctccgggcggacgcgtcctgctcagacgcgagcaaccgctcgacgagctccggcgcgtcggggatgagctggtccccgtgcgggagttggtagatcgcggagaccgcggatagcgcgtggcgacgtacgaattggtggcggtgctcgaggttggagaggatggaggggacgagcggctcgagcagctcgggctcggtgaggcggcagaggaaccgcagtgtgacgccgcggatgtactcgttggggctctggaggttgttgcggaggttctggcagatgaggatcatctcggggaggaccttccccgtggcggcgtcgcgcttgtcgacggtctcgaggtagaggaggaggagcttctggacggcgtggtcgtcgcaggactgtacgtagcggacgacggtgatgaagaggtgcgggagggactcgccgttgaggaggagcgagatggcgcggcgcatggcgtcggccttggcgggcccgtcgccggactcgagctccgccttgatctcgttcgccatcgacggcgagcccttgtcaaagtgcaccaggagggtgcacggcttctccatggccgccagatctgacgaggtcactggatctggcctggcctcctcgaggaagggaggtagggatcgg

SEQ ID NO: 32480 - DNA, 649 bp, Setaria italica
  Peptide Sequence Number=SeqID_98454
tcattttattatttgatacatgatactcaaatcagaaagacatctggattcataaagtcagtaagtataacaaaattcttcgttttgtaagctagaacaacacaaagctacacaatcctgttcatacaggaatatgggatgggatacctctactaccatctatcatttacggcttggcgacccatgaaaaattggtgtggaggaagcaaaatttagttcaaatcagggctttatggtataacggatgatatacatgtggcacggctcggctagctgccacccttttgttttagggtaatcttgtctcctaagctgagcgcgattccttgggtcttgctccttattctaatgtagccgctcaacttgccatcagcctgcttctcaatgctgatgttcaccagagcgtcctcaccaaacacactcttggcataaaggtttgcagcgaggaacccacattctccatcaagtgcagatggtggtgttagacacttcatgtttgttgacttaataatatgatttaagaactccttctcttcctgaatcacagtattcactgccaccttattttcccactcaaattctgcccacatattccggaaagcaacatcagcgcatgagcaggtgagatgtagtccatgatatcaatgtg

SEQ ID NO: 32481 - DNA, 2543 bp, Setaria italica
  Peptide Sequence Number=SeqID_98455
tttttttttttttttttggttaaaagaaatactataatcattttaattatttgatacatgatactcgaatcagaaagacatctggattcataaagtcagtaagtataacaaaattcttcgttttgtaagctagaacaacacaaagctacacaatcctgttcatacaggaatatgggatgggatacctctactaccatctatcatttacggcttggcgacccatgaaaaattggtgtggaggaagcaaaatttagttcaaatcagggctttatggtataacggatgatatacatgtggcacggctcggctagctgccacccttttgttttctattgtaatcatatgagctcaaactcatctctataaaaataaggtaacagtaccaccagagagcttcgtttcaagacctcacaaaaaaaaacaatcgcaaagtataatatcaaaacaagagggattcataataatacaagatcacgatctacctgtcgagaaatcaacagaaacttcacagctatttctacaatgtcattttatcaggaaaggaagttggaacagcatcgttactacagcaacatggatcttcaagggtctagtcttagaccgagaacttcttggccagcgatctaacaccatatgaattcctcgtaactgtcctcttatctctttctttgatccttttgtacaaaacatctttacccagttcaatgccacagcgccggtgtctccggggcaggtggatttcctaaaaaataaggatgatacaaccgtgacacgctggccagttaactgcctcccttctgcttgagggtgatcttgtcccctaagctgagcgcaattccttgggtcttgctccttattctgatgtaaccactgagcttgccatctagttgcttctcaatgctgatgttcaccaaagcatcctcgccaaacacactctttgcataaagattagcagcgaggaaaccacattctccgtcaagtgcagacggtggtgtcagacacttcatgtttgttgacttaataatgtgattcaagaactccttctcatcctgaataacagtgttcactgccaccttattttcccattcaaattctgcccacatgttccggaaagtaacatcagcacatgtagcaggtgagatgtaatccatgatatcaatgtgaatatcatttaggaccaccactgatcgttccatcacattagaagtctcataaactatgttgccaaatatgactccagtctctgttgatgaaaccttgatattggcacggatctgcttgctagactcaggagccaaggtgtagttctgagggcggtcaacaagtttaaggtcgcccattgtagctaactccaagcacaagttctgaagtgtctcctttgtgcggttaatgacagtaacatcaagtacaatatcataatgatgaacagttacaaatgcttcagcatacacaggatcactgaatcctgtcagttgaagaatccggttcaatttgttggaatcatctgcatccttggtaaattgaccagttgcggccatcaaatcatcttgaactgcatcttccaactcaagttggctcattcccttcctgctctttaggtggtagaaatcaataagatcatctggttgggcatgagatatctgtgccttagccttcatctcctcagtctccctaaattgcttctcagcaagcatgttgacaaagctctggcggcatgactgcaaccaaaccttcctaacatcttcaccaggattgcaaagacacctcacacagagaataatcctatcatgtgagtcattgtcaatagggtgtgggaggtaagatgactgtcccaattccagaatggacaccatgatcaacaaggctccagtacaagccttgtttacttcaacctttgatggctgaacctcctccagcctcaacacaagcttggtcagattgcatgcaacaacagcagccaggaagaaatcgcctgacagaatgagtgatctgaggttcagggttgaagataatgacccaggagcaactgatggagttgaaatggtctcagtggcagcactctgtgtggcataagtgccatctgcaagaacaacaggccgcctggaagatacagtgacagagttcacaaccgcctgagctggcttggcagaatcagtggtgtccccctcatcagagacagtgtaaaatggcagatccccaaggcattgcttaatggtggcaatggcgctttcaacctctgatagagagagggagtactctccaaggatccagagagcgcatgagcagacacgtgatgcccggatctgatagaatgtatcaatcagcctctggataatggacacacggagcttcggatttgtctcaatgatctcacgcacaaacagaacaacatcaactgctgcagcaacattagggtccccaaggaagtccatgagcaggtgcacaactgatgcagccacctccgggtacttcttggatacaatactagacaataccttaggtaaaattagaaccaaagttaagaacggaaccaaataacaaaa

SEQ ID NO: 32482 - DNA, 301 bp, Setaria italica
  Peptide Sequence Number=SeqID_98456
cctctcgatcagttgcgcgtttatcctctgttcatctaagaacgtcaggaagagcatgggatgcccggacataaccccttcaatggtggaggcccatccgccgtgcgtcaggaacgcgcccacggagctgtgagccagtatgatgggctgaggaacccagcccatggccacgagcccacggtcacgcgtccgctcctcgaaacctgggggcaggatgtcgccgtccgcctcgaggaggaggccgttaggcttcttcagagcccagaggaatgtcgtcccggcgagctccagcccaagcgcg

SEQ ID NO: 32483 - DNA, 458 bp, Setaria italica
  Peptide Sequence Number=SeqID_98457
cattgcagctgggtaagctcgctcacaaatgtcgcgagaacgaaagatccatgtgggtttgccgtgtggcatctaagttctacgattacgacgtaattggaacgagtaagagacgagtgcttacaaagatgacggctttgagcacgtccatgtcgagcgggatttggaggctgccgtccctctgtatcttgagcagcacgtcgaggaggtcctcggcctcgccggcgccgccggcgctgtccatcatctccaggtgctcgctgatgatgccgtcgaggatcccgtacaccgtgtcgcggcactgctcggctcgccgcaccgcgccgctgagccagccgacgaggcgggacgacggccacagggtccgcccggggttgaacccggcggaaagctcgagggagcggtcgagcgccgcaggacgcgtcgcggtccctacaccggtcgccgagcacggcgcg

SEQ ID NO: 32484 - DNA, 491 bp, Setaria italica
  Peptide Sequence Number=SeqID_98458
ggaggcttcttgccttctctaatcttcattttggtcaagaaaacaagttagttttacagaattcctgaggagattctctgataaatctgcagaagttagaattgctgcaattgatgcagcaaaagcctgctacatggataaatcatctgggaatgaagcgcgagaaatacttttgtcacttcaaggaaggttattagattttgatgaaaaagtgaggatccgagctgttaacacagtctgtgatttagccaaatcaaatcttagctcgtttcctcatgaagtgatattgcatgcagctgagaggctgcgtgacaaaaaggcatctgttagaaaaaatgtaatgcataagttgctggagctgtatcgggattactgtgacaaatgctcaaatggaactgctacggtcaacactcattatgaacaaatcccagctaaacttatagttctttgttttgataatgatgttgagtccttcaggccacagaatatgg

SEQ ID NO: 32485 - DNA, 463 bp, Setaria italica
  Peptide Sequence Number=SeqID_98459
cctaatgctggagatgccagtgatctcccgtgcgacaatgagggcgttaatttcgtagctaccctcgtatgtgtacacggtctccatgtcgcagaatgccttgccaacgtggaaatcagtgacaatgccgttgccgccaaagagctccctgccgagcgccaccgtctcccttgcctgcttcgtgatccatgccttgcccaggctggcctggccgatggtcatcttgccggagccgtgcagcttgcagaggcgccagccgaagagccacatggcctggatgttgccaagcatcctgacaagcttctcttggttcagctggaacgcggctaggggtacgcgccactgtttcctctctcccaggtacctccggcatgcgtcgtacacccctactgcgatgccaatgctgacccaggcagccatgacacgactgaaagcaagcgacaggctgtcatcttcggggaca

SEQ ID NO: 32486 - DNA, 266 bp, Setaria italica
  Peptide Sequence Number=SeqID_98460
gttgcccatgaaagaggttgaaattcttgcttcatgagtcgctttagatgcaaagatggatgaagatgctgatgcttatgggtttatccgtttcttcagtctcccctgctactttgttccaggccagttgatttatcctccatcaggaggatagtatcggaatctctgaggtaccccggggtcctggcccaactttccgcgagtctactacagccacatgtgagttatctgaaagatccttagaactccaacatgatgcctgtctt

SEQ ID NO: 32487 - DNA, 498 bp, Setaria italica
  Peptide Sequence Number=SeqID_98461
ctaatttactacaaacagattactcactattgtgttggctacgttacttcctctttactttttgcatcttctgcagcagtatcttattactctgctaccatttttagttggaactgtactgatttttggtcccctctaagtgaatgctaacatctatattggcagctgccattctatatccagctcattttgattgatttagcattgatccatattttgttcacggaatcatgcatttgaagatttggttattcaaagaagctaggttttcccttatgtaagttgcatgttctgattttgaactcagataccgcatagaaaacatatcctaaacattcatacatcccccttagaacaccatgttaatagatgtcggactgtaaactccactgctccttgcactgcctcagatcctgccaattaaaataaaataagcaaagcatggctcattttgtttagtaatattgtcttagttaacaatatgtatatcaagttaca

SEQ ID NO: 32488 - DNA, 260 bp, Setaria italica
  misc_feature (252)..(252): n is a, c, g, or t
  Peptide Sequence Number=SeqID_98462
cacgaagatctgcatgcctcccctgagacggagcaccaggtggagggtgctctccttctggatgttatagtcagccagggtgcgtccgtcctcaagctgcttgccggcgaagatgagcctctgctggtccggggggatgccttccttgtcctggatcttggccttcacgttgtcgatggtgtcggagctctcaacctccaaagtaatggtcttgccagtcaaagtcttcacaaagatctgcatcccaccctnaggcggag

SEQ ID NO: 32489 - DNA, 876 bp, Setaria italica
  Peptide Sequence Number=SeqID_98463
tgccaaacgaagccaacatctagtcaaggtccgtctctccttgccgcctccgctcctgcgccgcccgcttcaccgcaggcatccggcagccggctctacaacccgacgacgtgatctccccgccttcaattcctctctcgtcctgctctgtgcacaccaaggaagatggtccgggaggtggccgagagctgcgtcgacggggtggtcatggagatggtagcggcctactgcggccgcttctacgccgccaagcccgagctcgcggcccgccgcatcgaggccatcggcttccaggtcggtcaccagctctccgagagatataccatggagcgccctcgatttagtgatcatcttgaagcaatcaaatttatctgcaaagacttttggtctgaactattcaaaaagcagattgataatcttaaaacaaatcacaggggtacctttgtccttcaagataaccgttttcggtggcttactcgtgtttctctagatccacctgcagagagcactgatgcaactgacaatgactctgcaccattgggtgatactgcagcccaaacaacaagcatgcttctgtattttccatgcgggttgataagaggtgccttgaccaacttaggaatttcatgttccgtctctgcagatatgtcaaaccttccagcatgttcctttgtggtgcgcataaagacatgaactgcgagaaatgatacaaatacagtattaagtgctggcttgtggttcaagtcatttgacacctacctgttttcactgtctttcaatgaaattccttcttcgccttcatgaccatataaccgagatcgggtgttactttatgttgcatattagtaatattttctctggaagaattgtggcgcc

SEQ ID NO: 32490 - DNA, 234 bp, Setaria italica
  Peptide Sequence Number=SeqID_98464
gctccgcaccacgcacggagcgagagaaagagaaggcggggcagcggctgcggctgtgcgagcaggccattaacgccagacagataggtgttagaggtagaggtgagagggagaagaaggctagcgagagctagctgctgagagacggattgagggagagagcagcagctggaacaagtatagctcggaggcaatgaggtcgtggaggccgtcgccgtcgccgttgcggcaaag

SEQ ID NO: 32491 - DNA, 834 bp, Setaria italica
  Peptide Sequence Number=SeqID_98465
agaaaacctaccaagaacccaaccaacggtatacccgaaccagagtcgcgggacccgccaccgcgatcaaaggaaccaccaaaactgtcaaaatcaccaaagccaccggaacggtgatctccgaagccaccataactttcacggccaaaagtcccacccgttcttctgcttccaactgatctagagcgagtatctctcatgacattaaacatgtctgcggcctcatctgcaactgccatctttggaagctctgtgaacctgcaacctatatcttgctcgatgacccttacagctctagtttgctcatatgtgtatatcaaaattgcactgcctttcttccctgctcgtgcagttctcccagatctgtgaacaaataactctgaggtatttggaatctcataatgtaccactagatcaacattgggtatgtctaatccacgagctgcaacatcagttgccacaaggatattgaagcgaccatcacgaaatcctgagagtgtcctctctctttgattctgtgaaatatccccatgtagcgcctgacatggataactccttcccataacatatgccaatctatctgcttctcgtttagtttgagtaaacacaatgcattttccaccattagcatgctctttaatcaacggaccaagaattgatggcttcccaaagttgtcagaggcaatggagtacagagagattccttccggtaatttttggtctgagtcaccaacaaggtcaattataactggatcctttaagtacttgtttgaaatttttcttatccaactaggcattgttgcagagaacagcatactttgacggttctgtggc

SEQ ID NO: 32492 - DNA, 324 bp, Setaria italica
  Peptide Sequence Number=SeqID_98466
ccaactccaccacctagtctcctgggtcgccaatttggaacagttcttccacgctccacatcagctagtagcctcttgttgtccaattttcttccatctgcttgtttgtatgcatttttcatgtcccgggtgtgggcatattctacaaatgcatatcctctgggtttttttgtttccttgtcagtcacaagacgaacccttttaataggcccataagcttcaaactcctttttaatcctatgctctgatgtctcataattaagtcttgcaacaaagagtgttttgtatggatctccagtggcattggggtcactctgtgggtca

SEQ ID NO: 32493 - DNA, 742 bp, Setaria italica
  misc_feature (43)..(43): n is a, c, g, or t
  Peptide Sequence Number=SeqID_98467
cctatctgcatgatcgatcactcctcctaggctcctctgatcnggttgcccaacaagctgttgcaccctagcagcacacttgtggtcagcaccttcagcaccgatcctgcttgatccaactccaccacctagtctcctgggtcgccaatttggaacagttcttccacgctccacatcagctagtagcctcttgttgtccaattttcttccatctgcttgtttgtatgcatttttcatgtcccgggtgtgggcatattctacaaatgcatatcctctgggtttttttgtttccttgtcagtcacaagacgaaccttgcatgtgtagaacttccactccacatgaggattgaaatcatgtacaacatcaacacagtcggaggaaaaggcgaagtccagattggtccatattggaaaataaattgcccatccccttaccagggaacttaactaaaggaaataaagtgaatggcaatatactaaatactataccagtttctcctccacattgcagtaatttgttcaacctttgtgatcaagacaaacaaatagcaacagcagttacaggaaataactaataaaagcaattgagtgatgagcaggtattccttacacacagaaaaaaagaagaatatcaaaatctaggagttgggagatgccattcgtgttatattttgatgtcgtttcctccatgagaagcagaagtttgcagcaccaatagctttaacagttcatatgaattaac

SEQ ID NO: 32494 - DNA, 286 bp, Setaria italica
  Peptide Sequence Number=SeqID_98468
ctcccttctctagattcacgatcacacgtccggtcatgcgaacgctcacgggttctttcatcctggtccttttcccgcactcttttccgagatttctcaaaattcctatctgcatgatgatcatccctcctaggctcctctgatctgggttgcccaacaagctgttgcaccctggtaatcaaaaaattgaggtgtcaaaacagtaacaaggagacatgacatattcctaaataacagcatcaagcttcaatgaacccacaaaaatagtagaaaataaaactaaaaa

SEQ ID NO: 32495 - DNA, 207 bp, Setaria italica
  Peptide Sequence Number=SeqID_98469
tggccagtagaaacaaagccaaagtaaaaacaccagctcgagtctcgtcacacgagttcacattgttaatccatggaatcccttaatccattgtttccagatattgcatttgtttcaggcctgtttgtttccttgctttctgttcgctgtcccaactgcaatcatacaaatgcaatatctggaatcccttaattccattgtttccaa

SEQ ID NO: 32496 - DNA, 770 bp, Setaria italica
  Peptide Sequence Number=SeqID_98470
acttctggaaagaatgggccacttcagaagaacatgggctactcgtttcagaacattgggatagctgcttataactgcagatgagtcgggtcagaatagtaactcagcctttctggtgaaatcttttcggccacacgaataaagcgtttgtggccagtagaaacaaagaccaaagtaaaaacaccagctcgagtctcgtcacacgagttcacattgttaatccatggaatcccttaatccattgtttccagatattgcatttgtatgattgcagttgggacagcgaacagaaagcaaggaaacaaacaggcctgaaacaaaacagattttacattggaactagcgaatacaagacgcaaaaggcttgcaggagttgacatctacattcagtaggacacctgaaatccactgggcagcttcagttcttgtacttagagctctgtggaattagtagtcacctttctcgtatgcctcaccttgctctggggctccaggttctgtgctgatatgacccagggtcttcccgatagtaccgtacccatgctcatgtggcttctgagtgctcagtttcctggccaagaccatcttgaccataaccataagcatcatgacttttgcgctgctcattgtagccataatcctgaccataaccagccatatttctttcatgcctaggagcaccgttgccatatgcacccctctcatgcaagtgacgacctccaatctcggttatctgcatgctcataatctttgccatggtccctgccacg

SEQ ID NO: 32497 - DNA, 409 bp, Setaria italica
  Peptide Sequence Number=SeqID_98471
gctcttcttaaattcagtaagatccatggaaggtcttaaataatcctcaatgatagttccggagttgctcgatcttgtttcagccaaccacttgccgactagtcgatagacatctgatacgtctttcttgtcagaatgcttctgtagtatgtatttaccaagactaattgccatatcatgctgcccttgtgctctcagcagtttagcctcttcaagccttgaaaggaaataagtatttggcatgatgcccccatcttggtgaaaacaatgttctttcagttcatataaagcagctgctgccaaagaaaccttaatccctttggagtgcagaagcggattgaaataaatgagttacaagatgttcttcacaacctaaaaccttaaggaggcacgcctgaatgctaggaaa

SEQ ID NO: 32498 - DNA, 701 bp, Setaria italica
  Peptide Sequence Number=SeqID_98472
tgaaacagtaacaagcagtggctgtattgttggcctgaagaagacactcatcttctgcaccggagaaccttccaagggtttcaaaactaactggatcatgcatgagtaccaccttcaagatggaggatataatgtcagcggtagcagcacctcaagcagctcaagctccagcaggaaatcccaaaggaagagagttcactcaagcacggagtccaacagctgggtggtatgcagagtgttcgaatcgagttgcggttcgcaagtgagcttccatgacgagggcacagagctctcatgcttagatgaggtgtttttgtcgctagatgactatgatgaagtgagtttgccaaataattagaaccctagctagtaaagtagtgctgatggtagtaggtcctatgcctgtcaagtcatttaattaactgtgatggtgatatctacgtaagtggttgcaagttgcattatgtatcattcagatggcctgataggcatcgaacttaatccagtctatccaaaatcattaccatgcaattaaatatgatgtaagggtataaaaagcttgagcttgtctgataaatgtgacgtgtgatatgtgtgtgaacacaaatcacctagctatgctctaaagatcagctaattttctcaagcatttggtggtttactttgacttatttgctgtggatcattgcttgtcttacttt

SEQ ID NO: 32499 - DNA, 396 bp, Setaria italica
  Peptide Sequence Number=SeqID_98473
actattgaggggagagtgcaatttgatctcctgcaggctatgcaacgagattacaagctgagttcctattcattgaactctgtatcagcacacttccttggggagcaaaaagaggatgttcatcattcaattatatctgatcttcaaaatggaaactcagagacacgaaggaggctggcagtttattgcttgaaggatgcttatcttcctcaaagactgttagataaattgatgtatatctacaactatgtggaaatggcgagggtcactggtgttcccatttcatttcttctttcaaggggacagagcattaaggtcctctcacagctactcaggaaagctaaacagaaaaaccttgttataccaaacataaagggtcaagggtctggacaagat

SEQ ID NO: 32500 - DNA, 880 bp, Setaria italica
  misc_feature (849)..(880): n is a, c, g, or t
  Peptide Sequence Number=SeqID_98474
tcgaggaagaagaaaccgagagagagagagctctcgaggagaggagggaagcgagcaggaagcggggggctatcggagcggcgaggatgaggggcggcggcggcggagggatgatggacgacgacgaccgggtcacgcacgcgcagatcccgactagcttcggccccgagctgcgggcctgcctccgatgccgactcgtcaagacctacgaccagttcaggcagaacggttgcgagaactgcccattcctggagatggacaaggagcacgacaatgtcgtcaactgcaccaccccgaacttcactggaataatctctctgatggaccccagtaggagttgggctgctcgttggttgagaattggtaggttcattccagggtgctacacactggcagtctcggaggaacttccggaagagtaccaggggatttgccaggacaacaacgtgcagtatgtgccgcccaagcgtgtctaaggggctcagtgtgttcacggcaaccaatcctgaagcagtatgataatgtagcatagcttgtactggttgttgccaaggggactactcgcctcgctcgtcatatcagagattgcagctaatctggaactgatgtaacgctcgtgtactcaaggagtctatttagtaggcggtgctggttgagcctacgcaattgttatgttgcctctttagctgcttcaacgtgtgatcatgccgtgcctatctgtcggagcaagtagtagttctgtgtacaagcttctgcatctgtactacgctgcagtgccgtacgttcaaggccttgtgcattgacgcattcttgcctcctcatactcgtgtaattttttaaaaaaaaaannnnnnnnnnnnnnnnnnnnnnnnnnnnnnnn

SEQ ID NO: 32501 - DNA, 251 bp, Setaria italica
  Peptide Sequence Number=SeqID_98475
ggaagtaggatgagagatttcattcaagtaggctggctaattgctttgacatgatgcaaaagcttgcttaagattcagaacaagaaatgttaaatcaaattgtcgcttacccttgtgtgcctatatcctgagttcatacacccgtttgcttaaaggttgctttgatatgatatctatgaataagacttttaggtgaagtcatagatatttttggattacgatgagtcttatttgtttgacatttagcagtg

SEQ ID NO: 32502 - DNA, 627 bp, Setaria italica
  Peptide Sequence Number=SeqID_98476
caggtggtgttggggtagctgttcatgggttgcattccttgaagactgtggtggctgctgctagtggggctgtagtagtttgggctggtgactgcgttggagggagcggtttggaaggagtccgctgctggctgttgcagcctcttcaccttcttcttgaggtgtgtgttccagtagttcttgatgtcgttgtcggttctttgagggaggtaggaggctatggctgcccacttgttgccaagcaacgcctgaaggtggatgatgatcccttcctcgtgaggggtgaagttcccgcgcttgatcccgggcctgaggtagtttgtccaccgcagcctgcagctcttgctgcacctcatcaaccctgtgttctcgggcacggaccgccagttcccggggccatgctgctggatgtaggagacgaggacgatgtcctcctccggcgtccaaggccccttcttgacgccgacgccattgtcgcagcacggtggcctccccatacctgctgcctcctacctcggatacacctagctagagctagtcttagctagcagataggcaagttgaggagcaagaaagctctggctgctgcctacacagccatggccctgcacaacggcctccgaaacc

SEQ ID NO: 32503 - DNA, 768 bp, Setaria italica
  Peptide Sequence Number=SeqID_98477
ttttttttaagtaagaaacttatccattatttgtcacactaagcatatttttacaataattacacaagaaaagactagtaagacaacaggttcgaaggaaatacagatacgaaacagagtccctgaaacgtccaacactcaaatcactgaacagccgcggcccggcagctgggcggtggccgagtgcgggtggtcactcgacggggatcatgacctcgttggtgcgcagcggtgggagcgtgaagggcgggttgtaccgcgccagcacgaaggggcccttgacggtgtacccatccttctccagcgcggccctgagcccctccgccttctcccgcaccgtcttctccgcagccaccccgctgaacctcgccaccccgtacttcctctccggcacctcgcggatcaccacccgctcgtccgtcggccgcggcgcatcctccgccttggcgtacttggacggcagcaggaactgcattgtcaccttgcccggcgcctgctggtcgtccgtgatcacgggcgcggtcatcgcgaccggctccggctcgccgccggtggtgatgaccggcgccgtcatggcgatcttctcggaggacgcctcgccgtcgccggcgccggaggtgatgacgggagccgtcatggcgatcttctcgggcttggtgttctgcggcttgccgagggcgccgatgtagttggcgaggacggtgaacccgccgtcggggtcgcccttccactcccttgggggtcgtaggtgaactccgcggcgacgca

SEQ ID NO: 32504 - DNA, 609 bp, Setaria italica
  Peptide Sequence Number=SeqID_98478
gaatcagcagttgtagatgttccgaatggaaacacatcaattaccagcagcttcgtgggaaagcttgttggcatccgtcctggttctacaaacctcaacggcacaggggcaaatcaatcagcggccagaatacctgaagtcgttgtcatggagtgagcctcgtaatgaaccatcagagaataggtctgcaactcaagatgttcctacaaatacctctactacatctactggtgcaagtgaagtgtctaattcacagggtgagcctcttaaggaaccattggagaacagatttgcaacccaaggtattcctacaaatacatctactgcatctactgtagtaccgtctgttaaactctggacaaatgccgggctctttggacttgaaccatctaaacctccagtatttggtgcccaagatactccaagggaggatactccacctggttttgaggtacctcaaccaagccattcaactgaattcacagaactacattgttcaaagcctattgaatcagcagttgtagatgttccgaatggaaacacatcaattaccagcagcttcgtgggaaagcttgttggcatccgtcctggttctacaaacctcaacgg

SEQ ID NO: 32505 - DNA, 334 bp, Setaria italica
  Peptide Sequence Number=SeqID_98479
atcagttttctggacatccacttccttagcatgcccttgtggatcctgtagtgcagctggagaggatgttcttcctgggcagaggtgtgcacatgtggtaggcaagcagacttcaataagtgagcttctagaatctgaagaaagtgctgaaaattgcactgaaatgtactcaaccaacatgagaaatgacatgcatatggtgtctgcatcaagcttttcaagtattgcacaaagatttcttgctaatacacttcagagaagaacttctcccaaatataccgatcttcctatgtcatctgagagaagcatgaggaactaggtgattgtggtgtgt

SEQ ID NO: 32506 - DNA, 247 bp, Setaria italica
  Peptide Sequence Number=SeqID_98480
cagggaaccttgcttcaaatcatcacctgccagatgatgtggttgctagatcgccttatgataattgcagccttttcatcccatttaacataaggcgatctagcaaccacatcatctggcagggaaccttgcttcaaatcatgtggttgctagatcgccttttcatcccatttaacataaggcgatctagcaaccacatcatctggcagggaaccttgcttcaaatcatcacctgcatcatccacac

SEQ ID NO: 32507 - DNA, 410 bp, Setaria italica
  Peptide Sequence Number=SeqID_98481
gaattcacagaactacattgttcaaagcctattgaatcagcagttgtagatgttccgaatggaaacacatcaattaccagcagcttcgtggaaagcttgttggcatccgtcctggttctacaaacctcaacggcacaggggcaaatcaatcagcggccagaatacctgaccaagttcatagtcgaactgatgggccctcagatttttcctcctcatccttcgagcataatagtatgattggcaagcagacttcaataagtgagcttctagaatctgaagaaagtgctgaaaattgcactgaaatgtactcaaccaacatgagaaatgacatgcatatggtgtctgcatcaagcttttcaagtattgcacaaagatttcttgctaatacacttcagagaagaacttctccc

SEQ ID NO: 32508 - DNA, 342 bp, Setaria italica
  Peptide Sequence Number=SeqID_98482
atggaaacacatcaattaccagcagcttcgtgggaaagcttgttggcatccgtcctggttctacaaacctcaacggcacaggggcaaatcaatcagcggccagaatacctgaccaagttcatagtcgaactgatgggccctcagatttttcctcctcatccttcgagcataatagtatgattggcaagcagacttcaataagtgagcttctagaatctgaagaaagtgctgaaaattgcactgaaatgtactcaaccaacatgagaaatgacatgcatatggtgtctgcatcaagcttttcaagtattgcacaaagatttcttgctaatacacttcagagaa

SEQ ID NO: 32509 - DNA, 355 bp, Setaria italica
  Peptide Sequence Number=SeqID_98483
ccataaggggatggatactttggagcagcaagatgccttacttaaaaagacaaaatcaccattggtcttgaaccaccatgatgaaattccaggtgaaacagacaactacatggatgcacttaacacactggagtctgagacagaaactgaagctgaatctcaaactaaaaatcaagtgatgccattaccttcctttaatgctgaagcacctcaagtgggggcaactgatgacattgtttcacagcatcctgattcctctgttgccgattttactgacacatgtcaagattctaatatttcttgcacttctgaaagagcagttgatttcccccattgtcaaatgcagattctcctg

SEQ ID NO: 32510 - DNA, 515 bp, Setaria italica
  Peptide Sequence Number=SeqID_98484
tttttttttttttttttgttgcaacaacatgccccatcttattatcattgcaaaaatcatttttaatacaatgatagaaaagatggctagcatacttattttcatcagttgttctcactatcgtaaataaataataaagaaagatttacatcatgtagaaatgatctgacatttccacagccatagagacctaaggtagaatacgctaatatgaactaaaaaaaggtacagaaacagacctacaaaatctaattacaatgaagaaaacgatgttattcacatttttctcacttcatcttgtaatagctgaatatacagaaaaggagtaccatacacatctgcagttaggtgtcatatatcactccagttatcatcatcacctccctcatcactggctacagcctgtcgaatagcatttgccttctccaaaattgccacaacgttggaattggctgttgattgtgatgaggtgtctgtcttagatgcatttgtccgtcttaaattgaaggtcttgc

SEQ ID NO: 32511 - DNA, 1707 bp, Setaria italica
  Peptide Sequence Number=SeqID_98485
ggtaatggcatcactttgattttttagtttgagattcagcttcagtttctgtctcagactccagtgtgttaagtgcatccatgtagttgtctgtttcacctggaatttcatcatggtggttcaagaccaatggtgattttgtctttttaagtaaggcatcttgctgctccaaagtatccatccccttatggtcaatttctttctgcgcagagctaatgcaagtaggctctgcatcttcagccttatccataacaacatcatcacagtagacagaactagtagacatgataattgcagccttttcatcccatttaacataaggcgatctagcaaccacatcatctggcagggaaccttgcttcaaatcatcacctgcatcatccacactcgtactgctatgttgtatgcgcaaaggcaagtcgctgggcttgtgcagcttagtatttgatgactttccatgaccattttcatgaggaacagtggaaggttttgtatctaaagcttggtctactgaactcagccgtgtctttgaactaaaagaagaagatctgcttatattctcaggattacatcttgcatcagttgtagatctatgctctgagaaactctgaccatcggtgctgggagatgcaaacggcctgttaacaggttggccagcagtaagtgatcgctgcaattcaccactcctatgcctggatgtggcttgtccatgatatggctcccttagtcgcgatccttttctcttgattttctgagatctcttttctctttggtgattagtagtcttgtctgctctcatcatatcccatgctttcttgaaataggacggatcagagtatctctttaaacaggccccagcaccagcattatcgaatttatcaagaaggtaaagacgtggtggatctcggcattcttcataggagtccatcataaaacgaggcaggtcactggatagcaggtgattttgctcattttgaagctgagtgtgccaatcagagcccggtacataggcaaaatgtatgtggctcttctgattcttcacagctttttcaagagatggaagtgctgcttcaatgttctgtactcgagttagcaccttacgcccccctagcagatgtagcgataacttgctcgtgtaggtcatggaaaacatcagctgcaaattccgcgagatctccgagctggcgcaggatcccgacgagccccgcgacggcgacgccctcgagcagcgccttgggctcctcctccccggcggcggccgctcccctcttccccgccgctccggtcccgacggcagctcctcctaccccgcctcctcctcctccgccgccgccgtagaggtcggggtccccgagccccacctcattccgcacctcgaacctgaccagcggcatcgcctcctcctgctcagctcaccgggtccgcgcggccgcggcgggagccctcctcatgcagccccggcgcgcggtatagacgcccgccgacgcgacgccgcaacggctacttttctggtggcgcggcgggagtgggagcaggtgcgccgggtcgctctgggcgcctgcccggttgccgcctccgcaaggaagagcagggcgcgctgctgggggccggagtgaggtgaggcggactgggcgggggtgaggcgcacacgagtagtggtggaggtggaggcgccaccaccggtcgagctctatctttggaggtagt

SEQ ID NO: 32512 - DNA, 1606 bp, Setaria italica
  Peptide Sequence Number=SeqID_98486
aaatctttctttattatttatttacatcatgtagaaatgatctgacatttccacagccatagagacctaaggtagaatacgctaatatgaactaatagagatacagaaacagacctgcaaattcgaactaaaaaaaaggtacagaaacagacctacaaaatctaattacaatgaagaaaacgatgttattcacatttttctcacttcatcttgtaatagctgaatatacagaaaaggagtaccatacacatctgcagttaggtgtcatatatcactccagttatcatcatcacctccctcatcactggctacagcctgtcgaatagcatttgccttctccaaaattgccacaacgttggaattggctgttgattgtgatgaggtgtctgtcttagatgcatttgtccgtcttaaattgaaggtcttgctccggatttgttgaagcaactcctccctttcgtccaagcttttaatgtcactgcctactgtttttgacctttcatgtccattaggcttcagctgctctgacttatccctgatctgctgaagcaaacttgatttgatatcaatgatactagaaggattaatgatttcttttacaccatcagttttctggacatccacttccttagcatgcccttgtggatcctgtagtgcagctggaagaggatgttcttcctgggcagaggtgtgcacatgtggtaggcatgaagatttcctaaacatatctttagctgtaatgcctctttcctcttctagtggagttgtttgtctcatcatcctccactgcattgggggaagaggaggtggtggtggcaactgatcttcagctggtggtaaattcagtggattgtgtggaatggaggcttcatcgttttgatcgtcgtttctggacattaatgtatcaaagtttggaagttcttcaacagaatgggattctaatgtgcctagtccattctgatccccaatatctgcaagtgaaatagttgacttcacaccagacaagttcatttgctcaaatcccgcgtagctagataaaggtactgtcgaggatcctatctgattagaatcgccatacaattcatgttcctccagtccaactccgtcttcttgatcccacacctcagaatttgaatataaacgtggacttagatcatcgtatgaagaataactgtatgacctaccaaaagtgtcatcttcagactcagaaccactgcctggctgtggaatggaagactctgacagcaactgaaatgttggtaacatcatatcatcagagttctcatgaagattgccatcacagaaatctaggttcagttttgacatctcaaatgcactcatggggtgaaaagatattttcatatactcaagtggcggagacgatttctcagagtattgacggctggaaaagattgatgatttggacaatccattcattccattttctgatctgttctcaaactgagattcatccgtgaatactgttccacttggttctgcaataggatttagggtagattcatcattcacacttgcatcagcatttggtctctcagatgacataggaagatcggtatatttgggagaagttcttctctgaagtgta

SEQ ID NO: 32513 - DNA, 337 bp, Setaria italica
  Peptide Sequence Number=SeqID_98487
ctctcaacttcaggccgttgacagctgcaagcactgatattggaggggtcagcatgctgtcgctgatggccagcgcggtcgcgaaaatggtgaggaagaagagggaaaccttggccgccttgctcgtctccagcaggttcttcatccactgagctctcctgagcgtcgccgacggcttggcgcggtgcctgtaccttgacacgagctcatcctcggcctgctggttcgggataaggcacaccttggcgtaccgcgagatgagcgagtagagtgcgaacgtgccaccgtcgccctcgtcgttggcgtagagcgcgatgaagacgatcttgatcatggt

SEQ ID NO: 32514 - DNA, 371 bp, Setaria italica
  Peptide Sequence Number=SeqID_98488
gtgcagtacatcgacgaaaccttcgtcggcaatggtccatccctcctcccggctgacccctatgaacgcgccgttgctcgcttctgggctgcctacattgaagaaaagctggttgccccatgggatcaggtgttcagggtcaagacggacgaggagagggccgaggcgatgaagcagatgttcgcagcagtggatgttctggagggaggcctcaaggagtgctccaggggcaagtgcttcttcggcggcgacaacgtcgggtacgtggatgtaattctgggtggtgcagcctcgtacgccaaggcaaacgaggcgctctttggtgccaagctcttcgacgccgccaagacgccgctcctggccgcgtggct

SEQ ID NO: 32515 - DNA, 271 bp, Setaria italica
  Peptide Sequence Number=SeqID_98489
gtgcgcgatttggggtccaacagatggagaattctagaagaacaagtaacacaaggactagatcatttattgttaacagctgggtcgcctagatctcgaaaccaaagatttgatatctacgcgggtgacagtgcgatcaactcaaacagaggaactgctgagattgttcccttaaagaagaatcagccatccaatcctttcaatcgataaccaaggcagagcggaggagaaacgacggaatcttggacgaacagggtaaggaaaggcgggg

SEQ ID NO: 32516 - DNA, 261 bp, Setaria italica
  Peptide Sequence Number=SeqID_98490
ccctgctgtggtggaagctgccacccaacgcctcgtccagcagctccaagcttctcccttctctccacagcatccatgcatatcctaggaggttgacatcgagctctggttcgtaggagccacggttcctcttgccggtgatgatctccagcaccatgacgccgaagctgaagacgtcggattttattgagatgaggccgtccattgcgtactccggggacatgtatccatatgttccgataaccttccgggtgtatacag

SEQ ID NO: 32517 - DNA, 741 bp, Setaria italica
  Peptide Sequence Number=SeqID_98491
tgtcaaggaccttagcctcgaaaagtcaatgttctggaacacaatcctatctctgtcccagctttgttcgataacaaggtgccgtcctctgcgcctgcttgttgggctgcaagctcctttcagtacaaagagctcaattgcagttgcaatattttctttcaggggtcgtgagatcatgtactcacggaagatcgtattgacttcaaatgagaccattctcatgtctgtggtggttgtgagcggtggtggctgaatcattgtctgcttaacgagcccggaagaaagttcctccccattttcatctgaagtatggttttcagtgtccgtggagtatccctctgcaccccacgcatcaccaaacgccgccgtcgaatactgctgtctccagggaaaattaataggtacgcgacgtgcttcctgatgtgcctcggcaaagcaccgaggtagcaacgcatccaactaaacaaaccatgtaaacaacaaaactctggactggtctccaggttgggtacaaaactgccattcaaaatgctggctttttctgtccaattaaaggcttgggccaaaatgtcagcaatagcaacaattacttttggaagtccaccacattttgaaataagttgctgtaacactgagtccttctcaatacctgctacaggaaaatatggactttttgccattgttttgaagagatcaatggctgcgccaatacctagaggtttgacattgaacccgcgtagt

SEQ ID NO: 32518 - DNA, 297 bp, Setaria italica
  Peptide Sequence Number=SeqID_98492
ggcgtgcgcgtgcgcggcgccgtggccgtggccgtggccggcggcttgcggctgcgacgccgggtaggctgttgttggtggtgttgctgctgtaccggggctggtacggcctgggcggcgagaacttgctgccgcggctgctggtctcggacgccgcgctgctgccgttgctcccggtccggcggtggtggtaaccgtggccgccggggtgctggtgctgctgctggtggttctgcggccggtggtgcggctgcggcggcgcgtggccgtggccgtgggagctcggcgcgtagccgg

SEQ ID NO: 32519 - DNA, 280 bp, Setaria italica
  Peptide Sequence Number=SeqID_98493
gtcatagaacgccgggaggtcgaaccagtgcacagcctcagccaccgtgatgaggtcaacactgccctcaccaccgagcgtcgcgacgaggtcctcccctggtgtggcatctggggtgtggaggtaccggaccttgggtgtggtgcagcatgtaggagctggtcctcgctcacatccgtggccagcacactgtcgtagtgctcggcgacctgcacggcactcaatccatgtcagtatgtatgaacacgctctggtggagagcagggagttgagatgctta

SEQ ID NO: 32520 - DNA, 298 bp, Setaria italica
  misc_feature (295)..(295): n is a, c, g, or t
  Peptide Sequence Number=SeqID_98494
acggacgccgggacggagccggtgaggttgaggtgggacagggtcagccccgtgacgaccccgccgccgccggtggcgcaggcgaccccggtccaattgcagtggtcgggggcggcggcggggtcccaggacttgagctgagaggggctgccccaatccttcttgacggtgagcagagtctcgcggtcgccggcggcgggctgggatcggcccccgccggcgaggaggaggaagaggagcaagacgaggagttgggggaagcggcagcaggtagtgggccctgacattatttacncgg

SEQ ID NO: 32521 - DNA, 1464 bp, Setaria italica
  Peptide Sequence Number=SeqID_98495
gtttcttaggtgctaatcatggcaccttgattactcgggatacaggtgaacatatacaggtcataaaatgcagggagtcagattaatggaccagtaatgatacataaaacaacagttcaaattttgctgcagttctgctgctcagtggcagttttggctgaacaaacacagcagcactttcggccgcgagagctcggttcagtgcagcttgttcgcgacgtaaagaaggtggctgatgttcgttggggggtagttctgcaggagcttgagattggaggtgaaatcgccggccaggagccgcttccggacaaggatcagcatcgcgcagcatattctgagcaaggtttcctgaggaccgtcaggatcgctcaatagcgtgtcccatatgtgaatagtatcagcaaaattgaactcctgggtcagcagcaatgttatccatctgaatgcatagaactggggattaacttctgtcgttatttccaaatggtgctggagttctgcatcatactttgctacaagttgtgataatttggctagtgtacctcgaatgccaacagcactgttgtcaagtttctggcagaagttgtctctaaacccactaagcaactcaacgaagcaaaagaatgaatctgcttctgcaaatttctgcaaagattccaaatagtctcttcatgatacagacagccatgaccaaaccaggcaggaaaagcttcagctgcagcagtacaatgaagggcactaagaatctggtaaaataatctcttactccatacagcatttttatcatctggatcactccgaaatacaaagaagagtggagccaaaatttcattcatcccttgcacatatcttataccagcattcagcttggcaaagattaacagtatatttttcagagattcctgattggactttgcaaaagatgaatcaccacagaagaaatgcatgtcagggtgggtccgctttacatcacggtcaatctgttccataatctctgagtactcaaaaaattgattccaaacactggtcttcccaaggctcaaaggatgctcctcttgggttacctctgacctgtggagcaaaccattgtcaacatgctccgcattatcgtggtaatggccttctttttccccttgtcgcgctatttctacagggttgctaaggaactcatcttggaaagctgcgtactgcgatctcttctttgccagctcctgctcccacagtgagcggtcattgggcagatagcccagtagcagcttccacacagtcgaacggactccggcagcgtccgggacgccctgagccgctagcatcctcagctcgtcgagatctatcaccttcttggacagcgccgcgaagacgcgggactgccgcgttatctcgaactccggcggcggagccggcggtggagatcgcggcgagctcgccatggatttgggcgtggagatgcttccgaccgtccgt

SEQ ID NO: 32522 - DNA, 547 bp, Setaria italica
  misc_feature (519)..(519): n is a, c, g, or t
  Peptide Sequence Number=SeqID_98496
acatcaggggttctgagctgtaatgggacaatacaaacattatgtagcataatgtagaatattgaataactcagaagtttaattagtgtaaaaataaatccttgcgcttcgtgctcttatgggctatgtaattttctacgagtagttagcctactatgtttaaacacctagccttacttagcaacacctagccttacttagccagcagtctgctgagaacggatctcgagcttgtagatggggcatcacaagatgagttgaggtttcacggattaaaacgtgtgctatccaagtacttcagcaaccgttaagagaggcgaacaagccgcagagcagtcagaactgtgcagaaaagcaaagagtgtgcgctgggcactcatagggtgcaacccccgactacccgtgtagtagacggaccaaactatataagcagtcagaggtgtgaccagggtggttggcgaaagtcacgaacacataggagaattgagtcctgtggagatatacggaagccataaaatntttaaatgaatatatgacttagcttggt

SEQ ID NO: 32523 - DNA, 520 bp, Setaria italica
  Peptide Sequence Number=SeqID_98497
aaaattctgggcattttttgggatcatggttcagataccgttggtattcttgacgagatatcttcaagagaagttccagaacataatggtgggcaacatgatattctggttcttcttcagcatactcgggcagccgatttttgccttttatactatcacgatgtcatgaacaggcaagcccaggcaagtagatagttcctctgaaatatgtaccatgatacagatcatcagaagcgaaccaaatcgataaggtggaagaagcagcagcccccttgccatttttaccatcagctagtcagcttgcaatgctcccattccatgtggccatgcgggggatgctgcgtgtacattacaagcgatgcaacaaggtcatctaacagcgcttccgacatgtggactctgtacacttttcagtctatatgtcatcaggtgatgtgcataatgtcgtggtagatgtaacatgtatatgtatgtaatgtaccatgaatccatgatgtgtcacgccttgaagggtccaaag

SEQ ID NO: 32524 - DNA, 2191 bp, Setaria italica
  Peptide Sequence Number=SeqID_98498
ccggaggacctggtgctggtggagcctgggccttcagccgtcggctgggctgctggccatacactcgagcaacaggcacagagtatcacggaacaagcagcagcccggataggggagggcaagcaaatctgaggcacgattaagattactgtagtactaaatccatgatcaacatcactgtagtacagatccttaaacagctgcctccgatgtcaagtgatatgaatgccagcagtacaaagcatgcttcaatacaaaaccaaggctatctgctacaggttgctctcttcatgaagatagcccgcctgtgaagaaaacacagaacaaaagcaatagcagctgaccaatctccggtccaatttttttcctaaataaaacaagtatcaacgcatgcttctgctgaatttcctcctctagtaaaagtatttggccatttcaatcctcatcctgttgaattttcatggagtaaaacgtattcccggctactattgccaaacttgattgtgtctttttcaaatagttcataatagcgacgaggttcaatgcgattttcattaatgaaagtcccatttgtactatcaagatccatcagataaggcctcactttctttgccatcatgccatctggttgctccttctccacaagtctatattgaagaactgcatgctgcttgctgcaggagggatgatctgtggggatgtctgcaactttcctttctcttccaaaaaggtagcaggtcaaccgatgaacatacagtggttcattcagtggttctccacccttaaacacatagagcctccatctaatctctgacatgcgagcctcttggggctctgtatataatagatttacacctgcaactctgttggtctcctcagcaagctttccagacaactcaaaggatggctttgctttcttttgcttcaagagcttctgcggtagagttcattcttgccaaagcatcaggatctccactcctggatgcttcacctcctctagagttgatatcctcagtacgtgttccacttctgggcacccttggtgatggatgggattcatgcctgccccgatgcctgtgctcatctggagatgctgatcgaccacgcctagatgaccttcctgatcctccattgctctcctcccaatctgacagtttctctctggttgaatcccttttgtcactacggtccaccctttgctcccttgaagaagcagctttccagtcatcgcgatcaagccttccacctcttgaatcctgcctatcatcatcccggctcgataatgtctcctttgaagcaccagacctatcatcccttccagcccttctatctcttgaatgatcctttccatcatctcgatcagacttcttatcttttgcagtacctttggcatcttcccgctctgccttcctatccctagatgcatccctcccttcatcatgctccctgtgcttgcctccagattccctctcttccctatgagaggacttgcggcggtcaccattggttacctgcgctgcctcccgctccaccttcctgtccctcgaagtatccctcccctcatcaggctccctgtgcctccctgtgtcccgctcctccctatgactggacttccggcgatcactgtcagttacctgggtggcctcccgctcaccctggcctctcctcagcctcttggtgcgcggcgatggcgacctagagccgcgcctcctggcaggcgacgatgatcgtgactgctcccgcgcgtgtttcggcgacctgacccgctggtccttcgccctctccctcggaggcgacctatccttctccttgtgcgacaggctggccttcgcaggagaccgcggcgaccttgcacgctccttcgccttctctttcggaggcgacctctccctgtccctgtgcgacgcgcctggcttcgcatgaggggaccgtgccctagccggcgaactcttcctccgctcagaggggctccgcctgcgtggcggcgtgcccctccgctccctgtctccggccggggaacgcgatctcctggtgtgctcctccctccgcctctccaccgccgaagccattccagaccagagacggcggcggcggcggaatgggctagatgctacctccgccctcggcggcggcggcggcggcggggctgctgcgggcctgcggctgctccgtcccgacctctaccgccgat

SEQ ID NO: 32525 - DNA, 490 bp, Setaria italica
  Peptide Sequence Number=SeqID_98499
taagacccaatgaaccgaattaaaattagagggtaataaccccatcgattaaatgccttcctgtctgccctcatgtcagactgatttgatcgatcacttataccagcagccatccgtgttgcattgttcagcatgcgatttacttcatagtacgtgaacccgttgtacagaatggcaccccaaagtggaagataaaaagttatcaagtgcaaaacctttgccatgcttccttgctggatccagcaccaggaacctggccttccatagtcacttcctatcgaacgtaatacagtggtagctagtgaagttcctggagaaataaatgaaaaaattgaaatcttttcaactgattttgaaagctgacacaagactaccatagttagtcagtaaaataatgatctactgctaaaaatggaggatatatgcctacaagcagtaccatcagataaagcttcagtaaacagacatattggtcccaagatggtatatg

SEQ ID NO: 32526 - DNA, 1250 bp, Setaria italica
  Peptide Sequence Number=SeqID_98500
tttaaagatagagctattcaattgtccagaggagattacacatgcatactgaagaaacgagttctcaagaaatacatcagtgaagggggaataaaagaatgccaatctgagaagctttgcctatacgctacagatgaacatcagaatatctactgaatgtttctatctcctaacctcctatatactatgcaacaaatgaaacttcagcacaccaacagtgttaaaaacaatctcaacaatgagcccagtggaactgactccaaatgcacctgaaccagattgtcaatgctaaacaattgctcctacatcgatgtactatttccttcaaggttgtatagcacccaaaatatattgacaaacttagtacacttcaaactcctaactcctaagtattgctcgcatagtcgtatcagtttccctcaacgatgagagaagtcagttcattttcctgttgacttcgcaatcttgacaatgtagggaggctccttttaattctctcaggtaggaacatgtcgattctttctgaaatagctcggcgcacagaagagttgagcccataagaaatggaattgaaaaggcccataagtccagcaaacccaacatcaagaaaagagagccaaaatatcttgtgtcctggattggtaaagtcgtaaagtcgattgatagttgcaaaagcccatgaaccgattaaaattagagggtaataaccccatcgattaaatgccttcctgtctgccctcatgtcagactgatttgatcgatcacttataccagcagccatccgtgttgcattgttcagcatgcgatttacttcatagtacgtgaacccgttgtacagaatggcaccccaaagtggaagataaaaagttatcaagtgcaaaacctttgccatgcttccttgctggatccagcaccaggaacctggccttccatagtcacttcctatcgaacgtaatacagtggtagctagtgaagttccccacacatataagtggaaaatagatccaaattcttcaacatcagttttgtgtttgacaactgtgcgatgcagagtgaaagctatggtggttgtccatagaaaagaagccacgcagaagaaatgagcactgtagtcatgtgcaaagcagtaaaatgcattcgatgggtcccccagtatagtgaataagctgcaaaacatatccgagacggcgaggtagaagacgagcttgaaggagaacttgcggagctcgcggaagaggaggtagcagagc

SEQ ID NO: 32527 - DNA, 666 bp, Setaria italica
  misc_feature (603)..(666): n is a, c, g, or t
  Peptide Sequence Number=SeqID_98501
actactagtacgaagaataaatcttggatcagattataagaaacctaacctatgaggagcaaaaatacttgtaccagcagcttggggagatcttccatgagaggcaactgatgcaaagttgagcgttaatgcgcttacgagaagcatgatatgttgtgtatttaagccttcagctcattctgtagcactagattcgtgtatagcagcactgcccaaatgcatggtgatataggggaatccttgttcaaaccattgtacagaatggtagaaaggagaatgaatgggttttaggtgctttattcgctcaccactgacgctgccttctgcagttatccatacacttagtgctaattctacccccatatcatcgtttctgcacctcttatattgtgagaaggggacctcgaaaattgtattcttgcttatcactttgaggtccttgcctcggatcaaatattggaggatgcatagaataagggagagtagggcaaattcttttttcctcgccttctccgccatcaggttcttcgttgcatgtttattgtaagtgtagcaaacgaaatgttcttgttcctcttttcatatgcatccgtgtgttgcatnnnnnnnnnnnnnnnnnnnnnnnnnnnnnnnnnnnnnnnnnnnnnnnnnnnnnnnnnnnnnnnn

SEQ ID NO: 32528 - DNA, 1309 bp, Setaria italica
  Peptide Sequence Number=SeqID_98502
tccagtgaagagaacaactgccagggttccgactactgaattggcactctttttcacggcgatgctgtacacttatgggcgctttcttagtcggcagcttgtgaatacagtaacttcagatcacttgctgtataaggtcgtcagtggcctaataaagtatcagatgtttatttgctattttctttatattgcagggtttgtatggtttattttgactctgaagaaaaaggcatacaagtatcaattcaaacagtatgcctggacgcacatgatactcttaacagtttttgctcagtcctctttcaccgtggcaaacatatttgaagggattttctggtttcttctgcctgcttcactcattgtgatcaatgatatcttcgcttatttattcgggttctttcttgggagaacgccattaattaagttgtccccaaagaaaacttgggaaggttttattggtgcatcagtgacaactatcatctctgcatttctgttagcaaacgtaatgggccgctcccagtggttgacatgtccaagaaaggatctgtcgactgggtggctttattgtgatcctggtccaatgtttaagccagagcattactcgttgggagaatgggtgccacactggttcccatggaaagaacttgccattatgcccgtgcagtggcatgctttagccctaggtttgtttgcatcaataatagcaccatttggagggttttttgcgagtggtttcaagagggcttttaaaataaaggattttggtgacagcatacctgggcatggtggaattactgacagaatggattgtcaaatggttatggcagtgtttgcatacatataccaccaatcattcattgctccccagaacttctctgtcgagataatcttggatcagattataagaaacctaacctatgaggagcaaaaatacttgtaccagcagcttggggagatcttccatgagaggcaactgatgcaaagttgagcgttaatgcgcttacgagaagcatgatatgttgtgtatttaagccttcagctcattctgtagcactagattcgtgtatagcagcactgcccaaatgcatggtgatataggggaatccttgttcaaaccattgtacagaatggtagaaaggagaatgaatgggttttaggtgctttaaaaaaaaaaaaaaaaaaaactgaagaacgtacgaccgaaacggacaacgaactttcgctcaccactgacgctgccttctgcagttatccatacacttagtgctaattctacccccatatcatcgtttctgcacctcttatattg

SEQ ID NO: 32529 - DNA, 881 bp, Setaria italica
  Peptide Sequence Number=SeqID_98503
agaagtgccaattcagtagtcggaaccctggcagttgtttctcttcactgtattttctgagtaggttgaaaagctctctagccatatatatttgaatcacaaccaccatggcccaaatatatagatgacccatataaacaataaagacaaagcctccaatcatccatactgttgaatatgtacggataagcattgatctatacttgttctgatcattgacgagcaacggctgtccattagctctattcccatctgcagtagcctcacttggttgtctccgacgtctaacacgccctgtgtgagaagcagaaacatcgctagagctggtgtccctttgcatcactgatactccaaagtcaaatcagcgaggtgccgtcgggtggaaccggaggcgttgtgcacgccgtccgctgaccggcggcctccccacgcggccagggtacggaaaggggaatggtgggaggggctttgccgtttagggctgcagagacgggtgaggttttttccccccttccccctcccccagctcaaagcatgcgtactccttcctgtggcacgggacgaggcgacgagccctgtcgagtccactagtaggtatagtctatggcctgccttgttcccgcacctgtacaacgcaatcgatccgcgcaacagacaagcccatcgctctcgggattattaattgccgctcgcaaccgctcatccagagccgtcccaaatcgtcccaactaacaaccgagccaccctccactccagctaacaaaattcgacgggtgggacagctaaacatcgcaggccgtgcatattccccccgaataagtgaataacccagccgccgccggcgaaaaaacatcgcagtttgcaacaacaattcggagcaa

SEQ ID NO: 32530 - DNA, 247 bp, Setaria italica
  Peptide Sequence Number=SeqID_98504
gttacgttcctacctccaccttcacctgcggcggcggcggcacgtcgtacgccatcaccttctgcccaagcacaaccagcgtgaaatcagtgggaacagatgcggcgtccgttggcggcggactagtggggtcgtcgtcgtggcctgtcgcgccgcggcatggatccagccttgtcctcctcggcgtcgcgattgcggcccttgcacctgtcttttaactacttctactactatcaacggaagcgac

SEQ ID NO: 32531 - DNA, 347 bp, Setaria italica
  Peptide Sequence Number=SeqID_98505
tagttcatagtgtattatctcatacataatgggagggagaaaacaaccagcaaagagcaaataatttgtcaattcttccagatatcaacaccacaaggcattatcaagtaccataccagtgatcgcaagctctaatgttatccctcaaagatttaaactcagctacgacagacatgttggttttctctcgaaggagatatgctacgagttcattccggaaggacgacactgctagttaattcagcaactccatacctactggcctccctcctcggggtgctgccccaccggggcccgggccggcgccggcatttggggtagcggcaccgcctgtaccggcggtccct

SEQ ID NO: 32532 - DNA, 242 bp, Setaria italica
  Peptide Sequence Number=SeqID_98506
gccgtgaggtggagtagctggctacagaaattccttacagaatgacatgagaacagataactgattctgtgtcttctccgtttttgatactgaacgacgtgcagtttctttgttcttttcaagtctcccaattcaagataatcaaacggcgaatgctgagaccaattcaacagcctctcccaattcaagtctcaatgaattatggcactaattttcaacaaacatccaacaaacgaaataat

SEQ ID NO: 32533 - DNA, 508 bp, Setaria italica
  misc_feature (1)..(57): n is a, c, g, or t
  Peptide Sequence Number=SeqID_98507
nnnnnnnnnnnnnnnnnnnnnnnnnnnnnnnnnnnnnnnnnnnnnnnnnnnnnnnnnaaataaatagaacacataaaattaagcaagaagcagtacagacttcattattcagaagaacagaggtatagcatagcaattacggccagcagtagtagtaaaaagcaggcagttaaccacgataaaagcactccactccactcgacggcgccacctcacttaccgctgacggcggcggcggcctcgttgcccccgttggctgccgcggcgggtgcctccttgcccacgggcttgccgccgtcgtcgccaccctccttggcgaaggcggaggcggggtatgtcctgccgagcccggtgggggtcttgaaggtgatcttggaggggtcgtccttgtcgaggaacatgtcggagagggtgacccaggagctcctcatctgggtcaccctctccgacatgttcctcgacaaggactttccgtttcggtttccttttcgttacgttaaggttctta

SEQ ID NO: 32534 - DNA, 834 bp, Setaria italica
  Peptide Sequence Number=SeqID_98508
cctactccctgtgtgtccttggctagttcttctttttttatattttttttttttttcacacgattgattaccatttcattcataaataaatagaacacataaaattaagcaagaagcagtacagacttcattattcagaagaacagaggtatagcatagcaattacggccagcagtagtagtaaaaagcaggcagttaaccacgataaaagcactccactccactcgacggcgccacctcacttaccgctgacggcggcggcggcctcgttgcccccgttggctgccgcggcgggtgcctccttgcccacgggcttgccgccgtcgtcgccaccctccttggcgaaggcggaggcggggtatgtcctgccgagcccggtgggggtcttgaaggtgatcttggaggggtcgtccttgtcgaggaacatgtcggagagggtgacccagatgaggagctccttggtcttgacccccgtcatgcgcttcatccgtcggtcctcgacgaaggcggtgacctcggacgcgtaagagacctggcgcccgatctgcttgaaggtgtgggtgagggccttcttctggcggagccagacgaagcccgtggaccggttgtagccgacctcctccatgtcggcgagcgggagcaggcccagcgggaggtgcacctccgagagcagctccgtggatttctccgcgcacagcgccgcgccgtggtacacctccgcccccgcgcggtgctcctcgatggcctgcgaccccatgggtggatttggatcgaggccgggcgagatcaggcgagtctgggcgggctggggattccggcgaggtggcggggaaa

SEQ ID NO: 32535 - DNA, 1409 bp, Setaria italica
  Peptide Sequence Number=SeqID_98509
ttagttaaacttaaaattcttgtattgtcttgtctactactttgtattctatactgaattggcagggcaattgacaaatgtaccccgttttttaaaaaaaaattgtagtcgatgaatgcaacaagcccacaactacactgaggttcttaacaattgagccatatacgtcatctataacacaacaacaaatgctaagtccttcgtttgtcaatcagaaactaggaacgacggcgccggattttcaggtagccgaacttcgcagctcctggagacgacccgtcgaaaaggacgggcaggtacccggtggcagccttgtacctctgctgaatctctacgatctcttcgctgctccttgcgcagttcttcccgataacacaaactgtgccaccggagcctccaccggtgatctttgcgccaaatagactagggcttccaccttctgatgtcgtcctgtgttgcatttcttgtaccagatcaactagtctgtcagtcccatcagaaccaaggccacacgcgctgtagctgttgtggcactggtacatgagttctcctagggctgacaattgctcatctgtattgcctgctgctaacaatgttttgaaggtctcaacacggaaattttcatatataggatgtctagtaggagccttcacactataagatcttttaggatcaataactgtcactgtgtcactgtgatctccatatttctctaaaaatgcatctccactgatcacctctggaatatcttttgcataagcagcttcaaatctgtgaggtggtaggttgcacaaatactccattgcagcttcagatttcagtagacccgtaccattttctttataacaatcagactgaacaggggcctctgaagttgaggaatctgaaactaaatctgatgctgcacacttgatcatctttcgtcccatgtaagtgcctacccttacagatccgtaatctccccctccaacactatgccgtatccctgaatctagaccccagaatcgcagatgagttggtatgctaaccaattccttcacttctgcaggctggcaaaccatggcaaggagtttgttagcttctccacacgcggatgccatttgatccattaccccacaaggagctccaacaacatgattctcaaccttctgacaaagcaaagcaagatcccttggggtgatgtttaaaccataggcagcggcaatagcagacattgtagcaacctccactgatgcagaagaagaaacacctttgccttctggtacagcggatgaaaccagaatgctcatgctgtcagtgaactggacaccaagctcagtcatcaaaactagaattgttccagcaacgtaggcagcccatctgacagaggattggtaaacttgccaatataattgagtagttgaaactct

SEQ ID NO: 32536 - DNA, 546 bp, Setaria italica
  Peptide Sequence Number=SeqID_98510
aggaaccaacgcaacacggcagacggcaccacgcgagcgaaactagcacagcagcgaagcggcggcggcggcgatgggaggtgagaccacgggtgccggcggcggggggttccgcgcgcggatggagcactacctgtacagtggagagaagaagcacgtcctcgccgggatcgccatcttcgccgccgtcttcggcgtcccctggtacttcatgacccgaggagcaaagcatcaatctcaccaagattacatggaaaaagctaacaaggcgaggtcggagaggctttcttctggacagccatcggcgctgaaagaatgaagcagtagtacccatcctggttcctgacgtctagagatcagcatactcctgttttgtttgtaatcagaggattttagtctgttttgaaataagcagatatctttcttatctcactagatgtagaaaccaagaattggcgcaacatgttaccaggaattttgtctactggagcctccattaccatttgtgctgtttgcaaaaaaaatagtattagtacttgtagttct

SEQ ID NO: 32537 - DNA, 414 bp, Setaria italica
  Peptide Sequence Number=SeqID_98511
agcagcgatggaaaccggatcaggttacagccaatgtggagaaaagttgcctatgggggaagggcaaccaggatacgatgataaccacaccgatgagtcgttcctcgaggagatggttatgaacgccaatgttgtcaagagagaccttctgaaagtgatgattgactccgtctccatttcgcaatatctctgcattgtcgctcttgtggtttcgacatggaccctcacattgaacttggacattaatgagaccactcttctcaagctagatgttggtctcctgctggttggtttctctgtcctcttgctcacgacttgtccattctctctgaagcttctggcaaagtatgtcctcaacatatctttcttcatcagtggtctttatgttcttgcgccaattttacctattaccct

SEQ ID NO: 32538 - DNA, 258 bp, Setaria italica
  Peptide Sequence Number=SeqID_98512
ttttttttttgtaagcagaaatcatcacatctcttgactatttttatttttaatgctaatgttatcgagctatgatcactacagctccaaaatgaaaaagaaaaaagatcagctgcttttgcacctagtaaatatacaaatcggctaaagaatttaagtaccaatgttgctcatttccacgcttgccaaacaaaatgcacattctgatatttttattgccattacaggtcttgatcaagatttggctccatgttcacg

SEQ ID NO: 32539 - DNA, 526 bp, Setaria italica
  Peptide Sequence Number=SeqID_98513
caggtgaaggagcacctgctgaacttcacgatgcgcaacattgttcgcatggcgctgggggagaaatggtcgccgccgggctccgatggtcgtcgtagctccgagggcgacgaagcattccggcgatcgctcaaggaatcgttcacggccactggtttgctgggcaatgtaggagagtgggtgccgtggctcggctggctcgacgtgcagggttgtgttcggaggatgaagcgagtgcatgtgctcttcgaccagttcaacgagcagatcctcaacgagcaccagaaggaccggcagcgccgtgcaggagcagggatggacgacgacatggacctcgtgaacgtgctgctgcaactggccgaggacgggcaggaggagccaacggagacaaggctcacgcgtgatggcgtcaaggccttcctcctggacatcatcggcggcggcacggagacagcagcggcgacgatggagtgggccatattggagctcctgcgccacccggacgccacggcggccgccaccgagg

SEQ ID NO: 32540 - DNA, 709 bp, Setaria italica
  Peptide Sequence Number=SeqID_98514
ggcactggtaaaacatttaccatggaaggaattgaaggtgctcgggggggtcgaactacagaacttttggaggaactctttcggataataaaagaaagagagggcattttcctgtacgaggttactgtcagtgttttggaggtgtacaacgagcagatccatgatttgctcctgacagggtctcaaccaggcgcaacaaccaaaaggctagaagtaagacaagttgcagaaggggttcaccaggtacctggacttggtgaagcacgggtgatctctaacatgaatgaggcttgggaggtcctgcaaactggaagcaaagctagagttgttggttccacaaatgctaacgaacatagcagtcgatcacactgtatacactgtgtaatggtcaaaggagaaaacttggtcaatggagaatgcacaaagagcaaattatggctaattgacctcgctgggagtgagcgggtagcaaagacagatgcacaaggagaaaggttgaaagaagcacagaacattaacaaatcactctctgcactcggtgatgtcatatctgctcttgcaacaaagacctcgcatataccttttaggaattcgaagctaacacacttgctgcaagactcactaagtggagattccaagactttgatgtttgttcaaatcagtcctaatgagaatgacgtaggtgaaactctttgctcactgaacttcg

SEQ ID NO: 32541 - DNA, 524 bp, Setaria italica
  Peptide Sequence Number=SeqID_98515
tttattggaattctcaaaggcttcatactgaactgtcttagcatcttgttgcttgaaatcaagctaaacatacacctacatatcttacatcagcgctaaaactagtgagcacctacttaacacaggataacattaagttactacatctcaaaagcctgccttgtgtgggaaaacatcaagagggccagccctccacgattcaccagatacactacatcttctagcaagcagtaagcttcgcgatctcctcgagcaggtacttagattcagctgcgtagtcaaccggcgcctctgtcctcacggtgatcctctgcctcctctcgttcatgtactcatgctgcgccacgctgacgcggaacagatggggaacccatgtggcttccttgagcttctgaatgtagctgtcgtcgccctcctctttcctgatccgatcaagctcatcagcgctgcagccaatgatcctctctgcatgctcgttgaagacagaaacccatgcctcaccagtgggatcagaaaccttgatg

SEQ ID NO: 32542 - DNA, 1490 bp, Setaria italica
  Peptide Sequence Number=SeqID_98516
tttttttcatactgaactgtcttagcatcttgttgcttgaaatcaagctaaacatacacctacatatcttacatcagcgctaaaactagtgagcacctacttaacacaggataacattaagttactacatctcaaaagcctgccttgtgtgggaaaacatcaagagggccagccctccacgattcaccagatacactacatcttctagcaagcagtaagcttcgcgatctcctcgagcaggtacttagattcagctgcgtagtcaaccggcgcctctgtcctcacggtgatcctctgcctcctctcgttcatgtactcatgctgcgccacgctgatcaggcacaggcaaacaaggaaacagctgttgcattctggaaactgaatgctaaagctgccaagttttctcaagccggaatttacctctttcctgatccgatcaagctcatcagcgctgcagccaatgatcctctctgcatgctcgttgaagacagaaacccatgcctcaccagtgggatcagaaaccttgatgaccatgatgtatctcagtgagcactcagcatcattcttattgcatccttcacaccagtatccacctccaacagcttcagtcaccttcttgttgcaggtcttgcaagcacggtaccacatgttctgatcaggcttgatgtggcttatgatagcattcaaactgaagaaaacaggcttttcctgacccatgttgggatcactggtgatgtgagacagaaaaactctatcagaatacatggatctcaagccaccagcccgtgctgcacccatgtctgcaccaatcggtgccattgaagtacccttgccttcattgtcataccatgatttaagattgtgcacttcaggaaggtctggattaaccataagagtacttttgcctacagttgaaagggacacaccttggaagtcagacactcttaagctccttatcgcaatgatgggcgaactgtcaaccatgtccaagagttcttggccagtggtagtagcaagatcattccaaagtgaaatactaacagttttgcccgagtcatctgcaacaacaatgtcacgctttgggattgtctcattgtcaagctttctcctaatactcattgtgggtgatacgctctgaacaacaccaacaatatctacaagctccctgccattgacatatgatcctagttgatcaatcttgacaaaattgtattgcaccggtggaatgaaagtttccccctctgcttcttcaacaacagcactctcattcagcgtcatctcataatcattctggacagtcttgaactgcttgttggcaatcctaagtgatcccttggagacatagtagaccttccccagctcaaacattggtagaacttctttgcagcctcattgaacatggtggcctggatctgggtgccatcctcatcagtgagctctacattgaagacacagccttctccacgggcattcttgtaggttctcaggtt

SEQ ID NO: 32543 - DNA, 390 bp, Setaria italica
  Peptide Sequence Number=SeqID_98517
aaactgacaggagttccatggactgaggaagagcaccggatgttcctcgccggcctcgacaagctcgggaagggcgactggcgaggcatttcccggcacttcgtcacaacacggaccccaacacaggtggccagccatgcccagaagtacttcctcaggcagaacagccttacacagaagaagaggaggtccagcctctttgatgcggttgaagctgctaagaaggtagcaatgccgaggatagcatcagtatccgggctgccattccccagcttgtcgccgaggtcggtcgatgcaaggacgaatggagctgtggtgctgcctccattcctgaacctgatgagcagcacatcaccatttgctggtggtggtggtgcatcacagtcacag

SEQ ID NO: 32544 - DNA, 450 bp, Setaria italica
  Peptide Sequence Number=SeqID_98518
tagtccagttgaagtgatacaggaagtgaggtgagtacaaacacattgctgggcttattaaactccaggcaaactaatgtgtcggttcaggtttctcatttcaaatcaagccctgcctagtagaatttgaagtagcatcattgtgaatacctccttagtgggtcttcagtcatcataccttcttagatatctgcaccacatcaagtttttgtcaattaattatcaagaacttagcataaggcttcagcttcgtgaagatgtatgggaagaactgaagatatgccatcaaatgatcttcactgctggtgatggtgaattggtgatagcctccaagattaggaattccagccagcaccatgagcaaacgtgaatcgctgacaccttaggtcacatcagtctagcattgttcctccctcttgagttccttcttcttcctcatcttcactctcg

SEQ ID NO: 32545 - DNA, 452 bp, Setaria italica
  Peptide Sequence Number=SeqID_98519
aatttagaattgcataattccatgaactttgtcaaggactcactgtaactactaagaagctaaggtaaggcgtgattgcacctgatatcggtgcatcatatctatgggtaaggcgtgagtgctgcaggacttggaaacagccagtgaagtgatacaggaagtgaggtgagtacaaacacattgctgggcttattaaactccaggcaaactaatgtgtcggttcaggtttctcatttcaaatcaagccctgcctagtagaatttgaagtagcatcattgtgaatacctccttagtgggtcttcagtcatcataccttcttagatatcttcactgctggtgatggtgaattggtgatagcctccaagattaggaattccagccagcaccatgagcaaacgtgaatcgctgacaccttaggtcacatcagtctagcattgttcctccctcttgag

SEQ ID NO: 32546 - DNA, 270 bp, Setaria italica
  Peptide Sequence Number=SeqID_98520
agatgagagcctggagagcgcgccgtacaagctgaggaggaggaactcggagacgctgcgcgcgcagtacatcaacaccaaagagttgagggtctgcgtcggcacctggaacgctggcggcaaggccccgccggaggacctcgacatctccgagtggctcggcaccggcggcgacgccgagcccgccgacatctacgtgctcgggttccaaggaagtgggtgcctctgaacgccggcaacgtgttcggcgcggaggacgggcggccggcg

SEQ ID NO: 32547 - DNA, 367 bp, Setaria italica
  Peptide Sequence Number=SeqID_98521
tttagctcagttcatgaattaaagaaacaatcgtaatcatgtagagcaaataatgaaaccatgtgggccgcatctcagagcaatactattgttatcaggaaaggaaactaatgagctcttctgaagttggagagtatgctagatctttgaggtctacattctcttcttttgaggcactccctattccaacaattgctgtcattgaaggagctgctttaggtggggaaaatgcagaacttggactgccagaaacaggccttgccattatacctggagccggaggcactcagcgccttcctaggatcgtaggggggtccagagcaaaagaactgatattcactggccggagatgtgatgcagctgaagc

SEQ ID NO: 32548 - DNA, 664 bp, Setaria italica
  Peptide Sequence Number=SeqID_98522
ctaatgagctcttctgaagttgttctatgtgcatatacttacagggctcaggaattacagtttgtttgaacaggcactccctattccaacaattgctgtcattgaaggagctgctttaggtggtgggctagaacttgctctttcatgtgatctccgcatatgtggtgttgcctttaatctggaatattaccaaattcctttcatcctgtgggataactatttcctggtgttttgaatatttaagtgtataccttctctctaacgtgcaggggaaaatgcagaacttggactgccagaaacaggccttgccattatacctggagccggaggcactcagcgccttcctaggatcgtaggggggtccagagcaaaagaactgatattcactggccggagatgtgatgcagctgaagctgtaatgatgggacttgcaaactattgtgttccagcaggggaggcttatcaaaaagctcttgatattgcacgcgagataatgcagaaagtaagaatcattcttaatcctacttctgaacacagggaagttcaccatgagttcacgtttctgaataagcatttacatgccacagtatacaaataagaacaagtttctgtcagtacaagtgaacttgcgggaacgaattcatcaaagcaataataagtgaaa

SEQ ID NO: 32549 - DNA, 854 bp, Setaria italica
  misc_feature (823)..(823): n is a, c, g, or t
  Peptide Sequence Number=SeqID_98523
gtactccgactcagtctatactatcgaaggtcgtcctggttgtgagctccgtgccgggggctttctgcgcaggcgccgacctcaaggtctgggccctcaaggaaaggaaactaatgagctcttctgaagttggagagtatgctagatctttgaggtctacattctcttcttttgaggcactccctattccaacaattgctgtcattgaaggagctgctttaggtggtgggctagaacttgctctttcatgtgatctccgcatatgtggggaaaatgcagaacttggactgccagaaacaggccttgccattatacctggagccggaggcactcagcgccttcctaggatcgtaggggggtccagagcaaaagaactgatattcactggccggagatgtgatgcagctgaagctgtaatgatgggacttgcaaactattgtgttccagcaggggaggcttatcaaaaagctcttgatattgcacgcgagataatgcagaaaggtcccctggggataagaatggcgaagaaggctataaatcaggggacgcaggtcgccgacatgtcctcggcattggctgtcgaaggggagtgctacgagcagctgctgcacacgcaggatcgccttgaggccctggctgcgtttgccgagaaaaggaagcctgtctacacaggaaagtaagctgttggctggtggtggagtgtttgtaaaagataaggagaagcggtgaactggccttggattaccgatggaggcccagttacctatttcagcctggttgttctgcctgggcagaccgggctgcgtgggccaattctaaacgntttttctgccttgcattaggcccatcccgtc

SEQ ID NO: 32550 - DNA, 293 bp, Setaria italica
  Peptide Sequence Number=SeqID_98524
agtcttctttgttccatctgaggctgcttgtgcctggagcctagctgcctccttttgtttcgccttaagtttttttttcttctttctcttttgccttttgatcttttttcagcttcctttctaactctttctcatcaagttgcttctcctccggcaccttctctgcccccttgtccatggctcagatcaagccgacgggttgggtcttctctctgccgccggcagtagagtggatggacggcggagcgagcaggacagaggtagggagtctagggttccaaggtatttttttc

SEQ ID NO: 32551 - DNA, 421 bp, Setaria italica
  Peptide Sequence Number=SeqID_98525
gcttaatgttgggctaacttgcaggacgccgggagtgcggaggcgtcgagacgccgggactgcgggagtgcagggagaggcggctcgaagcgggagcggagcgggtgcggggtagggtttcggcggctccgttcctcaacgacgcgcggcccccgtaggagacttgcaagggagcgacaagtgagaagaagaggaacgagaggaggatcagaagaagaggaacgagaggaggatcagaagaagaggaacgagaggaggattacctgcgcagccggagcccggagcccggagccggagaagacgaaccgcaacggtggggaaccagggagggaggcggatctgcgaggggtcgggggaggagccggggagggaggcggagccgcggaggggctaggggaggaagcaggggttacggggaggg

SEQ ID NO: 32552 - DNA, 785 bp, Setaria italica
  Peptide Sequence Number=SeqID_98526
atcttttttcagcttcctttctaactctttctcatcaagttgcttctcctccggcaccttctctgccccctgctgctccacaaaaccacacccaaatcagtttcacaaacagtggaaagaggtccccccgcgagctggcgagcatgagggaaagacgggttgctcgatcggcacccccatgcttaccttgtccatggctcagatcaagccgacgggttgggtcttctctctgccgccggcagtagagtggatggacggcggagcgagcaggacagaggtagggagtctagggttccaaggatttttttcgggtttggagatggaaggaattgggcagtccggcgaggtggagtcggattagacaagtgggctgctttctagatgtgtcactggcacgtggggtccgcttaatgttgggctaacttgcaggacgccgggagtgcggaggcgtcgagacgccgggactgcgggagtgcagggagaggcggctcgaagcgggagcggagcgggtgcggggtagggtttcggcggctccgttcctcaacgacgcgcggcccccgtaggagactgcgcagccggagcccggagcccggagccggagaagacgaaccgcaacggtggggaaccagggagggaggcggatctgcgaggggtcgggggaggagccggggagggaggcggagccgcggaggggctaggggagaagcagggttacggggagggaggcggaggggcgaccggcgagccggcggcgggcgaggacgccggatctgagaggggagggc

SEQ ID NO: 32553 - DNA, 681 bp, Setaria italica
  Peptide Sequence Number=SeqID_98527
agttccaaaagaaaaataaaatttttttttttctttccgtgtcgcccttctctcggattgttgaaaggccgcttctttcggaggtttgcgcgtgtttctcgtcgagattagtcgaccggggttcggatcgagctgtttggggtggagaaattttccgaggccaagaagaggtcggaatcggatcggagttcttgaggctcggagggtgcggaaaggcggggggtttgggaggagttcgtgttgccgcacgcggtgggaaaaatcggttgttgagcggattggaggcggagatgggagccggagctgaggtcatgcatcaggtcgtgccgctgctggaggcgccgttccaccggtgcgtcgtcaagagcgtcgaggtcgtcgaggaggtggtcgcggtggcgcccgcgccggtgcagctggcggcgtcgccgaaggcggtggtggaggtcgccgtcgaggtgtccgatctggtgagtttttcgattttagctgagcaaaggtttcggctttcttgctctaattcatgttttgataagaattatatggcctgaaatcattgcatgagaattttacctgtgctgtagtcaaatgttccttgtatcattgaaagaggtaatttttcttatagtatttacttgatgtcgactaatttctgcagtaggataatattcagaggacggg

SEQ ID NO: 32554 - DNA, 398 bp, Setaria italica
  Peptide Sequence Number=SeqID_98528
ggggtcttcttcagtggcaccttcttctcaggcctctcctctccaatgattacattcttccctttggctttttcagcttgatccggccaaatgcactttgggatttgtcaactcaagagtgtttataggaaagggattttgattaatctgtattccatgaaacttcaattgtccttctttgatggccgattgtatttgtctatggaaaacattgcaatcattagttgaattatgccacttgcaataagcatgccgctttaattcatcaaccggaggtacatatgagaaaacttaatctttccagccttcactagttcatcaaagattctatcacatttagacacatcaaaagtgaatttcacctcatcttgccgtatttttatgggaccggcttgaga

SEQ ID NO: 32555 - DNA, 974 bp, Setaria italica
  misc_feature (963)..(963): n is a, c, g, or t
  Peptide Sequence Number=SeqID_98529
ttgaagctgaagcgttcgcctcgtctggggaaagcttccgttcgcgttccgttcttggtgccactgctgtggtataaaggcggaagctcgagccatcttctgaagaaatccaggcggaagatcgctccgtcgctgcggtttcgcggcgactgtggccggttgccgcatcgcggggctgggttgcggtggaaaggggcggcgtcgtgaggaaatcttgcgctgcaaccaatcgttctgctgccccttgctttctgggcggttgtcggtgctgccttttgtagtaaagggtgggatcttgcggccggcggtggcggcattgccggatcgagcaatcttcgacgacgacctccgtatctgcgtgaccgatctggcgcagttggtcatctcttcgccggcattgtgaggcgggctcgccgggtggtgtggattgctgcggtgagaagagcaaaggagcggagctctgcgctgtgatccaagcgggctcctgctcgccaggtgttcgccgaaaggcccaaggaagcgagccatgagggacttcccgtcctgcttcggcgagagcggcgtccagatcgcggacgcgtcgtcgtcgtcgtccagcgccggcaagggcgcggcgcagaacctggtgacctgcctctaccagacgcagttctcgggccggccctgcgtgatctcggtcacgtggagcaagagcctcatggggcaaggtctcagcatcggcgtcgacgacctgtcgggacactgcctgtgcaaggcggacatcaagccgtggctcttctccaagaagaaggggtccaagtgcctcgacgtcgaggacggcaagatcgagatcttctgggacctgtcgagcgccaagtttggtgccggaccagaaccagtggaggggttctatgttgcagtcgtgttcgaccttgagctcgtgctcttgcttggtgacatgaagaaggatgcttacaggaagtntttactacgaa

SEQ ID NO: 32556 - DNA, 365 bp, Setaria italica
  Peptide Sequence Number=SeqID_98530
cttctgcgcggagggctcgcgccggctgctcgtttacgagtacatgaacaggggctcccttgaccggtcgctgttcggccgcacggggccagtgttggagtggggtgagcgcatggaggtggcgctcggagcggcccgcggcctggcgtacctgcacacggggtgcgaccagaagatcgtgcactgcgatgtgaagccggagaacatcctgctggccgacggcgggcaggtgaagatcgccgacttcggcctcgccaagctgatgtcgccggagcagtcggagctgttcaccaccatgcgcggcacccgcgggtacctcgcgccggagtggctcagcaacgccgccatctcggaccgcgccgacg

SEQ ID NO: 32557 - DNA, 690 bp, Setaria italica
  Peptide Sequence Number=SeqID_98531
ggcagaataggcaatggttaagtatttacagtaagaattcctagtgaaactcaacatcctggggaactattttttatacaaagctggttgaaacttgacagaagcatcgtcaagtctggatcacgttcatgcttcttccaagcctcctcaaactgttgtcccttgcacttctgaagcagtacaagcatttccaggatatgacttcgtatgacctcgcggctgctccttgtcgctgactctttatacaagagagcaagttcatccaccaatcttgaagtatgaggtgatttccgaatccaagtaagcttgatgatggcatgcatttgctccaaaaccagcagaactgtcttatcatcgtcagtatgcatccactggaaaaagagtaagaaaaggcggcgaaaatgagccagtaagaagaggcccatagcatcaaaaactggcccaacaagggtcagccatgcaacacggcgctctttatttagtggttgccgttccaggtggcccaacatctcactaagcattcgatcataccaagagctgcggggattacttcgctgagtgattgttaacaatagcacagatacctcaacaacacgataccataactcatcgtcggcaggaatgttatggcagcatgcatcaagtatggcatcttcatacaaacttaattccgttactttcacattcttt

SEQ ID NO: 32558 - DNA, 502 bp, Setaria italica
  Peptide Sequence Number=SeqID_98532
acaatagtaataacaaagaatagagatatctctctacggtaaccatctattctgaaattgtccctggaagttactaatttattattattttgaaatttgtgcattcatgaatgtcaatagatgtggcatgttcattaatctttcctaggaattcaaatccactcggttcttacttatatccgtaattcatgcttttgtcggattgtaaataaggggtgattggaagcatttataacaaatgatctctttagttctacatttttaggaaattttcttgaggacttgatgtataaatatagttgacacagaccattcttgtgagattagttgccatggtacaaaaaaaatcaaatgcgcattgaacattaaccaaatatgatctacaaaaacatttgttttcaccaaattgatgtaatatgatctttttcacttaaagattgtcaatgtttatgttaagtcgccctagcaggttagtccaatagtaactgcacttagttttgtt

SEQ ID NO: 32559 - DNA, 239 bp, Setaria italica
  Peptide Sequence Number=SeqID_98533
cgcctcgggctccgggagcgggccccgcgcggagacgagggagaagaggtccccgccctcgcagaggtcgagcacgaggtggacggcgtcggcgtcctcgaaggcggcgtggagcgcgacgacgtggcggctggcgggcggcggcgcggacacgaggaggtgcaccttgggctcctgctccgcgagggccaggtccagcgggtccgcctccagctcccgcagcggctccttgggcgtgg

SEQ ID NO: 32560 - DNA, 786 bp, Setaria italica
  Peptide Sequence Number=SeqID_98534
tgcctctgcctgtgccaattgcgaacgcttttgccatgatttgtacacattgtatatgctgcttacattttccacccattggatcagtccagctcgtccactaaccggtgtaacagaatagaaccgtagtgcaatatttcgacttcgagtgtcagaagacgagtacaataagctatttatcgcctccaacaactgcattatccgagaatcaaggcgtagatcctcccggcccttgagaaggtaagtatacctctgaccatctgatccttgcaaaacaagcttcttaggtcttgtctttgttgaaagtatcgtcacctctttgcagaatgacgacacagttacaatgccatggtttccagcaaaagattctgaggaatcaagtatctgcttctcaaaaccaggcattggaatgtcagatgttgacaaaacagctagctgtggagcaatttcacttaacaatatgcatgactttctttgatgcgtggctaaagaagcagcaattgaatcaaaaggctgccaaatctctcctaatgctgttggagatccagggggcgtcttaagggttgtgattgcagatttcagcttagcattaaattccttatggaaccacatctcatgagatgtttttggttcgcgagatgtagatgccagacgacgttccaaggctacaatgattggagtcatcacagcagaatattttgcagcattgatcttgttcttttctgctgaactcagtgtagaatttgcagcaacccttgcagcttcgtctttaagtatattgattta

SEQ ID NO: 32561 - DNA, 601 bp, Setaria italica
  Peptide Sequence Number=SeqID_98535
gaaggacaggtgaaaaatcgctgtcgattactccccttggcagtgacagtgggtactttgttaatataactgttctgaacaacatgcagaagactactgatcgcctttcagtccctatcacaaaagctgagtttgcagtgatgcgcacagcactaagttttgcgttgccacacatcatgggctgggatcaggttttgacgcgccatccagctcctcaagctagcagcaagcctagggtggagcgtccacacccggattctgaatgggaaaggtgaagcttccttgttgcagctagatgatggaggattttgggcatcgctacaaagttgctgctgcaaagtttggagcatcggtgtgcgttgactatatctccttcctgatcgattcagaacagtcttcgttagatttctggaacttaagattgaaggccagatggagcacgatggaccattgtgtgtttgttcagtgcttgtgttaacttcaccatgcctactaagcgcatgtttctagtcgagttagctgttatccctacggtttcctgtgaatgatgtctgtgcttggtgttcatcgattggacgatatggaatttgcgatttatcct

SEQ ID NO: 32562 - DNA, 731 bp, Setaria italica
  Peptide Sequence Number=SeqID_98536
gtctagttgtagtacgtaaacttcgtcttctacttccccctactttcttccggcgctcgctccgctccgctcccctcccctccgccaccgcgaccaccaaggcgacgagacgatgctgcggctctcccgcttcctccagtgaggaagcaggagaggtttgatcctaaagaagctctttggagtggttcgttgacattccaacaagctgtctcaacttcagcagcaaatcttgatgagaactcatctggtaaaaatttgcaagctatactgtgtttaagggaaaggctgcactttctattcatcctatactaccaagtttcagcaaaatggaatctggagcatctcggataaacagaaatggatcagtaatgttgaccttctttcctgctgttggacaaaggaagtatgactatacaaagaaacagcttttttctctgtcacctactgaagttggaagcttgataagtcttgggcctgctgaatcctgtgagtttttccatgatccatccatgaaatcaagtcatgaaggacaggtgaaaaaatcgctgtcgattactccccttggcagtgacagtgggtactttgttaatataactgttctgaacaacatgcagaagactactgatcgcctttcagtccctatcacaaaaacttagtgtcttgttgtcgtctattcttactttgtttctttaaactttttctttttagttttttctttttttttgtttttt

SEQ ID NO: 32563 - DNA, 545 bp, Setaria italica
  Peptide Sequence Number=SeqID_98537
aaccgttaaccgttaaccccgtttaacggaatagacggaccgaacaaagaataaatcgctgcgaattgttgtcatgtgaaccttcctgtgatttgaggatctggcatgtacgatggctcgctaatttccattagaaaatcgccgcaatgcgtaactagatgccgacgcctaattatactcagaggtgtcaccattttttatttgttgctatggtaaacatggtcaggtactcggttctaccaaaaagggttgtagtacgtttccgaatgggagtttgtttggaacagcttgctcaaagtcgtggcatttggtcacagagagtgatcaagtaggtactagcacagtcatgtcccttttggtattgtcgtcgcttccttggaaagcttgtacctctcttctcaaaagattcagcatgtgctgcattcagaggggagattcaaccaaggcatgtacttaatgccccgttgctgcctcgtggctcatatcccagtccacgaagcgcaaatgaatggatgagaggaacattcccaactcaaaatatccgg

SEQ ID NO: 32564 - DNA, 412 bp, Setaria italica
  Peptide Sequence Number=SeqID_98538
gataagccggctccgccaccggaacctcgtccagctcgtcggctggtgccacggccgcgacgagctcctgctcgtctacgagctcgtgcctaaccgcagcctcgacatccatcttcacggcgacggcgacggcaccttcttgacatggccaatgaggctcaatattattcttgggcttgggtccgcactgctctacctccacgaggagtgggagcaatgcgtcgtgcaccgcgacgtcaagccgagcaacgtcatgctggacgtgtccttcaacgccaagctcggcgacttcgggctcgcgaggttcatcgaccacgccgtcggggtgcagacgatgaccgccgtctccggcacgccgggatacgtcgaccccgagagcttgattaccggcaaggcaagcgctgagtccgac

SEQ ID NO: 32565 - DNA, 497 bp, Setaria italica
  Peptide Sequence Number=SeqID_98539
acctgctgagatactgtttcagtctcagcgggcctgtagctgattgaggtatgtgactttcacaaaccatgttgctcttaacaacgggacattatatcgagtgagaacttcaaaaagtgatttcctacggtaaccatgaggaacgtgctcagatagtgaacgcaaacgcttgtttggctgggcaagagcctcagcccattttctgcgtgtgtcctcattacatggcctttgctccgggtaaactccggacttgattaatagagatccagaaagaggaactccgtaaacttggccagcctttctcttttgagcacgagattcgttgatagcccttaaccgcttctttagtgcctccttgcatttaacgacaacatctggcttgcaaaagtgcggaatctggctcagtacaatctctctggcttcctcaattccttcaacagtctccttataccctgcttgcgcatactctttggttaatgtctcttcaggacagtttg

SEQ ID NO: 32566 - DNA, 247 bp, Setaria italica
  misc_feature (217)..(217): n is a, c, g, or t
  misc_feature (236)..(236): n is a, c, g, or t
  Peptide Sequence Number=SeqID_98540
tccccttcgtcgcggagcggcgccacggtctcgagcacggacgcgccgctggtgacgaggtcctcgacgatgaggacggcctggccggcgcggtaggcgccctcgacgcgcttggtgtcgtagcggctgaggagcatgggcacggatgcggcggcggagaggacggcggcgaaggggacgcggtgtaggggacgccgcagaggaggtcgtaggggcncgtggcggggacgagggancggaggaggga

SEQ ID NO: 32567 - DNA, 344 bp, Setaria italica
  Peptide Sequence Number=SeqID_98541
gatttgcaccttctccatccacttgtccttctggatgagcagcaggtggatcagcgccgactggtcgtcggcctcgaacggcggccggccggacaggctcgcagtcagcagcttcccggcctcgacgcgggacgggcctctcgggcccatgggcacccatgcgtcgagcaggtccagcgaccactggcagttgcggagcaggaagatgccggcgttgagggagatccaggagcgcttctcgaagaggaggtccgggtagccgtggacgacgaggttgcggccctcgtagcgggagaacgggagctcgaaggccatgtcggtgaagatggcgtcgctgtccatcc

SEQ ID NO: 32568 - DNA, 471 bp, Setaria italica
  Peptide Sequence Number=SeqID_98542
gcatccagtgttcctgactaagcaaagcggataaatgcaacggaaagtatcacaaagaatcctcgttcctgtggcgacattgcccgagcctgctgcttcatcagagtcatgacatctgcacagaccgtcctgacccgcgagtcgcagtgagcagaggggaccttcaccttcttaacatcgacaccgacgacaacgccgcccttctcgaggggacccaggttctgacacgccacctggagccacgcgccgggagcacagccgaggtcgagcacggctgctccgggggtgatgagcctgtgctgcttctgcatctggatcagcttaagtgcggagcgggcgacatagcccagccgctgcgactcacggtagaagaagtcggcggtcgccccccgcggcgctcatggcgacctcgtccgacggcgaaggcgacggaggggggattgctagggtttttagcccgttcgtctttcc

SEQ ID NO: 32569 - DNA, 470 bp, Setaria italica
  Peptide Sequence Number=SeqID_98543
ccccgttccacgcgttgatggccgccgccgccgccgccgtgccctccccgagcgggcccgtcaggtagctaatcaggttcgccgacacgccatagaacgcgaaccgctccgcgatctccaccgctatgatgaagagcgccgacctccagccgccggtggtgccgcgctcggcggggaggccgcggtggtcaacagccgcatccggtagcatgccgtcggcgcgggcgagcaggggttccgaaccggaaggcatcttcgccggaggacgggggccgggctttatacggtcgtcgatcgcctcgaggagtcgtggtaacggccggagaagctggatacgaggtagctcgatgatcgatctagtagcccgcgcagccgagaaacggcaggcgcgagctggcgctcaacctggacgacgggtgggaactggataccggatagccgcctcggcagcggcggcgggcaaagctttg

SEQ ID NO: 32570 - DNA, 493 bp, Setaria italica
  Peptide Sequence Number=SeqID_98544
cccaacaatgatagctttacttcctgagcataatgataccaagagacgactcattggacctctcttagaaatgcaggatttgaatctaaagccttcttagctaaattacgcgtatcttctctcggggactctcttgatatgcgaagcagctccttgattccaccagaagcaatgatgtcacaggtgttgtcttcgttctgagctagatggcaaaaggcaagctcaatgtgtcttcgggttgaagcggaaaacctagttgaattggccaccatccaagtaaaacaccgtcttcaatgagaagggaccttcctttcctgtgaccttggcttatcacccgagattcacatttgcaaagttgctattcctcgtgctatctgggctatgacatcggcgtgtccactgcgaaacattcctagtagtgcttttattccaccatcttgtttcaacatcaagtgcaacttttcatttccacataaattggcgatcgcaccag

SEQ ID NO: 32571 - DNA, 319 bp, Setaria italica
  Peptide Sequence Number=SeqID_98545
cgctctggtgttgaggaaatattgccacttgggccattgaatgagttcgaaaggtctgcaccctctacttttgaaacttgaagtattcctgttcccggcatgcatttaggatagatattctctatcagtcaacaccaggggcaggcaactgcctcagcgaatttactttgtctgaaatttgtgttcatattactctttgtgaatcatgattggacccttcatatggtagtagatactgacaataagccagtttcatgagttcttttctgctggacatggacctatggctcacagtcagtaacactgtcatatactagaa

SEQ ID NO: 32572 - DNA, 904 bp, Setaria italica
  misc_feature (860)..(904): n is a, c, g, or t
  Peptide Sequence Number=SeqID_98546
taccttgggagaggcggcgggagtggtcatcgagatggatggggcgaagcagaagccgcggccgggcggcggcggcacttcgagcgcggcgccgccgttgggggccgaccccaaggccttggcctccttcaagcaggcgcaggctctagctggtggacccctggtgcaagcacgaaactttgcagtgatgactggtgcgaatgcgggtatatcctgtgttatgagaaggataagaggaaaggaggatgtccagggcagcatggcagcagcttttggttctggggctctattttccatcgtgagtggaatgggaacaccaaatccagtaactaatgcaattacaactggtgttgcatttgctgtatttcaaggtggttttttcatgatcggtcaaaagttttcgcagccacagagtgaagatacatactattctcgtggaagaagcatgttgcaaacattaggccttcagaactacgagaagaatttcaagaagggtctcctgactgatcaaaccttgcccctccttactgacagtgcactcagagatgtgaagatccctcctggtcccagactcctcatcctcgatcacattaaaagagatcctgaattgacaagagcaaactaaaatgatcggcaccctatgtcagggccacctttttctcttcagagttgcagaattgaggtttttgtggggaacaatttaacttttcggggatgagctttaggcagcagtatatttggttgtactactagtatatgttttgtagtcatcagactatgatcaatttgcatgcttcgatgtgtattgaagtgaaatttctacgaatcaatctgttctcttgaaaatttggaatggaacnnnnnnnnnnnnnnnnnnnnnnnnnnnnnnnnnnnnnnnnnnnnn

SEQ ID NO: 32573 - DNA, 676 bp, Setaria italica
  Peptide Sequence Number=SeqID_98547
agaaaacccttggtaccagtatcttggtaagtggaaaataacatgcagtactgtggcctcaattttgcacaaactacaagtaatttgaatgggagccatgttcccattggcttggttctgctcctgatgagcaccaaacagtggagtaggccaattatcacaatacctgggtttcttttgccacttgtgccacaatacctagggtttatgcaatttattcttatttggatcatttaacttcttcctcggcaacaaagaaaagtcaatctttggggcaaaaattggtgacgttcttattgaaattacatgttttttcatgccagtgcactcagagatgtgaagatccctcctggtcccagactcctcatcctcgatcacattaaaagagatcctgaattgacaagagcaaactaaaatgatcggcaccctatgtcagggccacctttttctcttcagagttgcagaattgaggtttttgtggggaacaatttaacttttcggggatgagctttaggcagcagtatatttggttgtactactagtatatgttttgtagtcatcagactatgatcaatttgcatgcttcgatgtgtattgaagtgaaatttctacgaatcaatctgttctcttagaaaatttaggaaataggacaagaaatttaaggtaaaaaaaaaaa

SEQ ID NO: 32574 - DNA, 203 bp, Setaria italica
  misc_feature (174)..(174): n is a, c, g, or t
  misc_feature (182)..(203): n is a, c, g, or t
  Peptide Sequence Number=SeqID_98548
tagtagcagatgtgtgagggatatcttatgcatgatgttttctctttaaggagcttgtattgtgggtttgcaacgccttcttttccttctcctgtaatgtcgagccaaagttggaaactacctaagaaatgaaacttcctactttttgcgaaccttaaaaaaaaaaaaaaaaanaaaaaaannnnnnnnnnnnnnnnnnnnnn

SEQ ID NO: 32575 - DNA, 196 bp, Setaria italica
  Peptide Sequence Number=SeqID_98549
tttgaattaaaaatgccaaatactagggacatcggatatggttcagcaccaacattttccttctcatctattgacaaaccttgagaacatcggatctgacggtctatcacatgtaataaccttgtaactgtatccttaggaacctcatgcaatatccttttggatcgaacagatgtaattcattgacaagaacctt

SEQ ID NO: 32576 - DNA, 462 bp, Setaria italica
  misc_feature (462)..(462): n is a, c, g, or t
  Peptide Sequence Number=SeqID_98550
tcctaattaacattcatcatgccacaaatcacagaataatagaagggtgatgatgagcacaaacaaaactggagtggaaggatgcagagatcacgggttaccaaggtagtcaaaatagctgacctgaactctgccaagcaaagaacaggagaagattaacaaataatttagcatataaagcacgaatgtacatataagataggatagtagactgaccccacagattcacaaagacagatgagacctttgaaggcccagacacaaagataagtcagtttaggtataccagtctgacatcaacgagagcttcctgtcttgatacagccacagctttaagctgcagacgtgtcacataatgtttaaagtgagttaagtaaactctctacttggaaacagaaaatcttcaggaccaggtctaacagaacaaatatcctattcccaaacaatggctagatctagttn

SEQ ID NO: 32577 - DNA, 944 bp, Setaria italica
  Peptide Sequence Number=SeqID_98551
gcagagatcacgggttaccaaggtagtcaaaatagctgacctgaactcccacagattcacaaagacagatgagacctttgaaggcccagacacaaagataagtcagtttaggtataccagtctgacatcaacgagagcttcctgtcttgatacagccacagctttaagcttacaagttgcaataagagtgcaccaatttccttgcaaaatcaaaaggcacccttccgatcacttcgttcaactcttgcaaacaaaatggaaagatcaaaagaaattgaactacttgaatagagcaaaaattaaataggatctcattaatatctcattgattactgattacaaggaaacaattgataatactttacaaagaagtttcaaaggtgaaactggtgcacccaataggccagacctatagatgaaactgaaactcaagtgaactggatctgtggcaattataatgatggtggattagaatgtgaccagatttctgtgagagagctaaccctgccatttgaacaatagctgcatggaacttaaggaaatatcttattcccccttgaaactgtgcctgctatagaacagaatcaactttcacacacaccaagtagactggttacttcatgtccagtgagacctcaccttggaacatgtttactcacaattattcacagtgaaaactggttttctgcagcaagccaaaatctggtgtcagatcagccaaaaaggccacgatctcctgtgctcccttgttctttcatctgttgctccaccaggggatcagggctcttcttgtatttcttgatcctcctgtcttgttcattcagagcaggaaatgttggcatgaaatcctttgttttgggcagaggaacctcacggaaccactcatggttcaaggcatcgtctgcagatatgcgcttctcagggtcatatgtcagcaacctgtt

SEQ ID NO: 32578 - DNA, 1199 bp, Setaria italica
  Peptide Sequence Number=SeqID_98552
taagaagggtagaatgatgagcacaaacaaaactggagtggaaggatgcagagatcacgggttaccaaggtagtcaaaatagctgacctgaactcccacagattcacaaagacagatgagacctttgaaggcccagacacaaagataagtcagtttaggtataccagtctgacatcaacgagagcttcctgtcttgatacagccacagctttaagctgcagacgtgtcacataatgtttaaagtgagttaagtaaactctctacttggaaacagaaaatcttcaggaccaggtctaacagaacaaatatcctattcccaaacaatggctagatctagtttgacaaattcaagcaaagatgccaaccacatatgcagtagcgtctcacaagagatggcttaagctgaagcaataataggttacaatagataaactcgctgaaacgaagatattagcacatgtgcaaggattatcaggccaagatacaatgttaagaagaactcagcgtcttcaattatccagcacctaagaaactgagaaggcttatctaacaccaaatgcatagctgaaaatcacagcatggaccatcactaagaaaaattctgcaaatttttattgtaatagtgtagataaacttttagaactgaacattagaaaactatggcatatttagaagaatgttccaagtcaaaaaatataaaacaaagaatgtctgttttttttaggagccagtagctccaaacatcgtagttacatcactgtgtgttcaacaaagcaaccaacaaaagatatagatctatgtttccacattctgaagccatttaggctactgcataaggctgaaggaactcatacattttaaaccaaggttctccattgccattcccagacaatgctacatacatagaaatctttctacagtgatccaaactgtctgatgtcattattaatttgtgaaacaggaaattcccctctaagctaaacatttgcacccttgaaaatgaagaacctaacaggaaattcccctctaaggtaaacagttacatgaccaggcgcgccaggaaccaagctaacaacttaaaagcagtaccagaggacatcatagcagtcattaatcattactctattcagtacaaagcagtcttcaataaaattaaaataggaaatgaaagaggcagatccatcgcatttattacacaa

SEQ ID NO: 32579 - DNA, 4780 bp, Setaria italica
  misc_feature (1)..(25): n is a, c, g, or t
  Peptide Sequence Number=SeqID_98553
nnnnnnnnnnnnnnnnnnnnnnnnnttttagaacataaattatatttagataaattatatttagatgcatctagagaaaccaaaacgccttacaaccatcgtggtttgaaaatctttacacagcattaatcataataattagctcgaccagaaatatctacacagatctctccgccaaggtttattcctagacaaatccaagagaggctaataaactccagcatctgttaaaccaagctcgacccgtcggatggatgtatcatgaggttcctgggtcagcgcacaaaggacttgcctctccagactctgatcgttggcttttaagcatttgcactcccacaaaacaaatgagcaacatacaagggttaaaacaagttcatgagccacaaataataccaaaacgagaacaattcgcttaagacagaatttattaagctcccacaggagtagtattcaaagaaatacaacaaaacctttagaaatcacgtcttctgttaggaaaatttttaagacttaagcacaaatcataatacagttgaaagtatacttaaaggacatacaaggggacgaacttaaggacaacatgaggactaggttgaattaccagatgatgatatgccaccatgatataggagtggcctttaacaatttaatgaacagcttacatctcatggtaagtatcttttcaataaatcaaatataagattctaaattgaaatagtgattagtaatcaacgtagctatctattattagccctctctgccagtccttgatctgacctgaatgtgccttctccatgtgtggtaaggaaatggagatggcaattggccaccatggaacattggagatctataccatttatttgaagttttaaacaagcttgatggacacaatggactgccacaaataaagcttcttaaacattctgcggttcagacattagatcttgctaattacattataattcccaacaactacaaatgcacttaataataattgcaactgcaatgcactgaaccattaacgatagaaaaatggtagtatcacagagtcctaagttttcaggcaaccgagaagttgggtttcaggcaaacatgatctcacagaacatcacaaaagctagtaacagagacattggtaacttgttataatcattaccacaattatataggagtatcatctttgttggtgcttatcgaattttatctccactttactccaacctgcttgagactaataagctttgttgtttttttactgtcattattgttgccggcagaagaaactcaaagttggttgtcatgttcatgcatacgggaagtaattttttttcagtcctggatctagtttatcctgtgtaccaagtagaactaccaggacaaaaatttagatgtcaccaactcacaacgcaagattcagccacagtaagcaattacgcaagggcagcagattatttaacaaaccccgataaagaaacagaaaaattaggatggtatatcaagagtaacaaagacctgtacattttcaacaatggcatgcagctcactaaggtcagtaaaaaacattcatgtacttcacaggctattcaattatagcattgactcaactgagaaacattaacaacgcactagccaaaaaaaacaagacagtgatcatgcattagtagcaaatatacctatacaacagtaaacccacattaggaaggtcaaacaaccttgcaagagaaaatcttaagcaatcaacattccacttcagaatcaacctaggaaagtaaaacattaccctacaactggaaaagttatttatgatcaaaatgtaaggcaaaaacatatttctccttttttgaactacctccataactattccaagcaataataagaatagaagcatgactgaaaaccgtggacaagtgcaaagtgttgagatggtgagcatagtcttaatgcagagtgtgtccttggctccttgcgaataaaagtaccaaaccaataacattcatcatgccacaaatcacagaataatagaagggtgatgatgagcacaaacaaaactggagtggaaggatgcagagatcacgggttaccaaggtagtcaaaatagctgacctgaactcccacagattcacaaagacagatgagacctttgaaggcccagacacaaagataagtcagtttaggtataccagtctgacatcaacgagagcttcctgtcttgatacagccacagctttaagcttacaagttgcaataagagtgcaccaatttccttgcaaaatcaaaaggcacccttccgatcacttcgttcaactcttggaacatgtttactcacaattattcacagtgaaaactggttttctgcagcaagccaaaatctggtgtcagatcagccaaaaaggccacgatctcctgtgctcccttgttctttcatctgttgctccaccaggggatcagggctcttcttgtatttcttgatcctcctgtcttgttcattcagagcaggaaatgttggcatgaaatcctttgttttgggcagaggaacctcacggaaccactcatggttcaaggcatcgtctgcagatatgcgcttctcagggtcatatgtcagcaacctagttagcaggtcaaatccagcttctgacaatgtcagccctcccgtgaaggatacaggtggaaacctctccctcaatctattgtacggttgctttacaaatttgcctttggcaccgggcaatttggaataaccaggccatcgctcctcattgggtgtgccaagtattctaaatatcttatcaagttgacctatctcatttttcccagtgaagagtggctcttttgacaagagttctgccattatgcaacccaatgaccacatatcaatagcagtagaatactcctttgctcctaaaagtagttctggagccctgtaccacaaagttacaactggttgagtgtaaggctttagcgggctgccatattgacgggagagtccaaaatcacatattttcacctcaccacggttattcaagaggatatttgatgtcttgagatccctgtgaagtacccaattgtcatgaagatacttcacaccctctagcagctgaagcatcaaacatttgacctcactttgggtatatggttgcttcatcgtctccatgacacccttcaggtcatgctccatgtactccatcaccatgaaagtatcatcatcatgaccaccaacaactacttccttgacatccacaattgatgggtggtcaaaagataaaaggatatttatttccctaagagaagtcaatggaaaaccttcccgttccttatccatctttaccttcttcaatgcaacaatctcaccagttttcttgtccctcaccctaaatacaactccatatgtaccctcattgattgtgttgagcctctcgaactcatcaatactcctacagctctgaagcatgttaaagcacctgcgtggcggctgtacagcctcaggtgttctagacctgcgtgcatcactcccagaatcaacatccagtgaacaaccagcagaagcatcaataccatcctcctcaacatccatgcggtcacccccatcaacctcaatattccagttttcactacagacagagttagacgaacatgaggaactccctcttgttttaacccgcagcgcttctccaagctctgggcttgtaactttctttgtagatctcagcgcagacaagttaccaggagacacacttctcttctttttgggcacagtcgcctcttcctcgtcctgatcagcgtctgcccatcttgaagtcaaaatgtttctcgttgttgggcagtcctcttccccctccataaccccattcttctcatgttcatgagaccattcggcctcatgtgtaaccactgaaacacccaaattcattgttgggcacctaccaaccacgtctataggactctcatctgataaaggaggcggcgaaggcagagggagctccgccactgaggtgtctatccctctcctgctcctgaaaccatctattgcctgcagctcagaaacattctcatccgggattacaggtgagtgcttcctcttcttacttggtagcaccgcactgccgtctttgcagactcccagaacaccatcctccctcggcgccctggccttcagtgggcgcccaccggactcctccgagccgctgccgctcgagacctcgccaggctccctatcctcctcccttcttgacggtcggctcctcggtggcggatacggcgagtggtggcggcggtgccggttggaaacctcgcggcccccgctgcggccagcgtcacggcgacggtcagagtcacggtcgcggctcgggtggcggtggtggtggtggtgatactccttgctccttctggagcgctccaggtcgagctcccgccccctcgccacttcgtggctcctgtagcctgcgtgtcgcgccgcggccatgggcgcaggcgcaagcagggatccctcagaaccgagcgaatcaagtggatcgccaaaattgacggcgaaattggcagccgaaccctagatccccgaactacaaccgcgaaccctagaaaaaaaattcgggcgcgctagggtagaattggcggtaggacaagacctcacaacgatcagatcggagaattgggagaaccggggctcggatttgagcgattttgcctgcgccgcgcgaaagctttatcggaaaggcggcgacgcgcggacgcggagaggaatcaggtgggttggacttggggcgatggaggcggctcggtg

SEQ ID NO: 32580 - DNA, 476 bp, Setaria italica
  Peptide Sequence Number=SeqID_98554
gtgataggaacctgaagaattgtccaagtacgccaattattttgaagaaagaaaagagaggaagttgtgctcttgaagaaagcacaataggagcatgtcagcagttgggcagctcatcagatgatttgtcagaggatgaacggaatatcaacccagatatagatggagcatatctgttcgatgaccatctagacagtttcagaaggaaactcaaacctaaagtactgaaggagctgaactacaacattaaaacaacagagagcctaagcggtgcttagtttgctataagaaacttgcttttgctggcatggtcctcgtgcaaacccacaacatctttaaacttctcaactagctcctccagaccagcaactccaaagccctcatagtcaatggtcttcttgtaccgttgctcatatagattctcgaatttaccaagtggaacagggcaggagtagcaaacagaagctcttgaatct

SEQ ID NO: 32581 - DNA, 701 bp, Setaria italica
  Peptide Sequence Number=SeqID_98555
tttttttttttttttttttgttaagtaacatggagattaaattggaatttgatgtatttgccaagtaactaacaaatggttactgttgtttcaaaggcctccttttcatagaagaaacaactctccatttgcacaggttacctgaacaggaagctattacatatacctgctatgccacccacacttatcccaccgacatgttaaaaagtaaatgccggccccgtgactcacacaccaaggaaactcaaacctaaagtactgaaggagctgaactacaacattaaaacaacagagagcctaagcggtgcttagtttgctataagaaacttgcttttgctggcatggtcctcgtgcaaacccacaacatctttaaacttctcaactagctcctccagaccagcaactccaaagccctcatagtcaatggtcttcttgtaccgttgctcatatagattctcgaatttaccaagtggaacagggcaggagtagcaaacaagaagctcttgaatctcccttctgaaactgtctagatggtcatcgaacagatatgctccatctatatctgggttgatattccgttcatcctctgacaaatcatctgatgagctgcccaactgctgacatgctcctattgtgctttcttcaagagcacaacttcctctcttttctttcttcaaaataattggcgtacttggacaatt

SEQ ID NO: 32582 - DNA, 404 bp, Setaria italica
  Peptide Sequence Number=SeqID_98556
gcggagcagatgctctgatctgtctgtttgttcttcgatcgagtctgggatacttgaaagttggaaggaggaaggggaggcaaagcgaaagagcccatctttttgtagtcttttcggttcggtttcctggttgcttcttttggatcccgcggaggagcccaccgtttctacaaaaacccaatctttgctgacttctccgcggccgagatcgataggtttccatatctaagagccctcctctggctgagagatcgcgggcgcagcaatccggcgcgcagctactagggaaaatatccaagaaaagatttcgcgggtgcgacggggcaggaagaagatattggagaacaggagtgtaaagaaatggtcttcgtgacgaagtgggcgatggggcggtggcggagatg

SEQ ID NO: 32583 - DNA, 464 bp, Setaria italica
  Peptide Sequence Number=SeqID_98557
aactttcaggagaccactccttagttctgatccagcaattactgtacatcaatacagccaactgataggttcatcatttttgcatctgatggactctgggagcatcttagtaatcaggaagcagttgacatggttcagagtagccctcgaaatgtatgtattcttatcttatgtttatttttctgtaacttggttcttttgaggcacagtgctagttgtttttttgtttatctgatcaaaattacaagaatacacttttgtagtagtttaatcatgctttgactgatgtttctgttgaggtagatggatgtaccttgttgcctttgaaattcgagagtataatatctgtaattttttatgtttttagaagcatctgatctaagtttctaaagatgtaatgagtaactttctacaataagtgtagtagatttagccatggtatgaaggcacctagattgttgttt

SEQ ID NO: 32584 - DNA, 2253 bp, Setaria italica
  Peptide Sequence Number=SeqID_98558
tagaatccggtagtctgagcgctgccttgccggccctgcctccgctccttctctccctctcgtccctcttccctggtttagttggttgcgtctcctgtagtttttgttctctctcgctctgcttctgctcttcatatatctatatggagcggagcagatgctctgatctttctgtttgttcttcgatcgagtctgggatacttgaaagttggaaggaggaaggggaggcaaagcgaaagagcccatctttttgtagtcttttcggttcggtttcctggttgcttcttttggattccactgcgggtaggagtctgccgtttctacaaaaacccagtctttcctgccttgctccgcggccgagatcgataggtttccagatctaagaccccctcctctggccgagagatcgcgcagctactaggggaaacacccaagaaaagatttttgtggggtgacggagcaggaagaagaaggtattggagaacaggagtgtacagaaatggtcttcgtgacgaagtgggcgatggggcactggcggagataagggatgctatcggctgtgatggagtacttgagatcttgctggggacctgcatcgccggccgggcgctcccgaagaggatcggacgccgccggccgccaggacgggctcctgtggtacaaggacggcgggcgggtcgtcgacggtgagttctccatggccgtggtccaggccaacaacctgctggaggaccatagccaggtggaatccgggccgctgagcgcaacggagcccgacctccaaggcaccttcgtcggcgtctatgatgggcatggtggcccggagacggcacggtacatcaatgatcatctcttcaaccacctgaggagatttgcatctgagcacaagtgcatgtcagcggatgtgattcggaaggctttccgagcgactgaggaggggttcatttctttagttagtagccaatggtcattgagacctcaattagcagcggttggctcttgctgtctagttggcgtggtttgcagtggaactctatatgttgcaagccttggagattcccgtgctgttcttgggagacttgtcaagggaactggagaggttttggcaatgcagctctcagcggaacacaatgcatcctatgaggaggttagacgagagctgcaggcatcacatcctgatgatccccatattgtggtcctaaagcacaacgtttggcgtgttaagggtatcatccagataacaaggtcaattggagatgtatatctgaagaaaccagagttcaatagagaacctttgcacaacaagtttcgcatccagggaactttcaggagaccactccttagttctgatccagcaattactgtacatcaaatacagccaactgataggttcatcatttttgcatctgatggactctgggagcatcttagtaatcaggaagcagttgacatggttcagagtagccctcgaaatggaatcgctcgaagattagtaaaggccgcaatgcaggaagctgcgaagaagagggagatgaggtattcagacctcaagaaaattgaccgtggggtgaggcgacacttccacgatgatataactgtcatcgtggtcttttttgattcaaatgccatgacaactgctgcctggagcagaccctcggtctctctccgagggggtggtgttccaatcccttcgaacacccttgctctgttgtcagttcccacagagctaaacagctcttactgaaaccatactggaggtgaaggggccaggcaagaagattgaaagaaagtaaaggaaaaggtaaaagaaaaagaaagaaagaaagcagcagttgtgatcagctgtagtgtattttggtatgcgttcttgtaaaaccttcttttagattctcaacctggtgactaagtactgatagcaaggtataagattagattatacaaagcaaatgtatgtattcttatcttatgttatttttctgtaacttggttcttttgaggcacagtgctagttgttttttgtttatctgatcaaaattacaagaatacacttttgtagtagtttaatcatgctttgactgatgtttctgttgaggtagatggatgtaccttgttgcctttgaaattcgagagtataatatctgtaattttttatgtttttagaagcatctgatctaagtttctaaagatgtaatgagtaactttctacaataagtgtagtagatttagccatggtatgaaggcacctagattgtt

SEQ ID NO: 32585 - DNA, 560 bp, Setaria italica
  Peptide Sequence Number=SeqID_98559
gtttaagcaccagttagaagctgttgccaaagtaaacatagttaggactgaagcttagacattggtttgtttggtaccatgagatgtgtagcaactacttgtgcagaacatgaagtaaacagaagtgcccaagatcctttggctttgtaatcaaggaaaaaaagggggggaaaactagagaatggaaccacgagcaaaaacatacagtgtcacgcaaatcaacttctcgcaagtaagctcgctgaagatttgcaccttgcaagtttgttccagacaacttagcaccctgaaaatcagaacgagcttcacatgtggttctgattgatataaggttaggcaccagaaaatggctggtgttaatattcaatagtctgggcaagactgcaggtttcagtaaaattatatatattcaattgcatcacagcttaacaaggatcaatacagttttgcttatgcaaattgtcatatacttggatatggcgggaaagatatgtttatgtcagaattactatcagttgatatgactagtatgcatgccctctagttctaagaattcatca

SEQ ID NO: 32586 - DNA, 1309 bp, Setaria italica
  Peptide Sequence Number=SeqID_98560
tccccacgtggattggagtggacccgtaaaaaaatatccttcaatccacaagaggaatggttcatccaaacttgccctcaatggttgctagatctcagaccatagggcagtgtacagctaaaagcggatacaacaaataaacattgatcaaatcgttttcttttgatgtgcctgtgtcctaaatttccaccagcaaagacccgaacagcaggctccatcctgctgcacgcaagctaccgcctccaataaaattatacagtatacacaatatgaagctgcacagtcgactgtagatggtcttctcttgttgcatcacctgatagctccaagtagatttgcacccccaagtttagcaccagttagaagagtgtcacgcaaatcaacttctcgcaagtaagctcgctgaagatttgcaccttgcaagtttgttccagacaacttagcacccttgagattggctgcttcaaggttagctccactcaagttggcagacgtaagattagcggtctgtaaatgggcagaatgaagatctgtttcaatgaagctacaacgtgttaagcatgcatcttgcaggttcgcacttcgaaggtttgctccatccagaatagaatcttgaaggtttgctccaacaaactcacactcacgcaaaattgcgttttggaaagatgaagatgaagcttccacctgcccgaactttgctttgtaaaggttagcacatgaaaaatcagtgttcttaatgcatgcataactgaagtccacctctgacaagtcaagcttagacagatcaaggccagatagattcacaccacggaacctgactctctgagcctggatgcattttatcacgtccttccgtgtcaattcagcctctgaactgtcgactttcttccaaccgagcctctcatttatgtaatcagctaggccaagcaactggtagtactctgcctcgcgcagcagctgttggtactcggactcagacagcacgggaatggcaccgtccctgagccagttgagtacgtgccggaaatgcttaccgtccctgtccacgaacaccgtccccgtggtggggtggtgcgggagcgtgtgccggccgctgaacatggcggcgagcatggaatcgggctcccgctgcgtcagcgtctccaccgtcgttgcgtacttcttgccccctatgttgaggaggacagaggaggaggaggaggactccggcgactgcatcgccgcgtaccctggtttcggcaccggtggcgtggaaggcggaaagcgtcggattgcggaggggggatcggggattctggttggggcgttt

SEQ ID NO: 32587 - DNA, 192 bp, Setaria italica
  Peptide Sequence Number=SeqID_98561
atggatctgtatgtgtttgcaactccatacaggatagcctgggattactatatgagatcaaatgaaaatcacacctttgagattaaggcatgggaggaagcagcagaactggaatatgtaaagcagcatggcattgccgtctttctcatgccatctggaatgcgttgggacgttgttatccttgattgatgt

SEQ ID NO: 32588 - DNA, 312 bp, Setaria italica
  Peptide Sequence Number=SeqID_98562
ccaccaccacgtcctccgcagccgccgccaactttccccacttcaccgagagaacgcaagcagcaatggcgactccaccgccaccgatcctcctgtgtctcctcctcctcgtcgcctccccctttctcccacgtgccgcagccgcggcgggtcccgcgccgctgtcctcctcctctttcgacgccgggctggcgaagctccaggcgcggatcggctacgccttccgcgcgccggacctcctccgccgcgccatgacgcacgcctcctactcccgcgagaacggccgcgcgctcgccgtcctgggcctcgccg

SEQ ID NO: 32589 - DNA, 755 bp, Setaria italica
  Peptide Sequence Number=SeqID_98563
tttttttttttttttttttaagctagaatccgtcaaacattttgcttattttcgcttacgtggtaagctgtttcagaagtttgaactgcgagaagcgaaaaaatcttcacttagattataatctaagcgtggctgggaaaagcttatccaaacatgtccatgctatgcatagtatccggcaaattgcaggggaatcttaatcggacaacaagtagagtgagtggttcattgctaacagggaaggaatgctgccgccaggcaggaggagatgtcactctgattagtctgccgtggagggcggtggctggtcgccgtcggcctgcgactggagcggcgggaggagctgcgacttgcggcgggtgtcgcggggtgggagcgggatggcgacgaagtgcttggtcttggagatggggcgggagctgcggagctccacgacgtcgccgaccttgaactggttctccgggtcgtgcgcctggtacttcttcttgatgcgctcccgccgcttgtacttggggtgcggcgccaggcgcaccacctccacgcccaccgtcttgtccgccttggtcgtcaccacccgccccgtcagctgcttcgccgcctcgatccggaggagccccaccggccggcacccctgcggctgctgcggtgagggcgagacccgcagcggcggcggggagacgacgaagggggagctcagcagcattctctctctccttgtcaatcaccgggaagcggagaggggaggtataggtagt

SEQ ID NO: 32590 - DNA, 571 bp, Setaria italica
  Peptide Sequence Number=SeqID_98564
actccttgctgagagcggtggcgaagcgcaccatctgcgtgctgacgccggcgtcggcgctggcgacaagcacgcactgcacggtgctcatgctctggcgcagcacgacgaaggccatcttcttgctgaccgggcggatagcctgcgtagccccacggataagcacggagcggcccgcggcggcggcgtcgaggtcgccgatcttggtccacgagcggccggagatggccttggactggatctcctcgacggggacatcgccgtagttggccgcgaaggggtcctcggcgtcggccggctgctgctgctgctgctggcgctgcgccgccttctcggccttctccgccttcctcgcgtccttcttcagctgctttttgctgagggtggcggcggagaggtcggtcgcgagttcatccgcgggggaggcggaggcggcggtgggtggaggctccgacgacatcgtggcggatgggggaagcaaacgtggctccgtgcgagatggtcgccggcggcggatgctacgcgcttgacaccggagcagtaggtaggggtttagggttaagtttaacgt

SEQ ID NO: 32591 - DNA, 1685 bp, Setaria italica
  Peptide Sequence Number=SeqID_98565
tttttttttttttggagtagaaagctcgtatcattgtcaggtctccaacaatccagtacatacaagcatctttgtgaatttaacagaaaaaaaactatagaccgcattaacattgtatcagttatcgtttcttggtctcggtagcagaagatcagcggctggtgaggatggcaacagcatggcaaacgatcctatgatgcttcatgacagaccacatccttgcctttgttgggagaagaaattatgggacaagcctctgcgggtcacgtgggaacatcgaagtcttcctgatgttgtttagggcgcagaacagcatcaccactctctccaggccaaccccgaaaccaccatgaggaggtgcaccgtagctgaacgattcaatatacgccgagatggtgctcacatcaatgccgcactctgtagcgcgcttggccaacagctcaggtgtgtgtatcctttgtgctccagaaattatttcctcgcctcgaatgaacacatcgaaagaattggtgtaagctgggttgtcataacaaggcatagtgtagaacggacgcacagccaaaggataacgatacagaatgaaaaaatctgtgccatacttttccttaacaagccgaccaagttttttctcagcttcagtattgaggtcacccattggctcaatttctgttccagcttccttcaacatttgaattccttcctcataagtgagcttcaaggttttctctagatactgcagaggttcaaatggatactgcctatttattgtctcaagttccttcttgcagttttcagtcaagtgcttaaatattgacacgaataagccatctataatatcacaaacctcaaaatagtgctccttaatctccatttcagcatcaagaccaacaaactcacagagatgtctgtgtgtgtttgaattttctgctctaaacacaggaccaacctcaaatacacgttcatacccaccacagatagccatttgcttgtacaactgaggagattgtgccaaacaagcaggctggccattgtacagaagcttgaatacagctgcacctccttcactagatccagaaatcagttttggggtgtggatcccaacaaagtctttcgacaacaaaaattctctgaatttgttttcgacttggcactggatccggaatattgcttgatttgcgggtgtccgaagatcaatagctctgtagttcaagcgggtatcttgaccaacacgaacaagcttctctccagcctgttcagccttctcaaactccgcctcactccgagccgcatcttcaaggttaattggaagggtcgggatagccctattgatgcaatatatcttccttacttgaatctcaacctgctgtgttgtggccttgaggggctccttggggaggggaaacgacaccctcaacgtcgacgatggactccttgctgagagcggtggcgaagcgcaccatctgcgtgctgacgccggcgtcggcgctggcgacaagcacgcactgcacggtgctcatgctctggcgcagcacgacgaaggccatcttcttgctgaccgggcggatagcctgcgtagccccacggataagcacggagcggcccgcggcggcggcgtcgaggagacgggttaattactttaagtaaacctaaaactaaacgtaaaactaaaagtaactttaacttaa

SEQ ID NO: 32592 - DNA, 489 bp, Setaria italica
  Peptide Sequence Number=SeqID_98566
cgccaaaccctacgactacggccactgacttcccgcgcgcgccccccatcgtccctgctcgttcccattcccccatccctccctgcggcggacccagccgaagcaggcccaacgtccagcggcggcggcaccaccggcgaagtccgaggaggcagatcggcctactccgatggcgtcgtggcacgacggcttggcggcgccgccgcgcgtcctcatttccccacgtccttctgatgccagcgctcaaggaaatgttctgtcacttcgccatccaagatcaggagatgaaacagggtatctgtttatcgatggtcaacttcaagaaatcaattggtttaaggagcgttacggtgcttggttcttgggcgactatgtttgcgaagatggtggcctctattattgcacccctgttgatcctatcttcatttcctaccaactttcgaagctgcacgtatgtcgaacgggaggatccaggaaaattcagacaac

SEQ ID NO: 32593 - DNA, 1387 bp, Setaria italica
  Peptide Sequence Number=SeqID_98567
cgtcgctcctcaccgtcctgttcttccagcggcggcgcgaggggcgaatccgaacccacctccatggcttggggcaagatccagaagaagcgccacggcgcggcggggggcgctggaggagggggcggccggctgcagggcgggatcccgttcgagaagtccaaggggcagcacatcctgcggaaccccgcgctggtggactccatcgtcgccaaggccgggctcaagcccaccgacaccgtcctcgagatcgggccgggcacgggaaacctcaccaagcgcctcctcgaggcgggggtcaaggccgtcgtcgccgtcgagctcgacccgcgcatggtgctcgagctcaaccgccggttccaggggcacccgctctcctcgcgcctcaaggttatccaaggagatgtcctcaaatgtgatctcccgtactttgatatatgtgtggcaaacatcccgtaccagatctcatctcccctgacgttcaagcttctgtcacaccgtccaatctttaggtgtgctgtgatcatgtttcaacgggaatttgccatgagacttgtggcgcagcctggggacagtctctactgtcgtctctccgtgaacgtgcagctcttgtctcgagtgtcacatcttctgaaggttggaaggaacaacttcaggcctccacccaaggttgattcatcagttgtgcgtatcgagcccaggaagcccctccctcctgtcagcttcaaggagtgggatgggcttgtgaggatttgtttcaacaggaagaacaagaccttgggctccatcttcaagcagaaacgtgtccttgagttgctagagaagaactacaagaccatgcagtctctccaacttacccaagatgcagagatgggcgaggagaagatgtctgcagacgacgttgcattgctagctaatatggttgaagatctgagcatggagactggcgatgagaaggaagatgatgagatggaaatggatgatgcagacatggtgggaggtggtgctgcaagctttaaagaaaagatcatgggtatattgcaacagggtgattttgcagaaaagagaggctccaagctgggtcaagatgatttctctaacttgctgtctctcttcaacaaagctggtatacatttctcgtgattgatccgctaatgggtcatttaccatgaatattctgtttatttttgtcagttaagttgtataagctttttaagacttttataagcttgtgctaagagaaattttggataggctcctcctagttgggttgcttgggtaaatccttttgagatagtttgaaagggttgtaaggaaggaaattatattcagtgttgcttatgcatgttgtaaaaaaacttaagtaccgatttgccaaacttaaaaa

SEQ ID NO: 32594 - DNA, 431 bp, Setaria italica
  Peptide Sequence Number=SeqID_98568
tgctgccctgcgccggcagcgatgcctacggcctcgtcgccgtcggcgacctcgtgcttcactcaaaggattctaattgacttcccggttacccacaggccacagcctgtttgatgaactgtgtcagtgttgctgcttgcattcgtttgctgttagggcccctgtaaaccaaatgtttgatgaaaagtgttcacgctctgctgctactgcaagcccttctgctgttcgcagtggttgctgtgctgtgatctcttcctgcaggctaactcttcctgccaaggtgatgtcaatacccaggccttgaaggttgccaagtctggtgcagtcaagaaaagacctagaaggtcgttgccccaagatgccaaagaaggcttgggacatgaaatatgttctggacttgattatagggttgcttttttttatggagattc

SEQ ID NO: 32595 - DNA, 627 bp, Setaria italica
  Peptide Sequence Number=SeqID_98569
ccctgctctccaagatctccattgattagccaagccaccacagtgtgtcgacctcacttcattgcttcaccctcatacatagccttctccgccgtgtcagcaagctagagaagtcgcttgcgccgtcttccgacgatgtaccgcaccggatagcccagctaggctgagcaacctgccgcgatctgctgcaagcctagtcgtcccacgctgtcattgccgcaagcgctgtcctctgacgcagtcccgcaccgcactgatcactgccaggcaacgtcaaccgccatggtccgctgcaaacagccaaatctgacaactatgcaacaacccctggctgccaccataacttcgaacacctgcacatgggctcggcaacacccattcagctcaccacgcggcagagttgccgccctcggctatgacctcccgtgacaatggcttagcagtgccacgaatcaagttgggtctctagagacgttgtccaaggaaggtacgacgccattggcaccgccatcgctcgtccaggatctggatagggttttcacccaaagaaccccgtgcagcagggtcatagctccaacatgacgccccaacgggagacgacatcctaggacgccaccgtcatgtccg

SEQ ID NO: 32596 - DNA, 200 bp, Setaria italica
  Peptide Sequence Number=SeqID_98570
catgtattttacaaatggctgcagcatcgcaagggatttgtaaaatacatgatccaaccaacactaaacatctgaaccgggccttaatgacctatgatgtcctccgtagtttattcagccctcaaattcagtatttcctttgctgtcctcctgcggaagtaccgcatctcttacggatgaggatgaagaaatcgttcgtg

SEQ ID NO: 32597 - DNA, 1594 bp, Setaria italica
  misc_feature (1586)..(1586): n is a, c, g, or t
  Peptide Sequence Number=SeqID_98571
gaagaaaaggattgagatcattacttaaaacttgattctgcgaagccatacagccctaagcctgtggattgctcacttggtcacatcttgatgcccacgtcggagctaacaggacgctaaaatgcgtacacaaatgtagcacactgctcaagtccactcatatataattcaaccatacactgctcagtctctcagctcatcacaatctaaacccagccaaaaaacctccctccacccattttatgccccccaatggctcaccttagcaaaaccttgcggtcgccattgtgctcatgcaaaaatcaatctgaagccgtagtcaccagccccttcaccttgttgcttgtaattacatggcgccattgagaaatcggacaactttcgaatcccttgcgatgctgcagccatttgtaaaatacatgatccaaccaacactaaacatctgaaccgggccttaatgacctatgatgtcctccgtagtttattcagccctcaaattcagtatttcctttgctgtcctcctgcggaagtaccgcatgtgcttctgtccaaaaataaggtccatatctctgctgtagaagtctatgtatttgagcatgaacatgccacaatcccatccattctcctgcaaaggaaggtttttgacaccttcctgtttccatgaaagtgcatcgatctgttggccacctttatctttcacctcatccacgaaatacctggccaagattctcaaaactttcatgtccatgctgccaagtgaatccagatattgaaactttttgtcctttatgttgatgactgctaaacaccaatggacttccttgtgtatgggaacaaatatcttgtcacactcaattagactataccctaacttcctttttgttgtccatcttctaaccgctttataatcgtatccaccagaaatcagcttcttgtagaaaaaggtgttgaagaaatggcattttaagaacttgctaggttgtcttagttccctctctttaagtagatcaagatacaaattgataacctcatcatttagccattcttggttattcaagcactgcaagatctcccttgttatcacaatatttgacggttcatgtactgctaatttctcacgactgttcctgccatgaagagccgcacgaacgatttcttcatcctcatccgtaagaggaacaaaaggttcaggcacctcctccttctttggagtaatccgcgggaggaaatctgcgagacgctcaaggccaaggcggccctcctcggcaagccgcacctcgaactcgagcgtcttgagcttggcatcccgcttccggctggactcctcgtaaagctccttgtacagcggcaccctcctcacctccacgctcccactcaccacctcctgctcgtcctgctgcttcctctcatctccgtcctcctcgatggcgaccacttcaaggggcaccgcctccttctccctcgctgcatcggtggtggcggtgggagtgggcggcgctgggcgggagacggtgttgacgagctcgacgtactgctcgagtccgagcgtccggggagggggcggcgtgggtgaggagtgggggaanacggcccc

SEQ ID NO: 32598 - DNA, 371 bp, Setaria italica
  Peptide Sequence Number=SeqID_98572
cccttcctccagcaggcgcctcccatggagctccaacgacgacggcgacagcggcgccggcggcgagctgtcccggcctcgcaggcggtggcagtcggttatgctgcaggtgaggggaacgaggatgaagacgacgacggaggggttgtttgggttcagaaggatcatggagccggagttcatgggcatgttgcttccggtattcgggtcaatgttgcggagagtggtttcagaggaggtagagaaagcaatgttcagacagttcagtgcccctgcatcacctccaagattactagtagactggaatcagcgcccgaggtatcagcttgcattcttgaatggtctgaaaccagtttacacaatgacgaaat

SEQ ID NO: 32599 - DNA, 734 bp, Setaria italica
  Peptide Sequence Number=SeqID_98573
atttttgcaggtaaagcatcaccttcatcaacagtgcgtggtgcagattcataaaggtaactctaatatctggactgatccctggtttgataattgggaaactatatacacccacttaaagaccctcatgttcataggcagcttcccaacttaatgtcagatttatggaatcagcagcagtctcttggaatgctaatcttgtcaattctactttccaccatcaaattgctgattccatccttcagattcctaaagtttcttctacctgtatagattgcttgtgttggaaaccttctatccatggtatctgctcaactaaagaagcttacaaatacctttcagctcaaaccactcactccctaccgaaccaaggaccaagagctatctcctctgatgctctttccattcttaacagaatttggcaacataaaaccattcctcctcgcattaaagcttttgcttgaggactattagacactctcttgccactggtcatcgagctgcttcctttagttcgagaatagaaaacacttgcaaattgtgtggtgctgatgaaactgagttccacctgttctttgaatgtgagtttgccagagctgtctggttttctgcaggggttcctttgaggactgatcggcttcctctggaatatgatggccttcaaagcactttatctttaatcctttcaaactgtgtttcagatgatcttttggagatatcttcaccaggttgtg

SEQ ID NO: 32600 - DNA, 278 bp, Setaria italica
  Peptide Sequence Number=SeqID_98574
taaacaccccccacgcccacaaagactttccacgaccagccgcttccgatgccgtcgtaacttgaataggatggccatgattgctaggagaatggacgagataccagccgtaaaaagataccgggataagttggcttcgtcttgcctcaccttatgtaggcttgcagaaggatctttcgtgggcaggccagatgaaccttctgcgtcacacaagcagagcaacagcaagatggcaatgacacagcacaccaagtacacatactcctggaggatcttct

SEQ ID NO: 32601 - DNA, 332 bp, Setaria italica
  Peptide Sequence Number=SeqID_98575
ggtagggattcgtaattgccacatgttgcaaagtccataggcggtggagggagggacctgccagtggttggcccatcctctacaataaacactgctgccatacccatcgacaaatggaactcataatgacaatgcatgaaccatacacctggattgtcagcaacaaatcgaacggcagcccacccaagatttggcacatgcaccgtgttcttcattggtggattcaccaagttgtacctcgccacgtccttggctgcatcgtagttgccaagcccctgcgcaaggaggtacatgtcgtgcccatgcaggtgcatcgggttggagtcgccctg

SEQ ID NO: 32602 - DNA, 378 bp, Setaria italica
  Peptide Sequence Number=SeqID_98576
tcgcgttccaggtgaccaacgccccaggacgtgtggttcgtcgacgccaacctccacctctggctggaccccaggtgcgcggcgacgacggcgggcgtcgtcagctacgacgcgccgccgctggacacgacgatcgcgttccggcctgagggccccccgcaacgagttctactacacgacggcgttccggcacgtgtcggcctcggggtgggtgcagacggcgtcgtacggcaggatcacggcggcgtggacgcagaggctggggtacgagaacacgaacaggatccaggacggcagcctgcaggcggtgaaccagaccaccgacgcctactccggcgcccacgtcgccgaccccgccggcgtgctctactcgcagga

SEQ ID NO: 32603 - DNA, 734 bp, Setaria italica
  Peptide Sequence Number=SeqID_98577
gttagcctgtcagtcaaatatgatcgctgaatttgtagcttctggggtcaagatcacattgcttgttcctatgctagatggtgatatttacccacaaaaacactcactcttttcagctgcattggaattttctctggttgccctagaggatatactctttatagctttcaaaatccttgaaaccatttgaaggaaattgttccataatgtttgtattgtctggtgttcagaaactttgcagatgctggcaattatgccgtcctctgactgtcagaagtgctgaccttatggataatttgacccctgttctgctgttcaaattgtaatgttattactgtcttgtataaaaataatattgcttgagcagtactttagttcaattgccattcatatgttgaaaatagtattggttggcacctggcagtacttaattctgtttatttaaccagcaaagtttagttggcccattagtacattcttgagttgggtttgtctggtcttatatctgttggttctacttgttatccatggtgttatttgattttaccttggttattaatcatactattcaggttggtgtaactgttggtttacaatgttgtatgttaatctgcctgtgtatgtatgccataatggcaatctacagggggtaacccctaaagctatttttattaacagaattgatttgagtagacgtggagttgagatgcttgatcacagcagatagatacgat

SEQ ID NO: 32604 - DNA, 322 bp, Setaria italica
  Peptide Sequence Number=SeqID_98578
ggctcctggccctacttgcaaggaccagattcttgtctccatcagcattcagctcggtaacgttctcccatttggacaccacgtgtgtcgtgcttgcttttcttcgccacacatacatagcggcttcaacgcggtctgcaatctcaagcgcctcatgttctgagctcaaattgaggaagttgaggaggtgctctggagagaactgatcccctgaagacatataccggtagatggcatcacctacacccaccctcccactctttggaagagtctccaagtatgacagtggaacttgcatttcagataggataccactgttgat

SEQ ID NO: 32605 - DNA, 769 bp, Setaria italica
  Peptide Sequence Number=SeqID_98579
agtgttctgtgtccatgtcaggatcatttcttggtgttctttactctaactcttccagggcatggcattcacgagggaagtaaaatgattattgtgtagattatgaagaatatgttccaacagcaacagaatggattttttttttttttggttgcaactctttctctcatccattatgatctacatacataggtaatgaagctgtcgtacattattatatctaccacaccaccctatcacaacaataaaactgcacgccactccaggaaggcaaaccacaaaaattctatgcaacataatatatatgtatttgtatattagtttgccatgctcagcgttgtggagaaagctgggtgaacacctgcttctgcatcctgatcttgtgcccttttttcgcattttcatcggcaattaggatatcatctatccatgagactatattatgagccaaactttccagcacccttgagtagctgtcgagaatcgcctgcccaatgtccttgttatactgaatcctgcttgtatccagggtagtctgtgacaggcctgggaacctctgcttcaagcaaaggagcaggctcctggccctacttgcaaggaccagattcttgtctccatcagcattcagctcggtaacgttctcccatttggacaccacgtgtgtcgtgcttgcttttcttcgccacacatacatagcggcttcaacgcggtctgcaatctcaagcctgagacacgcaacaggggataggaaggcacacgaggggatagg

SEQ ID NO: 32606 - DNA, 435 bp, Setaria italica
  misc_feature (405)..(405): n is a, c, g, or t
  Peptide Sequence Number=SeqID_98580
cgggaacttggcgcccaggcccgtcgcggggctcttcaggccgtcctcgatctccacgtcgccgttcgccgccgccgccgcgtccaccttcttgatcggcgtgacagtgccacttacgccttttggagtggcgccgtcgaccggcgcggccggcggcggtacgccggcgaagtcggtggaggcggcgtggttgacggcgttgcggaggttggcctccgacaccggcgacgcgctggagctccacacgaacatgtgcagctccttgttggagttggagttcgaacccccgagctccttcttccgtggcggcggcatcatgccggggttggcgcggggtacgcggtggcgtcgctgccctgctttcccgacgcgaacttgttggccacctgctcgtcgagccccggngcgcgcgcgccggagccgggctgcgccagg

SEQ ID NO: 32607 - DNA, 624 bp, Setaria italica
  Peptide Sequence Number=SeqID_98581
aactgcagacttgagagcatgagtccgaacttgaatttccagaatattttggtatttcatcatcagcaagattattcaatgattgtttgtcctgcaaccagtccctctgtatttgattgaatgctttatgactaattgactgaatctttgaattgtttgacttgctcgtacgagccagatttgcaaatttcattgttaatctgcggcgggacacaacaaatacattgcaggaacttggcatagttttcagaaccataaaaggcacatcttggatccttaacatcctccggagccagctgagggaggcggatccgaccacgaggctgcggacgccggactccgccgcgtagctcaccagcgcctccgcgacgctgtccccttccagaaccaccgtctccacggttctgcgggcgcagaggcggcggaaggggaggaagacctcctgcgcgcgcgcccggcggtcctgcgcgtatatctccaccacctcccgctccatcttctccaccggcaccctctccccccgatggagacggcacgaaggagacgggcgggatgacgtggacgagcgcgacgcggccgccggcggggaccatggtggcggcggcccaccgcgccgctcggcgg

SEQ ID NO: 32608 - DNA, 320 bp, Setaria italica
  Peptide Sequence Number=SeqID_98582
ctggccgacttcgcggccaccgccgccggccgcgccgcctgcgtggaaggtcgggtcgccgtcgggcggagccgggaggagagcgagaggctgatcgagcagacggcggcggccgtgtttttgtcggcgccgttggactttgccggcgtggaggacgtgtccgcggtcgtcgccgcggcgaccggtgggcggttgcttgccgttcgagagatttgtgcagtcgggcgcagcatccgggccgcgcgcggagtgttcgatcaattgcagagcctcgccgaggaaacgcaagacgggaggtgaggagtttcttctaatatcag

SEQ ID NO: 32609 - DNA, 1370 bp, Setaria italica
  Peptide Sequence Number=SeqID_98583
tctagttgttgtaagttaagttaaaacttagtcttctaaaaaagttgccggattagctcttcatctcccaaccaacctgccagtactacacaacagaagcagaagaacaacagggacaacagcagtctagacaaaatcagcaactaaaggaatcaaggtagtcaacaagctaagcttatgaagagcttaggacgaggaaacatgctaatgccccagactccaattgatagcactccagccaatgctgcttccactccaccaaaaaagcacgtccctgaaaaactagtgcaacatggccaaggagttttccctgctaatacagtaccaactccttcaacgcctcaacctgggaatcaacctaagctagtcacttcgttgcctcagtcaccaaagaaggtgcaagatattggtaaccaaggcttgatgcagggttctttgagtcagactctgttagctacacaacaagctccacttccttctaaatcgacattgaccacacagctgcagcaacggcagattaatccatcacaaaatagcatcgagagagcaatggtgcaacaaaaccgccaaatgaactctgactgtaggacagacttgcacatagatcaagtccaacacaatcagatggtcccaacatctttgccacagagtgcagattcaggcagccctgtagtgccattggtgaacccacagaagcaggaggtatcacacaatccagcttcagttaccccatcatcgaagctgcttacctctcctaaagatccttctttggggaatgaaacactatctagccaagagctgctgcaaagacaagtttctggtggttttcctattcatggtcatggtgttgttggccagtggaaccaacaagctaggcagctgttgcagtctcagcatcagcagagaccagttgttcaaggcagtgtatatactccttcaaattccgggcctggctgatcattaatttatttgggctggtcattttcagatagcaagccttctttccattgtaaagttactgtacaggtgtccgttctttggaagctgtggacgatagtgcttaattttacttggagctagctaattgtactcaccttgatgtcaggtagataattgtttgtgccattttagaccccatctttcgaagttgggttattttgctgtctggaatgtagaagataggtggaggtggtggttagattgtaacccagaaacctgggcccagctgtatattttgatatgaggtccgtgcttctagagtcaggaaggagaaggaagtcgggattaattatttatcttgtgtatgtatttgtagttatgtatgtttaactttaggtttgtgaatgcaaaagagctctttttggctaaga

SEQ ID NO: 32610 - DNA, 554 bp, Setaria italica
  Peptide Sequence Number=SeqID_98584
tcttgctgcaaaaggctgctttcttatgtgctcttttttctgaaggctcagctgatttctttctttcggttggtcttggattaggaggtacagaaactccagagcaaaggcaaaggaaaagtataagctgtgagcgaactttcacagcaacaagtgattcttctttgcttttcgacaaattagctaacctcgctggagccacaacggatgatttgcaaaggggctgcggtggtgctcgagctcgaggccgctcgtgcctactccaccatctgagcctcctcgccactgccgtccaagcccatgtcggccacctggtcctcgtgccgcgccagccgcccagccccgcgctcccttgccgaacagagcagggacggcgtcaactggcggcggacctcccttgggacggccccccgagcgcatcccttggcagctcacatgcgcggccccccgagcgcatcccttggcagctcacatgcgcggccccccgccagcgcgtacctagacatccgtccgtcgtcctgaccaagggtttgaaggggaagacactaacactc

SEQ ID NO: 32611 - DNA, 292 bp, Setaria italica
  Peptide Sequence Number=SeqID_98585
gggggcggcggggttggaggcggaggcggggaggaaggggcaggggaggggcgaggaggaggagcgcgagcgggagcaggagcagcgaggagagcgcgaggaagtggcgggagtgggccgcgatgaggcggcgcgtggaggacgccgcgccggcaaggaggtccggccaggggagggtgactggcgggagcgagggcggcggcggcggcggggagtccatggggtggagtgcggcggcggaggtgggggaaagagaggggtagtggcgtgtacggaacgagcgagtggggaa

SEQ ID NO: 32612 - DNA, 936 bp, Setaria italica
  Peptide Sequence Number=SeqID_98586
gtggagaaaaccaatgataccacacagtgaagaagcagtacaagttactcaaaaatggctttctcaggatgccactgtgtgcaagtgattggatatttatttgcttgtacggttgagacgtagaccttgccattttcatcaggcgatgtagtcaagattctgaagaaacttgataattcaccattctctcggaaacgctttggtgaaataccatatctgtgattttgcatgacaagacagctggtgctgactttcttgatgaggtcagagtcaaatctttgaaacaccgtaccctcgaaagaatagctgggaaactgaagagtagatgcttgattctgggcgtcaaacatttccaagatattattgtccttgctgacaatcatgcttacaagctcaaagcctaggcattgagcaaacacaggaaatggttcacctgcgtcattcctgtccaaggcatactgaaacgattttttaattgtctcaaagtatacaccttgcttctctgatccaccagtgaacagcacaccattcaccaaactcagtttctcgagcaggcgctcctcgggctcgttttagacgagcgagatgacgcgcgcgccggcggcctcgacgaacttgacgtaggaggcgccgatgtaggaggtggcggtgccgttgctgatcctcccgcccgcgccgtcccccgggtgcgagacgatgccgatgacggggcggtcgtaagccgcggggtccgccggcgctgcgcacgcccgcgcccccgctttcccgctcggcagccggatgacccccggctccgccgcgcgcgccgacgacggggcgagggcgaggactaggagggcgggcaggaggagggggaggagcagggtgggggccgcgtgacgagtccattggcaagactactggcgtgaggcggccgtctgtgcagttgtgcgtggc

SEQ ID NO: 32613 - DNA, 334 bp, Setaria italica
  Peptide Sequence Number=SeqID_98587
ctacttcgtcatggagtacgtgcgcggcggcgagctgttcgcgcgcgtcgcggaaggccgcctccgggaggacgacgcccggcgctacttccagcagctggtgtcctctgttgccttctgccatgcgcgcggggtgttccaccgggacatcaagcccgagaacctcctcgtcgacgacgccggcgacctcaaggtctccgacttcgggctctccgccgtcgccgaccagatgcgccacgacgggctgttccacaccttctgcggcacgccggcgtacgtcgcgccggaagtcctctcccgccgcggctacgacgccgcaaagccgacctatggt

SEQ ID NO: 32614 - DNA, 978 bp, Setaria italica
  Peptide Sequence Number=SeqID_98588
taacatgtccaatttccaggcatgcaagcctgaacgagtccaatattacaccaaaagcagtgcaaatatgcattcagttataaatcagatgccgcgaacaggaacgggcatgttttttcactccgcaggatcaaactcgcggaaaccttgtttgaaatcatccaccatttggatctcttcttcattcgagaccttgcagtttctccaatctgcacgatctgccatgcttagcaatcccgctaaaacctcacgtccaaactgggcagggaacttctcattactgtcaatcgtatgcaagagtattttgccttccgggagctcaacataaaacaggcttgatttgctttcagactgagatatcaatgattctctagcaacttttgcaccatcacctggattcaccaccgagaattcaaaacccagtcttttcgctgctatatggaatatcttattaactgcgtctgctttagataatggtaccggaacagcctgaaggtttgcatggcgggtgtgctgtgaaacccactcaaagtatactgctgtctttccttgcttctcaaagtacttagccagagcattcttatacctcccaagttctacctctgcttccgcaggcatcattaatgtactggggcaatgttcaacaggtatcattaaaacatgatttggaacaagaggaccctttgcaagtgcgcagtagtaagcttctccgatactaatgacaagatgtgactcaacatctggacttgacaagcagaaccagcaacggctctccgcacgccttcgttcgctacgaggtcttgcgtctcctacagaagtctccaggctgtgagaaaacttgcaatccaagcccctctcacattttctttatttagaaaatcaaaacagacatttctctggtaatgttccactgcctcctcgtcatgcctaaagttgcatttactccctcgtggacaggaccctgaggatgtaaatttg

SEQ ID NO: 32615 - DNA, 807 bp, Setaria italica
  Peptide Sequence Number=SeqID_98589
acagagaaatagtatgtgccagctctgagcctggaagttcgccaataggatcttcacttgtgacctagaaggtcaagagctggaagtatgggctggagatagaatacctaaagttagtgatcttgctgtgacacctgatggccggcacctaatctttgtatcttgcaacgatatctggattcgagaacttccaaaggggagggaatggagatttcgtgagaagcaggcgatttcatctctttctctctcaggtgatggacagtcactcattgtcaaccttagcagccaggaaattcatttgtggaaaattaatgaaagttctactgttcctgaaaagttcaaggggcacaagcaagagaagtttgtgattaggtcttgctttgggggttcaaattccttgttcattgcttagttggtctagttgtaggtattacaacaaggtactaacaatttaggaaaaagggcaacctacgaaaacgaccaaataagaggttttgcatggccacacaatgatcgtgaactgtgtaaagctggaaatcctgcgaggcctcatatgctggcttctgctagtgatgaccgcacagttcgaatatggctggcacgcaagcctggaagcacatgcagttgaagtgtcaaattttgatgttattgtaaatagttgtacatttagactgtttgcacaaatctgtttgggattaattcccccccgttaaagagtttgtagcttaccttcagagttcagaaataacctcgacagccagaggtagcagggtgctgtgttccttatgtatgcctggttacccggtg

SEQ ID NO: 32616 - DNA, 1480 bp, Setaria italica
  Peptide Sequence Number=SeqID_98590
gccatggtctcgtgcgagggggcagtcgctccggatgccgtggttgggtgggggattgcggtgttcttggatttagttgaggtgctgccaccatggttccatgtgcccaccgggcggttggagcatttggtggagagtgcggttactaagcaagtagcatcgtgtatatatcacaatttgccggatgagatcactatgcttgaagatcataagtgccatgaacagcacatcccctccgagtgtgcacagatattatgtggtcataataatgaagtttggtttgtaaggttctctaataatggagactacctggcatcatcttcaagtgattgcaccgccataatttggaaggtggaaaaggatgatacgttgaccaagaagcactgcctacagggtcaccacaaaccaatttccttcgttgcctggagcccaaatgatagaatgctgctcacttgtggtactggtgaatttttgaaactgtggaacgttgatactggtgaatgtaatcttaaattccgaggttcagcagactacatcatcagttcatgtgcatggtttcctaattcagagaaaatagtatgtgccagctctgagcctggaagttcgccaaataggatcttcacttgtgacctagaaggtcaagagctggaagtatgggctggagatagaatacctaaagttagtgatcttgctgtgacacctgatggccggcacctaatctttgtatcttgcaacgatatctggattcgagaacttccaaaggggagggaatggagatttcgtgagaagcaggcgatttcatctctttctctctcaggtgatggacagtcactcattgtcaaccttagcagccaggaaattcatttgtggaaaattaatgaaagttctactgttcctgaaaagttcaaggggcacaagcaagagaagtttgtgattaggtcttgctttgggggttcaaattccttgttcattgctagtggcagtgaggattcacaggtctacatttggaaaaggcacctcgaaacgccaataaaggttttgcatggccacacaatgatcgtgaactgtgtaagctggaatcctgcgaggcctcatatgctggcttctgctagtgatgaccgcacagttcgaatatggctggcacgcaagcctggaagcacatgcagttgaagtgtcaaattttgtatgttattgtaaatagttgtacatttagactgtttgcacaaatctgtttgggattaattccccccgttaaagagtttgtagcttaccttcagagttcagaaataaacctcgacagccagaggtagcagggtgctgtgttccttatgtatgcctggttacccggtgagttttgatacttgtgtgcatgacacagatgcatcagaactttgtagtacattttatgagccgatactagttaaaattgctgagatatgtcctttcttgtttggttgttgtaaaaaaaaaaaaaaaaaaa

SEQ ID NO: 32617 - DNA, 249 bp, Setaria italica
  Peptide Sequence Number=SeqID_98591
catttgggatttatgctgcaaatggcaaacgcataactgcataagcatgagtctcttcttgctagactacgtgaaccaagaaataatccggttaatggtttctgcattttcgctcatttctttcctcacatgttttccaggacaacccattctttacattgtatttcaataattagtctttgaatccagtgggcgtatcatatgcttagcaagtctaatctatagcactacctccggtaagatatacta

SEQ ID NO: 32618 - DNA, 1142 bp, Setaria italica
  misc_feature (1133)..(1133): n is a, c, g, or t
  Peptide Sequence Number=SeqID_98592
tcgtcgcgcttccgccgcggctgcggggcccgcggtgctccatcagcctatccatcggcggtggtggcagcgccagcgaagaccgcgggttcagctacgagcatgttccggtgttcccaagataccgattgcgagatccctacaagcttcttggcgttgatcgcgatgcatctgaagaagagatccgaggtgcaaggaattttcttgttcaacaatatgctggtcatgaaccgagtgaagaagctatcgaaggtgcttatgagaagattattatgaagagctaccagcagcggaagaagacaaaaatcaatctcaaaaccaagttaaagaagagagtagaggaatctccatcatgggtcaaggcactgattggttactttgaggtgccatcaatggatattatttccagaagattgttcttctttgctttcattgctgggtggagcatagcaacttctgctgagaatggacctgcattccagctcgcgatatcactcttctcatgtatatacttcctcaacgacaagatgaagaacctcctcagggcatcaaccactgggtttggagtacttgttggtggctggattatcggttctctattggtccccctgatcccgacattcatcatcccaccttcatggtccctagagcttctcacctcgctggttgcttacgtgttcttgttcctgggatgcacgttcctcaaatgaaactctttcgatcttgtaagcagaaaccgtagaaccatttggaaaaattttgtgatgactggcatccccgtatctgagttccagaaagttttttgcacatgctgacctcactctcgagcacgaaatctcggccttctttgatgaatcttttggtcagcttatgtacactattgttttctctatggtgacggtggacggacgaaggtgacattccttccttccagcagtcaattttgtgctttgtttagtggactactgggagaacacagatctagtttgtatttgctcacattctgcaagcattgaagcgaggtctgccaagtgcagcgttgtactactgattatgttgaattggtgtcactctaatttgttcgcttatgtcatttacaatccttgtacagccagcaaaaaaaaaaaaaaaanaaaaaaaaa

SEQ ID NO: 32619 - DNA, 532 bp, Setaria italica
  Peptide Sequence Number=SeqID_98593
cccacgacgacaactcacgctgcattactctactactgtctattgtccccactccatcttatgagcatatcctagtgccaaagtgctatgcgtacagggaatttctatgctaacgggccacacccatcccgctggcggttttgatgatcatgcatttctctggtgtaccatcaagccgagcaacatcgagaacaataaaagttgagcaccggaccatttgccgatcgatcggtcggtcggtccccagaggccagagcatatctcccaacatttttctactgttctaaacatgctgcggtatcaaatgagcagcacggggctcagctcagagatacgggcgccagaccggagggcgtaccaaatacgacggcccgatcctcatgcgccaataactgcggcacgcggagccccgccgtgcgccgtcccctgccgcgccattgcgaccgagggccgtagcgtcgctgctcgctcggggcaatgcgacggctacaaacaaatgagcgaacaatcctcgcgcatgaccgtccacggg

SEQ ID NO: 32620 - DNA, 422 bp, Setaria italica
  Peptide Sequence Number=SeqID_98594
ctcctccgcgaagggaacagaggcgccgctgccagacgaacccgctgctgcaggaacaccagcacggccagcagcgtcgccccgcacggcacggcgacgtcccacccggcgccgaaccggtcgtagcgggggctcgcgtagacgtaggacggcctcaggtttggcacgtaccccccgggccctgatcacgtcgtacacgtggggcatcgcccggaccacggtgccgccgacgtagaaccacggcgagagcgcccggaccccggccgcgccggcgaccgaggcgaacgcgttcgtggcgacctgcgggagcaggaacgcgtccagcaccagccccgcggacgacacgaggtcctcccacagcgtcgccggctccgggccgaggcggacggtgagggagcccctcccgcgcggcgcggcgggcg

SEQ ID NO: 32621 - DNA, 640 bp, Setaria italica
  Peptide Sequence Number=SeqID_98595
ctttcattactgcagaacatgccaaccatcattgtatatgtgttgagctgaggctcacaaccgtccatccccattttctggaacacatcataggcctcttcgaacttctgcgattttatcagatgatgaagaattatatcataagtccgggaatttgggccaattttacacttcctcatctcatcaaccatcttgaaagcatgctgaaactttgaggctctgcagtaagctccaacaaccgcattgcatgtaggcacctccatggggaacccactttccttgtaaagctgaaagtacttcaaagcttcatccagcctctcctccgagccgagcccattaataagcatgcagtacacatgagggcttggcatactagcacttacttccatctcgtggaacaccttgatggcttcatcacattttccagacttgcaaaaggcactgatcagcatcccaaacgccacaacatcaggcctgatgcctgcatccagcatttcttggtacactgttctgaccatcaacagatctttctcatggccccagccttccattaggacagtgtaggtcttcaaatcagggacgaacttggccttcctcttcatctccttatagatggcatgtcccttcttcactttgtttt

SEQ ID NO: 32622 - DNA, 452 bp, Setaria italica
  Peptide Sequence Number=SeqID_98596
ctaccggtgatgctgagctctggcgtcacggcgctgaaccatcttctagtgtgctggctcctggtgtacaagattggtatgggcaacaagggtgctgccttggcctgtgccatctcgtacctgattaacgtgtcaatcctgtcaatttacgttaggcttgcaccagcctgtgagaacactaggagagggttctcaaaggaggcttttcacggcatccccacgttcttgaggcttgctgttccatctgcactgatggtttgcttggagtggtggtcatttgagctcctggtacttctttctggacttctcccaaatccgaagctcgagacatctgttttgtccatttcgtgagttatctttccacagcacatttcaaactctgtttgccttttgttgattgtaactcttcagttttgtgcagtttaaacacaggctctttagcatttatgata

SEQ ID NO: 32623 - DNA, 247 bp, Setaria italica
  Peptide Sequence Number=SeqID_98597
attgtatcaacgctatttggcacaatgtgcaaaatatgcccagtcagttttaaagtgtcgaattgaactgtcttgatttttaatagctgccctagctatcatctggctagattgtggccgagctacagctgaagtaaaggctgattccatcacccactccaaatctccagtaggaaaattggggaaaataagcataggagggaaccgcatgagcacaaacagatctagacaagaagataagggatcg

SEQ ID NO: 32624 - DNA, 267 bp, Setaria italica
  Peptide Sequence Number=SeqID_98598
ggctggtgaggttgccaatgccgtcagggatggcgccgcgcagcgagttggtgttgagcgccagcgactggagcttccggagccggcacagctcggccgggatggcgccggacagctggttcttgctgaggtcaagcgtggtgagctcggcgaggtcgccgagctccttggggatcgcgccggtgaggttggtgccggagagcacaagcgtcttgagcgagcgccccagcggccgcaggtccgcggaggggagcgccccgccgaggt

SEQ ID NO: 32625 - DNA, 318 bp, Setaria italica
  Peptide Sequence Number=SeqID_98599
aggacctctgcaacggcatcgccgaggccaaggtggagatcgtggtgacggagggggagctcggggagacggtggtggcgacggtgaacaacctcggcgccaccacgctcgtcgttggcctccacgacaagagcttcctctacagcgcgccgagcccgtacacgagggtgaggagcctggggtgcagggtcctcgccgtccggcagcacgccacggcgcgggacggcttcttgaacgccgagctcacacagatcgagaccataagcttgcacataccaccgccgaagatcccgttccgatgttcacgtttccgcttgg

SEQ ID NO: 32626 - DNA, 580 bp, Setaria italica
  Peptide Sequence Number=SeqID_98600
tacaaggtcaaaggcgccctcctgcagccctacaggttgctgatcatcatacgcttgatcgccgtccttctcttcttcgcatggcgcatcaggcacaacaaatccgacgtcatgtggttctggaccatgtcgatcgtcggcgacgtttggtttggcttctcgtggctcctcaaccagctcccgaagttcaaccccgtcaagaccatcccagacctcgtcgccctcaagaggcactttgacctccccgatggcacctccaggctccccggcattgatgttttcgtcaccaccgccaaccccgtcgacgagcccatactctacaccatgaactgtgtcctctccatcctcgctgtcgactacccggtcaacaggcttgcctgctatctctcggatgatagcggggcgctggtgctctacgaagcattggtcgaggttggaaagtttgcgcctctttgggttccattctgccgcaagtactgcattgagccacgagcaccagagagctacttcgagatggtggcgccaccgcaggctggaagagaatcgcaggaattcttgaatgattacaggagggtgcaga

SEQ ID NO: 32627 - DNA, 396 bp, Setaria italica
  Peptide Sequence Number=SeqID_98601
taatatttgaaatactcattttctagttgttgtagttgtttacagcaaactcattgctagggttgcacttctcgcagctactcttctctccgtgtagcatatattgatgaggtggaagatagagtaggagacaagaaaatggagacagcttattattctactttggtaaaggttgctctaactaaggattctgattctgcagatccagtacaaaatcttgatcaggttatatatcggatattaggtctggtaatggtacataattttgtaaaaaatcatgttagtttcggtacagctttaatctgcaatgccagggacggaggcaaatggcccccttaatggctctgtatctgcaatacttagcaataggggaaccagatccgccccccccccccc

SEQ ID NO: 32628 - DNA, 322 bp, Setaria italica
  Peptide Sequence Number=SeqID_98602
ctttaaatccatgacatgcctaagattaatgattgtgtattttaaattctgcgatgccaatggaaagtgtgcttattctttcccataagctgtgtactcatgaacttaaatgaacatttgcaagagataacatatcattagatagttatgagtctgcacagtaatattcccattgcctttactattttaggctataactcaactcttcgtggtggcaatgtaacacaccatgaatatgtccaagttggtaaaggaagagatgtcggactaaatcagatctctaagtttgaggctaaagtggcaaatggaaatggtgagcaga

SEQ ID NO: 32629 - DNA, 373 bp, Setaria italica
  Peptide Sequence Number=SeqID_98603
gccagaatgcatttgctacatatatcaccatatggcatttgaaatgtatggcatgttagctggaaatgtgagtgctttgacgggtgaatatgtgaagccagcctatggtggtgagaaagaagcctttctgaggaaagttgttacaccaatttaccataccatagcaaaggaagctgaaaggagcaaaagagagaaaggaaatcattctgagtggagaaactatgacgatcttaatgaatacttctggtattagttctctcttggtttatttgttcactctctagattttatattgttaatttgcaggtctgccgactgctttcggctgggttggcctatgcgagctgatgctgactttctttatcaacccttt

SEQ ID NO: 32630 - DNA, 592 bp, Setaria italica
  misc_feature (518)..(592): n is a, c, g, or t
  Peptide Sequence Number=SeqID_98604
ttggcattcttgcccactggatgggggatcctattggtgtgcctcttgctgttctctggttcatttgcttatgtattgtaatagtatgcttgctgttgtcttactgtgcatcatttgatttttcagattgcacaagcttgcaagcctcttgctcgacgggtaggattatggggatctgttcgtgccctagcacgggcctatgagataattatgggggtgcttctctttacgccaattactattttggcatggtttccctttgtatcggagttccagacgcggatgctatttaatcaagcattcagcagaggactgcaaatttccagaattcttggtggacaaaaaaagggacggtcatctcgtaacaaagattgatttagccttcttgcatcttgttgcctgtctttcaacaatagacaacaaggactagtaaaataatttagtacaagtagtaataagtagtaattttagtacaattaacaaataataacaaagaaaataaaacaaaaaaaggtttnnnnnnnnnnnnnnnnnnnnnnnnnnnnnnnnnnnnnnnnnnnnnnnnnnnnnnnnnnnnnnnnnnnnnnnnnnn

SEQ ID NO: 32631 - DNA, 456 bp, Setaria italica
  Peptide Sequence Number=SeqID_98605
attttcacccgtggtgaaggcttacagaccatagatatgaaccaggataactatatggaagaagctcttaaaaatgagaaacctactccaagagttccttaaagagcatggagtgcgtcgtccatctatacttggagttagagagcatatttttactggcaggttaattacttgccaatggaaattgatggctgtgttcattgcataatctcaacttcttttatctttgatgatgtagtgtatcttcgcttgcatggtttatgtcaaatcaggagcacagttttgtgactatcgggcaacgtctgcttgcaaaccctctgaagtgagagcttctccttcttggctaaatcacaacagtaaattcttagtgaaaatttctaatatatttattgcatataattttgcgaatatcacagtccttggaacacatctctccaagccccacatgagtcacat

SEQ ID NO: 32632 - DNA, 883 bp, Setaria italica
  Peptide Sequence Number=SeqID_98606
acaagaagtggtgcaaatatcttggtcgcaagagcagcctttggttgccaacaattcagcaggagatgcaacaacgaaaattactgtatatgggtctgtaccttctcatttggggtgaagctgcaaacctgcgattcatgccagaatgcatttgctacatatatcaccatatggcatttgaaatgtatggcatgttagctggaaatgtgagtgctttgacgggtgaatatgtgaagccagcctatggtggtgagaaagaagcctttctgaggaaagttgttacaccaatttaccataccatagcaaaggaagctgaaaggagcaaaagagagaaaggaaatcattctgagtggagaaactatgacgatcttaatgaatacttctggtctgccgactgctttcggctgggttggcctatgcgagctgatgctgacttcttttatcaaccttcaaatttacctgatgaaagaaatgaaagcacaagaaaaggcaaacagaaaggaaaggtcaactttgtcgagctacgttcattttggcacatattcagaagtttttatagactctggagcttctttattttagctcttcaggttatgataatcctcgcttggaatggaggctcactagccaatatttttgattatacggttttcaagaagattttgagtatctttatcacttctgctatactaaatctcggacaagctacacttgatattatctttaattggaaggccaggagaacaatggaatttgcagttaagctgagatatgttcctaaaagttcacaatggcagccttgtgggtggtactactgccagttacatatgcttacacctgggaaaatccatctggaattatcagagccatcaaaaaactggtt

SEQ ID NO: 32633 - DNA, 4953 bp, Setaria italica
  misc_feature (4951)..(4951): n is a, c, g, or t
  Peptide Sequence Number=SeqID_98607
ggtaatgctcataatttttgtcgggttagcaaaatttaatgtaatgagctgttcagagcacaagaaaaggcaaacagaaaggaaaggtcaactttgtcgagctacgttcattttggcacatattcagaagtttttatagactctggagcttctttattttagctcttcaggtatttacttaattattcatgcttttctgcaataataattccctgcattattttgaacatttgaatggtcaggtgcatgctctacaggaaggtacctaatatcctttgctggatattatatagctaaacatcatttcgggtttcaacctaacttttgatctttctgcgtaggttatgataatcctcgcttggaatggaggctcactagccaatatttttgattatacggttttcaagaagattttgagtatctttatcacttctgctatactaaatctcggacaagctacacttgatattatctttaattggaaggccaggagaacaatggaatttgcagttaagctgagatatgttctaaagttcacaatggcagccttgtgggtggtactactgccagttacatatgcttacacctgggaaaatccatctggaattatcagagccatcaaaaactggtttggaaatggtcgaaaccacccgccactatttgtcctttcagtagtcctatatttgtcaccaagcatgcttgctgctattcttttccttcttccatttctacgccggaaacttgaaagttcagacttcaagctcgtgaggttgatcatgtggtggtctcagcctcgtctgtttgttggtagggggatgcatgaaagtgcgttctcacttttcatgtacactatgttctggattgctcttctcttgacaaagtttgcatttagctactatgtagagattaaacctcttgttgaacccaccaaggatatcatgaagacccctatacgtactttccagtggcatgagtttttcccgagagaaaagagcaacattggtgttgttattgcactttgggccccaatcattctggtctatttcatggacacacaaatttggtatacaatcttctccactctgcttggtggaatttatggcgctttccaacgactcggagagattcgcacattagggatgctgagatctcgcttcgattcaatacctctagccatcaactcatgtctaattcctgttgaaacatctgatgcaaaaggaagaaaggtctgaagtcttacttacacaatcgtttcaaagagatggaacatgcggacaaggagaatatagcagcaaggtttgcacagatgtggaatgaaattgtcaccagctttcgagaagaagaccttatagacaacagggaaaaggagctgctacttgttccgtatgtgtctgatcaggcccttggtgttgtgcagtggcctccatttttacttgccagcaagatccccatagcagttgacatggcaaaagatagcaacggcaaagaccgagatctgaaaaagcggcttgctaatgactattatttttcgtgtgcaattgaggagtgttatgcatcatttaagaatatcatcaatgatcttgtacagggtccacaggagaaaagggtcatgaataaaatatttgtagaagttgacaaatgcatcgctgaggacaaagttattacagatttgaatatgcgtgcactgccagatctcttcaataagtttgttgatttggtaaactacttggagaaaaatgatgagaaagacagaagcgctgtaataaagatttttcaagatatgctggaggttgtaacaagagatatatttgaggaccagcttagtattttggaatcaagtcatggaggctcgaatggaaggaatgaaggcacaaccacatgggatcaagagtatcaattgtttcagccatctggggctatcaggtttcctctacaagtaacagccacagatgcttggctcgaaaagataaaaaggctggaactactgcttactgtgaaagaatctgctatggatgttccttcaaatctagaagccagaaggcgtcttacatttttcaccaactccttatttatggatatgcctgatgcgcctaaagtccgaaacatgctctcattttccgcattgaccccttattacaatgaacctgttcttttctctataaaagaacttgaggaggaaaatgaagatggagtttccaccctgttctacctgcaaaaaatttatccagatgaatggaaaaattttcaggaaagagttggttgggaggaagaatttaaagagactgaagagctaaaggaggagcttcgtctatgggcttcatacagaggtcaaacactagctcgaacagttagaggcatgatgtactaccggaaagctttgattcttgaagcatttttagacatggccaaacgtgaagatctcatggaagggtacaaagcagctgaatcagtaactgatgaacagtggaagatacagcagaggtccttatttgcgcagtgtgaagcagtggctgacatgaagttcacctatgtggtttcatgccagcaatatggaaatgataagcgtgctgctctttctagtgcccaagacatattgcagctaatgaggaactactcttctctccgtgtagcatatattgatgaggtggaagatagagtaggagacaagaaaatggagacagcttattattctactttggtaaaggttgctctaactaaggattctgattctgcagatccagtacaaaatcttgatcaggttatatatcggataaaacttccaggccctgcaatgttgggagaaggaaagcccgaaaatcaaaatcatgctataattttcacccgtggtgaaggcttacagaccatagatatgaaccaggataactatatggaagaagctcttaaaatgagaaacctactccaagagttccttaaagagcatggagtgcggcgtccatctatacttggagttagagagcatatttttactggcagtgtatcttcgcttgcatggtttatgtcaaatcaggagcacagttttgtgactatcgggcaacgtctgcttgcaaaccctctgaaggtccgattccactatgggcatcctgatgtatttgataggcttttccatctaacaaggggtggcgtcagtaaggcatcaaagagtatcaacttaagtgaagatatttttgcaggctataactcaactcttcgtggtggcaatgtaacacaccatgaatatgtccaagttggtaaaggaagagatgtcggactaaatcagatctctaagtttgaggctaaagtggcaaatggaaatggtgagcagactcttagtcgtgatatctaccggcttgggcaccgcttcgatttcttcaggatgctttcatgctacttcacaaccgtggggttttatttcagtacactgttgacggttgtcacagtttatgtatttctgtatgggcgcctttatcttgctctcagtggacttgaagaggggctatcacatggaagattcattcataatcatcctcttcaagttgctcttgcctcacaatctcttgttcagcttggttttctgatggctcttcccatgatgatggaaattggtctcgaaagaggatttgggaaggcactaagtgaatttgtcatgatgaatttgcaattggctactgtgttttttacattttcccttggcactaaaactcactactatgggagaatgcttcttcatggaggtgctcagtacagaggtactggtagaggatttgtcgtctttcacgctaagttcgcggagaattatagactttattctcgcagccactttgttaaagggattgagctgatgattctgctcatcatataccaattgtttggtcaatcttatcgctcaaccattgcctatatttttattacatcctctatgtggttcctagtgttgacatggctatttgcacccttccttttcaacccctcgggatttgagtgggcaaaaatcgttgatgactggtctgattggaataagtggatcagcaatcgtggtgggattggtgtgtctccagacaagagctgggaatcttggtgggaggtggagcaggagcatttgaagtattcgggaacaataggacttttagttgagataattttggccgtgcggtttttcatataccagtatggccttgtttaccacttacgtataacacgcgacaaaagtatcttggtatatttgatttcatggctcgtaattgtggtggttctgcttgttatgaagactgtgtccgtgggaaggcggagattcagtgcagatttccagctattcttccgtctgatcaagtttttgatatttgtttctttcatagctattttgattgtcttgatagtatttcttcatatggccttgcgagatatatttgtgtgctttctggcattcttgcccactggatgggggatcctattgattgcacaagcttgcaagcctcttgctcgacgggtaggattatggggatctgttcgtgccctagcacgggcctatgagataattatgggggtgcttctctttacgccaattactattttggcatggtttccctttgtatcggagttccagacgcggatgctatttaatcaagcattcagcagaggactgcaaatttccagaattcttggtggacaaaaaaaggaacggtcatctcgtaacaaagattgatttagccttcttgcatcttgttgcctgtctttcaacatgcacaggctgtaaatatttgtcagtgtatagtgtatttttgtcattacaatatcagatcaaggtttcatataatatctccttccttcctccccacccccaattcccctgaccttacagaaattttgtaaaaaaaatgtattgtgttacttttccatgttgccactatattgtatattgagtagatttcacaaagaaaaaaaaaaaacaaaaganac

SEQ ID NO: 32634 - DNA, 422 bp, Setaria italica
  Peptide Sequence Number=SeqID_98608
gtttttttttttttttagctttcaatgatacaatatatagattatacaaatcaaagaatatactgtgtgtaaatttgtgattccatacttgataacataattgcaaactatgcccccaaagccacagtatatagcaaagagttcaaaataactcacaaatctcctgtcaaggaaggggtacagtggtagtacaatattacatcagggtgctagaaagactttcctagtcggccaacttgttcaagcggtgaattgtactcctcgcaagcctatttgtagggtcaatcttcagaaccaaacgcaggtcctctgcaccaagcctatatttctccgtgctttcgtaaaggagagcacgctgcactagcactgagacattctccttgtcttgggctgttgtgctcattgagaaatcagggaaagat

SEQ ID NO: 32635 - DNA, 1233 bp, Setaria italica
  Peptide Sequence Number=SeqID_98609
atccgccgctgcgccacaggcgtccaggcccaccggcgcgaatcccaatgccagcgccaacagctctaccttctcgatgggcggcatggcgagcgcgctgccgaagacgacggcagcgccgatgggctccggtggatacggcgtcggtggccggccgatgaagcccgcgggcatggcggcgacggccggggcgcaaccgatggggcagaagaaggatccgtttggctcgatagatccatttgcggcgaagccagggtccatgaatgcagctaagcaggctagctcggccaagccggatcagggatttggggcgttccagggtgtgagttccatcacaaacgctggattcgggagcttccagagcgctgatgctggattcggtagtttccaaagctctggtgccacgaaaccttccagctttacgtctccacccccaccagctccggcgcctacccctgcggcagcagcagcgaactctagtgtagatccgttggacaatctgttcgcttcaaccacagctgcaccggctgcaaccacggcaagcaatggtggtggcgggggtgacatgtttggtgagatggatggttgggtcgatgtggaggcagagttcggtggtggtgacagtggtggtgcaaccacagagctggatggcctgccaccaccaccatctggattgacagtatcggctgccaagtccaaggggatggatagctacaagggagggcagtacgctgatgccatcaagtggttgtcttgggctgttgtgctcattgagaaatcagggaaagatgctgacattgttgaggtgttgtcttcaagggcttcctcatataaggaggttggtgagtacaagaaggccattgctgactgctcaaaggtgctggatcaagataaggagaatgtctcagtgctagtgcagcgtgctctcctttacgaaagcacggagaaatataggcttggtgcagaggacctgcgtttggttctgaagattgaccctacaaataggcttgcgaggagtacaattcaccgcttgaacaagttggccgactaggaaagtctttctagcaccctgatgtaatattgtactaccactgtaccccttccttgacaggagatttgtgagttattttgaactctttgctatatactgtggctttgggaggcatagtttgcaattatgttatcaagtatggaatcacaaatttacacacagtatattctttgaattttaaa

SEQ ID NO: 32636 - DNA, 532 bp, Setaria italica
  Peptide Sequence Number=SeqID_98610
ggcggaggacgggcgccggaacgggtactggatcgagctccggcggccgccagaggcggctaacaggccgttcaacgtggtgcggacccaggagcacgtcgcgctggggcagcgcgtggagcggcacgaggtgtacgtggacggcgcgcccgtggcgaacggcaccacggtcgggcacaagcggctacaccggctgccccgcgccgtcgcggggcgggcggtgaggatctggatcacggcgcggcgtggcccgccgctgctgtcggcggtggggctccaccacgaccccttcgtcgaggcgggcgcgatgtgacgtggggcggtcagcggggggattgtgtacgattcggtgattggtgttgcgtggtcagtcgacgtcgtcgtcgatcagccggacccggaccgaacggagccgcgacgcgctccgccgccaccaaacgagcggcgctccggcgatcggtcgctgtggcgatggggaaccacgtaaaaacggcgttctgtttggattgatccatccgttccgtgatgaaag

SEQ ID NO: 32637 - DNA, 362 bp, Setaria italica
  Peptide Sequence Number=SeqID_98611
tggaaggttgggtattgctcaagtcatttggttcagtgtctgtggctatactgcacagcaatgaagaagggaagacacgttgcaagtgggtctccatgggatggcatccctggtctattgcgcagaatgacgacagatgatgcactcttctttgttaacaagcgcggcaggctgctacagttcatggttgctttgcggaaattcaagtggaaggactgccacagccctcctgacaccaagattgcattcatagtggaccaggaggtcttcagaagaaacatcatcttcgtggtaggccgcaacggtcgcctgtaccagtacaacaggatcaggtgaggcgattggtagtgcctatgccatag

SEQ ID NO: 32638 - DNA, 722 bp, Setaria italica
  Peptide Sequence Number=SeqID_98612
tgtagttctattgtctattgtctagtactagtattctacttttttctttattaacttgtactaattggtctttgtactttttgtaattattcttaaactagtctaattggtctatttttggtttgttggtgtgctcatgtccacactacagccatgaaagctacgctgggaagctacaatggcagcttgtatcttgtcgacgtgcatgggaacttacatatcagagaaagaaatggagatgaactattgtggattaactgcacagcaatgaagaagggaagacacgttgcaagtgggtctccatgggatggcatccctggtctattgcgcagaatgacgacagatgatgcactcttctttgttaacaagcgcggcaggctgctacagttcatggttgctttgcggaaattcaagtggaaggactgccacagccctcctgacaccaagattgcattcatagtggaccaggaggtcttcagaagaaacatcatcttcgtggtaggccgcaacggtcgcctgtaccagtacaacaggataacagagctatggcataggcactaccaatcgcctcacctgatcctctcgcgatccccagggacggccatgcgaccatcgcccctgtccctggccggctccctcttcatggtgtccgagcacgggggcctggtggagtaccactttagcccgcaggacgggtgggagtgggtggagcacgggacgcc

SEQ ID NO: 32639 - DNA, 399 bp, Setaria italica
  Peptide Sequence Number=SeqID_98613
atttggttgtggttaagacatgagcacactacagccatgaaaggtacgctgggaagctacaatggcagcttgtatcttgtcgacgtgcatgggaacttacatatcagagaaagaaatggagatgaactattgtggattaactgcacagcaatgaagaagggaagacacgttgcaagtgggtctccatgggatggcatccctggtctattgcgcagaatgacgacagatgatgcactcttctttgttaacaagcgcggcaggctgctacagttcatggtagaagttcaaacagaatttaatttgagtcatgatagccttgttagatgaaaagctcatatttaacattttcactagaacagtggaaatagctgaagatttaaaatttaaaaacataacggc

SEQ ID NO: 32640 - DNA, 265 bp, Setaria italica
  Peptide Sequence Number=SeqID_98614
gtcccttgtattcgatcagcttagtatcagggacgttattgtaccatatctgatccctgctcttaggccaccttattggattactatagccctctggtagaggaacaaggcaggtaggaggcttctcagggcaatgcctttctcgatgttcatagtgcttggtggaacgaagcttgttgatagcttgtacgttgtcgaggcatggaatataatctgctctggcgtcaacattgcacagcttacaactaagctcattggggtactc

SEQ ID NO: 32641 - DNA, 312 bp, Setaria italica
  Peptide Sequence Number=SeqID_98615
tctaagtttcttcgtgttgctggcggaagggaacctctggccggctcttggagctcttgccccttccacttccacctctttccagcgaagatttcaacttttttttaaggctttgggagctcaaaaattggatttctgaaactgttcttggagaggaatccaccgcaatcgccctgagatttggagctggaatagtccatccatgggttccgggtccggccatggagcggccgcggccgcggccgtggtgttggtgtcttggctgtgcgccgcggtggtcggcgtcggcgccataggggcgaactggggcac

SEQ ID NO: 32642 - DNA, 321 bp, Setaria italica
  Peptide Sequence Number=SeqID_98616
ttagaacaaagaatcaatggacactggaggtcataatgtagctcaaaaaccttcatttatcttcggaattcagaagctttgttcaatgttatggggaaggaataatgtcttctgtgatgcaagaaagagtgtgtacggtagtaggcaataggagcatagccgtggtcagaacttgtcacatgtagcagcaattgtctgtaagctgtctgcgctagttatttggtatcatgttactacctccgattctttttatttgacgttcccgatagccaaatagaactacttgcaggctaaaatcactgtatgaaatgtcaaatataa

SEQ ID NO: 32643 - DNA, 1244 bp, Setaria italica
  Peptide Sequence Number=SeqID_98617
tcgtgacttgcctcgcctgtcggccgctcaccccgggccccggccgcctcgcctcgccgcgccgccgccgaccaccggctccgtgcctcgccgccgccctccacccccaccttcctgcgctcgccatgtttctgcttttagatatgaactgcgattctattcgagtaaattgatttctgagctttagatttgtagccttatgcagatattcattcactttttttttagagtaaagatattcattcactagaatggtgctgagcctgaaattacttttggttgtgatgttttcttatggatttggatgtttgttattatcatttccgtttcagacaatacagagtcaaggttcagactcagggtaattttctgctgcactgatatacagactgaatgatgtcctacaaaaaaaaatatacagactgagtgtagatggcgatatgttcactatgtttcaggattcaggaattggcttctggaacatatcaggagaaaaaaccctatctatcaactaatagttgtatacttgtataggcaaaggtttccagtaagaggatgaaattttataaatccatggtgttttaaataattgtgttgttaaagtcgtgcgcctggtaaggtgcagaaagaagttatctcagggaacatcttcttttagtggactttgttgtgtaaaaaacatggttacatatatgctggtttaggaaagaaaaatagtttggctgtagatatttactacctggaatttggctttcaagaagcctgaccttctattgaacattgcctaattggtcataggcaagcaccaaccgcttcagttgtatgcttgtttcaaggagctaactgaagcgcttgtcatgcttatatgaacatttttgttactgttgctcttttactaccacttcagtttgtatcacatctcatgctatgcatctttcttgttcttacccacttttttccctcagtcctgaaggatctgaagtatgctgacacacatgaatgggtgaaggtcgaggacggttcagcaactattgggattactgaccatgctcaggaccatttgggtgatgtcgtgtatgtggagctgccagaagtgggtaacagtgtataccagggaaagaactttggtgctgttgaaagtgtgaaggcaaccagtgatattaactcacctgtatctggagaggtcgttgaagtgaatgggaaactaagcgaggaacctggatttggttctaattgtctaagtt

SEQ ID NO: 32644 - DNA, 479 bp, Setaria italica
  Peptide Sequence Number=SeqID_98618
cggcgaagggacgacgagtgaggtgatcaaaggactggcagaatgagcccgtgtcatctcgtatatcctcagctcgtgattggaattttgattctgatggtgcctttgagggtagcagccatagtgattgtgcatttggtgattcagatggtgagaactgtccaggtgcagggccagggccaaggatggagagatgactcctgagctctgtgttgaaaccccaaggcaattttgtccatgccaagttgtttgcttggaaggatgcacaggttgcaaagctcatagaaaatgatgaaggatctgaagtatgctgatactcatgaatgggtgaaggttgagggtgattcagcaactgtggggattacgaaccatgccaggatcatttgggtgatgttgtgtatgtggagctgccagaagttgacatcagtgtatcccagtcttgtcctagtaagtttgtactattctagttgttattccct

SEQ ID NO: 32645 - DNA, 660 bp, Setaria italica
  Peptide Sequence Number=SeqID_98619
ttcgttgtactttgtccttcgtcccttccaccccccaccttcctgcgctcgccatgtttctgcttttagatatgaactgcgattctattcgatcctgaaggatctgaagtatgctgacacacatgaatgggtgaaggtcgaggacggttcagcaactattgggattactgaccatgctcaggaccatttgggtgatgtcgtgtatgtggagctgccagaagtgggtaacagtgtataccagggaaagaactttggtgctgttgaaagtgtgaaggcaaccagtgatattaactcacctgtatctggagaggtcgttgaagtgaatgggaaactaagcgaggaacctggattggtcaatgcaagttcatatgaccagggatggattatcaaggtcaagctcagtgattcaggtgagctcagttcgctgatggatgatgagaagtacttgaaattctgtgaggaagaagacaagcattgaacaaacaagaggtgcttgtgagtgccaaaaacctgtatttctagcttttatcatgggatttgaactgccataaaatatttgcgtcttgtaacccaccttttcaagttgtcaaattttttatcatatggaataaatagttttagatatagtgaaattgtaataacaagaaaaagattatagga

SEQ ID NO: 32646 - DNA, 901 bp, Setaria italica
  misc_feature (874)..(901): n is a, c, g, or t
  Peptide Sequence Number=SeqID_98620
gtcagtcaccaccaaacgaaagcacgaacgagcccggcgacagagcggaaagcggcgccgagcaaccaatcccgccgtctccccacgccgccgccccggatcatggccatggccgcctcctcccggctgatgtgggcgtcccgcgccgccgcctacctcaggatctccaccttccccagggccttctccaccgtgatgaaggatctgaagtatgctgatactcatgaatgggtgaaggttgagggtgattcagcaactgtggggattacggaccatgcccaggatcatttgggtgatgttgtgtatgtggagctgccagaagttggcatcagtgtatcccagggaaagaactttggtgctgttgagagtgtgaaggcaaccagtgatatcaactcaccagtatctggagaggtcgttgaagtgaatgagaaactaagtgaggaacctggattggtgaatgcaagcccatatgacaagggatggattatcaaggtcaagctcagcgattcaggtgagctcaattcactgatggatgatgagaagtactcaaaattctgcgaggaagaagacaatcattgaagaaaaaagagtgtcttctgacatcaaggacctgtgtttcaattcaagctttatcagtgcttttggtctctgagacccgctgtcgcaaattggcaaggttcatcgcatggaataaattagtctgagatccgagcgtgtaaaggacatgtccgagtttcgttatctctttgtagttgtaatgctcatgagttttcgtttgctgtctctgtttcattccttggtatacaaattgtttggtcctttgtggttggttgccgatataattgaagcaagaacgattatgaaactcttccannnnnnnnnnnnnnnnnnnnnnnnnnnn

SEQ ID NO: 32647 - DNA, 458 bp, Setaria italica
  Peptide Sequence Number=SeqID_98621
aagacaaaataactaataccaatcctagtgatgtcaacgacctagccaatcgtttggatttactgtggaaattgccagtggaaccttcaagtccagtagatgaagcaatttgggaagcatccaaatggctaacctcttgaaactgcatctgcatcatatttccttcaacatttaatctctgataatggggatcttctggaggcctttttctacgaactggagaaaatctataccctgaagatccaatggcaccattcagagcaacattagctgcttgttgaatgttatttcgatcacatgaattatccccttgaattatagcgcgcagctcctcacttccatcgaagttcttgcaatccatacatttacaattcttggagcaaaggatatttgcttggaaacattcacagtacttctttagacaacccgacttcttgcagtgacaacctttattatgt

SEQ ID NO: 32648 - DNA, 328 bp, Setaria italica
  Peptide Sequence Number=SeqID_98622
gccagccagtgaatggaagaaggcatcaaagcagagccgaagaaagaaggggcagccacggacccggccaagggttcgacgagcaccgtgggggtcatggcggacgcgacgttcaagagcatcggcgacgtgctccggctgctgcccacggcgacggtgatcgtgtacgaggtgctcaacccgatcgtgactaacaccggagactgccacgtcgggtacaagatagccacggggatcctcctaggcctctgcggcttcttctgcgccttctccaccttcaccgacagctacgtgggcgccgacggcaaggccaagtacggcctcgtga

SEQ ID NO: 32649 - DNA, 433 bp, Setaria italica
  misc_feature (15)..(15): n is a, c, g, or t
  Peptide Sequence Number=SeqID_98623
gtgattgattgtgcngcgcagacaagatgacatcaaacgagatcgtcttgatgttcatcttgtctgcgcagcacaaatcaatcacaatcagccattctcgtcatgcacgatcatcaacacgaaacggttgtaagttgtagcacgaggtgacaggtgagcccaaccaccgccaaggtggacgctcatgctcatgcagtcatgtgattaaggcgggtccacatgtcagcgagcgttcccggtagcgtgacaggccctgtcactggcagactgcacaggtgtttgcactggtgaagggtgatgagggtgggctatacaatactgtaccttggatcttgcagaggactcttctcatcttcttgtagcatctctcgcattcaaggtcaaccttgaggacgatcgtggagatctgcgatgagatcaaatgatttaaata

SEQ ID NO: 32650 - DNA, 505 bp, Setaria italica
  Peptide Sequence Number=SeqID_98624
ggaggcaataagaggaggggaaggaggaggagggggaggggaaagagaaggtgaagaaggagaaagcgaagcttgtcaaagaagatgatgaagaagaagaagaagacgaggagcaggtgaccctggagccctttgagcgcgaccacgcctgcgtcgttggtggctacaggatgcccaagaagcaaaaggctacttaaaaaagaagagatggtgtttgatgcttgcactactagatgatatgttgtatcccggagaaagaactttcgcaagtgttgggttttggagcagctatattgaacttgtgctgtgtttgcagcaatttagtcgaatcaagagatagtcgtggctttgttgatgttgttttcttgggtatcctgtagccaccaacgacgcaggcgtggtcgcgctcaaagggctccagggtcacctgctccgatggcttgaactggtcagccttcagcttctccacttcagcagcaaacacagcctcagcaggcatggtgga

SEQ ID NO: 32651 - DNA, 1483 bp, Setaria italica
  Peptide Sequence Number=SeqID_98625
cagaacgaggatgggacaaaggttgaatacagggtgtggaatcccttccgttccaagcttgctgctgctgtgcttggtggtgttgacaacatctggattgctcctggtactcgtgtgctgtatcttggtgctgcttctggcacaactgtgtcccatgtgtctgatattgttggacctgatgggttggtctatgctgttgagttctctcacaggagtggtagggatcttgtcaatatggcaaagaagagaaccaatgtgatccccattattgaggatgctaggcacccagcgaggtaccgcatgttggttggcatggttgatgttatcttctctgatgttgcacagcctgaccaggtatacctgtcttatcattttatatttgatgcttgtttctatcattgttactaacctctggtgaccgttggatattattatttgagtctttttgtggtgttccctgcttttttttgggggtgatactgggtctaagcaagtgatgagcatactcggattccccttcaggacatcaatcggatgatgcaaattcgagtttctgatgcgtccatctacccaatgcctaaagcttctttctttcaatttgtgcttcagacttttgttttcttgattctcacattgattggtgcagcctgttttactttaacattcaatttggaaggttagtgcgtcatggtccatgtcaaataggtctaaggacttctttggttgtggacagcacaaggatcattattgagttgggttcctttgttattttgtttatttaatggatgcatattcttcgcttctccatttgttgtgtgcatttgccatttgttttaaagctttcccttatttaaaggtgttttgtgttatttgtatttcttttatttgcccatacatcaatttgaccctttgcaagcctgtgattgttgtgctattgagtgtggttgagaaattacgtgctaattcatggtttcttttactgtaaattaaaaagaagatgggggctacagatatgctggttgttaactttagatatctagttatactagtataattatcaggttttcatggcattgtgatggccctctgggagaactgcgagtgtaactgatgcacagcttatgaatgctctatggttattctatactgcaggctaggatcttagcccttaatgcttcatacttcttgaagaatggtggccattttgtgatatctatcaaggcaaactgtattgactccaccatgcctgctgaggctgtgtttgctgctgaagtggagaagctgaaggctgaccagttcaagccatcggagcaggtgaccctggagccctttgagcgcgaccacgcctgcgtcgttggtggctacaggatgcccaagaagcaaaaggctacttaaaaaagaagagatggtgtttgatgcaaacacagcacaagttcaatatagctgctccaaaaccccaacacttgcgaaagttctttctccg

SEQ ID NO: 32652 - DNA, 1223 bp, Setaria italica
  Peptide Sequence Number=SeqID_98626
ccccaccagaatcctaaaccctactccccttcggcggcggcggcggcggcggcttcaagctcctcgtcgactcggaaccatgaggccaccagcgcgaggacgcggcggtaggggaggtagattcgatggtggcggccgcagcggcggcgggggccgtggctttggcggtggtagaggtgggagaggtgacaggggtggcagaggtggaggtggtaggactccgagaggccgcggtggaggcatgaggggtggtcgcggtggaggcatgaggggcgggagcaaggccgtcgtggtggcgcacaagcacgccggtatcttcatctccaagtccaaggaggacgcgctctgcaccaagaacatggtccctggcgagtccgtctattcagagaagcgcgtctccgtccagaacgaggatgggacaaaggttgaatacagggtgtggaatcccttccgttccaagcttgctgctgctgtgcttggtggtgttgacaacatctggattgctcctggtactcgtgtgctgtatcttggtgctgcttctggcacaactgtgtcccatgtgtctgatattgttggacctgatgggttggtctatgctgttgagttctctcacaggagtggtagggatcttgtcaatatggcaaagaagagaaccaatgtgatccccattattgaggatgctaggcacccagcgaggtaccgcatgttggttggcatggttgatgttatcttctctgatgttgcacagcctgaccaggctaggatcttagcccttaatgcttcatacttcttgaagaatggtggccattttgtgatatctatcaaggcaaactgtattgactccaccatgcctgctgaggctgtgtttgctgctgaagtggagaagctgaaggctgaccagttcaagccatcggagcaggtgaccctggagccctttgagcgcgaccacgcctgcgtcgttggtggctacaggatgcccaagaagcaaaaggctacttaaaaaagaagagatggtgtttgatgcttgcactactagatgatatgttgtatcccggagaaagaactttcgcaagtgttggggttttggagcagctatattgaacttgtgctgtgtttgcagcaatttagtcgaatcaagagatagtcgtggctttgttgatgttgaaaacttaaatgcgcctaatgtttccagtagctatggtcttctgtttaaaaaaaaaaaa

SEQ ID NO: 32653 - DNA, 385 bp, Setaria italica
  Peptide Sequence Number=SeqID_98627
tcgagcatggtagggccggaggggtacggccgtgggtggggtcagacgtcgctgggcgacatgccggagagctgcgtggcggcggtgctgctctacctcgacccgctggagatctgccaggtagcctgcctcaaccgggcgttccggggtgcggcctccgctgactgcatctgggccgccaagctgcccgccaaccaccggtacctcgccgcgctggccgccgcggccgacgacgactgcggctgcgacggcgcggccgagggcaatggccggtgctgctcctctgccgcgatcaagaaggagatatacgcgcgcctgtgccggcccaccccttcgacggtggcaccaaggaattttggattgagaaggacaagggaggtttttg

SEQ ID NO: 32654 - DNA, 327 bp, Setaria italica
  Peptide Sequence Number=SeqID_98628
gtccaaacattggcaacacgtgcccagcaggaaccatgttcaggaagggtgtgccagttcagttctggccatatggataagcttggggggaggacatacaagtggcgatccacagctggtagcaattgttagtatctcttcttgaattcatatagtgctagtattattaaaaaccacagcatacaaggaaaaaatctgtgtaaggaacatttgcagattcctttaaatgggagattccaaagccatacaaagacagcactggaagtgtataagttcgagctttaattaactagattaattacatcctggcaaaatgatttactggga

SEQ ID NO: 32655 - DNA, 439 bp, Setaria italica
  misc_feature (379)..(439): n is a, c, g, or t
  Peptide Sequence Number=SeqID_98629
cgaccgcgccctccgcggtgacccgaccacctcagtctccgccccggccggcgcccccaccgagactcccgccggcaacggcgccgcctcctccgccgtcagcttcgtcgccgtcgtcggcgcggtcgccgccgccgtcgtgttctagatgatgagatgcgccgtcggagtgggtcgtgtcatgggatctcgtgttgtttatactgtcattctttttgcgattcttttttagatactgatgatgatggagagagagcagagaggtcatttgaggagggggggatttactgcggtgtagtagcgtgctgttacacatcatgattcatgatgacatgattatattattaatggaattcttttatttgttactactaaaaannnnnnnnnnnnnnnnnnnnnnnnnnnnnnnnnnnnnnnnnnnnnnnnnnnnnnnnnnnnn

SEQ ID NO: 32656 - DNA, 279 bp, Setaria italica
  Peptide Sequence Number=SeqID_98630
agcacaatgtctttgtagttagtttttagaacacaatgctatttgcctttttgagtagccattatagttgtatatactatcttggtttagttaggaggcacatagagataatgttggctgattcagattagagcacaattcttttgctagaggtgttctgtgagaagccatacattgtaacttattcatctttctgtttgtttctgttgtcctctgcttatcagatttactgaccagatgactataataatatagaacaaacattccttaggtaccgta

SEQ ID NO: 32657 - DNA, 286 bp, Setaria italica
  misc_feature (275)..(275): n is a, c, g, or t
  Peptide Sequence Number=SeqID_98631
ccgagttcagagcacacttggagcccgacgggcgacagcgagccaagcaaaggcggccacggaacaagccaatcccgccgccaccaccagctccgtacctccatcgcgtcctcgcaaagtcgcaggccgggcgacacaattccgagagtggggagagggagaccgagagtgggggagggagctccgcttcgcccttctccgcattggatgtgatctcggagcggctgaggattgaggataagaatcattgcattacttttggatcctaaaagganaacagtgggtt

SEQ ID NO: 32658 - DNA, 797 bp, Setaria italica
  Peptide Sequence Number=SeqID_98632
tatttggtttccttttggtcttctaaactactttcttacttgttttctaggtctaatttctaaattatttgtcttgttatcatcctctttgcctagcatccaaagtagcatgggcatgggtcaatcagcgcaacctgtagcacaaggaggcttgatggctggttcacaattaggacaaggtggaattggtgcaaaccaaaatgtgagtgtccttgggcctacagctatctcttcagcgccagcaatgatgccaacacctgggatggcccagccgacaggagtcaattccctaggtgtgacaaacaattctgccatgaatatgcctattgggcagcatcccaatgcccaacaactgccaccaaagtatgtcagaatttgggagggaactttatccgggcagaggcaaggacagcctgtatttatttgtaaacttgaaggttataggagcggaacagcgtctgaaacacttgcagcagactggccagaaactatgcagattgttcgcctcatagctcaggagcatatgaacaacaaacaatatgttggcaaggcagaccttctagtatttcggactttaaatcagcatgggtttcttggacaactacaagagaagaagctgtgtgctgtgatacagctaccttcgcaaactctactgctgtcaatgtctgataaagcaggccgtctgattggcatgctcttccctggggtcccaactcagcagccaccgatgcagcagcagcaacttcaacagcaacaacagttacaacagcagcaactgcaacaacaacacatgcata

SEQ ID NO: 32659 - DNA, 2304 bp, Setaria italica
  Peptide Sequence Number=SeqID_98633
taagtctagtagtagtagtaagtaaacttgtatttttgggggtaggtcctaaagtcttgggggtttggtatttagtcgtagtagttccttcggtagttcggtttcgcggcggggggcggcggatggcggctgcggcggcggagaggcagctggtggttgctgtcgaggggacggcggcgctggggccctactggtccaccattgtgggggactacgtcgagaagatcgtgcggagcttttgtgcaaacgaagtgccagggcagaagcttgcaggggcaccacctgagcttgcattagttgttttccatacccatggaccttacagcgctttttggtgttcagcgaagtggatggacaaaagatatcgattctttcctatcatggttatctggaataccattcagtggaggaggatttagcgaagcttctacttgtgaaggtctcgccgaagcactaatgatacttcaaggaactcctaatacaacccagagtcatccaaaccatgaagcacaaaagcattgcgtacttgtcgctgcaagtaatccatatcctttgcctacacctgtctactgtcttcctactcaaagtactgatcacaaagagaacactgagtcatcaaaagagccttcaattgctgatgctgagaccgttgcgaaatcatttgctcagtgctctgtctcattgtcagtgatatctccaaaacagcttccaacactgaaagcgatatacaatgcgggcaagagaaatcctcgagccgctgatccatcagttgatcatgcaaaaaacccacactttcttgttttgctatctgagaatttcatggaggcgcggactgctctaagtcgtcctttgcatgggaacttggccccaaatcaaactgtaacgaagatggacaccacaccttcagttactatggcaggaccgacttcaaatgccaacccctcagtgaatggaccaatgatgggccgtcaaccagttggtgttggaggcatttctactgcaactgttaaagtggaaccagcaaccgtaccaccaatggtctctgcacctgctttctcgcatgtaacacctatttcaaatgtgtcttcgcaaggaatatcagcactgcaaacctcatcaccatctcttatttcacaagaagcaaattttgcaaatgataatgtgcaagaacacaaacctataatacaccctgttcaacagccagttcggcctggtggtcatggtagcctcctcaacaatctgtcacaggttcggctgatgaactcaacttctttaggaggaggagctacctcgatgggacttcctaacattggagcaacaccaattcaagtccacatgtcaaacatgatatcgagtggcatgacatcaacgccctctgtcatctcctctatgtctgcacctggacaacctattagtactcaacaaatggtgcagagcacagctattggttcctttggctcaaacacttctactgtttcaggcaattcaaatattgctgtatcatcctctttgcctagcatccaaagtagcatgggcatgggtcaatcagcgcaacctgtagcacaaggaggcttgatggctggttcacaattaggacaaggtggaattggtgcaaaccaaaatgtgagtgtccttgggcctacagctatctcttcagcgccagcaatgatgccaacacctgggatggcccagccgacaggagtcaattccctaggtgtgacaaacaattctgccatgaatatgcctattgggcagcatcccaatgcccaacaactgccaccaaagtatgtcagaatttgggagggaactttatccgggcagaggcaaggacagcctgtatttatttgtaaacttgaaggttataggagcggaacagcgtctgaaacacttgcagcagactggccagaaactatgcagattgttcgcctcatagctcaggagcatatgaacaacaaacaatatgttggcaaggcagaccttctagtatttcggactttaaatcagcatgggtttcttggacaactacaagagaagaagctgtgtgctgtgatacagctaccttcgcaaactctactgctgtcaatgtctgataaagcaggccgtctgattggcatgctcttccctggggacatggtggtgttcaaaccacaggtcccaactcagcagccaccgatgcagcagcagcaacttcaacagcaacaacagttacaacagcagcaactgcaacaacaacacatgcatatgcagccacaaggcctcccgcttcagcagcagccgtcgcagatgcaaccgattgtctagtct

SEQ ID NO: 32660 - DNA, 1238 bp, Setaria italica
  misc_feature (28)..(28): n is a, c, g, or t
  Peptide Sequence Number=SeqID_98634
agagggagtactacgagaagcagctcgngaccctgagaaccttcgaggaggtggaggcgctctgcatgcccggcgaattcgactcggatggctcggatcatggggccttcgatgacatggtggagcagaagcagagcgagttcgccatgaagatttccaattacaccaatattgtgctactggtttttaaggtgtatgctacgatcaggacagggtccatggcaattgcagcgtcaacgcttgattcgttgctcgatttaatggccggcggtatcctttggttcacacacctttccatgaagagagtgaacatttacatgtacccaattgggaagttgcgtgttcagcctgttgggatcatcgtcttcgcggccatcatggcaactctgggtttccaggtcttggtcaaagctattgagcaattggtggagaataaacctggcgcgaagatgacatcagagcagctaatatggttgtactccatcatgctttcagcaactgctgtgaaacttgctctctggttttactgcaagagttcaggaaacagcattgtccgggcttatgcaaaggatcactattttgatgtgataaccaatgttgtcggtctggtggctgctgttcttggggacaaattcgtatggtggatcgaccccgcgggggctgtactgcttgctgtatataccattgtgaactggtccaaaaccgtgttagaaaatgcagttaccctagtgggccgatgtgcccccccagagatgctgcagatgctgacctacctcgccatgaagcatgacacacgagtcaagcgggttgacactgttagagcttacagcttcggagttctctacttcgttgaggttgacattgaactctcagaggacatgccgctacgagaggcgcacaccattggcgaatcactgcaggagaagatcgagaagctgcctgaagtcgagcgggcgtttgttcatattgattttgagagcactcataagcctgaacacaaagtccggagcaggctgccggctactgatccttgacagattttcacatactcatgtacagtgttagatttaactgagagcacggtgctttcacttaaggcaccggagatcagcgacgaactcgatggtaaaatgtaatttcctttcctttgcacctgtaaaataagggcagcacggctgtctcaccggaataatacatgatttaacctttccggtttactgatcctgatcgtgtttccg

SEQ ID NO: 32661 - DNA, 955 bp, Setaria italica
  Peptide Sequence Number=SeqID_98635
acggttctgcttcgacagggacacccaaagggcccctggtctacgagtcttggagaacggatcgctcgagaagtacctctacggcgacgaggaggacacggcggcggcgccgccgaggctggagtggaagacgctgcacggcatcgccgtcggcacggcgaaggggatccggtacctgcacgaggagtgccagcagcggatcgtgcactacgacatcaagccggccaacatcctcctcaccagcgacttcaccccgaaggtggccgacttcgggctggcgcggctgggcgagcgggagaacacgcacatgtcgctgaccggcggcggccgcgggacgcccgggtacgcggcgccggagctgtggatggcgctgccggcgacggagaagtgcgacgtgtacagcttcgggatggtgctgttcgagatcctgggacggcgccggaacttcgaccctgaccatggcgagagcaaggagtggttcccgaggtgggtgtgggagaggtacgagcagggcgagatcaggagcgtcgtgtcctgcgacgggatcgaggaggcggacagggagaaggcggagatgatgtgcaaggtggcgctgtggtgcgtgcagttccagccggcggcgaggccgacgatgagcagcgtggtgcggatgctggagggagagatgcccatcgtcccgccggtgaaccccttccactacttgatggacagcagcggcggcggctcaacaagctcggggctgtggagcggcacgtaccagagcagcagggacaccgccggcagagacagtgaggtgtcatcaatgagccctgctgccaagtcggatgacgcgatgattcaagatgttaagcggactcacgcgtcggtgtcaatgatttagaatttgtcatcttgtacacatttgttaatgtttacatcacgtacaattaggggtgttctgtcattgtcttggatt

SEQ ID NO: 32662 - DNA, 314 bp, Setaria italica
  Peptide Sequence Number=SeqID_98636
catccaagcaggcgggccccaccgtgcacaccagctttgtcttccgcatccccatgaaacccttctcccgcagctccgcctccgacaccacgtccatcgccgcctcccctgtcgtccccgccgccaaggcgcggatccggtgggcggccacgtggcggcgggccgccggggaggaaccggcgacaaggtagggggagggcctggtggtcccggcggaggccattagggttagggtttacggggcgacgaggcggcggaggggcagaggaggaggtggaggtggtggactggtgggccggcggatgatgcgaggg

SEQ ID NO: 32663 - DNA, 266 bp, Setaria italica
  Peptide Sequence Number=SeqID_98637
ggacctgttggaacaaatgtcaacccagaattatcaacttgtctctgctgaggaggggacataacaaatggcctgaacacaggattgcgcgggttgacttttagtggattatgatcatccgatacttgactagaagttgattgtgctgaagggctaggccctgcagtttcatcagaaaagtcactgttaacagcttgtgatgcatagctatttctattgccatcaagtcctgatgtgatgcgctcagtcattatttcgaactctcg

SEQ ID NO: 32664 - DNA, 428 bp, Setaria italica
  Peptide Sequence Number=SeqID_98638
gccgatggataaatttacctgtcttggaaatcacatgtgtgcccataacattcttttctaaatgcattcataaatacaaatcaatacttatccggctgcattagatatttaggtatccctatgcctcgacttcatgaagtatgttggagttgagattggtagtgcttgacagtttagattcatgtgcttatggctacgataagagtttgtaagccatccattgtttcaattctacctacataagggatggcatgcaattggatttcagttcaaatatacatctgtatcttgtggacccttctatttaggaaaaatggttaacatcttcttgtttcatggttagtttcaaatctgtatatttgtgcctactagtcaaagcaactttgattcatccatgcacctttatatatgttttaagagtggattta

SEQ ID NO: 32665 - DNA, 175 bp, Setaria italica
  Peptide Sequence Number=SeqID_98639
gctataggcagcgggcaaaccaagccaagcagttgatctctcccaaggcgtgcacgctgacgcggtgagcaatggcgggtcggggaagaggcagtgcaagcggcagcaacggcgctctggtggccgccggcgcggcgctcctgtgcgcggcggcggtgctcctggcgccccgccc

SEQ ID NO: 32666 - DNA, 655 bp, Setaria italica
  Peptide Sequence Number=SeqID_98640
ccttgataatcttgatctttgcagcagcatcaaatttctccagcttcacatcgaagactgtcttctcagctttcttctcctcagcctttgcagcaccagcaccagaaccaccctgagcaccaaaactgaaaccctggcctgatatcgcctgaggtggctcttggttcagtcttaagaggagggctggagcaatctgtttgatctcctcaggagggagagcagcaatgcgatcagcaagatccacaactttctctgatggtggtggcatgggcccataaggatcatatacatcagggtatttgtacttcttagcacctgtgtcctttgcagcctcggtgctgtatagatgggcccaaactgctgaaagacgactgctagaggacggtcttgaaagacatagccgtcttgctattgtacagagactcatcctactatcagctatgtgagtggaacactctccctcggtggctcagaactcagcaacggatcagggaatcgtttatgcggcgcggcgtccacgcgccggcagtggcgcggggaggcgaggagaagccggccgcgcgcgctgtcgaggcggcgctagggttctgcgccggtggggtgtaggcgcgcggcggctgcgtggagcgaaacggcgagacgagcgagagattga

SEQ ID NO: 32667 - DNA, 193 bp, Setaria italica
  Peptide Sequence Number=SeqID_98641
ttacatgcgccttgtttatgaacttggacatgtttgtctcacaatgttagatcacttttgtgttctgttgatgaacttggacatgtttgtctcacaatgttagatcacttttgtgttctgttgatgtttgagctgactttgcgcaactattaaattcttgacctgatatagatgttttttttaaacctcaaag

SEQ ID NO: 32668 - DNA, 1375 bp, Setaria italica
  misc_feature (1322)..(1375): n is a, c, g, or t
  Peptide Sequence Number=SeqID_98642
aactaacggttaacaaataaccgaacctaaccgaacctaactaacttacttaacttcttcttataacgcaagaaagaaaagggtgaaatcgaaacctgaaaaggcctcactcggttcatccgcctccgcctctctcccccgcagcgcacaccgccggcgacgccatggccatgaagctggacatgtcagcgctcgagaccaacttcgccgtcccctgcggcgacgacggcgatggcatgtacttctccgcggaggcccccgacgtgccgtccatggtgctccccacctgcgccgacttcgacgggttccaggcggcgaccaaggatatggtgaagaataagaaggggacgaccacgctcgccttcatcttcgacaagggcgtcatcgtcgccgctgactccagggccagcatgggcggctacatatcttcgcaaactgtgaggaaaattattgaaataaatccctacatgctgggaacgatggctggaggcgccgcagattgccaattttggcataggaaccttggaaacaagtgccggctccatgagctttcaaacaagcgaaggatctctattgctggtgcttccaaactgttggccaatatcctttattcatatcgcgggatgggactgtcaatcggtacaatgattgctggatgggatgagaagggtcctggcttgtactatgttgacagtgagggtgcaaggctagtgggaaacaggttctctgttggctctggttccctctatgcttatggtatcttggacgaaggttaccgcttcaacatgtccgtcgaggaagctggtgagttagcacgacgggctatttatggggcaacattccgtgatgcagcaagtggtggttgtgttagcgtttatcacgttggccctgatggttggaagaagctttctggagatgatgtcggggagctgcactaccactactaccctgttcagaaaacaccggttgaacaggaaatgaccgacgcacctagtgcttctgcttaaacccagaacacccgagtggaggcgcatgtatccagggaaaccgtgaattgtcaaagcgtcttgtttatgaacttggacatgtttgtctcacaatgttagatcacttttgtgttctgttgatgtttgagctgactttgcgcaactattaaattcttgacctgatatagatgttttctttgaggtttcgtttgtgcctgtctgtgtgagccctggtctgtgatatgtttgctgccgcgggcctgcggctgtttgtaatcaggtctcgtgtaccaaagcgcatctacaatttcacagaagcatgcattgccccaaagnnnnnnnnnnnnnnnnnnnnnnnnnnnnnnnnnnnnnnnnnnnnnnnnnnnnnn

SEQ ID NO: 32669 - DNA, 247 bp, Setaria italica
  Peptide Sequence Number=SeqID_98643
gctcgatcccctcgccgtggcatgcaggactccctccggtctctcctggaattcgcctcgccggggtcggagccttagctcccctcaggcctggcgcctgttggatttcaccgcagccggctgtctccagggagggtaaaaggggaatactggttccccatctggtgatgcattgctagttgctacccactgggtaagacaaaaacaaggtaaaagcatggagtatacagcttcagaactgatgtat

SEQ ID NO: 32670 - DNA, 198 bp, Setaria italica
  Peptide Sequence Number=SeqID_98644
tttgctatctctagaacttgtgtcataaatattatttgtttgtgttttattgctaggcttcattttgacactgggatggcttttggaaagagcttttttgttaaaacttttgcacaggcagcttctggcttgcagcccagacaatccaaattagccttctggacaagctcttattgatggttagcttccagtcatggt

SEQ ID NO: 32671 - DNA, 195 bp, Setaria italica
  Peptide Sequence Number=SeqID_98645
atctgctgcctctccgctctccgggctagtttgctggtgactcggagcggggcgagcacgagccggaggagccttgtgccttgttgcttgccgtgtgcgtggtggatcgcgtgctcgtgcttgtgcctgcctcagccctccccacgctgcctacccttttgccttttggcgcgtctcaacaacacgcaacacgga

SEQ ID NO: 32672 - DNA, 519 bp, Setaria italica
  Peptide Sequence Number=SeqID_98646
cctatcccctgtgtgccttgtatcccctgttgcgtgtctcagcatcaagagcctcaaggctgagaagtctgagctgcgtgacgagaagacgaggctgaaggccgagagggagaggctggagcagatgctcaagggtgtcagcgccgcggctgctccggcgcccttcgtcccgcaccctgccgccaccggaccttcgttccacccggcggcgtttgtgcaggccggcaagttcgtcacgtaccccagctacgcgccaccgccggcgttctggcagtggataccgccgacgtccctggacacgtccaaggaccccgcgcactggccgccagtcgcctagtccaccagctgatgatcgtggcatcattgatcggtgatgcgtcgccgcgtgtactgaacttgcgcgtggtgctgaattttagtatatcccgtcactcactgatactttaataaccaaacgaaacaaaacaaaaagaaacaaaacaaaaaacaaaactaaagaaactaaaacaaacaaaataa

SEQ ID NO: 32673 - DNA, 1121 bp, Setaria italica
  Peptide Sequence Number=SeqID_98647
caagcacgagcacgcgatccaccacgcacacggcaagcaacaaggcacaaggctcctccggctcgtgctcgccccgcgccctccactccgaaagatctgctgcctctccgctctccgggctagtttgctggtgactcggagcggggcgcgatgagctgcggggggcaggcgggcgggtggctgctggactatgggctggtggaggaggagatccagggttccgagttcatgtacatggttgacgacccggccgtctccagcgtgatactggggttcgatgctcccaggaaggaggacggcgtccaggacaaccccggcgccaagaagagatcccggccggagtccagcgccccacccggcaccaaggcttgccgtgaaaagctccggagagacaggctcaacgaaaggttcaacgagctctgtgctatcttggagcccggcaagccaccaaaggctgacaaagtcgccattctaagcgacgctgcccgtctcctgagccagctgcgcgccgaggcccagaagctcaagcaatcgaatgaatcgcttcaggactccatcaagagcctcaaggctgagaagtctgagctgcgtgacgagaagacgaggctgaaggccgagagggagaggctggagcagatgctcaagggtgtcagcgccgcggctgctccggcgcccttcgtcccgcaccctgccgccaccggaccttcgttccacccggcggcgtttgtgcaggccggcaagttcgtcacgtaccccagctacgcgccaccgccggcgttctggcagtggataccgccgacgtccctggacacgtccaaggaccccgcgcactggccgccagtcgcctagtccaccagctgatgatcgtggcatcattgatcggtgatgcgtcgccgcgtgtactgaacttgcgcgtggtgcagaatttgaccgaagcacgcctgaagaaaaacttcggggggtgctgattgtgtagcagtgtttgtgcttgtgtcgtggataaagatcagtgagtgacgggatatactaaaattcagctgatcattgccgattggagaaagtctatgtaacagccctaattttaaagtaatgaaggtgatatgaaattattactaaaaaaa

SEQ ID NO: 32674 - DNA, 408 bp, Setaria italica
  Peptide Sequence Number=SeqID_98648
cgaggccacttcctcttcttccttcctccacagcagagccaagaagaagcacgaggggtcagggaatccaaccaagcccaggaagatgggtgcgacgctcctgcaggcggtggcggcgctggtgggccggctgcagcgggcggcgcggaggatggctgccggcgccggaggggccggcaaagggtcgccgcctcgcgccgtcgtggcgccgtggaagaagacgttctcgctggcgccgtcggggaaggcggccagggaggccgaggccggggtgtggaggaaggagatcctcatgggtgagcgctgccagccgctcgacttctccggggtcatctactacgacgccgagggccgccgcctcgcgcaaccgccgccgcccaggtcgcccatgcgcagcccgctccccgg

SEQ ID NO: 32675 - DNA, 585 bp, Setaria italica
  Peptide Sequence Number=SeqID_98649
atgtctcctctatgcaggctgtgagtgcttcgggtactgtctcaggtttagcatcctctcccatgactttagacatagacagggcaacagttgaagcccccaaaggatcagaatgccaatcaccattgtagagccgaagcgtgaagcagtaactgtacagaatgtcaaccaagtgaacggcaagcagaggcgatggctctgcccttgttagctgtttcagcgatgggagaggagattctggtccttctgggatttcattgatgctaggctcttggtcagtcattggatctgatgtagcagtgccttttgtgttcacttgtctgataagctggattccatcagggctaaggggtatcgatctagcagacggcgttttccaccatggtgtccatggttcgatcatcttgctgagttcacctgaggccagagcttgacgaaatcgtttgatttcatcatcagagaggtcttcaagctttatctcttccccagacataactttttgaataagttcctccgacaacatcggctcatcttcaccatccgactccatctcttcttccaagtggagccgcttgaggatatcta

SEQ ID NO: 32676 - DNA, 324 bp, Setaria italica
  Peptide Sequence Number=SeqID_98650
ggacgccgacggcaacggcaccgtggagtttgacgagctggcgtcctccctcgcgccgctgctcctgggaccttgccgccccgccgtggccgtcgaccaggcgcagctcgccgaggccttccgcgccttcgaccgcgacgggaacggcttcatctccgccgccgagctcgcgcgctccatggcgcggatggggcaccccatctgctacgacgagctcaccgacatgatgcgcgaggccgacaccgacggcgacggcgtcatcagcttccaggagttcaccgccatcatggccaagtccgccgtcgacttcctcggcctcgcccg

SEQ ID NO: 32677 - DNA, 247 bp, Setaria italica
  Peptide Sequence Number=SeqID_98651
ctccctcacaaagcagaaagccggggagcgccaaagccagccggcgaccggcatctccacggcctatcaacacgccgcacgcgctcgcaccaagcagtagggaggaggcggaggcatggggaacagcctgcggtgctgcctggcgtgcatgctcccctgcggcgcgctggacgttgtccgcgtggtgcacctcagcggacacgtcgacgagttcacctgcccgctcgccgcggccgacgtcctccgg

SEQ ID NO: 32678 - DNA, 1017 bp, Setaria italica
  Peptide Sequence Number=SeqID_98652
gccgtgttcttcgaagacccacccttttgctaacctgattctgaggtgccgttcttaaacactccctgtgatttcgtcctataaataatttacccccagcaatctcaccgtttcctgtcccatatctcctccagctccctggccaggtccttctgccggccgacaacaatggtgacgtgatccttgccgtcgatgaccttgacctgggcgcgcgggaccttggccttcaccgcgtagctgcactgcacggggaggagctcgtcgtccctgccgtggtagatggtgacgtcgcaggtgagctggtcccggaccacctccaggcacttgtcgatcttgccggcgctgccgcagatgatgttgtggagggtgtgccacgaggcgatgtgggtgtggcagaagaagccgtccatgaggtaggtccggaccctgtagagggtgaagacgcggaacgcgagctcccagaggcggtggtgcttgcagagcacgatgctaacggtgcggctgaggtgctcgtaccagcacgccacggaggcgccgaacgcgatgggcggccacacccgccgaggcgccaccgtccggagcacgtactgcgtcccgacctcgccgcggggcaccgggaagtagggcggcgcgacgagggtgagggacctgaccgcggcggggtacttgacggcgagcgcgagcgcgaggatggagcccagcgagtgcgccacgatgtggaaggacctcaccccgtgccgctcgatgacggagcgctcgatcatctccacgtgctcccgcagcgtgtacagcgaatccgccggcttggggctgcgcccgaacccgaggaggtccacggcgaacagccgccgccgggaccgcgccgccgggctcacgtgggggagcaccgtctccgtccagaaccccgacgacgagatgaacccgtggatgaacagcacgtcctcctccgtcgcagcgccgccgccgccttgcggcgcctcgacgtggacgaagaggcggtccgtgtcggccgggttg

SEQ ID NO: 32679 - DNA, 641 bp, Setaria italica
  Peptide Sequence Number=SeqID_98653
cttacagtcaagataatgtcattttcatgcaagatggcagatatcacagaagaaagggtttcattggttgaggacctatacaaacaaaggcagccattgccttcaatggatgcaatttacttcatgcagcctactaaggaaaacattcgtatattcatgtccgacatgtcggggaaaatccattgtacaagaaagcttatgtgtttttcagttctcctatacagggggacttgttggctcatataaaaaaagagtcaactgttctgacacgcatcagtgcactaagtgagatgaacctggaatactttgctattgatagtcagggctttgtaactgaccatgacaaggccctagcagagttgtttactgaggatgcggaatgctcacacaagtacaatgcatgtcttaacacaatgggcacacgaattgctacagtgtttgcatcaatgagggaatttcctcgtgtgcactaccgtgtggccaggacaattgatgcatctaccctgacaacactacgagatttggtcccgacaaagcttgctgcttctgtgtggaattgccttgccagatataagtcaacaatacctgaatttccacaaacagaaacatgtgagctactcattgtagaccgatcgatagat

SEQ ID NO: 32680 - DNA, 293 bp, Setaria italica
  Peptide Sequence Number=SeqID_98654
gctgcgcagccgcagcttgccgccgccgtagtgccgcccctggctgcgcggcaccagctccagcgcctcccgggcggtcgccgcgacgtcccgcaggaggctcgcgaacgcgtcgcacctgtcctcgccgttgtcgtcgtcggcgccggtgacggtgatgtcggcgaggccggcgtggaggcggttgagccggtccctgatgagctgccacttgagcgggaacagcgtggccgacaaggaagcggagaccaaggaactgatggcgtccagcgcctccgcaagcatcccctgct

SEQ ID NO: 32681 - DNA, 288 bp, Setaria italica
  Peptide Sequence Number=SeqID_98655
ctcagctcaaccccgtagttcaaaattcgaatccagagttccacaagcttttctttaaaccgtccgctcccccaaccgacctccctcgtgcaagcctcgcccgttgcgcgttcgaatttcgaatccctcctcccccggcgcccaaggccctagcccaattcctcctcctcgtcgtcctcgaccacctgccgccatgagcgccgccgccgcgccagccgccatgggtagcggcaaggagctcgcgaacccgcccgccgacgggatctccaacctccgcttctccaacca

SEQ ID NO: 32682 - DNA, 1056 bp, Setaria italica
  Peptide Sequence Number=SeqID_98656
ttcctctttggtggttcttttgttcctgccttactaggaacaacctgactagagcgtttattgtaggcctccccctcgcgtgtctcagggacatggttctcagcggactgtgcaacaggagacggatcttgttcatcgtctttagatgatgtagaaagaggagcatcctcaaaaccatcaacatcatactcattactgctgctgtttgtttccccatgtctgtcttctagcaaactgtggtgcgtcgccaatacaccattgtcagttctgtgaacaagcctttcttctctctgcagaactcccagccaaattagactctcttttgcggtcattttatcctgcaagcattttgatttgcgtacatgatttctgatcttatcaaagttaggggacatgtgcttgatcacacctgtaagcacaccaaccttccaaactttcttaagatcatgtggtttcttataaggaggtatttggccgctgggaaggcctgaggcaatccaccattcctcattccctgaaggccaccatgggggcggagtgcccttctccagagggtacttgcgctgtggtggatcacaatgctgcatcagagacgaaagcagagaacccagagtggcatcttggagatccatcaagctgtgctggttcttaatcccaccgctctgggcattagaagtcaccaagttctcagactcatacttctcaatcgccgcaggcccattcttatcgaacttcaccttctccttccaccaagctctgatattatccgaagcgccgctgacaggcttccccttgtccgggatgatcccgtacacgaacccgcgcgcattgcacacctccatcagcttgagcatgtacttgaggatcccgtcctgtgccctcgacatcttcttgcgcatggcctggtcggatatcggcttcggcctcgacttctccagctcggcctgctgcagcgcgagcttctgctgccgctccttgatcctcctcagcctgaccctgtccttccacatccgccgcgccaggtcctcaggctcgatctcctcatcactgacgtca

SEQ ID NO: 32683 - DNA, 395 bp, Setaria italica
  Peptide Sequence Number=SeqID_98657
actcctagaaaacaagcattacaagtgaagcaccaaagaatagagaagcttgagatcagttacaggaacatcaggaagcaggtgtacaattagtgaggctaccaaaatttcgtcaggcacgtcaaggccagctacttaaaagcaagaacgaaagaatcacaagcacacaaaagggctatatctacatctacgcaagaaacgtggagacgtgatgtcagactatgtagtcagcagcattcaggaagctctcgtactgggtaccgttgagggcactgtagacttcatcccagttttctatttgctcggacagaggtttcgtgtgtatcttaacatgccggcttgctagtttcatcttcggcactttgaggaaatccaggacatcaaaaatctttgtt

SEQ ID NO: 32684 - DNA, 620 bp, Setaria italica
  misc_feature (426)..(426): n is a, c, g, or t
  Peptide Sequence Number=SeqID_98658
ggaccatcgccgtgacgcagcggagcaatgtctcgccgcgcttggacgcgccgaactcgcactccgacatcgcgccgccgcggcgcgacttggagaccgcaggcttcttctttggcggcttgatcgccacgcggagagaggcgcgctcgtccatgacgtactcgtaagaccccatggagtggcaccttctctgcccgagacctgccttggcattggcgtagcaattgccgtcggtgctggttccggccccccggaccacgttggcggcggcattcgcattggcgttgccttccacgcacatgaacttccccagcttcacctcgaccacttcctctgctccctcctgcgccaaagcgagaccgctcggctcgccgtcggcgtcgtcggtggcccgggtcgccggcgcgcccatgtcgcgggagctcnctgactcgagcaccatcacacgggggctgcacgtcggcgagagctcggcgaggagggctccgccggcagagcgggcacgtggagtgcgagagcagccacgtgtcgatgcactccaggtggaacgcgtggctgcacttgggcagcagccggagctggtcgtcggcggagaactcgcacaggcagacggcgcagtc

SEQ ID NO: 32685 - DNA, 430 bp, Setaria italica
  Peptide Sequence Number=SeqID_98659
agtgtgtgcatagacaacaaaagaaatgagcctagagggtgacagctatctatttccaaatctaactgcatagttgtagggtttcccatcagttagtctgctagtgtatacagaatatcatttgagctgactctattttcatatcatgtaactcaatattagaatcgagtagcacaattactattgtgttcattctcaaatgaaagggagagaggcatacgttacgcacctgaaggcttctatgaagatcatgaccgtggcaaaccagaaatcctcggcgttgagtgctgtgcagaacccgcccaagcaggacgacggtcgcccacaggaaggctagcgtgccaaaggcgtttcctgcccactctccaaaggcaacgaagcacacgaaccagttgagccttgtctcccgcttagcagcagccctcgccct

SEQ ID NO: 32686 - DNA, 573 bp, Setaria italica
  Peptide Sequence Number=SeqID_98660
gaagtgtggaattgatactgctcactcactgctcggcaacttatcatcgttgggaggtttcagtcagtgcagtaatgtcaacagacatgtgcttgagaaaatgacagcatggaggtatggtagttttagtccaggacaaagtgagctcagcgtggtggatggtgaaaaattacacaatgaaatagccctcaaaaccaatggcaatttgcatctgaaagatcatggagctggttttggtatggtgttgtcctctgcagggtgcatggcagaaaaagggagtgctcgttatgtgatttctgaaatgccaccatggcgtcaaaatactttcaacaaaggaaactatcacatgaaaactgattattcagtttttgacaaaatatcttaatggaagcaaaatggtttcagtccatggagtagagtcaaccaaatagtgcttgaggtaatatcagagtggaagcatggtggaaaagtagcaggtgtttgtacctcatcaatgggctcccaaggcggatgtgagctaaacggaaggatttgggatccgggcattcataaatcagcttagataagttcagt

SEQ ID NO: 32687 - DNA, 1599 bp, Setaria italica
  misc_feature (1558)..(1599): n is a, c, g, or t
  Peptide Sequence Number=SeqID_98661
gagactagtgggtggtcttccccctcctccccccatgctaaaagttgcattagcgcgctgataacccacagacagcggctggtttacgtaccacgcttcgcttcgctcccgacctaagctccggccgacgatgcagcggtggctcccggcgatcctccgccgcgcggcccccgccgtctccggcggcggcggcggggcggcgcggctcttctcctcgtcctccctcctcttcgacgagacgcaggagcagttcaaggagagcgtgcacaagttcgcgcaggaggccatcgcgcctcacgccgcggcgatcgacgcctccaaccatttccccaagggcgtggacctgtggaagctcatggggggacttcaacctccacggcctcaccgcgccagaggagtacggcgggatggggctggggtacatgtaccactgcatcgccatggaggagatcagcagggcctccggctccgtcggcctctcctacggcgcgcattccaatctctgcatcaaccagctggtccgtcatggcaaccctgcgcaaaagcagaagtacctacccaagctgatcagtggcgagcatgtcggggcgttagcgatgagtgaacctaactcgggctccgatgtggtcagtatgaaatgcaaagctgagaaagtggacggtggttatgtcatcaatgggaataagatgtggtgcacgaatgggccttctgctcagacactggttgtttatgcaaaaacagatttatctgcaggatcaaaaggaataaccgcattcataattgagaaagggatgcctgggttcagtactgctcagaagttggacaaacttggcatgcgaggaagcgatacgtgtgagcttgtttttgagaactgctttgtgccacacgaaaatgttcttggtgaagaaggcaaaggtgtttatgtcatgatgtcagggcttgatctggaaaggcttgtattagctgcaggtcccattggcctcatgcaggcatgccttgatgccgtacttccatatgttcgccagagggagcaatttggccgtccaattggtgaatttcagttcatacagggtaaaatggctgatatgtacacctccctgcaatcatcaagatcatttgtatactcagttgctagggactgtgataatggcaaagttgaccgcaaggattgtgcaggagtaattctctttgctgctgaaagggcaacccaagttgcacttcaggcaatccagtgtcttggtggcaatgggtacataaatgagtacccaactggccgtctcctgagagatgcaaaactgtttgagattggtgctggtactagtgagataagaagaatgataattggccgtgagctcttcaaagaggactgaaattgttattttgcaagccagatatcaatgttcattatgaactggaggaggtgagcgggatttagatatttagcaacccatgcggttcaaaaagttgattctgttatatcctagcagtctcatgcttttgtataactccaatattcatcaaataaagttcacttccttgtaaaaaaaaaaaaaaaaannnnnnnnnnnnnnnnnnnnnnnnnnnnnnnnnnnnnnnnnn

SEQ ID NO: 32688 - DNA, 256 bp, Setaria italica
  Peptide Sequence Number=SeqID_98662
tgcaatcttgggatatgtggacatactctggtatttggtattgaattgacactattctctgaaaaaagaatgtggacccataaaatatttatcattacaaggtgcaagagtctgctatttaggtctggtgaacaaatgagtgaactattaccccaatcgtctttctgaaattcttgggatcatcggggtcctcaaaagggtatgcaccgaccagcatcacgtaaagagtcactccacaagaccaaacgtctgccat

SEQ ID NO: 32689 - DNA, 855 bp, Setaria italica
  Peptide Sequence Number=SeqID_98663
ttttgttttttttttgtttttgtctcaacgagatgttttatttccataattatgttgtgcctgctaacttaatgagtccttagaaatacagtgttggaactacttcaataatttacactgttgcagcatcaagagaaaaatgaaagaacttgaaacctaagaccacaaactcaggaccctggtataaggttcatcatcagctgctaccacagtatctcctatttgcggtctctctcacagcgaaactctcagctgatgtggaactcaccgctggcatggacttgcttcacctgcttttcatactcatcctcaccgtcctcttcttcctcagcattctcctctggtttcttgctgtcctcctcctcgtcctcctgtgcccaaccgaagccagccacaggggtggaggatggaggaggcgttcgcgccttctcgacgatcttcatgatgtcctccacggactgcacggagtaggttggggcgctgttgtccttcttgtagtacattgcctgtgcagcttctgtgagctccctaggcaggttcttcaggaaccaggggtggttcctgatctccctaattgttattctctttgcagagtttgcgacgaagattcttgagagcagttccttgcagtcttgggatacatggacgtactccggaattttgtattgaattgacactattctcccaatcgtctttctgaaattcttgggatcatcggggtcctcaaaagggtatgcaccgaccagcatcacgtaaagagtcactccacaagaccaaacgtctgccatagagatagggataacacgccaatcctggcgtgtggggccagacccactccctgccatatagaccttg

SEQ ID NO: 32690 - DNA, 1545 bp, Setaria italica
  misc_feature (1)..(22): n is a, c, g, or t
  Peptide Sequence Number=SeqID_98664
nnnnnnnnnnnnnnnnnnnnnntttttttttttttttttcttacaatgcagaagtttattccatagaaattatatttcaccttctagcttaatcactcaacagttcgttgcaattacataggcattgaggaagccagtttgataatttacagaattataacacaataccgggaaaaagggaggatcgagacagaaggaaactacaggtaaacaccgagggtgcagcatctcaacaccacaaactacaacaaatacatcagctgagaacttggcattgctagaagcttcattttatcagatgtcggaaatccccgctggcgtgtacttgcttcacctgcttgtcgtactcatcctcgccgtcatattcttcctcctccccatcctggtcttcatcatcaggcttcttgccatcttcttgctcgtcttcctctgcccaaccaaaaccagccaccggagtagacgattggggtggtgtgcgggcctcctcaacaatcttcatgatatcttcgacagtttgatcagagaaggtgggggcactgttgtccttcttgtagtactttgcttgcacagcttctgtaagctctctgggcaagttcttcaggaaccaggggtgattcctaatctccctaatcgtaattctctttgcaggattcgcaacgaagatcctagagaggagctgtctgcaatcttgggatatgtggacatactctggtatttggtattgaattgacactattctcccaatcgtctttctgaaattcttgggatcatcggggtcctcaaaagggtatgcaccgaccagcatcacgtaaagagtcactccacaagaccaaacgtctgccatcttgccgtcatattcccggcgagacagcacctccggagcaatgtacgccggagttccgaccgtcgacttgggctttgagtgcagcagtgaagacttggagtagccaaagtcgcagatcttcaggcgcggcgccgggctgccatccagcagcgtgttctccagcttcaagtcccggtggcaaatttgcatgaagtggcagtagctgacaccgcatatgagctgctggaagaaatacctcgcctcatcctcgctgaacctgccggcgctgcagatccggtcgaagagctcgccgccggcggcgtactccatgacgatggccaggtgcgtgggcgtgagcacgacctccttgaaccggatgatgttggggtgccgcagcgagcggtggtttatgatctccctcgccacattctcgtcaatcttgaggcccctggggatgtacttcatggcgacgagctccttggtctccttgttccgcatcagccgcgccacgccgaagttgccggcgccgatgtccttgagcagctcgtacctctccatggctccgagctcggggcgggaggactgcgcgcgagggctctccgatcgatcggactggcgcgcagaagaatctctcgggagggtttgaagtttcgctgggatgaggagttgaggaagaagagggagagagggaaagcggaggggagggatttgaagcttgttgc

SEQ ID NO: 32691 - DNA, 443 bp, Setaria italica
  Peptide Sequence Number=SeqID_98665
agtgaggctgaagtcctatcaaacttctgacctagtggcaccaaatcaatggttaccgttgtcttttcaggatcttgaagactactcccagcacccatgatccgaacttggctctgtttcaggaatgtacctgctgcaacctcaatttctaactcatcgattctcggaaataactgatatggtgccacaccaaggtcaagctgaatttgcataggatatacacaaccacaaggtgaaccgattggagtcgacgtaagcggagcagaacaagttgttccactgcaatcttgtctttctgatgatggcgatgaaggtgttgggaagcatgatgcctttttctgtgatgcctatgcactgggtgagcaataatgggaccttgaggttgaggagaaggggctgggcctggggctagggcaggaaagtgttgcagatgggttctactc

SEQ ID NO: 32692 - DNA, 777 bp, Setaria italica
  Peptide Sequence Number=SeqID_98666
ctccgcggcaccaccccctccaacccaaaccaccacgagttcaacgcaccccgcgcccccggcaaccgcagcacccaacgccgccttcgacttcgcgtcttcgcgagggcggtttccgcgtccgcgcttgctcggggactagccgagtcgtcgtcgtcgggaggcgatggatcggtaccagagggtggagaagccgcgggaggagtcctcggccatcggcgccaacgagatccgcatcacggcgcagggccggccccgcaactacatcacctacgcgctcgcgctgctccaggacaacgcaacagatgaaattgtcatcaaggctatgggaagggcgatcaacaagacagtcgtcattgtggagcttctaaagaggagggttgctggtctccatcagaatacctctattgagtccattgacataactgacacttgggagccattggaagaaggccttgtcactcttgagaccactcgccatgtgtccttgattaccattaaattgtcaaagaaggagctggatacatcatctcctggttaccagccaccgataccagctgatcaggtcaggtcagccgctgagttcgatcaggatgcagaggccattccaagtggtcgtggaaggggacgtggtcgtcggggaaggggcagaggaagagggttcagcaatggaggagtagactatgatgatgaatttggtgaaccagaggaggctccacgtggatatcgtggcagaggagggaggggtcggggaaggcggtggagtcgttttgggcc

SEQ ID NO: 32693 - DNA, 463 bp, Setaria italica
  Peptide Sequence Number=SeqID_98667
aaggaggattcgattgttctgcttttgtttcagtgtctgaaaatcctgattcgaagaaattactaaagggattgctctatgaccttggcaagagcatcaatgaagaaacgttggatgagatgcggcttatcaatattctcaaagaattccttcaagataaaagatatatcattgttcttgatgacatatgggatatttcagtttggaaattgatgagaggtgcgctgcctgataatgatgctggatacagaattatcacaactacccgcaatttcaatgtcggtcaacaagttggtggtacctataagctgaaacctctttgccttcatgactcgaaaattttattgtatagaagaatatttgccaatgaagacaaagatgaatgtcctgatgagcagttggcagaagtctctgataaaaatactaaagaaatgtgctggtgtacccttagctatcattatga

SEQ ID NO: 32694 - DNA, 885 bp, Setaria italica
  Peptide Sequence Number=SeqID_98668
agatttagaagatctgttagtcggctgataaaggcccctaacagaaacttttggtcctccgacgggtctatgagaaggttattcggcagccgttgattacaagtggacggcttggatcaatctgagctgtctgtttgcacgatccaatgaactggccgggagtacctccacttcagagagagctgtgatatatttgacccattcaattctttgtgcaccactagctaaacacttgttcctcagctcctctccgtgctgctgagaataagcctgctctcctctcctcttcaatctcagccttcaccccgggagacagctcaaagaaagaaagttctcagaagcttggagcacaacttgcctgatacttcttcctttggcatgtttaggtacaattccatcttgcttccagttgaggagcatctttctctgagcatttctgttccaccatctcatacgcttcttccagtgacacaacagtcaagcatcgatcttgcttcaggagggcttttgttttgaaacaacgaaacggattgagtacatcagccgcgctccaattcctgaaaacataacaaactgaggatatttttcagaaagcatgaagctgttagtttttgcgctagttttattgggatgtctacaatcttctgctgctgctgagttccaaggtaaggcctttacatttttgccaaataagatattctttattagctagcattagataagacgatagtaatttaaattgaagtattgactttgaattgaaaagctgtcataagtgacgtggaaattattgtgctattgactaggctatctctaaagaccacagaagtgaatcttagaaatttggctccctgtccatgtacaccggtcaaatgtttgaatcag

SEQ ID NO: 32695 - DNA, 593 bp, Setaria italica
  Peptide Sequence Number=SeqID_98669
tagggtttagaagaacaattaggaagaaaatagggtagaactaggtagacaatttgctgggcatacgtcggtttgcttaaaagatgagaagggtgatctctgggttgcggagtcaggctatgaaaatgaaaagggagaagaagttattgctgtagttccgtgggatgaatggtgggccatggcactcaaggatgaatcaaatccgcagatagcccttcttccattgcaccctgatgtacgtgctagattcaatgaaagtgctgcatgggagtatgtccggagcatggttgggaagccttatggctatcataacatgatatttagctggattgacacaataggagataattatccacctcctcttgatgctaacctggtaatgaccgttatgtctatgtggaccagagtgcagccactttatgctgcgaacatgtggaatgaagcccttaacaaacgacttggcactgaggtctgtaaagtccggttttaaaagaatgctggatttctgttaaacctatggatttaattggcgttccagttggttgcggtggtacatattcacatctgccactgcagttaaatatttgatacaa

SEQ ID NO: 32696 - DNA, 590 bp, Setaria italica
  Peptide Sequence Number=SeqID_98670
ttgcactttgttggacaagaaatatgttcaattcagtgttttgctcaagctgagatgacttgtcaaaatggattttttttcctgctttagttgttacagctaagttgagtatcaaattcatatgcatttatgcttttcatatagggtttggaccttaagggaatcattatggagactgaaagacgtggaatgtctttcgatcagttgctcaccatacctgagcaggatgaatggatatacagtgatggcaaatcaaccacctgtgttgccttcattcttgcaatgtacaaggaggctggtatatttggtcctttcgctgagtctattcaggtcaccgagttcactgtaagtgttaaagtagatacatatccacatatttcatgctcagctccctccctccctctcggtaccattctcctagttgatttttatgttgtgctactaagtctcacctgcaccgttcaactctgttctttctgcatcagattcgggatgcatatatgctcaagatttttgaggacagcctagccaggcttccgagctggtgcaatacggagtcggacaagcttcccttctgccagatcctcggg

SEQ ID NO: 32697 - DNA, 1840 bp, Setaria italica
  Peptide Sequence Number=SeqID_98671
ggagggtgaaggcggaggagagggtggtggacgccatggggacttgctcggggagctccggcctccggagtgagcggcgcgtgcttcgcggtgaacgaggccgccatcgagctcacgcccggggaccgcacgggacggacgtcggcggcgccgtcctgcggctcaagactgcttcagctcagagttggacatgcatggatctctatgtttttgcaacaccatataggataacttgggactattattttgctgctcgggaacacaccttggagattaaatcatgggaggaagaagcggaattggaatatgtgaagcagcatggcatctctgtttttctcatgccatctggaatgcttggaactttgttatctttgattgatgtcctgcctttgttttcaaacactgcctggggccaacattctaacttggcctttttagagaagcatatgggagcctcatttgagaaacgttcccagccttgggttgctaacattagaaaggaagacatacagtctggtgattttttggctctatcaaagattcgaggtcggtggggtgggtttgagacattggagaaatgggtgactggtgcatttgctgggcatacgtcggtttgcttaaaagatgagaagggtgatctctgggttgcggagtcaggctatgaaaatgaaaagggagaagaagttattgctgtagttccgtgggatgaatggtgggccatggcactcaaggatgaatcaaatccgcagatagcccttcttccattgcaccctgatgtacgtgctagattcaatgaaagtgctgcatgggagtatgtccggagcatggttgggaagccttatggctatcataacatgatatttagctggattgacacaataggagataattatccacctcctcttgatgctaacctggtaatgaccgttatgtctatgtggaccagagtgcagccactttatgctgcgaacatgtggaatgaagcccttaacaaacgacttggcactgagggtttggaccttaagggaatcattatggagactgaaagacgtggaatgtctttcgatcagttgctcaccatacctgagcaggatgaatggatatacagtgatggcaaatcaaccacctgtgttgccttcattcttgcaatgtacaaggaggctggtatatttggtcctttcgctgagtctattcaggtcaccgagttcactattcgggatgcatatatgctcaagatttttgaggacagcctagccaggcttccgagctggtgcaatacggagtcggacaagcttcccttctgccagatcctcggggagtacaggatggagctgccggagtacaacacggtagaaccttatgcgaagatgaatgagaactgcccgtccttacccccaacatacaagcgacctgcacgctgctgaccgtgagattgtcaacttagcttgctgcagctgttatttacctactggaagtagaatgttgtcctaagttatgctgtaaataaatgacgctgtatatataggtatggtcgtattgggtagatgatgagtagttgttacaagtaacctatgtgttcaggtatccggctgtcaccggagcagttctgaagccccggctggtcggcggccaatatgaaggttaggcttgcccgcttgggtcagaagtttgtatacgcagaacattacttccgtttgcccgagtacagtgttcttgcatgtataaagtcttcgcccatttattctgcaatcaaaaaaaaaaaaaaaaaggtgctggactacaattaacttaccgtttagacccgaagtaacaagtagttacttagacaataagtaaaaaa

SEQ ID NO: 32698 - DNA, 409 bp, Setaria italica
  Peptide Sequence Number=SeqID_98672
tttacttttggttaaattgtcccctgtgcctgttctcatcatgtcaaaactctctgtctctacccatgtacagattattcttttctttctccccctccacgaaccaattcttctttgtttctctatggacttacatcaaaagaaaaaaaaacaagaagcatcacaggaacaagaacaccatcatcccgttccatgcaattcagctgatcgactgctcaaatcaactccatcggactcggatcaccaaagccattctccatccgcttcgcttcctcagtcagaacggcatgatgtgggtggtcttggagtcgtacccggcgaggcaactcttggcgttcaccctgtagatcttgagcagctccagcgccatctgccgcgccgccggcgagcacccgctctgcaccaacag

SEQ ID NO: 32699 - DNA, 271 bp, Setaria italica
  Peptide Sequence Number=SeqID_98673
cgcgcgcgccgcccccgccgtgcgcgcgttcgggaacgtcgacgtcgtggggaggcccaccgcgggcaccccgatggggtcctccggcctcgccgccacgctccgcgcggcagccgcgatgctccggctggatgcggagtgggactggttcgtcacgctcaacgccgcggactaccctcttctcacgcaggacgacttaattcattgttttctcctctgttccaaggcacctcaacgtttattgatcacaccagtgacattggatggaaag

SEQ ID NO: 32700 - DNA, 561 bp, Setaria italica
  Peptide Sequence Number=SeqID_98674
ttgttactaaattcctttactaacctttatctctcgtgttcttcctcctccctccttccccgagcccctaaattctgctccaatttctgtgattgacctctaattccctgctgagttccccgaatcgggttaggatttttgcacccctcctccaccgcaccctcagatcgataccaaacccctcctcagtcctcaccctgcccactccgctgaccccaacccctaaaatccctcaatccccaaccgagcccgcctgcggccggagcccgtcgattccattcggattagagctcccgccgctgaggcgattagcctgaatcggctgattcgatgcgaatttgcgtgttccgggtgcgcgaagagcagaggcccgcggatctagggttgctccaggcgatctggtgatggtggtgcgccgcggcgccggagctcggcgaggaggagggatcggcagcggcagcgtggaagatgcagcgagccggctatgcatgggtggcgcggcggtgaggggtgcgacggcaggaggcggcgtcttcgtttcggcttcattgttggtccagt

SEQ ID NO: 32701 - DNA, 215 bp, Setaria italica
  Peptide Sequence Number=SeqID_98675
aaacgcagcagcgtccgatcgctcgagctagctgagcccagagcacgcctagcttgtgtgtgtgtattgtgttcttctgctcagcatcagcagtcgatcagctgctaataatataatccgtccagagataatcagcccaagctaatggacgggaagaaggtgcaggagcgggcgcagtggggcgccggtggcgacggcggcggcaaccgtggtgc

SEQ ID NO: 32702 - DNA, 793 bp, Setaria italica
  Peptide Sequence Number=SeqID_98676
agtcgtcccgacgacgccagccgagcgagcggtcgatcgaggcgtcgcagagaatctgccccccaaaccatcgccggctactggattgggcaacctttctgcgaatttggttgtaatctggggtcttgaggctaattacaggcagaacatggcttccttgccattggccaccgccgaagcatgtgatgctaatgctggtttaattctgaatggcgatctttatgccctccaaccaatcttccgtatctacggaaggcggcagatttttgctggccctgttgtgacactgaagatcttcgaggacaatgttctgctgcgtgagtttctcgaggagaaaggtcacggaagggtcctggtggtcgatgctggtgggagcatgcggtgtgctgttttgggtggcaacctcgcccagctagcacagaacaatgggtgggctggcattgtgatcaatggctgcatcagggatgtcgatgagatcaatggctgtgatgttggtgtccgggctctaaactcgcacccaatgaagtcaaacaagaaaggtgtgggtgagaagcatgtccctgttacctttgcaggaaccagaatatgcgacggtgagtggctctatgctgattctgatggcatccttctctcaacatcggaattgaccgtgtagacccgttccatacctgtaatgcgtgtatatgaattgagagcttaaaagtagggcatgtctcttgtcatcttggtgttatatatcgtctgaagttttcgtaactagtatttctgttgaatcgcatgactactgtgaaat

SEQ ID NO: 32703 - DNA, 307 bp, Setaria italica
  Peptide Sequence Number=SeqID_98677
tgatctgcagcatgtatgcaagtataggaagcaggtggtcgatcatcgcgtcgcagctccccggacgcacagacaatgacatcaagaactactggaacaccaagctgaagaagaagctcctaggctccacagctaccccacctcctcaccgtgcgccgcggcatcatcatcgacccctcaatctcatgcttcaacacacatctccctcgttaccccaacccacctacaacagcttcttctccggcgccggagccctccacaaccccatcagcatccctgcactaaatctgccgccaccccaggacta

SEQ ID NO: 32704 - DNA, 306 bp, Setaria italica
  Peptide Sequence Number=SeqID_98678
cgcccaacagtgcctgcacttctccttcaagaagcttccttgcaaccaacatgggaaaaaatgtttccatggttgtctccttatgctccagattcctccttccagaaatgatctcaaaaagcatcattccgtagctgaagacatctgcctttgtcgtgatggcttcaccacttatccattctggtgcaagatatcctactgtgcctctcatagatgtcaaaactctgactaaaaaattaccgaacctaagtaaattttagaccaaataccaaaagtactagaccaacttttaggaaacaaaataga

SEQ ID NO: 32705 - DNA, 525 bp, Setaria italica
  Peptide Sequence Number=SeqID_98679
gccaccccacccgccaccgccattgcggcttctcgcccgagctccctccttcctctcccttcttccatcatctcccccggtggaaacagcgaaggctctctcatctgtggctgcaaggccactacagaccggcactagcatcttcgcggtaatcgccatgcctccgattgcggcagcgtctgcgccgagctcgcttcttccgctgcgcattgcgcgccaggggattaggggaggacaaggctggggagaacgatctctgtacggttcacagtctcggagggctacgcgtggcgccactatttctgcaagagcttccatgaacataacctgctgcgcaaaccagacacaaactgcacaacgcaaatcgtattcaggacctacctctccaccatcaggttcagtcaaagagaaggtgaagccaaggcttgatgatggaggtgtcgggttcccaccgttccggttcggtggcggtggaggaggtggcggcggagggggcagcagctcctccggtggttcatcctcttt

SEQ ID NO: 32706 - DNA, 322 bp, Setaria italica
  Peptide Sequence Number=SeqID_98680
gttgaatgatttcatttcaggtccttggtaaaatgcaagtacaacgacgcctgcaaggctgaacagtatgccacaaacttttgcaatcccatggaactttttcatgttcaaagtctccatcctaccagatatagaacgaagaatatccaaaattaatctagtccacctcatcaagttaacttgtctaaaggagacacagatcatacatagtatttgtggtagattgcaaatagcaagaggctcctttactaaactttaaaagctcgtaagtttgccagatcgctctaggttcactaaaaagttcatgtgatcgtatgatgct

SEQ ID NO: 32707 - DNA, 495 bp, Setaria italica
  Peptide Sequence Number=SeqID_98681
caagaaaactatgttgaacacatccttgaagttgccatgaggctgtgccccagggaaccgaaaggatgatttcttgtctggaccatacctcagcactgagttgacaacgtcgacgaacacctgtatcgtatcttgttcgtctagagtttgctgtgtctttgttttcaggtggactggttttgacgtccacagtgaaatcgggacactgtagtttgcaaagatggagaaggtaacataggatggctgggggatgggaaggtttttcacaactgagaggttcattgttggctgtgatgatgctgatggtgtggtgcaaatacaaagggacatggcgttggtgcgccactgggagaactggggcaggctggtgatccaagcccatgcatcaggagcaaagttggaggccattgctttagtgttggaaacttaagctggtggtggtttgatcgatggagggaataggttggttttatagaggaagaaggcaatgtttta

SEQ ID NO: 32708 - DNA, 401 bp, Setaria italica
  Peptide Sequence Number=SeqID_98682
cgcgtccgcccctggctcctctggcgccgccgcggctccaggcggttccgcgccggggaccgcctcgtcgacctggcgtgggacctctctcgcgcgcggttcccgggctcggggtcacccgagcccacctcgggcttcttcgccgccgtcgtcgtcgacggcgagatggtcctcgcggccggggacctgcccgacgccgcctaccgtaggacccgggcgcggcgcccgtccggcccgcgcccggtcctcctctctcgacgggagcacgtctcgctgcgcgacgcaggcgccggccgcggccgcagccacacgacctgggtcaccgtccagggcaaggagcgggagatctccgtggatctcgtggcccgcggccgcggcagggacaagggcgctgccggccg

SEQ ID NO: 32709 - DNA, 384 bp, Setaria italica
  misc_feature (16)..(16): n is a, c, g, or t
  misc_feature (146)..(146): n is a, c, g, or t
  Peptide Sequence Number=SeqID_98683
ttaagtgattaacccncggttaaaaggacaccgagattacagatgttcatagtactcgatcattcccgccaacctccactatgcaaaacaagttactactccgccgtaactaacaactcctacagaataccgtgtatcaacagagnggcattgcctttctgaatttacaagaacgcagcatccctgctgctgctgatcatcatcaggcagagcaggaggccaagaaggacgtggaggatccgcggcgtcgaggcggcaaccgccgagctcgtgctcccggtgtgctcgaactgcagcgagtccacggccagcggcatgttctcctggtccgggctgcaccgcggcgccgcgccgccgctgccggactccgtcgggtgcgccgtg

SEQ ID NO: 32710 - DNA, 296 bp, Setaria italica
  Peptide Sequence Number=SeqID_98684
cgcggccgccgaggaccgcgccatcgccgagaaggggttctacctccacccgtccccgcgcggcaatgcgggccccggcggcgacctgcaggcgccgcccaggctgctcccgctcttccccgtgcagtcgccgaccagccggccgtgaccgcttctaggcttcccctcccttcttcctcctctaggctggctcgctcctgctcggtatgctctgctcgctgctaatcaccgtgctcctgaagcgggaggccgacctgatctgtggatgatttgctcctctctctccctctcgtgag

SEQ ID NO: 32711 - DNA, 230 bp, Setaria italica
  Peptide Sequence Number=SeqID_98685
gtgtatatctcacagcgcacctcaaacgaatcaatatgagatcctggatagaaatgcacaaccttgtgctccctcgtcttcggacaaaaccccaagcagtgccaattacaggatgagaactggctgctcccagccgtgtacattggcattggcaacacgagagattcaccagtcgtcgggttcagcacctccaccgctcctgtactgtcacccaggcacagcaggccatt

SEQ ID NO: 32712 - DNA, 233 bp, Setaria italica
  Peptide Sequence Number=SeqID_98686
caggctcctcgccggcgagaacctcggcgaccggaggagcggctccatctcgaaggcgttgggcacgacgacgccgaggaacggcccaaggcggttcgccctccggatggaccgcgccgtgctctccgggacggcggcgccgacggcgcaggacatcgcgagcagaagcagcgagacgccgaggaacggccgccggcgcgtgcccaacatgatggtcaggcgttggtttcttg

SEQ ID NO: 32713 - DNA, 420 bp, Setaria italica
  Peptide Sequence Number=SeqID_98687
ttgctgcatcaaaactatgtacaagattgcactcaagcctcggtacaatcactgcacgcactctcatctgagctctctgctccgccaccttcttgagggtgtcctgaatcccaggcatcatccccttcaaaccgcagaagtagatgtgcgcaccattgtccagaagcttgaaaaatctcatcgctgtactcctcaatcttgtcctggacgtacatcttgccaccgctcctgttcgtctgctccctgctgagggctttgtcatacctgaaattgtaaaatttaagtacttcagcaatgctgcactctcaaatcgcaataaggttgtacggatatgcaaactgaaaagcacctaaagtcaacaacgaagcacagttgtggacaagggtagcatgagtacatgaaatgagattgcaagatgga

SEQ ID NO: 32714 - DNA, 1481 bp, Setaria italica
  misc_feature (1)..(26): n is a, c, g, or t
  Peptide Sequence Number=SeqID_98688
nnnnnnnnnnnnnnnnnnnnnnnnnnttttttttttttttttttgaagcaaagcactgcactgcaattttgaagggacggctgaaagttacatgctccattccgtgcatcacgtgacgcggaagcttatgagttacaagggtgattttattggtttccaccatcgccaagaaaacttttataattttacaccaccggcaagaataatccatcgttcgatttcagtcatgtatctgtgtctcttcttggcattggctcgcagcaaaacaatcataacacctgcaaatatcagaccctagtaaacctcgacgtgccattgcttgttctttttcagctgcgacagcttctgctcccagctctcccctctctgctccgccaccttcttgagggtgtcctgaatcccaggcatcatccccttcaaaccgcagaagtagatgtgcgcaccattgtccagaagcttgaaaatctcatcgctgtactcctcaatcttgtcctggacgtacatcttgccaccgctcctgttcgtctgctccctgctgagggctttgtcatacctgaaattgtctggatactgcttaagatagcttgtgaactcttcgtcatagagaaggctgtctgaattagcaacgccaaggaaaagccaagccaggccaccaaatctgtagtttgggacatcttccatgaacatgcggcgcaggtacccacggaatggtgccacaccggtaccagtagcaatcatgatgtgggttgcgtttggatcctcctcaggtagaagcattattttgccagagggacctgtcaactgaatcttgtccccaggttttgcattgcataggaagttactgcagacgccattctttgaggggtcctccttgccagtttcaggatcataataaactgcacggcggacacacaagcttccggtccgtccatcaaagttatctccgtatctagtcgatgcaattgaataaagccggacattatgcggggctccaggctttttcgggttttctccaggaggaatcacaccgtaactctggccctcccagtaaggcacattgccaccatggtcaatgacgatgtggcaagtctcccctggagccttgggacctacaagcctctccaccgagacaatggtggccgtgaagggctccttcggcttgtatgtgttgaggggtggctccttggcactctccaaatcgagcggcgcaacagagaccttgctcttgctcgcctgctggaccgacatgcagagcaccttgttcgcgtgcctgggccgaattgccttgctctcccacgccaatgtgccaccaacccatgatttgttgccgaagctaagattgttggtacccttgatcccggagctcccgacgccgcgatccgagccgaagaccggcgccgagacagccacctgggacgcagcagcagcggtcgccatgtccgatcaaagagggaggggtgcgggcggtcggtgttttgatc

SEQ ID NO: 32715 - DNA, 424 bp, Setaria italica
  Peptide Sequence Number=SeqID_98689
aggtgaatcagacggttgctgccaacaatgttgagagtgttcgtcatcttggagaggcgaatcagactgttcttgctggtcttgaggatcctggcttaagtcgtcgtcctcagatgaggggccctcggcactgcactgcagatcctccatcgcgcagacgacagtcttcatctggctcggaagcgacgggcagccggcggtgaacttggtgttcttcgaggagaagaaattcaccgtcaggttcaagctttcccatgaggggaggttcagcatggtgtaggcgagcttgaccttgttgccgatgccgccgagcgacttgaactcggccgcggccttgcgcacggcgagggactccgccgggtgctgccacgcccactcgaactggagcgcggcgacattggaggggaagccgttaagaattagt

SEQ ID NO: 32716 - DNA, 273 bp, Setaria italica
  Peptide Sequence Number=SeqID_98690
ccggtgaggaggttgttgctgaagttcagcgtcgtggcgacgccggacatctggtagtacccgcggccttgccggctcgccgcgccgttgttcggcgtcagggtgaacgtgagcggcatgtggcccggcttgaaatccgccatggcctgctccgacgtcagcagcggcagctccgtcagcgacggcgggacctcgccggagagctggttgcctgacaggtccacgtagtagagcttcttgaagccgccgatccagctcgggatcgggccggtg

SEQ ID NO: 32717 - DNA, 376 bp, Setaria italica
  Peptide Sequence Number=SeqID_98691
cacgcggcacgccgccgaagccggccaggctgcgatgggccctgcagtcacgctctcctactccggcgagacttcgctcttctaaggaaggggtaatggaggaagaagaggcaccgaatcttccattagacatcatgtaccagatcccaaaatacatacccgatccagcctcactagcacgcactgcttcgtcctgcaagttatggcgcggtatctaaaggaccctgcctttcttgatgcctcaagatgcggcatctcgaccacggtttcacctcttccctcctccttggtttcttctatcaggacagtgccgaggctccctagcactgtggcagcatcacaaggacagcacttgttgcatggcaccgaccttcac

SEQ ID NO: 32718 - DNA, 514 bp, Setaria italica
  Peptide Sequence Number=SeqID_98692
gcgcccccgttcgatccgtacggcttcgcgcccccgccgccgccgggaagggcttccgttgagggcgatcggctgctcggcctgatccgggaccatggccacaatccacttcctggatcggcgtggcgtggcgagccgtgcccgcctgatgccggctttggttatggaggagtcagatgctatccttctccgtacccgcagggaggtgattttgcgaatttcaaccatgctggaaggttgccacctccagtgcctctgcatgatatgaaccatggctttggtcaaggttttgcaccgggaggagggcctcacgagaagtatctcgacagtgccgatcatcgttactgtcagttccacccagaggaattgcctggcgtgccaccgccccctccactgcctccatatgctgagacagatgctattccacagcccccggagcctccatttccttctcacagggattaccgtgccgcaccaccacggccggctgcaaattcgtcattgtttcctgtcc

SEQ ID NO: 32719 - DNA, 265 bp, Setaria italica
  Peptide Sequence Number=SeqID_98693
gatcgcgtgcgccatgttcctcatctttccggcggcccacttggcctacgccgggccgaagcacgagaacgaggcgcacccgcggaggacgacagaggactacatggcgcaaccgccatggatccccttcccctccacgatctcctaccgccgccacgaggcggcgacccgagcccccgcgtgtcggccaaacgcctccggcgtggccgacatcgaccgcctctggcagctgcaccacccgtcctgccgcctcatcatctacccg

SEQ ID NO: 32720 - DNA, 549 bp, Setaria italica
  Peptide Sequence Number=SeqID_98694
cctcgtcgtcttctcttttgttcgttttaaccctcgctcgcgtcccctcctcctccgcatccggctgctgcccccgcgtctgctccgccccctcggcgtcctggtcgccgccttgccgctccgatcccggtgttcgacgcgatgcagccgcctacggggaacgagaggccgccgccgcccggccgtcctgtctcagcgtttgtgcccggcgcagccgccccgccgccgccgtttgccgccggtggcccgttcgtcccgccgccgaggcagggagtgccgccgcctcaacctggctctgcggcaccccctttcgtggccgcgccgcccgcggcaatgggtgggttcaggggtccacctccgtcccagggtccctttgctgccgcgccaccgcctcagcggcctttcacttccgcgccgccgcctcagggctcctttaccaccgctccaccgcctcagggcccctttaccaccgctccaccgcctcagggccccttcgcctccgctccaccatctcagggccccttcgcctccgctccaccgtctcacggg

SEQ ID NO: 32721 - DNA, 476 bp, Setaria italica
  Peptide Sequence Number=SeqID_98695
aaaaagaacaatagatgcgcaaattcgaattgatcctgtccaggtttgtctggtagaactcgtcctcctttcggaagcaccttacagttggggcacccaaaaaggtttctgtaaagtgatcaataatcggcgcccttgttactccttgaagacgagtaagctctcgggatgttgcaatataacgattccgataccagatgttcaaaagcagtagaggaagcactgctatgactgacggccatgcaacttggcaagtaacagcaatgttggtaaccacagaaatgcacattgatgtggcaaacccaacatagaacacaagggaagtatcaatttttgattggtccgatgatgccctgcttaggatccttcctgaaggagtggtgtcaaaaaaatgacattggagctcttagaatgctgtcaaacatcttgttgaaaaaggcctgtgctgattgaagccccaagaatgtcacaataat

SEQ ID NO: 32722 - DNA, 363 bp, Setaria italica
  Peptide Sequence Number=SeqID_98696
tactaaggctccatggaagctacaacgttggtgaggcatccctagcgctcaagataggattgctatgctcacaccccctttccggtgcgaggcctagcatgcgccaagtcatcaagtacctcaacggagatatgccactaccggagctgaatccgacacttcaaagctttgaatctcttgcgctgatgcaaaacgaagggtttgactcgtacatcatgtcttacccctatcgatggcaaccatgaccaccatgtcgaacctttcaggcaaagttaccacgacgtgaatttccttccatttccattgttcctttttttttcttagagcaggctactcttcagtgtaagtacactgaattccatg

SEQ ID NO: 32723 - DNA, 786 bp, Setaria italica
  misc_feature (728)..(728): n is a, c, g, or t
  Peptide Sequence Number=SeqID_98697
aaaacagttgtcatcaaagatcttcacatggatgtgtaggagggtttctgttcttgaacatgtaaactataagctgggcatatttgtttaagacacgattgtttgtttacactccttctggttaagacatggtatttttgttttttagcgcagtcaacattcttatttaagtgtgtatccatggaatacaaggtgcatattctgatttcagttactatcgacatagcttacttttccaatgcattgcccaacccatgggcagtgatgatcaaagcgttccacacaattgttgcaaatggaacagtgtgagcaccgaggagggcgatataccatacaagtttcacaatactttactttcacaggcatcccatttactataacttcctttacacgaggaaattgtagtcttccaggtgtatcagtaagagacaaactatcatagtgagtatcctcctctggtgggtgtgaagcacgaggtacaattccaggatcctgagcagcagctgtgaagagtaacaaaagcacatagatagtgtacactattgctacgacaagaattgcatatcctgcatcatatgcacggaactgatgacggagatgccgtgcgacaaacacacaaaagaaagcaaccgggacaacaatgagggcaacagaaagacctagggatttaacatcaggtccaaatatcaaccgcccaccaaagaagaacctctgcaaacaagacacanaagtcagttagaggatactgaatcaatagtgtggtatattgcacatgaacaacaatgt

SEQ ID NO: 32724 - DNA, 869 bp, Setaria italica
  Peptide Sequence Number=SeqID_98698
cagaggagacttgaagaggaaacaacaggaaaaatacggtaattgcgttttccaatgcattgccaacccatgggcagtgatgatcaaagcgttccacacaattgttgcaaatggaacagtgtgagcaccgagagggcgatataccatacaagtttcacaatactttactttcacaggcatcccatttactataacttcctttacacgaggaaattgtagtcttccaggtgtatcagtaagagacaaactatcatagtgagtatcctcctctggtgggtgtgaagcacgaggtacaattccaggatcctgagcagcagctgtgaagagtaacaaaagcacatagatagtgtacactattgctacgacaagaattgcatatcctgcatcatatgcacggaactgatgacggagatgccgtgcgacaaacacacaaaagaaagcaaccgggacaacaatgagggcaacagaaagacctagggatttaacatcaggtccaaatatcaaccgcccaccaaagaagaacctgttatcccccttccaagcttggtacacccgctgctgtggttgtgccatgtgcaattacggatcagcttcagtcaataccctatcgaatccaccatagcaacacgagggctcagacgaaccccctgaaattcggaaaaataaacagcagccgcacgtggagactggagtaccaagttgtgtgttatcaactgagattggccttgcgccctgaagacgaaccacctactcgagaagtaacaagaactatggttctctcccgctcggccgctccacgccggtctcttccagtgcgaaggggccgagaagcgcgacgcctcccaaagtcccagcgaggaggacttcgg

SEQ ID NO: 32725 - DNA, 1576 bp, Setaria italica
  Peptide Sequence Number=SeqID_98699
attatcatgtctgtcttgcgatcgagatacatccgaacaggacgctgtagcttgaatgcagcaacagcacatgcacatgcaacatgtattgctttcattgcctttccaccaaaccctcctccaactcttctggtgatgagacggacattgtgaaatggaacgccaaggcaccttgcaaccacattttgtgtgacctcaggtatttgtgttgatgaatagatggttatgcagttatcttcatcaggaatagcaagcgccacttgtgtctccatgtagaaataatactgggattcaagtttgacctcagctgatataatcttgtgatcagcttcagacatcccttggttgtagtcaccaactggcttaggagctaaaaatggggggacttggaagtagctgtttcgttggatggcatcttctactgtcagaattggtggctgcagattttctgtgctatactcgataacagcttgctttgctgccatataggcgtacttctgtgtttcagcaatcacgacaccaatattttgaccagcaaattcagcaattggatcagcaaaaagtggttcatctcccagcattgggaagcaggatccaatgttttgtccactgctgggaatatcctttgcggtgataactgtgatgaccttctttgaagccaaagatgttttaaagttgatacccttaacatgggcataagagtgtgtgctatagataaatgctccatagaggcaatccttgggagcagggatatcatcaacgtacacagcctccccagatgcttggagctctgccccagctttcttgatcggcttgccaactggcttgtattcatcagtgaaaatcatttcttgtcttgagcgtattggcaaatcattgctgtcaaccttgagatgctcctctggtgagtgatcagcgctaccgttcgcgactccattcgtatatgacccattgagcacattaatctttgttgcttcatcaaagctgttggcaagggaagataggaaggtgaacaagaaactgatagccaagctgattctatactcaggatgtgttgtgccttcggatggtgaaactgtctctttaagcaaccggactgcttcaaatataacagaagaggtcactgatttgcccttcaggaaatcctcaaccttcctagctctgatggcatgatcggctccataagcaccgaatgccaagcatatatcctcaatgagatggccgcttgatgtccttgccaagaaagcggagtttgcatatgagacagcattgccaaatggacgaggggctgctcggaaagtctcaaaggtgaggccatctgaaccccaatctggaatgaatatgctgagcaacagggtcctagaatcacatggaggctgctgcaagaactcctccaaagtgaggcatagccttttggaagacacctggatactgacggttgaacctgcagccagtagcacggttgcaatgtctgacgggaactgcaacctctgtgccatgattatgtttccacctatggttgcagtgttccgaacaaacggtgaagccactttgttcaggtgattagcaatctttc

SEQ ID NO: 32726 - DNA, 545 bp, Setaria italica
  Peptide Sequence Number=SeqID_98700
atcagtacttctgacaacactgcccttgagctttcctgagatattaaatgtctatttcaagaagaagctggaagaacttaatattattatggctggatcatatgagagtgaccaacttgggaatcatgagcttttcgaaagtagtaatacctctgactggcattctggaatggatattgatggtcaagatgtttcagaaagtagctgtttggtaaagaacattggaaaagttgttcgtgatcttagatgtcttggttttacatcaatgacagaagatgcttattcctctgcaataatctggcttttaaagtctaaagtttatgaactagctggtgatgattacagagttcctgtccttgggtctgtgaagaagtggattcaggctgttcctcttcagtttctgcatgctcttttaacatatcttggcgactcagtggactatgatagtggatcttctggtctgaaatcaccgttagcctcacgtccttcttccttcccaagggtattggcgttccttctgaagcccttgtgagatggcacatgcg

SEQ ID NO: 32727 - DNA, 460 bp, Setaria italica
  Peptide Sequence Number=SeqID_98701
gcggagggggtcagctacctcgtcgtggcggggctggtcgggtggtcggtcaccaccaaggcgcgcaccgggtcgggcctcccggctggcccctacggcctcctcggcgccgccgagggcgtcgcctacctcaccgtcgcggccatcgccgttgtcttcggcctgcagttcttccagcaggggtcgatccccggtccgttgccgtcggagcagtgctttggctgactctgtaactgatctcgttgccggctgcagaactgtgtatggttgggtgttgctgagtctaccctgttagtacatgtttaactacagtacatatgcgtgtccgtcagtgattgtagatctgtagtgtttcaattcgagctctcgtttttgtgcacttcttctctgagatccggagatagactggagtttggctaactctgtagcttaaactgagtatcgcgaatgcgatgtttat

SEQ ID NO: 32728 - DNA, 274 bp, Setaria italica
  Peptide Sequence Number=SeqID_98702
ctccgcgacctcggcgcgcacgcgctgggcccgcgcctggggccctggctggtcgtgccgcagcagctcatcgtgcagctcggctgcgacatggtgtacatggtcacgggcggcaagtgcctccagaagttcgccgagtccgtctgcccgacctgcgcgccgctgcaccagtcctactggatctgcatcttcggctccttccagttcctcctctcccagctcccaaatctcgacgccatcaccgccgtctccttcctcgccgccgccatgtcgc

SEQ ID NO: 32729 - DNA, 378 bp, Setaria italica
  Peptide Sequence Number=SeqID_98703
agaacaaggaccatagcaaaaggccatcactgactgcaaacgagcgaagagggagatctcccgagggccgacgcctcgcgatttccggcggcaaggttcgattttgatcccgcccctaggttcccccaccccgattcgcccccatcccagccgctgcttccggcggagcactggagaaaaagatccccgttttttttttccttttctccagttgcagttcgtgccgccgctgccactcccttgtctccgattcggcagttgctggactgaggggagttggtgctgtgggattccggttcggatctgcggaggggcaggtttcttgctccaattcggccagcaatgagggtccctgaaccgtgttgatgcgcggccaga

SEQ ID NO: 32730 - DNA, 411 bp, Setaria italica
  Peptide Sequence Number=SeqID_98704
gtcccgttcaatcctccgggccgccgcttccttccctaatccccttcacctgttcaagtattcaggcagctcatccacctcctgattctgtccctccttttccatctgtctctcctagcatcctctgcctctgctatgagcttcaatccacagagctccctctccctgtcggcttcaatcaccacgttcttggtcctctcccatgggcagccataacatttgtcccttccttcccaaaatcctctctttttccacagctgttcatctttcctcttcacggtctgtctgttgaaaactagatggggtgcttcgccttcaagagcggcaagggcaggtccaggagccagccggccgccggagccaagacgccgccgccggccaagtcgcccccggcgtccgactcctcaggcg

SEQ ID NO: 32731 - DNA, 301 bp, Setaria italica
  Peptide Sequence Number=SeqID_98705
gttgaaaactaggcaaatatccccccttttttcaactatttctcattggtacagcgattccttcctcttgatgaaatttgcaaagatccacccattctaagctctcttctccggcttcatctgtcaccagatggggtgcttcgccttcaagagcggcaagggcaggtccaggagccagccggccgccggagccaagacgccgccgccggccaagtcgcccccggcgtccgactcctcaggcggcggcggcgggaagaggagcaaaggtccttcgttccgtcgttcggtcgttcctacgtcc

SEQ ID NO: 32732 - DNA, 731 bp, Setaria italica
  Peptide Sequence Number=SeqID_98706
agaatacttaataccttaactaccaattgcttctgtacacgtgttctatccacaggatccatgctaccatggtagtgtgatacactgtgtccacattcccttagtttttctgccacttttttcacaatccattcttgaaaggcagtatatgatgccacattctttaaaatgatttgtgcggataaagttatcaatgtcctcaaggcatttctttgtcttgggccttaagaggtaccttagatttggacgattaaaactttgtctgaaaacaatgcagtttgcaaggcctaaagcttgcacgacatcttccttaaccctagcagttgctgttgcagtcaaggccaggactggtgtcttggggaaattttgttttagaacacctaagttcttgtaatcaggtcggaagtcatgaccccattggcttacacaatgagcttcatcaataacaattctagaaagatgcccttgtgaatataaattatccaatagtcccgtcagcgaattactcttagctattttctctggagtgacgtacaacaacttgtagtggcatgacattaagcctcttaagatctcttgctgttcaggccattccatgctggcactcagataagttgcaggaatatttgcctgtgacaagtgcatgatctggtcttggatgagtgagacaagagggcaaactactaacgttaagccctcactaataagtgctggaagctgatatgtctaaa

SEQ ID NO: 32733 - DNA, 350 bp, Setaria italica
  Peptide Sequence Number=SeqID_98707
gtggtttcctggccgccgccctggcagccggtgggagcagaagatgccggcgggctttccggcgagcctctgctcgcaccagaggtcgctggtgccgtccatgaacgccttgaactgcgcggggagcatgccgaacctggtcgggaacccgaagaggaggccgtcggcgtccacgagctccgcgggggtgatcaccggcacgtcctcccgcatcggaggggcgctcatcttcgccagcgcctcgccggagagtgtctccgggacctgccacagcttgacctcgacgccgtcgacggacgcggcgcctttcttgatctcctccgcgagcgtcgcgacgtggccataggtgg

SEQ ID NO: 32734 - DNA, 366 bp, Setaria italica
  misc_feature (10)..(10): n is a, c, g, or t
  Peptide Sequence Number=SeqID_98708
gtttatatanatttattgatgatgatcaaatgttcatataagccaaagcattatgcattccattaactacacatgtgacatgtataaggattaaaactttacgacgagaggctcttgggtgactaagtttagtgtgtgtggattagtatatatggagggatcaaaacgagtcgtcgtggcagctgccgctgctcttcttcctccgcatgaagagcgcgcccaccagcgggatcagcggcttcttcttcttcttcctcccctcctccgccgccatcgtcttcgcggcctcgtgcccggccgacatctgcctctggaacctcggctcgcggtagtaatgcggctgcggctggggcgcgcgcggtgtag

SEQ ID NO: 32735 - DNA, 290 bp, Setaria italica
  Peptide Sequence Number=SeqID_98709
tcttttgcaaaaattctgaagatgtcactttgaagttgccttaaatctatctctatttgtttcggccagactgaaagggtcgaggatatctcatccagtttgcgggaatgggagttcagaacactcagctgatcagcaatgcttttggtgctgctctcaaaaagtgctttgagatcatcttgtcccttaagaactttctgcagtgaattgtctaggacaaccaccttctgctgtatgcttccagaatctagtgatgcttccttcatggctctgtttaactgcataacatc

SEQ ID NO: 32736 - DNA, 628 bp, Setaria italica
  misc_feature (199)..(199): n is a, c, g, or t
  Peptide Sequence Number=SeqID_98710
cttgacttttgtctaaacaatcaagccaaccagatgtagctgaagctatattgaaagatatcgattctgatcttgagcctgaaacaattgtctatcatcaacatcatcgtgtagtacttgttctacagatgggctttcagctgaagggatgtattcttggcaagagcaagctgtgcatggaagaaatcatctatcagangtttttgcattgatagaaatgttatcaatacctggattatttgttgaagtcgcacaggtttttgagagggctttattgcgaggggcctttggcctacaattagtagccatggtgctggaaagaagacactcttacagatcaagttcaaagtctgggtctgttgtgaatgattcacagaacaaacaagttctgttagatgggcagtttgaacctttgtctgtccaagaaaatgatttcacttcagtccttgcgcttggtgaggtattatctctatctacagaaacgaaggttcaagactttgtgcggatgctttacgctatcatatttaagatctattctgaggatcattatagatatagaattcttaagggccttgttgaacgagcaagaaataccaagacatccatatcgatgtcaactgctcggcag

SEQ ID NO: 32737 - DNA, 474 bp, Setaria italica
  Peptide Sequence Number=SeqID_98711
cttgagaatgaagtgagaaggctgacacagacagttgggcaaactgagggagaaaaaaaggaaaaagaagagcaaattagtcgatgtgaagcttacattgatgggatgcagtcgaaactggaagtttgccaggttttccaccttgctattttctaatgtttgcacagttgtttgttctatacttatatctacattgactattgtctcaaatgccttgttaaaaaatggagattatttccttaggatattttgttgtcacaaaagatgtagtcaacagcatcatacatttgggggacttgtccaccaactatttgatatacatggaatggtgttacctgtattcagcacattgatttttagatatgtacgccaaatagtatgccagttatttttgaaaatgaatcttgcatttgtttaattgatgtaattaaatactcagcagaactcagtgacataactgaccacaacattgtt

SEQ ID NO: 32738 - DNA, 1832 bp, Setaria italica
  Peptide Sequence Number=SeqID_98712
atcgattctgatcgtgagcctgaaaacaattgtctatcatcaacatcatcgtgtagtacttgttctacagatgggctttcagctgaagggatgtattcttggcaagagcaagctgtgcatggaagaaatcatctatcagatgtttttgcattgatagaaatgttatcaatacctggattatttgttgaagtcgcacaggtttttgagagggctttattgcgaggggcctttggcctacaattagtagccatggtgctggaaagaagacactcttacagatcaagttcaaagtctgggtctgttgtgaatgctagtaacagaactaagtttcttgtttagtattgggtctagttttgtgaaccttttgttctgttccaagaaaatgatttcacttcagtccttgcgcttggtgaggtattatctctatctacagaaacgaaggttcaagactttgtgcggatgctttacgctatcatatttaagatctattctgaggatcattatagatatagaattcttaagggccttgttgaacgagcaacaaatacatcagataactgccgagcagttgacatcgatatggatgtcttggtatttcttgttaaagaggagtatgggattgcaagacctgttttgaacatgttgcgtgaagttgctgaagttgctcaggctgaccgttcaaatctttggcaccaaatatgtactactgaagatgaaaatattcgtcttcgtgaggacatggaaatggagcaaacaaatttcaccaatgaaaagattgcactaaaccaacggctaactgaatcggaggcaactattggccatctaaggtctgagctaaaagctgagagggatcgtttcactcgcgagaagaagactctgtccgatcagatgcgagagattgagagtcaattggaatgggtgcgatcagagaaagatgagcaaattgctaagctctctgctgaaaagaagaatcttcaagttcgtcttaatgatgcagagtcacaactctccatggtgaaagcacagaaacgtgaagaattaaagaaagtgacaaaggagaaaaccacattagcagaacggctgaagaatgctgaagcttcaaggaaaaggtttgacgatgaattaaaacgttatgcagctgaaacacagactcgtgaagagattcggaaatcacttgagaatgaagtgagaaggctgacacagacagttgggcaaactgagggagaaaaaaaggaaaaagaagagcaaattagtcgatgtgaagcttacattgatgggatgcagtcgaaactggaagtttgccagcaatacattcggacacttgaaacttcactccaagaagagatggctcggcatgccccactctacggtgttggtgtcgaatcattgtcattcgatgagctcgaggcgctcacaaacatccacgagcatagtttaagacagatcaaagcgatccagcaaaggaaaggtggcagccatctcttgggtggcccctctctctcgcacatccctggcttattctcctcgcccccgcctccttcaatggcagttggccagccgtccccgcgcatccccgcatccccgatcgcacccaacggtgcaggaatccacgggaatgggcacgcgaacggtgccgggggccgctggttcaatccgacctgagcgagaagcagactcggttggaagttgggaaaaggtgtccattttgtgcatttgattcaacgggccacatttgcctgggcgtattttgcagccgctgagcaagccaacgtcgtaacctcgttgttcctggccttccgtcagggctctctccttgtacttacttggtagtg

SEQ ID NO: 32739 - DNA, 1029 bp, Setaria italica
  misc_feature (1)..(31): n is a, c, g, or t
  Peptide Sequence Number=SeqID_98713
nnnnnnnnnnnnnnnnnnnnnnnnnnnnnnnagtttctacggtaactctgaattagcccattcatagcttaaaacactgaagggcaacggacaatctgccagtacattggaaatgaacaatctgaaaattacatacaattcttcctccagacgacgaaaagaagaaaaagagaaatgcatacagctctatttcttctcacccctcctaccaaactatatcaaccatgacaagctcaaaaaaaataaccatacatggcatttcacaacaatgcagagcgagcacagcttggcagaaacaacagctgcttcgctcctacaggcaatcatcatgtcatcaaatagcagacatgaaatcaatccttcgtcgccttcacgacgtgaacaattggctccccagtgtcacgatggcggttccgtcacccatgaacgtcgtcatggacatctccgtctccagaattcggtctagctcagtcgcgaccagcctcatccttggtcgccgtcttgatgatgggttcaggcactggaaggcaaggccaacaagctccttcatgccttctgaagtgaagctgccgcctaatcttgggtcaatcaattcatttgaactgaaatgtgcttccatctttcgatgtgacaagaaaatgtctgtcagtgggcagttagttaaaaaaaattcttattcacaaaaaactgcagctcatttttaaattttgttatttttctctgaaaggagaaactgcagctcatcttttacattgttatttttctctaaaaggttactatgtctcaactgagataggaaaacaccataatgataggactttcagtattcaagaacagaaatcctaagaggaatttatgtgctcctgcagcatgacttggtacttatcatgcctaatgagcatgaaaaatgatgttaagctgatatgttccagctgttatcaagttttggaaattccattttgtcaaaatgcagaatgcacacataggtaagctaactctatgctaattgatggaccaaatgaagagaag

SEQ ID NO: 32740 - DNA, 140 bp, Setaria italica
  Peptide Sequence Number=SeqID_98714
gaggccagatcatctacaggcacaacaagcaaagagaacagtacatgaatgcagggaacaacggagaatttggttctgactggaccctacacaggactctcggcgtacttgtgcttcgccatcaaaattgacatccccga

SEQ ID NO: 32741 - DNA, 420 bp, Setaria italica
  misc_feature (165)..(165): n is a, c, g, or t
  Peptide Sequence Number=SeqID_98715
taccagagcacattccaaaccatcttacgttggttcaaaggattgccagaactatgcaagggtgaactacatgatgctcaagggattgctggaatgagagttgcttgcaaacttgctgcccgtgttctgacttgctgggactttagttaagccatcagttaccanaaatgaaatcgacgctgcagtgcataatatgatcattgaggctggtgcttatccttctccacttggctatcgtggattccctaaaagtatatgtacatcagtaaatgagtgtgtctgtcacggaatccctgattcaacacagctgcagaatggggacattataaatattgatgtaaatgtgttcttgaatggataccatgggggtacctccaaaacatttgtatgtggacaggtggatgattctatcaagcattt

SEQ ID NO: 32742 - DNA, 1306 bp, Setaria italica
  Peptide Sequence Number=SeqID_98716
cgggaatcgacggcgcggtgcaacgccacgtcgtcgtccgcggtgtcggaggccgccggcgtgcacgagctgccgcggacggagccggtggtgtcggccgagtggctgcacgccaacctcaaggaccccgacgtcaaggtacttgatgcctcttggtatatgcctgcggaacaaaggaatcctctacaagagtaccaggtggctcatattcccggtgccttgttctttgatgttgatgggatatctgacaaaacatctagtttaccacacatgctgccatctgaaaaggcattttcggctgctgtatccgctcttggcatctataacaaagatgggatagtagtttatgatggaaagggactgttcagcgctgctcgtgtttggtggatgttccgagtatttggacatgataaagtttgggtgctagatggaggtttgccccaatggcgcgcttctgggtatgacgttgaatcaagtgcatccagtgatgccatcttaaaggccagtgctgctggtgaagcaattgagaaagtttaccagggtcaaccggttggtccattcacatttgaagcaaagttgcagcctcatcttatttggagtcttgatcaggtgaaagagaacatcaagacccagacacatcaacttatagatgctcgatcaaaacctagatttgatggtgcagttccggagccacgcaaggggattagaagtgggcatgtacctgggagcaaatgcgttccttttccccaggtgcttgacagctcacaaaagctattggccccagatgaactccgtaaaagatttgagcaagaaggaatatcacttgatcaaccccttgtaacctcttgcggcactggtgtgacagcatgtgtattagccttgggccttcatcgccttggcaaaactgatgtctcagtatatgacggatcatggaccgaatggggcgcccatcctgacactccagtcgcaactgctgccgcttagtccctatcctgttcatggaggactcttgattgtactttccttgtaccctgatcctatgggtaaaggcgaaggaaactgaagtggtggggtgtgcggaaggttagggaagcgaagccttttggtcatcactgtaaatgctgaaacagaaaatgtcacatacacatacactggtgaattatgagttcataatttcccttgccgaggtcccttttcttggtggaacaataataatgaaatggcaaaaaagaaaaatatgccatcagttttagtgtccggtgcagcacctacctcgatggatgccacgtgtctcatcttgttcaat

SEQ ID NO: 32743 - DNA, 1309 bp, Setaria italica
  Peptide Sequence Number=SeqID_98717
caaaaggcaaacagttggagtggacattctttagttgcccaaattgtgactaaacactcacacattttcattcgtcgtttgccgcagttcattaaacacatcctatatataatatattatgcatgttaaatttataaattagtactatatatgagttatcagagttaacaagaaacaagtacttagttgactggaagtctcaaagaagttgcaacgacattattaacatatatcaaaaaagctgttaagacttccactactccttaagtaagtaattgttttggtctacttactttgggtagtgctcaaagaaaatattgttttggtctacttgaaaattgtattgcagttcagagaactccttttatgcttggcagttcatagaactcttcttttatgtttggcacattagttataattcttgtttttatttatattatatcctagttaataatattatccctattccctatataatagataatgggttcttcggaggaggatgttaggcagttcatgttagatgaggaagaattggacgatgaacttttctttgttattgtccctgttgtcatgtcatgtctctatgatgaaaagataccagaacacacgtcatctcttcctggtgccacaaaggtcaaagaaatcctagaaggccacaaaaattggtgcaagtcagagtttagaatggaggttgagatctttagagctatagcaaatcttctcagagcagaaaacttattacacgacacacgtggtgttaagattgaggagcaattaggaatatttttgttcatgctctcccataatgctagcattgaaatgctaaagaaaacattccaacacagcggtgagacaattcataggaaagtcaatgaggtcttcgatataattccaacattgactcatagattcgtcaagcttccaaatccaaaccaaacacatgccaagattttatcaaaccctcggttcatgccgttcttccaggttagtcatatatgctgcttgcccttgtatcattccaaacacactattccaacaatattaggttcctttttacgtgtagaactgcattggcgccatcgatgggacacatatccctattacgctcaatgaagataaggcccctccttttagaaacagaaaagggacattgtcccagaatgttagtttattgtgccgtcttgatctcaaattcactttcatctcttgtgggtgggaaggatctgcgtctgatgcaggagtcctacgttctgctcttacgaaggggtttcatgtaccgccagggaaattctatcttgtagaatta

SEQ ID NO: 32744 - DNA, 679 bp, Setaria italica
  misc_feature (653)..(679): n is a, c, g, or t
  Peptide Sequence Number=SeqID_98718
gtacgggcacccgtccctgtcgccgctccagcagcagcaggcggcgcacggccagctgggcatggcctcgggtggcggcggcggcggcggcacgaccagcgggttcaacatcctccacggcgaggccagcatgggcggcggtggtgcgggtgccggcgccggcaacagcatgatgaacgccgcatgttctcgggcttcggccgccctggcagcggcatcggcgccaaggaggggtcgagctcgctctcggtcgacgtccggggcggcgccagctccggcgcgcagagcggggacggcgagtacctgaaggccggcaccgaggaggaaggcagttaagacgctgtcgtcgctggcacgggcaccggcataacggcggcggcagcaggattagcaggtagctttgaggaacgaggaggggtagtagtgtagtagtggtagcactagctaatagtatgtggtcggtaaggtaggtttgttccatgggaacctggaggtggtagtgaccagcaccgctgcatgctgggtcacttgttttggatgtgcgtggcaggttctctccccaagatgatgatgtagtatggaacgttgatggtggccctcttgcgcgaacaactctatgctgtattgatggacttgatgatcttgaaaagccnnnnnnnnnnnnnnnnnnnnnnnnnnn

SEQ ID NO: 32745 - DNA, 262 bp, Setaria italica
  Peptide Sequence Number=SeqID_98719
gtctcttcgtccccgctccactcgctcccagccgtaccagggaccagcgtggcgaggagatgatgccatgagctggcggccgcgttccttttccagctgggtttgcagcggcgttttccgtgccgggtctcggagtttcttttcctcgtgcgtgcgattgtgcaaagcatctcgcccgagatctggcgaggaggataaggacacggaggccgcgatccgggcggtccagcccgtggtggtggtgggctggggtgcgtccgcg

SEQ ID NO: 32746 - DNA, 346 bp, Setaria italica
  Peptide Sequence Number=SeqID_98720
ttcctccacagttgatgtcagggagctcctcggagctttttggtttcattgcttctgaattggctaagtttgttgctgatgaggagaagtgcgctaacgtattatcaaatggaaaaaagcgagagctagggttcacattttcattcccagtgaagcaacgttcagttgcttcgggtacccttgtcaagtggacaaaggcattttccattgatgatgctgtaggtgaagatgttgtggctgaattgcaaacagctatggagaagcaaggtctcgacatgcatgtggctgcactgattaatgatgctgttggaactctagctggagacaagatactatgacagagtat

SEQ ID NO: 32747 - DNA, 1181 bp, Setaria italica
  Peptide Sequence Number=SeqID_98721
gtgtttgttggatcaattatctgcagtgaaagttatgaacttggttgtttattgaaaaccttccatcacattaatttctctgaaatcaggtaggtgaagatgttgtggctgaattgcaaacagctatggagaagcaaggtctcgacatgcatgtggctgcactgattaatgatgctgttggaactctagctggagcaagatactatgacagagatgttgttgctggtgtgatatttggaactggcacaaatgcagcatatgttgagaaggcaaactccattccaaaatgggaaggtgaattgcccaattcgggggatatggttatcaacatggaatggggtaacttctgttcatcccatcttcctgtcactgaatatgatcgagagttagataaggagagcttaaatccgggagagcagatctacgagaagttaatgtcaggaatgtatttaggcgaaattgtaaggagggttctccttaaaatgtcgttgcaatcctcaattttcggcaatattgatcacactaagctcaaaacccatttccttttgcggaccccacatatttctgcaatgcaccatgatgaaacgcctgatctcaagattgttgctgaaaaactggaagaaaacctagagataacaggtacatccttggagactcgaaaattggtcgtcgaaatttgtgatatcgtggcaagaagggcagcccggctggctgctgcaggtcttgcagggatcctcaagaagcttgggagagatggcaatgcccaggagcaacgatcagtcatcgccattgatggaggactgttcgagcactacaccaaattccgcgaatgcttggagatcacactgggcgagttgcttgcagagtatgcctccaagtcagtggccgtcaagcatgcagatgacggttcaggaataggtgctgccctgattgcagcttcgcaatctcagtacagaaatgttgagtgatatagcaatagctggcaaaagtatttgccacacatgtagggaagattaactagcaaagcagctggaatttctttcccacatcttaacagtccagtatgtgcagttcacaatgctggagctgaagcaatctgtaaccgaaacgaggcttgacgaagtgactttgcatagttccaataacagcggagttgcagagattttactaaaaaaaaaaaa

SEQ ID NO: 32748 - DNA, 859 bp, Setaria italica
  Peptide Sequence Number=SeqID_98722
gcccctttttaagccatctttcacactactttagttaattaaacaagtagtaaaagattcaatgatttgaagaaatgtccagttgatgcatccaaaactcccatgccacagttatgttcagccaaatgtcatatgaactggtaagcatttcatagcaaaaagcactacagagcaaactaaagatttacattgaaatgaacaaatgtaacaatattcttgcaccaatctttataatcaataagttgcaacccaacagacatggtccaggctagttaagacagccaagctattggtgaagtagtagatattagatgaattctggtacaggcagtataaaagtgcactcacagcaaaaattgcctagatatcacaagaagaaaagcagctagaaataacagtgaagaatgagaacaagcaaactgactttgaatgaaagaatcctgggagctggaaaccgttgctcactgagctcttctgccagtgtacggcatgctgctaaagctgctgcactttgcccttcttgggctgctagctcagcacccagccaaatgaaaatatcagttccatggtccagcaccactgcagcattagattgcatgacaagatcatatgccggcaattcctcaaaggtaccaccttcgcgatgcattatgcaccgaggtgccatcatacggagtgaaagatcaaatgaagcattcaagaacaaattcctaagtacagatcgttcatcttcatgtccgattatgctacctaaaagtggcccccgtttcccaaaagaactagcatcactcccagagtgcttgtttcatctgaaaagggggccacttttaggtagcataatcgttcatcttcatgtccg

SEQ ID NO: 32749 - DNA, 2609 bp, Setaria italica
  Peptide Sequence Number=SeqID_98723
agattccagaaagacattggctgcggcttcccataaatgaatggatttcaaagaatagtgacaccaccgccaaatagtatacatgtaacatctgcgatgctcttattgtgtaaatttctcagcctgtatgataagggaccgtttatgaacttactctaccacatcagggtcaaaatggggggaaaagaatcaagcaaaatcatacaatttctacagcaccctaaatggcgcttcaccaaaccaaacatgtgatcggctcgggcatgtctcatgagtcacgacgccacaatttggctcacaaagatctcagctatcgtttgggcaactttctgaaggcacgctatggcttctgtagcaatccaccgtttccatgtgtactgctctgattatttgtgttagcttggttctggcgggaccaatttgaggctgcgcatccactcacagaaactatggtcgtcaaagtggatgaagctactctttagcctagccctttgctcaggggtaagcgtccgtaattgtggaaaccttgactcctgctcataagtagggtctttgtgagctgggataaggcgtgagacaaaatatctagcctgagagcttccttgtttgaatgaaagaatcctgggagctggaaaccgttgctcactgagctcttctgccagtgtacggcatgctgctaaagctgctgcactttgcccttcttgggctgctagctcagcacccagccaaatgaaaatatcagttccatggtccagcaccactgcagcattagattgcatgacaagatcatatgccggcaattcctcaaaggtaccaccttcgcgatgcattatgcaccgaggtgccatcatacggagtgaaagatcaaatgaagcattcaagaacaaattcctaagtacagatcgttcatcttcatgtccgattatgctacctaaaagtggcccccttttcagatgaaacaagcactctgggagtgatgctagttcttttgggaaacggtaaagctttgattttggggcctgagtaccaaatttgagagctatgtcctttaccctttcatcaattgattgcctcatatcaatagcatcagaggcggttctggcacgcaagacggttcttttaccgatgatcactgaggcaacatcctcctgcacacttgccagatacgcagacaaaccatcaacagtctgcagcctcatagtgatcacccgagtgatttctgcttgatacacattggaataatggactgcaaactgaaagaaaacaaaatcactcttgatatcaccctttgtctccatagacacagaaaaactctgtgtctcctcgacactatgcatctggatacaaaatgaactatcatgcttgaatgtttcatgggaatcaggagacgcctcttcaccagggccaataacttgagtaacaagcatattatctgagcacctgatctcaaataagccatgggaaccggctgctctagttgatgccctttgcaagttgactccaaaggcctctccaaagtcatcatgaagtaaaagcacacctccagaacactttgctagtggttgcagaacaggaaccctcacaggacactgtccggcacaaaagatatcaacgacagtactgtgtctctgtgcttcatgcccaagactctccatccacttcatagctgtcttctccaggtaagcatagttcggatgtttaaccgaataaggcacagatcctggtccaaaggtgcaagggccaccagcacacaacaagatcctgcaattgcccccggatctcttgataattccacgagacaactccactgacggcccttgaataataccaagggcaacctctacggctgcaccaaggcaccgatcccttgacacttctggcacactcagctgatagggtctcagagatgagaatattgtgtgtgcaacaggcagcgaagcatgtataggagacaggtaaacccctgtcccatagattagtgccttcaaagactcatgtgtaggtgacttatttccaggtagcacatccgctgacacagctgccccctctgagaaatcatacaccgagactgttcgcccgtaggtgattattcctatctttgctgtcggaggaagagaatccacaaaagcatgcaaggagccctgcagatgctgcagatgggcctcgtcgaggcactcgtctatgagaataaaaatggggccagacacccttgagtcagacacagggacaaaacctggcctcctgtttcccacctgaacataatccacagtcgttgatgctagctccggccactggagcaggtcctgcttgctggagactacgaattccccttcactgccgttgatcttctggcagatgacgcactgccactgcccagagccgatcgagatgtcacagtacaaattgacataggccccgcagttcaggcagcggcgggggtcacgctccacgacctctggcccaggcgacacctccttccccggagaaaccagagctccgaaccccaagcttggggcattgagcagcttcttctgcttcagcaccttgttcgcggagaactggacgtaggggttgttgaggccgtccccctggagcggcgacggcgcggg

SEQ ID NO: 32750 - DNA, 419 bp, Setaria italica
  Peptide Sequence Number=SeqID_98724
atgtgtgctgatgaagttcccactggtgttgctgcttggtgtgctagcaggtgtgatgaaggtcctgtagctgcttcgtgttctgccttctgcaatgaagcttccattgctattccttgttctcatgccatggccaccttgtgaaaaattattacttcttggggggctatggttcatatcttcattgcatgatgaaggtgattcgatcgaagtccttcttgcctcaacttcgctgggaaacaagagctgaatggtgttccagagtacagtattgatggtgcacgatcttgaattgctgatcaattgcctgcacttaggacaccgttttcctacacttggttgcagcatgttttaagtcattccatgcagaagctgtgcccacaaggcgtggtgctaggctcgaagcagatttccaggca

SEQ ID NO: 32751 - DNA, 254 bp, Setaria italica
  Peptide Sequence Number=SeqID_98725
tcatcaggcaaacatcatagttcactgcaaaattgcccggcaaaggccaggtcaggaacatccaaactcccaacgtgcttgaacaagtgcaatctttgggttatgcacaagaaatggtatagttttcaaaaggaagtcagattcaggttggaaatctgcatcaaagatagcaacaaagtcacactgctgggcgtatatatgctccatgcccttcttcagtgcacctgctttgaatccctttctgttatttctaa

SEQ ID NO: 32752 - DNA, 923 bp, Setaria italica
  Peptide Sequence Number=SeqID_98726
tgaatggcgttcatgatggtgatggaagtgggaatgtagaacattccccagatagggatgctgacttcagggaccatgacggacagtggaatcacaatgcagtagaacaggaatgtcaggatgggagcgatgacccttcgtacaaagaagaagctgtacagaagatgaaatttcttccatacagatacgcccttgcttctaacaatgcccggtgccatttttctgaagaggctagtagcaccacaagtccacctgtgctgttgatgacggtaggcctttaaggtactcgggagttcactcttaacccttatatcaccgacatacaggaattgccatcccttgagactcgctcgtacagccaagtccatgtcttccacagtggtgcgatccttcaccctcctgcttcactaattgctgatacccgccacacaccagctgttccgttgaaaccaaagaacgcatgcacagatgagcctgattcctgctcgactttgaaatgatagtctagcgacatcttctgtatccttgtcattaagcaaacatcatagttcacaaactcccaacgtgtctgtaccagagcaatctcgggttatgcacaagaaatggtacagttcttaaaggaagtctggttcaggttggaaatctgcatcgaaaatggcaacaaaatcacactcttgggcatagctatgttccatgcccttcctcagggctcctgctttgtatcccttcctactctctcgaatctcatatttttatgttgatgttcttgctggcccaatccttgcattcaagctccacaagttccctaatgaacggatcggtggaatcatccaagacttggattataatacggtccggcggccatgtgagggcacatgctgctccaatggagagcttgtagacctccctctcattgtacatgg

SEQ ID NO: 32753 - DNA, 266 bp, Setaria italica
  Peptide Sequence Number=SeqID_98727
cgtcttcgaatcgtagcaaagttcgaagggtgccactgccggaaccctcttgctgatgttccaccgccgcatcagggccttgtcgaaagcgtccaccaacgggcggtacacatcgggccggagctcggtgtacggcgccgtcgtgccgagcaccacgccaccagtggcaagtgggttccccgggagttgcacctgcgccttgtcgaaggcgatggccttcacggggaggtagtagctggagctgcctttcctgctgagcaacgggg

SEQ ID NO: 32754 - DNA, 615 bp, Setaria italica
  Peptide Sequence Number=SeqID_98728
ctagtgattgtgtcctgtcctccaagatgaatgaggaggaagggcgcccaaaagaaagctagggggtgggttctccttaatgtaccattttccatgatggcatcctcttgtcgtgataggaatccaagggcataaactgctaccacatctgctcccaaataggctatccacatggtgcccctaagcagcccgtttgtgctacagcgccgaaggctgccagtaaagaaaaggaacacttgtatgataaagctgagaagcactagcaactgaatttcccactcattaattagttgccagatactctccattgctaattggggctatgttgatcgccaacacctagcttaatgatcgttgatggaaaagggtggatacactactactgctgcccatcttgattaaacattccggctggccttctttgcacgagccatgtgaaaacttagccagaatcagaccaagcgtttcctgtcgatgtgtccctgatgtacatgctatttattatagttcttgctctacccttcctagctcagttagtgaagatacagtaggattatgcatttcttgcaggaagagcaaagagccaccagatgtcttttcttatcttgtgaagct

SEQ ID NO: 32755 - DNA, 2425 bp, Setaria italica
  Peptide Sequence Number=SeqID_98729
tcttctatatccttagaggctggtgcccagacctggcctggtcagtttgtattctcctccgctgccgtgatctgatgttttccatctcttggaaagggttcggcccactgaaaccttgctttgatttcctcaccttcttcctccttccacggtcatattcctcgtcccgttcatctaaaacatagccaatgctggtggaactcgaatgttgcatttctgccgctttagtatttggcatgtcatcatcatcccattgtggaactcttaaacccctcgtgaggagattaaaatgccaggagcctttctcatctgtaaccccacattttcctgaatcaggatttaacacagagcctgggcatgagcttgctgctagctcagcagcagcaagagttgcatccttgctgaccttcttgtccagggtaagttcagcagcacaggaatttccaagattttgtttcttattatacatctggacagcatcttcagaacttgcagagttacgggagcgtttttgtctatgggattttcgcgacatgccactagtaagcacagtttctgatgttgatgtctgccgatcatcaccagtactttcagcgtttgcatcagatgtcaatcgccttctagttctcttgtgtttccttttcttgcatggtttcagtgacgccaacaacagttgtttggacccaaaataaaagttgacagctggatgactcacatgcttctttgacttgattttaatgattttatgtagattgccatgacatggatccttgtctaccacctggacagaattttcagagcacatcatctgcgcacaatcctcagaactagccacatgtgcagagtcttcagaaccgattttcttctcgcagttgacatgtccagtatctagcgagttattcttcttaaaggtctggtcatctgcatctgccatatggccagtttccataacagagacttccttcgccatagactgcccatcccccagtgaattgttccgcacagcagtctgctcctctacttttactttatcatcaatgcttttcacagaaagctccttcaccacaattagaccatcatgttgcttaacaggctctgtccctttagcttcattaccactggttgaatcttcattgccggttagtgttccattagaaacagcggtatcctcagttgggatgaatggtgcaatagttgttgcatcgctatcaggagttggtttgcaaaacacttctgtttgaggttcaatggcctgctcgtttgcccccaataacccatctgcaccattgcataattgaaaagcagaagcagggatgcctttgcctgaatcagtgagtgcaccatcagattctagttgcaattcttgcaatggcttctcatatgccttctgatcagagtttgcatcacagagaacacaagcatcaggctgtgctgtaaacgttgtctccctttgactagctggtgcagtttgttctgttttggtggatgtagcagtaccatcaagatgtgagcatgtggctttctgtactggctcattgttttgggatgttgaagctttagtaacttcagtgcttccatgttcatttgaacactggtcctgcgaagtggcactaatattgctgggctgaccatcatctgggttcagcttctgtgacttcatatcaagaataaaaacatcaggctgtcctggagacattgtctccctctgaacactcagtgctatttgctctgctttggtggacaaggtatcaacaccatctgggagtgtatgtggggctttctgtactgatacattgttttgggatgttgaagcattaataacttcaatgctgctatgctcatttgaacactggtcttgtgaagtggcactaatatcactgggctgacccttatctgggtcatgcttctgcaactttatatcttctttggcaattgtagaaaaatccaatgttttttccactagaccattccgaatggcaccgttcatacatgtaatcttctcggatattattttcttttctgacaaactggcatcaccattatctttttgaattacagcgctccttactttgtcacgaacataaaataacatgtatgctttctgccttagtacatctgcctcacggacttggcggacctcgttatcatcaagattgtgccataacccactggatgtccgaacgaagcaataatagtgacccgactgtgtgttccaaccagcatgaaccaaaacaccatagaggctatatttcaaatccataccttctgaattgctgacaaatggcttcaagtttaaagttgtttgaaaatccacctttttgtcaatcttttgaagagggttgaaaggactaaagcgcttcaggtgaatcgtcaacacagaaggagctttatcaataagaaacctttctttgccgcaactttctgc

SEQ ID NO: 32756 - DNA, 327 bp, Setaria italica
  Peptide Sequence Number=SeqID_98730
ttaaagcactgaacccagaaggcaagtggagtaaaaaacctgaagcagatatctcggtctcacttgtgaaagggcattcctcaagggaatataaccaggtattgtggtctgtttgctttggacgtttgcaggcaacttggcatggtttgacatcagaaagagggcgcttgtcatgatctagtgtggcagattgataattctcgacagggagccaaggaaagccgaacttctcaggaggaactgaagaactgtccttacagccatttccaaaactggattcctcagaatttccactggcgtctagtccccttaggttaccataagaaa

SEQ ID NO: 32757 - DNA, 258 bp, Setaria italica
  Peptide Sequence Number=SeqID_98731
ctccgccgttggccaccgctgccgggtcgcccgctcccagcctcgcggccccccgcgccgcgccgccgccgaccaggcccaccatctcggcactccctcctcctcctcagccgcggctccgatcggcggtcgcctcgcgtcgcctgtccctctccagcggctcgcccgcttcttcgctcgctcgcctggcttcttcgctcgagcactacctggcttcttcgctcgctcgcctggatacacgcaacagggagtagcgaa

SEQ ID NO: 32758 - DNA, 249 bp, Setaria italica
  Peptide Sequence Number=SeqID_98732
atatatcccaacagtggagagagatatgatggtgagaaaaaggagtgggtggtaagtttatccggcacactcaagcttatattcttatagcagctatcttatttcgaaattgaaaaaacgacaatgaaatacctggttttatttcttttcatacttttcgcctatgcggtttggggttttcattccaccaaagttaagaaacttaaataaacgcatgtccttacctaggtgctaggaaaattgtagtag

SEQ ID NO: 32759 - DNA, 605 bp, Setaria italica
  Peptide Sequence Number=SeqID_98733
ccgagcccgatacccgtacggggaggggtgaaaattccgtgttacgacaggtggtggccaatgagggtagggtagaaactaggaagcttcgagttgacctgttcgcccaggtctcgtgaatctgatgtaatccgaaacggaggccggatttgacgagttttctcagggaggactaaagggctcctacttttccagcattgacgggccgggaattcgccgggaggcggcaaaaccaacgagattacctaattgggtaaacaaaagggaagggggggggggtgagcaattcacgcgcgctaattgacggctagctatggaaccttctccgccccgaattgtcgcaattggcggcgaaatcaactggttgggccattaattggctctattctaattgagaagagaaattcggtttggtttctcgcggaacagcaggggagaaaaaaacagaggaaggaaggagacgaatcaaacagtaaccaaccaacaacgagggcgaggcacgtagcggtagcggcggcggataattacggcggcgaggcgacgagcgggcacgcggcggagggaaattggcgcagatctgcgcgagggagggagggactcgacca

SEQ ID NO: 32760 - DNA, 1206 bp, Setaria italica
  Peptide Sequence Number=SeqID_98734
tttttcgcttactttggtttctttagtttttttttttttacagcacttgctcaaatctgcttccgtattgcttatctgttcagtttttctttcaaacagaaaccaatcagatatacaagactctgactgatggtctgaacttgttacctcaacattggcaccccatacaagcacacaacacacaaatatggtctgaacaaaagaaataggaaatacaaaagaaatacacacaggttacaaaatgcagatagaataaaagaaattcacagctgccgtcctccgtcctggttgcggtagaaactactgtccaatgcaaagcaatcccctagtgcacgagcttgaaatacaggattactaggatggccaagacaaggagggctatgatgagaccgatgatccacttatttctatccattctcctcaccatgcttccaatggtcttcctgctcttgctaacgttgacatcgacgtcatccaatgcacgatgagcatgcaagagagattggcgttgttgactcagatcatgcaagatggagactccaagatcttcagtctccagcatagttctatggctatctctgagcctatcagttgtttggttctgtctttcagttgtcctgagcagtcttgatctttgatcagcagaaacccccaatgcatctgccattcctgactccagcaattcctctctcgccccttgctgtgcgttaccactggtaatcctcttcaacgctcccttgaggttattaagatctgacttgtactccctgatctttgctaggagcccagctctaacgcttggttggaggctccttgcttcaagatccatcttccttatcagtgcctcggcgccatcgatgccagatttgatctccgccgccttctgcttcagcttctctccttggagggctgcggcagcggtgcatttgcgagtgagggaggcggaggcctcgcagtactggcgctcgtagccctcgaagacctcgctcatggcgtcccgatctcgatccgagacgccgaccgggctaaacccctcgaaatcttcgctcgtgcggtgcgatcaggctcgtcctgtggccaccgagtccggaggagtcgcggcgaaggaactggaattggggaaaaaggacacggctggggccgtgagcgtcagggggacttttacggcaaaccgccatcgaaagcgtattttggatggtaggaggc

SEQ ID NO: 32761 - DNA, 251 bp, Setaria italica
  Peptide Sequence Number=SeqID_98735
gcaaaattgtaaataaataagtattcctccattctaaattgcagctcattttgtttttttcttaaatatatagattttgcttctacttagatatagatcatatctagatacatagtaaaatttatagatcatgtctagatacatagcaaaatatctagaaaagttgaaactgcccataatttgaaatggagggattactgaactttgtgcgcatttatggttgatgctcgctcgtctgttagatatctttg

SEQ ID NO: 32762 - DNA, 571 bp, Setaria italica
  Peptide Sequence Number=SeqID_98736
gggctcgcgctcgaacgcggatggcagcgtcatcgatgaggtcctggtggtgcctatgctggctccgaggtcgtacacgcgggaggatgtggtggagctccagtgccatggcaacgacctctgcttgcgccgcgtgctcagggcttgcctggaagctggcgccaggcttgctgatcctggcgagttcactcttcgtgcctttctgaatgggagattggacttggcccaagcagagaacgtgtcaaggctcatttcagcaaaatcaacagctgcggcagactcagctttagctggcatccagggaggcttctctactctagtaaagtcattgagatcaaggtgcattgagttactaactgaaatcgaggcacgtctggattttgaagatgagatgcctcccttggacccagtgatgcttatcagcaaaattaattctatgaggcaggaggttcaggatgcattagacacctctaattatgataagctgttacaatctggcctacagcaataattggccgcccaaatgttggcaagtcaagcctccttaatgcttggagtaagcttgcagagt

SEQ ID NO: 32763 - DNA, 386 bp, Setaria italica
  Peptide Sequence Number=SeqID_98737
caaaaaacccaaggcgaagccaaagcccccggaacgccaccacgtggtagccggccggtgccgcaagctacgaagctacaagcacggtgccagacagccatggtggccgccggagcagcgctgcggctgcgcctcctctaccggatgcttcgcgtgggggagctcctcgcactcgtggccttcctctcctggtcgtcctcccgcgtgccgtccgcggccgctgcggtgctgcggctcgccgggtcgctcctcctcaacgcccgcttcgtcttcgtgctcggcaacgccatcgtgctcctcctcttcgcgctgtcgagacacgacctctcctcctcttccaaccagcagcagacgagcacggccagcacgaccgccaccccaccgcc

SEQ ID NO: 32764 - DNA, 227 bp, Setaria italica
  Peptide Sequence Number=SeqID_98738
gccaacctgttttctatttactatgattcccacgcaaagtagatcatgttttggccttcttcatctatattccctttcccatgtaagttattatccaaatgtgcagaaactggatcgaaggagcctgatatgcttgctgatactttcaacctcttcctgttgtgaaactcatgtgtaggagaaacgacacaactgctctccacaaataaagcatgacaaaagcttag

SEQ ID NO: 32765 - DNA, 424 bp, Setaria italica
  Peptide Sequence Number=SeqID_98739
cacccacccatccggtccgcgcgcgtctcctcccgcccggcaccggcaccggcacgagcggagcggcatggcggcgtccagcgcgtacgcggcgtcgctcccggcggtgccggattggctgaacaagggcgacaacgcgtggcagctgacggcggcgacgctggtggccatccagtccatgcctgggctggtggtgctgtacggcagcatcgtgaagaagaagtgggccgtgaactcggccttcatggcgctctacgcctacgcctcgtcgctgctggtgtgggtgctggtgggcttccgcatggcgttcggggagcgcctcctcccgttctggggcaaggccggggtggcgctctcccagggctacctggtgcgccgcgcctcgctctcggccacggcgcacggggacaccccccgcaccgag

SEQ ID NO: 32766 - DNA, 951 bp, Setaria italica
  Peptide Sequence Number=SeqID_98740
gtgtcctctttgttcctagtagtggactgatgcgaagcataacgagaaaaattgaagctgtttaaaaaaatgtccgcactggatcaccaattgctagtggtctagtgcaactcctgtatccttaagcttggccgcgctagaagaattttacagtacgatcagtgggcaatggaaagaacttcagagcagagatctgaatgtggttaacgcagatccctgtacttgagaacatcaatcttgtccaaatcatactccttgcagatccttgaaatggtatcacagtccaaaccttcatccaagtttctcctctcaaggaatccatcaagccttttggatggccggaacttccaagggtaccgtgcattttcactagggttaccatcctttgctgaaccaatctccttctcatgaactttccattgatctgagcagtcagaaagtagcaactggagcctctcacttccctgtagagctctccaatgcgaataagcacgaaacaacacccaaaagaatggtatatttggtaaaggcagtaccatgaaaaaactagtaaccggaagcaaacagactgagccataaagaaatttcttgtgaactgaagcacccctaatagcaatatgccgcaaccgccgacgcacaagacgagaatttatgctcgccggatgcacgatctcgaccgcgcttacatccttggtcacggacttcaagagcacctccgacggccgcacccgcgagagcagcttcagcccgaagctgtggatccggctcttcatcgacccctccggcgcgctcccgaacccgatccacgcccggttcatctgcgcatcgacgaaatcgacgacggactcggccttctccggcgcggtgcgtcccctggaggtgatgccgcgccagaggtccctcagcgtcggcggcgggagggcgccatcgccggcgctgccgaggccgccg

SEQ ID NO: 32767 - DNA, 705 bp, Setaria italica
  misc_feature (1)..(37): n is a, c, g, or t
  Peptide Sequence Number=SeqID_98741
nnnnnnnnnnnnnnnnnnnnnnnnnnnnnnnnnnnnnaagtacttcgaaatgagaagattcagcattggatccaatttaagattcagatacacccaaagattctaaaccataaacaaaatgcaagccacgtaagaatggtcgagctcaaccctactctctcagcttccttttgttcacagttcgtaggcaggtgttcaagtggaagagctaggcagctagcaaaatgtcaactgctatttacacgatgggttcaacataacaaaccaccctgggttcctacactttggtgtgtcctctttgttcctagtagtggactgatgcgaagcataacgagaaaaattgaagctgtttaaaaaaatgtccgcactggatcaccaattgctagtggtctagtgcaactcctgtatccttaagcttggccgcgctagaagaattttacagtacgatcagtgggcaatggaaagaacttcagagcagagatctgaatgtggttaacgcagatccctgtacttgagaacatcaatcttgtccaaatcatactccttgcagatccttgaaatggtatcacagtccaaaccttcatccaagtttctcctctcaaggaatccatcaagccttttggatggccggaacttctgtccaatgaataccaaaaagcatcagatacaaatgcagaaaattataatcttaaatatgggcaaaat

SEQ ID NO: 32768 - DNA, 214 bp, Setaria italica
  Peptide Sequence Number=SeqID_98742
gcctcctccaactccaaggaggagagaagacggcacaagcaagccgtcaacacacggatcaaaaacgagagcttaagaagaggtcgccgagggggatcaagattcaagaagcggagccgtaggctgtggaggagaagaggggatggacgtgaagcggtcgcggagccctcgggctccgcccggcggcgacgacgacaagaagcgcgccgccgcc

SEQ ID NO: 32769 - DNA, 258 bp, Setaria italica
  Peptide Sequence Number=SeqID_98743
cagcgcagcaacaccgtaccatcaccaagtgaagtggctagctaggaagctacttacaatggcgacgacggtggcagtagctctggcggtggtggtgctggctgccgcggcagcggtgacgctgccaggggcggcgaccgcatcgccggcggaagggttccagccgctgtccaagatcgccgtgcatagaaccaccatcgaaatgcagccgtcggcgtacgtgcgggcgacgccggcgctgctcggcgagcaggtata

SEQ ID NO: 32770 - DNA, 335 bp, Setaria italica
  Peptide Sequence Number=SeqID_98744
gagaagcagggatggaggcgggaccaaggggagacatgccctgaagggcgaaggctgaactgatgcttaaaaagttaacccacctaccaagttctttcatttattttccggggttattttattggcaagttccttcatttctggaggaacaagttgttgatatctagctcctacgaacaaacaaaaggtgcactacaccttccagtggcctaaagattttggcaccctttccaatcaacttgaaacattgtaactggagggactaaccccttgatgtagttttgccacattgcacattcaagactacacagagctttgtaaccataatttggttt

SEQ ID NO: 32771 - DNA, 693 bp, Setaria italica
  Peptide Sequence Number=SeqID_98745
aggacgaagtctttactgtggttcagtctctacatgaacgacattggcgacgagggagctgaaaagattgcagaggctctgaaagataacaaaacaatttctaccatagatttgggcggcaataacattcactccaaaggggttagtgcaattgcggaaactttgaaggataacacagtgctgacaacattggatttgagctacaatccaattggatcagatggtgtaaaggctttgtgtgatgtcctcaagttccatgggaagatccaaacccttaagcttggctggtgccagataggtgtgcaaggtgcagagtttatttctgattgtctgaagtacaacacaacattgtcaacattggatttgcgggcgaatgggcttggagatgatggtgctatatgcttggcacgaagtttcaagataatcaatgaatctttgacgtcacttgacctgggttttaatgagattagagatgacggagcgtttgcattggcgcaagcactcaaggctaatgaagatctggcagtcacatcattaaatcttggaaacaacttcttcacaaaatttggacagatcgctctctctgaggctcgtgatcatgtatatgagatgagcgaaaaaggagatagacattatttttaggtgtggtttcctcactggacaattttaacacatgatttttgcacttttggg

SEQ ID NO: 32772 - DNA, 167 bp, Setaria italica
  Peptide Sequence Number=SeqID_98746
caagaaagcctattaccctgaggaaacggacagcaaatgctgggcgcctatcaggatcctttgcttctgccaaaaccttctgatggattaacacttgctctgctttgtcaacattcacatccagctgatagctggtggggagccgggcgaagtgggcctcgagccgg

SEQ ID NO: 32773 - DNA, 2754 bp, Setaria italica
  Peptide Sequence Number=SeqID_98747
ccgacatgacgctcgcctcgctcgcccgcgccctcggacggtccgcgcgctcctcccggccgcgtcagggtttccagctcgggggcctcggcggggtccggtcgccgccgctgccgccgccggtacatggcggggagggcggcgggttaggattggtccgggggtacctgaccgcggcgtcggcggcgggtcttgggaggcccgccgggggcaaggctgtggattggagatacctcctcgccagcccgcagttccggcggctcttctctgatgagtccaagaagaattacgagaactactacccgaagggtaagaaggaggtgcccaaaggtgacgggagtaacaagtccgaatcgaagcaggaatcaacagacgagggaggatggaatttccaggagactgctatgaaacagctgcagaatttccttgcacctctattgattcttggcctgatgctctcatccatgtcatctggcacagcggaccagaaggagataagcttccaagagttcaagaacaagttactagaacctggtttagttgatcgcattgtcgtttcaaataaatcagtggcaaaggtttatgtcaggatttcaccacagccaaagagccaaggtcaaaatagtgatacccatatttctaccattgatgttccaggcaaacctgctcccagtagatgcaagtattacttcaatattggtagtgttgattcctttgaagagaagttagaggaagcccaggaagcgatgggaatagatccacatgattttgtcccagtaacttatgttgctgaagtaaattggttccaggaagttatgaggtttgccccaacagcgtttcttgttggactgatatatttgatggggaaaaggatgcagagtggtttcaatattggaggtggtcctgggaagggaagaggtggtattttcaacattggaaaagctactgtgacaaagatggacaaaaattccaaaaataaggtgttttttaaggatgtagccggttgtgatgaagctaaacaagaaataatggagtttgtgcatttccttaaaagccccaagaagtatgaagagctgggagctaaaatacccaaaggtgctctgcttgtaggccctcctggtacagggaagactctgcttgccaaagctactgcaggagaatctggtgtgccctttttgtctatttctggttcagatttcatggaaatgtttgttggtgttggaccatccagagtacggaacttgttccaagaagctcgacagtgtgcacctagtattgtatttattgatgaaatcgatgctattggtcgcgcaagaggacgtggaggtttttcggggtcaaatgatgaacgtgagagtactttgaaccagctgcttgtagagatggatggatttggaacaacttctggtgttgttgttctcgctggtacaaatagacctgatatcctggataaggcattattaaggccaggaaggtttgatcgccagataacaattgacaagccagatataaagggccgtgatcaaatattccgcatctatcttaaaaagcttaagctggacaatgaaccatcattttattcccaaaggctagctgctttgacacctgggtttgctggagctgacattgccaatgtttgtaatgaagctgctttaattgctgcaagaaacgagcaaactcagatcacaatgcagcattttgagtctgcaattgataggattattggtggtttggagaagaaaaataaggtcattagcaaactggagcggcgcactgttgcttaccatgaatctggacatgctgttgctggatggttcttggagcatgcagagcctcttctaaaagttacgattgttcctcgtggaacagctgctttaggctttgcacagtatgtcccgaatgaaaatcttttaatgacaaaagaacagctttttgatatgacatgcatgacattaggtggccgtgctgcagaacaggttttgattggcaaaatctcaactggtgctcagaatgacctggagaaggttaccaaaatgacatatgcacaggttgccgtgtatggttttagtgaaaaggttgggcttctatccttccctcagagggatgatggcttcgaaatgaccaaaccttacagcaaccaaacagcatccataatcgatgatgaggtcagggaatgggttggcaaggcctataagaaaacagttgaacttataacggagcacaaggagcaagtagcccaaattgcagaattgctgctcgagaaggaagtcctccaccaggatgatctgaccagggtgctaggagaacggcctttcaaggcaacggagccaaccaactatgacctctttaagcaggggttccaggatgatgatgataagagccaagcgccagcaaagaacgccgagttgcctgatgatgatgcatctccctcgcttggcgaggttgtacccacgtagtttttcctcaaaagttagagctgtacattgcacgctcatccgatagattcttgcttgttgttgcagcataagaaaactgtataaattagcgctctcgtctgatcatgccagtgtggaagtgcatttggatttccacaagggtcaagggtggcagtccggttgatagaatgccttgagctcatcatggcatcagcaaacgttcagaatcttgtattaccttgtattgttctgaaagattctgtcgactgaggagttggcgcgaaaagagagtgtgtcccgcctgaaggattgctggttt

SEQ ID NO: 32774 - DNA, 545 bp, Setaria italica
  Peptide Sequence Number=SeqID_98748
gatgacgaacactctcaacatgtggtcagcaaccgtctgattcacctctccgatacgaacactctgaactttgttggcagcaaccgtcctctgatgaagatgaacagtctggacattgttggcagcaaccgtcctctgatgaagatgaacagtctggacattgttggcagcaaccgtcctctgatcaagcgcagccaatggttgggcaaacaggaattgcaggacctgatgttgaggaagaccccattgatgggtttggtccaagaaaatggagcgaaatccttgacataagaacagaagtggatgaaccaagaacatcgcctcgatgttccttgagcctgagtggcgatgattgtggaacagccatggaagatgagccaggacacctgtccccattgctgatgttcggtgctgctggttcagatgatggtggtggccatatcctcgatggaagtgctgatgtggtggacctggttaccccaacccctgtaggccggctgcggagaagaggctgcgtcgccagcgtttgcccaaagatcattgat

SEQ ID NO: 32775 - DNA, 655 bp, Setaria italica
  Peptide Sequence Number=SeqID_98749
cgtccttgaacaattgttcaactccatcgtcagattggtacagctggtacacgaggatgacagcaaccaaggccagcactgcagccaaaatgtacttccagtttagcagcttcggctcaatacaccgcactgtctcaagtgtgctctcggcacgagattcaccttccagtggagtcacctcatcgatttcaacctcttcttggggagagttaccagttggtatcaccttggtttgtgttggtgaagaagttagagccgcttcctccgtagctttactgggcctgatttcacctttggcaacatcagtagcttctttgctcaacgaagctttgtcaacattttctttgcatttttgagctaacatactgttcttttttgtcagtgtaacaatctgtacatgaagccgttctctttccaaggcaagttttgcaaccaagtcagtgataattttagttttactaccaatgtcttttgcagtggacaccttcagttggttggcttgatgcaatgagttttctagactttctactcgacctctcagaaatgaccgttcttcactaagctctaaattagtgtctgtcaacaatgaacatttggactcagcattctcagccctggtttcagctttcaaatacttttccttcagatcttcaat

SEQ ID NO: 32776 - DNA, 420 bp, Setaria italica
  Peptide Sequence Number=SeqID_98750
gccacgataacaatcaatttcctggcagcatagcaattgcttgaggaattatcttggttccagttctgtgattgatacttcattcggtgacatagcccctgatttagcgttaccggtggactgggaagctgtaggatgtgattctgaataagcagttgagtagtagccgctcttgggaatgaaaataccggcttcaatggagcctggagagacacagtgccgctgctgagcatgacgtttactgttgacatcatcggtctgtcaaccgggttatcctgaacacatagtaaccctatgtggacacacttcagcatctgttctgcaggagctttgcctctcagagatggatccataatctccacaattgtccccgtggtccagtgctcccaaacaagacttaagaaatcaacaggttgctcg

SEQ ID NO: 32777 - DNA, 1421 bp, Setaria italica
  misc_feature (47)..(47): n is a, c, g, or t
  Peptide Sequence Number=SeqID_98751
tggtggtggcggcggcggtggagaggaaaatgatgattttgccaatnttggggccaggggcgttggagatcgggctctcttttgtgaggctggaattacagataccgcatatgggtttgaatttgaaacggtgctggctggtggtgggggtgggggtgggggtggggggtggtggaggctgaggcggtacagctttttctatagtgattgttacctcttcgccatgtgacaaaggaagcagcatcatgcctgatttttgaagaggtggaggcggaggtggtggtggcggcggcggtgtagtatctgatcttaatttcttatccagtgacaatgacgaatccgctgacaatgcgaaaacattgggaccttcagcactatcagtttgtaacttcccatgaatttcattagaaggttcttgtgacttgaccagttgtccagttctcgaaaaaccttgaggagggactgatggttctgaagaaggtgaggaagggtgcacagttgatctaagggagatatcgatggtacttgtgctagtattttggggtaacttagcaggaactgggagtaatgagacagtgggtggagggggaggaagaggaggaggtgtgcacaagtgtatcagggatgcagttggtgctgatttatttgccatcagaggtgatgaatgctcaactggagtttgtgaaccagacttctcagctgatgctgagtctgatatctctgttaacatttggaccgcagagtcagacattagttgctgaggctgaactggcgaagatgatcgttgcggcatgactgtatttgaagacagttcccttgatgaagcagtggtctttggaatcttaaccttagaaggtgataacaacgctgtagtaggttgtgttcgagaaggagatagtgctgtagtttgtgatttagattgagcattagctgaacttgaatctaggcgaatatgtcttggttcagtgctgacaagcataccaaattcgcttccaagcttcagaacaacagtagaagagttaatttgaccatgtaaaatttcagactcaagttcttctcgagtatcaaagaaagtctcaggctcatcagtaactgctgatatctttagttgggttgtgtgaggtacagtatccctcttcccatccaaccagtctaaatggttaaagatatctagcaccttagcaaactcttcaaccccaagtccttgtttctcttgatgaataacaggctctgttgtgacatgtgaagtaactgcgtccatatcggaaaagataacctcaaaccgaaaatctttagggaattggtcttttgcattccataacatgtctacatgatcacggttaagcatcaagatgttcgatcggatgaatgctgtgttgaacatgatccggaaactcatctcttcacgatccagatcctca

SEQ ID NO: 32778 - DNA, 512 bp, Setaria italica
  misc_feature (268)..(268): n is a, c, g, or t
  Peptide Sequence Number=SeqID_98752
ccctcatccacaccattaccatagcaacaaaaaggaagagccagcttgatcgatcgatctaagtttgaggtgactatagtttcataactatattaattagcttgagatgagtttcatccgctagtagctagtagccatgcagcatgctcgcatatttcatgcgagcatggagggaaggcatggagcattggagctagctactagctcgtgttaccattaccacacactagagcgaaccttgctcgtgcgcgccgctcatgcgctgccncttgatgctcccgccgccgccgctagacgaggacgtgtcgccgctgctggccgtcttgcggtccatgacgccgcgcagcgcctcctggatggacgcgacgagctcgtgcctccggtggtggtgggaggcgcgggctccgcagccgtcggcggcgtcgtcgtcgtcttcaccgccgtggccgcctcccacgtcgtcgtgttggcgaccttcttcctcctcgccgccattcgttcgttcgttcggt

SEQ ID NO: 32779 - DNA, 369 bp, Setaria italica
  Peptide Sequence Number=SeqID_98753
ttccggatccccctcctctgcttcccctctgattccctgcgcggcgccgaccctcttcttggaggagagggtaagaaagcgaggccgccgccggcgcacactacactggcagggtcttgtgatcctgtccaacccacccgcctctcgaactttcggaaccatacgcgcgctcgctgcggtgcggcgcggcgggctgctgctagctccgacgccgagaggaggtgggggaggggaccagatagcgagagatggcctcgccggagccatccgcggcgggtgccggcgccgggggcagtcggcgagccaggcggcggcggtggagccgatccggatgccgacggtggaggagatcaaggggcaggacatctg

SEQ ID NO: 32780 - DNA, 649 bp, Setaria italica
  Peptide Sequence Number=SeqID_98754
gtctgaagatgaccagcagaaaagaaaattctacgcttagtgagttctctgtactcaaagacattgtcaaagtggcagatgagctagttcatggaagaccaatgaggtcactggtcagatcatcaacgcatcactgcgatgaaagtgatgtgccatcactgggtgaagatgaaagtatggtaactgagtgtgagatacatgcaaatttagaagaaccagcttgcagtgttgctgtgccagattcatctgaagagagacttgtacagcctgcaaattctaaacatattttaagcgcacaatgctatttggatagcagctgcatggttccagaatggcaagatgaggcccaggcttctgttgcagggaacctggtgatgcatcaagagccaacatgggtgctagatgatcatattgcttcctctagccccagcaactctgcaaatgagactgaggaacatgtgcttgatcactgcagaggcaatgcattcacatccaaacctatggaagagtcagcatctcacgaagatgatcagccaagtccattgtcagtttgtgaatcttccttgggcgcagaagatggctgttcaggaggctttgagaaaataagcgagacctgcaagagctgaggatgcaactccggcttctcaaa

SEQ ID NO: 32781 - DNA, 338 bp, Setaria italica
  Peptide Sequence Number=SeqID_98755
agcggcgacgtcgggctcctcgaggactcgccgtcggacgggcgcttggcggcgaacccgacgaagagccgcgggacggcgaagagcgcggcgccggcgcggggcctggcctccccgccggaggagtccggggccgggtcggacaccatcctccgcagcatcgccggccgccgcggaacccaaccaacctcctttctctgtttcgcctttagcaatgcaatcagtcttgctcctcctcgctctgccttactctctcccacctcacccactccgcaatggcgctgtgcgagggcaagacagagggaagggaagaagcgaaaggagccgaggagcttgtg

SEQ ID NO: 32782 - DNA, 334 bp, Setaria italica
  Peptide Sequence Number=SeqID_98756
gcctacaccgaggtcccaccgccgccatactacgagggtatcaccggaggaccgctacctctcgccaccacctccagcccaccacgagtcgccaccaccgccacctccagtccaccacgatccgccaccgccgccctactacgaggtgtcgccggaggaccggtacctctcgccgccgccgccaccggccagcgtccccaagtacgactactcgtcgccgccaccgccttcctccccgccgtactcggaggtgtcgcccgaggagcggtacccgtcacccccgccgccaccacgggagctgcccaagctgccggtgtacgactactcgtccccg

SEQ ID NO: 32783 - DNA, 353 bp, Setaria italica
  Peptide Sequence Number=SeqID_98757
tgtgactgcaacacgcaatttctcagaggcatgtaagatcgggcaggggggtttcggcaaagtttataaggcgatgcttggtggtaaagaagttgccatcaaaaaggttaagcaaggattctgagcaaggaacaaaggaatttagcaatgaagtaattctaattgctaaattgcaacatagaaatttggttcgactttttggttgcagtgttgaggctgatgagaaaatccttatttatgaatacttggctaatggaagcttagatgctaccctttttgataagtcatacgccataagtttttataaatagcacataaaagctaaaaattgtgttatacagaatctcttcatg

SEQ ID NO: 32784 - DNA, 256 bp, Setaria italica
  Peptide Sequence Number=SeqID_98758
cgccttcacccacccggagtacaacagctacggcggcatcggcgccgtcgccaacggcaacggcaacgggaacgggagcgaggcgccgagcctcctggcgcgcctgctgggtcagtcgctggcgcccgtgacgctcaccttcacggcggcgcacctcctccggctgaagcgccagtgcgcgccaccgctcaagtgcacgtccttcgaggccctggcggcgcacgtgtggcgcgcgtgggtgcgcgccctggacccg

SEQ ID NO: 32785 - DNA, 364 bp, Setaria italica
  misc_feature (336)..(336): n is a, c, g, or t
  misc_feature (348)..(348): n is a, c, g, or t
  misc_feature (355)..(355): n is a, c, g, or t
  Peptide Sequence Number=SeqID_98759
tctggaactgctcggcagcaggatttgcctggagtgtctagtctaaagcagggagcaggcaataagtctgagaaggatagttccacagtattagataaagctgccaatgctcctgtttccaaagaaccatcaattgttgcccatgcaaacaaaaataaagctcagaatggcaaggccatgcctggtaatggtggatcgctggctaacatgtggggccgtgcatcagcaaaaccgaagcctccagctaccactaatcctgcagctgtagcaagtgttgcagctactgctgatgcacaaatatgtgcaaaggaagaagcagatgctgatagcagtgangacagagaatanagagggnggtctgtga

SEQ ID NO: 32786 - DNA, 440 bp, Setaria italica
  Peptide Sequence Number=SeqID_98760
cgcggcgaactggacgcgcgcggcgaggctgcatcaagtttactcgacaagcaggtcccacccgtcagtgtaaagggagagggaaaggaaccgatagcttgagcaagctgaggtcatcacggtcatttaccatgcttgttccatgctggcttgatcactcggcgcgccacgtgtgcaagaatgacaattttgttgttccgttcgtgcgggaatggtaaatatgcaggtgccattttaaggatggcttttgaagagatgacatccgtgaggtccggaagggtgcagactctagacgatgcctggggtgcccgcacctgtgctctggtttccaccgtccaaataagatcggacggccgagaatttggagtgacgtggtccaatgcgctggccgagcttggctcagatttcgtcttatagagacgaggacttcgacctctgat

SEQ ID NO: 32787 - DNA, 431 bp, Setaria italica
  Peptide Sequence Number=SeqID_98761
cggcgatggccgccgccaacggcatgagcgctcctaccttgcaggagaacatcacggtcaaaatcgaggagaggatccacacgccagccttcgcgcggctcctcgcgcgcgaccccagcggcgcgccttcaaagcggtggagcaagtagagcagcagcgccaggtcggtgaaggacgccgccacgaacgccacggaccccggatcgtgccgggagtggtatatggccccgcagcaattcaagagcagaatcaagaggcagaggcgtgtgatcctggctgagctaccggcagtggacgatcttgctgttctggaggcaggggacgagggtgcggcactcaccatggcgatggggcttagcggcggcgacaaggagtcagtggtgtgaagtcctgcagaggggttgtggcagcttcggtcttggaggcgagct

SEQ ID NO: 32788 - DNA, 574 bp, Setaria italica
  Peptide Sequence Number=SeqID_98762
taagttaacctaaccttaggtaacgtactaacaagacagaccgacgtggatgcatcgcagcgcctgaattcgaccgtatccaaccagcgactggtccagcatctgcgatatcgaccctttcgtccagtgagcccagacatcgctcaggaggttcacggcgctgtaatcgtcggagccgcagttgcttctcctcgtcacgatctcaaggaccaacacgccaaagctgaagatgtcaaccttgggcgacacgagcccgtgcatcgcgtactccggcgccatgtagccgaatgtcccgaccactctggctgtctgagtaagggtgtgaccttctcctagcagcctagccagcccaaagtctgcgatcttcggttccatgtcgtcgtcgagaagaatgttgttcgccttcaggtcccggtggatgatcctcgtgctcgagtcctcatggagatacaatatccccttggcaattccaagaatgatgttgtactgttgctcccagtgaagtgcatttcccgtagtcttatcgaatagaatgctgtcgaggctcccgttcttgatgtattcatattacgag

SEQ ID NO: 32789 - DNA, 372 bp, Setaria italica
  Peptide Sequence Number=SeqID_98763
gcattgaattgggaaaacattgcttttctgtacatttgtttttcagcctgtagttctattactgtgatatgcaaagtgagtattttattgtgcattaggtggtttagtaaaatatattttacatccctgcaaaattatcatttgcttggaggactagcacatactttgatttgcatctagagcaaggtctactttgacgcaatgtgattacgggaaccttgatgatttggtgcatttgttgccatgtaaaactgcatctgttcaccagtttatgcttgaagctttcttatttttatttttttatgtcccaagttcttttaaattaaatttttaaaactgtggttgcgaagtgagcatttcatgatgctattt

SEQ ID NO: 32790 - DNA, 834 bp, Setaria italica
  Peptide Sequence Number=SeqID_98764
tgagccatcaacctagttttcacgacatcgaagggtccagtgcagacgggccctgcggttcctgcaaggaaccctgagatcatggactgccatggaaggaggaccttaccatctccctcatgcttcttccatagaacaatatcgaatgcgttcttggctgtgaacattgcagcttggtttgtgccattgcgcatgacagttggtaatgctccagaccacagaccaaataggccttcttcccgaactatggtctttgcacagtgtatgggacctttatatctaagcaagtctgtggtcagtcctttttgttgttgcaatctaatcttcaccacctcgaagggggtgacgatgaggagcgcctcgatgacgccggcgccgaacccggacgcgaggcggccgtgcgcggagaccttgccggtggtggggtccttgaacgcggactgcagcacggcgttggagccgaggcgcagcgcgtacttgagcgtgaggtgggtggcgaagggcgtgagccccttccagagcgcgcgcacgccctcggcgcgggccacggtggtgccgcagtgcgcgatgccccggtaggcccccgagcggtcgagctgcagccgcgtcttgacgacgtcgatcggctgcaggcagcacgcctccatgacgccgccgagggaccctgcagccgccttcacgtacggcgggaccggcggccggccccctccgcctccgcggggctcctcggccggggaagcccgcccctggagcgggcggcggcggcggtggagacgaggagggggaggcggcggccattcgggaagcggcggcggccttaccgggcggtgcggg

SEQ ID NO: 32791 - DNA, 353 bp, Setaria italica
  Peptide Sequence Number=SeqID_98765
cttctgttgttgcctactgtctagaagtatattaataggttctatattctgtaatcttctttggtggatttgttccttggattggaatttaaggtacacaatagggaggcaaatgtgctgatttgtcattcagcttttatagagactaaaattatcacttccgttcatggtcttacagaaacccagctttgatagagtaaaattgtcacttctgcttttgttcttacagaaggctgtaaattatcatcagcaatttgcttgctgcaacttttttgggcaacacaaaaggcctacagtactactagcagactccataggtttctgctagattgatgggcctattttgggccatg

SEQ ID NO: 32792 - DNA, 273 bp, Setaria italica
  Peptide Sequence Number=SeqID_98766
gattccccctcctgttttatctataaatcataacaaaacttggagtattttgtcctggaatattcgtggtattaattcccaagagaaatgggaccatattagaaacaaaatctcgggaagtggtgctgctattgtgtgtttgcaagagacaaaaagagaatcatttgatcaatcttatgtttccaaattctgtcctaggcatttgaacaagtttgcttttgttccttccattggtgcttcaggtggtatgcttattgtttggaatagtgctct

SEQ ID NO: 32793 - DNA, 516 bp, Setaria italica
  Peptide Sequence Number=SeqID_98767
gcacaagaagagctgaggaggtagtggatcctgacatggagttgaaaccagccactcgtgctctgaagcgtgctcttctggtggcactgcggtgtgtcgatccagatgctgagaaaagacccaccatgggtcaggttgttcggatgctcgaggccgaagatgtcccatcgcgggaggaccgccggagccggaggggccacagcagcaacgcagacaacgagtccaaggcaagctcaagcgagtttgagataagcagtgatcgaagagagtcgggaccgtctgcgaggtttcagtcctaactcctgatgagagcacagcgaatcatcatggccaagaactcggtttcacaccggcgaccattggagggtgtggatggttgttagagataggcacggcattgcatttctggaggacattgcattttgactgtaggtattatccttcggtggtagccagcttagagagcagagtcggatcgattcctgagagattgagacttgctgtgaatcctattcc

SEQ ID NO: 32794 - DNA, 1844 bp, Setaria italica
  Peptide Sequence Number=SeqID_98768
tttatcctaggtttcatgtgcttctggtccatatatcggaggaagccgaagaagtcttttgataacatcccgatatctcaaattccggatgtctccaaggagattgcagtagatgaagtgcgtgagcatgctattgttcaaaattttcatgtgcaagaaagccatgcgctggcagtgcaggaaaaaccttatgaaaaagattctgggaaaatgctggcacacttggttaggagcaaatcaagtgatgccgataatttgagccaatgcagctcggcgtaccaatgtgaaagggctggcagttcatattctggcgatgaaggcagctcaggcaatgctaggaggcagtattctcaatatgcaactgtctctgcatcaccattggttggtctcccggagttttcacatctaggctggggtcactggtttaccttgagagatttggagcacgcaacaaatcgtttttctaaggaaaatgtcatcggagaaggtggatatggaatagtttaccgtggtcgcctcataaatgggactgatgttgcaataaaaaagctcctcaataacatgggccaggcagaaaaggagttcagggttgaagttgaggcaattggacacgtcaggcataagaatcttgtccgccttctaggatattgcgttgagggaatccacaggatgcttgtgtatgagtacgtgaataatgggaatttagaacagtggcttcatggtgccatgcgtcaacacggtgttcttacttgggaagcccggatgaaaatcattcttggaattgctaaggcgcttgcttatttacatgaagccatagaaccaaaagttgttcaccgtgatatcaaatcaagtaatatcctaattgatgaagaattcaatggcaagctttctgattttggattggctaagctcctgggtgcagggaagagccatatcacaactcgagttatgggaaccttcgggtatgtggcccctgaatatgccaacactggtctgctaaatgagaggagcgatgtctacagtttcggggtgctactactggaagcagtgactgggagggatccagttgactatgctcgacctgctaatgaggtgcatctggtggagtggctcaaaatgatggttggcacgaggagagctgaggaagcagtggatccggacatggagttgaaaccagccactcgggctctgaagcgtgctcttctggtggcattgcggtgtgtcgacccagatgctgagaaaagacccactatgggtcaggttgtacggatgctcgaggcagaagatgtcccgtcgcgagaggaccgtcggagccggaggggccacagcagcaatgcggacagcgagtctaaggcaagctcaagcgagttcgagataagcagtgatcgaagagagtcaggactgtccgcgaggtcgcagtcctaactcctgatgagagcacagcgaattgagcacggggtggatggatcatggataactcgaaggtggtcgatgcaatagagcaggcctgaggccataggatggttggtacttggtagagttaggaagggcaattgcatttccagaggacattgcattttgtactgtaggtattccttggtggtagccagtttagagtgcagagccagatcgatcccctgagagatttagacttgctgcgaatcctattcgttattctcttggtccagcagcagcatgtacagaatttttctttcttttctttttgttattaggacttgcctcggctggtagaaaaaaatggtctctttcctaatgtgatgagtgacttgaaccatctaccataccgtattcgttatttagtccattgatcaagctaaaaaaaa

SEQ ID NO: 32795 - DNA, 437 bp, Setaria italica
  Peptide Sequence Number=SeqID_98769
agagaataaaatatgttatagataactcatttggcttggatgtctcaggggaggtggacggcatgtggcggccagctaaggtttggcgaaccgcacgctccatgggagacggatcctctgcagttagtgtgtctgcggttgaagtgactcaaccgcagacacaccgactgcagaggatctcattcccgtcccatattggtacaacgataggatggtactaggctatggggttattaagtcagatgttgggtttgatattaatattgcctattatatcgtgcacaacaaatgttgtaatcaaagttgtgggttataataaattcatatgtatggaaaagtggtgagcagatgcacattattttttagacaatcaacttctttagataaattattttgccaaaactaatagatgatagaattaatacataaatgtatag

SEQ ID NO: 32796 - DNA, 574 bp, Setaria italica
  Peptide Sequence Number=SeqID_98770
gatggtagggaatccatcgtatgtttgctcaggctgtaggtctggaagctgggctaacacatccagaagaggatcgccttcctgctgggcggctgttggctcattgttactgagagttgtaagaagatgagccattttcgcagaagcgggttggcacaaattctcagctttcactgctggcgcgatgggtggcgggtcggcggcagacgatgtggacggtgaatcggcggcgtctgcggcttccggttcctcctcctcgtgcttgtcgaacaggcggtagagaacgaagctaccgttttggccttgctggagctggggctcggccgtgcggtactcgtgcatgatccaggaggtgcggtggcctcgcggcgccctgcctctgtggaagacgagcgtcttcttgatgccgatgagggtgcctgctgggcgcgagcggatgaggcggtccttgcccgtggccttccagtagccggcggcggtggagcggttggagcggtggccgccggggtacttgcgatcgaggggcgcgaagaagaaccactcggggtcgtcggacctgatgagcgccttggcg

SEQ ID NO: 32797 - DNA, 2015 bp, Setaria italica
  misc_feature (1965)..(1965): n is a, c, g, or t
  Peptide Sequence Number=SeqID_98771
ctggtgtttcttattcgaagtacactttctctctctctagccatcaaatcaaacgggccgtgggaaaatcagtcggcccatgtgaagagattaaccaggagctatcaagctaataggattcgctttcgtctttggattcagacacaatcaagccttcgtctccaacgttcacggtcgccgccgcgagctcccacgcctcgagcttggtcaccttcaccttgtccgtcccgttgttgaacacgaacatgtggctgttgctcgtctccacgtgctcagggtacacccgtgccgtgatgcaggccctcccctcagcgccgtagctctccaccaccgagtgatcaaccagggttcttagtttgatggtcttgcgctcctcaatgtcgatgtcaacgaatcctccgtaggggggcttgtaaaccccagccctcgcagatgaccttgtcaggtcggtgcacatgagcaccttgtacttgtcatcgtgcctgaacacccggaagaagacggcggtgtgctcctgcaggtcgccggaggccatgacgatgagcccgaacgggccgacgccgccaggcacggaggcgcccttctccccgcacagcttctgcgggtccagcagccagttggagtcgagcgcctcggcctcctccaggctcgggatcctgaacgccacctccacgtccgcctgcgcctcggcgatgccgacgatctcgttcatggctccggcgctcagcatcgtgttacggcggaggccgacgcgtttcctcctcagcgtctcgatctcctcgatgggccactgccgcagctgcttgccgtccttgtccagccacagcttcctcgggaccgtctggacgccggaccagcccctggcgacgtcgtcggcctggctgtcggactcgttggcccaggcccacagcacgcgccggttcctgcgggcgtcgaagaaggacttggccgcgtagacgtgcccgtagtcgaagcgccgccagttccggacgtcgtcgccgcgctctggctccgccggcacgaacgcgtccgcggcgtcgtcgtaccggccgaccatgtagtagtcctggagggtgtccatcacgctgagcttgagcacgtggctcaccccggcgccgctcgccgaagtgtcgagcccgccctcctcgccgtgcgccttcaccgggaacaggtccgggcactcgaccatgccggcggcgcgcgacgagtgcagcggcgcgtcgttgcgttcccagtggacgaagtccgcgctccggtacaccagcgtggacgccacgccgctgacctcggcggacaccgcgatgcgccagagcccgtcgcggccgagccacgccgtcgaggggtcccgaaacttgtcgccggggacgtcggccgggagcgggatgacggggttgtagctgggcttgtgccactcgcggaggagcgggtcggccgggttcttggggaacgccaggttctgcacctgctctttgttggcgtcgatgcccgtgtacagaatggcgggggtgccgccgcggaggatggtggcggagccggaccagcagccgttgatgtcaaagggcgccgtcgggtcgatcgcggtgtcgagggcggcccagttcacgaggtcgccggagacggagtggccccaggagaggttgccgatgtcccagagcgcgccgtgcgggttgtactggtagaagaagtggtacatgccgttgtagtacatcggtccattcggatcgttctgccagttcttggcgggctggaagtggtaggccgtcctgcggacatggcggccctcgctcgtggtcgcgggggctacgcgaagagcggaagacgaagacgcgaggaggcagaggtagaaagcgacggcggagagaggaagacccgccatggccgccgcgggacgagagcgaagtggatgggtcgcctcccctctctggttggtctgctccccgcttcttttccgtcctcacattggtntatcttctccgtacgagctgttgtaattatgaacattgattttaatttat

SEQ ID NO: 32798 - DNA, 984 bp, Setaria italica
  misc_feature (1)..(28): n is a, c, g, or t
  Peptide Sequence Number=SeqID_98772
nnnnnnnnnnnnnnnnnnnnnnnnnnnnttgttacaaggagttgatttgactgcaattgcacattcataatatgtaatcgcgttacaacataacaatatgattttacatcacgctacataaaccaataaacgaataacataacaatttctcatcccatcctcacgcacatagttctatcagtagaacaacacccgacgctagttttttcttccttccaagaactcatggttctcagttcatcttctcgcgacccataagcgaaggccgatcacacacttcagacctggaagggccacggccaggtgctggtgccgtcctcgccgccgaccttggcgctgcggcgcagcgggttgccgccgcactccctgtcgacgtaggcgtagtacctgaggacgaaggcgagcgcgagggcgacccactcgaggcagaagatggcgacgccgagccctccgaccatgcggaggatgacggcgccgtcctcctcgcggacgtacgacttaagcccgtcggagaggaagtcggcggtgcgggagaaggcgagcacggcggcggcgccctgcaggatggaaacgacgacggtggcggacatgtggacggtgtagcagcggccccggggcgggtcgggcgccgcgatgacggcgcacccggcgacggcggccgccacggtgagcgcgtggaggaggatgaggaggaagccgtcgacggaggggacgaggcggagcgacagcgtgaggaagccgcacccggaggcgcaacccaggatgaggtagttggagacgaggaacgcgcggcgcgcgcggcggtgctgcggggaggcggagtccctcgccgggggagcgatcaccgacaggccgcccatggcgtctctctcttgcgcgcgcggggacggcgactgatgagggcgaagggagcgaagagcgaggggatggggaggaggcgcgaggagagggagtccgggccgtgtctcagtcccagtgtggctg

SEQ ID NO: 32799 - DNA, 267 bp, Setaria italica
  Peptide Sequence Number=SeqID_98773
cctgccccagccaccggcgcccacagcccccgacggcaacttaccgtccgcaaccccctaccagctgcagccccctgcccgctcccgatagcagatccacctgctcgctcccgtctactccccggccttcaccaagcgcgcgccgccgctccatcagcctcccctaccgctcctacccgccgcctgtgcacctccagacccgcaccgccaccgcccgcgcctaggccctcaaccccaccgccgcctcgtcggcctccttcggcctca

SEQ ID NO: 32800 - DNA, 863 bp, Setaria italica
  Peptide Sequence Number=SeqID_98774
ttaccttaaaaattacttaattccgtttttggtcttttctatatgcacatggatatatgatattttctagaaaagccaaatcgaatagtaatttaggatagagggagtagaagacaaacgacgtatatatcgacgtacaaggatcatgtagatattggtggaatgctacgaatattgtagagcgtcccattcgtgtcgtctcaaaccaccttcactgcttcttcttcctggcgtccttggccctccccttggcgcggccgtcgagggccatgctgaggatgaccctgtcggcgacggagccgggcaaaatcgagacgagcttccacacggcgtgcgcccagtacggggagcaccgaggctcgtacccgatgtagcggacggcggcacgggcgtacgcctccggcgacggcgccaagaagctcgggttcctgatggacgccatcttcgtcgccacgtacatgggcgcctggcattgcacatcgatgcctttgctcttgtactccacgtagagggatctagagaactgatcaacgaacgccttggtggcggcgtagacggtgtggagtgggcaggacggcaggacggaggcgctgccggagccgatgttcacaatggcgccgcgcccgcgctccaccatgccggggagcacggcgtgcgtcacgcgcgtggtggcttcgacgttgacccgcaccatgttccgcaccagcgcctcgtccacctcgtggaagtagcgtgcgtacgggtagcacgcgccggcgttgttcacgagcacgccgacgtcgaggtcccggattagctccccgagcgcgtccaccttcgcggcgagaccgtcggcggcgaagtccaggacgaaggttacgtct

SEQ ID NO: 32801 - DNA, 843 bp, Setaria italica
  misc_feature (9)..(9): n is a, c, g, or t
  Peptide Sequence Number=SeqID_98775
gtttttttnttttttttttgttactagaacgcccaacatggcaacatgaacctttgtagcacggcaggattttgttccccacagccactcctcactacagccaatcagttataggtagttgcctgctcatcgtgcgcaaacattgcagtaacaccttcataggatgcaaagctgcatcacttatgggattatttctactgattaccacgcgctcaacattcgagagccgtgcccttttgttcagttagacaggcctccactgcttcacctactgtcaggaagatccaatcttctcctattctgtccacgacccgcgacactttcatcttctgtactgcattccatcctggactggatatagccatctgtatgccaagagaaaccaactccttgtgtaattcttctagtgctgtgagtcctgaagtgtcgatgtttaccacacttgacatatcaaggacaactgcttgtatcctctctcttgccttcccatctgatgcctccacttcttcccgtacccactctatgatcctttctttgatgaaagtggcattgatgaaacacatgaaggatgtgtcgatgcgtatcgtcagtacagtcggagttcggcaagctacagggtattgcctgatactgcagaagatatttgtcccttgtagcctgccaagaacctctacttgaggtcggagcgactgtatgatgatctttgcgaaggaaatagcaattgcaacagcaaggccaatctccaccgagccaaatagaacaccaacgaatgcaccaaggcatgtgacgaaatccatcttatcaactttccatatgttgcaagcttctttgatgtcaatcagt

SEQ ID NO: 32802 - DNA, 581 bp, Setaria italica
  Peptide Sequence Number=SeqID_98776
aatttgaaacactacttgctggagcagaaaagtgatgctagcctcaccagtgcgaacctctgattcattgtctttgtgtgatattgctttcagccacctccatctgttgtattgcagtattgggaagacagacagggatttatttagcagaccagctagccagcatctcagagtttcactgttgtttccatggaaatggaagttttgcctctaggttttcagcattggtttagatgatctggcaagtaaagtatatgacagtggcatatctactagattttcctgacaccagaatatgctgaacttattgagagaagttagttcatgtgggtagcggtaaaattggcgccggtttggaaatagttcattttgccagaacatggtgcctagctttgctccttgtccgtgataatgagctttgctgtcttgggaatagactttttgatcaagatagttacagctagatgtatatgtgtcaagattacgattgttcttgaatcaccaagatccagtaataactaatctcaatgcttctctctccaagatcatgctggagaggcacactaaccgccacaggggca

SEQ ID NO: 32803 - DNA, 434 bp, Setaria italica
  Peptide Sequence Number=SeqID_98777
gagatcttaaaaggcccgtccagctccagtatctgtgttaacactcataaatccatgcggcatccatgcacaagttctgtgagtgagacctatgtctcgtgctgtccattgacgaccattctctagatatggttttcccgtcttaatgtccaagattggtgtatttgcattaacagcttgcacacttatacctttcatcaaatggatgccaaatttcaagcccattccatggaccttcctgggtttccatcatctaggattgtcaatcctagatgatggaaacctttgaaggtccggaaatggtcgaccccattcatcaatgttatcaaatccatatgaatctgtgtatgccccatcaacatacttccggtaccagaggaaatcaataactgcatactgatatccatgtgggagtaacttctctgccaaatctg

SEQ ID NO: 32804 - DNA, 312 bp, Setaria italica
  Peptide Sequence Number=SeqID_98778
ctccactccacctccgtgctccggcaagccgccgcaagcgatggcgctccggctcatgctcgccgctgcattcgccgtcctcgcaccggctctcgcggcggctggcgccccggcgctggggatcaactacggccaggtggcggacaacctgccgccgccgcaggcggcggccgtgctcctccgcgcgctcaacgccaccaaggtcaagctctacgacgcggacgcgcgcgtgctcagcgccttcgcgggctccggcgccgacttcaccagtcggcgttccggaccgcctcgtgccgtcggtttgccgaccgg

SEQ ID NO: 32805 - DNA, 231 bp, Setaria italica
  Peptide Sequence Number=SeqID_98779
cgtccctgctggttgtgtatttagcaaaaacaaaaatgtaagacttgagttagtaaacacaattggttagtgctgcgggaaaaaaataagtgctggttttttagaacatggagaaaaattgctagattactggactattgtgccttcatcttgttatattttttcctgttaaactaaattaagttgcttgtcattaggtacagtcattatggatttgaacaagctaccgcc

SEQ ID NO: 32806 - DNA, 485 bp, Setaria italica
  Peptide Sequence Number=SeqID_98780
taatattcatccatggttgtgcagaagccgtggttgcccgtcgatctgcggctgccggcggggccgcaggcgtcgctggggatcctggcgttcgaggcggcggcggccatgtccaagctgctgtcgctgcaccggtcgctgtcggaccaggaggtctcccgcctgcgctccgacgccatgcgctcgccgggcgtcgcctaccttaactccaccgaccaggcgttcctcctcaggctggcctgtgccgagctcgtcgtgtcactggacgccgcggcggccgccgtcgcgcgcctcggcctgcgctgcggcctcgacttcggcggggtgtactcgtgcctcaaggccggcgcgcacgacgcgcggctcgacccgctcgtcgccaaggggctcagggtcaaggccaagaagatggagcgcctcgtcgcggccacggccaggctctgctccgaaatggaggcgctggacgagatggaatcagccgagcg

SEQ ID NO: 32807 - DNA, 1053 bp, Setaria italica
  Peptide Sequence Number=SeqID_98781
tacttacgaccaaaggtacgacccgacggaccgacctacatcatggagtacgcccgcggcggggagctcttcgccaaggtcgcccgcggccgcctcaccgaggaccacgcgcgccgctacttccagcagcttgtcgccgccgtcggcttctgccaccgccgtggcgtcgcgcaccgggacctcaagcccgagaacctgctcctcgacgaggagggccggctcaaggtcaccgacttcggcctcgcagcgctgcccgagcagctccgccacgacggcctgctccacacgcagtgcggcaccccggcgtacgtcgcgcccgaggtgctccggaagcgcggctacgacggcgcccgcgccgacctctggtcctgcggcgtcgtgctctacgtcctgctctgcggattcctcccgttccagcacgacagctacgccaagatgtaccagaagatcttcaaggccgactaccaggtgccaccctgggtctccggcgacgcgcgccgcctcatcgcgcgcctgctcgtcgtcgaccccaccaagcgcgcgtccatcccggagatcatgctcacgccgtggttcaggaaaggcttcgtcccgcccgtcctgtcgccccaggtgtcgcccaagaaacggctggtggacgacgaagacgccgtcggtgccctcctcgagggcggcggcagcgatagggacagctccagcactgcctcgctctcgccccggtcgtgcaacgcgttccagctcatctcctccatgtcctccgggttcgacctgtcggggctgttcgagagcgagcagaaggccgcgacggtgttcacgtcgcgcgcgccggcggccgccgtggcggagaagctggaggccgtcggacacgccctggggttcgaggtcaccagggggaagggatgtaacctgcggatggaggcgaaggtcgacggcacgaacgggcggctcgcgctcaccgccgaggtgctcgaggtggccgcggacgtggccgtcgtcgagttcgcgcacgacgccggggacgctctggacttcaacaagttctgcgccgaggac

SEQ ID NO: 32808 - DNA, 292 bp, Setaria italica
  Peptide Sequence Number=SeqID_98782
cctttttttgtttttgattgtcgctttgtacttgttttatctattttatataatcagtagggatcaccctcctgtttcttcaaaaaaaaacaatgacgagacaagcttgtacacatccaaagtattactcatctgtacaaactaccaaggcgtttttttcccctttttgtatccagtggttcgggggcccagtagaagtatggatgaaaaataggatgaatttggacggaccaacaatatttcagagcaaaatcactttaattgagttactgacttatgaaaattgaatagc

SEQ ID NO: 32809 - DNA, 420 bp, Setaria italica
  Peptide Sequence Number=SeqID_98783
agactactaataggggttttttagcctctaatgcgggacattagaaaccgttttgatcacgggggcaactggaagaagagccctacttatctaatttcttcgtcctaccttcaacctctacttctctggacaggagcaacactaatctgcaggggtttggatccagttgtgttgccttcggcagcaagccaagctgtgaaaacgcgccttataacttttgtgagatcattatcaactgtcctggcttttgcgtatattctcacaagcttgattcagcaggtacagaagtttctcgtggacatgcgtaacccaacgatacaagaaatgtaagattcttgagcaattgttggtatacaccaaaatcctttgaactgtttcttttttctgtctgctattgcttctctctattcacaaaggccc

SEQ ID NO: 32810 - DNA, 2291 bp, Setaria italica
  Peptide Sequence Number=SeqID_98784
atgactgataggagactgcatccagttgatgtgagtttcatccgacttgagtcttgcttgagatggcggttggattgacatcccagctgttccaaagagtgactgttaccgaaacattttgcagaaggaacatacttaggagtcctgagatgaggagttctcttcccttgccatccacttcgtttccttcagtttctgataggcaagactgctggggtcataatgtgttgcgaagtaactacaggcccatgctttacacacctcacagatatagatcttcaggctttagatcttttgccttgccagttccttttcagaaaattcctcttgtcaagagcgcatcattagcactgactaggtcatgtgataagttactttcaaatcctgctacctctcttgtggtccctgcaattgggattattgtgtttgctctatggggttttttgcctctaatgcgggacattagaaaccgttttgatcacgggggcaactggaagaagagccctacttatctaatttcttcgtcctaccttcaacctctacttctctggacaggagcaacactaatctgcaggggtttggatccagttgtgttgccttcggcagcaagccaagctgtgaaaacgcgccttataacttttgtgagatcattatcaactgtcctggcttttgcgtatattctcacaagcttgattcagcaggtacagaagtttctcgtggacatgcgtaaccccaacgatacaagaaatatggggtttgattttatcacgaaagctctttatactggtatttggattgctgctgtttctctcttcatggagttgctgggtttcaatacccaaaagtggataactgctggaggttttgggacagtattgcttacacttgctggtcgtgagattttcactaacttcctctcgagtgtcatgatcaatgctacgcgcccgtttgtagtcaatgaatggatcaatgcaaagatagatggtgttgaattctctggaattgtcgagcatgttggttggtggtctccaacaataattagaggtgatgatcgagaagcgatatacattcctaaccacaagtttacagtttctatattaaggaataactctcagaggacccattggcgtattaagacctatcttgctataagtcacatggatgctggaaaaattgggattattgttgcagacatgaggaaagtgttggcgaaaaatccacatatagaacaacagaagctgcatagaagagtattttttgagaaaattgatccaaaaaaccaagcacttatgatatacatatcctgttttgttaagacatcacgtttcgaggagtatctaaatgtccaggaagctgttatgttggatcttcttagaatagttggccatcacaaagcaaggcttgcgacccaaattcgaacggttcagaaatcatatggcaatgcagactttgataacattccttttggagaggacatgtatagtcgcgtcaggggccgtccacttctgattgatacatctgcaagggtcagtgatgataaggccaaacctcgaccggtatcatcacatgaggagcagaaagtcaagacaaacggttcagtagagatcaattcagcttcacctgaaaatactagtttaagcaactccgaaaagcaggaacagaaaaaattagtacctgacgatgctcgggcgaagaacagcaagagtgataatgttgcaccagcaacaccatcttcagatcctgttatgtcaacttctaagattggtaaagggaaagcacatgagcctgaggcgactgaaggccaagatggttccatgtcagtggctaacccgaagaaagaatcaaggcctgcttttgaagacaatattgttctgggcgttgctcttgcgggctccaagaggacactgcctattgaagaaggaaacccttatctatcactatctgagaatgagccggacactgtagaggctgcttcttcaccgaaggacaagacagctcaaagcccgaaactttctggacaagacaaggctgaccagaggaatgtagataggtgatctaaattaagatggaatcctcgtgaagatttgtcaccaagcctaccttttttgtgcgcttgtgcaaatgtgatctgtcacacatcattgttcatgtttgtaaatttccgcggatgattattcaggggacacagcctgttgaaatatcaggcgttgctatatgcttgtaaaagatgcagttgcctttccctggggacgttttgtacaaattttgctgttgctgatttaagtcggttg

SEQ ID NO: 32811 - DNA, 691 bp, Setaria italica
  Peptide Sequence Number=SeqID_98785
gtgggatgttgttggttgatgtcaagaggtgtctcttcttggtctgagcttccttggtctccaaagctgattctcccaataccatcacggccaaagcacattggagaagggagttaggtatcagacctttctgcgctaagatgcttggaactgaaacctcatctattccaagtccaaaaagaccattaggagcagcagcatccagaaatgatccagtttgagtctgtccacaaccaagcattatttgtgccttgagaatgtgaggatgtgcattctccgttgagagataaagcacatcctcaactaaaaatccagaagatgatgtgcccgcagacacatacaccatcttgtatgggcattgcgatgttgtggagcattctttttgaaggtcacaaaagttgctattgcatggaacggctttgctagttgacgacgtaccagggatgtaaaaggaagctgatccagaagcagccgttgttggtggcgtgcagccatcacactggcatggcaaccagaagaggtcgcttccagtgtccagtgccaccatgaacgtttgccccggtgtgcctacggtcacaagagcatagtgcaaaaatccgaggttgctgaccttgagggtggcgtttccctctgcaaacgttagcggaggggcctcgccgctacctccagcagccgacatcgcgcgatgacg

SEQ ID NO: 32812 - DNA, 486 bp, Setaria italica
  Peptide Sequence Number=SeqID_98786
ttgccatcaaatgtttgcgttcctaggaagttatgcatttcatcatccaaaacggaagagggcacactcactatgaacaaaacaacgcatcaccgactcggtccgacctcaacacaaaatctaacgcgacaccaccgccctactaattactaaacaacaaggaccaaataataacgtgacaagtacgtgacgagcacctgacgcgaataccacgaccggatctacgtctccttcccacaaaatacgggaaggactacagggcgccaccgccaccgccgacgccgacggcgcgccgtgtcggtgcgtcgtcgtcgtctgggtcagtcgaagcggcggccgcgccatgcggagacggagaagatggcgcggtcctgccagcacaggaagaaggacccccttctcctcgcgcaccttgaagccgtcgcagccgagcccctgcgccgcccgccgcgcctgcagcagcgcgtagtagctcatcggcaccgg

SEQ ID NO: 32813 - DNA, 266 bp, Setaria italica
  Peptide Sequence Number=SeqID_98787
gggagtaataaagcctttcttgagaaatccatgctttccaataagacttggatctttctcgttctttaggcaaatgatagttatgctcatccattaaagataaaatagataatgcatcacatgccctggatgggtactccctccgtcccaaattgtaggtcgttttagtatttttagacataatatatatttagacttagaaatgttaaaacaacctacaatttgagacggagggattacaacacaagggaagaactgccaatgta

SEQ ID NO: 32814 - DNA, 1748 bp, Setaria italica
  misc_feature (20)..(20): n is a, c, g, or t
  misc_feature (1689)..(1710): n is a, c, g, or t
  Peptide Sequence Number=SeqID_98788
tgctcggaggccgccctatnttcccctccccccactccaactccagatccgccatcccatcgtccccctcccccccactcccaccccggatccgccatcctcgccgacacaactcccggatccgccatactcgccgccctatcttccccctccccccactccaactccagatccggccatcccgatacgcgcaaacgaacaaggcaacagttcacgggctcactgaacgagccaagccagccgcctcccctccccctgctctgctcctgcgaatctttttcctcttccccaattcacggacgccgggttggttcctttctcccccttgcaagaatggtgggatccgacgcgctgcagtccatcgtctacgcccgcgggtcgctccgcctcctcgatcagaggaagctgccgctcgaggtggactacatcgacgtcaaggattccgccgatggctggaatgcaatcagagacatggttgtccgtggtgctccagcaatagccatagcagcagcattagcgttagctgtggaagtttctggtttagatttcactggtacgcctgcaggagcagcttcttttgtttccaagaaactggaataccttgtatccagccgcccaactgctgtgaacctatctgatgctgctacaaagcttcagactttggtgtcaaagacagctgaaactgcgaaagatgccaaggctatatttcaggtctacattgaggctgcagaaaccatgcttattgatgatgtggccgataataaagctattggctcacatggagctgaatttcttcaaaagcagcttggaaattcaaaaaacatctctgttctaacccattgtaatacgggcagtcttgcaactgctggttacggaactgctcttggggttattcgcgctcttcattctggtggagttttagagaaggcattttgcactgaaactcgtccatttaaccagggatccaggcttaccgcctttgagttggttcatgagaaaatacctgcaacactgatagcagattctgctgctgctgcactgatgaaacaagggcgtgttcaggcagttattgtcggtgctgatcgtatagcagcaaatggtgacacggccaacaagattggcacatacaaccttgccatttctgcaaagcatcatggtgtccagttctatgtggcagcgccagtaacctccatcgatctcaccctcccatctggggaagaaattgtcatagaggaaaggtcaccaaaggagttgctgaactctgaaggtggtcttggaaagcaagttgccgcatccggtatttcagtctggaacccagctttcgatgttactccagcaaatctgattactgccatcataacagaaaagggtgtgatcacaaaaactgatggtgatggagctttcgacatcaaaggtttcattcagtctgcgaaataatgctcactagcgactagcgaggctcatttttgcatgacgcaaatgcatggagcacctcatgttgcactctatacaataaaattgctctggtgaggctcatgttgtaacaagggtgtgtccatgcgtatttgggagtaataaagcctttcttgagaaatccatgctttccaataagacttggatctttctcgttctttaggcaaatgatagttatgctcatccattaaagataaaatagataatgcaataacnnnnnnnnnnnnnnnnnnnnnnttaagtaaaataaacgggaacaaagtaacttaagaaca

SEQ ID NO: 32815 - DNA, 341 bp, Setaria italica
  Peptide Sequence Number=SeqID_98789
cttcggtacaaagacaagtgtatgttctgaaactgccaaatcacaaacagaaaagacgaagcaacgaaaataaggaaataatgatgatgatctctaggccaaaagcattgcgctgagcaccccgatcaattctcagccgctagctaaccctcgtgggcagcagcggtggcggtgacatagtaggcgacggtgatcccgccatggacgaagcacatgatcccgccgagggctagggtgtggccgtgcgtgaacccgcatgatgtcttggacttggagttggacatggcaccggcgagcagcagcgagaatccggcaatcagggcaatccatgagagaactat

SEQ ID NO: 32816 - DNA, 511 bp, Setaria italica
  misc_feature (435)..(435): n is a, c, g, or t
  Peptide Sequence Number=SeqID_98790
acctcgtgcaggagccgcaggaacgcggagacgcggcgccggcgccgcgtcaactcgtgctcgtcccagtcgtggacgtctccgccgccgggctccggctggcgccggctgcggcggcggcgggcagagctgtcgcccgagctgaggatggcgtgcgcccagatggagctcgggcggtccgcgccagggtacacttcggtcaacgcgccgccgccgccgccgtcggccgcggccgcgccgcgggcggtctccatctcctcgaggaagccgctgtggcagtgcgggcacttcatctccgcctcgccctgtgcgggcctcaccgccacggtgcacatgtggcaccagtagctcccggcggccgcctgctccgccattgccgccgagcttcttgcgctttccccgccaatgcagctactctaattggttcgggggagnattcagcttgggcgcagcgcagcagggcaggggccggggtggggcggggggcagggcagtggtggggggaaagaaa

SEQ ID NO: 32817 - DNA, 254 bp, Setaria italica
  Peptide Sequence Number=SeqID_98791
ttagtgttttgtttatttgatgtccgtgattcttggatagcttcccatagcgtgaatcttgatccggtatctatgcaaaccttgaggaattcaaaagcacaattctcctagaacaattgtagcatgctaagtattaaggtttaccatctaaatatcaatgaagtaaaacatgcaactaagcgataaaacacctgcacttataatgctaatgctgctgtgagagaaaaatagacaacaaaaaatgaacaatggtc

SEQ ID NO: 32818 - DNA, 443 bp, Setaria italica
  Peptide Sequence Number=SeqID_98792
gccagttttctgccaagaagtggtgggtggttcagggtccgattgtgccagtgtcgaagtagagtgtcgtcccagaagatccaccagcaacaccctccatgagcgcgaatcgcatgtcctccgacggcttccaatgcctcttcctctggttgatgaaccaattgttgatctgctttgggtcgaggccggtcatcgctgcgagcctcaccttatcttcttcctgtcataatcacaacatcgggcaacagttatagtgcatcaggttttgattgtagagggaaaatattcagcctctaccgtaggataaggccagcggtagtgtgtgttccaccactccagcaacaccgtccgtgcatcctttggtagcttccctttcttccgcttctttaggaactccgatcgaagacgactgaggcatccactgtacttcttgagcagcattt

SEQ ID NO: 32819 - DNA, 852 bp, Setaria italica
  Peptide Sequence Number=SeqID_98793
gcacttgtaaattacctttatataagcccttcagcctatctaacaattaaattgggtagccaatattacagccaatacatgaaactactaataaaatgcttttgcaggtctccccaatttgctcgtacatacattttgtttcattaggacgacaccatgtacacataatcttgcaaaataatgaggcagtggactgatttgatcaatttcaggctgacaaatatttattgtcaattttgacccggcagattcatcatcttcacaagccaggtcatgctactgattgagttggccagttttctgccaagaagtggtgggtggttcagggtccgattgtgccagtgtcgaagtagagtgtcgtcccagaagatccaccagcaacaccctccatgagcgcgaatcgcatgtcctccgacggcttccaatgcctcttcctctggttgatgaaccaattgttgatctgctttgggtcgaggccggtcatcgctgcgagcctcaccttatcttcttcctgtcataatcactcggtaggataaggccagcggtagtgtgtgttccaccactccagcaacaccgtccgtgcatcctttggtagcttccctttcttccgcttctttaggaactccgatcgaagacgactgaggcatccactgtacttcttgagcagcatttccttgagctcatggtcagctaagcgggagctgtgttcttgccctatgtctggcacatcagtgtcccctgagcattgctcatcctcagaggaccccatcatgtcatcggagtgcgtggcggtcgtcgccgccggcgagctgccgccgctgcagaggttgctgagctgcgcctggatgctgc

SEQ ID NO: 32820 - DNA, 318 bp, Setaria italica
  Peptide Sequence Number=SeqID_98794
tatagaccgcttatcaagcattttcagcaatgtgaaacatccagaagtagttgctgaagctgtagatagatattggccaacactcaaaagtatctttgatcagcgagcatgggatacgcgcaccatggagtcaatatgccgatcttgcaaatttgctgtaaggacatgcggaagggccatgggaacgacgattggtgcaatgcttgaagaaatccaaactctttaccaacaacacaagcagtcttgcttcctttacctgtccagtaagataacccgcacaagatggatcagacccaaatatcttgataacttcactgg

SEQ ID NO: 32821 - DNA, 718 bp, Setaria italica
  Peptide Sequence Number=SeqID_98795
ggccaacactcaaaagtatctttgatcagcgagcatgggatacgcgcaccatggagtcaatatctatctacagcttcagcaactacttctggatgtttcacattgctgaaaatgcttgataagcggtctatatgtacagttaactgccgagcagggacttgttgaagaacttgatcaccttgctggattaattcttgcaagggattgattactggctggcagattaactccagggccgttctagcagattcttgtggaagcgtcgtaataaccacacttaggcttcaaccaaatgcaacgagtcctctgaagaaactttataaccaccaactccactgattgcaatatggtatatctggaagaggccatccaaggatcccgagaactttctcctacagtcttcacatatatacttgaacgccatagaagcagccgcagctgtatcctctgatgtactcatacccttattgagaatatcaactaaaggtgggagaatggatatttcagctggcgcagcatcaatccattttgaaaatgatccaatggtcgaacagactgtttgcagcaactgctcatgctgaggaaggcagggaagcagtgacataacctgtggtaaaatttctctctcttcaactgagactgatttcgcaattgcttgtatacagaacaagggacaagtaccttacttaactaaggtttagtacctaactttagggta

SEQ ID NO: 32822 - DNA, 1453 bp, Setaria italica
  Peptide Sequence Number=SeqID_98796
gcaagatcggcatattgactccatggtgcgcgtatcccatgctcgctgatcaaagatacttttgagtgttggccaatatctatctacagcttcagcaactacttctggatgtttcacattgctgaaaatgcttgataagcggtctatatgtacagttaactgccgagcagggacttgttgaagaacttgatcaccttgctggattaattcttgcaagggattgattactggctggcagattaactccagggccgttctagcagattcttgtggaagcgtcgtaataaccacacttagggcttcaaccaaatgcaacgagtcctctgaagaaactttataaccaccaactccactgattgcaatatggtatatctggaagaggccatccaaggatcccgagaactttctcctacagtcttcacatatatacttgaacgccatagaagcagccgcagctgtatcctctgatgtactcatacccttattgagaatatcaactaaaggtgggagaatggatatttcagctggcgcagcatcaatccattttgaaaatgatccaatggtcgaacagactgtttgcagcaactgctcatgctgaggaaggcagggaagcagtgacataacctgtggtaaaatttctctctcttcaactgagactgatttcgcaattgcttgtatacagaacagggcagcctctacaggttgccacttggggttctgctcattgttgcagcttccatatgcctgagctagcttcgtggaaagtacttttagtgttgagtcacctcccagaacatcggttgcatcaagtaatacatcactaacagcgtatctaacatgtctgaaatccctgcggtcttcctctgaaaaggtgtggtaatcctcggggtattcaactcgagaactgaccagagacaccaaagtttcaaatttaggacggaatatttgcaatcttctgtttctctcagcttcaattgccacctcagatccaaaagatacataagactccctcctgatcaggttacgcttaagacggtgccagaaattaaatgtcatagaggagatgtcaaattccagatgagaagtaacttctagcagtgcgttcacaatgtgaatggagtcatctgaacctgctgcaattaagtcaacataggattcacccatgtctgcatataaacgtgcaatagcttttacatcttcttcatccttagatggatctttgagctgctctttcagacccataatatgagggacaagaatttgaatcagcggcatttgttcagcagtagtaccagagccatgagatacagtagcatgtatcaattcagatgtaacatttacagctgcctccaaaaattgatcagagttcaatgaagagagtgccatatggaccaaaggatgcgatgcaagttcagaagcagagatcccatgacagaaacgaagccaaagaacg

SEQ ID NO: 32823 - DNA, 1484 bp, Setaria italica
  misc_feature (1477)..(1484): n is a, c, g, or t
  Peptide Sequence Number=SeqID_98797
tcaagcattttcagcaatgtgaaacatccagaagtagttgctgaagctgtagatagatattggccaacactcaaaagtatctttgatcagcgagcatgggatacgcgcaccatggagtcaatatgccgatcttgcaaatttgctgtaaggacatgcggaagggccatgggaacgacgattggtgcaatgcttgaagaaatccaaactctttaccaacaacacaagcagtcttgcttcctttacctgtccagtgaagttatcaagatatttgggtctgatccatcttgtgcgggttatcttactagcttgatacaaatacttttcagccatacagtacagcttctcagaacaattcaagattttacagctagaccagatatagctgatgattgctatctgttagcatcaagatgtatacgttactgtcccaatctatttgtacctacagaaatgtttcaaagattgattgactgtgcaatggctggtataactatacagcacagggaagcatgtaaatcgatattgtcttttctatcagacgtctttgaccttccaaactcatctgatggggggaattaccgagaatttattaacacaatcgtacttcagcgtggtgccacccttactagaataatgattgctgccttaacaggggcattgccatctggtcgtttggaagaggtatcttatgttctgctgtcacttagcagagcgtttggtgagaacatgctgaattgggcaagggaaagtattaatcttataccaccacaagccctaacagatgcagaacgcttgcgtttcttgaacattatatcagacgctgcatctgggtctagtcttcataccataacagacagatttggggaaatctctgatgtttgtagacgaaacaagactgtgcaagacctagttcaaagtgccttgcggcctcatgagttgaccttcatggtggttccacaacagctgtcataactggatatctctgcaaggcaggttcagaatgccgcttcatgcatgttttcagttgagaaagccactttgattcggtgttgatgcaagactcacacatcatctcgggattttttttccaagttcatacaggtttgagttgcggcaccatacagttgagatttgttcagagcatagataggtcagtagccattgtaattctttcgtgttccacctttgtacatgtgccgtacattgtgtatgcgggggatagaggtcgtgttgtattaactcgaaagcagtgttatactgggtgtaacaggcagatcacgcagaatggtgatcttccgtgggcctgattttacgttggccggtcagcttcttttttgtaaagtgaggtggccatcaattttattatgtatacttataccgactgttgaagggtgtcaggaaagagcatgtttccattctcttgatcgctggagatctttatgggcccaaatgtgatggccttctggcttgatgaatnnnnnnnn

SEQ ID NO: 32824 - DNA, 494 bp, Setaria italica
  Peptide Sequence Number=SeqID_98798
tgtttccttgttcttctcctctttgttctgaatcttacgaagtcgttcttcttttccccttggcgtttgtcaactcctgacacggcggatccagcgccggccctctatctcacatcggaggaggagcgccaatgcgccatcatgcgcggcctctgcttggccactccttcggtgatccgcgccgcctcgacctctgctcgtgtagagcaggcctatcccacggtccatttgcggcggacgcatgctggagaagagaggtcgagcgcctccgcccgttcgtctcccgagtccaagtgctgccggccaattcgagccagtccgtgccgattcgtcgttctccacacgaggtcctcctccgctcaagcgtggcttccactgcgtgagccgacacccccgctcaagcccatctccgccgcaagctcgcctccggcgtctctgctgcccacagccccctccgtcccaagcctcgtcaggctggaggtcccgcaggtcca

SEQ ID NO: 32825 - DNA, 300 bp, Setaria italica
  Peptide Sequence Number=SeqID_98799
ggaggaggaggcggacgacctcctcgctcccggcctccgcggcgacgtagagcgcggtctccccggcgtccgtctgcgcggcggcgagcgcggccagggaggtgcccgaggcctcggcgtcggccaggagcgcgcggacggcggccgcgtcggcggatcgtaccgccgcgaagagcgcctggtgggagagcggcgggagatccatcgggctccggctccggcggccgcgtgggcgttgccgccgctgtcactctggtgcctgatgccctgattgattggtggtgcggtggactggtggtg

SEQ ID NO: 32826 - DNA, 537 bp, Setaria italica
  Peptide Sequence Number=SeqID_98800
ctcttttgacatggtaatcagagcctttcttccataaaatacatctacatctacaccacctggcgcacgccaccttgcatgcaacagtcatggtgtcatcatcgtcgttgtcagccactacgcccacggcggcacagcttggagctcctgtagctgaaaagcttacaggggagaattatgtcttatggaaggctcaatcttgcctgctgtgcgggtgcgcagctcatgggagtcctcaacggatctgtcaaggagccggccaagaccatggaactggtgaaggctgacggcaagaaagggtagcatgacttcatcaacttactacaccaagatggtggctatcaaagatgagttggcggcagtagaagtcattattgacgatggtgagatggcatcttacatacttaatggtcttgatttcgaatataatccgtttgtgtcctcgatgcttggctgtgctgattccctctctctttccgatctatactctcatctgttgttttatgagatgcgcctggaagcatataatgaagcggg

SEQ ID NO: 32827 - DNA, 498 bp, Setaria italica
  Peptide Sequence Number=SeqID_98801
atggttgttaccttggtgacgcttcctagatgagccttaggtatatgccagaccatcccattagtggtaccaccagaagtaccagatttggtatcgtgcgtggaaggtgccttgacaccatgctccatggagattctattatgctgggacttcccagtagaaaggaagcggaaatcatgcaaagctacatctccacttttcccaccagttacaaccagtggtgagatggacccacagcctctatcactatcaaaaaactgaaagagaccgtgctcctccttcatgacacataatagaagtttgacacgtgccaggtggagacagtgtatcccagataacaacatttgcaccgtttgaattagatccagcagaagcgataactgatccacttgcagacacataagagacatccgaggcatggatatcaaagcatagggatgaatctgtaggatgaatgttgcttcttccgcccacctcaacttgccatgtacctacggt

SEQ ID NO: 32828 - DNA, 865 bp, Setaria italica
  Peptide Sequence Number=SeqID_98802
gctagctaagctataagcactgtcagcatgtatctgccattggtttgtaccaaacttgcatcagtaaatctcgtccttcaaatgttgatcccaatatgagatcatttgtcatatagtttgtagggcttagagcaatccctggggaactattgattccgaatatggccatattccggccatatccgtaaaatggcgcgaaaggtcaactccgaagctcaagccaatagatactccatgcatgcaggcaatgtatcgtaactaatacctcatctgatgcatcttgcaagggatggaaaaagcagctcacgacagcaagacgaaactatgtcgaatttgacagtcgttccttttcattgctgaggaaaccaaagacctgtttcaagtttcctctagatggccgtgcatttacagcaaatttgcaaatgaacaccagcctcttcctcatctccaactttgtgatgtctcttttcatgaaagaatgtccatagtcaaagcatccattatcatcgaataacagtgtcactattgccaaggccacacaaatactaatatcgtctccattttgacagcatactagtatttttctcccagcaataaaatttctcttagcaaagtcaacagcttttgaaaggtttttcatcaaggaaaaccgatcatcctttgagcccacaatagatagctcaaggtaagaattttctgatgaactagatggtatttttgacgtgctgtcacagttcagtatgcagtccacaccaactaaggcatctgcaacttggagagtagatgatactgcaaggttcgttgttccaatccagaagagaagaggaccatttatttgtctaattatttgttgtcgttcttgttt

SEQ ID NO: 32829 - DNA, 329 bp, Setaria italica
  Peptide Sequence Number=SeqID_98803
accccttgatccccaaccagacaaccaagtggaggcctggcctcccccacctctacaaaaacgtgggcattaacaaggacccctcatggaggcatggacctccaatggcgacccagctgccgacctcccccttctaccccgatatgtccacgcatatacatatatatatcgccgaatagtgtggactgtctcccccatgcttcctctctctacaggtcctctctcctctttagctccttcctcctcctctcacttggaattcctgttgcaagtacagcataatgatctgctacatgctgtggtggttggtggcatgctgcctcctgctt

SEQ ID NO: 32830 - DNA, 269 bp, Setaria italica
  Peptide Sequence Number=SeqID_98804
gcggcctccgcctcggcccggggtggcgtggtgatgacggcgccgccggccagcgggcgggcggcgcccgacagccccggccgcgggctgaagcggaagctgggctgcatcgagtccgccacgcggatggggcggaagaagcggctcgacagcgagtacgagctcggcgccgagatcgggcagggcaagttcggttccgtccggatctgccgcgccagggcggggggcgaggagttcgcctgcaaggcgcttgccaagaacggcgagga

SEQ ID NO: 32831 - DNA, 233 bp, Setaria italica
  Peptide Sequence Number=SeqID_98805
ttcattgtacggctgaagatcgcacatgaggcggcagaggcacttgcatacctacattccatggcatcaccaccgatcatccacggggatgtgaagtcacccaacatacttcttgatgagaactacaccacaaaggtatcggactttggggcatcggcattggcaccgacagacgaggcacatcttgtaacgttggttcaaggaacatgtggatacctcgatcctgagtattt

SEQ ID NO: 32832 - DNA, 3585 bp, Setaria italica
  Peptide Sequence Number=SeqID_98806
ccagcctgaagcttttgtgctcccatctagagatggacctgaggcagcacttggtttggttttacctcttctggtactccaggacctgtggtggcacttgaatttccctgttccatctttttctccccttgtgttggtactgtttcaacaaaagcactatttccttgaactgctatcacctcctctatgatgcatgaagtatcttttccatcagctccaagacctgaggaaggctggagagcaggtgttggtgaagacattgaccacatgtcattactagggtcatcttggaccccccatagagcagaatcaacagcttcaccctgatagtaacttggctcaccccaaggtgacaatgcaataggactagagcattgcggttgttcttcctcagctgaagctggcacaaaattttctaaaggcacggcttcacgtgtattgtatttttcacaactttgttctgttaatgattccaacacatctgatacagcaatcccttcagcatcagatacaggattaaccagtttgctgtttctctttactgtagtctcttcaaacacatgcttcatttgggtgatagattccctatctcttgaatttcttttttctagacatgatctttccttgagtgattgcaagctatcaatttcactagcaggtgggccagatagttcagatacaaaagacattgaagagtggacacatgtctttgtagctaaatcttcagatgctattgatgttgatcctgattggttcatggaagtctccttcctctccagttttggggttggactaggatactcgcactcaacatcttgaggcttcgaggaaaccaatgggccagttttaggttcaggatgctgatgaaatggtgcattcaacgcatcaggtcggcatgctttatgttgattcatggttgcctcagtctcacttgaatttgggttagatgtagatggaactggttggggaaggcatacaggagcacctgactgaatagacacagcagaagcagaactcgaatctctgtcttcaacaggatttgttggagaacagctctctggctttaccaaagcaacagataacttagggtcatgggcgccagtatttattgctgagctccagtcgcgttcctgctggctcttggctttgaaatccagcagacttgaagtgctaggagaagttgctgggtccctctcagattgttgtggagtacgaactgagactttatgcgaattattcttagagtcagtttgcaattggtccttcatagtactgccatcaggatgctgctccacatcactcttgcaactatcagtcatgggcgctatggttggattccacatatcgccattgtcccgacaactgttccattcaccaaccagttctcttgggaccctcacatcatgagagctagttggtacatctgaacctgctgaagatagaatagttgacgaatagctaacgtgatgctggacctgaccatgaaaagtgtgagcatccttcagagatctcaacggtaaagttgcggccagaggctttggatcttcttttgtaggatctgaaccctcagcaaactggccagatgatgtagaagaatacaccacgttataaccaataggggaggaagagttatttgcaactaaatttgagttgattctatcttgcccagtgcttacccatattgatttatcaccagattggactgctgaatgcggaacgaaatctgtctgctgtttttggagcacttcagccaacagaagtgagttctcctcactctcaaatgtaagccatattctcaggtcgcgtgggaaaaaagttacccacttggatagctgcgaaagagtaaatgggccctgaacatttcccttaggatccttgtagtgccagactttttctggctcggtgtcatctgatacaactccaagcattgcaggctcaactgcagtgttgttcaaattaatgttgcttcctgctccagatttatggcccacatcctctgttggcacactacttgtgtcactgcttccatccaggcacttttgtgtatgattttccacagaatccgattttgatccttttcttcctagatatgacccattcctatttatggtccaatcaacagctttcttataatcctgttcttcagcagattcataatttggagccatgcggggatcaacatgtacttcaggcacttcattaatcctgcgggctttttcttcaggagtgtccaaaagctgcaacttttctacacactctctcaattcctttcgacgtccagtttcactagcacgatcacgaagatggctcagcctctgtttctcattttccaaccaatctttaaatcgcagagattggaatattttagctttctcatagatgtcccccacttttaaccgggtggttagaccaaacttcatactctgacgtaagcgcttgcattcctcctctgtgaaatcctgattagagatcgtatccattgtgataacctcctttttatccaaatttgatatctcgagagcataatctgttgcctttttaccaacactgtatcgctcagcaaccttatgtgtaccaagaactttcactagacggtacatatcttgcttgttgccaagaccagaaattcttatcctcacaaaagcaccagcaattttgtcagagaatgcagcagcagcatcaataagatcctccatcaaactgcgacgcaagtaaattaaatttatattatgcatgtcaatggctgcataatcctcaagattagttgtcagttctctttcaatcttcttatgagccttcatcctcttatcagaacataatttagccgtcaactcattatatccttcagtggccgcttcagcacaatctgaatcaattgctctttgactatctgcatttaatgctggggcctgtttcacaagataatgcgtctccaaaagctttaacatctcaaaatgaccgacacgcggttttctaaacaaattgctaagccttgaatcacagataacttgactttttttgcgaggatcatggagattattttgctttatatattcaagcaaaagagcctgaacatcagactgggaaatataagaactatcaccatttctcatgtgcccaatgaattccaatagctcagctgaagcccattctgtaacacctggcaaggacatcccttcattttttgatccattcggtaagcttccagcactgttgattgagattccacacttccttgcagtagtaccactgtctttcttgcgtttctgtcctcttttccctgaagaattattccgtcttcgtttccttgaagagatgtcaaaactagcatcttcgtcatcgtttgcatcatataaatcatcagatgattcctctttctctctcctacaagcagtagtagggacagtccagtggctcttggcactgattagctcttccaatgttaataaatgtttccctttcacatccaaccaatataacttgaaaagatactcccagctatttttatcatcaaaatcaacaccaacctttgcaccatcatctttggattctatcaacaatattgtaccataacatgtatcacag

SEQ ID NO: 32833 - DNA, 413 bp, Setaria italica
  Peptide Sequence Number=SeqID_98807
cgacgcgtcaggggtcgacatgaaggccgtgctgtgcgtggccgccgccggggacgtggtgtgcagcggttcggcggacaggacggtgagagtgtggaggaggggagcggcaggagcgggctacacctgtctggccgtgctcgacggccatgctggagcagtgaagagcttgacgttggtgaagaaatcgggaggtgatcacgatggctcgtgcgacgggtgctgctcctgctctgcagctcatgtttgcagcggatcgctggactctgacgtgaagatttggagggtgaacgtttcttgtttatgagtgccgtagatagactagcggtagaggtgtactccgtagctatgtgtacacaagtatattcttcgagatgacagattttagttattttttttagtaaaactaaaaa

SEQ ID NO: 32834 - DNA, 377 bp, Setaria italica
  misc_feature (62)..(62): n is a, c, g, or t
  Peptide Sequence Number=SeqID_98808
ccacgccttaatttgattgtgttgctaccaagcttaggacctgtatcaaagacaagccaagnttcccaagtatcatcctctccagtaaaaagagcatgcaaatccggtgtacttccttgaagatcaacccgtgctgcaaataagcctgaaggttgaaatttgcggcgatgccagacctgacaattatatgctaactcaagttgttcagaaacatcctcgcgcatgggaagccaatcaagaccacctttgcgagcaaaccagtggcctctcaagacacgcctgttttccccattccagtacacagggaagcaatgacgcctcatcaaatcaacctcaaatagtccacctttcacaggaaccccaacccgctcttccac

SEQ ID NO: 32835 - DNA, 357 bp, Setaria italica
  Peptide Sequence Number=SeqID_98809
atacattcttgccattccctaggattgacttctattatcaaatcgtttttagatagccagtactcctttcgtctagcaaagctcaagttgatgttacgatcaagcatcatgtaagtgcctattcggaagtctagctgagcgttctaggttttctgaaggtgagattcagaccttcatgtctgttgatgctgaccgcacaataaacctatgtaacagccttcatgatgcttggagcttgccactgcagattggagttgcactttatctactgtatacacaagtcaattatggcttttctatcgtgggctggcaataacaatcatactaataccagtgaacaaatggatttctacaagg

SEQ ID NO: 32836 - DNA, 307 bp, Setaria italica
  misc_feature (278)..(278): n is a, c, g, or t
  Peptide Sequence Number=SeqID_98810
tggccctcgcgcgcggccccctcctcccgctccagaaaccctagggcgcggcacgcacgcaccctcctctcctcgcgggcgcgggcagcatggcgccgcaggccgcggggtcgcccccgtcggtggcggcgctcgggttcctcctcccgacctgctgggagatcgaggtcacctgcgccgccgcgatgatcctcgtcgcgctctacgccgcctacgagctcctcaacccgcgcccctcgcaggcgggcgcgggaggtgaggccgccgaccgggccctnttgggggattcgacggcgccgacaagttc

SEQ ID NO: 32837 - DNA, 1157 bp, Setaria italica
  Peptide Sequence Number=SeqID_98811
gacgaaggcgtgctcctcaagtggaaggccgatttcggctccaccctcggcagctgcgtcatcctcggggcctcgtcggtctcgtccaagacgacgtcgccgtctgctcagcccgaaactgacgccgccgacagcacggacacctcacccgatcccaacagggagactgaagacctggggagcgtgcctgagtcgctctataccaatggaggcctcaagcttcgcgtcgtctggaccatcagctcgctgattgctgcgtcggcgaggcattacttgctgcagccgataatttctaatcacgcaacgctggagagtttgaacctcactgacgctgacggacagggggagctcaccatggacaagaggcagcttcaggagctgagggtgcggcccgtctcggcgtcagcaagctcgcatcgcacgctcatgccggcgctcagcatgcgactgcactacgcgccgctcatcgagctgcctgggggaatgctgctgaagggtgccacgctggtggcgatcagaccaagcgaagatgccttgaggggggagggtcaaggggttgggactgctggttctgtcggtacatgttgggtttcagaggcctttgaggagccatatcgaactgcagcaaaggtgcttctcaagagaaggccgtattgccttgaaatgaactcgttctgagcatcacggattcagttccagagagttccacccttatggcaggactgtgggatgctttttggatgaatataggagtatttatcattcagtgcaagaatcggacaaagacgcctcccatccgttgattattccagcgtagtggtgactttgcgtacctgtaagtatatatacatgtttgcgttgggttactacaggctggaatgccattggagtcgaatctacagcaaagcaatatgaagggaagccatgcaatgtgcctcacttgagcttggtgctcctaggccaagctgacattatactttcctcaaggaagccccgaagattttgttatttagcaagcagcaccttttttttttgcttaaatctttgaggggtcatgctcctggcactgtatcaaatatagactaatataccgtccttttcggaaaagttagccctgctgtctccgtttcttaggtcgttaaaaaaaaaaaaaaaaa

SEQ ID NO: 32838 - DNA, 674 bp, Setaria italica
  misc_feature (633)..(674): n is a, c, g, or t
  Peptide Sequence Number=SeqID_98812
acggcgccaaccggtggacggtgtccgtggcgtgggggttcgcggtgctggtggcgaggggcggtaatgtcgccgcgggagatggagatgccggcgcgcaccttcctcaactggtaccggcgcgccgactacacggcgtacgcgttcaacaccaggcccctggcgcgcagcccgtgccagaagcccgcggtgtactacctgtcgtcgtcggcgcggcgcgcggccgagcgcggcggcggggagaccacggtgacgcggtacgagcggtggcgccacccgaacgagacgcggccggcgtgccggtgggacatcgccgacccggacgcgcatctcgatcacatcgtcgtgctcaagaggcccgaccccgggctctgggacaggtccccccggcgaaattgctgtagagtggtgtcgtcgcccaaggaggggaagaacggggagaagacgatgaccatcgacgtaggcgtatgcagggaaggcgagttcagccaagtagccggagtataaacttcattagacacacagatgaagataggaacattcagatttttttcttcttctttgcttgtagtacgaatctattcgtctcggagggaacgggtcccgtttcacggtttcagcgtccctttaccnnnnnnnnnnnnnnnnnnnnnnnnnnnnnnnnnnnnnnnnnn

SEQ ID NO: 32839 - DNA, 216 bp, Setaria italica
  Peptide Sequence Number=SeqID_98813
atgcaagccttggctatgtcagctgcaagatctgactgatgcttccttgcatccatgcaaagctgactgtagtcgatagcacgatgcagctcttccaagctgaccctctgcgattttctccacaaggaagctatttttctatctgggtcgcatgctgaccccataagccacatgcccacattcagcatttcagggagagacatgacaggtaaaagg

SEQ ID NO: 32840 - DNA, 259 bp, Setaria italica
  Peptide Sequence Number=SeqID_98814
ttcgaagagaaaggcgacagccggtactgtggagtgagggagatgggactgagcatcggtggcgagaggaggagctgcagtgcagagaggcgggattaccatgaccctttcatggcgcggagatgggcgaagcatttcaatgtgtacagggcctgagtaaaagagcttggtgatcagctgcgaaatatgattcttgttggtttcttttttgaattcctgcaagcatctgtgggtggtgtctgcaggaattcaaaaaaag

SEQ ID NO: 32841 - DNA, 246 bp, Setaria italica
  Peptide Sequence Number=SeqID_98815
aagaatttgttgaacagagtgccaatattttcaagtatgactctgattcttcttcaaacataaattgtgcgttctggattcgcttcttctggctgagtggttgtctatccctttcatcagactgcaaagagaaagcttacaaagagttcagtattgccctgtccatcctaaggaatggtaacaaagacaaaagctgtggagatgttattcttctacctcacaccaagcttgtaaaatcactgacaa

SEQ ID NO: 32842 - DNA, 751 bp, Setaria italica
  misc_feature (37)..(37): n is a, c, g, or t
  Peptide Sequence Number=SeqID_98816
acttaagtctgagtgtacacagaaagcattaactccnttaaaatagactgcatccataaaagtaaactgcaggcatagacctccagtcctctagaaaatagagcattcaacggctcatagtctttgcttatgctgttggcccgcagtttgccctagcaaatcaattttattggtagcattggatttaaaccatctctcaatcaagtttttttccaagaaataactaacagctgcagtagcatttattggtgtaggtatgcactccttaaagattttgctgtcttcacaactaagtacatcattggtaaacaatgttccctcactggctttatctagcgctgcaaatagttcatctgctgttgttttctttgtattgatggcatcctatagaaaaaacaaagtaaatatatacacacagatacacacatttcgcaaaagacaaatatatacacacaaatacacacatttcgcaaaagacaacataaatataaaagaatacaatttacatgaaaaagcataccaacagctttccagcaaccaaaggattttgctccttcttcaataactttttaacagtcttccacttgaatggctgagggtttgcatttcagtttagcacagattattgcctcgataaacttttgtgcagatgggaaaagcaattaccttgatgttcacttgatcaagtgacaacacaggtccagccgaatcagatgtaataagcttatcgaaatattcaccaatttgagtc

SEQ ID NO: 32843 - DNA, 570 bp, Setaria italica
  Peptide Sequence Number=SeqID_98817
aactgcaggcatagacctccagtcctctagaaaatagagcattcaacggctcatagtctgcaggtggaacacagggagcagattcatataccttgtaaaggtgcatcagcaagtttgatctgctaaacggagacataaaggcaaaatgtaaagcaatatatttttcaaagctgacaaagtcatcctaattgaattctggatctggaatcttcagaatatcatgctgaaattcatcaaaatatagaggataactcttcagatcagcactgtagaagttatacttcagaactcattcaaaaaatttcttgaaatcttctgaagcactgttagccgtcagtgtgtctaaagcttcttttaagatgatgaattgaccattaacaacctccatatcagaaagtagcttaaaaatcccctggcacacttagtcccagaatatagctacgtttagggttcactagcatattaaaaacataaaacatgtcaaaggtttataacctttgcttatgctgttggcccgcagtttgccctagcaaatctaattttattggtagcattggatttaaaaccatc

SEQ ID NO: 32844 - DNA, 884 bp, Setaria italica
  misc_feature (863)..(863): n is a, c, g, or t
  misc_feature (870)..(870): n is a, c, g, or t
  Peptide Sequence Number=SeqID_98818
tgtatatatttacttgttttttctataggatgccaatcaatacaaagaaaacaacagcagatgaactatttgcagcgctagataaagccagtgagggaacattgtttaccaatgatgtacttagttgtgaagacagcaaaatctttaaggagtgcatacctacaccaataaatgctactgcagctgttagttatttcttggaaaaaaacttgattgagagatggtttaaatccaatgctaccaataaaattgatttgctagggcaaactgcgggccaacagcataagcaaagactatgagccgttgaatgctctattttctagaggactggaggtctatgcctgcagtttacttttattggatgcagtctattttaatggagttaatgcttctgtgtacactcagacttaagttctcccgttactttggcacgcatgatatggaccatagaaagcttggttcaaaccagatggtgctcgatatgttgattactgatctggttcttggacaagcgcttgctccttatttaacttacttgatattctttgttgttaaagttactaaaagttagaccattttttcatcttatcatatgttgattgattatttatggcttaattaaaaaattctctctttcagagtattttgagcctttcatacgttcgaagtatatgagtatgttccactcattttacctttacctttacacttatttgcttttcattaaccttgtgcatccaacaccctaacgagtatacatataatgcagtggtgaggtatttttgtgcgtcgaggatgacaaggatgattacatcagaggaaagctctgatgattcaagtgatgatgactgaattcatgttanagtgttntcttaagtcattga

SEQ ID NO: 32845 - DNA, 717 bp, Setaria italica
  Peptide Sequence Number=SeqID_98819
agaagggggggaaaaagtacaacttgaaacagaacgaataacgctgtacgttttccagttcccaatctatccacaaatagcatatctgctaaacctgcatgatgtttctcgtcacaatggagatcagcttttgtgcagaatgcattttacccaaaaaggctcaggagttcaacgttttctggtaagcaaccgaagttgaagtctttgtcaactctctgatggccattgtggcataggatgatgctggtagagtaaattctaattttacagccagtttctcgggtaatggttctgagatgccattagattttggttttcactgagctagcttcagtggttggtccagaggtgtccaatgaagcatccaatccagaatcacatgatgcgaaactggaaatcccatcagatagcagctcatttgcttctgatgggttggttttggatagaacaactaaattagtttccaataaaggtacattgtcatctgtgtaagtcattaggtcccattcaaaatcaataggtcgttggagtagccgacggtaacctcctttcatgctggtaatcgagaagtccttgatcccatggacgctctctaccaggctaatgccatcctgagtcacaaaattagataaatgtcatggcaatcgtttgagaagaaattatttgaatgtgtgaaactcaatcacttcttcataatctgactggaaaatttttgta

SEQ ID NO: 32846 - DNA, 426 bp, Setaria italica
  Peptide Sequence Number=SeqID_98820
ccaactgccactgcatatagctttgcaatagtagtactgcgtgattttgtcggatgccaatgaaatggttcgagagaatgatgtgaccacctggtctaaacacacttataatccaccatcctaattatatactagaactagaatgatccagcatccatgggagagtagtgtagagagtgtagactactactgctcccttcgtcctaaattacaattcgttttgatttttctagatacattacttttgttatgtatcttgatattaatatacatctaagtgtatatcaaaagttatgtatttagaaaagtcaaaacgaataataatttgggacggaaggagtagctggtagcgactgtgaggtagctagcttatcaagaacggacggccacgggttgcatcagagcgcaggagcggcgggcggccgg

SEQ ID NO: 32847 - DNA, 471 bp, Setaria italica
  Peptide Sequence Number=SeqID_98821
gttcgtgtttccatcagcatggtccggcgacgaaagcttccccaggccagtaacgctgacggggaggtaatcttgcagcgacgtccgaggcagggacgagcccacggacagcgatatcaacaggagggtcagcaacagcgccgccaccgacacgacgatggtgacgacccaccgccggactccggcgccccccgccggggccttcctccccggcaagctcatgggcatggccccctccccccgagatcagccctcccattcgaaccgcatctgcgctacgcgcgacgaaatccagatccaggaaaggaaagagatcgcgacggagggcaaggagacgaggaggcgtaccagcgtggaatttggggatggaggtggggaagggatcggattcgggcggggaagcgggccaagcgggagcggagcggagcggcgcggctgtgctcgtggtcggtgaatgcaggagaaaaggat

SEQ ID NO: 32848 - DNA, 246 bp, Setaria italica
  Peptide Sequence Number=SeqID_98822
cggatggatctccagtccccgctccacgccagtacggcaccagtagaaggcggagacggaatgacgggttaggaggtgaccgcgcctccggggttggtgccgccgtgtccggtggtgtatacggtcgccgccgaggcacggcagatttgcggggaacaggggagcgaattcgggggctggagacgggtgcggggagaatttggggggttgaaaatcggaggagaggaacggaccaggggaggagaa

SEQ ID NO: 32849 - DNA, 418 bp, Setaria italica
  Peptide Sequence Number=SeqID_98823
ttattcatatccgaagaacttctctgtcagtcagaagtgtttcttgcattaaaagatttcaataatatcaattctgagactatgttattgttgtggagcatgagagagcggtataatctatcttcaaagtttaaaacatactttgagacactcccggcaaattttaatacaggcttgagttttggaattgatgcacttgcttcattagaaggaacccttctttttgatgagataatgcaagctaagcagcatttgcgtcagcagtatgacgacttatttcccttactatgcataaattttcctgagatattcagaaaggacgtatgcacatgggacaattttcttgttgggcatgtgaactatggtattccaacagtatgatggttgttataagtagtgggaaattatcaatgtgttt

SEQ ID NO: 32850 - DNA, 440 bp, Setaria italica
  Peptide Sequence Number=SeqID_98824
ggggtcgctaatcttcacagagtgtgcgtggtatgaaaccatggatgtcctcatcctgatgcaggaacaagttgttcctgggtgtttcctgcgagctcgtgctattgggctcatgcctatgattgatcaggtctagtttcgccatcagcttattgcatactccgtttcaccttaggctatggtttattgcctcgtgctcttgcatgtaatttgagatctgctgatgcatgagctttgaccaagccagcgtagggcttttctatggaatgacagttctcctagtaattctatctcaaggcttagttcttacatcttatttaatcattgatcaaaatcactagggtgagaaagatgataagatcatagcagtctgtgctgatgaccctgagtaccgtcacttcacggacatcaaggatcttcctccgcatcgccttcaagag

SEQ ID NO: 32851 - DNA, 720 bp, Setaria italica
  Peptide Sequence Number=SeqID_98825
actcgaggccgctccctccgccacctcgcgctcgcctgcctgacgcctctctcctccgcgcttccgccaccgatcggctccgccatggctggaactcctgttctcaatgagcgtatcctttcttccatgtcccagaaacatgttgctgctcacccgtggcatgatttggagattggaccaggggctcctgaagttttcaactgtgtaagttaaccttttactactaaatttacaaataatgttgttctgaattctgatcatactgatggacaccaatttgaagctttatcttcacacttacattaagcctcatatgacagcatgaggactgatattcctggcctgtttagcagtcttggacttcacaatttataaactccagatacattagatctactgatttttgctgggacaatagagcttaagttatattgcaacaaatcaatctcatgatatccctacttgtacatcatttttggccatggtatgaatatatgatctactggttcaaaaatatctcaaactgtcctgtagtacagaaatatatgatgcaccagttcaaccatgtctcattttgtgttactagggtatgcttatgttcaccaatcagtggctaaccagctgtgcctgcatactagtagatagcatctgttgcagactggacttctttatttacctgtctttagatgtggtgctgaaataaagcatgttggtaaccta

SEQ ID NO: 32852 - DNA, 1106 bp, Setaria italica
  misc_feature (1046)..(1106): n is a, c, g, or t
  Peptide Sequence Number=SeqID_98826
ccctggcgttggacagcagcagtagcagcagcagcggactcgaggccgctccctccgccacctcgcgctcgcctgcctgacgcctctctcctccgcgcttccgccaccgatcggctccgccatggctggaactcctgttctcaatgagcgtatcctttcttccatgtcccagaaacatgttgctgctcacccgtggcatgatttggagattggaccaggggctcctgaagttttcaactgtgtggttgagattcctagaggcaccaaggttaagtatgagttggacaaggcatctggtctgatcaaggttgatcgtgtcctttactcctctgttgtttacccacacaactatggtttcataccacgcacactctgtgaagatagcgaccccatggatgtcctcatcctgatgcaggaacaagttgttcctgggtgtttcctgcgagctcgtgctattgggctcatgcctatgattgatcagggtgagaaagatgataagatcatagcagtctgtgctgatgaccctgagtaccgtcacttcacggacatcaaggatcttcctccgcatcgccttcaagagatccgccgcttctttgaagattataagaagaatgaaaacaaagaggttgcagtgaatgagttcctcccagcaaaagatgccatcgaggcaatcaagtactccatggacctgtatggctcgtacatcatcgaaagcctgaggaagtaatctatagctgctagattgcggatgctgcatgatttactgagcagctcatcgagagtacgaagtaccgtggtacaacatatgttaacacgcacggactaaaatcatggcaaaagggatattaccttattgttcatgtcgagacaagcagcagtgcctttgtttccattatatatgccgtgtcaagtccaagcacttgacgtttgctgaaatctttgtcgtcaaaccaacatttgacagaacgattgcgattgcctgatagaaaatcactgatacataaatgcctttcgctcatacaaaaaaaaaaaaaaaaaacaaaacnnnnnnnnnnnnnnnnnnnnnnnnnnnnnnnnnnnnnnnnnnnnnnnnnnnnnnnnnnnnn

SEQ ID NO: 32853 - DNA, 270 bp, Setaria italica
  Peptide Sequence Number=SeqID_98827
ccgggagcacgtgcatgtagcccgtggcgaggatgacccccgacgcgaaggccttgacgatgacgaagaggttgcggtcgggccggagcgccgggatggagcgggagaagagcggcaggcacacgccgatcacgctggccaccaggatcgtcgggatcgcgatcagcttcagccgcagcgccttggggacgttgtggcacgcgccgtccacggaggggtcggcgcaggcgtcggccgccgggtcagccgccggcggctgcgcatcggcga

SEQ ID NO: 32854 - DNA, 423 bp, Setaria italica
  Peptide Sequence Number=SeqID_98828
aagattgtctctatagttggattcggaggacttggcaagacaactctttccaaagcagtctatgacaaacacaaaccggcatttgattgtggggcttttgttccggttggccgggatcctgacatgaagaaagtcttaagggatattctcattgattttgactacgtgaatccaaatgtgatgatattggatgaaaggcagctcatcaatgaactaaggaaattcatccacaacaagaggtgtttgtttgttattgatgacatatgggataagaaatcatgggaattgatccgatgtgctttgcaacatagtaattgtcgaagtagagtagtggtgactactcgtatttttgaagtcgctacacatattggtgatatttacaagatgcaaccactttctcgcgatgactctgaaatattacta

SEQ ID NO: 32855 - DNA, 2371 bp, Setaria italica
  Peptide Sequence Number=SeqID_98829
ccattttcgtgttgttcttacaaatggttgacacttggtgtcattcatgctttgcattcttgccacttttggtgcggttactaacttatgtttgtgtccttgtactgtcatgtggacgcctaggtgtttgtttgttattgatgacatatgggataagaaatcatgggaattgatccgatgtgctttgcaacatagtaattgtcgaagtagagtagtggtgactactcgtatttttgaagtcgctacacatattggtgatatttacaagatgcaaccactttctcgcgatgactctgaaatattactatattctagaataactggtggtgaagacagatttctagacagtctttcaaccgaggcatgtgataaaattttgaagaaatgtggtggtgtgccattagctatcattacaatagctagcttattggcaagtaaatcaggggaggactgggctaaggtgtacaattctataggttttggtgacagaggcaatgacattgtggagaatactagaagaatattgtcatttagctactatgacctcccttcacatctaaagccttgcttgctgtatgtaagtttatttcgggaagaatatgggatccagaaaaatcttttgatatggaagtggatagctgaaggttttattcagaatgaacaagcaacaacagagatagaactatttgagctcggggaagggtacttcaatgagctaataaatagaagcatgatccaaccgatggagagagaggataacgggtatgtatatggttgtcgtgttcatgatatggtgcttgatctggtccgttcactatcgagtgaagaaaagttcaccactatattggacagcaatgaccaacaaaaactcataggcggtagcaatactcgcagatttgccgtgcacggtaggagtgttgaagagagcacaaccgcactcagctggttaacatatatgggtttggagaaagtgaggtcgtttagtgcaacgaatattaatgtggtaatatcatgtttccgagttctacgtgttttaactatagaagattgcagtgttggggaagcttggggaaaacatagattacagcatttagggagtttacgtcacctgaggtatcttggaattttggatacacaaattgatgagctccccaaggaagttggagacctcaagtttctacaaacactgaatttgtcaggtaccggaatgcaacagctgccggagggtgtgggcctgttgaaacaactgttgtgcctacgtgtcaatgacagtataacagtgccgtctggtttgatcgggaaccttactttgttgcaagagctgaagatatggccggctgatgatgcgtcaacaaggcagctcatcaaggacctgggcgagttgagagaactaaggatgctccagtgtaccattcatgtaagcgatgagagcatggagagagatttgctggaatcgcttgcaaatctccacaagatccgcaccttatttgtttttggctcagcattggcgagaggcatcacaagtgaagaagtatgttttgtggctcctcctcggtgccttggacagatgtgtttggaatgcttcaagttctctgcactaccggtatggatggactcgacactcgttttgaacctcacccatctggatgtgacagtgaatttggtgcaagaacaggacatggaaacccttgggaggctaccagagctctgttatctcaaactgagttcagatcacaccagactattaagcataaggaagaccactggtgatctgcaccgctacttccggaagttgagattctttcacactcccttttcgtttgtccagtttgattcacacggctgcgaaagcgacgacgatgcaaccatagcacattccatcatgatgccaagccttgaatcccttgtgttttctgtttatgtgcggttcataaaagatatggacattattcagcctggctttgagaatctgcttggcttcgaaaatgttgctggtacttcgctccagagggttactgctacgatccagtgtgaggatgctactgctgcggaggtggaggaagcgaaggcagcattggcacatgcagctgatctccatcccaactgtcccgcccttagaattcagatggagaataagcataagatgctctcaactgaccgagaggtttctggaaagatccagaatggtgcccatcagcaccagaggaaaccagactgaatttagttgatttattgtgcactttcttctcaccgatctctgttgcatccttgtatgtgcgcttgttttaactctcttcttctttagactgaaatactgaatacaggaagtgacaacatattcattaaggaaaatgtatttttacaaaaaaaa

SEQ ID NO: 32856 - DNA, 222 bp, Setaria italica
  Peptide Sequence Number=SeqID_98830
ccgcccccctccaccttcgcctccctctccgccgcctccgagctcgagggcggcagcggagaggctgccgccgcctcggccgcagcggcagcgttggtgtttgtgtcggatttagggccggccttcgcttcctcgtccatggcagtagagctagggctcaggccgggacctcgtcctgcgcgcagcacggtggccggagaccaggcgtgctggcggagcgtg

SEQ ID NO: 32857 - DNA, 318 bp, Setaria italica
  Peptide Sequence Number=SeqID_98831
ataagccgcagccgcaaaagagaagccgcagccgcagcagcgctttacgcgctgccgaacgcgctcaatattgtgactcgcaaaaaaaattacccaattaatttatcggaaacttgttgccaatggtagtggtttggatggtaaagaagttgcctaacagtagtaattaatcgtcagacacatgagaaataacagttgaaagcagcagggtagggtagtattgcacacaccatcgtgtgctgccctgcctctgcctacatgaatggatcagctagtagcggtgcttagtcctggaggtcttctggttcctcctacgta

SEQ ID NO: 32858 - DNA, 238 bp, Setaria italica
  Peptide Sequence Number=SeqID_98832
gctgttgaaactgctgcagatcgacaccctggagttgagcaggtgtttttcgactttggagattgtagttgcaaaaaataatgcaatgctgtaccttctgactgtttctttgttgtgtagtatgctatcaggtcatttgctgatgcattagatgctgttccactagccttagctgaaaatagtggtttgccgcctattgatacattaactgtggtgaaagctcagcaagttaaggaga

SEQ ID NO: 32859 - DNA, 240 bp, Setaria italica
  Peptide Sequence Number=SeqID_98833
cacaaatgccaaagagaattgaggatgctaagatagccatccttacttgcccatttgagcccccgaagcctaagacaaagcataaggttgacattgacactgtagagaaattccagaccctgcgcgagcaagagcagaagtactttgatgaaatggttcagaagtgcaaggatgctggtgccgaccctggtttatttgtcaggttggggttttgatgatgaacgccaatcatctcttgat

SEQ ID NO: 32860 - DNA, 350 bp, Setaria italica
  Peptide Sequence Number=SeqID_98834
cgttgttggggatccactccacgaagtaggaggagttcttgttctgcaacgttagaagacaatactgctcgtccacctccttggtgctcatcttgccgcggaacatggcggaggcggtgaggtagcggccgtggcgggggtcggcggcgcacatcatgttcttggcgtcccacatctgctgggtgagctccgggaccgtcagggcgcggtactgctgggagccgcgggaggtgagcggcgcgaagccggaccatgaagaagtggaggcgcgggaacgggatgaggtgagcggcgcgaagccgaccatgaagaagtggaggcgcgggaacgggatgaggttgacggccagc

SEQ ID NO: 32861 - DNA, 400 bp, Setaria italica
  Peptide Sequence Number=SeqID_98835
tcagctgaccagggaagcgcaggcagcatgtgacaccactcatggttgcagagataaggtggttgagatcaccaactgcaccataaaagacaaggttaaaggaagtgccaactagagcaccaaaatacttgcatgtacaacaataacaaccagattatgacagtggcatattactttgggcgtctaagataacaatatggactagaatattaattagaagacaagcaaggatgaacaatatcaaccccctacaacattacacacagtgacaccattcaatttaacaattattggttgagtgattacatgtatataacaagtaagttgagtgtttacatgtatatagcaagtagaatagaaaaaactgtgtattggcaatacatgagttaagcatgtttcc

SEQ ID NO: 32862 - DNA, 131 bp, Setaria italica
  Peptide Sequence Number=SeqID_98836
ctcaaccacggtatcagatactttcggtgagccatacaatgccactctttcagtcaaccaactggtggactgaaagagtggcattgtatggctcaaccacggtatcagatactttcggtgaggggaaaact

SEQ ID NO: 32863 - DNA, 341 bp, Setaria italica
  Peptide Sequence Number=SeqID_98837
acaagatgctccagtcccccgacggcgacgtcaccatcacaaatgatggggcgacaatcctggagcagatggatgttgacaaccagattgcgaagctgatggtggagctttcccgcagtcaagactatgaaatcggagatgggaccactggggtcgttgtcatggcaggggctctcttagagcaggctgagaaacttctggaacgtggtattcacccaataagggttgctgaaggttatgagatggcatcaaggatagcttttgatcaccttgagcacatctcccgaaagtttgacgacagcgtagtcatgcatgtctgaaccaggggctctatattgtct

SEQ ID NO: 32864 - DNA, 718 bp, Setaria italica
  Peptide Sequence Number=SeqID_98838
atcaccagaaagacatgttcgcctgcactgcttgatatatgggaggataagcggtagcatgcagcatgctaccacggaggtacgtactacatactcagcataacatacgcgaataacaataaccaaacatacgcaagctccagcttaaagcaaaccaggatcccgagggtacaacaggcgacaggggtccagaccaccttactcgtcctggatcgcctcctcatcctcgtactcaccctcctcatcagcagtggcatcctggtactgctggtactcggacaccaggtcgttcatgttgctctctgcctcagtgaactccatctcgtccatgccctcaccagtgtacccaatgcagaagccttcctcctgaacatagcagtgaactgctcactcacacggcggaacatctcctggatggaggtggagtttccgatgaaggtggaggccatggagaggccacgtggcgggatgtcacagacgctggacttgacgttgttggggatccactccacgaagtaggaagagttcttgttctggacattgatcatctgctcgtccacctccttggtgctcatcttgccacggaacatggcagaggccgtgaggtagcggccgtggcgcgggtcagcagcgcacatcatgttcttggcatcccacatctgctgggtcagctcgagggaccggtgagggcacggtactgctgcgagccacgcgaggt

SEQ ID NO: 32865 - DNA, 423 bp, Setaria italica
  Peptide Sequence Number=SeqID_98839
cctggatggaggtggagtttccgatgaaggtggaggccatggagaaggccacggtggcgggatgtcacagacgctggacttgacgttgttggggatccactccacgaagtaggaagagttcttgttctggacattgatcatctgctcgtccacctccttggtgctcatcttagtccacggaacatggcagaggccgtgaggtagcggccgtggcgcgggtcagcagcgcacatcatgttcttggcatcccacatctgctgggtcagctcagggacggtgagggcacggtactgctgcgagccacgcgaggtgagtggcgcaaagccgaccatgaagaagtggagacgagggaaggggatcaagttgacagcaagcttgcgaaggtcagagttcagctgtcctgggaagcggagacagcaagtg

SEQ ID NO: 32866 - DNA, 920 bp, Setaria italica
  Peptide Sequence Number=SeqID_98840
tgttcgttcggggtttctattcttccttctttccttcgttccttcgttacttctacccttccttcgttcggtcggttcgtcgttccttggttacttgtcttggttatttccgacacgaggtcgttcatgttgctctctgcctcagtgaactccatctcgtccatgccctcgcctgtgtaccagtgcaagaaagccttcctcctgaacatggctgtgaactgctcgctcaccctccggaacatctcctggatagaggttgagttgccaatgaaggtggacgccatggacaggccccttggcgggatgtcacacacactggacttcacgttgttggggatccactccacgaagtaggacgagttcttgttctggacgttagaatacaatactgctcgtccacctccttggtgctcatcttcccacggaacatggcagaggcagtgaggtaacgcccatggcgagggtcagcagcgcacatcatgttcttggcatcccacatctgctgtgtgagctcagggacagtgagggcacggtactgctgggagccacgggaggtcagtggggcgaagccgaccatgaagaagtggagacgggggaaggggatcaggttcactgccagcttccggagatccgagttcagctgaccagggaacctaaggcagcaggtgactccactcatggtagcagagatcaaatggttcaaatccccaactgcagaaattaacagacatgcagaatatgttatcatacacaggcaatacatgcatgcatatatccacagtgctgaaaagataaaattgattaagattgaaggctgcttacagctaggcgtggtcagcttgagagtcctgaagcaaatgtcatagagggcctcattgtcaagaaccatgcactcatcagcattctcaaccaactggtgg

SEQ ID NO: 32867 - DNA, 519 bp, Setaria italica
  Peptide Sequence Number=SeqID_98841
agcaactcaaagcaactcgtgcccaaacagcaagcaaatcccttgtgacccagcccaacaaccccggtcgagatggctgactactaccacggcggcaggagcatgtactcgagcaccgacgagtgctacgacgccggcaggcacggcagccggaggatgtactcgcacaccgacgagtgctacgacgacgtcgaccgcaggaggccgggcgcgtacgccgacgactgctacaacggcgccggcggctacggcggcggcagacaggccgccgtctactccgacgagtactcccgcggcggctacggctacggcggcgggcaggagcacttcaagagggaggagagggagcacaagcacaaggagcgcctcggcgagatgggcgccctcgccggcggagccttcgcactgtacgaggggcaccgcgcgaagaaggacccggagcacgcgcagaggcacaagatcgaggccggcgtggcgacggcggcggcgctgggcgccggcggctacgcttaaccaaca

SEQ ID NO: 32868 - DNA, 802 bp, Setaria italica
  Peptide Sequence Number=SeqID_98842
tgttgtactattcccgtcctaaggggtccttgttctactactactacttggtactttctacgtttgtttggggtattcctacttccacgaagtaggacgagttcttgttctggacgttgatcatctgctcgtccacctccttggtgctcatcttcccacggaacatggcagaggcagtgaggtaacgcccatggcgagggtcagcagcgcacatcatgttcttggcatcccacatctgctgtgtgagctcagggacagtgagggcacggtactgctgggagccacgggaggtcagtggggcggaagccgaccatgaagaagtggagacgggggaaggggatcaggttcactgccagcttccggagatccgagttcagctgaccagggaacctaaggcagcaggtgactccactcatggtagcagagatcaaatggttcaaatccccaaagctaggcgtggtcagcttgagagtcctgaagcaaatgtcatagagggcctcattgtcaagaaccatgcactcatcagcattctcaaccaactggtggactgaaagagtggcattgtatggctcaaccacggtatcagatactttcggtgaggggaaaactgagaatgtcagcatcatgcggtcagggtactcctccctgatctttgagatcaacagcgtacccataccagatccagtaccaccaccaagagagtggcatacttggaatccttgcaggcagtcacagttctctgcttccttcctcacaacgtccagaacagagtcaatgagctcagccacctcagtgtaatggc

SEQ ID NO: 32869 - DNA, 1743 bp, Setaria italica
  Peptide Sequence Number=SeqID_98843
aattaattctactgggttgacaaagatttcacggaaaatctaaatcaattactggaaaacattcaggaccaccaaattcactcgataatttgaattccaatcggacaatgcaggaacccatacagaacaaacagcaacaagatattcttgtcctgtttaacataagtgatagcaattaaacgaagcacgagcatcatgcacgagaaactgcataggttgaggtggctactagtagcagtagcataaggataaggataaacactccatacacacgcaggcgactcaaagaatgcccaaggcaaataccattgcgccaactgatggcagcggccagcctcactccgccgcggcctcctcatcctgatcctcgtaatcggcatcctcatcggcggtcgcgtcctggtactgctggtactctgagacgaggtcgttcatgttgctttcggcctctgtgaactccatctcgtccatgccctcgcccgtgtaccagtgcaagaaggccttcctcctgaacatggccgtgaactgctcactcacccgcctgaacatctcctggattgaggtggagttgccaacgaaggtagaggacatggagaggccacgcggagggatgtcgcacacgctcgacttgacgttgtttgggatccactccacgaagtaggacgagttcttgttctgcacattgatcatctgctcgtccacctccttggtgctcatcttgccccggaacatggcggaggccgtcaggtagcggccgtggcgcgggtccgcagcacacatcatgttcttggagtcccacatctgctgggtcagctcagggacggtgagggagcggtactgctgggagccacgcgaggtgagtggcgcaaagcccaccatgaagaagtgcaggcgcgggaaggggatcaggttgacagcaagcttgcggaggtcagagttcagctgccctgggaagcgaaggcagcaggtgacaccactcatggtggcactgatcaggtggttcagatcaccaaagctaggagtagtcagcttcagagtgcggaagcagatgtcgtatagcgcctcgttgtccagcaccatgcactcgtcggcgttctccacgagctgatggacggagagcgtggcgttgtatggctcgaccaccgtgtccgacactttgggggacgggaagacggagaaggtcagcatcatccggtccgggtactcctccctgatcttggagatgagcagggtgcccataccggagcccgtgcctccgccaagcgagtggcacacctgaaaaccttggaggcagtcgcagttctcggcctccttgcggacgacatcgaggacggagtcgatgagctccgcgccctcggtgtagtgccccttggcccagttgttgccggcgccggactggccgaagacgaagttgtccgggcggaagatctggccgtagggccccgtgcggatggcgtccatggtgccgggctccaggtccatgagcacggcgcgcggcacgaaccggccgcacgacgcctcgttgtagtagacattgacgcgctccagctgcaggtccgacgtcccaacgtaccgccccgtcgggtcgatgccgtgctcatcgcacaccacctcccagaacttggagccgatctggttcccgcactgcccgccctggatgtgcaggatctccctcatcttcctctcacctcgggggagaaaacaatcggtattcgggtttgtattccttggggtagtcggtaa

SEQ ID NO: 32870 - DNA, 1003 bp, Setaria italica
  Peptide Sequence Number=SeqID_98844
taacatggcaacaaaacaacgcaaggaacaacccaactcgaaatactgcctgccatagaaggctacaaccaccagagcctcatggtcacagatctcacatgtcgtcggggttcgatctcctcttcctcgtcctcgtactcaccctcctcgtcggcggtcgcgtcctggtactgctggtattccgacacgaggtcgttcatgttgctctctgcctcagtgaactccatctcgtccatgccctccgcctgtgtaccagtgcaagaaagccttcctcctgaacatggctgtgaactgctcgctcaccctccggaacatctcctggatagaggttgagttgccaatgaaggtggacgccatggacaggcccccttggcgggatgtcacacacactggacttcacgttgttggggagtccactccacgaagtaggacgagttcttgttctggacgttgatcatctgctcgtccacctccttggtgctcatcttcccacggaacatggcagaggcagtgaggtaacgcccatggcgagggtcagcagcgcacatcatgttcttggcatcccacatctgctgtgtgagctcagggacagtgagggcacggtactgctgggagccacgggaggtcagtggggcgaagccgaccatgaagaagtggagacgggggaaggggatcaggttcactgccagcttccggagatccgagttcagctgaccagggaacctaaggcagcaggtgactccactcatggtagcagagatcaaaatggttcaaatccccaaagctaggcgtggtcagcttgagagtcctgaagcaaatgtcatagagggcctcattgtcaagaaccatgcactcatcagcattctcaaccaactggtggactgaaagagtggcattgtatggctcaaccacggtatcagatactttcggtgaggggaaaactgagaatgtcagcatcatgcggtcagggtactcctccctgatctttgagatcaacagcgta

SEQ ID NO: 32871 - DNA, 2328 bp, Setaria italica
  Peptide Sequence Number=SeqID_98845
gaaagtagaagcaccgccacactccgctgctccctccccgtcccccgcactccaccacacgccgccgccgcccgtccgatccgcgggatcttccaggagagcgcgctccgcgccaagcggcggccatggcgctcgccttcgacgagttcgggcgccccttcatcatcctcagggagcaggagaagaagacgcgcctgcgcggcctcgacgcgcagaaggccaacatcgccgcgggcaaggccgtcgcgcggatcctccgcacctcgctcgggcccaagggcatggacaagatgctccagtcccccgacggcgacgtcaccatcacaaatgatggggcgacaatcctggagcagatggatgttgacaaccagattgcgaagctgatggtggagctttcccgcagtcaagactatgaaatcggagatgggaccactggggtcgttgtcatggcaggggctctcttagagcaggctgagaaacttctggaacgtggtattcacccaataagggttgctgaaggttatgagatggcatcaaggatagcttttgatcaccttgagcacatctcccgaaagtttgagttcagtgcagacaatatagagcccctggttcagacatgcatgactacgctgtcgtcaaagattgttaaccgctgcaagcgggcactggcagagattgctgtcaaagcagtccttgcggttgctgatttggagaggaaagatgttaacttggatttgattaaagtagaaggcaaggttggtggaaagctggaggacacggagctcatacatggaattgttgtcgacaaagatatgagtcacccacaaatgccaaagagaattgaggatgctaagatagccatccttacttgcccatttgagcccccgaagcctaagacaaagcataaggttgacattgacactgtagagaaattccagaccctgcgcgagcaagagcagaagtactttgatgaaatggttcagaagtgcaaggatgctggtgcgaccctggttatttgtcagtggggttttgatgatgaagccaatcatctcttgatgcacagaaatttgccagctgtcagatgggttggtggtgttgaattggaattgattgccattgctacaggaggccggattgttccgagattccaagagctgagtcctgaaaagcttgggaaggctggattagtcagagagaagtcatttggaacaaccaaggaccggatgctttacattgagcagtgtgccaattctagagctgtaactattttcattcgtggtggaaacaagatgatgattgaggagactaagcgcagccttcatgatgctctttgtgtggcaaggaatcttatccgcaataattcaatcgtgtatggtggtggctcagcagagatatcttgctcgattgctgttgaaactgctgcagatcgacaccctggagttgagcagtatgctatcaggtcatttgctgatgcattagatgctgttccactagccttagctgaaaatagtggtttgccgcctattgatacattaactgtggtgaaagctcagcaagttaaggagagcaacccccacctgcggcatagactgcaatgacgttggcaccaacgacatgaaggagcaggacgtctttgagactctgattggcaagcagcagcagatcttgcttgccacgcaggtggtgaagatgatcctcaagatcgatgatgtgatctcgccgtccgagtactgatgaaacctgagaaggggcagttgtgcttggtgacaatctatcagtaggcagcatttctgatgtgctgacaccttcatggtgcttatttttgagaagtctagttggatacaagaggggcacaagttgtgggacgtcaaagacacatgcttcatgttgagacggttgccagtccgtgttctgcgccagaggggttgtgaggcgagtcaggtttgtgtagggtgccggcagagccgcactgcggtgctgctgtccaaaagaaccattccacatgctgtaagggtcattttcaattcatgctgattttcatgagcttattccagacccaaatcagcctcaaaatcttgtaggaatttgttaaagttactagtcagaaatgatggttttgttttggtaaatttatcgtttgttggcttgttgcaataccatcatttttgttatgacgatattacaagtgtctctttcatagtactgcgaaattgccaacacagcttgtccaggtgtagtgaattcggacaatgcgaatacggttgttgcaataccagtttgtgtacaatctaagcttgcacgaaactactagcgatatgcttgcaaatt

SEQ ID NO: 32872 - DNA, 1784 bp, Setaria italica
  Peptide Sequence Number=SeqID_98846
ttttttttttaaactacaaaactacaagagtgtaatcatgctaacatatacagaacagggagtgaccccagcacatgaagaataaacaaacgcacagaacctgaacaacgatgaccaccacaagttcacaacaccaccacaaaccagtactagcagacacaactgtagatacacgcacaagctagcagcagtaacaagtgcagacacggcagtaacaatgcatataggtacaaactttaggcagtaggaatgtatagcgagcgcctcgattggcatagcataggagacgaaactcaagcccctctgtggatcaattcaccgaacgacgtccggtcatcagacgtgctcctcgtcgccgtcctgctcctcctcgtcgtattcctcctcggcggtggcgtcctggtactgctggtactcggcgacgaggtcgttcatgttgctctcggcctcggtgaactccatctcgtccatgccctcgctggtgtaccagtgcaggaaggccttgcgccggaacatggccgtgaactgctcgctcacgcgccggaacatctcctggatggaggtggagttgcccacgaaggtggacgccatggacaggcccacgggcgggatgtcgcacacgctcgacttgacgttgttcgggatccactccacgaagtaggacgagttcttgttctgcacgttgatcatctgctcgtccacctccttggtgctcatcttgccacggaacatggccgacgccgtcaggtaacgcccgtgccgcgggtccgccgcgcacatcatgttcttggcgtcccacatctgctgggtcagctccggcaccgtcagcgcacggtactgctgcgacccgcgcgacgtcaagggggcgaaccccaccatgaagaagtgcagccgcgggaacgggatcaggttcacggcgagcttccggaggtccgagttcagctggcccgggaaccgcaggcagcaggtcacgccactcatcgtcgccgagatcaggtggttcaggtcaccgaacgaagggttggtgagcttgagggtgcggaagcagatgtcgtaaagcgcttcgttgtcaaggaccatgcactcgtcggcgttctccacgagctggtgcacagacagcgtcgcgttgtagggctccaccacggtgtcagacaccttgggcgacgggaacacggagaaggtgagcatcatgcggtccgggtactcctcacggatcttggagatgagtagcgtgcccatgccagaacccgtgccgccacccagggagtggcatacttggaacccttggaggcagtcgcagttctcggcctccttgcgcacgacgtcgaggacggagtcgatgagctcggcgccctcggtgtagtgtcccttggcccagttgttgccggcgccggactggccgtagacgaagttgtcggggcggaagatgctgccgaaggggcccgcgcggatggactccatggtgccgggctccaggtccatgagcacggcgcggggcacgtagcgcccgccccccgcctcgttgtagtagacgttgatccgctcgagctgctgcgcggaggcccccgagtatcggcccgtggcgtcgacgccgtgctccccgcagatcacctcccagaacttggcgccgatctggttgccgcactgcccgccctggatgtgcaggatctccctcatcttggcgacgacggtcctcgcgccgcggtggcgatctggcctctgtggtagggatgggatcggaggaggaggaggacgtgggagcgaggccgggggagggagatcga

SEQ ID NO: 32873 - DNA, 1863 bp, Setaria italica
  Peptide Sequence Number=SeqID_98847
tttttttttttttttttttaacccttaaattttaaattttaattacggaaacttgttgccaatggtagtggtttggatggtaaagaagttgcctaacagtagtaattaatcgtcagacacatgagaaataacagttgaaagcagcagggtagggtagtattgcacacaccatcgtgtgctgccctgcctctgcctacctgttttaacaagcactaataagattaacaaggaagtaaacaacacaaggcattaagattaaataggaagcagcagcaagcaacacacatgaatggatcagctagtagcggtgcttagtcctggaggtcttctggttcctcctcgtcctcctcgtagtctccctcctcgtcggcggttgcgtcctggtactgctggtactcggacacgaggtcgttcatgttgctctcggcctcggtgaactccatctcgtccatgccctcgcccgtgtaccagtgcaggaaggccttcctgcggaacatggcggtgaactgctcgctgacgcggcggaacatctcctggatggaggtggagttgccgatgaaggtggaggccatcttgaggccggtgggcgggatgtcgcagacggtggacttgacgttgttggggatccactccacgaagtaggaggagttcttgttctgcacgttgagcatctgctcgtccacctccttggtgctcatcttgccgcggaacatggcggaggcggtgaggtagcggccgtggcgggggtcggcggcgcacatcatgttcttggcgtcccacatctgctgggtgagctccgggaccgtcagggcgcggtactgctgggagccgcgggaggtgagcggcgcgaagccgaccatgaagaagtggaggcgcgggaacgggatgaggttgacggccagcttgcggaggtcggagttgagctggccggggaagcggaggcagcaggtgacgccgctcatggtggcggagatgaggtggttgaggtcgccgaagctcggcgttgtgagcttgagcgtcctgaagcatatgtcgtagagcgcctcgttgtcgagcaccatgcactcgtcggcgttctcgacgagctggtgcacggagagcgtcgcgttgtacggctcgacgacggtgtcggagaccttgggcgacgggaagacggagaaggtgagcatcatccggtcggggtactcctcgcggatcttggagatgaggagggtgcccatgccggagccggtgccgccacccagggagtggcaaacctggaacccttgcaggcagtcgcagttctccgcctccttcctgacgacgtcgagcaccgagtcgatgagctcggctccctcggtgtagtggcccttggcccagttgttcccggcccccgactggccgaagacgaagttgtccgggcggaagatgttgccgtaggggccggagcgcaccgagtccatggtccccggctcgaggtccatgaggacggcgcggggcacgaagcggccgcaggaggcctcgttgtagtagacgttgacgcgctcgagctggaggtcggagtcgccgccgtagcggccagtggcgtcgatgccgtgctcggcgcagaccacctcccagaacttggcgccgatctggttgccgcactgcccgccctggatgtgaaggatctccctcatcttctcctcctcctccttcttcctggatggatttgagatttgggaggcggcgagcgaaaggggatttgagatttgggagatgaaaaaggggaaggacgttagtcagagagaagtccttcggaacaacaaaggaccggatgctttacattgagcagtgtgccaattccagagctgtaactattttcattcgtggtggaaacaaaat

SEQ ID NO: 32874 - DNA, 2090 bp, Setaria italica
  Peptide Sequence Number=SeqID_98848
cgcactcggcttctcccctccctccccgcccgcactccacccgcgccgccgcctccccctccccctcccgatccgggcgccggccatggcgctcgccttcgacgagttcgggcgccccttcatcatcctccgggagcaggagcagaagacgcgcctgcgcggcctcgacgcgcagaaggccaacatagccgccggcaaggccgtcgcgcggatcctccgcacctcgctcggacccaagggcatggacaagatgctccagtcccccgacggcgacgtcaccatcacgaatgatggggcgacgatcctggagcagatggatgttgacaaccagattgccaagctgatggtggagctgtcacgcagccaggactatgaaattggggatggtaccacgcgggttgtcgtcatggcaggggctctcctggagcaggctgagaagcttctggagcgtggtattcacccaattagggttgctgaaggctatgagatggcgtcaaggatagcgtctgagcacctagagcgcatctcccataagtatgagttcactgccgacaacattgagccactggttcagacctgcatgacaactctatcgtcaaagattgttaaccgttgcaagcgggcactggcagagattgctgtcaaagcagtccttgcggttgctgatttggagaggaaggatgttaacttagatttaattaaagtagaaggcaaggttggtgggaagctggaggacactgagcttatatatggaattgttgttgacaaagatatgagccacccacaaatgccaaagagaattgaggatgctaagattgccatcctaacgtgcccattcgagcccccgaagcctaagacaaagcataaggttgacattgacactgtagagaaattccagacgctgcgtgaacaagagcagaaatactttgacgaaatggttcagaagtgcaaggatgctggcgcgaccctggttatttgtcaatggggcttcgatgatgaagccaatcatttgttgatgaacagaaatctgccagctgtgagatgggttggtggtgttgaattggaattgattgccattgctacaggaggacggattgttccgagattcgaggagttgagtcctgaaaagcttgggaaggctggattagtcagagagaagtccttcggaacaacaaaggaccggatgctttacattgagcagtgtgccaattccagagctgtaactattttcattcgtggtggaaacaaaatgatgattgaggagaccaagcgcagtcttcatgatgctctctgtgtggcaaggaatctaatccgcaataactcaattgtgtatggtggcggctcagcagagatatcttgttcaattgctgttgaaaccgctgcagatcggcaccctggagttgagcagtatgctatcaggtcgtttgctgatgcattagatgctgttccactagccttggctgaaaacagtggtttgccaccaattgacactttaactgcagtaaaagctcaacaagtaaaggagagcaatccccactgcggcatcgactgcaatgacgttggcacgaacgacatgaaagaacagaacgtcttcgagaccctgatcggcaagcagcagcagatcctacttgccactcaggtggtgaagatgatcctcaagatcgacgacgtcatctcaccatccgaatactgatgaacccgagcccgacgggcagctatgcttgatggcagttcagtctattaggcaggcattgctggggtggtggtgatttgctggggtccgcttgttgcattcgatgagctgcctacctgtttttgtgtgatgcttgcgagattgtttgtattgcatgataggaccgaaggatacgcttgcaattagcctacctcttcagatgtttgcagtattgtttctttgttagagttttcacggcttttgctgaagccttgtccatttcagatccttcggaaactgtctcttctggacggcgttacaatccaaaagcgcgccactatgtctaaggctaccctggctggaccctaagccaggtcggtccaacactacatggaaccctaaacataagcacgaaaga

SEQ ID NO: 32875 - DNA, 1732 bp, Setaria italica
  Peptide Sequence Number=SeqID_98849
gaagcttttaacataaactgccgatgcaccaccgaacatattactgatgaattctactaatgcataagacacttgtactgctggagtaatggtataacaacaatgatttaagctacctcatagaaataacagcttgagcaacataaacacaaagaaatgcagttttttcaccacaacatcgcattcataagaaataccacccacctatcacctaacatcaccacaagcacctcaagcgacataatgactaacagcgatacaagggatatcacatctgtagcaagcacagggaaaggtagcttattcagcaatctcctcttcctcctcctcgtactcctcttcatcctccgccgtggcatcctggtactgctggtactcggccaccaggtcgttcatgttgctctcagcctcagtgaactccatctcgtccatgccctcacccgtgtaccagtgcaagaaggccttcctcctgaacatggctgtgaaactgctcgctcacgcggcggaacatctcctggatggaggtcgagttgccgatgaacgtggacgccatcttcaggcccttgggcgggatgtcacacacactcgacttcacgttgttggggatccactcaacaaagtacgatgagttcttgttctgcacgttcagcatctgctcatccacttccttggtgctcatcttcccacggaacatggcggatgcagtgaggtagcggccatggcgagggtcagcagcacacatcatgttcttggagtcccacatttgctgggtcagctctggtacagtgagggcacggtactgctgggagccccgcgaggtcagtggagcaaatccgaccatgaagaagtgtagacgtgggaaggggatcaggttcactgcaagcttccggaggtcagaattcagctgaccagggaagcgcaggcagcatgtgacaccactcatggttgcagagataaggtggttgagatcaccaaaggttggtgttgcaagcttgagcgtgcggaagcagatgtcatagagagcctcattgtcgagcaccatgcactcatccgcgttctcaacaagctggtgcacggagagcgtggcgttgtagggctccacgacagtatcagacactttgggcgacgggaagacagagaatgtcagcatcatcctgtccgggtactcctccctgatcttggagatgagcagtgtgcccattcctgagccagtacctcctcccagcgagtggcagacctggaaaccttggaggcagtcgcagttctcggcctccttacggacgacgtcgagcacggagtcgatgagctctgcgccctcggtgtagtgtcccttcgcccagttgttgccggcgccggactggccgaagacgaagttgtcggggcggaagatctggccgtagggtcccgagcgcaccgagtccatggtcccgggctcgaggtccatgagcacggcgcgcgggacgaaccggccgccgccggcctcgttgtagtagacgttgatccgctcgagctggaggtcggagtcgccggcgtacttgccggtgtggtcgatgccgtgctcgtcgcagatcacctcccagaacttggccccgatctggttgccgcactggccgccctggatgtggaggatctctctcatggcgccgggttggggggcggggcggggcagcggcggcgggtgagggctagggttccggcgaggcggtggggtttgggaggtttggggaggcgg

SEQ ID NO: 32876 - DNA, 1820 bp, Setaria italica
  Peptide Sequence Number=SeqID_98850
cagtctctttttagttttttaacttttagagatgggaaatcactcactactaccaatactcgtcagaaattacaggcgaccagctcgaggagagcactatcagtgcaaagccataagctacttgaccaaggtccacgggatgcggagcagaaacggacggcgacctattacagtaggtacattacaggtgaccgcagccgaagcacagacgcaacctcaacgacgacgacaatgtacgtgatcaatccatcatgcaaaagccacgagaagcatagaagacaaactcaattcacagggacacaacctggccggcgacggccgctcatcgctattcggccacagcttcctcttcctcctcatcctcgtactcctcgtcagcggtggccatcctggtactgctggtactctgcaaccaggtcgttcatgttgctctcagcctcggtgaactccatctcgtccatgccctcaccggtgtaccagtgcaagaaggccttgcgcctgaacatggcggtgaactgctcgctcaccctgcggaacatctcctggatggaggtggagttccccacgaaggtgcccgccatcttcagccccttgggcgggatgtcacacacgctggacttgacgttgttggggatccactccacgaagtaggaagagttcttgttctggacgttgagcatctgctcgtccacctccttggtgctcatcttcccgcggaacatggctgaggccgtgaggtagcggccatgggcgggggtcggcggcgcacatcatgttcttggcatcccacatctgctgagtcagctcagggacggtgagggcacggtactgctgcgatccacgtgaggtcagcggcgcaaagccaaccatgaagaaatggagacgagggaacgggatgaggttcacagcaagcttgcgcaggtcggagttgagctgaccagggaacctcaggcagcatgtgacaccactcatggtagcagagataagatggttcaggtcaccaaaggtaggggtggcgagctttagcgtgcggaagcatatgtcatacagagcttcattgtcaagcaccatacattcatcagcattctcaacaagttggtgaaccgaaagtgtagcattgtatggctccacaacagtatctgaaacttttggcgatgggaagacagagaaggtcaacatcatcctatcagggtactcctccctgatcttagaaataagaagggtgcccatgccagatccagtgcctcctcccaacgaatggcaaacttggaaaccctggaggcagtcgcagttctcggcctccttgcggacgacgtcgaggacggagtcgatgagctcggcgccctcggtgtagtgtcccttggcccagttgttgccggcgccggactggccgaagacgaagttgtcggggcggaagatctggccgaaggggcccgagcgcacggagtccatggtccctggctcgaggtccatgagcacggcgcgaggcacgaaccgccccccgcctggcctcgttgtagtagacgttgatgcgctcgagctggaggtccgagtcccccgcgtagcggcccgtggcgtcgatgccgtgctcgtcgcagatcacctcccagaacttggcgccgatctggttcccgcactgcccgccctggatgtgcaggatctccctcatggctgacgccgccttcgccggtgacttcgccggagcggctggggtcggagggggagcggcgcgggtgtgggtcgggtgcctggtggtgcgcgtgtgctggcggggctgcggcttgtggtttgggtgaggactgatttgaaatggtgcttta

SEQ ID NO: 32877 - DNA, 1267 bp, Setaria italica
  Peptide Sequence Number=SeqID_98851
cgccgtgtgagtgagcagttcactgctatgttcaggaggaaggctttcttgcattggtacactggtgagggcatggacgagatggagttcactgaggcagagagcaacatgaacgacctggtgtccgagtaccagcagtaccaggatcccgagggtacaacaggcgacaggggtccagatcaccttactcgtcctggatcgcctcctcatcctcgtactcaccctcctcatcagcagtggcatcctggtactgctggtactcggacaccaggtcgttcatgttgctctctgcctcagtgaactccatctcgtccatgccctcaccagtgtaccaatgcaagaaagccttcctcctgaacatagcagtgaactgctcactcacacggcggaacatctcctggatggaggtggagtttccgatgaaggtggaggccatggagaggccacgtggcgggatgtcacagacgctggacttgacgttgttggggatccactccacgaagtaggaagagttcttgttctggacattgatcatctgctcgtccacctccttggtgctcatcttgccacggaacatggcagaggccgtagaaggtagcggccgtggcgcgggtcagcagcgcacatcatgttcttggcatcccacatctgctgggtcagctcagggacggtgagggcacggtactgctgcgagccacgcgaggtgagtggcgcaaagccgaccatgaagaagtggagacgagggaaggggatcaagttgacagcaagcttgcgaaggtcagagttcagctgtcctgggaagcggagacagcaagtgacaccactcattgtagcactgatcaagtggttcaagtctccaaagctaggagtggttagcttcagagtacggaagcaaatgtcataaagagcctcattgtcaaggaccatgcactcatggtcggctttgcgccactcacctcgcgtggctcgcagcagtaccgtgccctcaccgtccctgagctgacccagcagatgtgggatgccaagaacatgatgtgcgctgctgacccgcgccacggccgctacctcacggcctctgccatgttccgtggcaagatgagcaccaaggaggtggacgagcagatgatcaatgtccagaacaagaactcttcctacttcgtggagtggatccccaacaacgtcaagtccagcgtctgtgacatcccgccacgtggcctctccatggcctccactcacacggcggaacatctcctggatggaggttgga

SEQ ID NO: 32878 - DNA, 586 bp, Setaria italica
  Peptide Sequence Number=SeqID_98852
agccaatgtaccacttggggagagtgtaagccgttctcccttccttggcgagtctttcaagcaagttaggggtgaagtttttgcaaatgattgaggctttggccgtgactttttaggtggtgatggctcactccgccataatattttcgacaaagatgatattgtcgaaaatgttgcagctacacctcttgacaaaattgctccaacaattgacctgcctctatcttctgatagcctatatgctgaaactacagcatcctctccaactgtgatggcacaatagtggcgctgacttgactgcccagcaatataaaagcagctgaagttctaacaagggaggtggcatcagaccaacaattgcagcatcagcacaagaaccaaacttgcttacattccaaatccgaaagggtatccttccaaaggaaccttcatcactagcatcttcctcttcaaacttatctttccacagacgggattttacatcttgaaatgatttttgaagaatgctctgaaggtcagcaccatcgaagcgtgcgataacaccaggaaaaactacagaaagttcatttgaacctgaattctttct

SEQ ID NO: 32879 - DNA, 388 bp, Setaria italica
  Peptide Sequence Number=SeqID_98853
aaaacaattgtaatttattagctaaaatacttctaagtggctgaagaccaacagaaaaatcaaaccaaccccagaatgtcatcgttcagcactggtagaaccaaaagatgattgtaaacacgaaatcaacaatgaggcaaccatgagacttacctctattatgccccacggaaaggcatagaggtttggattgctaggcacaaacagtagtcactctttgtatattctgtatgcattgaacttgatgaagccttgtctttatttagaagcatctccacaaatagacatgaagcatcacgatagccctataaaattattacattggaaatgataatagacatgaagcatcacgatagcaaaagatataaaaatgacaatccaaaaaaga

SEQ ID NO: 32880 - DNA, 1177 bp, Setaria italica
  Peptide Sequence Number=SeqID_98854
caaaacacagctttattcattttcttcgatcggcaaaattgtaagcactgtcaacaaatatttctgtacaacacttgcagtaacaatttaataccacaaaagaacagacaatagtcatccaacgtgactattcaaaactgacaactgtccagagtctccattgaacaagtaaacctccagtggggtatacgagtatgttgatgagagcctcgctgagggttgcaagattctgctccctttggggcatgggatagttaggaggcgtgacccagtccgcatcttccaaacctctattatgcctttccgtggggcatggattgctaggcacaaacagtagtcactctttgtatattctgtatgcattgaacttgatgaagccttgtctttatttagaagcatctccacaaatagacatgaagcatcacgatagcccttccataaccgcacagccacaagggcatgagtgtccagcagtagaatccgcccaagtgaatcagttatggcagccaatgtaccacttggggagagtgtaagccgttctcccttccttggcgagtctttcaagcaagttaggggtgaagtttttgcaaatgattgaggctttggccgtgactttttaggtggtgatggctcactccgccataatattttcgacaaagatgatattgtcgaaaatgttgcagctacacctcttgacaaaattgctccaacaattgacctgcctctatcttctgatagcctatatgctgaaactacagcatcctctccaactgtgatggcacaatagtggcgctgacttgactgaagttctaacaagggaggtggcatcagaccaacaattgcagcatcagcacaagaaccaaacttgcttacattccaaatccgaaagggtatccttccaaaggaaccttcatcactagcatcttcctcttcaaacttatctttccacagacgggattttacatcttgaaatgatttttgaagaatgctctgaaggtcagcaccatcgaagcgtgcgataacaccaggaaaaactacagaaagttcatttgaacctgaatcttcccaagcgttctccttccgctcacgaaagttgagtttcagtatctttgcaggatatatactctgcttgtgcagtagatcgccggctagcgagtagaacagcagccacccggtg

SEQ ID NO: 32881 - DNA, 256 bp, Setaria italica
  Peptide Sequence Number=SeqID_98855
gtaaactcctgtccaatagcatggcactaatgaagcagttggatcccagttcattacatttcatttacataacccactatatttcttcattcttgtagtattgggtatgtgttacagttacagcataacatgctatggacgataacatccttgctaaggccatggtgggtaggacagaatcaaattcaaatccttcggatttaatttacatttgaaccaaaacgtgaaaattcccatagtaacaccttttatgttt

SEQ ID NO: 32882 - DNA, 489 bp, Setaria italica
  Peptide Sequence Number=SeqID_98856
ggccgtcccggcctcccgcgccgcgccgtcggaggccgcggccaagcaggccccgccgagcgccggtgagggcgtcatgaacttcaccttcttctcgcgtgcaacagcggccgcgaggacggtggcggtgaccacctcgtcggtctgctccggcaacggtgaccggagccagcccaagaggagcagccaccaccagctcctggactgctccatattgtcattggacaaggggcaaggttggtattgtgcagcagaatgaaagtggctcttccgagcgtgggtccatctagtcagtgaggaaaacttaacagcaatggacgggaatggcaatcaagggaaaggaatttgaaacaatagcagtgtggggaagctaagaattccaatagtattgaaggaagcgctataaaattttagtggtcatcgagggaatttactcaaaattaaacgaaaggaaccgatcgagaggtcattcatgcatatcgctggtag

SEQ ID NO: 32883 - DNA, 300 bp, Setaria italica
  Peptide Sequence Number=SeqID_98857
tgatggactgaggaagtatgagggagggtacaatatcactgacaagcattattggagttcgaccatatttacaggtagatctggatacgtgattgcagcactgtgggtaattggtggtatcatttttctgggaactatattagtctccaagattttatgcacaaaaaggaaagaaagatacactgagttcgactttttcctagagagatacgaaattttgactgtgatactgtgcatcatccttgcagtttttgtcatagttgcatcagcagtcgctcttcgtggcacagtacaattcca

SEQ ID NO: 32884 - DNA, 399 bp, Setaria italica
  Peptide Sequence Number=SeqID_98858
agaaggtagaatccaaatagttgtgcatccagtatctgctgtactcgtaagtgcagaagaagacagcattaccaatcgcctctctgaacaatgtggctaaaccaccacggaatatgcccctaagcccttcactttccaatgttttcacagcacaatcaagagggctggagtacctagtaccatgcattacatccttcccttgaacttgcattctgcactggaaaaggtcttgacatgacatcattaagtgccacctgaatcatgcatctaagtccttacatcaattagggaaaagagggaatttagacataacactgaccttagtcagctcagttggagtgaggatacagctaatcagcgctccactacatgcagcagaaggaatgattacctgtagag

SEQ ID NO: 32885 - DNA, 772 bp, Setaria italica
  Peptide Sequence Number=SeqID_98859
ccaccatttccacgcttgtttgatgcaaagtagaagatagaagtggagcacgaagattccacaaagatgccaccaagtttacagagttcttagtatagccttcctccttttcatcgctgtggaggaaaaaaaacatccgtgccatgaaccaaaaagaaatgttccattcagtgtatttcccagtccaattccgggacaagtgcaaagtaccttaatactagcctcgcttaataccaagaatcttagcactgtactcccaggcaacaattgccgctgcattggcagggaaagctcttgctagtgtcggtccaaggccagcatagcagccactcatcccagctctcttataaaccatgcttaaaactcgaaagggtttcggctcaaatgagggtccggatcggtctgtatgacagtttttgcaacatccagtggtagggtagctgtccagaatgccattccactaatgccaccactcatgacccctatcccaatgtcttttgccataacaaaatgactgctactagaaaaccgaggtgaatccaaatagttgtgcatccagtatctgctgtactcgtaagtgcagaagaagacagcattaccaatcgcctctctgaacaatgtggctaaaccaccacggaatatgcccctaagcccttcactttccaatgttttcacagcacaatcaagagggctggagtacctagtaccatgcattacatccttcccttgaacttgcattcttagtcagctcagttggagtgaggatacagct

SEQ ID NO: 32886 - DNA, 382 bp, Setaria italica
  Peptide Sequence Number=SeqID_98860
agtagcgggtagtagtctgagtaagatggggagattgttttcagtgtcttgagatgttcaggattttgagttgggaagaacagcaaagagaggaatttaagcatgggatgctttcatgttgggctgggcaaacgggtgtgtcgtgatagtacactggaagtcgcgtttgcttttcttgccggctctcctttgccttgcactcggcggcggcgcagctcggctcgatggagacgaaggtcaatctggtggcagcggagatcgatttggcagaggagaaggtcgatccggcgagcgcggaggttgattttgtagttgaaaagctcgattcggtagcaacggaactcaatttggcgccggagaacttcgatttgggggtggaaga

SEQ ID NO: 32887 - DNA, 3061 bp, Setaria italica
  misc_feature (2997)..(3061): n is a, c, g, or t
  Peptide Sequence Number=SeqID_98861
caacggtgttggcttcctaaaccattgagctgaacgaaatgttgaagacactcttcgttcagctcaacggtgttggcttcctaaaccattggcttcaggatgctcaaaattgtggcgagaaggtcagcagttcagctgaggatctaatagttgcaatattaactgcgttggagtgccttccaatcaatagtgagcactcaacttcttgtggagttatgtctactgttaatcacctacttgcccatggaaatgctgtgatcaaccaaaaggccagagcactctgtcagaagtggagcactgtaccaaaatatggtgcaaatgctgaacattttaatacagaggaggcatgccagactgatcagaagtctccagaagttagcctcaagacagaaattgacaaacagagtgtagcaaacgaagttgaaaatactgttgatgaaccaaaacctgaggtgacaacttgttcagatgcacctttgcctgatccttctctaaccaatgataatacagatgcaacaaagcaaccactggggccggcatcaccaaatttgtcaaatggaaagacaacattaggagattcgaagaacttggtaccatcccctacatccacatgtcatgtgggtttagaagatggacagtccattaccaaggaaacttctgcttcaaatgatgtagatttgtccgctaatggcatactccgatcaaactctatcaatgcaaagagtggttctgggcaagatgcaccttcggatgctactccagcggccatgtctgtagagcctaataaacctcaaaggctgtttgtgagtagcaaaatggatttggaggataatattgtttcaactagctcatgtatcaaggaatctgagccatttgcagcaggtagaccacatctggagaaggatacagcagatactttaaaccatcttgctgttgtaacccgtgagttgcaagatttgtctgaggaaagtacaggcaaagaagagggacctacaccatcatctagtacagatgatatgggcatgggcagtgattatatattgaagagatgcatgaagagttttgggggttcctcgaaggcaacagacacaaaatcaactgtattgaaaggggagaaatcaacacgactaacagagtatgatgatacagatgcactagaagtagcacgtctggtagctattgaggtagaacgggaggtcatcgactacagagggcccttttgtggttctcctgatattaattccaggaatgctgatagtcctgacttggaagcacggcggcagcctgtacctgatgaactgaatgacaataaatcttccactacaggtgctgattcaggaagttcctcatctcttaaggaggatggatcaggcattacagatggcagtggtccgttgagtaggaaacatacacggcgtgtggaactggggaacttagacctcaatgaaaatcagtgtcctgaggaagctgactgtaatcaaaagtccatccttagtaattctgtcaatttgtcaatgcctaaagctgtggctgcttcaagaggctcatctgtgtttccagctcgactccactttgaaggtgaacttggctggaaaggctccgctgcaaccagtgcctttcgaccagcttcacctcgacggactcccgatgcagagaagtccctatcagcttcttcacataagacaagcaacgtgttgtttgatttaaatgtagctgacagtgatagtgctacgtctggtgagccactctcaacagcaatcctgccagcttcatctgacctagcttccaagggtgcttctacagcagttggtgtgagcggaggactgaaacttgaccttaatttctcatgtggggatgaggaagatgtaaccactgcaagcaatttaccgccactgtggaaccgccaacagttcaatggcaactggagccagccttcttcctcctcatcttcgaggcaacctgcagtcagaaacttcgacttgaatgacagcatgtcaatcgctgatggttctggacgaggaatggatgggtcttctgtcaaggctcttgcaaaggatacatctgaccattctgccgtcacaattatgggtaagagaataattgttgggcagcaagaacatgggcaacactaccagcataactttctgggactgagtgcggaatcaagagttcctgcgagatctattcagtcatttgcacatacttctgattataatggtgtcagttatccatctcaacctgctatgcctttcccgccagctttctttgcccccggaggcgttccgtacatggttgatgcaaagggtgcaccagtcataccaccactatcaggcttaagcctgggcatttctcatccatctttcaacaccagagcaaccccaccctcatctaatgaattgagttactatcatcctagcatggatttcaattacagactgccatctgaaggtgcacgtagggaagcaggaagctactggcctgtgtcctaccagggtcacaccgtctttatggatgaacgcatgaggaatatgtcacagggtggcagttccgggttggtgacgaagcgaaaagagccagaatccggttgggatatgtactcgcgtcgttgagcttgaaggtctgttgcatctgtaatcgattttgtcttgttttctaaatggtttgttcaatgttccgtttatggcggcaccttggacattgtattctagggtatttctttggctccagaaaatgggtcagctctattaggtctgaagacatacacggagaactgaataagagatcagctacaggtagctttgagagacgttgacatggcatggacattgttagctgctggaaaaccaccttgtgtagatctggttctttgtgaatgtattagcttgttttagttgacataatatagccaaattgctctctgcggaaagctgaaattatgtaaatcatcgtataactcatagatgaaatgcatcctccttttttcatattcaaaaaaannnnnnnnnnnnnnnnnnnnnnnnnnnnnnnnnnnnnnnnnnnnnnnnnnnnnnnnnnnnnnnnn

SEQ ID NO: 32888 - DNA, 642 bp, Setaria italica
  Peptide Sequence Number=SeqID_98862
aaccctttttggttcatcttgatgaaatttgattactttcctctcagccagaccatacctgataatggctttcttgaattgcttcttgcttttaaacaacatgcccaaagcaaatatgggtgttcctctagtctccttgaaccttgtaaagctgttgtccttcctacttaactctccatcactatccaaatcatttattgagtctacatcatcactgctttgagcatatgcagtctcactaccatcgtcttggcttccttcaaaacctgctggcatagcagtcgacccttccagaacaacatcatcaagtgaggcaatatgtcctcttttcaaatccttcttaaagtccttgaatttcctcagaatatcaacaccctcattgtctgcttctgaagatgaatcatctccacgcatgtagtcactatctgagctagaatgctcatcttcatcctgcttctcctcttcttgttttcctttatctttcttcacttgtgcatccttccctttcttacttgggctcctgtgaaactccttaagcttcttgatctgcctctccacaacttccctggagtctggttttgcagatatcaaaattaacttaagtaactaaattaactttaacccctaaagtttaaacgtaaa

SEQ ID NO: 32889 - DNA, 891 bp, Setaria italica
  Peptide Sequence Number=SeqID_98863
ctctccagtcacaatatgccgtgtaatgttctccaagactccaatgcctcgtaatccattcagcagataacagcattcaaggtttcattgtccacaaagctgatcccatccgagcactcgtttccagcacacgcaagatcgctatcctgtcttagcaggctaggcgactcgcgcaccccacggatgtagttccttatgagttcgttgtgctcctgatcgccgaccgaagaaaccgtgtcgcattcggagacgatgctcaatctcgacacgctcctgtcactgaactgcctctggaaactgcttgcccccgcttcctcaaagctaaactcctctaggacaaagcatggtttgaatctggaaccatgtctctgcggccggttgccgaccaaatagttaggaagtctttacgtgccttttgaagaggtgtcttgatgcgaaaccgcccattcctgggcttccagattgtgatgtgcaaggtcaccggtttcagctgattgtttggtaggaactttgttttactcggaagaggatgcagaataggaggagccgacccaggaagttccgcatcatcggtaaatgggttcatctgtcgtgatgaaattgaaataggctgaagtcgggaatgtgacaaatcatctgctatatcacccatgctgtctagctcaaatcttatgttttttcttgattttctcctcaccatcagagtctccaacctacggttgcgctcaatctcggagtacccaagatccatgacattcttctcattgtcagctgtccacaaaagcgcaggctcagttccagcatcctcctcctacaccatcatcgtggccttgctattgtcagccacaacattactatcactttcaacttgagaatcatgagaggcgatgc

SEQ ID NO: 32890 - DNA, 398 bp, Setaria italica
  Peptide Sequence Number=SeqID_98864
ttgtctgataaccatagtcccaccaagatgcaacctgcacaatcaactccatcttgctgtcagaataaacacagttagtgtaataataagaagcaagaaggtgtaccttatcatctacgtctgtgttatggcgcagccatccataagcttcacggaaatcatcaaaaacatgcaacccatcatgtgaacgagatgtcagcacaattgagggtgctgagtatgcttctgcagcagcccacacacagtggaccacataaaacccagaaagtatgatcagcaacattatacccacggcagatggtccacaaggcagcactaaaagtttttcttccgttctaggatcaacaggagaacttccctctgagtctttgcctttcttccggtttttcttggctggc

SEQ ID NO: 32891 - DNA, 1224 bp, Setaria italica
  Peptide Sequence Number=SeqID_98865
ttttttttttaattactaagaaggaatacggatcagaaaatcttggcttgtgttccgtacatcgcatatctagaagttcagagcttctgttagctgtttgttagtagtgtaagttttgaagctgatcttacaagctcaacagaggtggcacactttgcatcaaactaaatgttaacacataagaggcctagcatataacatagtagcatagcatgttctcagaatcacatctgagatgccttggcaaatcgagcaaatcttgaggacttgtgattcagaagaacttctggatttccttcttcaaccagtttgccttgatcaagaactagaatattgtccatcttcatcactgttgaaattcgatgtgctatggtgagaaccgtcatccctttgcattcagcggagatagtattttgcaacaggaaggctgtttggttgtcaacattggctgtgcattcatcaaggcaaagcacctttgatgattttaggaaagcacgggcaaggcagaggagctgtctctggcctactgaaaatgatgcaccactttctttcacatggatgtcaagtccacctattgattctatctctcccttcatatggcatttttcaagaacttcccataccctgagatctgttgctgtattgaatggatccaggttttccctcaaggacccatcaaacaaaaatgggctctgtggaactactgcaaaatgtgcacgaagttctcgaacagcaactttagccacatcaatgccgtctactaagatgcagccgttgcagattggaactaagcgaaatagtgcattcaatacacttgatttgcctgctccagtccttcctattattccaacctgcatgccggatgcaatatggaatgaaacatcatccaaagctggtggtaactctggcttgtacctcagagttacatgtacaaagtcgatcctcccttctgtcggccagcttctggatggagattcagatccctggagttcttcttgaggtatgccaacatactcagcaaccctctcaacagagatcatttccttttctgtctccgtaaatgtggttaagaagccattcagcagtgatactacaggtgctgcatatgatagagccaggcccaccagtccaggtgttccaaggttaacaaggactgctatggaaggtgacagtggccatcattgcgatgaacagaatgataaaacctgccaacaactggagtct

SEQ ID NO: 32892 - DNA, 841 bp, Setaria italica
  Peptide Sequence Number=SeqID_98866
aaggacccaaccaagctgcatatgatagagccaggcccaccagtccaggtgttccaaggttaacaagggaactgctatggaaggtgacagtggccatcattgcgatgaacagaatgataaaacctgccaacaactggagtctcagtgagagccacaaactagcaatcagctcacagtaggatgttttctgatatagtgtcacatgctggatgaacctttctaagaagaacccttctttctggaaagctcttattgttgatgaaccatcaagcgtctctgtaaaagatgtataaattggtgaacgagcaacactatcaagtcgccgtacttcacgtgatgtagacctgcagcttcctatagataagccagagtggaagtaagatgagtaagaaggaaacctgtgaataagacaaaacaaccagagtgccgagtaagctaaagaagttagccacaaatatattgaggatgaatggaagagaatcatcaacggtgtagaggtctgatgataatctgtttagaatccgaccactgggattttggtcaaagaaacaaaccggtgcactgataatattttcaagaagagatgcatggatatggattgctgcacggaggccaccaaatgcaaaagaaaacgcccttcccaacgtgaaaagagaatttattatgccaaacacagcaaggataatcagataaaaaactcgtgttgttggtgcctgtgctggtatcaacccagtaagttaaccaaagatcattcccattacgggatgcttgcattaagattgcacttaggaatattaaaaacaacaattaaccaccccgcgaatgttgcatattttttgag

SEQ ID NO: 32893 - DNA, 231 bp, Setaria italica
  Peptide Sequence Number=SeqID_98867
gaatttcaaactaatgcagctacccttaactatcacagtaccgtcagataagtggcagcgagatgtcatcgtttcacctcacattagccagttacatagcttaaatgtgaccattgctgctcaaaagactacgatcctgtaccaaggacgaggataaccaaaagacaaaatgaacccatatacaggcaatgtgctactgcgtcagatgtcagctactgagggcttgtcatc

SEQ ID NO: 32894 - DNA, 804 bp, Setaria italica
  misc_feature (14)..(14): n is a, c, g, or t
  misc_feature (31)..(31): n is a, c, g, or t
  Peptide Sequence Number=SeqID_98868
tttggtctagttcncttttttagtttttttntttttttttttttttttaagttcacaagatatatcgtttcgtggattcatcggatcaaaagaacacgagctacatgcacgcatgccactatcccttacaccttaacagatcagtcttgtgcaggttcatgcgcttaacggatcagtcttattggttccacattgcacactaatgatacaacagcagcgacctccgctgttatgtacatttttcttatgagggggaaaaagaatatcaactggagttgaggggcggatctcaagtaggaggctcgttttgcttgtccttttggtacacggtttctaggcactccttggcccggtgaatcttcgattggaggtaaaagctcccagatttggcgtttctttcaaataagttgtcataccgctgtacaatctcttcccacgttgaattctctgatacacccagtatctgcctcgcttcctgctcggtcattgatttgctggctctacgaatattatttattgcctcatgtgccacgccagttttatttgcattatcaagtgctttacgatatgcctgaagcatagctcttcctagaattgtagagcccatgacaatcaggtttgcaataagcttcccagccatggtggctccgacgggatgcgatccaagccgcggcgcagctgccggagaggagacgccgagagggggaggggaggttctagttacccaacgttagaaattactactagaataacaacccaagtaatactagacctacgacttacctagactacggtacaattaga

SEQ ID NO: 32895 - DNA, 802 bp, Setaria italica
  Peptide Sequence Number=SeqID_98869
tgtactcctcgatcttgaaagcatattgcaaggagcagaagactgcagaggctgcacagcttgtggcagagattagtgcagcagggcttcaacttgatgctagtagttatgatgctcttatcgacgcttccatgacagcccatgatttccagtctgcatttgctcttttcaaggacatgagggaggcaagactaccagaacttaggtcgagttacctcactataatgacaggcttgacagagaacaaccggcctggcctcatggcttcattcttggactcagtggttgatgacccaagaatagagattgctacacatgattggaactctataatacatgctttctgcaaggtagggaggttagaggacgctaaaaggacataccgaaggatggtgttccttagatttgaaccaaataatcagacatacctttcacttatcaatgggtatgtctcagctgagaagtattttaatgtgctcatactatggacagaagtgaggaggaagggggctgagttcaaccacgagttgattgatgcctttctatatgctttggtgaaaggaggattctttgatatggcaatgcaggtgattgacaaggcgcaagagttcaaaatatttattgataaatggaggtacaagcaagcattcatggaaacccacaagaaactgaaagtggcaaagctaagaaagcgaaacttcaggaaaatggaagccctggtagctttcaaaaattgggctggtctcaatacataacaccgcaacctcagttatcaacctatcatgtgttatggctgaattca

SEQ ID NO: 32896 - DNA, 343 bp, Setaria italica
  misc_feature (3)..(3): n is a, c, g, or t
  Peptide Sequence Number=SeqID_98870
ggntctcgccgggcgccgcggcggcgtcgtcgtcatcggccctccggtggcgacctcctcggcacggcacgcgcgccgggtttcgcggcgtggctgcgcggcgtgcggcggcgcatccacgagcgccccgagctggccttccaggagcaccgcaccagcgagctcgtccgcgccgagctcgacgcgatcggcgtgccgtacgtgtggcccgtcgcgcagaccggcgtcgtggcgaccatcgccggcggcggcggcggcggcgatgggcccgtcgtcgcgctccgggcggacatggacgcgctccccttgcaggaattagttgattgggaatacaagagccaaa

SEQ ID NO: 32897 - DNA, 789 bp, Setaria italica
  misc_feature (30)..(30): n is a, c, g, or t
  Peptide Sequence Number=SeqID_98871
tttttttttttttttttttaggtatcaacngaaaatctctccgatgagattttatttcatatgtgtaattttatacgggatcctataaagatcttattcacaaatcatgtaagcaacttattacagatagtacagggcactgccagtacaatttcttctgagaatgaccagcagaacaacaggtctcaactctcacgggtctccgatgcaggctgttcctgttgttgcatgaatgactggtaggtctcaacccgggtcttcgcttcaggctgttcgagaccgtgcatgaaaccattagtcatcgcgaggaaatccttcatatgcagcctcttccactcctcaaaatcccattcgccatatagatctggatcctgtgcatcgctccatacataagtgtcagccaacattttctccgaagagtcggttaatgatatctcaactcgtgtcctcgtgtactccacatcttcaaatgcatccaggacttggagctcctcgtcagtgacacccatgacaaccatccctgcaactttcttgctctcgacgggcaggatcgccgggtaaatacggcccttgatgttgaaccggtggtagttcgggaggatcgccggggcggcgggcgggacgcgcttgaggatggcgcggaccacctcgtccgccatgaggctcccgtacacgaagacgctgtgcgccccggccttggcggcggcggccggtagcaggaggcggcggcgtcatcgccatgtgggggagttgtcgagtcgagggctgtcaggttgcggcgcgcgcttg

SEQ ID NO: 32898 - DNA, 237 bp, Setaria italica
  Peptide Sequence Number=SeqID_98872
ttgttcatcgccagtagcattgccgcgtccgggtgtgcgtgcagaggctcctctgatcctgagttcagaaactttagccctcttctgtcagctccgggtgctggattgagacgcgaggggtttcagctgcttcctgtatgtatctcatgccttctaatatacgagaaaggccttgccaccagatcttgtcagttgcagtgtacctaggaagtcttttcccgtatatgactgacaacc

SEQ ID NO: 32899 - DNA, 609 bp, Setaria italica
  Peptide Sequence Number=SeqID_98873
ttactagtgctagccaacttcatgcgctgaggcttgagatcatccagattacaactggatcaagagagcttgatcaaattttggatggaggaatagaaactgggtctatcacagagatctatggtgaatttcgctctgggaagactcagctgtcccacactctctgtgtcacatgtcagctcccactggatcaaggtggtggtgaaggaaaagctttgtatattgatgcagagggcaagttcaggccacaaagacttctccagatagcagacaggtttggcttgaatggtgctgatgtactggagaatgtggcttatgccagagcatataacactgatcatcaatcaagacttttgctggaggcagcttccatgatggtggagaccaggtttgctcttatggttgtggatagtgccacagccttatacagaactgatttctctggtagaggagagctatcagcaagacagatgcacctggctaagtttcttaggagccttcagaagttagcagatgagtttggagtggcagtggtaatcactaaccaagtagtggctcaagtggatggtgctgcaatgtttgctgggccacaaatcaaacccattggag

SEQ ID NO: 32900 - DNA, 364 bp, Setaria italica
  Peptide Sequence Number=SeqID_98874
agaaatctcgagacatcagataaatatgcaactcttgctctcctcccaaataaaaagcctaaacaaatatacccctctccgtgcattaccggcaatggcacaaactctagcccggatgctacaaatggtttctccacatcctcctcaattatcttccagtcaatctttgcagcttgggcatcttcatcgccatcctctggcttctgctcgaccaagtaggggaatcttcttgtgatactgtccattgcgaatcgtgtgagaaaaataggaatttgcttaatttcgtttctgtaatttcttggctgcaccacccatacttcatcaaggcccaagacagcatccgcgtgctcatgagtcagaattt

SEQ ID NO: 32901 - DNA, 483 bp, Setaria italica
  Peptide Sequence Number=SeqID_98875
aaatagaccattctgccaacatctggttctctctctgatgctcaaaaaaatgcctcattccaatcaacagagcccttttaggacggatcctcttgatagcatcaagagtctcactcagagttaaatgggtgctgaaagcatctcccactccatgcaaagcgtttgcttctagtataagaaggtcaagttgtccagcaccagtctttgaaatagcatgctcagttttaggtagaaatctcgagacatcagataaatatgcaactcttgctctcctcccaaataaaaagcctaaacaaatatacccctctccgtgcattaccggcaatggcacaaactctagcccggatgctacaaatggtttctccacatcctcctcaattatcttccagtcaatctttgcagcttgggcatcttcatcgccatcctctggctttacttagtacttacgtaacctaaagttaaggggtaaattactttacttaa

SEQ ID NO: 32902 - DNA, 794 bp, Setaria italica
  misc_feature (104)..(104): n is a, c, g, or t
  Peptide Sequence Number=SeqID_98876
ctgctgcggagacatcctcaataattttttggttccattgggaagtggatgaaaatgacagcaatgcaagagaagctagtcagcctaagaagatcggtgctgancctttcaacaatgatgaggcagaccctgcaaagtctggtgcaatgcgtatgtatttaatcatatcgaacatgtgttgcctcatcttttctttcttcagttcttcctttgcgatcctaaatgacaagcaatcacctgaaaaatcattctatgagctccagttacgcttctatcgatctcaaagcgtgtcgttttttaagataaccagcttgatggctagatgaaggagcgacactgaaacaggaagcgatagaactctgaaatagaaagcagaagagctatatgcatgaattcacatctttctttctttctctctctttctttctttcttctttctttttttgtggcatcctttttggtagtatactgacacagtgacacctaataaacctaccatgaagagtacctatagaacctatagttttcttaaaagaagaaatataacttggctcatacggtggtgatgttatttttttttgtctttcttcctttattttaaaaggagaatgtatagaggaagcatgttggtgcttatagttttatctatactatacttctacctttagtatttgtatttttaatggtacacctgctataaattccgtactctagaccccacctggcacgggagctttcaactgggtatgtcttgtttttgctgtaaaatatccgagttgtcatgaggtgtcaag

SEQ ID NO: 32903 - DNA, 2149 bp, Setaria italica
  misc_feature (2098)..(2149): n is a, c, g, or t
  Peptide Sequence Number=SeqID_98877
ccgtaagcctaaaccccagaatcttcttcccccgagtctccaacctcgcgccgccgcctcccacgcctcccgccatggcgaaatcgtcgtcggccgcggcgaccgcgtctgccactaagaagcggcgttctagaggtggagctctaaccctagatgaggtgaagacgctgggccgcgagctcctctcctcgcgggcccacctcaaccacgcccccgccctcctcgcgctcctctccccctccgcgccgctcgacctcgccctcgaggcgctcatctcgctccagtccttcttcgtcccgctcatcccctctattccatccgcctctgcggcagtcaccgcggggcatgcgggcagcgaccccgagctcgtgttcggggcctggctgcgtcagcggttcgatgagctcgttgccgcgctggtcgagctaagcgtgtcgccgcacagcgatgacgcgatcagggatgtagcactggatgctctcatggattttgtgaagctgggaaaggacgggaagttccagtcggcaatttaccacaagtttctccatgctgtggttcatgctgctgattccgttgatcctttgttagagttgcttggatcgaagtacttcaaatacactgatgtttgttactttacttactctagcgcagacaagattgccaacagtctgggcagtaaaaccactgactctggaaaggatgccttgcagaatggaagtgatggatcagaaaacaaatgtgctatttttatacacaatatatacaatctcttggttcgtgttcctgtgatggattatcaaaaggaatcaacatttgaaatgtggagtacttttggtctttcatctaaaggagaaaaagactcttctaaggactcttcttcttcttacatcaagaaaaactaaaattgaagttcaccaaagcatggctgtcctttctcaagttaccattaccacttgatgtgtacaaggaggtccttgcttcaattcatcaaaatgtcattccttcaatgtcaaaccctgccattttatgcgatttcttgactagatcatatgacattggtggtgttatcagcgtgatggccttaagtggccttttcattcttatgacacaacacggtctggaatatccaaagttctatgaaaagctttatgcactactgactcctgctgtttttatggcaaaacaccggtcagtgttcttgcaacttcttgacacatgcctgaaatcttcttatcttcctgcatatcttgctgctgcatttgcaaaaagattgagcagacttgctctttcagttccaccagctggagctcttattattattgctttaattcataatctgctgcggagacatccctcaattaattttttggtccattgggaagtggatgaaaatgacagcaatgcaagagaagctagtcagcctaagaagatcggtgctgatcctttcaacaatgatgaggcagaccctgcaaagtctggtgcaatgcgaagttctttgtgggaaatagacacgctccggcatcattactctcctgcagtttctagatttgttgcatcacttgaggaggatctcactgtcagggccaaaactactgagatgaaaataacggactttagttcaggctcctatgctacagtttttagagatgaggtacggcgacggataaaacaggttccccttgcattctacagaaccacaccaacttcgttatttcaaggatcagattttcctggatggaccttcggggacccatccaatagcaccgtagccactatggttgaaggcaatgaaactatcaagactgtaggggctagcgacagcacaccgtccaaaaggttgcgggtggaggcctgagaaggagatcctgagtgatctccaactattaggcagttggcttgttggggatagcattggattgttgtgtgcttcctatttgtagtttgatacccttaagttatctctaggaatcttcgggtgttgtaacatacatcttgagctgaaagggaagttgtttcttatggcaactaatgtaagatgtaagcttgattgccaattatagagtaaatgtcatttccgaaataaaaaaaaaaaaaaaannnnnnnnnnnnnnnnnnnnnnnnnnnnnnnnnnnnnnnnnnnnnnnnnnnn

SEQ ID NO: 32904 - DNA, 700 bp, Setaria italica
  Peptide Sequence Number=SeqID_98878
cccagtcataactcaattcagttttcaacagttgaacgtgcttcctccattggcaacaggggcttgggtgccatcagtttcttctttgccagataaccccatagctttcagtacaaaggaatcatcctgcaactcaaatggagtgctattgaagtcaaaatgcaccagctgcatatcttctgatatctccacttctacggttgcatgaggacgtgtctgaactagtataaatggcaaggccactccaccagaaggtgcatctcctgacccatagagctgctcatttcgttgtaccaagttttggagacttacatattgatcttgtaagtcctgcaaatatgcacttttcttgtccaatccgacctttcagtccaacgatctctgtcttcaattcttcaatatcattcatacttgtcttgggcaagcctctccattgtatttcctttttatctttagatataatctccattgccattaggacattcagcgcatcataaactcttcgtcgaatatttttttcatcgtattgttgtgcagagggattatcaggatctggagagtcaatattaatgttggggtctgaaaactcagcaaccagttcatcagccacctcattgtaggttgttctccctttgctttcaactttctcacagactctcatgctgaattggcgcaatccacggccatttttgtcaggacc

SEQ ID NO: 32905 - DNA, 956 bp, Setaria italica
  Peptide Sequence Number=SeqID_98879
gcctttatcatatctgaactcctccaactccaacacaaacctaacaaaagaagcatacaatatcctggaatacgtactatcatcttaaatcgatgccgactacttccagaagataattctaagcaattacactgaaccaaagattcttttcctcaacaagataactgaaacctaggagttaatgtgagccaggcgtcaggcacacatcatgacgcccatcgaactaccatcagcaaagtaaaattagactgccattgcccctaatgacataatttacaagcgtttctacatgtaaagccaaataggtcatgcaacaccaacaagtgtatcaaggcctagtgttcatgcttgacacgcccttttagtatccctggaataggaggcgagtttggtagccttactcctcttggcctcgtaggctgcggcgattgatgccaataattgttcggtgtacttgagcactcacctccattggcaacaggggcttgggtgccatcagtttcttctttgccagataaccccatagctttcagtacaaaggaatcatcctgcaactcaaatggagtgctattgaagtcaaaatgcaccagctgcatatcttctgatatctccacttctacggttgcatgaggacgtgtctgaactagtataaatggcaaggccactccaccagaaggtgcatctcctgacccatagagctgctcatttcgttgtaccaagttttggagacttacatattgatcttgtaagtcctgcaaatatgcacttttcttgtcaatccgacctttcagtccaacgatctctgtcttcaattcttcaatatcattcatacttgtcttgggcaaagacctctaccaattagttaattttaccttttttaattacttttaagtaattaattaaattacttacctaatttagtacctaatttaaggtaactaattactaagtacgta

SEQ ID NO: 32906 - DNA, 468 bp, Setaria italica
  Peptide Sequence Number=SeqID_98880
caagcaccgctcactgcttgtgcacgccgaggagatggtgctgtcccgcaccaaacgcctggccgcacagtgtgtcgaggccggttgccatccccgccagcacgcataagcctgtgactgcggcaaaggaggtggcaatggagacgctggcgagctcaagcttgccgaggtggccgacgaacatgatcgagatcatctgggtgatgttcatcaggaggtacccggcgacaagtggcccggccaggtacaactgcgttttcacttcactccagaacgagccctcagcgtgtgcttcgaccctttgctcggtgtccttcacagtgaggagcggcgcttccatgcttcccatcttgtttcactgagtgagaaactgaggcagcaatggcgattgaaccagaataaaatctgattccatcttctccaaattgagctaactatttggtactattgttgggtagttcttaaaaa

SEQ ID NO: 32907 - DNA, 920 bp, Setaria italica
  Peptide Sequence Number=SeqID_98881
tttttagccataaaaaaaaactttacaaattactcaggtatcacaaaagctaaagagggataggttattaattctgtagccttcagaaaaattacaattcggtccaggccaagaaattgatgaaggcaagagggggggctccatgcgtgttagattgcagctgaaacgacagcagattcacagctttttccagaagttcctgaagccataggcaaaagatttcaaactgccaaaaagacccgtgcttgtggattcctcaggctcatgctttgggttgtgctctctgtcatgtatgtttgccttgaccaccttgtcacttccactttgatctgacacacttgattcacttgcattcaggattttttctgtattctccagagctaatttgctagcttctgtattcctttgctggtttccagggtccgattgcgcctccactcccacagatacataagatttgttcgttatgaccttcatgctctcactttctgtttgatcagataaagttgggtcatctgcagtcttcaaggtttctgaagtgttcaaatcatgcttagcagcttctgtttctacattgtgatgagaagagcccactgatttccaagtttcagtcttttccacgattccagtacttgtagcatcatctttctgggatattagcatatcatctacatcctgaatctccttactacttttgaggctgtcgcagttgtacggactttttacactgtcatccttaggtcttgagtgctcagcgaattcaggtgttcctttaagttgagccaccatagcttcatccttaggcccggagtgctcagcaacttcaactgttccttgaagtggagttgccttagcattacccagtggtaattttgcatgattatatttcaattcctgaagtatctcacgcaccgtgtagt

SEQ ID NO: 32908 - DNA, 1443 bp, Setaria italica
  Peptide Sequence Number=SeqID_98882
ttttatggtaacagatgaacaatttattcagacaacgactgcccaaatccaagaccatcttctctggtcacagacggacatacagttacaacccaatcagcaagtctcagcagcttgcattgtcggctagccgaggcggaagttgttgcagttcgtctgccggaacagcagcgaggagctgaaccccagccgcgacgcctccaggtcgaactccagcaggttgtcctccatcatgtggccgccgatcaccaccgacgtcctcggcgcctcgccgccgtccaccacgccgaggcacagcgccccgcccttgacggccaccatcgagttcgccccgaacaccacccacgacgtggcgtcggtccccagcaccagctcgatggtcggcaccgcgggccccacgcgcgtgctcccgaccttgctcccgtcgtagcacagctggaacggcgccatggccggggcgcgcgggatcgccgccgtctcggccgcgaacgcgccggtgacggccttgtagatggagctctccagcacggtgtatggcgccaccgtgctgagcttggtcccgcccacgcccttcttgtcgatggccagcagcgtcgcgttcagcggcacggcgcggccgttcaccttgatgcccgtcacgccgacgaagtactcgtcggacttgtcgcccttggtggacacgcccgccgtgctcaccgggttgacgaggagcggggtgtagatgagcgacgagttggagagcacgaacccgggctggaacgcgtagggcgcgtcgccgaagacgacgacgcccgcggagcccgccggcggcaggcaaagtgcgaacttgcgcgagaaccggaacgttgcggcgagctgcgtgggcagcgcgaagcgggcgcggctgagcgacgccatccccgtggcgcccgccgcgaggccctccgtcaggaacgtggcgccgcaggtgaagaggaacgccggcgccgtggcgagcgggccgggcgccgggcggaacgtggtgggcagcgccagcacgtcggtgatgatgtttccgcccgtgctgacgtgcgtgaccgtgttcccggggaacccggcgcaggtgtcgttgaggcaggaagggctgggcgcgcccaggcagctggtggcgcaggccgccgagcgcgagaggcggcagggtttggacgcgcacggcacgcggcggtaggtggaggaggcgtacccggcctcgcagtccacccagagcgtggcgcccgcgaggtccagcaccgcctccacaggcgccagcggcgtgcgctgccggaacgacgtcacgtactgctgcgtggccgcggcgtccttgctcaccggtagcaccacggcgctcgggttgccgtcgcgggggccggccgcgcggcaggccgacagcaggcagaggaagaggagagcggcgagaggagggaggcgtgccatgctgggctggag

SEQ ID NO: 32909 - DNA, 323 bp, Setaria italica
  Peptide Sequence Number=SeqID_98883
tcccacgtctcgctctccccaccccacctcccgctacagcgccggtggggggcccccgcggctgccggcgaccgggcgccgccgccgtcgccgttgtcgttcctcgccgcccccgcattctcgaactggcatttgccatgatttagcggaggcaattttcttcgcagctgcttccggggtggtggactgaaggaataaagaatgatcaacctctttgatttgagcgttggagccagcgccaaggtcgcctcaagagatggctctccggtgagaggaactcaatcagaacggaaggagtacgctggatcaaagacagtgactgg

SEQ ID NO: 32910 - DNA, 932 bp, Setaria italica
  Peptide Sequence Number=SeqID_98884
ggcggagtcggcggcctcaatcgccgagctcatcggcggcgaggcagactactcgccgagaccggactaccccgaccgcctccggtcgcggtccatcgacccggccgcccgggccgagtcggttgcatggattctcaaggtgcaagaatactatggatttcttcccttgacagcctacctcgccgtcaactacatggaccggttcctctcgctccaccgtctgccgcaggaggacgggtgggcgatggagctgctggccgtgacctgcctctccctagccgccaagatggaggagactctcgtgccctcactcctggaccttcaggtcgagggcatcagcagatacgtgttcgagcccgggacgatcggccggatggagctcctcgtcctgacggcgctgaattggcggctccggtcggtgacacctttcaccttcatcgacttcttcgcctgcaaggtcgatccgggagggaggcacacgaggtgcctcatcgcccgggccacacaagtcattctagctgcaatgcatgacatcgagttcttggaccactgcccatcggcaatggctgcagctgccgtgctctgcgccaccggcgagacgccgtcgctggagtccgtcagccccggggccgccgtcggctggtgcatcggccttgcagaggaaaccatcggcagctgctacagactgatgcagcagctcgtgatcggcggcaacgttcagacaaggcggccggcaccacagcatcggcactgaacctgtgctgctcagaccaggccctgtcctcgcactcctcgtcctcctcctcgcctcccccggccaagaggaggaagaggtcgccgccgggcatttgaaaacgcaagtagatagcattgtttacatgggccttttttttgcagattaacagggtttgatcgatttctttacttttaga

SEQ ID NO: 32911 - DNA, 336 bp, Setaria italica
  Peptide Sequence Number=SeqID_98885
tttgttagatagtcctggtgttctctcaggtgaaagacaacggacccaaccgcagctatgatttcactggtgtaacttcatggtttgctgccaagtgtgaccttattcttcttctgtttgaccctcacaagcttgatataagtgatgagttcaaacgtgtcatttcatccttacgtgggcatgatgacaaaatacgcgtagtgttgaacaaggcagaccaagttgacactcagcagcttatgagagtgtatggtgcgctgatgtggtctcttggaaaagtgctaaatactcctgaggttgtgcgtgtgtacattgggtcattcaatgataaaccag

SEQ ID NO: 32912 - DNA, 405 bp, Setaria italica
  Peptide Sequence Number=SeqID_98886
ataaatcgcatattacaagtgaatcctattcagggtctaccatgtttgtccttcacagtggaaacaaggcaacagtcaacttaaaggctgcaactgcgagcccccctgaatattgaagataatgctagaaggtaagtagccactgttcaagctacctaatatggtatgaaacaatagcttgactcccttaacgttatcgaaaatcctttcgctcctcggtctgctcaatgcttattgatgactaggcattagaatttactacattcttgatgtaccttctgatgtccaagtgtaacaatgatagcgttgatattggttctaattagatgttttctataacatgcataggtttacatggtgtttcacatgctgaggaatactaggagctccctgacatccggggaa

SEQ ID NO: 32913 - DNA, 597 bp, Setaria italica
  Peptide Sequence Number=SeqID_98887
tgctgctccacctcgtcacctcctcctcacccataaccccggcacgcccctcgacgcagaggcgtccgtgcgtttccgcggcggcggtggcggtgacggtgaggtgcgcggcctcctcctcgagcaccccgtcgtcttctgcatcggaggcggctgctgctgggcagcaggtggcgaaggtgcacagctacgggacggtggactacgagcgtcgcgctcctctgcggtggggtaccctgtaccgtcgcatcgcggtggggcacggtgggcggccggtggggcgcacgctgggggcgtgggacgagggggagcgccgcctcgacaaatgggagctctgccgcatcgcctccgagctccgcaagttcaggaggttcaacctcgcgctccaggtttacgattggatgacagagcgcagagatagatttccgctctcatcaagtgatatggcaatccagttggatctgattgctaaagtgcgtggtgtttcacatgctgagaaatattttgaggagctccctgatcccctgaaggacaagcggacttatggttcccttctaaatgtttacgcccaagctatgatgaaagataaaacagaag

SEQ ID NO: 32914 - DNA, 387 bp, Setaria italica
  Peptide Sequence Number=SeqID_98888
gaactcgaaatcacccgaggaagaatcagaagcaagctccattcctgcagatgataaatcgcatattacaagtgaatcctattcagggtctaccatgtttgtccttcacagtggaaacaaggcaacagtcaacttaaaggctgcaactgcgagcccccctgaatattgaagataatgctagaaggtttacatggtgtttcacatgctgaggaatactaggagctccctgacatcctgaaggacaagagggcgtatggttccctattaaatgtttacacccaagctatgatgaaagagaaaacagaagacacatttgagcaaatgaggaaaaaaaaaggatttgcatctgacacattaccttgtaatgtgctgatgaatttctttgtg

SEQ ID NO: 32915 - DNA, 1583 bp, Setaria italica
  Peptide Sequence Number=SeqID_98889
agaccttacaaccttagttagaaaagcttgcaaaagatcttaactccatcatgcatgaagagcagttatcttacctttcaggatcctcagaggaagacctactgtaccatagcgaagctcctgtgggttcctttgaaacaggctctggaagcgtgcttctaaggcatccaaactcaaaatcacccgacgaagaatcagaagcaagctccattcctgcagatgataaatcgcatattacaagtgaatcctattcagggtctgcctcagttgtcgttcacagtggaaacaaggcaacagtcaacttaaaggctgtaactgcgaggccccctgcatattgaagataatgctagaaggtttatgattggatgaccgcgcagagatagatttccgctctcatcaagtgacatggcaatgcagttggatctgattgctaaagtgcacggtgtttgacatgctgaggaatactaggagctccctgacgcgctgaaggacaagaagacgtatggttcccttcgaaatgtttacgcgcaatctatgatgaaagagaaaacagaagacacgtttgagcaaatgagaaaaaaatgatttgcatctgacacattaccttgtaatgtgctgatgaatttctatgttgatgttggagagcctgatgaagtgtcagcaattattgatgagatgaaggaaagaaatgtttcctttgatgtgtgcacttacaacatttggataaagagctgtgcagctaaacaagatgctgatgaaatggagcgagtctttagccagatgattgctgatgagtctgttattgccaattggactacttatactacactggctagcatgtatattaagcttgggaactctgagaaggcagaagaatgcttgaaaggagctgaaaagagaacaacaggtcgggacaaaaagtgttttcactatctcatcacactctatagccatcttggcaagaaggaagaagtttaccgtatttggaactggtataaggcaacttttcctacaattcataacctgggttaccaagaggtactatctgcccttgtaaggataggagatattgagggagctgagcttctatacgaggaatgggcgtccaaaagctctagtttcgatcctaagactatgaacattttactggcatggtatgctagagaaggtttgattaccaaggctgaacaaattgtgaaccaatttgttgaaaaaggtggaaaccccaagccaaacacctgggaaatccttgccacagcctacctgaaggataataaaatatctgaagctctgtcatgcatggagaaagccacggcagttaaaagtgcaagtaaatggaaaccaagacccactaatgttgagagtctcctagcaagtttcaaggagaagaatgacacagagggtgcagataggttagtgagtgtacttacaagtagaggatgtgctgaggacgaagaatacaagtcactgattaacacctatgcttttgcgggcacataatggtggaagcaagagtgatgatattatgagtacacaacaattgaaacgaatacgacaattaacttagacctagaaaatagtta

SEQ ID NO: 32916 - DNA, 1447 bp, Setaria italica
  Peptide Sequence Number=SeqID_98890
cagagaaatagttcttgatttttcccctttcttttgctgaagaacttagagaactgcttgtttctactttgttttccgtatttgttttgttgggattttcttttgctccgttcttcttcacctgtggggaggtgaggagcagaaggaaccatggggaagcaaggaccctgccgccattgcggagtcacaagcactcctctttggcgaaatgggccacctgataagccagtgctctgcaatgcatgtggctcgagatggagaacgaagggttcattggcaaactacaccccgatgcatcgcaaggatgacattgatgatgatgaacctagagttagtaagctgaagccaccaacatcaaagatgaagtcacagaagaaaaaaacaaatcacatcacaacagagaatgggccattttctggtcagagttttcaaaagatgggggatgctgatccaagcagtcgatctagttctggatctgcaatatcatactctgagagttgtgttccatatggcgctgttgatgcaagtgaaatgagtggttcagctcaatcacatgcttgggaatccctagtgccatcaagaaagaggagctgtgttactcgtccaaagccgtcgcctgtagaaatgcttgcaaaagatcttagctccatcatgcatgaagagcagctatattacctttcaggatcctcagaggaagacctactataccatagtgaaactcctgttgggtcctttgagataggctctggaagtgtgcttctaagacatccgaactcgaaatcaccagaggaagaatcagaagcaagctccattcctgcagataataaatcatacattacaagcgaatcctattctgggtctgcctcatttgttgttcacagtggaaacagggcaatcaacttaaatcctgcaactgcgaggctaaagaggtcaccgctgcatattgaagataatgctagaagggataaacttccttatgaaaataagcatatcctggagagtattgattcacctttagtttcagtagatttagaggatgttgtcaactactctaactttgtgaaatatctaactaaagaagaccaacaacagttgttcaaacttctttctcctgcagaatcctcaactcctgacagcagcgttagaagcatgttcgattctatccagttttctgatgctatagatagctaccaaatgcttcttggagagggaattcttgatccgtctttctctggtgatgagggatggaatacagtgaagatgcttgccttaactaatttaacaagatgcaaatggctggagtgctataaacagcaaaaaggaaaaggagattaaggcaattggaggagtggagaatatcagtggatcaaaaggctctaccaagttcactatgaaaccgctcaaaagatcccgtgaccacccacattcagagtgaaacagaactaga

SEQ ID NO: 32917 - DNA, 262 bp, Setaria italica
  Peptide Sequence Number=SeqID_98891
tttgggggcgctttagaaaagcgacacgtggcagataagctctagtggcccactagacgtggatgtcgaaagttcaggcttcagcctctcagaattcagaaacttgcaaggctcaaactagtacgctttgctcacggttcctgttccgtccttttctgcacacttgcttaaagccttaattaaccctgccttttacgctagaatttcacacgcacaaggagtttctttggtcagggcattcagctacattcgccgtggctac

SEQ ID NO: 32918 - DNA, 273 bp, Setaria italica
  Peptide Sequence Number=SeqID_98892
ctccgatcgtcttcctcctccgtcctgccctgccttccccgcccccctccctcttctcttcctcatctcacctcctatcctccatctattctaagccaccagtcaccaccaccgtcacgcccttctctctccgagaaccttctacaagataggagccttccttaatggacgatagatcactgggcggaggagtttctcgtgtcggattgatcaattaatactagatagaggagagaaacagagaggcgccggccggcaagcccaagaagcaat

SEQ ID NO: 32919 - DNA, 471 bp, Setaria italica
  Peptide Sequence Number=SeqID_98893
gtccgcgttcccctttcctctctccgacaattctcccccctctcgtcgcgaggcccgcgcgggagattctggaggaggccttcctcccgggagtgagtagaatcctctgccgtggccaatgaaggaggccagcggagccggcgccggcgctgaggacgtcggctcctcgtccgtgtcaaatatttgtttaccacaagatgagggtacaagctccagcgagatggagaatactgaatgctctgagacatcctcagagctgtctaattctgaaagatctgcaccctaatgtagcaaaaaatatcctccacattggataagaagatacccattaaaaagagctaaaattgtttagtcgaatggctacactgaaagatgatggaactgtagttgttgatatccccactaatcttgaggctgcatcacttgatcttccttcggagaatcaccacaatgtggcctggtggggaacca

SEQ ID NO: 32920 - DNA, 386 bp, Setaria italica
  Peptide Sequence Number=SeqID_98894
agctgtagacattgaggatcaaagagcaagttctttagcatattcacgagtactagaatatctcaaacttagcatttatcaatgatagatcatatcctatagagtttagaccgacctgttttctctttgtttttcccctttccttgtatatacctaatccttgtttgtttgtttctatatctgcaaagtggggcactcccccacagttttgcgtcaaaaactacaggtaatttgccaaatacatgttagcatcatgttgggtttcaactctagcctaccccaacttgatcgggcctaaaagactctgttgttgttgatgttagcatctctaaacaagttcgagcctctttcttctatgttaagctcattagttctttgcccttcag

SEQ ID NO: 32921 - DNA, 263 bp, Setaria italica
  Peptide Sequence Number=SeqID_98895
ttgtctcatcggctgcacgactgcacctacccaacccgacgagccacccacccaaacccaaccagcagcgcagctgcctgagcttttgatgagcagttgttgagctagcctagctgcttaggtagagtcacggagtaagctagctgttggatcagttcgccatgggcaactgcatccagcagagcagcagtagcagcggtagccgcggcgccttcgccggagaaggccgccgcccggcggcgcatcagctgcagaggagcggg

SEQ ID NO: 32922 - DNA, 385 bp, Setaria italica
  Peptide Sequence Number=SeqID_98896
cacaaaacaataataaaaatttcaagttcaatattaggggtaacacaattgttccaaggcatactttaggtatattaggtatcaattcacaatggcaacattcacgtgtacagtcttatgtcatgtacattttcagatcgtatcatcctaagaaacaaattaaaattattcaaaattagtagaaactgagaaacctaagtacatgtcagtactaaaaacaatatgttggttatgttgaaacaaatctaacattcaaagcagtttttcttccaattctaaagtaactgctggttatttatgaacatcaaaacccagagggaaacaatgaagtcactcaacactcactagttttggttccaaattggtcatactcatcttttgttag

SEQ ID NO: 32923 - DNA, 424 bp, Setaria italica
  Peptide Sequence Number=SeqID_98897
cgagctcgacgtccggaggagacggctggccgaacgccggcagccatggccggtgcagcgcgcgacgaggggtagcgcgagcctcacagctatgctgcgattccaaggcaaggcggcgatgttgccagaccccagctgcctgaagaaatgtggcgacgttgatattgtattcccatttgggattggcgctgactgtgcaatggaaggatttaatctcgactgcaacaagactgtggatggaagcagccacataacatattaccacaacgctccactgatgaatatatcgctgctccatggccaggttcggatgaagaactacatccaatacaggtgcagcaaccactcgaatgggaacatcatcgatggctcctggtacctgcaactctctgatacgccattacaacaaattaaactaaacaaa

SEQ ID NO: 32924 - DNA, 920 bp, Setaria italica
  misc_feature (857)..(857): n is a, c, g, or t
  Peptide Sequence Number=SeqID_98898
ttttttttttttttttttagtcgttaatttgtagtactaattgttttctaagtaggacaacaacaacaacggagaaaaggactttacaggagagatttactgtccagtgatggttacagacttggacaccctatcagttttcccagtaggaagccatacgcttccacatgaccggagccgcagtaatctcaaggttaataagtatcttattcgagtgctgcctgatgatgacagttaccacataatactaggtttaacacgagcacgagacccacaccacaaatattctaagatagtaatccacaccacatacggaggttctgtcggcccaccggcggtggtggacgcagcgaatttcccccaaccacggccatcgtgcagcgagcgagtgatgcaacatgagaccaaacaaaatgagctgtgatgttgacaccccggtgccatcggtgctggccaatggtgaaaaaaagcggcaaaaagacacactgcttgctcgatgcgacgcctaccaatcactcatcgtcgtcttctcgggaactcctcatttacatgtccatccatcctcggatccatgtctctcacccaatcaagaaacagagaagaaggggaaaagggcaataatggaagagaaaaagggaggaaagaattgcgtccagttgtctgtcgtctccggtaaacgtcgccgtggttcgaggaatcgttttggctttagaacgtcgtcagatgatctctctgccgtggaagacgatcggtcgatgcacggtcgctggtccttcttgctctaggtgggtctggccagcgagtggaacccgttcttctgaacccagctcgtcgggccttgcgtcgtgacgtagggnggatcgtgatgatgctgcagctgcggtcgcggcggcggcggcggcggcgttggtcggtggcgg

SEQ ID NO: 32925 - DNA, 186 bp, Setaria italica
  Peptide Sequence Number=SeqID_98899
gctcaggcaaattggtcagcttctctgagaactacttgttcatcagatacgggtagtcaagaaaaatctgagggggaaggttcagttctgccgcagcaaattgatgcatacactgacttcttgcagacttttgcaaagcttgctcgctctgcttggacagagtttgatttgtggtcgatgatcagt

SEQ ID NO: 32926 - DNA, 435 bp, Setaria italica
  Peptide Sequence Number=SeqID_98900
ggctatcggagaaagagagtgtaaactatgtggcactgacgggtcctcttccagacttggatgagtggtctgcctcagttcctagcgagctaagcacgaaagtgaaacaatgggtgccttgcgagcttgcgtgatgccgggcattttcttttgttctagttgcacctaatttgcttcagcaacttgtccatgacctctgtggctctctccatgctcctttaatttctggtgtatttatggcgtcatctgcatctgaagcaaatgctgaatccagatgctctatggggataccagtggaacaggtaagtacggactcaaggcaattgtttagagaatctgtatagtacttatctcagggcaattgtcgagagaaggcatgccaggacaaattttgcagcagaagattgtacattggagcccacactgcaggacaat

SEQ ID NO: 32927 - DNA, 423 bp, Setaria italica
  Peptide Sequence Number=SeqID_98901
cgtggaggcgttggacaaggacgtggagattgtcgtgccggaggacgtccttgggcttttgtagaacttgtccatctgactatggtgtatcacttccacgatatgatcgatatgctcattaactgtgggtacaagaaagggaccacactatttggatatggttatgattttcgtcaaagcaacagacaaagtgatggctggtctgagaacaaaacttgaaactgcttataagacctctggagggaaaaaggttaatataatatcacattctatgggtggattgctagtgtgctgcttcatgtctataaatcatgatgtattcacaaagtatgtaaacaaatggatttgcattgcttgtccatttcaaggtgccccaggatgcatcaatgattctctacttactggactgcagtttgtttatgg

SEQ ID NO: 32928 - DNA, 225 bp, Setaria italica
  Peptide Sequence Number=SeqID_98902
atgacaaatacatgacacagctttcggcatgttcaacagatgcaggacctcacattgttcctacacgatatgttgattcatctgaaatggccaaaacagcagttccattgatgaatgacactattggggaaaattccttctccttttcttcatatatgaatccttgtagaatcaatcttgatccttttgttcattccacacacaatcaaaataatcaagattgat

SEQ ID NO: 32929 - DNA, 365 bp, Setaria italica
  Peptide Sequence Number=SeqID_98903
aattgggctttctttgggcaaacaagagagaactgcgagctaaaggatcggtcacaaagattatatctgcaccaccttcagctctccaaaagtacaggtcgccccaatggagacgtcatgccaggagaagccggtggcgatcctgacagtgatgatctccacgtcgccccttccgtccctcttctgcaccagcatgccccccggcctcacctcccactctatctccccgcggccaccaccggcatcgccgccgtcgctgccactgctgctgcccttggaggagctcctcctgaacagcttcttggagcacctcagcttgatcatcttcgaagttgagctcttctaacggtacgtacgttagtcta

SEQ ID NO: 32930 - DNA, 348 bp, Setaria italica
  Peptide Sequence Number=SeqID_98904
cagtggcagacgcgtttcttgcagctagatatttcgtttgctcctctgttctcttcacatcggtttttggataggcacagccgcacaggacggtctgacgttgaagacttgaaggatgcagaaacgcgtggtgctggtgagcgcggcggtggccgcgctcggcctcgccgccgccgtcttggggttcgtcgcggaggccacaaagtccaaggctttcgtggccttcgacgggcggcgctgcgtgtaccggcgcacgccggcgctcttctgcggcgtcgtcgcggcgctgctcgcgctggcggcgctggccctcgccaccgccgccagcggctgcttcggccgcaacgc

SEQ ID NO: 32931 - DNA, 230 bp, Setaria italica
  Peptide Sequence Number=SeqID_98905
catcagtatgatcgaagatgatgaagtttctggggcataccttggaaggctggaactcaaagacaccaagttcaagttggcttcgggatatgagggcttgtcatgcctgaagggactcctaaggcaggtgaaacaggagccctgtagttgcattgaccatccaaaggtccatttgccatacaaccatcagcttcatatccataagcaaaggaggggttcccagcgaaagc

SEQ ID NO: 32932 - DNA, 1550 bp, Setaria italica
  Peptide Sequence Number=SeqID_98906
ttggagcctagtgcgcgcaagaacgcccgcggcgtccggccatgtccttcccgcggctcctcgtcctcttcgtcctcgccgtggcggtggccgcgcgccgtgcggccgccgcctgcggggcggagaagttctcggccaaccgggtgttcgcggcgtgcgccgacctgccccgcctgggcgcgtccgtgcactggacctacgacgctgcggcgtcgtccctctccgtggcgttcctggccgccccgccctccggcgggtgggtggcctgggggctcaacccgaccggcgagggcatgatcggcacgcaggcgctcgtcgccgtgcccaagggaggcgggtacgaggtgcagacgtatagcatatccgggttatctctcggctccccggggcccctttcctacaagacgtccgatctcaccgccgagagcggcggcgacggccgcgtccggattttcgggaccctccagctccagaacggcaccggggaggtgaaccaggtctggcaggtaggcccattctccggcggggccatcggtatgcactcaacgactaattccgacaacctgaactccaaggggaagctgaacctcctcaccggggccagcaccgccgccagcggaggggggaacatcctcaggaagagaaatacccatggagtcctgaatgctgtaagctggggtcttctgttgcccatgggagccatttttgcgagatacctcaagacattcaaatcggccgatcccgcatggttctacctccacgtagcttgccagctgatcggctatggcgtcggagtgtctggatgggcaactgggattcatcttggaaacttgtccaagggaatcacctattcagttcacaggaacattgggatcacagtattttctcttggtactctgcagatctttgcgctcttcttgaggccgaagaaggatcacaagtaccggttctactggaacgtttaccaccactcgatcggttacaccatcatcatactgggcatcatcaacatcttcaagggcatgtcgatcctgagcgtggaccagaaatggaagacggcctacatcatcgcgatctgcatcctgggcgccatcgccctgattctggaagtcgttacatggggcatcgtcttgaagcggaggaaagaggacaacaagacctacaatggcaacgggaacggccacttgccgctatctatgtaatagagctccatagtcagggtcctttggcctctatttatcttcagtgtttgtgttggtgtgcagatgtagggggggataggtcctgtgatcttagtatctctcttttttgtatgatagatgtgtgtatacttgcacaattataccggagatgagtgatactagtggcattggtcattgcctgctttttgttctcttgtaaatgctgagctgatcatgcacttgtgttctggagtcatgccgtttgctcccttttgcgaaaaagggtgacgagctgtcgaggtgtgccacccagtggttggtgagcagtctgaagctgagaagaggagatacacgtataaaccccactag

SEQ ID NO: 32933 - DNA, 406 bp, Setaria italica
  Peptide Sequence Number=SeqID_98907
tcttgcggttgcgggaaaaaggctgtgggctttttccgctcgccgcaacgggtgctccgtgcgtgctcgcgcgcgctctctctcgctgtccgcccgacccgaccgaccacccctcgcgatcacggggaagcgtcgccgtcgtggtccgtccgtcgacgggggttggcggtcagtggtgttcaacaaagtcgcgcgccccctcttctctttcttttcgtgagatgtctcgcgtcgcgtcgtagtcgaatcgttaattagtcttccaggtcaatcccgggcctcccggcttgttcttgacttgtgccgtgctcgacccgtgacgcctgtggttggcgggcgacggggtcaaatttccagttcctgattctttgcgccgcggccgccggctcccagcccaatgctggcg

SEQ ID NO: 32934 - DNA, 216 bp, Setaria italica
  Peptide Sequence Number=SeqID_98908
tccactaggaacctgaatcaagctatcagacttctgccctgtctgcgcattcaccagtcctccgttcgcgtcgaccttgtaagtcagctcttccttgttgggagaagcgtctatgaacaccgtggagttctcgtctatctcttccttgatcaacatcttggacagctcggtcactactctcttctcaatccatctcctgatcggtctggcaccata

SEQ ID NO: 32935 - DNA, 719 bp, Setaria italica
  Peptide Sequence Number=SeqID_98909
tttttttttttgttatactgtaaccgatcattattatattaagcagaatgaacaaatatccttgatcaagtaatacaacatgcttccagtacatatggcatttgagcagacaacgtacaagaagcacaacaacacatgatgaccaattaagttaaacagatctcaactccggacgcacaacaacacaaacatgtgcagactcatctgcatcggtcaccttataaggcaccttattgatgtaagtagtagtatacgtaaacaaccaggcaacgcgcccatttaatttgaagttgcgcgcgccagcatgcatgcttagacagtgataccggccccaacgcatctgagtttgggccccgagccgggaatgagggagctaggattattggtgcacacacaaaatttcacacctgggtgcaggagacctatcctcgcgagggtggtatcgagcttcaccatgatattaggaataaaaatcatctcgatcttgtccacgagcgccctagctgccgtttcgaaggcctgaatgtcgctcaagacattagggcacagagattgggatggcgccggtgccggagtcggtgtcgaggccggtgcctgggcgtgggcggaagccgcgagcatgagcgcagtagcgaggagcaggagcgtggggaacgctatggatttgaaggccattttgctatgcggctagctaggctgtggattgtttcttgactgcg

SEQ ID NO: 32936 - DNA, 775 bp, Setaria italica
  Peptide Sequence Number=SeqID_98910
gagacagtagagataggatggatgagagggattcaagctcccggaagaagagatcaggtgagcaaaggtctgagagggaggcccatggaaaggagaggagtgcccgggagagccgagaaggcacaagtaacggcactgattctcgtagcaaggtccggtggttacagagccatatcagggttcgtgttgttagcgaaaagttgagcaagaggctgtacttgatgaagggtaaggttgtcgatgtagtgggaccaacaacatgtgatgttatgatggatgatggatctgaactggtgcaaggggtggagcaggatatgcttgaaacagtacttcctcggacgaacggtcgagtgcttgtgctctatgggaagcacaagggaatgtatgggcacctggtggagaagaattccgaagaggagattggattggtggaagatgcagatacaaaagatatagtacgtgttagatatgaccagatggcagaatatactggagatccggagctgcttggctactgattaatttatttttagcggatatttgcttactcggagctattccattgtgttaggtaatgtctgttccctattatgaccaacagttgttgctttgatgcaaaatcttgaaggaacaggtggttttgtatgcgtttacttgtatatgtattttgtacttatttgtcagtcctcggtgctaatccatgatttgggaggtgacctcttgtactagttggggctctttgaataaatgatggaatgtctctgaatgtcaaaaa

SEQ ID NO: 32937 - DNA, 236 bp, Setaria italica
  Peptide Sequence Number=SeqID_98911
tactacactcatatcagcaggcttttctgtcaatgaggctgatagatgtgtgtactaccgccatggtaggggtgagggagttatattgtgcttgtatgttgatgacatactgatctttggtacaaatcttgacgtgattaaagaggtcaagtcatttctatgccaaaattttgacatgaaagatctgggagaggctgatgtaattctgaatatcaagttgatcaaaggagagtaag

SEQ ID NO: 32938 - DNA, 1115 bp, Setaria italica
  Peptide Sequence Number=SeqID_98912
agaaatttacaattttactaataaagggaagttgccggtgctggtgagcctgttcatatccttgcatactatggtacatgcggtccatcaagatatgatgagttgtacagcatgctattgaacatcagagatgggagatacttacgtgcaaagaatatgctggcaaagctaaatagactcaaggtgccgataaagtgggagcatataactaaaattgctggtgagggagtggcacctggtcgattgcatgtagcaagggctatggttgaagcaggttatgtagagaatgtaaggcaagcgttcaacaagtatcttggtgatgatggccctgcatatgccagaggaagtgaaccatttgctgagactgttgtgcagttaattagtcgtactgggggtatatctgcactcgctcatccttggtcattgaagaacccggatgcagtaatcaggtctttaaaaggtgctggccttaatggtatggaggtctacagaagtgatggaaaggttgatggctttagtgaattagccgagaagtatggacttctgaaacttggaggttcagatttccacggaagaggcgggaaagatgaatctgacattggcacggtcaagcttgctattacaactttgtgctgtttcttgaagatggctaggcctatctggtcgactgctatgaaagacatcctacttaaatttgcagaggagccatcttctgcaaatctaggaaacataatttaaattggacaacttaccaatgctgatgctttttctccaataaacactggtattgatgttgttgatttctgcttatcctcatggtcaagcaatgatgacatggaagatgttgaactggaggaggtaagactgaagctggcccattatgcagcagaaagatgacatcaactacaaagccatcttgagcaatgttctcccccttgttgcaactcaatatctgtgtttcaccttttcctttgcagccgattcgaactaatatgtttcttcactagttgatgaccttgttgaaagtaggtatgctgaatctggtggtctttgacattttaatcaagaatgtatatttctctatgataatttaagcatgcaacattaaaatgatg

SEQ ID NO: 32939 - DNA, 680 bp, Setaria italica
  Peptide Sequence Number=SeqID_98913
ccttcaccccttgagaacttctgatatggatcgacatagaatctattcacagtcaattgcagaaaatgtgcattctcaggagtcagggaagaaaagttcttcatgctccaacagaaactatgatcttgggtctgatcctaatcaagctaagtctcatgtttctggtttccttaacagaggcacaggccatcatattaagaatgataaggacttgctgagagataaacaagacttgacgaatgcatgcctcataaacaagggttctgggctcagtattaaaaatgtccagttaaatcctgaacataaagttaacacagatgccctgccattacatgacaaccgtggtcacaagcaaccaacaggcagacagaatgagaaaacactgccgcattttgattcaaacctaagtgacgaagcaaacttgacttatgggaatgttaagcctgataaagggaatataccacataatgacctgaaaataaattcatctacagtcaaaggaagcaagcagcagccatcattaaacaacgcatcaaatggtgatgcctcttacaaggcaaagcaaatagagaagtctgttgttgaaaatttggaaactaggaagcaagtaactctgggtggcgatgcttcagatgtaccaaatgcatctgttctactgaaagaagctcgagtatttgaag

SEQ ID NO: 32940 - DNA, 167 bp, Setaria italica
  Peptide Sequence Number=SeqID_98914
cctccctaacatttgtaagtcctatgtgatgattcgctcaagatctccgcacctactggcacatcaatccctactaaacccaattgcatgctagtttctttcattgaacaaatgtatactcactcagtcaaatcatataagctgtattttatgagagtcttcaaaac

SEQ ID NO: 32941 - DNA, 455 bp, Setaria italica
  Peptide Sequence Number=SeqID_98915
ccaatctggaccatctctggagacaattgctgaagcttcataagttttgggtctgtcactggctgatatataggaatcattacacttccatcaaacaatgagcaaagtgatatcacaggaggagactttgatgactcatgcacatcaatgaaccttagcaactgatggtcaagaataactgaatgccatcccgttccatgagtcaatctctggggtgtttgtaacggtagactttggtcaggataaaggtttgtcacatataaatgtgattccaatggtccatccaatgtaccagtaaaatataccagttcagtgccctcgttgacagcaaccacctgctcaaccatccaatcaccttgtgtgagaggtccaaggcaagttccatcgttaccacaaaggtaaaatgtttaatcctgtcttctcgctggcccaaatgaacaatcttggtattattt

SEQ ID NO: 32942 - DNA, 220 bp, Setaria italica
  Peptide Sequence Number=SeqID_98916
attcaagctgctcattcgatggtctatcaagaaacgggagcatggtgtagtagtttcatgtccctagaaaagtaatgaattccatctgctaagtcgggtaccttccatcactgtgatataacggctgaagtgaggatcaaatacaccatcagcataactgattgttgggcgcactataatctggtgtaagaggcacaggtggacttccaactgacaagga

SEQ ID NO: 32943 - DNA, 503 bp, Setaria italica
  Peptide Sequence Number=SeqID_98917
tccgacggccgtgttctgtggacgaccgacgtcaccggtgcagctccggcggccggcaacgctgccgcggtgcttctcaacaccggcaacctcgtcatccggtctcccgacggcaccgccttatggcagagcttcgaccacccggccgacacgttcctccccggcatgaggatccgaatcaggtacgagacgcgcgccggcaagcgcctggtctcgtggaagggccccgacgacccatccccggggagcttctccttcggcggggacccagaaacgttccttcagatcttcgtctggaacgcaacgcgtccgatctggcgcagtgggccatggacgggcgactccttttccgtccaggtccagttccagatggtcatcagcgtcatcgtcaacctcaacgttgtcaacaccaagaaggagatctacataaccttcagcctctcacccggcgccgcgcataccagatacgtgctcacagactccggcgagtaccagctccaaaa

SEQ ID NO: 32944 - DNA, 1982 bp, Setaria italica
  Peptide Sequence Number=SeqID_98918
attttttttaagttataacattttcacatgacactaaaagaaaacactttgcctgcaaattgcagtggtggattgcaatatccaactctccacagatcaattaaaacatctcaggcaacacagcactccttgcttgcgggtgccgactgccgacgggctcaatgtaatgcaatgcaatggtttttgctactactactacacaattctcattgtccaagatgcacagcacaacgccaccatttccatttccacacaaatcatgaatgcggcctacgaatcaagtcgaacctacttcaattctatcaaactcctaatctgcaaacagcagctgagcacaagctggcaatttctgtcaatggcccaacgccaaggctaacaaagagaccaaaaccacaagcagataattgttcagtttcgctgcagaggctgatgaacttgatgaaccatgaggcttctgagccttctgtttatccttgaggagaccacagtagagcatgttgtctggagccaccatctcagtgacattatagcctccatttggatccaccaccctgatgtaagtctcctgacccagataccatgtgtccagattttctgtgcgcacattccagaaacctgggctgtcaagtgacagcatcacagcagtccatgctccaggaaacacctgggtcgtgcaacgagaaacaccatcccacttgttgtaagtcccacggctattctcagtccactcgccatagtccattcctacaacccagaacgcatatccatcgatatggtaggtctggacaattgtgtcgttgttctgaaatacaatttccaaaaagttcttgtatgtggagttaatgacagatgttctgatcaccggcggcccatcaattggcattgtagggaagtcaagtgtgtagactcccttcttgtcatagagatctgacaatctcagaggagtatcaggtggggaataagagataccactcagtgtagtccgttttttcccattgatgataacaggtggttcattcctcagcttgtaaacctggctcacattgatagagccatagtggaatgaaccctgaggattcggacgagcagcaccagtgctcacattcatcctgattgagcgtgcctggttcattgagaaagttttgtcatactcatcgtttggaggatcaggaagaggaccagatgctttgccctttgaatttgaatattgcaaaattgcaacaccagtgactttggtccagagtgattcattcacaaacctagcactggccacaatgtaataatcactgcttgcattctgatccattgtaaccaagaaagagtaagactggcccacatggatgtcgagatttgtgaaattctgcttcattgtgtatgaaccttctgtttcaacaagggccaggttgtggttctgaattctgaagttcaagcttgtggagacacccacattatggacacggaaacggtatgtttttcctggctcgactttgatagtctcgtactcaatgccatccgggacgagggagtcattgtacctatatggccccttgccattcatcaaaacaccgtctggcatccccagctcctttccatcatcaagcatctttctcaggtgcgtgtggttcttcttgtaccagtccccgatgaacaacgtgatgtccccatctggcgtgtcgaatgggactgagatcacggcgcggttgttgacggtgatgcctccaaaacccccggcggcacgctgcataccaagggatggaaagtagaaaaagctcccaatctggtctttgacttggaaattgtaagtccagttccaaccaggcggtatcgggcaggttgtgccgagaaccccatcctgccagcaattctttcggtgctggatcccatcccatgtgatgagcagtggctcgtccaagctgttgagcacattgacgacgacattgtagttggtggtgacattcatgacagggccagggaactgcttg

SEQ ID NO: 32945 - DNA, 543 bp, Setaria italica
  Peptide Sequence Number=SeqID_98919
accaaacattgccctaaaatatgatacaaacatgccctaaatatgatacaaacatgccctaaatatgttccagggcatatactgttaatgcatttcgccatttccgcatcatgggatttcagcttcgatcaacaatcccccatcaagtcttcattgaacccacgagacagcacagcgtcaaggagaaacaccgagagttgaatgatcgctacttcggtaaaagaaacaagcagagcagcagccatgcgcccatgcaaaattggagtcgcagaaaggataccactcgagcagaaacagccaatttaatcaagcccctgaccattaaatttgttccctgaagttgctaatccaaacattgaagtgcttaacacaaaaaattggtatggtagaatttcagcttgcaaatcagggctacataagcactcatctatccgcctccatggatctcatctcatgttgccctctctcaagacatcaatcatgtcatacagtttcttggtcgctccagattgtatctttgtgtagagaacatagcagcatcaa

SEQ ID NO: 32946 - DNA, 831 bp, Setaria italica
  Peptide Sequence Number=SeqID_98920
atccctgtgtgtccttggtctagttcttcttttttagttttttttttgtttttttttgtttttttttttaaaagttagccaagaaagattttattccatattccatattagagtgagtaatcgtatggtattatacaatatacaaccaacaataccatatgcattgcacaaagaaacgaagctgctttctgtcacagagacatggtccaagcacacaccacaccatactagctaccatacgcagtgcttagcaaggcctccttgatccagtcagatcaaagtttactagatgctgcaccgagatacttggagtaacgagcttgagcaatgattttgccagatttcttcttcagctccacaacggccacccctactgccttgccagcgcgcagaaccttcgcctcgatatcaatctcttcgtcggcaaaagcagcatccaggtaggagatgttcatctcgagtggtgagcccctggtgcggaggccggcagtggtgaaggcggcggaggcaaccagatcgacgagggaagcggttgcgccgccgtgcaggaagccgcccgagttgagtagcctggaggggacggtgaagtggcagaggagggtgccgggctggagggcctgcgcgacgcggattcccctgaggacgaaggcgtcgtagaaccccgagggcagatccgcctccgcctccgcccccgccggggatgtctcctccagcagcagccgcgccgtctccaacgacttgtcctgggagccggaggccatcccgccgatgaccaaatttctcctttttcccctccggtggcggatggagcctgccctgaaggcggaagac

SEQ ID NO: 32947 - DNA, 534 bp, Setaria italica
  misc_feature (1)..(51): n is a, c, g, or t
  Peptide Sequence Number=SeqID_98921
nnnnnnnnnnnnnnnnnnnnnnnnnnnnnnnnnnnnnnnnnnnnnnnnnnnaatctgaaaatgcagtttccaaattacttcagcgaaaaatgaacacactgttccaagataacttcagaactacaaatttgtaactttactaaggtctagtctgacgtaactcaataacacatgatcatttcttctacatggaacaagacaactacatcttcagtaattggtcattcaacaaaacacacatgcatacaggcgatacaaatgaacggcactgctggcctgttataaacagataatgatctagttagtgtttccatcctttagaaaagccttccggggtgtagggctccaagaatccgatgaactttgaaccatcttgagaccatctggcgccataaccttcatgcacacggatttcgaaaacaggaccgtatggttgagtccagatgaacattcatccaacaacaatcacgtaacaaagagccaatggcttcagatgtgagtttgttcttgttacgaatctgaagacaaatgatg

SEQ ID NO: 32948 - DNA, 251 bp, Setaria italica
  Peptide Sequence Number=SeqID_98922
taggtctctgctagatagcggcagattgctcttgaatcttgcagaaacaggggaccatcatagaatggaaccggaacacttcttgatgcctggaggctgagtatgtccttgtaagaggctttgattgtctcaaacttgacatttttctcatacaggcatgtgagcacccttgacacatctggtaggatcatggacttctcatggtacacattcaccacgggaggccctgctccagtgctaaggcttgccat

SEQ ID NO: 32949 - DNA, 789 bp, Setaria italica
  Peptide Sequence Number=SeqID_98923
acaactagaatttaaagttaattcacttggacaacaaacatatgattctagtatgtgcatgtgtggcttgcaaaatactatgtcactgtaactatgcaacccaatcgttacacaacaagctaggggcattaccttgcagaaacaggggaccatcatagaatggaaccggaacacttcttgatgcctgcagagacaaatgaacatgatacaaactttagatgagggttgagttgttctaagccaaacaaactgctgcttctactatttgggtgttgcaaaggacattgggacatatacctggaggctgagtatgtccttgtaagaggctttgattgtctcaaacttgacatttttctcatacaggcatgtgagcacccttgacacatctggtaggatcatggacttctcatggtacacattcaccacgggaggccctgctccagtgctaaggcttgccatggaggcaagagctcaggctcactggttggaagaactgaagttaatggtgtgcaagcgtggtgacccaaccgtcattgttttaatattagaaggttctgttcgtgcctgcctgaggaagcaaagagaagatgcttaaagtgtggttgagggagaagcaggactagaaatagataaaagggaaaaggaaaagaaaagaggagaaaagcaaaaggtaaagttacctacatctggaggatttggattgtggatgatcttatttataacttcatgccataagtttatatgtggggaattttgattgtgggcgatgtttaaagggaataggcttct

SEQ ID NO: 32950 - DNA, 1795 bp, Setaria italica
  Peptide Sequence Number=SeqID_98924
cccgtgtgcagccgcctctcacaagccacaactagtagcactctaccgcacgccgcacggaacgtcggatccacgcccgcaccgtcgccgccgcctccacctcctcctagatggcggcggcctcgccggagaagaggcctcctcgctcgctattcgaccttcccgccgaattctttgattcatccatcctcctccgggtccacccctccaggcccccctccgcagttgaaccgtccgagccctcccggccaccgccgacgactcagcagcagcagccttcagaggctgcggggttcaggtggacgtgcaacacctgcgctgccgagttcgaatcgctgcaggagcagcgcgagcacttcaagtccgacctacaccgcctcaacgttaagttgagcattgctggtaaaactattataaaggaagaggacctagacaaagcagattctgattctctgtttgacgatttggagatatccagtgtatctggttcggaggacgaactagaaaatggacctgcatcagagcgtggactctcagttaaaggcaaggaagaattcaggaagaaactttattttcggtgccaatcgggtgacacgatttctatctggagatgcatactgttgaaggaacatgaagaaccagttattgatcgcaagtctggtcagatggaaagtgcatcttttgtacaggaggatgagatgataaatagggtgaagcggttgacatgtgaacctcgtgatgcatcacatttgaggattgttctactaacaagtggtgggcattttgctggatgtgtttttgacggaaattccatcgtagctcataaaacatttcataggtatgtcgtaagagcaaaggctggaaagaggcaatctggaaaagatgctactggcaaaagttgcgcactcagcaggctcttctcttcgacgctataatgaagcagcattgaaaaaggaagttcaagaattaatagtttcatggaagccatactttgacacctgcgtttgtgcctttatttacgctccatcaaagaatcgccaaatgctctttgatggagataagacccagtcagtaattcaggcttgtgatattcgtgcagttccgttgactgttcatcggccaccttgaagaagctaagcgggtatatagtaacctaacacagctccattatgagatggaatgtccaactgcagatgaaaccataccccgtgatgaaagtgtgacaagtgctgaacaaagtcaagggaaaaataaggaagtggctgtggactctgaggaatctatttctgacttatctgtcagcttggagttgttgaataagaatgaaggagtaaccgcaccatcatctaagaacgaaacaacacctcttcacgaggcagctaaatctggcaatgcccagctgactttggagttacttgagcagggtttggatccttgcatcagagatgcaagaggaaagacaccttacttgctggcttcagataaggaaattagaaatacattcagaagatttatggcgctcaaccttgacaagtgggattggcatgctgcagatgtgcctagtgcacttacgaaggaaatggaagaatcacaagctgcaaaacaggcagagaaggatgccaagaagaaagcacgtgcaaaagaactgaagaaattaaagaaagcaagagaaaaggaggagaaggaaaaagaaaaggcgaaggctcaagcatcacaagcccaaacttcaatgggccaaatggccaacagaactacttctatgccaggccttaaaccaaagcatcacgaccccgca

SEQ ID NO: 32951 - DNA, 488 bp, Setaria italica
  Peptide Sequence Number=SeqID_98925
cggcggcgaggctggccgccgccgggcagccgttcgaggtggttcactacccgcgcgcgagcacgccggagttctgcgtgcgcgcggccgcggtcagggcgtccatgcaggtgccgtggtgccccggcatgcggttcaagatggcgttcgagaccgaggactcgtcgcggatcagctggttcatgggcaccatcgccggcgtcaaggccgccgacccacccgctggccacagtcgccctggcgtctcctccaggtggcctgggacgagccggagctcctgcagaacgtgaagcgcgtgtgcccgtggctggtcgagcaggtgtcgagcatgcccaacctccacctgcccagcttcacgccgcgcaagaagccgcgcatcccggagttccccttggagggccagccgctcttcgacccgggcttcccgcccgccgcccacccgcttccgccgctggcgccccacccgcgcccacaccacgaccaaaacc

SEQ ID NO: 32952 - DNA, 624 bp, Setaria italica
  Peptide Sequence Number=SeqID_98926
cgcggactcttttttttccttcggggcgtggtcggatggggaatcgaaccggtattctccattacgagtggcaggtgggtaaattttacgaagtttctcccccacagccactgaaagcaagtccagaccggctgtgagttttgtactaaggaaaaagctgcttttgccccaaagcacctatgggtttctacccctttggttggcttttgagaagcaaaagcagcttccaaaagcccaaccaaaggcacccatattcaaccaatagttagatggaagcaaacatgttatcgaaaagaacaatttcatgaacggtcatgccaataaatgaaatagcagtaaaccatccttttcagtactgccactatctcacttcccttgaattattaagctcagatttcacaaatttcagtacatttgggagattgaggactagatgtgaaaagatctaaccccagctgctggctacatctatcatgatatcttatttacaacatccatatgcctccccaaataacttatgcacttgtatctatccagtgtctgctcattactagagctagtagctcaaatatgattcacggtacaaatgatgccgtttatagaaagtctaacaaaaaaggaccg

SEQ ID NO: 32953 - DNA, 329 bp, Setaria italica
  Peptide Sequence Number=SeqID_98927
aagcggcttatcggtggaaataagcaagaatcccgccaaacgctttgcttatttccaccaattctcgcttatgtggtaagccgcttcaacgatttgaactacgagaagcgaaaagcgagaagcgagaaaatcttcgcttagattataatctaagcgtggctaggaaaaacgtatacaaacagggccatagtttggtagggtggtaaatgacagtgtgcactgttgcgagggagcaaagttttttcttcatttcttgtttagcttggtccggtccttgttgtgattagtactgacatctgcacctgcagctttttttgaaagcgtcaaat

SEQ ID NO: 32954 - DNA, 439 bp, Setaria italica
  Peptide Sequence Number=SeqID_98928
agcccgggtgggttggagacccacctttcttgccggcagcggcgtttgcagatgccgactgcatcacaccatcaaggcagcctaagccttgatgaatatagagaaaaatggtcggcgtcacatgatggccgaccttgctcccagctcaaggcatgggtcctctccaaaaagggcaaggcgacggccgatatagatttcaacccagacgacccgtccgaggcgtacagccatcctagcatatacagccgcgtcagcgagtatacaaagatggctagggaggttcacgggccagacttcgatccgagctccgaggacattgatggagaaatcgtgatgagggtgggaggaggcaagaagcatggccgatattggattgacgacggcgtaatcgacatggcctctactccctctctctcccaaatccgagctaggagcacgg

SEQ ID NO: 32955 - DNA, 310 bp, Setaria italica
  Peptide Sequence Number=SeqID_98929
cgcgtggacgccggcggcgacgacggagagcagcatgaagagcgcccaccagagtctgagcggcgcggggaaccgctcctgatgccgccgccggccgacgccaaactgcaggtacgcggcgagcagcagccacgccaccgcgcgcgccgccgcgtccccccgttccgcgatcgcgtcgcgagaccagccggcgccagcgtccgcataccacgagtacgcagccaggacgagctggaacgccgccagagcccacgtggtgcagactgcgactgcgtagcaccggaacccgactacgccgcggccggcttct

SEQ ID NO: 32956 - DNA, 397 bp, Setaria italica
  Peptide Sequence Number=SeqID_98930
ggggccagccgggaggcccgacccggtgcgcgccttggtggtgaccgaccacccgaccagccccgccacgacgaggtagctgaccccctccgccgcgccgagggcgccgccggggcccgggggcaggccgcagcccgtcgtgttgagcgtgtacagggaccacgccacggtcgcgctcgacgccagcccggcggcccccgcggccagctcgagggtgctgttgccgccgctcggctccgccttgcaggtgatgatggtgcggcgccggcggggtctggcggcgtggcagcagcgggaggcagcggtcgcgagtgccgtcgaagcggcagtggccgagatgatggggcggagggcaagagacgccatggttatcttgccttgctgggttggagcagac

SEQ ID NO: 32957 - DNA, 391 bp, Setaria italica
  Peptide Sequence Number=SeqID_98931
cagcgtcaaatccttctttggtcttatttccaggtttaccccagcaaaaacaaactattctctgaaactttttttgcttcctcttcttcagaaaactcgactagagcacttctgtggcactgctctagtcgagttttctgaagaagaggaagcaaaaaactcgactagagcagtgccacagaagtgctttttgtttgcaatatgacgtggtagtctcacactgttcacctttgcatattgtgcgaagaaagattggacatcttccagctttacattgtaaggcagtggcgatgcagcaactgtcctagaatctacttgctctatgacctcatctggcttcaacaactcacttgctctaccaatcttctttccgtcctctgattacgtcggt

SEQ ID NO: 32958 - DNA, 1760 bp, Setaria italica
  Peptide Sequence Number=SeqID_98932
ctctgtaaacaagtcacgtacaatcaaacactatttctgtgtttctttgtttacaatctgcaaaacccagcgagcattgaggacggtatcagaaacagaacacctgcaccaggagctcatgaggccagttttgattttatacacgatattagttgaccactcgtatcacaataaactcaaccaaatgttcagaatttgtgcaagtaaacatcgcaacaaaccaccaaaagaaccaaaatggtaagaacaagtctctgatgcttggagactagtggagataagcagcatggtgcatgttacttcctagtcgaggtactaccggtagctaaattagtctcacgcggcagcttcaaccttctgggccttattagaattcttctcagcatcagggtttctacctcgcttcccattgaactgctttcctcctctgtagttctttccggcccttcctttgtagcttctattgtccttgtaattttcttgaatgccacgaattttgctccaataatccttctctgcttcaccagtcacagcctccaaagtaatgatgtggtcttttattatcaagccaccttcatcagctagtacagcagccacgcgagccttttcagctgccttagaatcttcaaaacgaaggtatcctgaatcatccccgatgctgaagtccacataccgaacatttccaaatttcttgagtgcttcttttagatcctccctcgagattgggttcttcacattgccagaaacactattgccatccctgctcaatgattcactatctccacgcttttcgcagtcttccaaggcatcaccagtgcacttctcagattctgtagcttccttaatgtttacctctttctccttggtcatgttgtccgaggacttgtcatcctttgaatcagtattatctgggatcctctcagatgcctcgcctgatggattctccacagaattggaagtttcgttagtttgttgaaccgcagactcagccatatccttcttcaatttgaaggccacaattaggccttttggaaagccttcatcctgactatccttgacagggtgcgccttttcgtattcttctcttttagattcctgttcagcgtcaaattccttctttggtcttatttccaggtttaccccagcaaaaaacaaactattctctgaaactttttttgcttcctcttcttcagaaaactcgactagagcagtgccacagaagtgctttttgtttgcaatatgacgtggtagtctcacactgttcacctttgcatattgtgcgaagaaagattggacatcttccagctttacattgtaaggcagtggcgatgcagcaactgtcctagaatctacttgctctatgacctcatctggcttcaacaactcacttgctctaccaatcttctttccgtcctctgatacgcggagcacaggagaacgtcgcagcacctcagccaccgcgagcacagtctcctccggcacagtctcaggcttcaccgcggcgtcgagccccaggtgggacttcatccgcgagaaggaacatatcaaggccaagctcaccaggccatcgtcgctctgctcgaccgtctccctcaagaacttgtcgcgggggaggttgctgtcgctgaagtagaactccacctggcgaaggacgctcttcgccttggcctcgtcgagcggcgcgggggcgggggcggcggcggccatggatggctgggctccgactgcgaattcgaagacttagaaaaatttaggttaga

SEQ ID NO: 32959 - DNA, 450 bp, Setaria italica
  Peptide Sequence Number=SeqID_98933
ctccgccgcagcctgtccccgtgaccgccaccgcttcctccaacaccacccccggcgcccgcaaggaactctctttccttgacgagaacggccaccctgacgacccgggctcgtcctccggctcggacgccggcgccgcgggatgcgacccgcgcggtgctgcagtcagggtcttcatgtacgacatgccgcccgagttccacttcggcctcctcggctggtccccgccctctcccgactccgtctggccggacctctccacgccgccgccgcgctaccccggggggctcaaccagcagcacagcgtcgagtactggctcacgctcgacctcctctcctcgtcctccgctccctgcggccccgccgtgcgggtcgccgactcccgcgacgccgacctcgtcttcgtccccttcttcgcctccctcagctacaaccgccactccaggcccg

SEQ ID NO: 32960 - DNA, 700 bp, Setaria italica
  Peptide Sequence Number=SeqID_98934
ccgttaccgaccatgaaacctttgaagttgatgaaaggcttctctacgccgatgttgttcctgtacacaagctgggacagctgaggaacatagtgacctgcatagctctctcctgcaatgtagaaatcacggtacttgtactgcgggaatctctgcgggaatctctcgaaccatttctacgagtcacgtgccgttctgtcgtcgccaacaacgaggtcagagctggtgttgctgtaagagaaccccacgccggccggcgactccaagaacagcacgttcgccgctttgttccaagcgaactcgttgagcaggagcgtctgtccgtcggtgttgacgcggaacgcgccgagctcctcgaacgcgccggagccgacggaggagcacccgggcccgccgttgagccagaggacgagcggcgcggtggccgggtcggccgtggcgcggtctgcctcctggaaccagtagtagagcgcgcggccggcgccctcgtcgacggtgacgtagccgccgtacatgtcgaacgccacgccgtcgttgggctgccccggcatcgccaggatgcggtcctcctcctgcgagttctcgtgggacgacccacttgccagtggcggcaccaggaggaggaggaggccggcggctaaggcgaggagtagtggagagcagtggcaggagctgctagcagccattgtttgattcttcc

SEQ ID NO: 32961 - DNA, 1748 bp, Setaria italica
  Peptide Sequence Number=SeqID_98935
ttttaaaaggacaattactcagaataaacatgtttagagatgtgacaattattggggagatccacttgtacaaaaactgtgtatgacaaaattggtcagaattcagatagtgctgttttcgctcaagtgtttgtctagactctgatcacaagatcagttcaaacatcaactgaatcctgctgccatcagcaattgttacaatttgaacatgctgctgtttcaacagcaaatccttgtcttcccacaaccaaaagcagtaacagttacaccgtttgccttttattactcataacagtacaagcacactgtagttgtggttatcaaggaaaatctcatgagtagttaaccgcttccttgtgcatcagcgccctccaaccaatgtcgcgcctaacaaacccttctggccaatcaacagcgtctaccgcatcatatgctcttgcccttgcttcttcgatgtcgttgcccttggctgtgacaccaagaactcggcctccgacggcgacaagattcccatctccatctagagctgtcccagcatggaatatcttgactgctggagagacctgctcagccttgtcaaggttttttattacagtccccttcttataagagccagggtatccctggcttgccatcacaaccaccattgccatttcaggtgaccaggttactgaaacattgcctaaatctccccggcaagcggataacagaacttgtgctaaatcagattccaatcgcatcatcagaacctggcattctgggtcaccaaatcttacattgtactcaataagcttaggaagcccagatttcttctcaatcataagcccagcatatagtacaccaacaaacttgcacccttctgctgccatacctttaacggtagggataattatgctttccatgataatgtgcttgagctcatcagtaactattggtgcaggggaatatgcacccataccaccagtatttggaccaacatcaccatcaccaactctcttgtgatcctgtgccgattcaagaggcaacgcattttcaccatctaccaatgcaaagaaagaggcttcttcaccctccagaaactcttcaataataacccgtgaaccagcagaaccaaatgaaccttcaaccaacatagagtctatggcttcgaatgcctcatccaaagtcattgcgacaaccacaccctttccagcagccagtccatcagctttaacaacaataggagctccttcatgtttgacataatttttagcttccacagcatccgtaaatgtccgatacttggctgttgggatattgtacttatcacacaacttcttcatgaagtccttggatccttctagcgctgcagcctctgaagaagggccaaaggttggtatcccaactttaacaaggtcattggcaagaccagcgacaagaggggcttcaggacccactacaaccattcccactccccttttgcgacagaacgagataacatcatcgctactggagatgtccaagtctgagatacaggttgcatccccggactgagcaatacccacattaccaggggcgcatagaactgcattgcaagacggggaacggttcaaggcatagcaaagggcatgctccctgcctccaccaccaattactaatacagttatcttctcatcagtaacgatgcctgcatcggttgctgaagctttcagggtggatcgccaccttgctgaagcccgaacactcaattgacaatgtgatgtgacatt

SEQ ID NO: 32962 - DNA, 723 bp, Setaria italica
  Peptide Sequence Number=SeqID_98936
gacgccgccggtaacaccgccgtgaagcagatcacgacgaggcaccgcctcctgctcgagaagatcgtgagcttgctcccggcggagagggatgccgtctcctgcggcttcctgctcaagctcctcaaggcggccaacatcctgagcgcatccgccgcatccaagtccgagctggtgcggcgggtggcgtggcagctcgaggaggccggcgtcgcggacctgctcgtcccgtcgctgtcctgcgtcagcgagacgctctacgacgtcgacgccgtggcggccatcctcgatgagttcgcgctgcggtacgcggcggtggcgccggcgccggcgctggccctgtccgggagccccgacgacagcccggtgcactcgggcgggcaccggcggtcgcgctcggccgagagcgtgagcttcgacggcacgcggcggtccttgtcggcggcgcccgtgtcgcagggcgcgctggcgcgggtgggcaagttggtggacgggttcttggttgaggtggccaaggaccccaacatgccgctggacaagctgctcgccattgccgaggccgtgccagacagcgcccggccggagcacgatggcctctacaaagtcgtcgacacatacctcaaggcgcatccggagatgaacaaaagcgcgagaaagcggctgtgtcgggtgctcaactgccggaagctgtcggagaaggcgtgcgcgcacgcggcgcagaac

SEQ ID NO: 32963 - DNA, 828 bp, Setaria italica
  misc_feature (800)..(800): n is a, c, g, or t
  Peptide Sequence Number=SeqID_98937
ccgcgtcgtacgcccggacgtccaggaagtcctcaagagccctcgccgtagccgccctaagaagcagcagcctccgcctccgccccagcccccgccgccaaggaagcagaagcaggtaaaggagaagaaagaccgggggaaggagaaggagaaggagaaagagaagggagaggaggagcaattcgatcccgtgcggtacaattgcgccttccagcacgaggacgaagggagccgcgacttcgcgccgccggagcttgtttggggtaaggtgcggagccacccatggtggcccggccaggtcttcgacgctgctgacgcgtccgaggtcgcgctgcagcaccggaaggccggcgccccgcttgtcgcctatttctgggacaggaccttcgcttggagcgacggctccgcgctgctccccttccacgccaacttcacgcggttgtccgcccagagctccatgtccggcttcgtctccgccgtcgacgccgcgctgcaggaggttgggcgacgcgtggaagctggcctctcgtgcagttgtttcgcttccagtgttgccaccaggcaggaggttcagaactctggcatccggcaaggagcctatggtgcagcggtagacgcctcgtatatgagggacgccttccaaggcaaagcatttctgaactacatctcagcactgggaaggaggccgctggctggcgctgatcttcttgaccttgccactgccagagcgcagctgagggcgttcaaccgatcgaaggggttcaagggatctccctgagtttgtgacgtttgagggtatngaggagtttgcgggtggcgatcccacgc

SEQ ID NO: 32964 - DNA, 174 bp, Setaria italica
  Peptide Sequence Number=SeqID_98938
ttcagttgacttaagaaagaagtacccaacctctagttgttgaaggtagtattcaggaatgattggataaattcaagtacacattagtataaaagtgaaccagggcttctgtacaggcaatgataaataatgtgacctactaaatcagcagggaatggacctccctcctaccag

SEQ ID NO: 32965 - DNA, 374 bp, Setaria italica
  Peptide Sequence Number=SeqID_98939
ggtaaatgtaaggttagtggtagggcaaagaaaggtggctacttcaaattcaacaaaagaaacaatcctggggtggtcatctatctgatgacccaaatgatggaaaccacactccagatgatgttgatgatcagactccattgtttgttcacaggtctagggagcttgaggataactggtttgatgaggttacaatgagtcacccagtcatgacagaaggaatgttgtttactgatgttggacaatttagagagtatccattgggagtattcatgccaggattttagtttggtatttttttatgttttttactgtatcaccatcctgcagtaagtcaggtaaacatccgagctcttcttgttcttaaaaaaaaa

SEQ ID NO: 32966 - DNA, 372 bp, Setaria italica
  Peptide Sequence Number=SeqID_98940
aggaccggagcgcgccggcgacggcgtccacggcctccggcgcggtacggaagcaagggaacaccgaagggtcgccgtgccccatcgggatcaccggccgcgcgccgccgccggccaccatcccggccttgaccctgcccagcacgccacgcaccgagagcgccgtcaggcccagaagggcctcgttcggcgcgaagttccacgtggccgccggggccgccgccgccgccgccgccgccacggccatcccattgccagcgccgttctccatcgggggcgtggtggttcttgtggcgcgcggcgcggtaggcttggcttgttggcgcttttggcggcggcgagcaggagcagagtggagaagtaggatgtgtg

SEQ ID NO: 32967 - DNA, 755 bp, Setaria italica
  misc_feature (5)..(5): n is a, c, g, or t
  Peptide Sequence Number=SeqID_98941
tgtcnctagtttttttttttttatttcgtttgcaacgacgaccactagtttatgaactgaattgagaaggctaatacaccaattttgtacacataggagaggcgacacctaaaattcccaatacaaagtaattttgcagtcaatgttgcattatgctgcctgagacagttcaacttcatagcagcaagtgcggtttgaaacaacaaaaaataactgaaatctcagattcaaaacattgtcatatggcagtatggcttggcaacaatcagtttccctcacagtaatttcacaccggcatctctaagagagtctatcacggccttaaccttgccatggtacttctgttctcttgacatggagacagatactgcagggatacccttaaacagcaagcgctcaccaagcagctttccaatctttgctgccgcagcaacatcccgcgttgactccatgcttggcctcaggagtttctcctgagagcttgcggagcatgtgactgtggccgatggagtgtgtatgacctgagcactcacaaaattgtttgtgaaatgcatcttcagaatatagggcttcagaaacttggtgattgcaggagccatagctggtggaggggtaaccatatcgtctaatcaagcgggtcgcagtcgtctcctcctgttccccgcggccgaggagcttggcgagggcggcggctcgcaatcgcctgccggtgccggcgccgcgatagaggtagtaggattgtcgtattaaatgag

SEQ ID NO: 32968 - DNA, 1454 bp, Setaria italica
  Peptide Sequence Number=SeqID_98942
gtttaccttctgagcttggctaattcggctcttggtccggccgtacgcgccgtctgtctttctcctaagcggtggctgcgagcgggcctgcgtgccttgccttgctctcgattcatgggcatggcggcctcgccggcttgtgctccggggctcatctccggccccacgctccctccccagcgcgttgccttccgttgctactgggccccaaagccctcctcgtcgtcgtcccacaccaggcgtccgcggcgcaggcgcgtacttgtggttgcaactgcctccgcccgcgcctcccctgcggccgctcggggcctcgacgccgacgacttccgccacccgctcgacaagcagaacactttgctgctaagagcgatccctggccttaacgacatgggcaaagctttgctaggcccggtctctgagcaagtcatggtcctccagaacatcggatcatctgttcttgtctctccaaaccagctgccagaacttcacgagctccttgttgaggctgcgaaactcttgaacacagaagctcctgacttgtacatacggcagaatcctgttcctaatgcttacaccttagcaatcaacggcaaaaagccattcatagttgttcacacaagccttgtggagcttcttactagaaaagagttgcaggctgttttggctcacgagctgggtcacctgaagtgcgatcatggtgtgtggcttactttcgccaacatactaacaatgggagcatacagtgtccctggttttggcatggttgctggcttcatggaagagcagctgtacagatggctgcgagctgcagagctgacttgcgatagggcggctcttcttgtggtgcaagacccaaaagttgtcatctctgttctgatgaaactggctggaggaagcccatctcttgccgaccagctaaatgtggatgccttcttggagcaagctcgttcctacgacaaagctgcatcaaacccagttggttggtacatccggttagaactattaactcatggaccatgattggcaatctattaatgttatggaaatgaatgtgttgtatggcatttctctctatctctttacgcgttgcaggaatgctcaaaccagagagctttcacaccctttgcctgtgatgcgagctcgcgagatcgatgagtggtcaaggagccaggagtacaagactgtaatgccaaaaattgattcagctgggtctaaacaaagtatagctaatggagtctagagtttgtagcttgtatatgaaacggaatgtttggatttggagaaggctggtgctgctggagaacagatacaaacatggacatatgtactgtatatatttgcacttgaagtttagttttcttgtatatgctcttttctttcgtcctgttacagtgcactcttgtaactagaagtagaattaataaaagttaattgaattattaattttcttg

SEQ ID NO: 32969 - DNA, 612 bp, Setaria italica
  Peptide Sequence Number=SeqID_98943
agaactaagtgtgagtagtcgactcagtgtgagtagtagcagctgtacagatggctgcgagctgcagagctgacttgcgatagggcggctcttcttgtggtgcaagacccaaaagttgtcatctctgttctgatgaaactggctggaggaagcccatctcttgccgaccagctaaatgtggatgccttcttggagcaagctcgttcctacgacaaagctgcatcaaacccagttggttggtacatccggaatgctcaaaccagagagctttcacaccctttgcctgtgatgcgagctcgcgagatcgatgagtggtcaaggagccaggagtacaagactgtaatgcaaaaattgattcagctggggctaaacaaagtatagctaatggagtctagagtttgtagcttgtatatgaaacggaatgtttggatttggagaaggctggtgctgctggagaacagatacaaacatggacatatgtactgtatatatttgcacttgaagtttagttttcttgtatatgcttcttttctttcgtcctgttacagtgctaactagttaaattagactaaaaaatttagtaatttactaagtacttaggggtacttaaaa

SEQ ID NO: 32970 - DNA, 251 bp, Setaria italica
  Peptide Sequence Number=SeqID_98944
ggtgatgctagttcgtgccaattcttctccgaattcactatcacatttttttcccttttttgttctgatgagcaagttacagaaattacagcttagaaactgtggctgatctgaatcgtgccaaaatttcaggggctactaccgctgcacgcaccgccactcccagggatgcttggcgacgaagcaggtgcagcgcaccgacgaggacccgacgctcttcgacgtcatctaccaggagagcacacctgccg

SEQ ID NO: 32971 - DNA, 1070 bp, Setaria italica
  Peptide Sequence Number=SeqID_98945
cgctccatcagcatcatcacctcctccagcctcgacgccggcgccggcggccggaagcggcccgcctcgcccctctcggcgacgcccaccagcgacgtcaccgacgggcctttcaagaacgccaagaagaggaaggtcatggagaagaggaagcaccaggtgagggtgagctccggctccgccggcggaggagccgccgagaacgacggccacagctggaggaagtacggccagaaggagattcttggagccaagaacccaaggggctactaccgctgcacgcaccgccactcccagggatgcttggcgacgaagcaggtgcagcgcaccgacgaggacccgacgctcttcgacgtcatctaccacggagagcacacctgcgtccagaggccgacggcggcggcggcaggccagccggagcacaacccggaggcgaacggcctcctgcagagcctggccgccggcctcacggtgaagaccgaggggctgccggccttggccgcggacccgcagggcaggggcgccgccgcgccgttctacctctcctcctcgacgccggcgagcgggtgtctggcggcggccgagcgcagcccgttctcgacgtcggagaactggggcgtgtcgccggcgacctcggactccaacaaccacgtcgccgcctcctacctgccgttcgaggacgccgagtggcgggggcacaacgagctccaggaggtcgtgtccgcgctcgtcgccgccagcgcgctgccgccgctgcccgccgtggacggcttcgacgagttcctcgacttggacatagcgagcttcttggcgtgatccgatcctagcgccgatctccgtagctgatgaaaaatagggaaatcgaagcagctgatgtgatgcgaccatccctctggcctctgggccttcgtccaggaacagaggagggaagagcacgagctctgcttcctgggtccatgcaggcgtaaaaccgtagatgatgagagtagtgaatgtctttttttcctctcttattcttttgctcttctgaaactgagagtgttgtgttgcattgtattattgattctttt

SEQ ID NO: 32972 - DNA, 431 bp, Setaria italica
  Peptide Sequence Number=SeqID_98946
ataattgacagcaaaatcacgatccctttcagtattgctctgaaaatcacaaattcctctagcccgaatttcttcgtctgaaacagcacaggtcttcaggtttctcactgaaactgcttctaggtacaggtagtataaaccctggttcttgcttctggacttccctcctccaacatccatattgttcagtactttgacgattccagttaccgttactatctctccagggatgcaacaatcaacgaggtcttctgtaagctcacactcaattgttcgtggcactcggccttcttcatggttgtcagcactaacaagctcctgtatccttattttctggaaatccatcaactttgcactagatctatctggagtgaaggttctgctcctgcatccctgaatggtacaggacatttggtaggttgtaaaacttt

SEQ ID NO: 32973 - DNA, 382 bp, Setaria italica
  misc_feature (28)..(28): n is a, c, g, or t
  Peptide Sequence Number=SeqID_98947
accggcaagtacgccgccgcttcgtccncggcgtgcagggctacgccatcgccggccccgtcaactccaccgacctcgaggcctccgcctgctgcaagcacttcaccgcctacgacctcgagaactggaagggcgtcacccgatacgtcttcgacgcccaggtgggcgccgccgatgatccgaacggttcagcaggtctctttggccaggcggtctgagacactgaaacaaaatgcaaaacctttctctcttttcaggtgacggtgcaggatcttgaggacacgtacaaccccccgttcaagagctgcgtcgaagacggccatgccagcggcatcatgtgctcctacaaccgcgtcaatggcgtgccgacgtgcgccgatta

SEQ ID NO: 32974 - DNA, 2439 bp, Setaria italica
  Peptide Sequence Number=SeqID_98948
caacatcccgttctgcgacaggtcgctgccgatcgagcggcgcgtggccgacctcgtggcgcggatgacggtggaggagaagatctcgcagctcggggacgagtccccggccgtccccaggctcggcgtgccggcgtacaagtggtggtcggaggcgctgcacggcgtgtccgaccacggccgcggcgtccacctcagcggcccgctccgcgccgccaccagcttcccgcaggtcatcctcaccgccgcgagcttcaacccgcacctctggtaccgcatcggccaggtgatcggcgtggaggcgagggcggtgtacaacaacggtcaggcggagggtctcaccttctgggcgcccaacatcaacgtgttccgggacccgcggtggggccgggggccaggagacccccggcgaggacccgacgatgaccggcaagtacgccgccgtcttcgtccgcggcgtgcagggctacgccatcgccggccccgtcaactccaccgacctcgaggcctccgcctgctgcaagcacttcaccgcctacgacctcgagaactggaagggcgtcacccgatacgtcttcgacgcccaggtgacggtgcaggatcttgaggacacgtacaaccccccgttcaagagctgcgtcgaagacggccatgccagcggcatcatgtgctcctacaaccgcgtcaatggcgtgccgacgtgcgccgattacaacctcctctccaagaccgccaggcagaactggggattttacgggtacatcacttcggactgcgacgctgtatcgatcatccatgacgcgcaagggtatgccaagacggcagaagatgcagttgcagatgtcctcaaggctgggatggacgtgaactgtggcagctacgtgcagcagcacggcgcctctgcactccagcaggggaagatcaccgagcaggacatcgaccgagccctgcacaacctgttcgccgtcaggatgcgtctggggctcttcaacggcgaccccaggcgcaaccggtacggcgacatcgggccggaccaggtctgcacgcaggagcaccagaacctggccctggaggcggcgcaggacggcatcgtcctcctcaagaacgacgccggcgcgctcccgctgtccaagtccaaggtcacctcgctcggcgtcatcgggttcaatgccaacaacgccgagaggctgctcggcaactacttcggcccgccctgcgtcacggtgacgccgctccaggtgctgcaggggtacgtgaaggacacgaggttcgccgccggctgcaacgccgccgcctgcaacgtgacggcgatccccgaggccgtccaggtggcgagctcggtggactccgtcgtcctgttcatgggtctcgaccaggaccaggagagggaggagatcgaccggctggacctgacgctacccggacagcagcagagcctcatcgagagcgtcgcgaacgcggccaataagccggtgatcttggtgctgctgtgcggtggcccggtggacgtgagcttcgccaagaccaaccccaagatcggcgccatcctttgggctggctaccccggcgaggccggcggcatggccattgcccaagtcctcttcggagagcacaacccaggtggaaggctaccggtgacgtggtacccacaggatttcacgaaggttcccatgacggacatgcggatgcgcgccgacccggcgacggggtaccccggccggacgtaccggttctaccgcggcccgaccgtgttcgactttggctacggcctgagctactccaagtactcccaccgcttcgtcgccagcggcacgaagcctccttccatgagcgacatcgccggcctgaaggcgctggagacgacgagcgcggccggcgcggcgatgtacgacgtggaggcgatggggtcggaggcgtgcgagcggctcaagttcccggcggtggtgcgggtgcagaaccacgggcccatggacgggaagcacccggtactggtgttcctgcggtggcccaacgcgacggacgacggcagcggcaggccggcccggcagctgatcgggttccggaccctgcacctgagggcgatgcagacggcccacgtggagttcgaggtgagcccctgcaagcacttcagcagggcgagcgaggacggcaggaaggtgatcgaccaggggtcccacatcgtcatggtcggcgaggatgagttcgagatgagcttcatggcgtgatcgaattagtacattccgatgagtgtcaaaaaaaaattgtattccgatgctctctaacttattccaagcagagaagggtaatttagcaagattacggcattgctagtgccagattgttcatcgacaaatcagtctgccacgtacctcacacctaggagttgttcttgtcccatgtcccatctgattgaactacggatagtaacacaacgcataa

SEQ ID NO: 32975 - DNA, 214 bp, Setaria italica
  misc_feature (14)..(14): n is a, c, g, or t
  Peptide Sequence Number=SeqID_98949
gatcatggagcccnccgggatggtgaagcggccggcggcgcggtccatggccagcgcctgcaggatggtgaagttgatctgcacgccgatggcgatgctgaggaagatggtcgcgctccagatcggcaggatgcggagcaccgccttgaagtcctccacctgctgcaccgtgcacacgcgccacggccgggccgccaccgacccgtccgcggcg

SEQ ID NO: 32976 - DNA, 410 bp, Setaria italica
  Peptide Sequence Number=SeqID_98950
gttcaaatacctcaagattttacagtattgcttgtgataccatcagatttttgtgaaatcaacagaaacattaatcgcccgtgacaatgctgttatgcaattattcatttcaattctagttatcacgtcaccaccaccaaggcccaagtgtgagcggcggtattttctttgcaaacgcgacacaagggattgaaggggaacttgatgctcagcctcttggggaacagtgagatcacccctcaagctcagagcattatacaacgccaggagagcggaacgctcatggtgattggcggggtatgcgataatcctttgaatcccaccaaaatctattgccctggatgtgtagatgatgcccgcgatgtcaatttgtatgctctacacaactatatggataacatatctacaaa

SEQ ID NO: 32977 - DNA, 239 bp, Setaria italica
  Peptide Sequence Number=SeqID_98951
cgcatgctgttggcaattcagtatctgagtttctctcaggcttcagcgataggaggacagactcggcagccagagagaaactcagatactgaattgccaacagcatgcgctgccatcttcgacatctctacagctacagcagggctcgagagagaagatgtggcagagttgtagaacttttcctggttcttgaagaacaactccaacaatggatatgttgatgatgaattcaacttgtt

SEQ ID NO: 32978 - DNA, 1135 bp, Setaria italica
  Peptide Sequence Number=SeqID_98952
taggaataggaaggatccaggatgccaatccatgtgctgtagtcgataggcgatccgcccccaggctgaaggaagccattcacgaagaagaacggcgcaccaaaaactcccctagtgcacccatacttaaaagaaactctggctgccgagtctgtcctcctatcgctgaagcctgagagaaactcagatactgaattgccaacagcatgcgctgccatcttcgacatctctacagctacagcagggctcgagagagaagatgtggcagagttgtagaacttttcctgtttgcgtttatcaaaaaggcaattaaagtatttcagtaaaactttaatgtggtaagcagtaagaaagagaactgcagtggatgaattgcatggcaaagaaagctatgtaagtacaaattgcttgagcagcaacattttttgcggtcatgactttactgaaagcgtgaacatgctgtgtttgctcccaaaagggcctatttgaggaacggagaattgggatccaaatccttagcatcagtctgaacctaacgctaaaattgcctgtagcgaatccatctcccaaaaagagctagagactttagtaacatatttcaccgaacatataactgagtatttagtcattgataataaaagggagctcaattggcatatgaaaataataaattgtacagcaatgtcaaaatggtaaaccattgtaacggggaatgtaatggacctggttcttgaagaacaactccaacaatggatatgttgatgatgaattcaacttgttagctatgtaaagtgcacggcaagcatggaatgcatatgtgtgatacctgtggtttaacatctcagtaagaaaatgcaagaatgagcagttaggaactatagtatactaatataaaaccaagagcaaacatttttgtagccgaaaagtccataatatgaagcactctagtacacaaagaaaaggtctgcaacctagcatagagaatcaactataacacctggcacctggaactatgcactggaccatgtattacccgaattggggaaggaaaacaactgacatgagagagcatgagatgcaatcattggctttaaaaggcatcatctcgaaagtggacgtagccacttgattctgc

SEQ ID NO: 32979 - DNA, 1038 bp, Setaria italica
  Peptide Sequence Number=SeqID_98953
accacgtgggtctgagtttccattatggtaacatttgaattcagggtcattttctgtgccccagttgtgggtgagttcgcgggtagctttttgcctgaaagtccattcagtccgtttgatatgatcagcaggagctgatgtcacatcctaaaaactcaaagcagagtcaattgacataagaacttaagaagcaatataaaaaaactcgacctgcggggggtaagacagcccctgggcattttgtttaaattctgcggcaaggttttgtgggaactgggaaccccctcaggtaaatcagaaatttcatggtttttggggattgagtccagagttaactgaatgcagaatggctgtaccacaaccctttgttatgcataactagttacgaagtacctactaaaatactttactttgttggcaggcaatgaaatagtacagctccaaatacagtataccactaacagtacaaatcacacaaaatcaaacaggaaaacattgaggaaaacaagaatgagaaacaaatttgctttccctccactgtaaagtggcaacatagtgacacaagctcagcctaaatcagaggattatccacgaacatgccattttccaaaattgctaagtcaattagtctgatttcttagtgataatgctcaggtccaccatttcaacatgtgatactactcaggcatgccaaaatgacactcttatactcagactcgacctgcggggggtaagacagccccgaggcattttgctaagaagaagaagaccttctcacgcaggtcgagaaaacccccaaccctacccacccttacatagcggcacgtagcccgtgtgagacaaccaacgacctgggacgggccttagacctatgctttggcatgggacagacgaggggatttttttaaccccagcctgaaattcgctcccacgaggagtcgaacctaagacctgaggagtgctactagagccacctaaccaactcagctagaggcccgttcgcaattaagaagcaatatcatgtaaattatattttaa

SEQ ID NO: 32980 - DNA, 1665 bp, Setaria italica
  misc_feature (895)..(895): n is a, c, g, or t
  Peptide Sequence Number=SeqID_98954
tatatgaccaaaaccacgtgggtctgagtttccattatggtaacatttgaattcagggtcattttctgtgccccagttgtgggtgagttcgcgggtagctttttgcctgaaagtccattcagtccgtttgatatgatcagcaggagctgatgtcacatcctaaaaactcaaagcagagtcaattgacataagaacttaagaagcaatataaaaaaactcgacctgcggggggtaagacagcccctgggcattttgttaagaacaagaccttctcacacaggtcgagaaaacccctgcccacccttacatagcggcaccatagcccatgtaagatgaccaacgacctgggctgggccttagacctatgctttggcatgggacagacgaggggatttttttaacctcagcctgaaattcgctcccacggggagtcgaacccatgacctgaggagtgctactagagccacctaaccaactcagctagaggcccgttcgcctcttatactcagatttgccatgtgaaaccaagggctaacatttttgtagtagaacagtccataatatgaagcactttagtacacaaattgtaatgccaacaaagaaaaggtctgcaacctagcatagagaagcaagctataacacctggcacctggaactatgcactggaccatgtattacccgaattgggaaaggaaaacaactgacatgagagagcatgagatgcaatcattggctttaaaaagcatcatctcggtaaaaaaagtggaagcacccacttgattctgcaatggcaaatattgttttagcctatagcaagtctagttatagatcttgttctgtactatttaattaacttgttagtgggaacccccctcagatacacaagaaattttgnggttttcagaaatggattccagagttaaccaattggagaacggccctatcacaatcctttgttacacttagctaattacaaaggtgcctactgaaatacttactgtgtttccagccaatgaaatagtacatctccaaatgcagtataccacgaacagcacaattcacacacaatcaaacagggatatattgaagaaaacaaatgaatgagaaacgaattggctttttccctgtaatttcccgccataaagtggcaacatagtgacacaagctcagcctaaatcagaggatcgtccgcgaacttgcctttttccaaaattggtaagttaattagttcgatttctcaatgagaatgctcagattcgccaatttaacaactgatactactcaggcatgccaagaggacgctcttactcagactttcgatgtaaattagtgagactactcatacagtcatacttgcacaaaaaaaaatacacactccagcacagaagatcagtgtaaggtgcttacggcagcgggaaggggtggacgatgagggagaccctgggcgcgtatcgctcgacggcgagcttgagcgggtgccaggcgtcgcggctgtcggggcagagcgggtcgaggaaggcctcgacgaggacggcgtccttccacgccgccgcggcgcccccgccgtaggcgaacccgtcgtagcgcggcggcgcggaggcctgcgcctggagcacgagcaggtagtaggagcagcggggcgcgcgcgggcctcgccatgagtag

SEQ ID NO: 32981 - DNA, 1129 bp, Setaria italica
  misc_feature (1)..(68): n is a, c, g, or t
  Peptide Sequence Number=SeqID_98955
nnnnnnnnnnnnnnnnnnnnnnnnnnnnnnnnnnnnnnnnnnnnnnnnnnnnnnnnnnnnnnnnnnnntttttttttttttttttttttaccaagaaattgccagattggctgttcatccatcgaacaaagctcctccaattacacggggggcgatttcacatacttgtcccacgtttcaggcgttttacacacaaccgctagctacagtaaccagaatagcgaccttttaaaacaagtacaacaggcaagcgggatgctatctatgaagcatgcacacaactgacagaagagctgctgcgttattgcctatcagcactagccaagcatctgtacgaccgtatccgtcgtagggccacttcaatcacttacatagaagtaaacatctcgattctctcaccctgctgggaaacgaggggatccaggatgccaatccatgtgctgtagtcgataggcgatccgcccccaggctgaaggaagccattcacgaagaagaacggcgcaccaaaaactcccctagtgcacccatacttaaaagaaactctggctgccgagtctgtcctcctatcgctgaagcctgagagaaactcagatactgaattgccaacagcatgcgctgccatcttcgacatctctacagctacagcagggctcgagagagaagatgtggcagagttgtagaacttttcctggttcttgaagaacaactccaacaatggatatgttgatgatgaattcaacttgttagctatgtaaagtgcacggcaagcatggaatgcatatgtgtgatacggcagcgggaaggggtggacgatgagggagaccctgggcgcgtatcgctcgacggcgagcttgagcgggtgccaggcgtcgcggctgtcggggcagagcgggtcgaggaaggcctcgacgaggacggcgtccttccacgccgccgcggcgcccccgccgtaggcgaacccgtcgtagcgcggcggcgcggaggcctgcgcctggagcacgagcaggtagtaggagcagcacgccgcgagggccgccagcagcagcagccgccggagcagcggggcgcgcgcgggcctcgccatgagtagctccccgatcctggtggtggaagcagagtctccgccggg

SEQ ID NO: 32982 - DNA, 996 bp, Setaria italica
  Peptide Sequence Number=SeqID_98956
tcctgaccacttgtttgcagtttaaagtaacatttcaaaacaatccaacaaaaactaaaattatttaagcaaccttattttacttccgacaccacaattcattcctctgatcgccaaaaagagataatagtctcattcctagagggtaaagcccacagctgtggttctgagataatgggagttgtatcatcttgtgttccatacaacgaatgaactatgttccatactaacttgcattataacatagaaaaactgaactcgaagcattcagaatatctgaatcacagaacttcatgatgccgaagcagtcactgtcccaatggtgtggtcaaaaatctcaatccagtagccatcaggatctttgataaatgcgatgcctttgattttcccatcatcgggtttcttcacaaagtcaaccccaagacgttcaaagcgttcacatgccttgtagacgtcatccacggttactcctatatgaccaaaaccacgtgggtctgagtttccattatggtaacatttgaattcagggtcattttctgtgccccagttgtgggtgagttcgagggtagctttttgcctgaaagtccattcagtccgtttgatatgatcagcaggagctgatgtcacatcctcataaccgagaaaatacaagctgaacttcaactcttcaaaatctaatcttttcagcaacgacatgcccatcacacgggagtagaagtcaaggctcacttttgggtccttcacacgtaacatcgtttgctgcaagaagtagcccttggtggccgggtcgatctcggtgtggagaccggggttgtttcccggcgcctcctttggccccgacgacgtcgacatggcggccggcgagaaccggcgaacccggtcgaaccccttgatgcgagcggagcgggagaggtgcggcgcggcggggaggcggcggagcaaggcgcacgcggggggacaggagcgaggcggcggccatggcctgttgtaccaggg

SEQ ID NO: 32983 - DNA, 215 bp, Setaria italica
  Peptide Sequence Number=SeqID_98957
agcgagactctgatagataccgtagcgagtggctctttcgtctttgctcgctcacgaggttcttaagatttcggatctcctgtgctgttcgctggagctgcgggaacatcatcacctttcgcacgatcttgtgcacaaagattgcattggaacctccatggctgtgactgagcatgaagcggtcaatgcgatcctcaatattgtaggatagctca

SEQ ID NO: 32984 - DNA, 479 bp, Setaria italica
  Peptide Sequence Number=SeqID_98958
caccatcattgctatctaatctcatgggcataggactatagttgtacatgtaaaataagcttctcgctgacatgaaacgcggtttagaatgagttgtgcctcagcaatgcacacatgtttcttccaaggatgtggtattgccttaaacatcttccaagagttctttttccttatgcagcttggttgtggatacgggcttcctggcatatttgcttgcctgaaggtacacatttatccgtagttctttttcttactttctattaacatgatgtcagtttctatttcagagctatcattccatcaacaattgcctgtagtgttccacttccatcattccgtgtgaatgtactattaatatctatttatttagcaatctatcatggtatagtaactaatatcttccttttaaacattcttagggagctacaacagttcattttcaggatcctagtgcagaagtagtaaggtgacaaaacaat

SEQ ID NO: 32985 - DNA, 653 bp, Setaria italica
  Peptide Sequence Number=SeqID_98959
ccaccaagagccttgcccgaatttcattaccagaagcaacgaaattacaaagttaggttcaggattacaactagggtttaaagtaatagctggagctttattggatcagtagaatcacgcaagcagcagtaatagctggagctttattggagctaaatatattacaattacagactccatatgcatctaaaagaaacaatcataggtgacgctatagacaactacacaatcaagttagtgattgatcatggagagccaagcgcagtacgtgcagacgagcttctgggagatgtacacgtacacggcgaaggagaagctcatgagcgtgacgtccttccagtctcccttctgcttggggctcaggctctcccgcgccgccatgcccgccttcaccacgtcgccgcgcagcctctcggccgtggcggcccaccacgggcccttcttcccgcctccaccttccccgccgccgccgccgctggccggcggctcggacggaagccggctttggcagagcaagcaggatctccgcctggacacggcgatgtcaggtcgtcgtggcctgctgccccgggagacatgtggagtggcgttgatggtaagcatggccagggaagccatgcatgggcgatcgatcagatctagcttgtggattg

SEQ ID NO: 32986 - DNA, 229 bp, Setaria italica
  Peptide Sequence Number=SeqID_98960
tacagcaagaatatcctgattctgcagttcgtgtaggacatattcaaggatatccaaataatcgactggttcatgtagagcgatcacagataagatgtcgaaatacagaggcactttcggagtatcctgatgctcatactggcagagatgatatagatactgaagtgtcaaacgagattaatgcaaggcactaccacaggagcggattttcagttgcttctagttaacg

SEQ ID NO: 32987 - DNA, 1112 bp, Setaria italica
  Peptide Sequence Number=SeqID_98961
ggaaaagggactgtaggtcagtaggtaggagcggagaaattccaaagactgtactgtaccgtagctacagcagcaagcgcggtccagtatggccagattgtgccatacaacagaatggcttcactgatggattatttcaggggacaaggctaccagagtataccaaaacgtaagatccatggaaggaaaattgccttcggaaaaacctatgcttgatttgctgaaacactttttgctcaacagatctatacagctgctcccagcagaggaggtgaacacttgtaccgacactgaacaaacgaatccaaccgagaaagaatgaggcccctctgaagattacaagcccagcatatacctgttctgcggtgctgaaccgatcgagattcttgtggctccatcagagactgattcgctgcggtctcagtgcgccaccgcggtccgggactgcagagtgatgctcttctggctcgggatggcgagcatggcggtgtggtccaggaagtccttgaggtccaccaccgactgcaggatccgcctgaggtcgtcggcgcgcatgaacccggccgcgccaagccggcgcacggcgtagacgtagatggtgaggcagcccttccggaacttgaaccgcgccatctcgctgccggagagcccgcggatgagcttcttgttcacgtccccgagcgggatcatggccggccacagctggtccacggccgccttcatgctctcggactcgaacacgaagagcaccaccttggacttcttggtgcccaggcccagcgtcagcgtgtgccacgcctggtgcgccaagatggtgaagctggtgggcatgtaggtggtggtggacgggaacggcaggctctggcactcgctcaggtacgacggcgggatgtccagcagccgcagcagctccagcggcgacgcccgccgcaccgtgaacgacttgacgatgaactgccccccgaaccggatgcccttcacgtcggcgcacggcttgaagtgcgccgcctgctccgactgcttctccttgtcattgtccttctccttgtgcttgtgcttgtgcttgtgcttcttcttctcctctgccatggcgtgctttcggctggagtgag

SEQ ID NO: 32988 - DNA, 781 bp, Setaria italica
  Peptide Sequence Number=SeqID_98962
tgtcaactgctcttctttcaagggaacataggaatgttttggatgctttccggctgttgcaaaaggatcccaccgttcagaaaatggttatgtctttgtcatgtgataaggctgtttggaatgccgtcatgaataatgaggcagttcaagatttcaggagatctttacatcatggaaaagaaaatgatagaaagggaaacactggtggccctgctgaagtacttaagtggatcctggacagtgcccaggcaaaaattgttgaattccttgagaacgtgatgaagatattcaacatgctgatccaccctcaagaggatgaagagaagccagatgcatacattgatgcagtgaaggtgtcgttcatgctcacggtgtttgtcttcatcgtggtggccattgctcgtatcaattctgaacattgggatttcaaagtgtggtgatgcgagattctggcattctgcaagtcgactgtacatgttttgtagaacgcaccaagcttcaaaacttaggtccacacgaaattatgcatcacagtattgtttaactgtatcatttgaccttggcagatcatgcaagtgaatgttgttgttctgggtctttagttatctgtgtgtgctcaacccccttggagccacagaagtttagatcgttgaagtaaaaaacgcataaatttccatcgatgaaattatttgtataaataaagttgcaacctgaatttgatttgattcagtccatgaataacatgacccatcgggtcacgggaatgcactcttgttcaaaa

SEQ ID NO: 32989 - DNA, 169 bp, Setaria italica
  Peptide Sequence Number=SeqID_98963
gctcactcgcatcccatccccatcacatccgtgttcacgctcccgagctcaactcagctctgctcacttcgagcaaaagacaagaaccggtcgtttcgcccgcccatcgctccggccatcgttgtttctgaggggagaggagaagcaagcggcggagcggaagggaagg

SEQ ID NO: 32990 - DNA, 513 bp, Setaria italica
  Peptide Sequence Number=SeqID_98964
gtcctttataaacacggccaaaacctccttcacccaataaacaatcttgtctgaagttctttgtggcagcagcaagttcacgaaaagtgaaagtgtgtgctgcaatatgttgattgttcccctccctcaggatgactgcatccttcttagaatccgatccaccctgtggttttgatttatctgatccgacgcgggtaacgcggcgatccgacaagccgtccttgcgcgcgccgccttcttggccgcccctcgccagccgacccgaagcacggcaggcagcccatccaagagccgcccttgggaaggggataatagccaagaaaacaggcagcggaggccgacccaccagatggaacggggattcctctccgatctgggggtggtgcccctcccaaaatccgatctttgaaagatgaagaggaaatttggatgggattcgggagcggcgggtcggcgaattgggggaaggggccggggatgagccaaggacagagaaggtgtcgagggtaaaag

SEQ ID NO: 32991 - DNA, 557 bp, Setaria italica
  Peptide Sequence Number=SeqID_98965
agcgttcacgccagtcgcgagtcaccacaccaacctgtatctcgtgtctctgagccgcccatcagttcgtcggccctcatgggcggcgaggtgtagaggcgggggcgcagaggagcatccagggctcccgtcagtttcccagtggttaccgtgttcgcgtccggccgcctgtcttgtctcatccgccgccgggcactccccggtgccctccgacgcgttctcttctcctgttcatccctgccctgccttactgccttcaccgctgtctttcctttcttgtcccgttcaccccgctctctctctctctctggcggcgagccggcgacgactgggcgagcgccgccgccgccctacgccaggtgcccaggtcttcgtcgggctcttcaccggcgacgagcacacaccaggcttgtacaccccttctcttcccttcttgctgtgcgaaaccgagcacccagaccgtaatgtaagctatttgtattcggatcttgactcgctacaaccgagtgttggggaagctcctcacacccgaatcctggaaacacacgcgcagcaca

SEQ ID NO: 32992 - DNA, 289 bp, Setaria italica
  Peptide Sequence Number=SeqID_98966
cgcccgcttcgccatgccgcccccctccctcctctccctcctccccgccgcgtccatctcacctcgagttcgaagacgccagggcaagcaccacaaggcccccaccgcgagcagccacctcctctgcttccgaagagcagcggccccatcaccgctccatgtccacggctcgtcgtcctcctcagccgacggtggcagaggcgacgagctccacctcctcgagaagccgtccccctccgtcgcggaggatgccgaggaggaggagcccgagcccgtcccggtgctgtcc

SEQ ID NO: 32993 - DNA, 546 bp, Setaria italica
  Peptide Sequence Number=SeqID_98967
caaagacagctttagtggtggatccggtcatggtgtccaccagtggtgatactctttcaggaccatctactcttgctacatatatggatgaactatttcctattgctgacatagtcactcctaatgttaaagaagcatcaaagttacttgggaatgtatcattgcaaacaatttctgacatgcgcagtgcagctgaatccatttacaaacttggtccaaaacatgtgcttgtgaaaggtgggatatgccagattcaacagatgcaattgatgtattttttgatggtaaggagttcattgagtttcgtggactgcgtataaagacccgtaacacacatggaactggttgcactttagcttcatgtattgctgctgaattagcaaaaggtgcaacaatgctgcatgctgttgaggttgcaaagaaatttgtggagtctgctctttatcatagtaaagatcttgtgattggaaatgggcctcaaggcccttttgaccacctcttcagtctcaagtctccattatacaagatgggatcactgcacaagtt

SEQ ID NO: 32994 - DNA, 359 bp, Setaria italica
  Peptide Sequence Number=SeqID_98968
ggcattgatcgctgatcactagttaatcactgctctcatcaggccgtctgaagaagaacgcccgatccaccgccttgagcaggctggcatccgtgaagcgactctccttcatgtcatcgttctccacgctcatgttcagatcaaagcaagacgaagacggtgacgcagaggtagcggcgacggcttcctctctgggctcctcctcgctctcggtcttcgccttcttggccgtcggtgggaggaggttctcgacctggcgtcgaagctctcgcagctcaggacgacaatggcgtcgccgagggcagcctcgtcgccgccatggctccggaccaacccgcttcgatggcctccaagatgcc

SEQ ID NO: 32995 - DNA, 451 bp, Setaria italica
  Peptide Sequence Number=SeqID_98969
aatcattgagagagagagggagggcaaccaggcattcaatgagggcaagaggtgtaaagtgcatcttttagtccccataagcaaccataagcaacccaagagttgcttatttgcttataataagcaaccccataagcaagagtgattggtttcataagcaacttatttgcttattttaagttgcttatgcataagcatgtgaaaccaaacaggccctaactgtacggatagctgccacctataagattcatacatgttaacaaagatgatactatacacagctttcacactaatctaactatgacagagtctacaaacattaatgcagtcccacatgcaatagatctcaatattattgcattaaatgggtcccaatacatttcaatattattgcattaaatgagtagactatctagtaactaggaggtaccatctctcttctccatatagg

SEQ ID NO: 32996 - DNA, 399 bp, Setaria italica
  Peptide Sequence Number=SeqID_98970
ttcgtacgaccgtgtgcatgccgcgccggcgccttcctccccgccgtcagccggaacgaacacggccggcggcagtaaccaccacaccagtgatcttaagccggcggccgatgcatgaccgtggcgtcgcaatcaatggcagatgaaggcgctggctctgacgctctcgtacatggtgtacgacgcggcgtgctgccacctcaacggcgacgtgcggctggacaacacggtccaccacctcgtcagcatcgtcggcatcggcgccggcctcgcctaccggaggtgcgggacggagatggtggccagcctgctcatcacggagatctcgagcccgctgcttcacatccgggcggcggagaatgtgacggcgaagagcacgtcgacgaggagagtcgctag

SEQ ID NO: 32997 - DNA, 1062 bp, Setaria italica
  misc_feature (1019)..(1062): n is a, c, g, or t
  Peptide Sequence Number=SeqID_98971
ggggtcggttagcggcggcacggtggtgagctgggtggcgtccggggcggtgctgtggtcgacggcgttcgtgctggtgcgggcgctcttccccaagcgctcctacgacttctgcaaccgcgccgtctccaccatgcacgccgtcgccgccgtctgcctcgcctgcctctccgtcgacgactggtcctgccccgtctgcccgctcgccgccgcgtcgtccccgcgccagatgaaggcgctggctctgacgctctcgtacatggtgtacgacgcggcgtgctgccacctcaacggcgacgtgcggctggacaacacggtccaccacctcgtcagcatcgtcggcatcggcgccggcctcgcctaccggaggtgcgggacggagatggtggccagcctgctcatcacggagatctcgagcccgctgcttcacctccgggagatgctcaaggagtttggcgtccgggataccgacctcaacctcctcgtcgacgtgctcttcgccgtcaccttctccgccgcccggatgggcgtcggcccctacctcacttacgtcaccgtcaccgccgacaaccccatcctcatcaaggcgatggcgacggggctgcagctggtgagcgcctactggttcctgcggatcctcaggatggtcaggtacaagctcagcaagaagaagccatcgccgccgcagccgccggcaggcaagctcgccgtcaactgatctccagcgaccgtacgccggcagcctgcagtagctgtcgtcggagcccaagctgacgacggataagagttgaattcgattctagaccgagtgctgtacatatatacccgtgtctgcgcagttcttgcctctgacgaaggtgatcgtcacgatctgatgatgatcatgtaaacatgctgttccctttggcaaggatgtcgcaaaccggcggtgcgtgtactctagcgatcattattggctgtacaattgtccagcgaatcgtgttcaggaatctgatgagtgcaaacaaacaagttaaggnnnnnnnnnnnnnnnnnnnnnnnnnnnnnnnnnnnnnnnnnnnn

SEQ ID NO: 32998 - DNA, 1746 bp, Setaria italica
  Peptide Sequence Number=SeqID_98972
cagaacactgctagaaaactaggtatcaagtactgttctaacaggccatgtgctctttatgcgattgctagcccttttgaaggaccagaacctgacactaaacgagttagtgatagtaaatcagactccgctgcagcagcacagaatttaacagcaagcatcaatagtgctttctttccacggttcagccgggatggaaaaatcctagtcttcctatctgcaaaacaggctgtaaatagtggagcacataatgcaacgaattctctgcataagatcaactggccttctgattggaaaatggataaacaacttaatgttactgaagtggtgcctattgtaatgtgccctgaagatggttgttttccgggtctttactgttcatccattctgtccaatccttggctttctgatggatgcacgatgatactaacatctgcttggagaagtaccgaagtgatattatcaatagatgttttaagtggaaaagtaacaagaattactccagaagactcacattactcttggagtgtccttgcaatagatggtgacaatgttcttgctgtgtcaagtagtcccatcgaccctcctcacatcaggtatggacgccaagtgacaccagaggggcaagaacacagatggacttgggatgaagttgatagtccgttggttacggccagcaataaggttaagtccttgttatcgcatcacagtgtcactatacttaaaattcctgtcgctaactcctcagatgacctctctgatggtggcaaacttccatttgaggccatttttgtgtcctgcaaggatagttcacacagtccaactgttgtaatccttcatggtggtccacactcggtgtctgtgtcaagctacgtgaaatcatcagcatttcttgcttcacttggattcaacctgctaattgttaattatcgaggtacaccgggttttggagaggaggctttacaatcgcttcccggaaaagtcggttctcaggacgtccaagactgtcttacagccgtagatcacatcatcaatgaaaagctaatagatgcttctaaagtagctgttgttgggatttcacatggtggattcttgacaactcatctgattggtcaggctccagatagatttgtggtggcagctgctcggaatcctgtctgcaacctgtcgctgatgattggcaccacagacattccagactggtgttacatggtggcctgcggacctgaatcgaagcaatatgcctctgaatccccttcacctgaccatcttcacctcttctatcagaaatcaccaattgcccatatctcaaaagtgaaagcgccccttcttatgcttcttggaggagctgatcttcgagtaccagcttctaatggcctacagtatgcaagggccctgagagaaaggggtggcggggtcaaaattatgatgttcccagaggacatacacgaaatcatcatacctcggtccgattttgaaaacttcctcaacattggagtatggttcaagaaacatatggaataaataagtgcaaacgcagtggtcccaagcagagtctggcgatccatgaggttgaagaacaaggcttgtctatggacttcaaatagttcttgtagcagtgctcatttgggaagacttcaattttttcatgaaaaatgctgattcctatcggcctcataggagactccggttcctttttagatttgaccaaacctctgctccatttaatactgccttatttcatga

SEQ ID NO: 32999 - DNA, 439 bp, Setaria italica
  Peptide Sequence Number=SeqID_98973
taggtctgctggtcacctctgaacttcacttctgccacatacctgccatagttgatccttcttgaaagcacctgaagacatgcaagatctgaatctacagtcgaggcatagttgccatcatcaccatttttagccagcagagggagcagctcattgaagtacatgctccaaatggcatcattgacattgataaaggcagccgcaggatacaactcgcgtgtgaagttgtatggaggtgcaagagtgaaaggaactctgtaagcgaagaatggaatctcttgtagactttggtaccttccggcctatgaaaaagttcagcttcaactctggattagtggagcataattaacactcacttcaagttttggtcacaatttacgcaatttttgttgcttgatgccaacggcagtagcagtgcaaagaaacttgccgttagaaa

SEQ ID NO: 33000 - DNA, 238 bp, Setaria italica
  Peptide Sequence Number=SeqID_98974
attgccccctagggattcttgtaacagaaatgtgagcttggaatcacgatatggaacatggtgcctttgttttccagactgcgatatttctgctagtatattaatcaagtttccgagctgtgaaagtgaacgatttatattcccagcttcttttaatcgatcaccagctgcgtgtgttagtttttgccgctctgatccagcaagatctaccaggtttatcctgcttgatctagtgctg

SEQ ID NO: 33001 - DNA, 500 bp, Setaria italica
  misc_feature (439)..(500): n is a, c, g, or t
  Peptide Sequence Number=SeqID_98975
aagagaagaaggtgcagatacacacgtcgtccaggtggtcgttcgttcttggaagctgaaacgagttttgggtgcaattttttggtgatcgatgagttgtgcatttgtttgatcgctgtgaaatgggtaaggccctgttgtggatgtctgtatagtagcgatttgtatgccatctgtaaattgcgtgttgattacccatgccacggccaccctgccatgtaaatgggggttgtagagtatctgttggggtttgcaggattgcatggctattttggtgcgcacgccatgcgtgcaggttgcagcttggcgttgcgggtttacaatctcgtgttgtaagcgtagagaaattttttaggatgtgatgattcttgggttctttttatagtatataacatacatactcatacgaagattttttaaataaaaaaaaaaaaaaacnnnnnnnnnnnnnnnnnnnnnnnnnnnnnnnnnnnnnnnnnnnnnnnnnnnnnnnnnnnnnn

SEQ ID NO: 33002 - DNA, 255 bp, Setaria italica
  Peptide Sequence Number=SeqID_98976
gccgcgcccaccccggactccacctcgtgccggctccgcaaccgcgcgccggcggcgacggccttgggacgaagggcagcagcagcgccggcgccagcgtcccggccggaggagctcaggaacagcatcaggacgccggccagggcgaggagcgccgcggcgatggccagcgcggtccacgtccggctgctccggcggccatggggaaggtcctgggagaccgttccggtggccccgagcagaggggcccttcga

SEQ ID NO: 33003 - DNA, 513 bp, Setaria italica
  Peptide Sequence Number=SeqID_98977
agtgactatggcctgaacaccaagcacagaattactgcggagcaactggatctctgactccaaaatggcaatcttgctttccagtctaaacagacaatttcttttacttgtgagcctttatcataggatatgaacacagtccagaaagaaagaaaaaatgcgaatgcgagattgcaactttccaatttcttggcccttggcttcttcaaggtcagtctaccagcaagacaaagttaataaactcatttgggaccaagtaacatactaaagcactacagaaactgccatattgatccaggtgaattaccctcaaacgcttctcaacatctaaccgccatgtaagttcttctactctcttttcaagcttgtctttagcttctttgagtgcaccagtctctctcgcttcctgtttagatagctatgcttactttacatgcattaataaggaatgatgtattatgtttcacatgtgaagttagacaaaccattctcagtttccgaagttcctttctt

SEQ ID NO: 33004 - DNA, 519 bp, Setaria italica
  Peptide Sequence Number=SeqID_98978
tcatcagatcgtttttgcaactcaagaagcttctcttcaagatcttcagccttctgtttaaatgtacttacttcatcctcaagttctttatttttacttgtcaactgctcaacttctgcagtatccacaactggcacttctactatctttggtggtgcctgttcaattgctaacttcgcggcttctttctccttcaatattgctgcatgggcttcctcaatcttttcttgcatttcttgcaatgcagattgcaactttccaatttcttggcccttggcttcttcaaggtcagtcctcaaacgcttctcaacatctaaccgccatgtaagttcttctactctcttttcaagcttgtctttagcttctttgagtgcaccagtctctctcgcttccattctcagtttccgaagttcctttcttgcaatacgtgccctccacaagcactgaagaatcaacgaagctctcttttgctgcttataagcaacataagcttttgttgtttggcgtcctattcgtagt

SEQ ID NO: 33005 - DNA, 551 bp, Setaria italica
  Peptide Sequence Number=SeqID_98979
tgaaatgccaagtgtaggagtgatttgtagacaatgcatgcggcagctggtttttgtgtcatcaaatctcctgtctcctaccagacttttaatcagggcatcatgattttcttgctgccgatccgtcagtgatttttgtttgcttagattctttacaggaggaacagccacctgctcattggctattttaacttcttcaagctggtgtctgttatcaatttccttgtgaacgaggttctccattacggatgtttgattcatttcaggagtgactatggcctgaacagcaagcacagaattactgcggagcaactggatctctgactccaaaatggcaatcttgctttccagtctttctatctgttttgatttatcctcatctgctgatgcaacaaccaaagattgttgtcgtagaacttggttttcagattccatactggataaacttgtttcaagcctgcagcaaatagtagaggtagtgtatgggtagggcttgtaatcttaacaagttaatttgaccaaagcaagaaaaaatcattaatacctttcaa

SEQ ID NO: 33006 - DNA, 1823 bp, Setaria italica
  Peptide Sequence Number=SeqID_98980
ctgtaaaggagtacatatactactgatatgctccagaattactcgcccaattcgagacaggatatcaaagccagcactgtaatctcatataagtattctccaaatcacctttcttaatttcttttcgattgcaagaattcaaaaaaatggaagattgcatctgtgataagcactgaagaatcaacgaagctctcttttgctgcttataagcaacataagctttgtgttggcgccatcgagtctggataattatggaagccctggtctctcttcagaacctgtgttcattgcgagctgccattgctcgtaatcctgtctgtattactatagctgattcatatacttgaaggtacgcttttctggcagaatgggtacgtgcatgcttttgtatcctaattgaagcagcatctcttctcatatactcaaaaagctttctagctagtcttgctctccagaacttctgagatttaattgaggcttttcgtaagttgacgaattcctttcgcataagatgtgtctttatacgcctctggattagtcgcgcagcatttgccaatacttctgctcttcgagcatccagctctgccatctgaccagctcttaagaatacctttgttttccctatctgatatcctttcaaacccattctatcacatatggctgcacaagcggccttctcatcagagctgtccacaagctctggtgcaagcattccaaaccgatcaatgaactcatcaaatgtcctctttgttggatagccagcacagctgatccggattgcttccagaacacccccacatctcaattgattcaagacgttgaagttctcaaagatgcctggtttcagtacagtattaggcttcacacatctaatgtagtgaggttctgttgtactcagtgtttccatgagggattgcagttgttgcttaaagcgagtaccgattgaagagaatttggactgtttagaagtctcctcaggtaatggaggaaagagatttgcaacaaaatggcaccttgaagaatttagtagagcttgatgttcagctaccacatagtctttgttcttatctaggaactgatctgcttgatatgtgacatctcctgcatagtggttgattgtaaaggcggtgcgagcaagtttgggcttgctgaagcgcttatgtgccttgtatgtttggtacatcttctgggcaaatgtttcatgtgtggactttggaaacatgcatgcctcatccaggagagcaattattcctccaggtttcttctcaagcaggtccagcacatcctgattgtctacaaattcaacatagctccagtctatttcttcccttgctgctacgaactattcctcttgctccatcttaaacacatgctgcaataggaactcgtgttagatatatccatagacattaggtattcattaattattctcttagtatcttcaaatcttgtctaacctgattgaagtgctgctgcaacttctcgtttgtcaaattgatgcatagttgctcgaaactgtcacatgtgcagaatttgaatcgtgtttcagcttttcaggtaccaaaaaatagtataaagctaaaaatgcgaagtcatacttgcagtaagaccagacagttctaaactgagttgcgcgaaactgttaatcttgaagctctcgaatccatagatatcaagcacgcctattatatcggtcgcatctggatcctgaccaatagagttattgatcttgtctacaatccagtcaaacagtcttgagtataccgtctttgctaaagtccagtactagtggtgctggtacaagtctgaagtggtaactcaac

SEQ ID NO: 33007 - DNA, 780 bp, Setaria italica
  Peptide Sequence Number=SeqID_98981
aataccaaggtagaaattaaccctacaaacgctacagaaactgccatattgatccaggtgaattaccctcaaacgcttctcaacatctaaccgccatcgcgaacctggataattatggaagccttggtctctcttcggaacctgtgttcattgcgagctgccattgctcgtaatcctgtctgtattactatagcaggatttgattacattatacgtcagtttcaggtacgaccagttttactgaccttaaagacacaaagtgctctgagcagtgaagaaatacctctccagaacttctgagatttaattgaggcttttcgtaatttgatgaattcctttcgcataagatgtgtctttatacgcctctggattagtcgcacagcattcgctcttcgagatgaggtcttgcgaaaaaagtatatgctgtataagattgttttatctcctgtattcacccattgacataggctacctgatatcctttcaaacccattctatcacgtatggctgcacaagcggccttctcatcagagctgtccacaagctctggtgcaagcattccaaaccgatcaataatgagctcatcaaatgtcctctttgttggatagctagcacaactgatccggattgcttccagaacaccctcgtcgagtagcgcgcggagcgacgccgcaggccgcgagcgcggccggctggtcctcgtcggcgacggatggcagcacggcggcctcccccaccggattggttgcctatttgtcggtagtcttcgtattgttgttc

SEQ ID NO: 33008 - DNA, 3663 bp, Setaria italica
  Peptide Sequence Number=SeqID_98982
tttttttttttttttttgtttaacataagtggagaatgaattaagaatgaaagttaagtccacaacggtatgttgccaaaactatgtttcaccaatcatgtgaaagttcatttgtaagtgacgcggtctaccttgtggaccacaaaagctaatttctcgtcctctacttttttctatacaataggactcctgcatacgcaatgtatacgcactacccgaagttagcatttacaaaagaaccaaaagaatatgttgctgaaatgccacgtagaccagggccgtccagcatcatctcgttctgtctctatttagagtctcccaacaaatctcctggccacattcattacaggttattgtgcaccctgctttcgtgccctcgcttcttagagttagcatgtgggttaagttgttgcacttcttttggttgttggagttaaccttaggttgctgcggttgccggcttcttgaagcagccttgactgaccgcacaacgttgggatctgctggaaccgcagtcatgtttgattttctctcgggatcacgtacacctttcctcaaagcctcccactctgacaaggccatgtcttgttcctcctttgtaagcctttcctcttcattttcttggaggagagcttcatgttcatggtaaccagcaatccacccagtttgttcactgagtaggttcagcatgagtctgtcgacaggtacaggttcagaagttccactggtgttggaagtgaatggcttctcagtcatggtagaaccgttctcattctgttccattaattcctcttcaccaaattcaaaaagatgcaacatctcttctttggagatggttcttgaaacttgctgtctgtccaccacccttgctgcgaggccttccttcgtcacctgtcgcttatatattttctcttccattgttcgatgtgccattaggcggtaagcatatacaggtttggtctggccatacctccaaactcgataaatggcttgcagatcgtgtgttggattccaggatccatccaaaagaaccacacgatttgcagcatgaaggttaatgcccagagatccagcacgagttgatatcaacgtgcatttcactcttgcattttcagggtcgttaaacatctccacaagattctgccgatcagaagatggagtgctcccatcaagcctataccaatccttcccccgcttccaatgtttgccttcttttcctttaatttgcaattttgacagataaaactccactaaatccagggtagtcaagctctggctaaacaccaataccttgtcgcccaattcagaactttttgacaggatatcaaggagcaaaatcattttgccactgtaatctgcctccatgtaagtattctcatctagaagttcctcccaccagttactttcctcattcacaaagttgctttttttggactgctggtcagctctatccttctgcttctctccattaggaaagtaattttcagtattatcatcacttgaactctcatccatcataaaattctcaacagcatcctcatgacgcaaagttcctctctgttctttagacatctggaggagccctggatgattccatacctgggctaatgtttggtacttggcaaagaaggaactgtgagatttttctgagtaaccactacttgagaaaccatgaacatccaagaatcttctgtatagcttcctttgcagctgagatagctttacagtaataacaaaaaccttcttaggtggtagatcattcttcacaacattcatgctcatccgctggacaaaacctttcagttgttcaaacaaaatgtgcgatcgttggttcatgatctttacatcatctgatgttgaatttgtgtgctgcccattttcaatggggttctggaacctgtttcggaattcatggctactcccaagaaagccttccctaacaaaatcaaccatacaataatattccatcaaattattctgcaacggagatccagttaacgcaattcttctctgtgtccttacttgtttcagagcctgtgtaatgtcagccctcctattctttatcatatgtgcttcatcacatacaagaatgtctggcccacactgcaaagcataagtaatttcatttgcgacatttttgtccttcacatgctttccaagggataagctcctaaatgatgaataaccaatgagaagcactccgccttttactcgccatttggttagtaaatctggtcttttcaccctggcaacatcttccaacataaaaacacgaagaggcttcaagttcggctggatgccacctgataaactctttcctccagttatgaagaacattaacaggggtaacaataagtgctgtgcgcaaacccaattgagcacatttcataacagtgtagaggaatgtaataacctgaaaggttttcccaaggcccatattatgcgccaaaatgcagccaagacctttatccccggatttcacctttttaacagattgaataacattttcccacataaaccttattccttctacctgatgaggcttcagtttaaaagacatgctgcttggaatcctaacaggttcctcatcttcctctctggcaaggttgactatatgcccatctccagcatcctttaaagagacttccgatgggctccaaaggaagttccaacattctcacttcttaacttgccggcagattgctcttgcatggacttcaaatggtcttgccttgccttctccattgcaattttgcgcttagtttcctcaccaagttctgtatcatccataattcttctaatccttttcttcattcttcgcttgctaacaggaccattggtttccggtccagaaagatgtgtgtcgctgctctctgaatcagaagattcaacaccactgagggccttgtcacattcagaaattaaaacttccagttgactgggtacacagcagcaacactgccaaccagtggctatagcttccgataagcattcttcacctaaattcttcaacaaacaatttctacagaaaagcagcttacaagaactacaactttgaagtagttcgctttgtgcacaccaagtgcaataaccaccagatacaggatcctcaagacgattcttctcgatcacaagaaatctgcatggtccgcaaacagtaacatccagtactgggtggcgatgcacctcagaggcattcaatatttcagtgcaaatggtacatttgaaagctttaggcaaacttttatcactgagcttagggctttgtgatgggtcatcaagatcaatgatatcagccaccttttcaactctagctgagctaccttcccctggttttctatctatctgcatttcatcatcactttctattatcacagtttccgatctcttctggaaaagctcctcaatagaaagtttgttttcatcaattttgagttttttagatgaaggaaggtcacttttagcacccaaaacaccattttctgatagaggcttctcatggcatgatgagaccaaaccaaaattctccttagtgcctctcatccttttccctttcaaacgacgctgcaggcaattcattatttttgcatcatcctcttcctttacctttctgtatttccttctctgttcctcagaaagttctacttcatcttagtacctttt

SEQ ID NO: 33009 - DNA, 262 bp, Setaria italica
  misc_feature (257)..(257): n is a, c, g, or t
  Peptide Sequence Number=SeqID_98983
gtctgaggaggtaagcttcgattactaaattatttgcttcaatctatttaattattttctctgtgtagatatgatagaacgttttaatttacaattctcttcttgtacctttgcatgggttatgaacaagctcttgctgttttctgaaagcttgttaattcgtagaactttgcagttttgttctgaggtcctctgtcattattcttgcgtcgttatctatttctatttcattgatacagcttcattgttttttaccngtttt

SEQ ID NO: 33010 - DNA, 581 bp, Setaria italica
  Peptide Sequence Number=SeqID_98984
gcggtattccatctttgtgcgtgaaataaatcaacccaagaatttccattctgaataacagtacaaaaaatccactaatataccaccaaacagtgctaactaattaacaaacaaactaagatcatacaaacagaacactgcctaatgatcactcatgtcgccgtcttccttcgtccatgcatcgtgtgttgagactttctgcgatcaggggccaaggatgatgccacatttgcccagattatgatgtcactgcgaagcaggtggtgcactggcatattggtgatgctagtcatggcagaagttatctgaacacctcctgctcttagcacttggaagatgcttgagggtttcctccactttgctcacgggatgcgacctgttgcggggataataggttggtgcaccaaacccagaggcttgttcatgttgttagcgttctctgctgctccgccatcacaattcggttccaacaagcgcacaagcgatagaaagatttccattctggttacgtcccggtttgcctcaacagtaaatcgtgcccagattttacttttacgcatttccattacacccctcaagat

SEQ ID NO: 33011 - DNA, 462 bp, Setaria italica
  Peptide Sequence Number=SeqID_98985
aaaatcataaagattacagagttgctctagccatgaagtcatgatcggtttccagtcttctttaactctatgaatcacttgagagaatatcactttgaagaaagatagggtcccttgaacagatgggtcaagccctttgaagatcaggtcatttcttgccatccaaatagcccaactcatgaggattataacttccataaagaaaggtacatttagttgatgtttgaaactgtgaaggattgtgtatggctcctccagtaggtttggaaacagacctaagtgaatctagcatttctgtgcaaaggggcatccaagaaggagatgaaagagagattcctcggcaccttgttgacaaagaacacattcatatgagggcagaaccatatgtttcccggatcaaatgtacccaaggtatatcaactttgttaaagaatttatgaagatatttgagcaacaaggctt

SEQ ID NO: 33012 - DNA, 431 bp, Setaria italica
  Peptide Sequence Number=SeqID_98986
atgagtgtccactttgagataactgtcctcaaacaaaaggcatggatgtttcttccgttggagctcgctgatctgttccaagaattgttgatcctttgtttgaagcaccctatgcagaccagcttccaggttcttctccaactgctgtagttcatcaacactcaatccctcaagctcctcacctctcatctgcctgagtcggaggcttgcttccgtaagttgctcattcaaatttgcatatttgctatgttccaagttcaagtcaagtgaaggctgttctgctttccccagatttttggaatgtgtgttgtacttgtcaatgatctcattcatactttcttcaccttgatggtcttcccggaatgcgagcggcgcacgtgcctcggtcccccgcctccgcctccgcctccccctcctcccccgcccccgcc

SEQ ID NO: 33013 - DNA, 359 bp, Setaria italica
  Peptide Sequence Number=SeqID_98987
atcctgtgaacttccagagtgcagtgcagtcatcactgattcagaggattgcccgtcttcagcaataacattttcagtttcagcaaccgcttgcttgccagctggggatatctgtgatacctgtgtccagacacaaattgaaatgcaaatatgtattcagatggatccttcaaagaaatgatggctagctaaagaggtgcagttaatacttgattcctcaattgcatattctcctctgccagctgtgaactcttccgttggagctcgctgatctgttccaagaatttttgatcctttgtttgaagcaccctatgcagaccagcttccaggttcttctccaacttgcttgttagttcatc

SEQ ID NO: 33014 - DNA, 237 bp, Setaria italica
  Peptide Sequence Number=SeqID_98988
gttgttcttcttatttccatgcaacacaaggcaaccctaatttcagggatacatccgaaccatcatcattatcctgtgaacttccagagtgcagtgcagtcatcactgattcagaggattgcccgtcttcagcaataacattttcagtttcagcaaccgcttgcttgccagctgggatgttaactaagctttttagaatcatgtctacttttgttcttatcactgtactgctatgta

SEQ ID NO: 33015 - DNA, 395 bp, Setaria italica
  Peptide Sequence Number=SeqID_98989
cggtatgtatccctgaaattagggttgccttgtgttgcatggaaataagaagacaagtgtccgtgcggatctggatggaggagctgcggcctctgcggataggcacttgtgttatggacaaacccagactgcaataatctttgcattggaagcgagatcagttaacctgatttgtcatccttgtggcttcatgatgcgatgtgccgcttgtaccgtctgctaggatgttaactaagctttttagaatcatgtctacttttgttcttatcactgtactgctatgtacttgatgctagctatcataagttatggtctatgacttgccagcttataaaatctaaaaaaaaaaaaaaaaaaaaaaaaaaaaaaaaaaaagaaaaaaaaaaaaaaaaaaa

SEQ ID NO: 33016 - DNA, 1180 bp, Setaria italica
  Peptide Sequence Number=SeqID_98990
tttaggtataagctggcaagtcatagaccataacttatgatagctagcatcaagtacatagcagtacagtgataagaacaaaagtagacatgattctaaaaagcttagttaacatcctagcagacggtacaagcggcacatcgcatcatgaagccacaaggatgacaaatcaggttaactgatctcgcttccaatgcaaagattattgcagtctgggtttgtccataacacaagtgcctatccgcagaggccgcagctcctccatccagatccgcacggacacttgtcttcttatttccatgcaacacaaggcaaccctaatttcagggatacatccgaaccatcatcattatcctgtgaacttccagagtgcagtgcagtcatcactgattcagaggattgcccgtcttcagcaataacattttcagtttcagcaaccgcttgcttgccagctgggggtatctgtgatacttgattcctcaattgcatattctcctctgccagctgtgaactcttccgttggagctcgctgatctgttccaagaattgttgatcctttgtttgaagcaccctatgcagaccagcttccaggttcttctccaactgctgtagttcatcaacactcaatccctcaagctcctcacctctcatctgcctgagtcggaggcttgcttccgtaagttgctcattcaaatttgcatatttgctatgttccaagttcaagtcaagtgaaggctgttctgctttccccagatttttggaatgtgtgttgtacttgtcaatgatctcattcatactggagctagcgaactgggagagcttccccgtggaggagaagacgatgagcgcgacgtccgcatcgcagagcacggagagttcctcggccttcttgaagaggccgcggcggcgcttggagaacgtgacctgccgcgccgccgcgctctctatcctctttatctcccgccgctccctcgccatccccgccgatccctcgtctccgccggcgcagcagacccccggaggacgtacggtctcacgcgtcccgcgaggcggaggcggaggcggaggaggggaggacggagcagcaggccagccggcggtgggggctgtgatgtgatgcgatgggatgcgaaagggaaggagggaggggggggagaggaaaggggaaggggcgagtttg

SEQ ID NO: 33017 - DNA, 897 bp, Setaria italica
  misc_feature (1)..(16): n is a, c, g, or t
  Peptide Sequence Number=SeqID_98991
nnnnnnnnnnnnnnnnccctgtgtgccttggctagtctcttttagttttttttgtttttttttttttaaaaatttcaatattaccctttcctcaacaatcattttacactacatgacatatctcaaaatcaatgccgtatagtccagcgacctattgatctacagaaaacagaagtttttgagcgttaatgagtacaggtgaaccttgtttagttctctctacaatctgctgaatcagcactttactatcatcgtcagtctcatcttcgtcatccacatcactctcttgagctctgctaggatccacactcttcagaacttgctcccaagtggacacttctttcagatccctagagctatcctcctccatgccccagattaagccacggtccaccaagtaatcttcagttacctgcggtttcccatttgtacttgtggtgcaaggggagtctgcaattctcatgaattcctcgtaagcttcatcatatgcttctagtgcatctccagataggtttagacagtagggttctgccatggagctagtttcttgtatgaacatgggactttcctggttggaagaacccgtctcactgtttgagcagattcgatcagagaagattccatcggtcaccatcatctgcagttgcgcctgcttctgtctatgggcaagtgctgactcaagctccttgattcgatcttcaagcctgtgttgaatcaccttgtggagacgaatgctgagatctcttggcgagacgggatagtttgctccacgtgtgtaatcgggggaactttctctgctgtccatgtcatggtcactttcactgctgtaatctgtgaggtcgcgagggatcatatcaactttcagttccccaacaaacaatgtcaccaatgaactct

SEQ ID NO: 33018 - DNA, 410 bp, Setaria italica
  misc_feature (378)..(378): n is a, c, g, or t
  Peptide Sequence Number=SeqID_98992
gcggtggtcgacgaaggggtggtcggggacgagcgccgccgacggcgcggcggggaaggcgaagacgagcggcggacggtaggggtactccctgggaagccatacggtgaggaggatcggcggcagggcgggggagacggcgaggggcccccgcgcgttgagcagcacggcggaggcgccgtcgtcgctggtgtaggtgtcgacggagggcgagagggtggggaactcctggaggacagcgaggacgtgcttccggacgagccaccggaggtcggggtgctcgtaaggggccagcgccgcgtctaccagcaccaccgtgccggcgggcgccgccgcagtcgccatggacgcccacccgttctcgcaaacgatcaaacnctcccaaatactccggcagagataatacgggt

SEQ ID NO: 33019 - DNA, 475 bp, Setaria italica
  misc_feature (155)..(155): n is a, c, g, or t
  Peptide Sequence Number=SeqID_98993
aagtcactgcctcataggttgtcacaggaagagaaaaggctgtgtagttatatttcataatcagtatttagtatattaggtatgtacaggtcatcaaagcaatggtgctaggctaatgctatgctccatgtagaaattgaaacatattggaattntaaaatctcatgtataagctcaccacatcagaactaacattccacttgatgttgaccaatgaggcatttaatcaaacaggttatgtgcatgcatagcgtacgcgctaaccttgaaatggttcagactttggagatgggggacgaagcgaggcaacaccaaactgaggggaaggcactggagcaccagttgatggagtaaaactgtaagagccaccaccggatttctctgcatcggtcacatcctgctcgccttgggaggagtggtacacgactgcgagcagaaggaccaagacaacgaaccaagactacctacaatacca

SEQ ID NO: 33020 - DNA, 457 bp, Setaria italica
  Peptide Sequence Number=SeqID_98994
cgcccgccggagctcgcgggcgaccctgttcacgaagtcctggggtgggcatctcggcgtcgccagcggcggggggcgggaggagggagatgttggcgaagggggccgcggcgtcggcggcgaggtcgtgcaggcgctcgtcgggcacgtccggtaggctgctccgcatgacgcaggtggcgtggtcgcccaccacgtagaccttgaagagcacgccgccgtggttgacgaactcctggagcaccagcggcgcgcggaggccgcgaaggccctcgcggcggtagaccaggcacaggtcgtgcgacgcggcgctgccgtcgacctccaccggcttggcgatcagcgggaaccggaggccgccggggaccgcgtccgcatcgtcgccgccggccagcgccgcggcgtcgccgacgaagacctgcctgggcgtggccatggcgccctctttcgctacgcc

SEQ ID NO: 33021 - DNA, 262 bp, Setaria italica
  Peptide Sequence Number=SeqID_98995
actccatttcctcaagtagttagttattaaggattgtgttatgacttttctgaaatttggatcacaaatctatatctcgtaaaggaaatagactttagacctttatttcattttcctaattcttgctttttgccatggtaacttcagtcatgtaggatgaggattcctgggcatatacatgatcttctaggagttgatgtcatgtttcctggtctttagactgtatctgtgatgtatttttttgtgttttttctcagattta

SEQ ID NO: 33022 - DNA, 286 bp, Setaria italica
  Peptide Sequence Number=SeqID_98996
ggagcagagcccaagcgccccctgttccccaaggccccgcaagctccggcaaggaaaacggcagcgagacacacagggaggcagggcaaggaaagcggcggcggcaccaacaccctggtccccaaggacagggcccggacacgagcccttctcccgagaccgccgccccggcacggcaggggctcgtgggaacagacccgcgacgagatcacacgaaaagcagagccatgtcgtcgttccaggacgggcggggggcggctagcagaccgaggaacctgttggagaa

SEQ ID NO: 33023 - DNA, 319 bp, Setaria italica
  Peptide Sequence Number=SeqID_98997
cgaggcggtacaccaccgtcttcctggcgcccagcttggcgcccttgtcggcgagctgcacgcgctcgaacggctgcccgtcgaaggtgtacgccgcctccagcggcttgtcgtgcttgatgccgatggcccagttggggttgcggacggtcagcgccaccgtgaggttgtacgcgagcgccgtcgtcgccggcgaggacgtcaccagcgcgaagcgggtgagggaggcgtcctcgacggtgatcttgacgtggcggaggggcccgccgaagatgatgatgatgaggaccacgccggccacgacggcgaggccgatgac

SEQ ID NO: 33024 - DNA, 364 bp, Setaria italica
  Peptide Sequence Number=SeqID_98998
tcgtgcagcgacccgttgggcacgtactccatgacgatcagcagctgctgctgcggcgccgacacccccttcgccccctcactcgcggccgccggcgccggctggtgggctgcgaccccgacgaaggcgacgacgcccgggtggcgcggcgcggcggagagcacggcgatctcgttggcgagcttggccgccccctgcgcgtgcgacggccgcttgacagcgacgacggccgccctgccgcctccccatccccacagcctggccttgtagacgctgccatggctgcccttccccacgaggttcttggccgcgaacccgcccgtcgccgcctccacctcctcgtacgagaactccttcatggccg

SEQ ID NO: 33025 - DNA, 302 bp, Setaria italica
  Peptide Sequence Number=SeqID_98999
cccgctcttctttgtcgtcgtcgtcctcccctcggcatcctccttctccgctactgcggagttcgcagcatcttcgtcccgctgctgctccgccttcttgttctccgcctcctcgcccgccgccgcttcgttctcgccgtgctcctccaccgtgtcatcgccgcggtcgctgtccccgtccatgtcgtggatcctccagtacccgtccccggcgccgcagccgccggggcccgcggggtggaagcgccgcatggagaaggcccgcctcagcgcgctcggcaggccgctccggctccggctcc

SEQ ID NO: 33026 - DNA, 410 bp, Setaria italica
  misc_feature (377)..(377): n is a, c, g, or t
  Peptide Sequence Number=SeqID_99000
cttctctactaacaattctactcacttctgggaacagcatgcatactacctggattacgaggaccgaagggctgattatgttgctgcaagaagagagaagcttgtatcgtgggaagtggttgagtcgaggctcacgaaagccgtacaacgggcggtagaaagagatgggtatctcaggaaaagagttctaaagaaacgacatttagctcaggcgaatggccaggatagagctagatctcgcactccgcaggaggcaaggtgaccatgaatgcatgaagtcaccagcagcagtcccgtggaggcatgacaatgcagctggtaaatgaggtgcatctcggtccttctgtagctgaattgagacgcaaaggatggggaanaacctgcagccagacccaccagagaatgcgatc

SEQ ID NO: 33027 - DNA, 370 bp, Setaria italica
  Peptide Sequence Number=SeqID_99001
atctatataccttgtacaacttgaggaactcgctgactgtactgtctcacgaacggagcctaacgtacacctacgcctacgcgcgcgcgcgcggcggcgtcatcaggcagcgccgatgcaggcgaaggcgcggacgctccgggccttgggcagcggcacgcgcagccgccggtcgtgcgagagccccacctcgcccgccagctcctccagagacaggttccgccggtgcagcagcgggccctccgccgacgccgcgtggaccggggaccgcagctcctgctgcagccaccgccgcctctgctccgggtcctcgaggtccacgggcgcggaggcagcggaggggcgccaccggcgacgttgctccgccggt

SEQ ID NO: 33028 - DNA, 903 bp, Setaria italica
  Peptide Sequence Number=SeqID_99002
attacaaaagctatgttacttgcaaacagatgaacatgataaatttattgtgaatgaacataaacatgaagaacatgatcaggaggaacaaaaattccagattataatgttttgagcctttgtcctggtgaaatatgtcacttcatgagcagattcttgattacatggaaagctccggaagatgtgaatgaaatatgtttgcatgaaaataaagaatgtctgtccaagatttgtactgtgaatttggatggaagtcttgaagtccggcacatggctgatgctgactggttgttccttgctgaagtttgtaatatccgttcagtggaacagaacttaagtggtccaaaagcttcgattagcaaaattgaaatggataatgccccacagcactacagatacttgcaacggtcggcacataaagctcttcagatccttagatctattccagctgctgcaaggcgtacacttcctgtactaaccaatgcacaaggtgacatagtgtgtatacctagtattggcttcagatgttgccctagcctatcgatacaagcagtattctatccaagggtacctctcggtggaggatacagttcatatttatgattgcttgagctttgctttgaacgaagtgaaacattgggtggatcatcactgttgggatgagtggctgctgcctattacaggtgctaaatgatgcaagctgtttaagtcataccaacattctgaatgcttgacagacagtcttttgcagcatgaattgaaactgcttgttcaaatggcagaggatggatagactcatggacattataggctcaacaattataatttctgtaattatagtcttcttttttggagggattcaaatgtccttctgatgtgaaatgctgttgagcaatccagtgt

SEQ ID NO: 33029 - DNA, 420 bp, Setaria italica
  misc_feature (414)..(414): n is a, c, g, or t
  Peptide Sequence Number=SeqID_99003
ctcgaatgcaatataatgaagtagctgctatgaagcatcacctactatatccatgaactcagtttacccaatatattacaaattacaaaactgagaaacatttcatctgccagttacctttcatcctaaagaacttgtgttgggagaccagtactattggctgtgggttcttgatcaccagatgaaggtggtctaaaccagccaggtttataagtgataaagccataagcaccaaaccacacaacctttttccatttgcttccaaaatagtacaaaatggtgtgaatttacaaaagaaccaagaaaattatttccaagaggtgttaaaacgtttgtagcttagcacgatatatctatcatgcagtggcatcttggctccctgagcctgaatgcattttacactatctcaactancgcagt

SEQ ID NO: 33030 - DNA, 517 bp, Setaria italica
  misc_feature (29)..(29): n is a, c, g, or t
  Peptide Sequence Number=SeqID_99004
aatccctatcattggtgaaggaaaccaanagggaaatgataggtacatagagcaactagttgctagtgcggaagcagcagtaaatgaaattgtaagaagaggggttgctcatcctgacaaaatcgccgtgggtggtcattcatatggtgcgtttatgactgctaacctcttagcacacgcccctcatctgttttgctgtggaattgctcgctctggagcttacaacaggacactgactccatttggctttcagaaagagatgaggacgctatgggaggctaccgatacctatattaagatgagtcccttcatgtcagctaacaaaaatcaagaaaccaattctactgattcacggagaagatgacagcaaagtaactacagcaatgcagtcaagccaattttatgatgccttgaaaggtcatggggtgccatgccgtttggtgattctcccatttgagcggcaccagtatgctgcgagggagagcattatgcatataatcgtgggagactgataggt

SEQ ID NO: 33031 - DNA, 277 bp, Setaria italica
  Peptide Sequence Number=SeqID_99005
gcagaatagcaatatagcatacgttctttcacaatttgatattttgagaggtagtaccagagattaagaatcaatatacaaaacaggagtaaataattttaagtactgcagtacaaattcacaacaatacatgtttaattgcccatatggactattcaggactactataagttagttaattgatgtagcaaaattttcctatagttttctatgtacaatcctcacaattacaaaggatcgactgcagtttactcttcttattagcagccccctgctt

SEQ ID NO: 33032 - DNA, 1049 bp, Setaria italica
  Peptide Sequence Number=SeqID_99006
gatctcagcttatatggttaaatgaccagttcaaccatataagctgagattggcaggcagcttacttacaagaacagctcacgagaagttcccttcgttgttaacgcgttgcatttgcacggcggctatgaagacgcaagcatttccacgatggtactctccattattgaccgtccagtgcctgtttcttccagctgctgaatagacaattagaccaaggaccattggaaggtgagaagatttttgcacttgcatccgatgtactttacatcagcagtagtcaactttcaaaatatgaaggcacgtgatatgcagtctttgacttcgtacagattcggactaagtgagtaaaaaagaaggaaatgcacaatccttttctggagacggcggttctgaatttctggttttgtacgaaatcagaattagacatcatatggtatttacagttctgatctgcatgtcgtgacacgttcaaagcaattttgtcaagcaaagagaggcgtggggaattgagttgtgaagactctctagtctctcgactacaatgatctgcagtatgcagttgtactacgccactgagcatgtcttctgttgttttattcctcgttcagctctgtttgctgagtttattaaaaaaaagagcatcgaatatagatgtggaatattatactacaccattgtgttactgatcagactgacgcgaactatcacgaattcgcgatcagtagttagtttattactgaaattttgttcagcaattctcagcacactatataactactggtgtataataaacggttccttgtagaacagcacatgggtgaccgctgaatatattttttttattgagcgtcttgtgacctactgtatgttataaaatgctgcgtacagactacagccagcaaaatgcaagattacacgtatattgatctgcataagtaggaataacagtgtgcatgctatttgataggaagttacggaaaaaagactacttcaaaaaagactaacgttcatatttggcttttgatcccaacaatgaaagccaccga

SEQ ID NO: 33033 - DNA, 516 bp, Setaria italica
  Peptide Sequence Number=SeqID_99007
gtggcgcgagcgacatgggagaggatatgaaggcagccagacagtggcttgtggatttcttgaaagggcaaggggttttgacagggatggacatagcgcagagatttggcctgtggagggttcggtacagagatgatggccacattgcatggatctgcaggaagcacatcgccgcaagggaagatgagatcttcgagctgccactttgagccacatccagagccgataagatccatgtgctagaacaaatatgttgtgctaaccacaaactactcagtgtctcagtggccagtgggctaggaatcagtctggtgacccagagatagatgaagcttttgctagcttcaatttcttttaaatgctagttatttctgcatgattatatcgagccaatgtatttagatcaaccatgtatttagcacacagataagcccatttagatcaaatagtgcatgtataaccatcagcggatcagtctcagaatatgacccagccgccaacaatcaagtacaattt

SEQ ID NO: 33034 - DNA, 507 bp, Setaria italica
  Peptide Sequence Number=SeqID_99008
atagcattaactttagttcatatctgtagaaacaccagattgactaataacatgacccaaataagaaattgtcctctgggcaaacttgcacttagataactttacatgccaatgatccttttgtaacagttctaggacctccttcaaatgcaacagatgatcttcaaagctcttactatatataagcatatcattaaagaaaacaatgacacatctcctaagcaagggtgccaaggtagtgctcatggcaccttgaaaggttccaggagcacctgacacaccaaaagccataaccaaaaactcaaattgcccatggtgggtttggaaagcagttttatattcctcaccaggtttcagcctgacctgatgataaccagacatcaaatccagagtagaaaaccaactagccccagctaattcatccataaactgatcaaatattggaatagggaattttcctttgatagtaagagcattcaaatatcggtaatctgaatgtgccatctt

SEQ ID NO: 33035 - DNA, 1393 bp, Setaria italica
  misc_feature (49)..(49): n is a, c, g, or t
  Peptide Sequence Number=SeqID_99009
cctcaaagaactccaagagatgctttcggacagttagctgcaagtaacngtttaacaggcaatgtgcttcatcaatgtccagtgtgtacgtgtcatgttctaaacaacttgatcatgtggattctgaaatagatgggggttctctatcacccactagcacttcaagtgatcactcagtaacagataaaagagtatatctttcaggttttcagtccagtggcttggtaagttgcggtagtttggatgaatcctcaaatgaagatgaagaccccatacatgaacagtcttgttgctgccatgattctgttaaagaaattgatgggtgcggtcagccagataagcatacaatcacgagagatgaggatgatctttgcttcagatcctttttgggagtaagaaagaaggatactgaacaacagagatacttgtgtggtgcttataatacaaagatggcatcacaggctccattgtcattttggcctcgctgggcttatgagatgtatgattcatattcacttgctcggagagctgcagatttgtggagacaggtaattgtaaacccaagcatggatgatcatgtgagaaagccaaatcatttgtcattttacattggaagcaatcttccgatctcaggatctctgaggcaagaactgcttgaaattgatggagtctcgtaccgattacagcgggagattcagctactcaaagccttcaatatcatacgatgtagaagctgtctgacttctattgcaagacgaagtgacatggtgatgttgtccagtgccaacgctattggttctctcagttttaaagagatgattacagttcacaatgccactggtcttggattgcgtggtgaaccgtccaaaatttacagctggtttccaggatatgcatggacgatcgccctgtgtgctgcctgtgagtccaacataggctggctgttcagagccgacaagaagaacctgcatccaaaatctttctgggcgatacgcaccacccaagtttcggatgatacgcaggcaggacaggtctgatcagatcatccatgaatgaccttcatgacagtggattgcagcaacctcttcattgcaagatgcaagttgcctgctttaacttcctgtaaatacaaaagggttttcagcaaaaaggttggatcccgaaagggaagagttataaagaacatgttacttgtgagagtgcactgtaaagaacatgttacttgtgagagtgcacatttcacagtgctgtacatattttgcggtttgcggcagcgttcagagtttgccgtttgtggcagcagctgctactaatttcgttatacttgttgctggtgtcattgtcatccatgtagctatcaatttatcaaagagttgaaagaggaaaaaatagt

SEQ ID NO: 33036 - DNA, 383 bp, Setaria italica
  Peptide Sequence Number=SeqID_99010
ccaacctcgtcaactacgccaccgcgcgcgcctcctggggctggcgcgtctcgctgggcctcgcgggcgccccggccatcgtcatcttcgtcggcgcgctcttcctcaccgacacccccagcagcctcgtcatgcgggggcggcccgacagggcccgcgcggcgctgctccgggtgcgcggtcccgacgcggacgtggacgccgagctccgggacatcgccaaggccgtggaggctgcgcggcagagcgaggacggcgcgttccgccggatggccacgaggcgcgagtaccgcccgcacctggtgctcgccgtggccgtgcccatgttcttccagctcaccggcgtcatcgtgctcgccttcttcgcgccgctggtgttccgc

SEQ ID NO: 33037 - DNA, 409 bp, Setaria italica
  misc_feature (1)..(56): n is a, c, g, or t
  Peptide Sequence Number=SeqID_99011
nnnnnnnnnnnnnnnnnnnnnnnnnnnnnnnnnnnnnnnnnnnnnnnnnnnnnnnnttttttttttttttggttttgtaaatgcctgttagtggctgcatgttgcttcataataaagtgtgatcatacacaacctatgtgtccacattaccaattgtgtcaagagcaggaagagaatacatgggggctactactagggtagaaggtgaacacgactgcacactcaactttacagggtagcttaaacataatatccagtgcttgttatcactacataacgcatcattatcctaattgctttcagctacttagtcaaattgcgataggagtaatccgcttcttagtaggcttactcgatgcattgttcttggtcgacactggtggcggtgttacttcgacagccacaggta

SEQ ID NO: 33038 - DNA, 187 bp, Setaria italica
  Peptide Sequence Number=SeqID_99012
cgcaccacgaaacaaaatcttagatctataagcatgcaactagctcatttttctttgcttaaaaagatagcatgcgactagctctatttttttttgcttcaaaggttaagcatgggcaattaataatcacgcggtaatactaattgcaggcaatggtaaaattcaaattccagacaaggtctccggc

SEQ ID NO: 33039 - DNA, 358 bp, Setaria italica
  Peptide Sequence Number=SeqID_99013
atacggcactgctgtacctcttgttctaaatggttgcagcgatggcgttgttcagtactacgtcccttacttatctgcagtccagctttacggcggatacagaaggcaaaccggcccttccaggacgggtgcagaggagagcgacagcgacctggagcaggagacaagctccagcacgaacgcgtcctcagcccaggaaaccagcgagagctccagcggcagcgaagcttcgagcgacgacggcgaatccggaagctgccacgagcagctcctcttcgagttcttcgagtctgagtcaccctaccaacgcgaaccgctggccgacaagatttgcagcctcgcgaagcggtttccagag

SEQ ID NO: 33040 - DNA, 571 bp, Setaria italica
  Peptide Sequence Number=SeqID_99014
ttagtaagtacttggttattttttaagtaagtcctattctagtattttctttactagtattgttttaaggatgtacagtcaaaagtcagtgatgttgttctgggaaaagaaagccagtggaggaatctactcctgagtatgagaagcttaaaaattacatatttgaactagaaaatcatttagcagaggcacagaatcaggcatacaatcctgtgaaacatcacagagaacttgggcaatctttggcggaatttggaaaggcgattaagcttttaggtgcttgtgaaggagatgtgatggaaaaggtgtttctgaagttggttctaagtcagagatgttgtcaataaagttgcaaagagaggcagacaatcttctctttaactttgaagaaccattgaaagattatgtgcgggctgtacaatctataaaagccaccatgatggatcgagccaatgctttcaggcagcactttgatttggatcaggagaggaagtataaagagcttaacctgtacgtgtttgcgtactccaattaccttttcctatccagtcttgaagaaatgttaactaat

SEQ ID NO: 33041 - DNA, 1648 bp, Setaria italica
  misc_feature (1613)..(1648): n is a, c, g, or t
  Peptide Sequence Number=SeqID_99015
cgaaaaaaaaatcaatcgatttccctttcttcccaagtcgtcctcttcctcccgtcgcttcgccgtgccgcaccagggaagggaggaggcttcaccgcggagctcgccatgatctcgccggagaggagcccgtcgcagagtccgcggtcgccggcggcggcggcgggggcgccgttcctgtcgatctccgtcacggatcccgtcaagatgggcaccggcgtgcaggcatacatctcctaccgcgtcttcaccaagaccaacttgcctgaatttgagggaccagagaaaattgttattcgacgctatagtgattttgaatggttgcatgataggcttgctgagaggtacaaaggcatttttatacctccccttccagagaagaatgctgttgagaaattccgttttagcaaggagttcattgaattgcggcgtcaagctctggacttattcattaacaggatagcttcacaccctgagctcaagcaaagtgaagtcttgagggtatttttgcaggcagatgaagagaaaatggatagggcaaggtcttatgagactggtatttttaagaagccatcagatttcttacagatgtttaaggatgtacagtcaaaagtcagtgatgttgttctgggaaaagaaaagccagtggaggaatctactcctgagtatgagaagcttaaaaattacatatttgaactagaaaatcatttagcagaggcacagaaacaagcataccgtcttgtgaaaagacacagagaacttgggcaatctttggcggaatttggaaaggcgattaagcttttaggtgcttgtgaaggagatgtgatggaaaaggtgttttctgaagttggttctaagtcagagatgttgtcaataaagttgcaaagagaggcagacaatcttctctttaactttgaagaaccattgaaagattatgtgcgggctgtacaatctataaaagccaccatgatggatcgagccaatgctttcaggcagcactttgatttggatcaggagaggaagtataaagagcttaaccttgaaaaattgaagttcatgaaccctgagaaatatgccgaagcagaatttgagtttagagagttgaaagcagacagcgaggaggctacgaagaagtttgaacacatagttagaataatgaatgaagaactcgctcgtttccaggagcaaaaaacagctgatatcggacttgcgttccatgaatttgccaaagggcaggctaagctagccaaagacatagctgatgcatggcgcagcatcctcccaaagctggaagcttgttcgtcatcataagtgcctcgcgatgtttgagatatagggggtttgcacttgctgagttttaggctgttttttccccggcctgttttgacactgattcctgtatacttattaaaaagtgatgtttggagatgctcctgctgttagattcagtcagacatcatttctttctgctcgagtatgtgtaacatgtcttcttttcttcgatcaattgacaatttgacatagctactggaatctcgtaataatgatcatcaataatgaagaaatactggaccatggtcctatttacctaagtgtaaaaaaaaaaaaaaaannnnnnnnnnnnnnnnnnnnnnnnnnnnnnnnnnnn

SEQ ID NO: 33042 - DNA, 460 bp, Setaria italica
  Peptide Sequence Number=SeqID_99016
cccttggaggaggcggaggagcggaggccgagcgccttcttcatcttgctggcggcggcggaggtgagggagcgctggagcgaggcggaggaggccgaggacgcggaggaggccggggacgccggggccgccgcacccgacgcggactgcgggatgtacgtgagcggcttcccgcccgtggtgcgggacgccgcgaccaggacctcgtaggcggcctcccggaagtcggcagccgagagcggaaccccgaggtccgggaacggcgaggggagcgccgaggaggaggaggccgccgccgcggcgggcgggaggaagccgttggaggaggaggagtgggacgagtcccggcgggactcgcggaacaggcgagccatcgcggcggcggcggcgtcggcggtggcctcgcggcttgccttttctcctcccccccccctgtcggcctctccctcgcgtgctacgg

SEQ ID NO: 33043 - DNA, 259 bp, Setaria italica
  Peptide Sequence Number=SeqID_99017
tgcatataggttgtttcagacaggcatgtgaggtttcaagtgcctccgccactaacatggttatatggaattagggatcatatattatcacaaaacgtaaatacttcctagaacaaatatatacttcgcagacagattttcaagctaccattgtctattttcaactctgttagcaatttttcaatatttattagccaagatcagcacacaagaaccccaaacatcatcgactttgagcgcctggggttggatagagctg

SEQ ID NO: 33044 - DNA, 323 bp, Setaria italica
  Peptide Sequence Number=SeqID_99018
acatgtcggagaagcacgacttcggagggcaggcggtgctgccggtgtgggagctgaagcagggcatccgtgccgtgcccctgcacgaccgcaagggcgtcaggttcaagtcggtcaggctcctcatgcgcttcgattttgtctaggccgccatcagcacagcagcagcagtcattgttgagggatttgcattcttttgcatcatcctagtgtgattgtgattaacgtaaaaaaaagttaccagatatgtactatgaattactgttactagtagaagtagagtatggtccatgtgattagtgtagactaggattagaggggct

SEQ ID NO: 33045 - DNA, 309 bp, Setaria italica
  Peptide Sequence Number=SeqID_99019
gccgagggaagaagtagaggaggagtcgaggaagaagaagtctctcgagcagcagcagaggaaccaagaagatggggagctacgcgtacaagtactgcatgtgcttcacccgcaagttccgatcccccgacgcgcagccgccgcccgacgtccgcgccgctcacctctcctactgctgcggcggcggcagctccgacggcggccacgacggcctccgccgcttcctctccctggtccagggcgagtccgcccccgacgccgaccgcatcctcgccaccctcgcgcgcacttcggcggctcgacggcggc

SEQ ID NO: 33046 - DNA, 1046 bp, Setaria italica
  Peptide Sequence Number=SeqID_99020
taacaaggcagcacaggacaggagaggtctgtctcctcgcctccacttcttcttcttgacttgactcgagtcgaggaatgttcaatccagggggaggggaacgaacgcaacgcggtctcgacgcgaaattggctgcagcacctgacctcacctgataagcgagcaagcagcatctgtcggacagatcggatcggattcccttcccttctcttgtgtcggagggaagtagaggagtcgaggaagaaggctctcaagaagcagcagaggaaccaagatggggagctacgcgtacaagtactgcatgtgcttcacccgcaagttccgatcccccgacgcgcagccgccgcccgacgtccgcgccgcccacctctcctactgttgcagctctgatggccatggcctccgccgcttcctctcccaagtccagggcgagtctccccccgacgtcgaccgcatcctcgccaccctcgcgcccacttcggcggctcacggcatcgcccgcctcgtcaccaggtcgccggcgccggcgccgcccacgctcgacgacttcttcgggttcctcttctcccccgatctcaacccgccaatcaacaaccaggttcaccaggacatgtcagccccgttgcctcattatttcatattcactggccataattcctaccttactgggaaccagctcaatagtgactccagcgacatcccaattataaagtcactcgagagaggtgttagagtcattgaactcgatatgtggccaaatgcttcaaagaacaatgttgatattcttcatggagggacattgactgcccctgtagaaatgatcagatgtttaaagtccattaaagaatatgccttttgtgcatccaattatccccttgttattactcttgaggatcacctcacagcggacctccaagccaaagtagctgagatgctcactgaaacatttggagatcttcttttcatccctagttcagacccaatgaaagagtttccttctccagaagctctgatgaagaggataatcatctcaactaaacccccac

SEQ ID NO: 33047 - DNA, 1525 bp, Setaria italica
  Peptide Sequence Number=SeqID_99021
ctttccatcagattcatcagcatttgaatctattcttctcttattcttcatggagggacattgactgcccctgtagaaatgatcagatgtttaaagtccattaaagaatatgccttttgtgcatccaattatccccttgttattactcttgaggatcacctcacagcggacctccaagccaaagtagctgagatgctcactgaaacatttggagatcttcttttcatccctagttcagacccaatgaaagagtttccttctccagaagctctgatgaagaggataatcatctcaactaaacccccacaagaatataaggagtttctcaaagtcaaggataatcagaatggcagtggaaacatagctgatttgccagaccaaggaagcctgagaagaatagattcaaatgctgatgaatctgatggaaaggatgaactagacgatcaagatgaggaagattccgatgaggacgaccccaaatttcagcatgatactgcctgcgagtataggaaactgatcaccatccaagctggaaaaccaaaaggccatttgcgggatgcgcttagggtggatccagacaaagtcaggcggctttctttgagtgaaacacagttagctaaagcaacaacttctcatggtgctgaagtcataaggttcacccagaagaatatactccgagtgtatccgaagggcacaagggttaattcttctaactatgatccaatgaatgcctgggctcatggtgctcagatggttgcgttcaacatgcaggggcatgacaaagcactgcggttaatgcaaggatttttcagagctaatgggggttgcgggtatgttaaaaaacctgacttcttgctagtgacaggtccaaatggtgaagtatttgaccccaaggcgagtttgccagtgaagaaaactctcaaggtaaaagtatacatgggcgatgggtggcgcatggatttcagtaaaactcatttcgacgccttctcgcctccggatttctataccagggtagggatcgctggagtgaaggcggacagcgtgatgaagaaaacacgggtcctggaggaccagtgggtgccggtgtgggacgaggagttcacgttcccgctgacggtgccggagcttgccctgctgaggatagaggtgcaggagtacgacatgtcggagaagcacgacttcggagggcagacggtgctgccggtgtgggagctgaagcagggcattcgtgctgtgcccctgcacgatcgcaagggcgtcaggttcaagtcggtcaggctcctcatgcgcttcgattttgtctaggccatcagcacagcagcagtccatgcttgcgccaaccagtcattgagatatttgcattcttttgcaccctagtgtgattgtgtctacgtaaagttaccaaatacgtactatgaattattgttactagtagagtagagtatgctccatgtgattagtgtagactaggatttaggggtgcttggttaattccatcttgcgcatatatgtaccatgaatgtac

SEQ ID NO: 33048 - DNA, 472 bp, Setaria italica
  Peptide Sequence Number=SeqID_99022
ccgccgccagcgggctcagcgggtggtggtggtggtggtggtggtgcccgtgcagctgccgcgcgtcgccgcccggcggctccttccggtggaagttgcggtggcacccgcacgccgagcacctgagcgcgtccagcgagccctcctcccccgccggcatgaactcgccgcacccgtccgtcgcgctcccgccgatggccgccgcgtggttcttcaggcactcgcggtacctcaccccagccccgccgcctcccgcgccgacgggcaccaccgccagctgccggttcttcgcctcctccggcaccaccacctccggcggcgacatgtgccgcccgttcgcgccgtggctgtgatgctgcgggtgctcgtggtgcccgtggtgcaggcccaggtacggcgagcccccaccgccgccgtgcattgccaacggcaccggcagctccccctgcgccccggaaagatccatgactta

SEQ ID NO: 33049 - DNA, 466 bp, Setaria italica
  Peptide Sequence Number=SeqID_99023
ccgggagacgggccacgttgctgtgcacccgccgccgccgccgccgacggcgctggcgcggggcctgcccgtgagccagcagcagctcggcggggagcatgaccttgaccccaacgcgctgctggtgggggccacgctgatcacgatgctcgcctacctgctcggcaccttcatccccggcggctactggcagcaggactggagcgacgacggcaagcgggtgctctaccgcgccggcgaccccatcatgcgcgacctgcaccggccgaggtactgtgtgttccggatcgcgagctgggtcggggtcgcgagctccatggtgatgacgctgagcctgctcgtgcggatggccccggactcgcgccacgtccggtggtcgttcgcggtgtcctactccagcctgctgctcaccttcgcggtgtcgcagaccaagacgcacctgtcggtggacatcatcgtctggctc

SEQ ID NO: 33050 - DNA, 238 bp, Setaria italica
  Peptide Sequence Number=SeqID_99024
aagctgcacgatgcgcagagacgagttcctctggctgccgaacgccgcggccgggatggcgccggtgagctggttccgcgacaccgagagaatctgcagcgtgggtatggcggcgaccgcggacggcaggatgccgcggagcgagttcccctgcaggctcaggtggagcagcgccgagcagttggcgagcggcgcagggatggtcccctcgaggaggttcccgtcgagccagaggtaa

SEQ ID NO: 33051 - DNA, 2161 bp, Setaria italica
  Peptide Sequence Number=SeqID_99025
tgttcatcacaaacctgatgaccgacaatgtataaaacagcaaatatatagattgtagagtattacaaaataaaatggaggcatgtcctcgtatctgaagatgagaagaaaaggggattcaagaacatctggttaccagttccaatacaacatacactagaagccgttcaaaatcccagaaaatgctgacatacaccagctgaaaaacacatgcttttcactccgcaaaggctgtaaaatattggcctgctcaaactctgtagaatgaagacacggctctgcagtgcacctttcagacttcatgccgtctcgcgtctgccatctcgtctaatctgcaacgtctcttcttgtcttctgttgtgtcttattgtatcaccgattcataaagagtgggcagagactaggcttcaatgaggaaacatgcagcacacacaacgaagaatgcaaaaccacacaaatgatcacaaaacgcacaaggcaaacctcacttctcatacgagatccaaattccacaccggaaaatcgcaagggttaaatataacatgcagtggccaagaaacatatgacattgttgcacgactcctgcaacaatttgctctcgagacattattcagcaggcaacttttctttgaggtacttgagaattgctttcgttcctcgctccaacagagttcgtcttatgcttcttagcggattcccgtcaagtttcaacacttgaaggttaggctcaagcaatcccagctctgctgggagcgctgttatattgttgtctgacaggtcaagctcaatcagagcagtgaaattctttataccctctggtacagttgtgaggttattctgactcaggtcaagaatccggagctgttttaagcccaacaaaccattaggaaattcatggagtttcattcgtcttaggtagagctcctgcagctgtggcgacgcagaaactgcagaaggttcaggtagtgctgaagcattgccacttaaatcaagcacttcaagtttcgacagagacaaaagatcagtggatgatatctctgccaaggaattattgtccagctttaaggaagacagactggtaagggaagatatcactgtgtgcggccacctttttattttgttatttgacaacactaaggattgaagtgatgaacataatgacagctcgtttggcagatcttctattgaatttttagaaagatccagtttcaccacatcacttgtctcccacgccacagctggtacactggtcacaccaagactgctcaagttcaactcctttgaagataaggacaatcgcctcgctgcagcaatttggtcatcttttgttggagtgcttgtgcttccagatccttcctcatcagatgaaagccgacttcgcagaaacttcagtaatgtagttgttggtccggaaaccaatgaacttctaagtgttctcataggatttccagtaagcagaagccttctgagggtagtcattttacctagttcagctggtagaccagataatgagttattcgatagatcaaggaaagatagtttgaggttgcatgctccaacagggtactcctttagctgattagaatggagatcaagtattcctaattttgatagtgtgccaatatcagctggtattgaagacaacaagttatttcccatatagagctcagctaaagaagagcaaccctttatggaaggaggaattgatgttattttattctgatgcatgtccaggcgaataagttttgaaagtgctccaatactatccggggtggttgtaagtagattttttgcaagatttagctctgtgagcattgtccatgacgcaaacatgttttcagaaaccgtcacaagcttgttaccctctagatccaatttacttaacttggaacagccaagtatgtctggtattcttgatatgttgttgttcgatgccttgagttccaacaagtccggacatttggcaaggctagatggaagctcagtaaggcaattgtttgagaaatcaaccttgactagagcagtagccagaccaatctcttcgggcagagtgtttatttgattaaaagatacatccagcgattttagcaatggaaggtctccgatagctgctggaagggaagatatcttgttgtggcttatattagcacaacaagtgaag

SEQ ID NO: 33052 - DNA, 233 bp, Setaria italica
  misc_feature (209)..(209): n is a, c, g, or t
  Peptide Sequence Number=SeqID_99026
tctgacatttccaagggaatgaattacttgcatcagattaatattgttcacagggacttgaagactgcaaatcttcttatggatgatcaggtgcttgactgcttctcatattattgacctttgttacagcatctatgttaggaaaataaaagtctactacaattttcacttctcagcatagtggaatcttagctttgtgagaaaggttntttgatcctgatattctgacaata

SEQ ID NO: 33053 - DNA, 357 bp, Setaria italica
  Peptide Sequence Number=SeqID_99027
ggtattgtatcaccggccaatggaggtttctccttcatccgactttgtccagataccagctgatgcagctgatgtttgggaagttgatcccaggcttctcaaattcgaacgaaaattagcgtctggatcatttggtgatctataccatgggacgtactgtagtcaagatgtagctatcaaagtactcaagcctgagagggttagcgttgatatgctgcgtgagtttgcacaggaagtatatataatgaaaaaggttcgtcacaagaatgttgtacaatttattggtgcatgcacgagacctcctatttcatgtatagttacagaattcatgcatggagggagtattttcgacttcct

SEQ ID NO: 33054 - DNA, 845 bp, Setaria italica
  Peptide Sequence Number=SeqID_99028
tttaaattacttattaattgtctagttactagtagtctattggtcctatttggttccagtcaatggctgctaggatggatcaccggccaatggaggtttctccttcatccgactttgtccagataccagctgatgcagctgatgtttgggaagttgatcccaggcttctcaaattcgaacgaaaattagcgtctggatcatttggtgatctgtatgttcaagaagtaaattgtagtaactcttatttatatgtaactgacttacttggtgtgccatcagataccatgggacgtactgtagtcaagatgtagctatcaaagtactcaagcctgagagggttagcgttgatatgctgcgtgagtttgcacaggaagtatatataatgaaaaaggttcgtcacaagaatgttgtacaatttattggtgcatgcacgagacctcctatttcatgtatagttacagaattcatgcatggagggagtattttcgacttcctttacaatagacgaggaaaatttcagctcccagatgtgataagaattgcatctgacatttccaagggaatgaattacttgcatcagattaatattgttcacagggacttgaagactgcaaatcttcttatggatgatcaggttgtcaaggttgcagactttggggttgcaagggttaaagaccagtcaggagttatgactgcagaaacaggaacctacagatggatggcccctgaggtcattgagcacttgccgtatgatcatagtgcagatgttttcagtttcgggatagttctttgggagctactaaccggaaagcttccatacgaagacatgacacctcttcaggctg

SEQ ID NO: 33055 - DNA, 674 bp, Setaria italica
  misc_feature (666)..(674): n is a, c, g, or t
  Peptide Sequence Number=SeqID_99029
cctatcccctgtgtgccgcacctatcctttaggttactcgaaaagaccagtcaggagttatgactgcagaaacaggaacctacagatggatggcccctgaggtcattgagcacttgccgtatgatcatagtgcagatgttttcagtttcgggatagttctttgggagctactaaccggaaagcttccatacgaagacatgacacctcttcaggctgcagttgccgttgttcaaaaggatctgaggcccacgattgctgctgatactcatcccgtgcttgctgatctgattcagcgttgctggcagaaagatccggctctaaggccaacctttgcagagattgtggatatactgaactccataaaagaggtggttcggagttctgggcatcacaagagacatccaggtcgatccgactctgggaggagacgaggatgttgatgcggcagttttgtttagtgttccacgcctttgtttcgtcgccctttctcattttcatctttgacattggtgttattttggttgtagttcagtaatagcttcagaatatggtcagatgagtttgttgcactcatttcgagagggttacttacagtttgtaggcttgactaaatgttaagaggagttccacttttttaaagcttaaagaaaaaaaaaaaaaaaaaannnnnnnnn

SEQ ID NO: 33056 - DNA, 412 bp, Setaria italica
  Peptide Sequence Number=SeqID_99030
tgtgctccacatttgccatgtgccttgttcactgctagcctcagggtcagtggcttcgacaaagtacaaatcaatttaaccatagtgcaaatcttttcaatggtggaacaaatagctccctgagtactggtttgaatgacagtgatccatggctgcagaaagcacccttccagcaattgccacctgatacaccaagcctgttccttccacatgaagtacaagaaaaagctataaacaatgattttgtttttggttctcctaacaaatcagcccgtgaacacccctttgggccgcctggtcatccttggcccaaggaggaactggtgctgaaaggagctcaggaagcaaaccatatgttgttgacgaaaataagcctccagcaccaacatgtgcacaaggcgccaacgacata

SEQ ID NO: 33057 - DNA, 2090 bp, Setaria italica
  Peptide Sequence Number=SeqID_99031
tttcttggcattctcatggcgcttgctgtcgtccttttgctcgacagcagccagctggttcttgaggaagatattcagatttacatcatcaggggacgatgagggcttgggcccagatggtaaaaggttgtcaaagagaggggagaatggaggaaaagcagaggagagcagggtcgagaaggcgaggaggaaggcagaggagaagagactggcaagactggagagggaaatgctggaggaggaggaacgaaagcagcgtgaggaggtggcgaagctagtggaggagcgcaggaggctgagggatgagaaggcagaggctgaggagcggtccaaaagcgctacccctgttggggagaaggatgctaggagggaggcagagagacggcggcaggagaggaggaagagagaggacaagggttcaagcaagagcaattcagattgtgaggacatcgatagaagattgggccgcgaaggcgataggaagcgagactttgacagaaagagtgacttggacaagcgtgagggttataaacctcattactttgaagctaacaaccatagtaataagacagtggagagcagaaccaagtactttggccgtatgacaggtggtttcttatcatcttcaagagggtttggtggaggttccttctttggcagaagtgctcaggcccctgcccctcaagttaacaaggttagtagacctgtagttcctgcaactgaccagggtaatgcactcaaaagagaaacccagcatgcagccactcaagctacagccaaatccgctacagctggagaaaccagaagttcatggactaattttaatcgacctgttagtccaaatgtgcagccacaccctaccggccttaaaaagtcatggcatcagctgtttagccgttcagcgtctgtgtccccttgtcctgatgttacaacttcagctcgtgatatgaattggaagccagaaccaaatggagcacaaataagcagtgctcattcatttctctcccattatcctcctctggaaagcaagccaagttcaagccagtccatgcattttccaggttttccaccacttaatggaccacctcccattaagccattgcctcattttcctgctggacacatgaccttctatgatgatgcagaatccacagtatttgaagaaccagaacaatttgaagacccatgctatgatccagatgcaatcgcattacttgggcctgtttcagagtctctagataacttccctctggacatgaattgtgggttcatctcgagtaatgtcaccaaggaatcacatgggaagccttcaccaattgagtctcctctgtcacgatctcgtatggttgatgaaaagcccatcaagcaaccgcactcatcaaccacaaaaggacctggtggtttcatttcgcctgaggctagcagcgaacaaggcacatggcaaatgtggagcacaccattggttcaggaaactttaggtctgcaaggtcctcagagtcagtggcttcgacaaagtacaaatcaatttaaccatagtgcaaatcttttcaatggtggaacaaatagctccctgagtactggtttgaatgacagtgatccatggctgcagaaagcacccttccagcaattgccacctgatacaccaagcctgttccttccacatgaagtacaaggaaaagctataaacaatgatttggtttttggttctcctaacaaatcagcccatgaacacccctttgggccgcctggtcatccttggcccaaggaggaactggtgctgaaaggagctcaggaagcaaaccatatgccgtcgccgccttgtgcacatgttggtgctggaggcttattttcgtcaacaagtcctgatgtacagtcagtgtggtctttcaatgaaaaagagacagcatagaaggaactttgattatatagagggaacgaaatgtggagccaagacttccttgcctcctcctcctccttgcagtggtgtaggggttactgaggagataagataagctggactgtgttccttgatgcaaaatcatgatgctttgcatcaaggaacacagtccagtcaccagttaacatgcgcc

SEQ ID NO: 33058 - DNA, 244 bp, Setaria italica
  Peptide Sequence Number=SeqID_99032
agtagtagccaatggagtagtagtaggagggctatcaattagtaagcagctagtattagttacctgggcggtggtgcagcgggactgcggcgagcgatgcaacgaggccggcgcggccgaagaacttggcgacgaagacggtggcgttggcctgcggctgggcgccgtcgatccactcgatgctgggccggagcacgcaggcgtcgctgcagcccttgcgcaggacgcggcagccgttgcagct

SEQ ID NO: 33059 - DNA, 1293 bp, Setaria italica
  misc_feature (1)..(93): n is a, c, g, or t
  Peptide Sequence Number=SeqID_99033
nnnnnnnnnnnnnnnnnnnnnnnnnnnnnnnnnnnnnnnnnnnnnnnnnnnnnnnnnnnnnnnnnnnnnnnnnnnnnnnnnnnnnnnnnnnnntatctaaaaagaaaaacttgaattgcaaataaggcctcggttatctcgacctgataagattcaagatacggaccttaattacaaactgctcgatgttaatccacctatgctatgcatcacagcctaatttggcacaccagcccatcctttctgtagcaaagcaaattaacacactcgttaattcaccagcttaatcaacagctggatcgcttcaaaagcattttcacaccccaaaaacctttgtccagcaccgaccgactcctgcaactaattaccacacacacaccctctgctgaactccctctctgtctctctgcacagttacatcttcttacaagaaagaaagaagggcgatgacacggtcacggtcagtcagttgaagaggttcagcagcgccggcgccctgggctccacgtcgccgccggtggcctgcaggtcctcgcacgtcgtcgtggcggagtactcgtccgacgcgccgcagccccgccgccctcccgccatcggcgacgccggcgtcaggcagaggtcgagctcgcacgactgcagcagccccgccggcggcggctgctggcaggcgcccgtggcgcggacggcgtcgaagcaggcgatgccgccgccgccgttgttcctgcgcttcttggacggcgtggaggaggagttctcgggcgatgcggaggaggcggcggcagcgccgacgttgccgtagaggccgtccatgtcgcggtccttgaacgcggcggggatggtggagagcgcgcggagggacgactcgccgcggaggacggcgtcggcggcggcctggcagaggtcccagttgcccgtccacatgagcccgatggcgccgctcaccgggttgatggtccgcccgcaggcctcgtacagcagggatcggaacagggctgggcggtggtgcagcgggactgcggcgagcgatgcgacgaggccggcgcggccgaagaacttggcgacgaagacggtggcgttggcctgcggctgggcgccgtcgatccactcgatgctgggccggagcacgcaggcgtcgctgcagcccttgcgcaggacgcggcagccgttgcagctcatctcgcgagatgatcgatcaattccctcgcctcgccttctagctaataatcttaatctcctcctccctgctccctcccctctcgatacctccgcctccgctcccctccaagcctcccc

SEQ ID NO: 33060 - DNA, 267 bp, Setaria italica
  misc_feature (4)..(4): n is a, c, g, or t
  Peptide Sequence Number=SeqID_99034
tcangttgccatccttcagcaataagctccagaaaaaactgaaggtgcccttggaggcagcagttctgaccttgtaccttgcaaatcggcaccgcaacaacttgaacaatgcaaatgacaagcataagtctttttgtggtttcagtgttgatgttggaagcacgttatccatcctccaaactctatcaatagtcaccaggccattgttatgcgaagttgtccatgagtcatccttgaacacatacccaagaggatgcttctccagtg

SEQ ID NO: 33061 - DNA, 244 bp, Setaria italica
  Peptide Sequence Number=SeqID_99035
cccaattgcactccgcacgccgtgatgactgaccccaccggcctgccgccgccgctccgcccgcccaccgcgccgcctcgacccgccgtcgcgcgcgtgctgcacgctatcaacacctgcacctccgccgcggccctcgggcctatgcgcggcggcatcctccgcgaccccgcgctcctccgcaacacgaccgtcgtctccgccttcttcctcgcatgcggccgcctccgcagcctcgaccccg

SEQ ID NO: 33062 - DNA, 129 bp, Setaria italica
  Peptide Sequence Number=SeqID_99036
aatttccagaaacaataattgtcttcatgcacaagcaaatacatgtcttgtgcatgaagacaattattgtttctggaaattcatatccaagcaaccagatatccagagctgaggatttcaataacgaag

SEQ ID NO: 33063 - DNA, 1802 bp, Setaria italica
  Peptide Sequence Number=SeqID_99037
atcaccaactctctcacaaatggaacatcattaacattcttgtatgcaacaagctcatttgaagcccttgcaggaccacgtccttcaccagaaccagaaccacccccagcaagccttctagcagtctcttcattcttttgacgagcaagttcagcctggtgctgtctcctttgttcttccttggacatctcctggttgtccgacctgagagttgccttggttggcacgacgtcaacaggctttgacaccacctttgccacaggaacatcctcctcatcttcattgaatgaataggcaacatccttaacagccttggagcaaggtgctgtcaagatctcatttcctttttcagttactaagactgtatcagctaacaacagtgaaaactgctttgtcttttcactggtggtttctgcctggacattatgcaaaccaagagaaatattaaaaatcattccctgttttatccgacgatcattcttggcattcagatttaagccagattctcggaattcaaggcctattccagttccagctgactttgttaaattgggaagtagttcaggagcatctctctcaatcaccttcactgcagcttgataaaccgcactcatctgattgcctggtttcactgcttctatagcagcttcatgagctttcagaagggtctcatatgctttactctgcgtagggatagcatctatcagatatgtccgggcaacatttgaacaatagcttgaatatttggacccaagtgcacagatgataacacttgctgaatcataatagagatagtcatcattgctagaggcgccaggcttgagatcgtacttccccccactctgaaagactggcggatagcaaatatcaacattatcagacttcaacttcacctttactttgagagggtcaagaatgaccttttccgtgtcatccatcaatgaggagtgtgagactttcttctcctcatcaataactttctccaaccttggaaccacaaaatttctgagtacagaagtagttaagtaagcagccttcttcacacaagtgatctctgtggagtccttcacagagaaaagctcagagaagccatttgtcacatctgtaagttgtatagatgacccagataacttgtctgcccatgtttcaagaagcttaccctcaggtgcctcttttgcaatgtgcccaacaattggattgcctgatttagactgattgcgaacagcctgcactatgtcatccatcaagtcagcaccatccccattcttagatttcacatgcaagacaatgtcagcaccaacagcctcatttgcagccttcttgagggtcccaatcagatttgctttcttctgactgcacaagacatgtatttgcttgtgcatgaagacaattattgtttctggaaattcatatccaagcaaccagatatccagagctgaggatttcaaataacgaagatcctcagaaggaggcggggtagcaatggcaatagcatcagaagaaccccaaagatcagacttgtgttccttccaatggtcatagaataccttcagccgcttactgaagttatctagattgattgtatatgttccagatcccccttttgcgttaccattatcagccatctttttcaagaagctagcattaacctaggcaaccgacggcgcgaggatgcgcgctcccggcggtagggggtaggggagcgtccacgggcggaggggcggggcgcgctcgtcggcggggaggggagggctcgccggcggagtcgggctccggggcaaggcagggcggggggacgccgg

SEQ ID NO: 33064 - DNA, 415 bp, Setaria italica
  misc_feature (415)..(415): n is a, c, g, or t
  Peptide Sequence Number=SeqID_99038
ggcggcggtagccggcgaccgggatcacgtcggtgagcaggccccagaggggcttgacgacccacggcgcgtccgtgacgccctggtagaactgggccgccgacggctgcacgcgctgcacgtccttccagtagtaccccgcggcgacgccgccgacggcgttgccgacgccctggcaggcgccgtagaccgcgacgaccgcgagcacgaagctccagtgcagctcgcgggacagccgccgcagccatcggcaggggaacgcgacgcagcttttgccaatggtgacgccgcagccgccgccggcgggttcttggaggcggagggccctgtcttcctgggactccatccgggcagcttgcgatgaccaattacttccttcgcggacgggatctagcgaggagccgccggaatccgn

SEQ ID NO: 33065 - DNA, 263 bp, Setaria italica
  Peptide Sequence Number=SeqID_99039
gttgggcttgaggcacccgctccccaccgccaccaggtacagcgccgcgaagaagatccccgccttcaccccgccggcctcctcgcacgccgccgccgccgcgatcatgtcgcacggcggcggccgcagctgcggcaggtgcgcctgcaccgccagcaggatgaaccccgagagttcgacgaatccaaagatgagcatggtccagaagctgccgaggtaggagtcggagaggaagccgccgaggagggagaggaggaagacgg

SEQ ID NO: 33066 - DNA, 877 bp, Setaria italica
  Peptide Sequence Number=SeqID_99040
cgattcagcacgctcattcagtcaaacgaacgcaacatacatcaggtcatttggtactctcatccatgtcgccacaatataagaacactctatcagaggtactttaccggcttcagaaagggtattgaggtgcataagcggcatggatccacgggactttgtgtaacaggtatgcaaatgtaactgaaacgctgcgtctaaatgtttatgctccagtcgtagggttggtacgcgactttcagttgagtgctcgcgagaagttccaagagctgctctgactgtgcaggctcaaggtagtttgcggcgtgcttcagtacttccgtctcattcttgccaaaatctgagctataccattttaaaatcttgcttgcagatgcaactttggcatcagggtcaacaatcagtcctccattccttaggaaatcacgtgcagcttccattaattctttgtcaatatctcctggcgagtaacacctaagggcaggtccagatttggtgccacataccaaagcaaagtgaacaagaggttcatggtatggaagggccaccttggatcttcggtctttctgtccgaaaggtttggcaatgttgtatggtggcctttggttgccacgtagaatgccgttttggatagctgaaagtgaataagcacatccaccaatgacacacttgaaatctccaaaaaactttttcctgtccagtggtccagcaggatggccacatgtcactaatgcatggatagatcatattgtagagatttatgaagaaagctagcttttcttcacgtgataagtcatcaatttccaccctttggagctcctcgattgttctaataataaccttttaaaattacctacaacaagaccctaggaataga

SEQ ID NO: 33067 - DNA, 313 bp, Setaria italica
  Peptide Sequence Number=SeqID_99041
aggaaaagacaggaaagcttgggatggttgaattataggatgtaggtaaagaacagccgcttcgcatggattcttccgaccaaggtctagggcatcctcagcctatggccgtataggctcgggagcctgtgcgccttcctccaaaagagctgaagcagaagggtgcagcaccgtaggctgtaactgtttgtctgcaccccctacaggtcaaatcaaagaatcaccacgcccaagggttgcgtcctgtcgacgatgacggcaacgacaacatcagcacaggaagcagggtggagctggttagcactggaggggg

SEQ ID NO: 33068 - DNA, 624 bp, Setaria italica
  Peptide Sequence Number=SeqID_99042
tgtattaccttctttgttctttgtctagttaagtagttttttacctagtctattcctaggtagtaagtacttccctttaagttgttgatcatgggctctgcaattggcattgtcatgaatggtacaatcttgggtcagatactactgtaccagaagcccgctccgaagaaacagaagaaagaagattaagcaacgcgcaagagagacagcagaaagttcttcatgggttgtttcttaggattctggtttcagcactcttcgtctgaccaaaaggcaccggtatacgaacttgttggcaacttggttttatgaggaaaaacaacaggcaggatacagtcttgctatgtaaggacatttttgtgctgttgtttttagcacatcgcagtgtaccatgactgatatagttgatgcaactatcgttagtttgtgactgtaaactgctgttgttccatagattcggttggcatgtatgggttttgctttctcttatgccattctgtatttgaatttcattcaacgttttcgtccgctgcttagctgcaggaagattgataaacgggagcagactgttcttataaagatgctagccgagagaagcaacctctgaatcatacaaaaaaaaaa

SEQ ID NO: 33069 - DNA, 1184 bp, Setaria italica
  misc_feature (1111)..(1184): n is a, c, g, or t
  Peptide Sequence Number=SeqID_99043
ctgttcgtcgtcttctccatcaccgtcggggtcgacgccgcggcaaacacctgcgcgaccacaggagacggccatggtggcgatggagctggagattctgggcatgaacttcgggtgcgtcctagcggcgctgagcgacgccaagatccccgacaagggatgcctcctcccgctcatctccaagctgctcggctacgccatcgtcgccgcatccaccaccgtcaagctcccccagatactaaaaattttgaagcatggaagtgttagaggacttagtgtagcatcctttgaacttgaggtcgttggctacacaattgctttggcatattgtattcataaaggacttcctttttcagcttatggggagctagcttttctgttaatccaagcaattatcttggtggcaatcatttactattactccccgccaatgggagccaaaacatggatgaaagctttattatattgtggactggctccaactgttttggctggaaaaattgatcctgctctttttgaagtcctttatgcttcacagcatgccatcttcttttttgccagagttccacagatatggaagaatttttcgaataagggcactggcgagctcagcttccttacctgttttatgaactttgctggttctattgtaagagtttttaccagcatccaggagaagactcccttaagtgtgatcatgggctctgcaattggcattgtcatgaatggtacaatcttgggtcagatactactgtaccagaagcccgctccgaagaaacagaagaaagaagattaagcaacgcgcaagagagacagcagaaagttcttcatggttgtttcttaggattctgtttcagcactcttcgtctgaccaaaaggcaccggtatacgaacttgttggcaacttggttttatgaggaaaaacaacaggcaggatacagtcttgctatgtaaggacatttttgtgctgttgtttttagcacatcgcagtgtaccatgactgatatagttgatgcaactatcgttagtttgtgactgtaaactgctgttgttccatagattcggttggcatgtatgggttttgcttttacaaaaactttaaaaaaaaaannnnnnnnnnnnnnnnnnnnnnnnnnnnnnnnnnnnnnnnnnnnnnnnnnnnnnnnnnnnnnnnnnnnnnnnnn

SEQ ID NO: 33070 - DNA, 659 bp, Setaria italica
  Peptide Sequence Number=SeqID_99044
ggatcagtctagcatttactcttcatttatttaaaatatatgttgtttcaagatttttgcccgctaaaccttttaacttttaactggaatacgcaaaggccaaacggaaacctcttattcttcaggcccacacggtacgaatagcgacgaattccccgcgtcggcccatcaacacgcgcatctcattgagatacgcggcccagctcgctgaggaatcgtgctggttcgcgtggcgtgtgggcttcttcgctgttcgtcgtcttctccatcaccgtcggggtcgacgccgcggcaaacacctgcgcgaccacaggagacggccatggtggcgatggagctggagattctgggcatgaacttcgggtgcgtcctagcggcgctgagcgacgccaagatccccgacaagggatgcctcctcccgctcatctccaagctgctcggctacgccatcgtcgccgcatccaccaccgtcaagctcccccaggttcccccgccttcttcctgccactagataaaggttcttgtgtgcgtatagatatgcatgcctctatgtgtctcgatctgcggcgagctcgcctggtggatgtgagaggggatctcaaatctcatgttctttgcgtgagcatcgcgtgcggaattttgcataaagggtcctttgg

SEQ ID NO: 33071 - DNA, 249 bp, Setaria italica
  Peptide Sequence Number=SeqID_99045
cctctacctagctttgttcatcttgttcttccaagtcttcctcctagctaggtcttcgctctcttggatatgagtgggagcaactttggggacagcatggggtggagcagtagcgggagatcgtctggctccagaaggggcaagagaggcggcggcagcggcggcgccgacaagcccaagcagccgcagcgcggcctcggcgtggcgcagctggagaagattaggttacagagcgaaatggccgaactt

SEQ ID NO: 33072 - DNA, 401 bp, Setaria italica
  Peptide Sequence Number=SeqID_99046
gtcccactgcggctggaactcgacactggagagcgtggcggccggcgtgccgatggtcgcgtggccgctgtacgcggagcagagggtgaacgccgtcgtcctgtcgcagaacgtgggcgtggcgctgcggccgcgcgcgacgcgggcggacggtctgatcacacggaaggagatcacggcggccgtgcgggaactgatggatggggaggagaaggggcgtgccgtgcgccgccgggccgaggatttgcaggaggcggcggcgcgggcgggagcgcccggggggtcgtcctggcagatgctggaggaagtcgccggcaagtggaaggcggcagcgctgggcaggcagaagcaatagaagacatgcgagcgaagagacaggtggtgatcgtcgatgtgcatgc

SEQ ID NO: 33073 - DNA, 2630 bp, Setaria italica
  Peptide Sequence Number=SeqID_99047
ggcaccgccgagcacgacatcaagaaccgcatcatggattacctcaacatccccgagtccgagtactgcctcgtcttcacggtcagccgtggctcggcgttccggctgctcgcagagtgctaccccttcggcaccaacaagcggctgctcaccatgttcgaccacgagtcccaatccgtgaattggatgatgcaggccgcgcgcgacaagggagccaaggcatactccgcctggtttaagtggcccacgctcaagatctgcaccaccgagctccggaagctgatctccaccaagaagcggcggcgcaaggactccgccactggcctgttcgtgttccccgtgcagtcgagggtgacgggggcaaagtactcttatcagtggatggcattggctcagcagaatcactggcatgtcctgctcgatgctggggctctggggcctaaggacatggactcgctggggctgtcgctgttccggccagacttcatcatcacgtcattttatagggtgtttggggctgacccaacgggttttggctgcttgctgatcaagaagtcggtaatggcgtgcttgcagagtccgagcggcgggacgggggcaggaatggtgcggattgtgccggtctttccacagtatcttagtgactcagttgatggtcttgatggtgtcctggatgggctggaggatgatactatcattccaattgaggaggggtcagtgtcaaacaatcaccatgcatcccagttacctgcattctcgggcgcatattcatcagctcaggtgagggaggtgattgagagtgaaatggaccaggacagttcagatagggatggtgccagcacaatatatgaagagagtgagagtgtttctgttggggaggtgatgaagagccctgtgttcagtgaggatgagtcatccgagaactccttctgggttgatttgggccagagtccacttggttcagaccactcagagcaatcaggcaaggggaaattgggatctccattgccagcgtcctggttttctggtaggaggaatgcgaagaaggcatcgccaaaggtgccatcaaaactggcaaagagtcctattcatgacaaccatgttatgtcattcgatgcagctgtgaggtcagtatcacaagattcagggcctgtgaaggtggttccagatgaagatcattcacataatgacataaagaatgccattcctgttagtgagattgaagaagataaggatgccaaaggaaacaagaggttcgtaaagttttcttgtgccaatggccctgctgaaggcagtgcaacctctgtatttgggagttacaccacccatgagaatggctccacttcagagatttgctcagaaagtcaggcagaaaccaaagagagtgcaatcagaagggaaaatgaaggtgactttcgtctactgggaaggagggaagcacacaatggcagattcaatggtggaagattctttggagtagaagaatcggaacgagtttcaagtatggggcgcaaggtatcattcactatggatgatagtaggctctgtcgtaattctgatgctggggaaacatctgggtatgcaatggcagatgatgatgacgaagcatacagtgactatgatgaacctcaggatggcaggaaagaacctgaaattatctgcaaacatcttgatcatgtgaacatgcttggacttagtaagaccacacttcggttgcgatacctgatcaattggttggtgacctcactattgcagctccggctacctgattcaggggatggcgagggggtatcccttgtctatatatatggtccaaagatcaaatatgatcgaggagcagcagttgcattcaacataaaggactgcaacactggaacctcactgatcaatcccgaaattgtacagaaactggcagaaaaagaaggcctctctttgggcgttgggtttctaagtcatatacgactcacagacaaccagaaacatggtgcggctgatgtgggtcttagctcttccacaccagcagcaaacggtcgccgtgaaaagaaaactagcaaaaatgctattattggtactgaagtggtcactgcttctcttgggttccttacaaattttgaggatgtctacaggttgtgggcatttgttgcaaaatttctggattcgtcatttcttgagcaagagaggctatcatctattcctgaggatgcagaaaggtagtattagaggattcaagtttatggctatcgcagctacttcataaatatagagggaaggaggcgacagtgtaattgagaggaggatagaagaagagatgtcaaggtgcttctgtgtattgcttttgcatccgaatatctctgcttggcatcaaggggcaatacttggcagtttggctggtatatttcttcattcttcttttccccttttctaggcatgcgactttttcgtctgtagattttgttggagatctatatgtaccacctaattattttgaggagcatcctttccatgtacttgtttgtaaattggctccattggccatgaagtacactcagctcgcttgtatgattcttgcaacatgaatagcatgatgataggtgattctgcaattcacttaacccttttactaaaaaaaa

SEQ ID NO: 33074 - DNA, 993 bp, Setaria italica
  Peptide Sequence Number=SeqID_99048
cacagaggcttgttgatgatgataacccatggatgaaattgataggagatgtatatgcttgaattgcaatttttcaatgagtagtacatccaccttgcaaagggaaagagtgattgagactattatgtgaattgatcaggcagccacaaccgtattacagaaacaaatctatattgcaattatgaagtatcacagcctctctgtttatacctatcacaaaatggccagattacaaaaggcaatgtaatgtgtacagcatatcctagctgttttccttacaagaaaaggtctggaactgcagttttatctctgtaggtatcttggaagatttcatctaagtctctggaatcatgtgtcactaattactggtccaatggttgttagtacatgttatgttagttttatctgtttagcctcacttctgtcacgtgtattgtcgaccatttctcaactttaacactgagaataataaatttccacagctcttcatcagaattaggcgcttaccggacacgtttcgtcttcctgggcatgaagaactccattcctaagaggcattccaacagggggaaaaagaagacttagaactctgatccaacagcatgagcattcctaaggtactcgatgctcatgctgcagcatttgcccagttggtggtcggagggatatctttactttacgtacgctgaaagaagacttagaactctgatccttttggctgcccctgacggcctttgaagaattggatgctatagctgacccaaagttaagatcaagattgcagctctggcaatgtgccaatgtcctgaagtcctgagacttctgactgcagatttagatgactaccttgtaccagtatgtagtttcattttgctattgagttaaggttttggaaagtcctgtaagacagggaaaagcatattttcagcaatggcatgtgtttatgtgatcatattatttaaatataatgaggcgaaacaatagccagcaaaa

SEQ ID NO: 33075 - DNA, 496 bp, Setaria italica
  Peptide Sequence Number=SeqID_99049
catagtggtaaacatgacttattaaggagtttattcatgagttgaaaagttagcttggaacaaaggtaacttgcattcattcctacttctcattggacaggggtggatttgcctccacattggatatatgacattgcactttgtgattaaaatgtttgcaatgagtaggatggagatcttatacttacaattctataattttcttttggagatctatacctgtgttagaatggacaaattgcctcgtacagatatacctgatccatttggtgacaagtctaaagctgccaaagcttttcccagtctagttagcttgttgtacactattttagtggttcactgcattcttataaggtgatgataaaatccatgtccttctatgttccctactgtcttatttatattatcgagtctttgatgggttcagtgatatcagcaatgcaatgatgaagttgtccaaaactatttggcatttcccatgctcttaagtagcatc

SEQ ID NO: 33076 - DNA, 336 bp, Setaria italica
  Peptide Sequence Number=SeqID_99050
atatacagtcccatccgaagagggaagcaagtacagatggatgtatgtcggtccaccaaacgggacgcatccgaaggcgcgtttgagcgtgtagttgtcacccggagcaagaaccctaccttgcattttcaggcccgcaggtcactttggggcgacctctggccattttaagcagtagaatcgccaggcttggttagagccgatgggagctctgaaactgttcagcattggattcactgggtgaaaaccttatgcggttttagtgactgttgtgccggaactaataccaatgtgctctataacagatatatattgccggaaaaatctcttttgaaa

SEQ ID NO: 33077 - DNA, 177 bp, Setaria italica
  Peptide Sequence Number=SeqID_99051
cgccaatggtgtattggcaagcagttcttccagctgggcctgccgtgaagtcgcctaagaccatggcgccaatggtgtattggcaagcagttcttcctgagactccgatgccccaagccatacacgacttgttgacccaatctacaggacatgtctctcaggataataaaggtttgg

SEQ ID NO: 33078 - DNA, 237 bp, Setaria italica
  Peptide Sequence Number=SeqID_99052
cctatcccctgtgtgccttgcctatccccttttgcgtgtctcagacgacggcgcgacgggggaggtataacgtgacggctgtgcggaagctctccgactctccgatggtcgcggcgtgccatgacctgacgtacccctacgcggtgtactactgccacacgacgaacccagcggcggcgtacctggtgacgctggcggccgaggatggcggggcgccggcgatggaggccctagccg

SEQ ID NO: 33079 - DNA, 493 bp, Setaria italica
  Peptide Sequence Number=SeqID_99053
gtcccaagatgatggagactcaatgaaaataatgatgtcatatggatctcaatgtaaggacaactcaaggaaggccaccacatcatatagggtactacaaaggtagaatagaaggaaatactaagaaaggtcacaacttcatatgggtccaaaggtgaggaggactcaaggaagctcaccacatcatatgggtctcaaggtgatgagttatcaagaaagaccaccacatcatatgggtcccaaggtgatgagttatcaaggaaggccactacttcatataggtcccaaggggacaggcatgaccatattcacagccacaacaacggcaacaagctagcagacgtgttcttcttccatgacgtgctacggccagggtccattatcacaccgaccatcccaccgaccacatccttgccacccctgctaccgcgccacgaggctgaaaccattccattctccaccaagcgcttcggcgacattcctttaccattgt

SEQ ID NO: 33080 - DNA, 461 bp, Setaria italica
  Peptide Sequence Number=SeqID_99054
gatgatggagactcaatgaaaataaatgatgtcatatggatctcaatgtaaggacaactcaaggaaggccaccacatcatatgggtctcaaggtgatgaggaatctagaaaggtcacaacttcatatgggtccaaaggtgaggaggactcaaggaagctcaccacatcatatgggtctcaaggtgatgagttatcaagaaagaccaccacatcatatgggtcccaaggtgatgagttatcaagaaagaccaccacatcatatgggtcccaaggtgagaaggactcaaggaaggccactacttcatataggtcccaaggggacaggcatgaccatattcacagccacaacaacggcaacaagctagcagacgtgttcttcttccatgacgtgctacggccagggtccattatcacaccgaccactcccaccgaccacacttccttcgccccacccctgccta

SEQ ID NO: 33081 - DNA, 907 bp, Setaria italica
  Peptide Sequence Number=SeqID_99055
aagtggtgtcatggtcaatatggatgccattgtgtcgctcgccatactcctcctggttactggagcaggagcaagcaaacatgcagatctgccagctgggcctgccgtgaagtcgcctaagaccatggcgccaatggtgtattggcaagcagttcttcctgagactccgatgccccaagccatacacgacttgttgacccaatctacaggacatgtctctcaggataataaaggtttggcacaaggggagaactcaagaaaagtcaccgcatcatatgggtcccaaggtgaggaggacacaaggaaggtcactacttcacataagtcccaaggtgaggactcaaggaaggtcaccgcctcatatgggtcccaagatgatggagactcaatgaaaataatgatgtcatatggatctcaatgtaaggacaactcaaggaaggccaccacatcatatgggtctcaaggtgatgaggaatctagaaaggtcacaacttcatatgggtccaaaggtgaggaggactcaaggaagctcaccacatcatatgggtctcaaggtgatgagttatcaagaaagaccaccacatcatatgggtcccaaggtgatgagttatcaagaaaggctaccacatcatatgggtcccaaggtgatgagttatcaagaaagaccaccacatcatatgggtcccaaggtgagaaggactcaaggaaggccactacttcatataggtcccaaggggacaggcatgaccatattcacagccacaacaacggcaacaagctagcagacgtgttcttcttccatgacgtgctacggccagggtccattatcacaccgaccatcccaccgaccacatccttgccacccctgctaccgcgccacgaggctgaaaccattccattctccacc

SEQ ID NO: 33082 - DNA, 1243 bp, Setaria italica
  Peptide Sequence Number=SeqID_99056
gagcaagcaaacaatgcagatctgccagctgggcctgccgtgaagtcgcctaagaccatggcgccaatggtgtattggcaagcagttcttcctgagactccgatgccccaagccatacacgacttgttgacccaatctacaggacatgtctctcaggataataaaggtttggcacaaggggagaactcaagaaaagtcaccgcatcatatgggtcccaaggtgagaaggactcaaggaaggccactacttcatataggtcccaagggggacaggcatgaccatattcacagccacaacaacggcaacaagctagcagacgtgttcttcttccatgacgtgctacggccagggtccattatcacaccgaccatcccaccgaccacatccttgccacccctgctaccgcgccacgaggctgaaaccattccattctccaccaagcgcttcggcgacatccttaccatgttcgcgccagccgtcccatgccatggcagatgagatacggtggactctggacacttgcgagcacccgcagacactcgcaggagagaaggccagctgcgccacgtccttcgagtccctcgcaaagcctccctgctgccctccttgggatacgcaatgtccatgctttctcgggtgacatgcccatccgaccctgcggggcacgacggcgcgacgggggaggtataacgtgacggctgtgcggaagctctccgactctccgatggtcgcggcgtgccatgacctgacgtacccctacgcggtgtactactgccacacgacgaacccagcggcggcgtacctggtgacgctggcggccgaggatgggcggggcgccggcgatggaggccctagccgtgtgccacctggacacgtcgcagtggacccccagacacccgttcctagtggcgcacaatctcaagccaggtgatgcggtggtgtgccatttcctctctaagctcagcatagtctgggtcccggccggcgagcaaggaggcgcacgtgaagcccggaagaacgcaaagtacctgagggcatttgcatgagcaagctctgtggcacgtttgtaacctgtcgaacaaacaacgtggctctagtactaaataaaagctgcgtgaacgtattgtgatcgtgctttgtttaagcaaagtgttgtggttatggtttggctaagcaacgaactcatcttttatttgtaataattacttaaggaactggcagttaagatttgagacgtcaaaa

SEQ ID NO: 33083 - DNA, 490 bp, Setaria italica
  Peptide Sequence Number=SeqID_99057
tggaccttgttgctggcagcggcgaatccggaacgactacgtccgcgccgtcgccatggccatgtcggcggcgccgcagtgtgtgatctcactgtcgccggcgaggctgccgtccggcacgaggatggggtgtagctccaagacggcctcaagcgagggctgccccgacctgcagctcgtgtaggacgcgtaggctgagaagcccagcagccagaacttgtcgtggccgcggcctccgccgccgcgcaccaggttgctcagttccatgaccgcgtgctcgacggggcagtagtaatagcgggcatgcccacttctcttccacgaggcggcggcccaggcctcggctgcgcaggcgaggtcctcgagcacgagcaccacgcctttcccggcggcgcgagcctcgcgaatgatcgcgcgcaggtcgccggccctggcgtccacctcctccctcggcaagcgctggaggacgcggccgagaagggcacgagct

SEQ ID NO: 33084 - DNA, 221 bp, Setaria italica
  Peptide Sequence Number=SeqID_99058
atgccactgagtccctgtccaatagcatcctcactgtggagccagctgcgtccatagctgcagacgcatcagtgtgcaagaacagcatcgagaagaacactactgaacttgtggcaatgcaagatgagaaggtagtaaaggtgaacaagaaatctgtggatttgtacgcatttagcctacggcagctcaaaaccagctcaagggaggggctgaacgccaag

SEQ ID NO: 33085 - DNA, 252 bp, Setaria italica
  Peptide Sequence Number=SeqID_99059
aaaatatgctacactgattgttagtcaaactttgattggacctggatgtgtagattagtcccagttgttatgttgtagcatctgttgaataaactagtaggttaggtgagctgttagatacttagatctgtgcttcttcagatctcttactatcttccaaacatatgaacttaacacttagtactatattcaattttgtatgtctttgttgttgaaatttctgaacgctccccaacttgtgactgttgatat

SEQ ID NO: 33086 - DNA, 1071 bp, Setaria italica
  Peptide Sequence Number=SeqID_99060
acgagctggagctggcgtcgccggcgggctcgccggcgccgccgccccggaagatgcactcccctggacttcgagcacatcggctccctcgccgcggtggccgagtcgctctcgcgcgagagcaagtgggggagggcgctcaccagcgtgcgcgtcgtcatcttccaggccaagatcaacgtgctcctccccttcggcccgctcgccatcatgctccactacctcagcgggaaacaccaaggatgggttttccttttcagcttaattggtataacaccattggccgagagattgggatatgcaactgagcaacttgcttgctacactggcccaacagttggggggctcctgaatgctacatttggaaatgcaacggaaatgattatatcaatatatgcgctgaaaaatggcatgattcgtgtcgtccagcagtcactgctaggctcaatattgtcaaatatgctccttgttcttggctgtgctttctttgctggtggtcttgtccattctgacagggaccaggtcttcaataaggcatcagccgttgtaaactctggactactattgatggctgtcttaggcctaatgttcccagcagtgcttcacttcacacattcagaagctcagtacggaaaatctgaagtagcactttcaaggtttagtagctgcatcatgcttgtggcctatgcaagctatctattttttcaactaaagagccaccgcagtatgtacagcccaattggtgatgaagaagaagccattgaggatgaggaggatgaaaaggagataacacaatgggaggccatctgctggctttttatattgactatttggatttcagtactctcagggtacctggtagatgccattcagggcgcgtctgattcattaaacttgccagtagcctttattagtgttattctgcttcctatagtggggaacgctgctgaacatgctagtgccattatgtttgccatgaaaaacaaattggacattacgttaggagttgcaatagggtcatcaacacagatctccatgtttgtgattccattctgtgtagtattggctgga

SEQ ID NO: 33087 - DNA, 507 bp, Setaria italica
  misc_feature (454)..(507): n is a, c, g, or t
  Peptide Sequence Number=SeqID_99061
ggctcttcctgtcaatctgctggccatgtggagtgcaagtggtgtgcaggcacaggtttctttatccttggcaacaacatgttgtgtgaagtaccctcaagaaatacaacatgcgtgatatgctctggaaagggtattgcaagttgtgctgattgccaagggactgggtttcgtgccaagtggcttgaagagcctcctgttgacaaatgagctaaggaaatcaatcataatgtaaattttaccatttctcagtaaaatagctaattgtatgaacctgtgtccatattctccatatgcaactatggcactactattttcatgtaactgcatcagtcccatgcctatggtgacatgttgttaattactctacataccatttctataagaatatgagtagcgagaggtatttctcactctatctcgcagattttacctcaaaaaaaaaaaaaaaaannnnnnnnnnnnnnnnnnnnnnnnnnnnnnnnnnnnnnnnnnnnnnnnnnnnnn

SEQ ID NO: 33088 - DNA, 225 bp, Setaria italica
  Peptide Sequence Number=SeqID_99062
gttcacaacaggatcgtcgaacaaatatcgagaaagacaggatgcaaggaaaaataaagcagaggacatggttaaagaaaacctctctgctttctacagcaggggagtccctctggtgaacatctggatggccctctctttctttgcgaagatgaaataccacgaagtcagttttacatcgccgtggaccatcatgtatctggcgtgcctcgtcgtcttcgtttt

SEQ ID NO: 33089 - DNA, 262 bp, Setaria italica
  Peptide Sequence Number=SeqID_99063
cgttgagcgcggcgtaggaggaggtggtcaggatgcaacccccgtgagagcacttgaagcagctcttgtggtaggactcgccctccaaagttaactgaacaacaaggtagttttattagcattacggtgtcatttgtcaaagaagcgtagaattcattagtaggatcagaagagctattgatgcttttaagtttggggaagtagaagaaaaatgttcagaaattctgtaccttctccagcgggtacactgttttctggcatt

SEQ ID NO: 33090 - DNA, 263 bp, Setaria italica
  Peptide Sequence Number=SeqID_99064
gtggttgtagctgcccttctccttgaacagctgcgagaaatggatcttgcagtagaggatgccgttgagcgcggcgtaggaggaggtggtcaggatgcagcccccgtgcgagcacttgaagcagctcttgtggtacgactcgccttccaacgtcatcttttctaatggatacacagttttttggcacgctgcgcatttatcttgagttccagagaatgcagacgatagcttgctcggtgcttttgcctggtcgctcttgttcg

SEQ ID NO: 33091 - DNA, 466 bp, Setaria italica
  Peptide Sequence Number=SeqID_99065
gccgccgccacctccaagatttggcggtggccgccgccgccgccgccgcggggattgacggcgacggagttgccgccgccgcctcgtgcttgcttctcctgcccttctttttctcctccttccggacggcctcctgcaccaacgaagacgccgccgccacctccagcttcttcctcttgcgccccttgcccgccgccaccgccgtcgaggttagggtttcggcagtgactggggccggagactcggtcttggaatccggagtcgccggaggtcgaggagactccgaggaagaagccgcgacctccacctcctccctgtgcttcttcctcctcttcttctgccgcgtcgcctcccacccctctaccatggccgccggcgccgccgccgacatcgcgcactgcagcggcgggagcaggacgcgagggattcggacggggtatccacctggagaccggcggcggaccgg

SEQ ID NO: 33092 - DNA, 282 bp, Setaria italica
  misc_feature (268)..(268): n is a, c, g, or t
  misc_feature (276)..(276): n is a, c, g, or t
  Peptide Sequence Number=SeqID_99066
ggcgccacggcgaagaggagcagcgcgatccatgagcgctggaggtacacgcccaacatatggtacttcttggcaccaaatgcttgcccacacaacgtctccagagcgctcgccatgccaagcaggaatccgaagttgaagccggcgacgacggtggcggcgatagagaaggcggcgagctcgaggtcgccgaggtggccgatgaaggactgcgagacgacgttgatcccgtacagcgcgatccgctggaagatggcccggccccagntgcgccanagcttc

SEQ ID NO: 33093 - DNA, 699 bp, Setaria italica
  Peptide Sequence Number=SeqID_99067
atgatagtactaagatacatgtatcaaaatgttagttcagtaatttttttcaagaataacaaggtattgattcagaaagacttaagcttgtatgtttattgagccatgtacattctaatctgggccttactgtataaatttgtgaacaggaactgttggaaaaggctggctttgaatcaacaagagcatcataacatttaaaagttttgcaatcttcatgtacatctactggatttactccctccgtcctataatacaaggcatccaaacgttcaaaatttgtcctcaaatacaaagcattgtaggcatatttggatgattgttcatttaattcttcctgaaattgacaagataagggtggctgattggtggattattacgacaaataagttctttgttatatgcaattgctattaaaagagccagacaacaggggtacatgcgtcttttgctactcctgctaatatgttctaaaatctcggatgccttgtatttcaggacggaagaagtatgttgcagttcttcactaaggaacaggaaaataccaatacagacaagaacagttgtcgtaatctgtggaatgacatgatatcttatttacgaaccatctctaaacaaaactgaggggatggggtgagtttccttcagcgcagcttacgaaaagcttacaaatttggaatacctaagtacttgcaccaa

SEQ ID NO: 33094 - DNA, 369 bp, Setaria italica
  Peptide Sequence Number=SeqID_99068
cgtcggccgcttcctcctcccccgaccccgactgcagccggcggctcggctggaacctcgccagcgtgacggcgacgcccgggtgctccgccatgcgcgtcgcgtaggccagcgcctcgcggtcgtcaggcccgccgaagaagagcgccacgacggagaaggagacgttcttggccgacacctgcgcgtgcccgccgaggccgcggtcgacgaggatggcgacggagcagggcgcctcgcggagcacgcgcttgttgatggcgtggtacgcggagccgagagactggaaggagccgtcgtggtggagcgccttgtggtacggcatgatgacgatggccgcgcgcttgtcggcggcgctgtcgatgaccg

SEQ ID NO: 33095 - DNA, 283 bp, Setaria italica
  Peptide Sequence Number=SeqID_99069
caggccgccgctcgtctccggtcattcatcgacgaccgcgccgccgcttcttgctctcctcgccgccgactcgtaaggccaccatggccgggcgccaccgccgccgccgccgcggcggacatctccggcaagaacggtccccgctagcgcctcctccaggagatccctcgccgatggaacccacgactcgcagggaagttgccattccagataggccctccaagaaaacctgccatgcatcaagctctacttcctcttccatgtctcggccctgatgtctggg

SEQ ID NO: 33096 - DNA, 498 bp, Setaria italica
  Peptide Sequence Number=SeqID_99070
cgacacacacacacacacacacacacacacacacacacacacacacacacagagagagagagagagcatcattcatagatggcaatgtgttaatcagctgctcataagactaagtcatccatgcagctaatctgccttgacacttgacggtccttaccttgaccattgtacaaaattctgatcttgtccaatttcaactcgttttactaacccaaattattattagtctaattcaccaccaaatgattttttttttgtttctcctcacacacattatgtttttaggttcaagctttgtgggtgacaaccaccaacaaacctgatgttacaaaagtatatcttctctttttgtgattattcataggttggaagccactgatgctaatttaaccatcaatatatgaaaatacattttgccccaaaaaaggtgaaaatacacgaaaaagaacatgaaaaattccataacttgtttttttttcgatgtacatctgattaaag

SEQ ID NO: 33097 - DNA, 1037 bp, Setaria italica
  Peptide Sequence Number=SeqID_99071
tttgtaggttcttgaggtcccttgccgcctgctggagctgctgcgtctgcagcgagtgcaatggctgctggtgctgagggtgcagcgtctgttgctgaggctgggaatggagctggagctgctggagctggtgtgtcgccatcatggattgcatcgcttggttgttgtggaacatctgctggttccctccaaactggcgtggcatggtgccgaagttcatcatcatccctccaccaccattgcccacctgtcctgtcgctaccttcagccgctggacctccgctttcaaagtgtcattcaaagcatcttgtaagtggacttgctgctccatggtctgcaggcgtatcttcaactcgctattctcagttgttagcccagtggtgtctctctgcagcaatgccagctgagctgacaatgttgtggcttctgtttgcagggtttgcaccttgcgctcgagttcagctatatagcgcatcttcctttccttcgatcttgcagcagattgtctattagcccaaatcctttttgccctctttgggtcaacaagagcaagctcagccagcttcgccgcagacactgccttcttggcctctgcggacgacatcccctccatccccggcgcccccaccagctgctccgccttgatcgacatggactcgtccatggactggctgtgctgatgccttggcctcggcgcggggctcagctcagccccctcacccccgccacctgcggcagatgacgactcagcctcggcctccgacgacgccccgcacgacgagttcagcttgtccacgtcaaggaacatggagaggagctcctcgtcgttctcgtccgacagagacggcccgtcgccgcctcggggggcgctgaggtcgaggtcgtcgggcaggctcaggatctcggagtgcgcgcgccggtggccggcgttccgggtagggaagtccgacatgcggctgatgtcgtactccggcggcggggtcgacgacgagggcggtcgtcttccgcggcgcacggcctgaggcggcaagccgtcg

SEQ ID NO: 33098 - DNA, 313 bp, Setaria italica
  Peptide Sequence Number=SeqID_99072
ctacggcgtcgatggcgacgcagctgcagagcaactggctcatgatgctcttcttgagcatatgaactgggagtcccagatcgaggagtggcagaggccgatcctgcaagacgaaacgctgcctgaatggtatccaattggtctgttcaacgagctctactacctcaacgctggaggcaccatctggacagatggacatcctccgaagaaggccggcttcggttcatccgggccgttctccctcgacacgccccgcgttgcagcggcgccgccgccaacgtcaccggcggcggcggcagcgcggtggacggca

SEQ ID NO: 33099 - DNA, 171 bp, Setaria italica
  Peptide Sequence Number=SeqID_99073
gggaatagccccggataaattattgtgggaaaggtcaagcaccaagaggccattcagtttttctaatgatgatggaatttctccttgaagaccattcccagatatattgagatactctaagatttgacacccaccaatggatgaaggaatctctcctgaaatcctgttatc

SEQ ID NO: 33100 - DNA, 842 bp, Setaria italica
  misc_feature (261)..(261): n is a, c, g, or t
  Peptide Sequence Number=SeqID_99074
taggcgggtgcatcgctcaggtgagaatttcagtaaactgccattgaacatttctcattattttaatcaataaaagctgattttgcacatagtgatgaacatggaagtgaaattatttagattgcacaaggttccagcagtttacctgtttggcaatctgtacacggccctacatttatttttgtcggaatttactcctttgacaatttcatggttggggaatctgctttaagaacatggacccagtccttgaaacttcgngaaaacctaatttgtggatgttccatcatcactggcttgtcaaagttgattgaaattactgtgcaagaataaatcaaattatagagttgtaagaagatgggtttatttaattcaaagttggtgggaaaatccagctgatactcacgcctcaacttgatatggggtgagtgtaatttgttgtgtttctctcattgcattgttccttttactgaccttccaagttgcctgtttctaccttccatactgatatttgtgacttgacatcagggattcagacctcctgtgcactattgaccttcttccaaatcatgtttaatgtttccaatactactagtttggcaatacttgtacagctttttatacttgataggttacgaaatggtattgacatatcagaggtcaaacatttgactttaataacataaccgggtattgtgctgcgttgctgcatcttttctatttctttcagtttcagttcgttattaatgtaaatggtcatctacgactcctattccaagttttggttgcctattactttataaataggattgcggagtcacgacaatcttgttgggtgtcca

SEQ ID NO: 33101 - DNA, 1161 bp, Setaria italica
  Peptide Sequence Number=SeqID_99075
gtccatttttcttgagtattgcctgtctgcagcagctgaaataactagcctagtgactctatgcaggccaataagttcaaccagaccagctaccacatcttccttctcaaaaactagtttctcacatcttaccttcattttcgagcactgatgaacatagccgtctagctgtttgttcgccttttcacgttccatccttctgaacagtttcacttgctccgggctcagtttactagaatgaaatttgactcccatcactggaatcatctgcggcggaacatgcacatgtgtaatcacaacggtggctccgctgctaccgaaatggctgagaacccacgacagcgtggactgccccgccttgaactcagccggcagcgcaacgaacaccttctccgtcgctgccgccatcctcttcgcagagtttgccgacaagccttggtttaaatgactttcttatttggtggcataagaaacacgcagacgttggacttacgatacaagagactatggacgcgggacagtgacaccatgtgaggaggaagccaacagcaagcgacagtgacatacagaggtggcaaggaggaagttcccaagctacctgcagttctgaactcagtgtgatcacttgtcacatcagaccaaaaaattctcgtttcataatgccctgttcagttgactgactcatccagtcatctatgaaatattttgatggctcaagtttcaactcattgagagtaaagcacacggcatgaagctatgaaataggaagcatcaataaagaaaactaaaaggaaatactgctattaaatacatgatcagatggacatgttggaatatctggtgctagaatatttaattacataaaattgtacatgtagaatggcagaatatcagtcttgtataatcttaaaaagtcagaagatttgctacagaggccgagagtgcacatagataagaagcaatcatgcaataaacaagccttatcatatcactgaaacttcaacacaaaacatttaccagattaaaaaggccagctgttactttactaggatcaaaatagtccacatagtatgtggagctgatttttttaaacgcagcatagacccagcgtttttataaccagaataacaacatcgtgatagagtgcaataggacacatgg

SEQ ID NO: 33102 - DNA, 348 bp, Setaria italica
  Peptide Sequence Number=SeqID_99076
agggatgtaccccctgccaccaccggcagcctctgggctgctccctccgacctcctcgctatccatctctgagatctgtgacatcaacgagccctgccgtgatgagaagctgagctgccccttcagcctgctgccgccacctgcaagagagtcggccgtggcagcagcggcgctgctgccgtccctgaagcccatgctcatgccggccctcagcatagccccgtacccgttgtccatgttcaaattgtcgaggaatccggcgggggagctgctctgccgagccaggttgctggcgccgacgccggcggcggcagcggacgcgggttccatgccggagctgacggtgcg

SEQ ID NO: 33103 - DNA, 408 bp, Setaria italica
  Peptide Sequence Number=SeqID_99077
ccttgatgtagtcgacagccaaatccagcatgtcagaagtgttggtttgctgcaggaaatggaagtgtaggttgcagacaagtcaattatggagtggtcctagcacagaaaatttgctaactgcacaatgttctattgccaattggggagaggagactgcagaatgtcaggtaccttgtccatgtttgggacgagttcttgcaactttcggattcgctcgctgatctttgttctcctcacctgggagcaaggatcagcgcatcagccaattgctcaactgcaggctcgaaattgaagaaattctatacaagaacgggtgttcactaacccgctcagcaatactgcgtgggtgtgtggcacatccccgcttggcacggatcttgcaaggcacggcgtcctggaactgga

SEQ ID NO: 33104 - DNA, 641 bp, Setaria italica
  Peptide Sequence Number=SeqID_99078
gggcgtgcaggacggtgtatatagcaaaagttacagcaaaaactaagtactatacaattctccctcccatgcctcccccctcccatctcacatcgcttgaatacttgatgatgccactgctccggaccccggtccggtgctcaaaagctcactccatgcctctactcgaacccagagaaatgagagctacaattttgttttacaaccccctcaacaaattctaaatgatgctgtttcctgaggcctccgcgtgtcttgcctggagcgcttcagccggagtactgcgggttcttgctcgccgagcaggtgcagttggcgcggctctcgttcagcaccttgacctgcttctggagatccttgatgtagtcgacggccaaatccagcatgtctgaggtgttggtttgcttgtccatgttgggcacgagctcctggagcttcctgattcgctcgctgatctttgtcctcctcacccgctcggcgatgctgcgcgggtgcgtggcgcacccgcgcttggcgcggatcttgcagggcacggcgtcctggaactggaggaacttctcgatggccgccatctccgacgacgtcttgggcaggctgaactgctgcgtcaggccgctctggccgggttccgacgagtcccg

SEQ ID NO: 33105 - DNA, 455 bp, Setaria italica
  Peptide Sequence Number=SeqID_99079
aatgcaacagagctcaagttgacagaatggaggaagaagagacaccaaaagctgatgaaaatcatgttcttgatgacaggcagcctcaacctgctgttacaaaagcctctcctccagagtgcaatgcagcagaagggcaaaatgtcatgcagcaagaggctttgactacaagtcaagacccactaacttcttctgagggtgatttaacatcagatggggatgttgtccaggcaagtggtcatcatcatattgttgtatcagaggattctccagaggaatgccaaagagatgaagtcaaaagaagtgtacaagatgaagcagtaaaatccgattggagccatgttctggatagcagagaatttcagcctgctgtatcagaagtctttccttcgaagaacagcgtggctgaagtgcaaaaggccacacaagaagaatcattaccttcagatggagat

SEQ ID NO: 33106 - DNA, 318 bp, Setaria italica
  Peptide Sequence Number=SeqID_99080
gcgcgcgccgggggtgccatgcccgggaacgcggaagccggttcttcggggcgccctgtcgtctgacgtcgcgccggccggccggccgcctcctttgcgcgcctccgccatggccgaggaccacgggtcgtcgcggcacatgtcggcgtcgcagaaggagctgggcgacgaggacgcgcgggtggtgcgcgtgggcgacgccgagcgcaccaacgagcgcctcgacttcgcgggcaacgccgtgcgcaccgccaagtactcgccgctcaccttcctgccgcggaacctcttcgagcagttccaccgcctcgcctacgt

SEQ ID NO: 33107 - DNA, 571 bp, Setaria italica
  misc_feature (174)..(174): n is a, c, g, or t
  Peptide Sequence Number=SeqID_99081
ttaccgtttatttcttttgttccttttgttcttagttggtcctagttggttattctttacagtggaagttgggatggtaccattaggtcatggtggctcactgatcatacaccattgtctgtactggaagatgatacagcaggaagcatggctcctgtgttgtcaatttcaacngaagccaattttgtcgcttcatcgtacgagaacggctactttaagatttggaagaatgatgtccttgtcaaatcagaaagcttcaaaatggaactgtttatgacgttatcccatccaccagtatagaaccaactgccacataatttaactgcataaatattcaggaattattggaaaatgaatcagaggtagaactccgcgacgtcgcttccattacttgtgactcaattataacttcaatactgtcctggaatgaaaggctgatagtcggactatccaacagggatatcaaggtttactacaaggcgtcataattccttatgccaccggttcaccctatgtatatactgtgaatggcttaatgtacaataaatgtgagataatggattgatggaaa

SEQ ID NO: 33108 - DNA, 2299 bp, Setaria italica
  Peptide Sequence Number=SeqID_99082
gcaggaagccgtattctaccggcccagccacgcggcgcgggtcctcgccgcgatcggcgcgctcagcgacgcggcgcgggaggagctcgccggtctgatcgcctcttccgcgcggttggcacggcaggtgtgcaggatctacggggtctggatggactccgacgctccgccattgtggatggtatctgaacggcacacgcgtagtgtttcccggttgttggaagaggagacgatcattggagaggagatggtggctcagattggatttgttgtaatggaggcctgtgaagtgataatgaggttgcattgtgaggggctggtgctgggatgccttgggctcgattgcttctgcctcgaccgctttgggcactgcctgcttgatttcaatcaggtgttggccttgtgccggggagtccgagctgggacacacaatattggggcttttgttgctcctgaggtagtggcggtgctaggtgacacattgcgaaggatggatcatgattttgatggcttggttgggtgtagttcggatatctggtcattgggttgtgtattggtgtcatttcttactagggatgagcagcttgtggcaggatggaactctgaagggtcatatgatgattgggagaaggaagtggtcacaaggcttaatgcctcattgcttggtacgcaacttgaaccattggctgcaattatagtgtcgtgcttgagctatgatccaaaaggccgtccagagattgctgatgtctggaaacgtattagaggcttgttgatgaaatccagcgatgttgctttagctcctgatgatgactctgcagctcagaagagttttagatgtttactctttggggagctatccttgatgttcaaatcagattgtaaggcacaactgtatcaaggagcagaggagaacatttcaaatcaggatgatggaagtaatggtggttgcattgacaatagggtaattgatggtccacagtctgccggaatgtttaaatcagcaacgctggttgcccactgtgattgtgtaacaggattagccattggaggtggattcttgtttagctcttcttatgataaaactatcaatgtgtggtcactgcaggacttctctcatgtacagtgcttgaagggtcatgaacacaaagtcaccgcaattgttgttgttgacaatgataatcattctctttgtataagtggagacagcggtagtggaatttttgtctggcgtgtagattccactctcaatgaagaacctttaaataaatggtatgaacataatgattggctctatcgaggagttaactgcttggctgtctctggaactggttacctttacactggtggcagagacaaatctgtcaaggcctggtcactggaggattattcacttcgctgcactatgacaggtcataaatcaaccgtatcttgccttgcagtggccagtggtattctttacagtggaagttgggatggtaccattaggtcatggtggctcactgatcatacaccattgtctgtactggaagatgatacagcaggaagcatggctcctgtgttgtcaatttcaacagaagccaattttgtcgcttcatcgtacgagaacggctactttaagatttggaagaatgatgtccttgtcaaatcagaaaagcttcaaaatggtgctgtttatgcagttaaattaagtggcaaatggttctatactggtggatgggataaagtcataaatattcaggaattattggaaaatgaatcagaggtagaactccgcgacgtcgcttccattacttgtgactcaattataacttcaatactgtcctggaatgaaaggctgatagtcggactatccaacagggatatcaaggtttactacaaggcgtcataattccttatgccaccggttcaccctatgtatatactgtgaatggcttaatgtacaataaatgtgagataatggattgatggaaacagaaaaaaccctccttttgatggtacagaagtgtgtcagttggaaagaaacagcagcagttaagataggttgttgtaaggaggagtagatataggttgcacattttacttcaaatcttatggagtagaataaacattaaaagtacaatgtctggtttgtggctaccatatcatacagactgtaaagtagaattagcagtgctgctttatgagaagccaccagctagaagaatgctgttgaatgtcaataataatactatatgcctgttattgtcaaaaaaaaattgttgtatttcttaatttgtttaaagtttactaaaaaaaaaaa

SEQ ID NO: 33109 - DNA, 718 bp, Setaria italica
  misc_feature (640)..(640): n is a, c, g, or t
  Peptide Sequence Number=SeqID_99083
aggatgccaggctatacttcaacattctttttggttcaaaaccaaatatacaatagttcgagaaaaaaccaaaagatacaagtttcacaggagaaatagtgccacattctgaagttttcagttttaacctttcatgttcctggctactggacaatttagcttctgcttctgcaactcgtaggaaggtcacagacaagcttcacacttttttccagtacaagtttaaaagtatcgagcaaaaaataaatagccaactactgatgttttgtgtaaacttgtgctcaagtttgtacccaattcattcttagcaagcaaacaaaccacctgatatgctttactcccatagtcttataaagaaaacagtgggaaccaggactttgcatactgtacagaaaacaatgctttcataattgacacaaataattaaaataattgagataccgcacaaaatatgtcgaaatattttaaaccaataacgagtgcttacctctataacattctcacttggttttatggtagtttgataaaaagatactttagcacttctatcagtgccaaaaatagcatctggtttcattaaccgtcgaaatgctgctctggcatagtaatgcgaggcaaatttaagaaaagcaaaaccctntgcatcctcccttgtaagtgggaaaaagttatcttgcattctgaattccaatactttttaaggagtcagaacctgatc

SEQ ID NO: 33110 - DNA, 864 bp, Setaria italica
  Peptide Sequence Number=SeqID_99084
aggaaattcagcccatcttcaaggtccgaacctttgtcctccccttgtctccaatcccgcaccctcgccgtggaatcagaaaccctagcttcaccacggcgggatgactgcatccgccaccgacgatggtacctctccggcgcccaacgtgacggagggagaaaccccagcggcggccgatgttggagcagcggtcgaagagggcgagaagatgaatgtgggggttactgctgcagttgaggagaagggtgaggtggagcctgaggaggatcctgacgagcaggcggaagatgaggaggaagaggaagtggatgcgggggaggtggaggctgcgtatgggatggaggcggcgttgatggagcccctggtggtgttgaagcccagcgaggaggacgcacctgaagagctggagggggagaaggaaaagctggatgaggaacccgaggaggtggaagagggcaaggaggaatgcaatggtgttgaggagaaaggcttggtggatggatccgtggaggctgtgtcagatatgaatgaagtatccaaacaggaacatggtaaatgtggcaacacaaataaggataaagttgttgatcaatcgagcaatgtcagtgatagcggtagaagcaaaagtgatgatgcgcagaactatgaacttgctggaggtcttgaaatatttgttgacggattgcctaaagattgtgttgaggaagacattgcaatggtgttttctcaatgcggggaggtcaagtcggttaggataattaagaattcatcaaccgaaaagagccttcttattgcatttgtctgttacataacagacaaatgcaatatctttgcttcttttcggttgatgaattcttaatt

SEQ ID NO: 33111 - DNA, 664 bp, Setaria italica
  Peptide Sequence Number=SeqID_99085
ctttgtattatttattccttccacacaagctaatgcactcttgctggatgagaattcaacaaaagaaaaggtttcactttccatgttctttgatatctggaaaaggtcaactttcagaatcttcccatattgttgacagcattctttaactttatcctcatcccaagaaagagggacatattccaggtatacttttttagcctctataacattctcacttggttttatggtagtttgataaaaagatactttagcacttctatcagtgccaaaaatagcatctggtttcattaaccgtcgaaatgctgctctggcatagtaatgcgaggcaaatttaagaaaagcaaaccctctgcatcctcccttgtaagtgggaaaagttatcttgcattcttgaattccaatactttttaaggtagtcagaacctgatctttggtccagcccttgcatatgtttcccaggtaaagggtactattatcttgacaggcagataccctaaccttttctccttttacctcaattccctccttgaattcaacgagagccttctttgcagcttcaatgctcgcataacagacaaatgcaatatctttgctcttttcggttgatgaattcttaattatcctaaccgacttgacctccccgctcattgtagtaaaacta

SEQ ID NO: 33112 - DNA, 331 bp, Setaria italica
  Peptide Sequence Number=SeqID_99086
ctgctactgctcactgtcacaggaatgattagcataaactttattttaacaaggtcaacttgggcagccttaacacatgcaccacggtacatatccttcacgcctggtaaactttctttaattcttgtgcaggacatgtgcccagatcttagccagggtgcttgcatcaggacaacaccaagaacataccctcttatctccctttgggttaactctattctgcaatggaagcctcctgtccctctgactggtaaatgtcatagtactagcactgcttcttttctcaaaattacagtccctgttcttgtcctactagcttctctgtgtactc

SEQ ID NO: 33113 - DNA, 343 bp, Setaria italica
  Peptide Sequence Number=SeqID_99087
cggtgcggttggcggcgacggaaggaagatgtcgaagaagaacagtctcgccaagaggaagaagcagtacgaattcgacctcaagagggagaaggaggccaaggagcagcaggccaagaagctgcaagccaagaaatccaagatgaagatagatggtggtgataaaaaaagaaagggtggtcaatttaaggttggcaagaaaaaggtgaagacaaaactttcagccttagcgaaagccaaagctgctcaagccatggaggtcgacaagtgaagcggctctggagcttttgcagcgtataatatgcattacactagctaaagtgctgagatgatgctgaatttc

SEQ ID NO: 33114 - DNA, 462 bp, Setaria italica
  misc_feature (283)..(283): n is a, c, g, or t
  Peptide Sequence Number=SeqID_99088
cacccgcaccgattcgcccgtgctggccgcggccgccaccgtcaccgcgcgctcccttctcgtcgccgcggcaggcgcagccgaggcgacgacggcgtccagtggcgtgtaccggcggctgaagcagtcccgcgtgcggaggctggggatggcgcggcggatgctgtgacgccagcgcaggaggcgcgaagctagccgttggacgccgacgacgcagcgaagggaggagcgtcactttgctttttgccttcgtgccattctcctttgtttttgtctggttcgntttttccggcggcagctgcgttcggtggagatggctgcagcgagcgagtgcatgcatatgggcagccgttcggctccagcagcttgctgttttgggcgtgcagctgcagcataagcgctgcaaaaaaatcagaaacgaacaggctggaaaaaagttctagtaaattggttagttgtcta

SEQ ID NO: 33115 - DNA, 713 bp, Setaria italica
  Peptide Sequence Number=SeqID_99089
cagaacagatcgagcgagccccctcgcctcgcgactcggtggcctcctctcccggcgacgctgctcccggcggcgcccgctcccggcgtccgcggagccctcgcgcggcggcgcccgctcacggaggcgactcctgcggcagaaaaacgcatcggcccctctcttccttttctttgctagcggcgacaactgggtgagcggcgccaccttacgccaggtcttcgtcgggccgagcgccggcgatgaatatccaccaggttataggcaaagtttgccttgaactgccaatcatggtgaaaggctgggtattctctactttgttagtggtgtttctagtgtttgctccaccatgcggggcattctacttgccaggtagttacatgcacacgtatcggcaaggcgaggaaataggggcgaaggtgaactccctcacttccattgagacagaactgcccttcagctactacagcctcccatactgtcgtcctaaagatggcattaagaagagtgctgaaaacttgggggagcttctgatgggtgatcaaattgataattccccataccgtttccgtgtaaatgtcaatgaatctctgtatctgtgtaccacaaacccacttggtgaggctgatgtgaagctcctcaagcagagaagccgtgatttgtaccaggtgaacatgattcttgacaatcttcctgtgaggaggttcactgag

SEQ ID NO: 33116 - DNA, 568 bp, Setaria italica
  misc_feature (564)..(564): n is a, c, g, or t
  Peptide Sequence Number=SeqID_99090
acaggcagcttctggcttgcagcccagacaatccaaattagccttctggacaagctcttattgatggttagcttccagtcatggtgtgtgcatgtatcaatttcatgaaactaacaatggaccagacaacagaccatgaactaatttctctgagtgatacgtataaaattgaaacataggagtgataaagcgtgtgtatgtgagattatggcctattgcaattatttctagctaggtttggggtggctgggattggctcattgggaaaatgctatggtaatgatgtgcaatccaaataatagatggcagcaatttgaagagcctgtgaatttttgttgtctcaagttatcttgaccgacctctatattctggatataaattttaacatcctcataagttcctcctgtctgaagataattgtttatcaattatcaacccttgaaatggtctctcataggatttggacatgtgttcaaaatgtcaagcttgattgctttgttaggatgtggttcagctggtccatagctatatatcaaacactggcaccagaacaatttggtcttnaaca

SEQ ID NO: 33117 - DNA, 516 bp, Setaria italica
  Peptide Sequence Number=SeqID_99091
tgcagatggcccagcagccttgattttacattttagtagtccagaagctattccttctgtggatgacatcaacagcatattccgcatacatggacctatcgtggagggtgagactgagatcactaagaagtccaagattgcaaaagtagttttctctaagcgtgctgacgcagagcgggcatttagcagtccgggaaagtatagcgcatttggcccatcgcttgtcacatatgaaattcaatgcatgccatctgcgcctcaggtttcttaagtgctgcagtctgaacttgatatgttgcgatttcagaggaaatgcaccatgaaggttggagcaatggagcattaattggtgtccatgacttagagttaggatcgctcactgaccaggtcacattagtcactgagttggctgagcaagttttaggctttctgctgttgcatgcgtccaggtgactggttgtgtgcttggtatcggagttaatagtttatgttaaatcattagatggtagagtaaat

SEQ ID NO: 33118 - DNA, 1499 bp, Setaria italica
  misc_feature (1492)..(1492): n is a, c, g, or t
  Peptide Sequence Number=SeqID_99092
cgctgccggaccctcctcactacaccttggaactcggcctgctccccctcactcctatccatcctcctcctaaatccaccaccaccaccaccagggatgaggccccctccagcaggaggggcaggaagaggaaggaggaagccgtcaaggaggacgactccgacgaggactgggaccctaggaagaaggggccaccgactccgaatcagacctcgacatcgaccgcaagaggggctccaggggcaggggcagtggtgcgccgcgcgggaggcctcgagggaggcctaggaaaactgatgcctgcagggacacgcggctcaaagatgaggagatggaggacaaactggagtatccgtcagccgctgacatgctgctgcaactcttgtcggttgctgctgatcctgtcaacgccagttacgactctgttcctctcattgttagcttcttctcaaagcacaaggacaacgaagcgccgagcgtttaccaagataaagagctgctcgacactttcggttgcaagaagggtaggaaaaagtcggctgggagcttgggcccagctacaaaggcagaagccgacaacgataacgaacaactgatggctgcggatggtcagaggggccggagaaagtccgcggggagcttgtactcagctaggaaggcagaagattcgtattggtgtgatatcatcatcagcgatttcgatgacggagatagtgattatgaaggtcgcaaaaggaagcggccctcccagaacaccaacaggagtgccaataagaagatgaagcaggaggagacacctcaggatcgggcctctgcagatcctcccgcagatgcaaaaagtctggcttctgcagatccttctgcagatggcccagcagccttgattttacattttagtagtccagaagctattccttctgtggatgacatcaacagcatattccgcatacatggacctatcgtggagggtgagactgagatcactaagaagtccaagattgcaaaagtagttttctctaagcgtgctgacgcagagcgggcatttagcagtccgggaaagtatagcgcatttggcccatcgcttgtcacatatgaaattcaatgcatgccatctgcgcctcaggtttcttaagtgctgcagtctgaacttgatatgttgcgatttcagaggtacatgttgtttgaccgatgccaactttatttcctgattcatttgcttatcgaattctcatatggtgaattcaggaaatgcaccatgaaggttggagcaatggagcattaattggtgtccatgacttagagttaggatcgctcactgaccaggtcacattagtcactgagttggctgagcaagttttaggctttctgctgttgcatgcgtccaggtgactggttgtgtgcttggtatcggagttaatagtttatgttaaatcattagatggtagagtaaatcatgtagcgtgatgcgcctccttctatgttagcaccttanccttttt

SEQ ID NO: 33119 - DNA, 392 bp, Setaria italica
  Peptide Sequence Number=SeqID_99093
agggaacaaaataacgaaggacggaccaatacgaagggtgttcatgtgatcagccatggcaagtgcagactcactgtcctctgaaacacacgacccagtagcctgaatagttcgtagtcgatcatgattttggttcggattgttggataatcctctttagttcttaaacttggttcgcctgttagtcatatcactataatctggcattgtgtggaaatgattttgttcaaggtaatggcttaatgggtatattgcaaactgtaggaatctaatgtctagcattagttatggaacttgttaaaatcttcggcaaaatcccttagttttagaagaaaactcactgggtggagctaatttgtgcctgatggtccatatgtattttgtttttgaac

SEQ ID NO: 33120 - DNA, 372 bp, Setaria italica
  Peptide Sequence Number=SeqID_99094
ggtctagttcttctttagttttttttttgtttttttttgtttttttttttttgtaatgacgaatttctcaagagaatcgatcatacactttactgcaatctgaagttaccaatttacaatttaccaatattttacagtatattgaaagaatttgattcaagattaggctcatgaaaagattaaaggtcttgctattatgtaacaaaggccaccaaatctcaacataaacatttcattccagtccgaagaatagaacggggggagtttaattcatatgggcaaatgcaggcatctatgaagaggttgacacaaactttcttgaactctggagcgggcatgcacctgggatgaatttacaccagacagtcctca

SEQ ID NO: 33121 - DNA, 487 bp, Setaria italica
  Peptide Sequence Number=SeqID_99095
atgttgatgatgcagcgttgattctcaaaccatgttggtttttccagcgaactacgtaaaatgaatcacctaggatgtcattcatgagtcaggacagaatactaggtgattcattttaggggatctggtgatttcttttccagcgaactacgtaaaaattccatgaggttaagaagtagacagtaaaactgtaatcgataagaatcgtactagtgctatggaataagaaggaatgacaaaaaggggacaaatcgagtaagttagagcactgaagtgagcagagagagctgtgctcagctttttaaatatttttttatattcaaaactccatttatgtctactgttctaggctttgtgcctttgtctgaggaaagctaaggtaacaggcatgataggatagcttaactgactttcagatgttgtaaattgcagttactaagatttatcttgtctgcatcacccccatcatacataggtaaagaatcgg

SEQ ID NO: 33122 - DNA, 633 bp, Setaria italica
  Peptide Sequence Number=SeqID_99096
aaagcttcctttcttgattcatcagcttccatcattacatgtttgagatttctgtccaatacttccttagaatagaagggtaatgtgtccatatgtacagaagaatcagagaagaaggttgagttgagtgccggttctgcatcttgccattttgccatgttcatactgtagaaatggttggcttcacgtgccccaagagcgtcataatctgaaacagtgccttgattaagatcaactgtcattagtgcctcgcccgtgacatgtccttcatcaagtcttgtttcggtgttgttagaatatgagctgaacctaatcctttttgttgtcatggcatcatcttggtagtgaaccggagcattgttgtcgatggctgcactcgcttctctggtccagatttgccttcctctccacacgaaccagatttggcaaaatgcaggagcattgctagccattaaagattctttgccatatttcaacttgaagcaattgtcaggtgtagagcccattataagcttggtgatcctgtaatggttgaccaagttgaggatgccgtcgtggatttggtcgttctccgtgcgaagaagcgttgcctgcacctgggccctgcggcagaaggcgaggtaggagaggagg

SEQ ID NO: 33123 - DNA, 415 bp, Setaria italica
  Peptide Sequence Number=SeqID_99097
gcagtgacattctacattggacataatttcttgtgaatggagctagattattataaataataatatgtataggagcagcgacacacacaaattgcggatccatgccattacctcgatgagtgaactgcactaggggtacctaaactattcccgcactcacttaggtccatgaacttctagattaaccttggtttggatctttcaggttaaccttcatcttcaagacttgagcacgttccattctttccatcatcagcccttctccttgtcctcttccacttgaacaggaccccatatcttcttcggtgttattctccctttcttctctgcttgttgcttaatcatccccactgacccaacagcttcctttccctccttcacatcatttactgtaggtgcttctttgcattccaag

SEQ ID NO: 33124 - DNA, 284 bp, Setaria italica
  Peptide Sequence Number=SeqID_99098
cgagaggagaagagagggcagcagcggacggcggcgggctctcaaactgcttgcctgctcgtcgccgccggtcggtcggccggggacagctacgtgctttctaggtttcgatcccatcatccagcagaagcagcagcagcagtggacgacgggttcccgatgctggccgcccggagcccctctccgagcttccacgcgcacgaccgccttcctccgccggcacatgacatcgcggagcgcctccgccacctgcgcgaccttcgcagggcgccgcctccccacgg

SEQ ID NO: 33125 - DNA, 284 bp, Setaria italica
  Peptide Sequence Number=SeqID_99099
cgtggtggtggtgatggctgttcttggactccatgtgcaggatggcgtccatcggcggaccttgtgcgccttgtccggcaacgaccgcttctgcccgccgcccgatcgctcctcgacggacctgtggtggtggggcgggtggtggctgccgtggcgggtgtctccggcggcggcggtggaggccgacgcgcgggacgggaaggaggacgccgcccgcaggttggacccgcgcgtgtaggagccggctggcgggtggcggcggcatgagcttctccgccgccggc

SEQ ID NO: 33126 - DNA, 746 bp, Setaria italica
  misc_feature (584)..(584): n is a, c, g, or t
  Peptide Sequence Number=SeqID_99100
ggcctctctcccgttgcctaagctaccggtgatctttctcctcctccagcttccacccgtggctggctgcgtctccatcttattgccccctttttgctgtctcacttgaccgcctcgcagtcactcggagtcgctgtccatgctctccatccctttcagccctcttcgcttcttcttcacgcatttcttctcccgcacctcataccggcctttcgtcaaatctgacagccacatccccgggaagacaaattggagggtcttgtccacgttcttggccctcttcttgggccgctggggcagcttggtgcccttcatggccaggaagtcgtcctccttctccttgcgcgacagcgagatgtagatccgcggcagctcgaaccgctccgcgcccaacttctcgccggcggcgaccgcgccgttggcagtcaacggcgagtcgtggtggtggtgatggctgttcttggactccatgtgcaggatggcgtccatggcggacttgtgcgccttgtccggcaacgaccgcttctgcccgccgcccgatcgctcctcgacggacctgtggtggtggggcgggtgaatggggngaacgggtgttaacgatgatgatgagattgctgtggtggtggtggcagcgatgatgcggtggttggcaagttgaggcaaaaggggaacaagggtggtgggtcgggtggtggtggattggtgctacggctacgagggagtcgagttgaggctgcaatccttcc

SEQ ID NO: 33127 - DNA, 1883 bp, Setaria italica
  Peptide Sequence Number=SeqID_99101
ggcacgcgctgttacccgaccgcgcacccacaccatcctgccggccctcgcgcggggaccgaatgatgattcctagggaaccgcggcggccggagcccccgtccgactcctgattccggatcccccgccgatcgcggcggcggcgtctccgccgcagtgtccagactagaagatggagattcctcaaatagagatgggtggtttcaaagtcaacagcccgcaagtgcccaacggcgggctacgtccgaccatggctgggtcctgggactcgcggaggacagtcgagaggacgctcaggagcatcaggatcgtcattttcacctccaagctcaatttgctgatgccatttggacctgcgtccatcattctccacttcacttctaggaggcatggattggttttccttttcagcatgctaggaataacacctttagcagaacgtttgggatacgcaactgagcagcttgcactatacactggtccaacagttggtggccttctaaatgccacatttggaaatgcaactgaaatgatcatcgcagtatacgctttgaaaaatggaatgatccgagtagtgcagcagtcactattgggttccatattatcaaatatgctgttggttttgggatgtgctttctttgctggtggtataattcatcgtaataaagaccaagtcttcagtaaggcaactgcagttgtcaactcaggtttactgttgatggctgtcatgggattgatgtttcccgctgtccttcacttcacacattcagaagcgcgccaaggagcatccgaggtttcactttcaaggttcagtagttgcattatgctcgtggcatatgcaagctatctctatttccaactaagtggtcggagcaacatttacagtccaattggcagtgaagaggtgcctactgaggatgcagcagaagaggatgaagaagctgagattggcatgtgggaggctgttacctggcttgcagtgctaacactgtgggtgtctgtcctttctgaatacctagttaacgccattgagggagcatctgattcattgaacctaccggtggcttttatcagtgttattttgcttcctattgtgggcaatgcagctgaacatgctagtgcaataatgtttgccatgaaagataagcttgacataacgctaggtgttgcaattggctcatcaacacagatatcaatgtttgtgattccattttgtgttgttattggttggatgatgggacaaaagatggacttgaattttcaactatttgagacagcaagtctcttcataacagtacttgtggtggcatttatgctacaggatggcactgcaaactacttgaaaggacttatgctgatcctgtgttatctgatagttgctgccagtttctttgttcatgttgatccgcaatcaagtgatggctgaggtcacagatgctgtaagtaatgtaccaaataccttcgatggttgctaatcccattttgttgaggtgcaccaccatagcaatgttcagcctgcctgaagcagcatgttggcaacacagtaacatcacacatcatcggttccttcatgaactgcggaaggaattgtgtggatactgaggggtactagggctagtctcgatgtatacagaaacaagaaatgtcatcctgttaaattcaattaattgagttaatcttgcccttttttcccctgtattcttcgggtttctttatcgggtcgcagaatgtatatttgggtatgatcgatgctggcaaaagctttcttccccttttgtggtttatgatgtctgcatgatcatggttggttctgcatccaagctggtctttcctagctagcgaccgtgtgtacgtttgatggcaaatcaatttttgtggctact

SEQ ID NO: 33128 - DNA, 284 bp, Setaria italica
  Peptide Sequence Number=SeqID_99102
ctatgttgtataggttgcatagttcctctacacctgctttgcatcctggttgagctgcttctattgatggaagaatcgaggaaaccttatccaacatcaaagacaactcattgcacattgtgctgtgaacctttggatgagaattgtgccgagaggtacccattgcttcatcactattagtttccattcacacaaggaataggcaaccaaaagattttccaactctgaagaaagaaagaacctttcagatgcctcgttagctccttcttttttcccgggatttc

SEQ ID NO: 33129 - DNA, 297 bp, Setaria italica
  Peptide Sequence Number=SeqID_99103
gatggtgctctaagggctggtaaggtcaactgcgataatgaaaaatctctttgcaaaaaggctggtgtttcgctagggaaatcagcccgtctattcgtttattcgtatgccactacagaaaaggggtctttgcatgagtattctggagaacatgatgctaagagcttgaagacattttgtcaagaacacctgccaagattctccaaacgggtagatattggccaattcagcttccctccaaatgtcctcccaaaccttcctcaagtgctcttactatcgagtaagaaggacacacca

SEQ ID NO: 33130 - DNA, 355 bp, Setaria italica
  Peptide Sequence Number=SeqID_99104
aacccgaaaccctagccagcgtcccggtcgcggtgccagccaccgcgcgccgcagcgtggtttcccccttctcagcttcggagcttctccccgagatcggcggcggaatctcaagaggaggtggtgggggaggcggaggcggggccatggggctccatggctgaggatgcctgtgctgcgtagcgcggcgcgaagggcccgagaggcgcaggggagtccaccggaggcggcggcggaagctccggaggcggcagcaccggcaccggcgccaccgccggcagagacgaggcggagggcgacgagggccgccgcgagggcggaggagagggagcgggaggagatcaggaccccgaac

SEQ ID NO: 33131 - DNA, 1160 bp, Setaria italica
  misc_feature (1123)..(1123): n is a, c, g, or t
  Peptide Sequence Number=SeqID_99105
cgaatccaccgaaagaaccaggcgagcacgagcggggcggcacacaagttggcgcaacgagcccagccttccttcattcccccaaatccccgcaacaaaatcaaatccaatcgccaccgcattccgcaccggatcgactagggagaaccaccagcggcggcggcgatggcggcggagaagccggctccggtgcgcgtgctctactgcggcgtctgcggcctccccgcggagtactgcgagttcggccccgacttcgagcgctgcaagccctggctccgcgcccacgcgccgggggtctaccccgacgacctcatcgccccttcctcatccggcggcggcggcgacaaggacgtcgacaagctcggcgagcgcctccagggcgtcgggatctcggacggctccaccagcagcgccgcaggagatgcttctgcatctaagccggaagaggtgaaacgcctgcctggtggtaaggtcaagaaaaaggagaagcaggaggttgtgattgaaaagattgtccgcaataagcgcaaatgtgttactgtggtgaaaggacttgaattgttcggtgtaaagctgagtgatgcttcaaagaagcttgggaagaagtttgcaactggagcttctgttgttaagggcccaactgagaaggagcagattgatgttcaaggggacatatcatatgatattgtggagttcattacagatacatggcctgatgtacctgagtcagccattttcttcattgaagatggaaggaaggttcctgctgcttgatgtcatatggtttacggaggcacagaccaatggatttacaaatattatacagagataaggacaagagcatggccgttaaggcatgctgcgtatgagtccatctcttgtctgaagtcatcgtctgttgtttcagtttctaggctaagttcactagtggtattttgtttatcaccagcatctgcttccatgtatcaaatcaaatatatataatttctgatttcctacaatcctgttgtgtcatcatgttgtctgaaaatctagtgttgtttgcataccccattttgcacgattgaaaagctgttttgctccttagtcaggagctaactggcgtataaatttaaaaaaaaanaaaaaactaaaaaaagagaactagaccaaaggacaca

SEQ ID NO: 33132 - DNA, 316 bp, Setaria italica
  Peptide Sequence Number=SeqID_99106
ccccttctcttggcctgcctcactgttccgcgtccgccgccccggaggcctgagccgcacggcggcacacggaaccctaaacccgccccactcgcgcgggggttgcccccggcgtatgcgcggcggcggctcataggcctcggccgccggcgatcgccgggatttgtggggccagcgcggcggctgctacgagcggcggagacggcgccgttggggaacggtgggagatggcggcaggcgggggaaggggtgggcggagcgggtgcggcgcggggtgaggactgtatggttcatggtggtcatggtggcgtcgctg

SEQ ID NO: 33133 - DNA, 260 bp, Setaria italica
  Peptide Sequence Number=SeqID_99107
tcatatgggttagtgagtttttcctaactgcgcacgatattaaggctgcttatcttttttccttgaaacaattgttataatcaattcaagttcatgtcatgtttattgcaagatacttatgtggtatccagttcttcttatggcacactagaaatagaacctgccaggaatagtgcttggtatttttattttggtaatagacaaaagcatattggttttgaaactgatttcactcgcatatttttcatcacttttgtgca

SEQ ID NO: 33134 - DNA, 660 bp, Setaria italica
  Peptide Sequence Number=SeqID_99108
catgaaccaccctggccagatcggcaatggctacgccccagtgctggactgccacacctcacacattgctgtcaagtttgccgagcttgttaccaagattgacagacgatctggcaaggagctcgagaaggagcccaagttcctgaagaacggtgatgctggtatggtgaagatggttcccaccaagcccatggttgtggagacattctctgagtaccctcctcttggtcgctttgctgttcgtgacatgaggcagacggttgctgttggtgtcatcaagagcgtggagaagaaggaccccaccggtgccaaggttaccaaggctgctgccaagaagaaatgagggggtttgagggtggtcatcttctgcttttcatctatcttagtagtgttagtgctgttaagttttgttaggccattgttcttacagggccttgcagttgctcacaactgtaatttcgccctgtccggtgtcgcttaaacgctactgttattttggttgtggtggaacatgggtatttttgcggctgattcatatcacctattagctgtgtagttccggaatgtgacaatgcgagtcccttcattgctagtttatacatgggtccaagttatgagatgctttcttgaataaactttaacttaaacaaaaaaaaaaaa

SEQ ID NO: 33135 - DNA, 270 bp, Setaria italica
  Peptide Sequence Number=SeqID_99109
tagaacgccgcaacaggaagaaggcggccggtaggttgatcgcccctgttgattactagattggactcagtttcatggatctcctgccacttgaatggtttaccgccatggcaatggcgacggacggggagaggcgtgcttgccaaatggatcttgaatgcaaactttgcctgcgggggacggggaggttgacgatgacgaggagaagggagacgacgtgggggtggtgcctccgcctcggtcaaacccaaaccttgtctcctgcggcgt

SEQ ID NO: 33136 - DNA, 556 bp, Setaria italica
  Peptide Sequence Number=SeqID_99110
tttttttttttgaatcttgatatgcatgtgcgccttataaataaaaatagtttataaacggaagaagcaatgtcaatgttgccaaatcatcaagacatcagctctagaaactacaccttgaacccatgatttcttgacatgggtccgtaataaattttctctcctctcttccctctcttattcttcattagagatcgtgtcaacaccatatcttgcgtgagatccggtttctccatatttttacatctctcctcattcactctttgccacctcatctttttgcctacatggcaccgtgcattaatggcaccgtacttaatagcagaaaaccagttgaggtgcaaggttgggacgggcctaactagcctaaaaaaagataactgaattctcctctctctctaaaaaaagaaagatgataactgactgaattcagcgacgtcatatgaacagaactgttccaggatagagttcgtatcaatcacctgcatttcaataaagatatatacaaatctcaaacaaatttacactccaaatggattcattaatagcagtcatg

SEQ ID NO: 33137 - DNA, 613 bp, Setaria italica
  Peptide Sequence Number=SeqID_99111
ttggttgtaaagtagtattggaggactttggggttggcatgcactgtgtctaccctgaactctgtgctgaatgggttttgcaagaacggcatgatggtggaagctgaagactggattgatggtatggcacagaatggcataaaacccaatgtggttacttacaataccttggtcaatggataccgccgtcttggaaagatggaggaggcggtggcggtgaaggaggcaatggcaggaaaagggattagtccaaatgttaacacctataactgcttgttagcagggattaccagtagttcggataggaggagtgtttcaggccttctcaatgagatgaaggacaagggtgtgagagcagatgttgtaacttataatgtgcttattggcgcgctttgttgcaaaggtgaggtctggaatgcagtaaagctcttggatgagatgtttgtggttggtttggagccgaaacatttgacctacaataccattataaatgggttttgtgagaagggggacattaaagctgtccatgaaattaaaaataggatgaacaaatgtaagaaacgggcgaatgtggccacattactaattgttgttttcttctaagttacttttt

SEQ ID NO: 33138 - DNA, 318 bp, Setaria italica
  Peptide Sequence Number=SeqID_99112
ctctttcacccttcctgtgttcccccacctccttcccgtcccgtccccaaaacacatttctttccttccttgctttcctaccttctccctcgcttgcgtgtacccgtccattcctcaccattacccctcttccccaacaatgccgccgtggaggcagcgtgcgcgcagcctccggcggtgctagatccgcggccaagcacagcggcgcgcgccgagccaaggtaccgggcggggaccgagaagaagacgcaggaggcgtggccgccgcgacaggcgggggcgtccaatgcacgagcacacccgcgtcaaggcgtggga

SEQ ID NO: 33139 - DNA, 266 bp, Setaria italica
  Peptide Sequence Number=SeqID_99113
cgccgttgtcttgccgccggtgtcggtatcagccaccgccgcggcggcgtcgccgtcgccatcgtcggtttccggaagtatacgctcctgccgggagcacgcgaggatctggttgtacatgtcgtcgacggggatggagccgaagccgaacatcctgatctgcacgccgatcctccttgtcgccggcgcgaggtaggagtggtagtacctggtgacgaggccccacaccgggttgctcgggtggagaaggtaccggagaaggaggt

SEQ ID NO: 33140 - DNA, 318 bp, Setaria italica
  Peptide Sequence Number=SeqID_99114
tcgcctttgctcatgtcggtctcgatcaggcctggcgcgacacagttcacacgaacattatcgcgggcccactcggcagccaggcttcttgtcagctggttcattccacctttggctatgctgtaaagcgtgagttctggtaaggccatgacactggcaatggaggagatgtggacgatgcttcccccaccggcaatggaggtgttgaggaggagagggtgcgcgagctggctgaggtggaagcacgactccaggttggtcgccatgagccgcgagtagtcctccgccgtgaactccatcgccggcttgctgatcaac

SEQ ID NO: 33141 - DNA, 609 bp, Setaria italica
  Peptide Sequence Number=SeqID_99115
caaacatcaaacccccaaatctcgaccggcactcatccactcgatcaacacacagcagcaaccccaccccactcactctcgatcaggcactcatggttcggccgccgtcaatgcagatgacttgcccggtgatgtaggacgccgccggcatgcagaggaacgacacggcggacgccacctccgccggctcgccggtccgccgcatcgggatccgcgacacctcttgctccagcgctccagccggcgcatctttgaccatgtcagtcatgatcgtgcccggcgcgatgcagttcacgcggatcttgtcgcaggcccactcggcagccaggctcctcgtcagctggttcagtccccctttggcggtggagtagagcgcttcccatgggtagccaatgacgctagcaatggaggagatgtggacgatgcttccacagccggcgacggcggcgttccggaggagagggtgcgcgagctggctgaggtggaagcacgactccaggttggtcgccatgagccgcgagtactcctccgccgtgaactccatcgccggcttgctgatcaactgggccgcattgttcactaggatgtcgagcttgccggcgaaggtgt

SEQ ID NO: 33142 - DNA, 374 bp, Setaria italica
  Peptide Sequence Number=SeqID_99116
cccgcggaggggttctccgtcgccggcgacggcgcgcggcggctgcgcacgcacctgtggcacgccaagaggttcgccatggagaggcggtggggattcgtcttgcccgtcggcgcccagggggagagggaggggttcaaggagtgttctcaagcggctgaagaatggcacgattgtccatgatgctagctacttcattccagttgagcttgatggtcctgaggactccctgttatccattctcagaatggttctgcgcccttctcctgtagacaaaacacctgagttgaagcatctacaagatcaagttatgcgaggtgtttgctatgagaatgctatgctttgtggtgttgggagtcctcgttctcaaatta

SEQ ID NO: 33143 - DNA, 560 bp, Setaria italica
  misc_feature (32)..(32): n is a, c, g, or t
  Peptide Sequence Number=SeqID_99117
tcctttggcagcctgggatgacgtcatggcangtttgcagtggtcctcctcttgatggtcccaaagatattgccttctaccagggtaagctgtacgtgctccagagtttcatttagaacagacctctttgcttttgtcctcaaggaggatgatcgtgggattgttatctctcgtgttgagcattgtatgactgagccactccccctcaccccatggagcaaaatggttttctgagatgtaacatggtggtgtgacgtgaaaatctgttattaataatgagatactatgatagtaattacatggagcaagattcgaaaattattaaagttgaagtgtttgcactggatgtcagcaaaaacccttacagactcaccagggtccgcagcttcaacggcgattccatcttcattggctcaggcagctccaagtcgtttcctgccagtctgcatgatggagctgaaggtgatcttatctactttgttcctgaatattggagcccaactgatagatttgtgtacaacatgagagatggtaagatgagacccttttctgccaaattg

SEQ ID NO: 33144 - DNA, 249 bp, Setaria italica
  Peptide Sequence Number=SeqID_99118
gctgcggaggccggccacacggtgcgacatcttcgtctacccgcggcgcgcatcccggtcgagagaggcagagggatcgagtagtggccgagcgaggaattggagagagattgcatagcagagcagaggagagatcgatcggtgtccatcatcgtcggccatggcgtggagggacagctacttggacgtggtgctgatccccctgccgtcctcttccccgcgtgtaccacctctggctctggcgcgccg

SEQ ID NO: 33145 - DNA, 252 bp, Setaria italica
  Peptide Sequence Number=SeqID_99119
ctcagctctccagtctccacaaccacaacacactagctagctggttattcactagagccagctccagtccattagcgatggagcacttcaactacaaagccctagcagcattgtccgccacgctgcttctgctgctggcacctcacctcatggccgccgacccggaccctctccaggacttctgcgtcgccgacctcaacggcaagcccacggtgaacggctacccgtgccagccttcctcgtcggccggcg

SEQ ID NO: 33146 - DNA, 441 bp, Setaria italica
  misc_feature (34)..(34): n is a, c, g, or t
  Peptide Sequence Number=SeqID_99120
ccggctctgccatggcatgcaacatctcaacctnttcgggcattcgtccatgctagctcatcagcaagcaccacatctaaagtacccgtggtcgtcatcggaaccttcgcacggcggcagtggcggtctggcagggagcaagaggccgttttggagcaccgccggcgacgagaaggcggcgacattgcccgacaatgtaggcgcggtcatgtcggacccgaataagttctcggtggcgattgcggctgcgatcaatagcttcatggggaaagacagcggcaaggacggggagagcagcagcagcaagagtagtaacaagtggggggtggttgaatcacttccacctccatgactgctagtcagtagtaagacacgggggctagctaattgtggaaagtcaaggggttcataattgttgtgtgtaacaaatcaagatagggg

SEQ ID NO: 33147 - DNA, 1524 bp, Setaria italica
  Peptide Sequence Number=SeqID_99121
tttttttttttaaaacgtacaaactttacaacttatctatgtaaattgaaaactgcaaagcagtcataaggaaatacatgtgaagcattatcaagaaacactaaactagcttcatttatccaacatcgaaaaattggcagtgcaaactcattccagaatccagatcagaagtagccactagccagaatatgcaagacatccatgtgaattcagcacaaccattgcaaatcatatgctcccaacagttgtcacacaccttagaagtaaggcggcacattgggatacataggaggagccctgccacctggcccaggtgacatcccaccttgagggtcctggccacggaaaccagaccctggaagggggtagttccctccttcaccaaaggcacctgcaggcagcccacctcctccctgttgcatgcggtacatggaacctccacccattccaaggccgccataagcccccatcccaccagcaccaaactgagatgatccaccaaacgagccaccacccaatccaccaggcccaaatgcgccaggcccagcaccacccaaaccggtaggcacctggcctcccatagagcctaaaccacctgcgcctcctccacccatagaagatggcatgtttccataagggtttggacccccaaacccaccgccaacaccaccaaatgccccaaacgatgacagtccactcccggggccaccatactgtgctcccatctgtgggccaggcccaagcccaagccctccctgcatgtcctgtggaccaccctgcaacatctgctgctgctgttgctggttgccaggcccggattgctgcgattgcccctgcttgcccttcttcccctctatcgcgagcttgcatacaagctggtggccgtcaattaccttcaccgagtccactaacgaggcctgagcaccctcaggcgtcttgtacacaaagagggcaaagccacggaacttgccagtctgcttgtcaaaacccagcggcccctcctcgatctcaccatacgaggcaaagtgcgcaaggaggcgctcagacgacatgtcggcagggacgttgccaacaaagatctttcggagggagacatccgccacgggagcaccaccgctgcccgcggccccaccagacggcccgccggccgcaccagcggcagcgagctgcgtgacggtcatgcggccgtcgatcttcttggagggctccttaagcgcgaggacggcagagtcggcgtggcggaaggtgacgaagccgtagcccttggaccgccccgtattcttgtcggtgatgaccacggcctcctcgaggtcgccgtaggcggagaatatggagcggagcgagtcggaggtggtctcccatccgagcccccgcacgaagagcttgcggagggccgggtcccggtcggcggcggcgcgcacggcgtcgagcgcgtgcgccgagacgagcgcggcggcagccgcgatgtcggcgagctggtcccgggagagcggctcgaggaggcggaggacgtcgtcgcgggtg

SEQ ID NO: 33148 - DNA, 255 bp, Setaria italica
  Peptide Sequence Number=SeqID_99122
cagaacttccgctcccaatcgccatatcaaaacttcaattgctaggtagccaccaaagagagcgaaggcatgcatggagctcgcaacggcagctctgggcagccttctccccaagcttgacacccttctcagggatgaatacaagttgcagaagggggtgaggggggagatcaggttcctgcaagctgaaatggagagcatgcaggctgccctcgaaagggtgtccagcctgcctgctcatcagatcgatgatct

SEQ ID NO: 33149 - DNA, 726 bp, Setaria italica
  Peptide Sequence Number=SeqID_99123
acgctcatggtcctcacctacgacgagcacggagggtcttcgaccacgtcccacccccgtcaactggcgtcccgagccccgacggcatcgtcggtccgccgccgtacaacttcaccttcgaccggctcggagtgcgtgttccggccatcctcatctccccatggatcgaaaagggaacagttgtccatgggccaaatggaccgacgcaaacatcgcaatacgagcactcatcgatccctgccacggtgaagaagctcttcgacctgccgcaagatttcctgacgaaaagagacgcctgggctgggaccttcgagagcgtcgtgcagacaagaaccgagcccaggacggactgcccagagcaactcccgatgccgacgaggatcaggcaaaccgaggcgaacgaggaggcgaagctgagcgagttccagcaggagatcatccagctcgcctcggtcctcaacggggaccatgagctcaccagcctgcaggacaggatccgggacaagatgaatgtcagggaaggcatcgcctacatgaggggcgctgtgaagcgctatttcgaggccggcatgtcggccaagcggatgggcgtcgacgacgagcagatcgtcaagatgaggccctccctcaccaccaggattgaacgtccatagagacagtgagaaaaatcaaaatgaaatcatatacagtagaaattaaattgatgatgtcaagggtcgcattaca

SEQ ID NO: 33150 - DNA, 273 bp, Setaria italica
  Peptide Sequence Number=SeqID_99124
gaccgtctcatccgcgactgccacagccgaaagcggcgaggaagccggcagcgatgcctcctccgccacctcgtccggcacctccacgacctccgccagcgtcgagcgcttcgccccacgcaacggcggcgacacctccttcaccaccacgtctgccgccaccgccgccgcctcatccgggacccccacggccgccgcaagtgtcgagggcttcgccccgcgcaacggcggggacgcctccttcaccaccacatccgccgccaccgccgcccg

SEQ ID NO: 33151 - DNA, 242 bp, Setaria italica
  Peptide Sequence Number=SeqID_99125
cgcaggtagtggcaagactccattgataaaatggcggtgcccgtcgagatcacacggcgcgcaattatgagtcccaagcccgactgcgacgatgccgtcggccggatggtcccgctcaccgttttcgaccgcgccgccaccgacggctacgtcccagccgtcttcgcgtggaccgcgcaagccgcgccggccaacaccgccgtcgtggacggcctcctcgctaccgtcgcaaggttcccgca

SEQ ID NO: 33152 - DNA, 940 bp, Setaria italica
  Peptide Sequence Number=SeqID_99126
ccgccgcggcggcgggctggaggccgctggcgcccgtgcgcgcggccgcggctgtggcggaggaactcgaggcggaggtgcaggccggcggggaggaggatgaggagttctccgcggatctcaggatcttcgtcggcaacctgcccttcagcgtcgacagcgcccagctcgcgggactcttcgagcaggctggctccgtcgagatggtcgaggtcatctatgacaaactgaccggaagaagccggggatttgggtttgtgacaatgtcttctgtcgaagaagttgaggtggctgttgagcaattcaatggctatgtacttgatggaagaagtttgaaggtgaattcagggccagcgccacctagggagcagtcctcaccaagaggaccaaggggcgaagcgaacagggtctacgtgggcaacctttcctggggcgtcgacaattctgccctcgctaacctgttcaacaagcaaggagaggtcctggaagccagggtcatctacgacagggagagtgggaggtcaagggggtttggtttcgtcacgtatggatcctccgaggaggtcgagaacgcaatatcaaacctcgacggcgccgacttggatggccggcagatccgcgtcacggtagcagagtcgagaccacccaggggacaatactgaaaccccgcttcggatgctcagaaacggtaccatagctcaaaatatggattatagtttcgtgatcagtctttctcttcaggatccttagctgtagtataggtggactccatcatacatgatttggtcttgaccttggtcgagcttctgaagttctcatgtatatggttcgttatgcatgcttgtaacagcggattcccatgctcggtagccctctacagtctctactacattggctgcgcattacgtggcgcctgatcccgtatgtctgattggctttg

SEQ ID NO: 33153 - DNA, 371 bp, Setaria italica
  Peptide Sequence Number=SeqID_99127
gcctcgtcgaacgccttgaagatgatgcggtgcaccacggaggtggtgtccgtctcctgcaggtacgacatgagctccgtcggctcgatcgacggcacgccagggatgtacgtgatcgtgtccttgcgaggctctttgcagttgaagtggccatgcttggtgagcaggtccatgtggtagtagaggctgaagatgagcgcgggctccgtccagaaggacacgtaggggaccccgagcttcctggccagcgtggccggccacacgaagaaggtgtcgacgacgaggcaggtggacggcgggtcgacgacgacgcggcggaggagctcctcgacgtgcgcgggcagcacgtgcaggacgccctccatgaatta

SEQ ID NO: 33154 - DNA, 1746 bp, Setaria italica
  Peptide Sequence Number=SeqID_99128
gctgtttacagttcttggctatgtacaacatacgccagaaagaatggagcaatcagaaaaggcaaaaactggcaacagagaccacaagctgtcttctcttaaaatgataaaaaaagttgaagaaagaagaccacaactcctcaagctgctgtaagtttgagtaactcagagcactgctattaccaaatcaagcggctccaagcgaaatcaaccaatcatttaaaaaaaagctcacaaggacgggcgacctgcatcgtcgctcatcatccctttgaaacttctggccagccagatagcggtttctcgtggagacaccttattcttcccaaacggcttgagaacaatggcgagctcctccaacctttggttctccagcaggtccgcggaaagctccagaagcccttcaagagcctcagctctctgccgaaacgatgtaacatcaagtacttccttagttgggggtgcctcttccttcattccgttactgatctctgatgtggcagcagataactttaccaaagccgaggtaacttgcactgtgggagcagcattggcttctgaaacatgcgatgtagcagtaactgatgaggtgcgtgctggaggcagggtgtttgatgaactgctccttgcatcagcatcttctggtaccacattcaggagtttgatgatatctgtgctctgagcttccctttgaacactttcttgtgttggctgctgctcatcattaacacggaaagtgctctgtcttgtggtctgtgcaacatcatcagctggagggtttaaatgagaaactacatgtttcttccatgactgaagagaaatgggtgactccaacagtgtgctttttgttgctggaataggagcaacttctggtgccaatgaaatagaaggagctacttccaatgctgataaaataggaggggcttctggtgctgatgaaagaagttcttgaaccgtgaacttatcctcaccgctttggaatgtggtgctcttctcatgctggctagattgcgcatcatccttggaaacaaactcttgttcagaactaagaaaggatggctccaaagcagatctcaggattgaaccaccattattagtcacaataatcttgtcagtgctaatttctgtggtgattaggtcatcctcttcgttgacagtattgggtgcagagcctgtacatggtgaaatcaaggagacaggtgaattaggatcagatagttcagagtggtccatattttcagtacaaccaactgtagaatttgagcaagcactgctgtgttccttggttgaaacagagaaaaattcccaaagatttgttgattttgcttgtaaaccatccagtttcatatgctgtccttctgaaggattcatagaaatcattacattacatgaaggattactgagagcattatctgagcaacaggaaggtcgctctggagttttctctctttctattgtgaccttggtataagctcgtcttgtcactgtgactgggaggcttggcgccccgacgccagcttgcctctgagggctagggcgtctagtagcaggtggtgtcttgctcttaatttttcctgaagcaacagcaccattttctgttatcagtttggcaggttcaggagttgatggcccagcagttttgatctttggattatgttcagcaataggtgactgcaagaccggtaccaggagacatacgtaagcaatatatagaaaaagttggtattttcgttactagtaaaaact

SEQ ID NO: 33155 - DNA, 290 bp, Setaria italica
  Peptide Sequence Number=SeqID_99129
aatatgctctattgcagttatactggcctttctataacatgattctcttgtactaactacaaagtgtaggtgccttgctaattttgtctgttgcagctagcgtgtaaacattggatgggggtgttgatgagggtactttggatattcagagggcaatgtaacaaaattgcaatctttgtacttctatacttggtaccacctctgaactttgttcaagtatttcattccggatacagataacgaaccaaaccgactcagtatatggtatattgctaggagaagaatcctta

SEQ ID NO: 33156 - DNA, 290 bp, Setaria italica
  Peptide Sequence Number=SeqID_99130
agccgcacgcgacgatgacggcgccgacggcgacggcgcgtcgccggtgacgaggaagcggagggaccggtcgaagacgatcgtgtcggagcgcaagcggagggtccggatgaaggagaagctctacgagctcagatccctcgtccccaacatcacaaagatggacaaggcctccatcatcgccgacgcggtggtgtacgtcaagaacctgcaggcccacgccaggaagctcaaggaggaggtctccacgctcgaggcgcggccgaggtcacccaggcaggggcagcagc

SEQ ID NO: 33157 - DNA, 358 bp, Setaria italica
  Peptide Sequence Number=SeqID_99131
tcgagcccaaactgcgatagcgaaaaacggcgagccctgcggaagaacaatggcgacaatgtctctcgccgcggcgtcgcccctcacctccactccccgccgccatcggcgcacccgcacctctcacggccttccttggcctccgctcaggtgtcgctcaggctacgcggttccccggactggcgatgtcatcgaagccggcggagccccgcgccgcggcggtggtggcgatggcgaagagagagcaggagctggaggagatccggggcatgacgacggagcagctggaggaggaggttgtggacctcaagggggagctcttcctgctccgcctcaagcgctccgcgcgccaggagtt

SEQ ID NO: 33158 - DNA, 266 bp, Setaria italica
  Peptide Sequence Number=SeqID_99132
gcgagggaaagggtgggggggcgagttgaatacttctattctgaggtgctacctgcttgttctcggtaaaactgacaaaagggtggtggtggcgctcacggctcatgcactctgctgaaagccaaaagagagcgagaggggaaaaaaaaactactggcaactggaaaggggcaggcaggatgtaaaaatctgccgccaggatctggatatgctacactgcacacactgcatctgtatgcgccatgtatgcaaaagtttctatgggg

SEQ ID NO: 33159 - DNA, 1095 bp, Setaria italica
  Peptide Sequence Number=SeqID_99133
ccgcttcctcctccgctccaggaatatagatagccggaaaaaaccagaggaggggaggaggggagcggagggggaggtgcgtggcatccatcgagaatccgggtttcaatcccccacctcgccgctcccaccggcgcggattgcttcccgtggtttgcccaggatgagcgccgaggccggggagctgctcgggatcgaccccatcgagctccgcttcccattcgaattgaataagcagatctcgtgcacgctgcagctgacgaacaagacagacaagcaggttgcgttcaaggtcaagacaacgagcccgaagaagtactgcgttcggccgaacaatggcattgtggcaccccggtccacggctgacgttgttgttacaatgcaagcgcaacgggaggcgccaccggacatgcaatgcaaggacaaattccttgtgcagagcgccatcgtggccaaggagattatgccaaaggaagtcaccggagacatgtttaccaaagaatcaggcaatgtggttgatgaagtgaaattgaaggtggtttatatcacgccatccacccaaagtgagggatttgaggatggttctctgggcagtttgagttatcaagagccatttgctttgatttccaaactgatggaggagaagaattctgctgttgaactgaacaacaagcttcgacaagaattggatcttctgaggcgagacatcagcaggcagcacggtggctactcattagttttagtactggtggttgctattatgggaatactactaggtctcctcatgaaaagatgagtgtgcgtaatgatttgtcttgtttggcttttctttcaagaactgaacaaaattgtacgtgttctctgtgtgtttgctattattgtacaacttcaggtctgtttatcatagcatatgggtgcctattgtaattttctgattcatattataaagtttagtcagctaataagtcatagttcccaaaaaaacccagctgttatcagcttgccatcgacatgaggtttagccttttggatttgaaagattttgactaattgttggaatcgcttttgcacatataaacagaataatttctacta

SEQ ID NO: 33160 - DNA, 189 bp, Setaria italica
  Peptide Sequence Number=SeqID_99134
cacgtttatccttgaggccacgaggacagagtatacaaagcatagttttgtgttttctgggggtttctccattactgttgtaatttcatttattctgtcctttctttaagcaggacagctggaccgagctgatcctcagtaaccttgtcactaatgatacaccaatatacagcagcagagaaatgaaca

SEQ ID NO: 33161 - DNA, 2320 bp, Setaria italica
  Peptide Sequence Number=SeqID_99135
gctatctgtaatgaacacgagatgcccctctttaagagtttgtatcagtttcatttgtcaaatttgaatggtacagcaaattgctcaagtgtggatctttactattggcaaccccaaaaatcttgcaaaatagcagctggccaggttgaagctcttctgcgtgaactcgtagctggggctgtcctttctttcagcaggacagctggaccgagctgatcctcagtaaccttgtcactaatgatacaccaatatacagcagcagagaaatgaacagctacagaatgaacagaataaatgaaattacaacagtaatggagaaacccccagaaaacacaaaactatgctttgtatactctgtcctcgtggcctcaaggataaacgtgcacttcaactacagattgtatccttataccaactccatcagaagagggtctcctttggacatcagccgaatcacctttatgaaatcaatctcattcataactttcacagggaaaacagcaggtgcttgagctgtataaatagttgagaatgttgcattggctggcaactgggtcttgaacactgttccagccagagcatcagagtcaaaattttgaggcgagtccatcgccaagaagaacatcgggactgcaatcttgtgatgcaaatccaaactgccaacaagacccacaagatcaccaaagtcctcaacaaatcgccggggcacatagaagagttcactgccacaaaatgcgatcttctcttcgcccatgttttccttatagttcgtctggaaatgaactggggaattgccaatgacttgcttcaccagtgcaccctgttttacaaaccattcctccttattgctctccagtgggacagtaacccaagaatgtgcaatcttatttgtgatccaaagtttgtccttgtcggcttgcagcaggttccagtagtttagaatcatgtggtcttgaaggaagagaaatccatctgcaccactatatctttcgaagaccttgggcaaatacttataagcgtgtgacagtgtagagcgttcaacagcaagctctgcattgctctgctcagcaagaatgatgaccgtcttgaaaatccttccataaagcagcctccattcaagtgccgtgcgatccacaggcccactaacatgcatgatcatcacaacatttccaaagttctttctccacttaataagatttccaatctcatagttaactgtaccaatctcatcgaccccaagatgcacagatggcagcttcttgggcacaaactccttcatgtcaccctctccaatggttgcccgctgcctgtcaatctccaatgacatgagccgaggctgccgatagcccacagcaagcaggtcctgaagccaagcagctgttaatctaacatcctgctctgtccagaacccttcctcagccatggcatagctcaaatcaagaatcttctcaaacagcgtcctcttgttcgacctccactcattcaggaacttgatcagccgaccaacattcacgtgcagatccttctcctctgcgaatgggtacgcttgaatatgatccttcctgtaaatagttggtggatagaaagccacatatccaccaatctcccacaagatccgttgcgcccagtacccacggatcacatctgctgccattgagctcacagacaccggcatcatgagtccccagaaagctggtgactggaacaatgtattgaacgagttcactggtgccatcatgccctgtggtagcgcgacctttggggcctctgagtcgaacctcagatcaaatgccgaagttggtggcttccgagtgaagtagaacacagcatccacatccggcaacccatctgacagcccctgctgaatgaactgccggccactgaacacttcggtgtagaacacctcatgtgccacctctccaaccttatcgagtggcagcccccgcggccagaccgatcgctggccaaagtgcacgtaggggttcaccaccgtgcgattgggatccgcgtggctgtactggagcagcacggggtggttggtgactccagatcccaaatccacatcgaaatgcttccccagatcgttgcccggcacctcggcgcggtcgtcggcgtcgaagatcaccttggccccgtgctggatggcgaagaggtagcccgccgtcttgcgtacgtgggagccgtagggcaggaagtcgacggagcggtacccgagctgcgcctgcagctcgagtgagaggaagatggcgcccttgagctcccacccggtcggcgtgtgggagtcgccgacggcgaggagctgccaccccttgacgcgcgc

SEQ ID NO: 33162 - DNA, 741 bp, Setaria italica
  Peptide Sequence Number=SeqID_99136
agctggtatctgcttagggacaatagcaaagctcagtgacaaaacattcgggatgcctggctacatatacactataatagcagtttctcttttgtgcaagattgcagcattgaggtcgttttcactggaacgattgcagtactttagggaaagagaatctggaatgagctcgttggcgtacttccttgccagggatacaattgatcatttcagcacagttgtaaagccgatcatttacctgtctatgttctactacttcaacaacccgagatcaacaattggagataactacattgtactcctcgcacttgtgtactgcgtgacggggataggatacacttttgccatctgcttcagccctggttctgcacagctgtgttctgcccttataccggttgttctgactctgttatccactcaaaagagcaccccgatatttctgaagagattgtgctactcaaaatgggcactggagggcttcataattgtaaacgccaaaaagtatcctggagtttggttaataactcgctgcggtctgttgttcaacagtagtttcgatatccacaactacaagctctgtatttgattctgttatgtatctgttcttaggctgtggcaccatagataaccatagtctagttataccatttgttctgactctgttatccactcaaacgagcacccgatagttctggaagagattgtgctactcaaaatgggcactggaggcttcataattgt

SEQ ID NO: 33163 - DNA, 306 bp, Setaria italica
  Peptide Sequence Number=SeqID_99137
ggacggcgacggcgccgaggagctgatgctggtccaggtcacgcggttcaagtgcggctcccttgccgtcggccacaccatacaccacgccgtcgccgacgggcgcgccgcctgcaacttcctcctggcctggggccaggccacccgcggcgccgcgttcgaccccgtcccggcgcacgacagggcgtccctcttcctgccccggcagccgccgcgggtcgcgttcgagcaccgcggcgtcgagttcaagccccgtgaagagaagaagccctgcagaagaagcgacgtcgccgtcgtcgacaacga

SEQ ID NO: 33164 - DNA, 458 bp, Setaria italica
  Peptide Sequence Number=SeqID_99138
ggagacgaaatgccttcatctgaggtcctggactccggaaaagccatcagggcataactaacttctgtgttttttcgtttctgcaagacagtagtctgtacgagcttgtttgcttgggatcccgggaaagcttcctggcacaggcagcgcccccaagcgcacaatttcgtggggcgggttcgagatcgctgcctggcaggttccaaacatactgcacctgactgtctggtatgaacatgatctgatttcttgagtcacaatcattcatgaacgtttccaaaaggagctgttatgcttgcttatcgatcattaggggtcttttaaaccatggttgtcttgcgtcagatagggtgcagcaaattcaattgaatttagtcgcccgagacggtattgtgttgtacagtatctttattctacttagcatttatcttttgttaaaaaaaaaaaaaaacagagac

SEQ ID NO: 33165 - DNA, 249 bp, Setaria italica
  Peptide Sequence Number=SeqID_99139
tcggtttggttggtagtttgattgatctaatgccgtgggtcagttctgtactggcaacagaattttcagatggttgctcatatcttgttaactaattacaacttaaattgggaattacttggtgtacaaagatgccttatttgtgctttagaccagatatactgatgactgtgatagtgattgaaagaaggcatccttaatatgaagtgctggtcaactatttagcgtttacttaatcttcttattggt

SEQ ID NO: 33166 - DNA, 786 bp, Setaria italica
  Peptide Sequence Number=SeqID_99140
tgagatctgatcataccatacccaaagacgggaagttcaagaaagtactctagcagtgcagctaaccaatccgtaaactgagggtccaccaacatttcccagtttgttttagctgtcgcagcttggtgaaacgtaagagctgatgctctagatgagatcagcattctttacagctgataactacttaaccagagtgcctagccgatactatttcctagctacatatatatgttgtaacatcactgctaagggatcaaaactttgcttgattgcgtggttacattgagcattcgtcgatcttgcttttggtcagctgaaatgctggaatcacccaggctccgcagcagcactgcataccggcccagttgaattgtccaagacgagctttgcatcccatgcaaaagagcttattcgcaacatatccttcttccacagtttgcatccacttcatcggctccacatagatgcagggacattcaggttttttgtcatcatcatccacagaccgtttgcctcggttgaagcactttccacccgcacctacttcatgggtaacaacaaattcttgagttgcaagcattctccgacattttttgcagcggtagataacacctggatcagaagttcgtttttctgggttgacatcagattctgcagatgtctcctgacatgtttctgtaggcttttgattaacctccaatcctgcttcccgatcagctttcttgtctgggatgaataatacaagtttaaccaaacctaaaacttaaagttaaagttaaacctaaa

SEQ ID NO: 33167 - DNA, 483 bp, Setaria italica
  Peptide Sequence Number=SeqID_99141
gctgcatagaatgggccgcgaacatacccagaacactaataaagcatgcaacacataaacgtgtctaatgtaataatctttatgagaaaggataggagagcatacagcactgcactgccattattcggaaccaaatccttgccatcacaccaggaaaaggaagataacaaacccttagagtgctgctactgcctactaataaccatagctaggagggtaggtcgggccaccgtagctccctccgttgtactgcggaggagggcccgcagcggccgaagaaccataggatggagcggctccgtatggtggtgggtaggagccgtagcttggatcaactggcggagcaggagggttagaagctggcggtgggcctggggtagcagcttctgccatgaaattctggaccagttgctgggcagtttgaacttgagatgcagtaccaattatctccacagccatctctccaggtgcacctctgctttc

SEQ ID NO: 33168 - DNA, 405 bp, Setaria italica
  Peptide Sequence Number=SeqID_99142
ggagcataaaaaactggagtttcagaaccatgtcaattcatccattttgggaaaaggttgttttgtttgggatcttagactgcagtcacaaccgctctttctggtacaccaggtgggccatcaagtattttgatgcgcgctttagactcctcacacatcttcttgataaactcccctttgcggccaatgatagctcctaccttctgggctggaaccagtatacgaaaaacactctctcctggccaaccaggccatctgttatcctcaacgttaacctgcgagttgtcctgtcggctcgtatcctcaatgctgtatgcattctccagctcttcctggtaagaatttgccggctcctcattgtactgattcccggtttcctcgctgaacaagtttgcctgctcttcg

SEQ ID NO: 33169 - DNA, 583 bp, Setaria italica
  Peptide Sequence Number=SeqID_99143
tagttagacgacaatacgtagaaagttcagcaggtgctccttcacctgcaagacggcgccggcgcgctcgaacacgccgcgcgtcagggcgcgcatctcctgcgcgcgggcgtgctcgaacgcgtcgatgcgccgcgcggagaagagctcggtggcgcagagcttgcgcgccatgcgccagtaggggccgtagggcgtctgaacgatgccctggtagccgtagccgaggatctcgccgaaggccgtgggcgggcggtcggcgaaggcgaggtcgtgggtcttgaggaccagccgcgccgtctcctcggaggaggcgaccacgacgtggaaggatccgaaccggaggtgcatgagcgggccgtggcgcgccgcgagcttcgccaatacgcggtgtggcgggagcgtgtctgctagcaagccgaggctaccgaacaccggccatccccttgggcccggagggaggttcagcgccttccgatggctgcggcggcgccacacgacggagctgagcacgaggaccacgaaggtgataatcagtgccaaagccatggacagtggtagcgtgagctccattgtggaagtg

SEQ ID NO: 33170 - DNA, 252 bp, Setaria italica
  Peptide Sequence Number=SeqID_99144
ccgcgcggcgtccacggacacgacgcggtcgagccgccgcgtgctgatggcgaggccctcgccgccgccgctcccggggcacgccagctgcgggatgctgtgggagtaccgtgtggtcaccttcatcttggtccccgacgcgacggcgcgcgccacggcgcgcaccagctcgccctccgtggacgggtacgcgacggcggcggcgcggcacgtggagcggtccgggaacacgccgtaggcgctggacacggt

SEQ ID NO: 33171 - DNA, 221 bp, Setaria italica
  Peptide Sequence Number=SeqID_99145
cgccaccgcatatggtgggtggccgacctcgtgcgttggatgtcgcgcgccaagcggcggtccgccgagaagcagaacggcggcgacgacgaggacgagtcctccaccgtccagctccggtccgaggcccgcatgaagcctgaggagcgggcgcggagggcagcattggagctccacgagaacttggagcggtgcatcgccagcgtcgacggcagcggcga

SEQ ID NO: 33172 - DNA, 613 bp, Setaria italica
  Peptide Sequence Number=SeqID_99146
cggaggaggcgttggaggacggcgccggcgtggcgagcgacatttccacaggctttcttgaacggttcttgccgcggtgcatgtgcttctcgcagtatttggagtccgggtaggcctacttggagcagcgccacttcttgccgtccgtccgccggcaccgcccgggctccgggtcctcgtcgggcttcctgctgaaccccatcccgaagcatcccaccccagcgagggttgcggcgggaaggcgagggagggggaggtggcgagggcggagtcgaggatgcggcggagcggtggcatgaggtacgaggggatgggcttgccagacgccaggcacttgtagatgagcgcctggtgctccagctcctgccactgcgaggccgtgaacgggtaccgtcccgcggtggcgccgccgcccgcgcgaccgctcatcatcatcatactggtcgatccgacaccggtgggcttctctctccgggatctaacctatctatctctagctagctaaccggaacgctcaccgccggcgggacaccggggaggaggtgatcggagcgcggtgtggtgcggttgtggttttggaggtgtcagcaagacgccgagggctgggacgctg

SEQ ID NO: 33173 - DNA, 225 bp, Setaria italica
  Peptide Sequence Number=SeqID_99147
tttatgcaaagaaatacacttggcttgaaatggactatggcgaaactgataaggaaacaaataagactgagaagaaagattccattactgatcagataaaagagacaaaacttgaaactcggattgcacaattcatatccctgatatgcaatattagcatgatgaagcagcaaatggtggaaataggttataatgctgataactccccccccttggaaagctaag

SEQ ID NO: 33174 - DNA, 305 bp, Setaria italica
  Peptide Sequence Number=SeqID_99148
ctccaccgcccagctctcctggggcctcctccgcccgctcctctgccgctccgacgctctcccgggcaccgccacaggcgtcctcgaggccgccgatgcctggcggaacctcaccctggccgtggccgccgccgcggcagacgaggaggggcgcgcccaaggacccagctgcccggcgtccgtggaaggggatctgggcgcgggccgtgccgggatcccgtgcgggctcgcggagggcgccgccgtgacggtggtcggggtgcctagggagggggcggcccggttcatggtggagatggtgggtg

SEQ ID NO: 33175 - DNA, 659 bp, Setaria italica
  Peptide Sequence Number=SeqID_99149
tcttccattcgttgttcactggtgtgaacctgaggccactgccagcctgagctgagctgaacttcagaagacagcaagagcatcgaggaagaagatggcctctgctaccctgctcaagtcctccttccttcccaagaagtcggaatggggcgccgccaggcagctcaccgcgccccggccggtcaccgtctccgtggtcgtccgcgccagcgcctacgccgatgagctcgtcaagacagcggtgcgttcgtcgtttcttcactagtggccgatcgaaactgtcactatcgccatcttgcttgctgaaagaaataatgatgacatggtgagttgcagaaaacgatcgcgtcgcctgggcgcggcatcctggccatggacgagtcgaacgcgacgtgcgggaagcggctggcgtccatcgggctggagaacacggaggccaaccggcaggcgtacaggacgctgctggtcaccgcgccggggctgggcaactacatctccggcgccatccttttcgaggagacgctctaccagtccgccgtcgacggccgccggatcgtcgacatcctcaccgagcagggcatcgtgcccgggatcaaggtcgacaagggcctcgtcccgctcgccggctccaacgacgagtcctggtgccagggcctcga

SEQ ID NO: 33176 - DNA, 917 bp, Setaria italica
  Peptide Sequence Number=SeqID_99150
ttttcgttttatttttcgttttcgtttttcgttttccttttgggtttcgtttcggtttcttattgtgatgtggctgcagctctcaccccaaggaggaagacactccattcgttgttcactggtgtgaacctgaggccactgccagcctgagctgagctgaacttcagaagacagcaagagcatcgaggaagaagatggcctctgctaccctgctcaagtcctccttccttcccaagaagtcggaatggggcgccgccaggcagctcaccgcgccccggccggtcaccgtctccgtggtcgtccgcgccagcgcctacgccgatgagctcgtcaagacagcgaaaacgatcgcgtcgcctgggcgcggcatcctggccatggacgagtcgaacgcgacgtgcgggaagcggctggcgtccatcgggctggagaacacggaggccaaccggcaggcgtacaggacgctgctggtcaccgcgccggggctgggcaactacatctccggcgccatccttttcgaggagacgctctaccagtccgccgtcgacggccgccggatcgtcgacatcctcaccgagcagggcatcgtgcccgggatcaaggtcgacaagggcctcgtcccgctcgccggctccaacgacgagtcctggtgccagggcctcgacggcctcgccgcccgcgaggccgcctactaccagcagggcgcccgattcgccaagtggcgcaccgtcgtcagcatccccaacgggccatccgagctcgccgtcaaggaggccgcatgggggctcgcccgctacgccgccatctcgcaggacaacggacttgtgccgatcgtagagccggagatcctgctggacggcgagcacggcatcgagcggaccttcgaggtggcgcagaaggtgtgggccgagaccttc

SEQ ID NO: 33177 - DNA, 1271 bp, Setaria italica
  misc_feature (28)..(28): n is a, c, g, or t
  Peptide Sequence Number=SeqID_99151
atacaagaggagaggttagcactaacanctttaaggataacaaatcatcacaatatgttgattgctatgaagctaaacaacaatgtgcagaacagattgtgcagtaacttagagtcttaaagagttgatcttatatctagatagtctgcctgattaagactgctggttaatttgaaacaacactttatagtgatcaaacttttgtgctgtcttatgctttatgtttgcatcctggaagggggaaaaactttatcctttctttatcagccagatgcatttgccttgtttcccatttcttgaatcaataaatttatattgttataagaagaaccaccctcttccaaagctttccttgccttaacaccaaattcctttgctctcatcctcatctcctctgcagcctccccctcatccatcaacttggacactgctatctctacagcatcccttgtcactgtaacctccttttgttcatgcccccattgtgtcactgctttaaccccaacctccactccagttttcagcacatccaccaccaacctctcgttcacaaactggtctgcaaagtgtggccatgtgatcatgggtacgcctgcacagatgctctctattgttgagttccacccacagtgcgtcatgaaacatccaatggctttgtgccacaggatcaatacctgtggcgcccagccccttatgatcaggcctctgtccttcactcgttcttcgaacccctctgcgagccattcctcaacttgtggaaacttatctcctgctttaatcacccagacaaatggcttcttggaagcttccagtcctagtcccagctcagtaagctgctgaggtgcagtgcaggcgaggctgccaaagctgataaaggtcactgaacctggcttcatcgaatcaagccattgcaagcactgtgcctcatccattgaggccttgtttcccctttcagccattgtgtttatgtcctggttacacagacacattggtcccacagtccagaccttcttccctgtaatctgttcaaaagactcaatgtacaaagcctcgagctcttggaagctgttcatgacaacaccggtggattttatctcctcctcgtagatgttcttacggatttgctccagaccacaaacatataggcttccagggcatctttcctttgtcagttgaagcggtgtagggaatcctgggaagttaatgagctcaattactacaatacttacaaaagtagttaccaagttaaagtttagttacaacggtaacta

SEQ ID NO: 33178 - DNA, 307 bp, Setaria italica
  Peptide Sequence Number=SeqID_99152
tttttttttttatttgattaggtcattttattttcacatagagccaaattaaaataatatacacacacacatctctagctacgaaaaccttggcctggccatgggtaaaactacccatcactcaacaacaatgcacactcttattctgacgacgacaacaaatatactactagctctcatataagtgatgataagtttcagacatacacatgcacatgtatcaacaatttagtgtacacacacatataatcaagctggacatgcatggtaatgatgatacacgagattattcgacaaatattatgtt

SEQ ID NO: 33179 - DNA, 335 bp, Setaria italica
  Peptide Sequence Number=SeqID_99153
taccttttgtagaagagttgttcgtcggccacgtcttctagagaataaggatcagggattgccgaagaaatataactagaaaataaccatgaagcagttcgaggatctgccagcgaagatcacccaccctgccgacccggcgcacgagctaaacctcaccgacggcgtgccgttcgtgtgcgacggctgcaaggagcccggctgccagcccaaggtacacgcacgactacgggagccacagcttcgacctccacacgtgctgcgccctcgccaagggcacgatgaggcatcccctcttcggcgacctcgccttcgagttccgcacgaacgccccc

SEQ ID NO: 33180 - DNA, 680 bp, Setaria italica
  Peptide Sequence Number=SeqID_99154
cgcgacgggcaacgccgcaggagctgccagcggtggcgctgcagctgcgaacgtcggagccgccggcgcgggcgcgggtgaccacccgctgacgttcttcatgcacgacatcctggggggctcgcagccgtcggggcgcatcgtgaccggcgtggtggcgagcgcggcggccaacgggcagctcccgttcgcgcgccccaacaccaacatcttcccgatccagggcgcggtgccgctgccgcagggcgccaccagcctcatcaacggcaacaacgcccctacgtcgcggggctcggcggcacctccggcggcggcgtcctcgtccagaacaacggcaaccccgtcaacggcggcaacaagaacatccccttcgtcaacgccggggacctcccctcgggcgtcacgctccagaacctcctcttcggcaccaccaccgtcatcgacgacgagctcaccgagggccacgagctcggcgccggggtcatcggcagggcgcaggggttctacgtcgccagctcacaggacggcaccagcaagaccatcgtgctcacggccatgttcgagggccccgacgcgccgcacggcgacacgctcagcttcttcggggtccaccggatggccgcgcccgagtcacacatcgccatcatcgggggcacaggcaagtacgagaacgccaaggg

SEQ ID NO: 33181 - DNA, 724 bp, Setaria italica
  Peptide Sequence Number=SeqID_99155
tgggacacgggaggagaagatctagaaggctccaaagccaatttgtctcaagtccatggctgagtggatagcgctggccctctccggggttgcgcgggaggcaccgcggcggcgtcaggtttgctgagggtgcggtgggatgacaacgtcttccatatctgggaggaggacgcaaccggcttctgtatgtgccgggcgccatggatgacacggccgcagtcctcctttgtcgtatctttctttaaggattcctatgagatccagttcacatgtgattagaacattagcatgaaatttggaaatgctaacttagcactctcttgaataggtcattctctgatggtgcggctagttcactgtccttttcaccgtccatgtttgctgtctggtaacttctttcgtaattttgtaccccttgtggtgcgcagcatctgttggtacatctacattcaagaatgaccctttaggatttttttagaatgatcctttaggatatgttccattctcgatctcagtcaagatagtatttatgagcagcatagacacctctgcagacaccttgaggttctaaacactactctgacccgcaacccaggtcaggaaccacaccatcaaagagcttcccagagatgcgtaaagaggcgcagttggcaggagttcagggcgccatgtgatgcagtggactaaacaacccgaatttagtactaatagaattacggtagaa

SEQ ID NO: 33182 - DNA, 655 bp, Setaria italica
  Peptide Sequence Number=SeqID_99156
ttactgtggcctacttgcatgtgtagcattttgtccacccctttttcagtgctacatggtttggtctgtttgctttgctggtatttcagcccaattttgttaaataactgtttttgtttaccagcagcaaataaattattgcttatatggttctcatatctgtactcattctgcaggtcatcaaaggattgaagccaacagagcgttgtttgctcctgaagtttgtgacaagctgttcacgagctccgttacttggattcaagtacctgcagccttctttcacaatacataaggttccatgtgatgtaacactttgggcttcaattggaggccaagatgtagaccgccttccatctgcctccacatgctacaatacgctcaagcttccgacgtacaagcgatcaagcacgctgaggagcaagctgctctacgccatcagctcgaacaccgggtttgagctctcgtagaggtagtgtatatgcagtggtgccgtcgtaaccgtgttaaggtttgctgtgaatagaggtatagcgaaatttcatcagatgtaatgaaattagaccgaccaaataattaatacttagttacaattacggaaacaaacaagactacaatttagaaaggttaaacgacgaaataatactaattaccaaga

SEQ ID NO: 33183 - DNA, 1054 bp, Setaria italica
  misc_feature (1005)..(1054): n is a, c, g, or t
  Peptide Sequence Number=SeqID_99157
ggcaaagcactctagtgaggggattctgttggactatactttttcaccggtatttgtgcagaaacttcttgggcggtataatttcttggatgagctatcaacacttgatagctcatcctgagctctatagaaatcttatgcaactaaagcactatgatggggatgttgaggatctatgtttggattttactgtaactgaagagttgggtggtaaaagaatcatccatgagctgagacctggtggtaaaagtacatctgtcacgaatgataataagctgcattatgttcatgcaatggcagatttcaagcttaaccgccagatacttccatttgcaaatgcattttatagaggactcagtgatctcatttcaccatcttggctaagcctgtttaatgcaaatgaatttaatcagttactttcaggcgggctgcaggattttgatgttgatgatctgcggaacaacactaagtatactggtggttatacggtgtcaagtcgaactgttaaactcttctgggaggtcatcaaaggattgaagccaacagagcgttgtttgctcctgaagtttgtgacaagctgttcacgagctccgttacttggattcaagtacctgcagccttctttcacaatacataaggttccatgtgatgtaacactttgggcttcaattggaggccaagatgtagaccgccttccatctgcctccacatgctacaatacgctcaagcttccgacgtacaagcgatcaagcacgctgaggagcaagctgctctacgccatcagctcgaacaccgggtttgagctctcgtagaggtagtgtatatgcagtggtgccgtcgtaaccgtgttaaggtttgctgtgaatagaggtatagcgaaatttcatcagatgtatgaattgccgccaatattatcttgttcattcggaacaacagctcatttgaaggttaacgcgaatatctattccagtacagaagtttgttggcactactcacactgagtcnnnnnnnnnnnnnnnnnnnnnnnnnnnnnnnnnnnnnnnnnnnnnnnnnn

SEQ ID NO: 33184 - DNA, 619 bp, Setaria italica
  Peptide Sequence Number=SeqID_99158
atctacttcaagaccgctcaatatgccatcatctttatgaaaacaagccatgatacagtgccataaaggtggcataggaactgttggaggtctcttggcagcagggcggcactcaactgctttatcaaaaacagcagcttctttggacatatatgatgcatatgctttgctgtctggataatcatagggaaagcatggcatcctgaactttgttgcgatccaccgtctctctcttaggccaattacgtgtgcaccatgagatactagaaaaagccagaaaggtttcacccaactcaaaggtaaaatgatagaccaccctagagagggcataccctttttggcatgtttcaggagaacaactgggcaggatcgactgaagctatccttctcttgtgttgtttgtccttgatcatttccagaatccaggcagaaaaattttatgcgctcatgttgcttctccatacaaagaacctcctctgccacaggaggatttatgctttggctggagtcccacagttctctacagtcagaaaggaatatatcatgctttccaggttgcatccacatcgatgacaacatatttccaacctctgatggcgcctcatcagcatttggaact

SEQ ID NO: 33185 - DNA, 621 bp, Setaria italica
  Peptide Sequence Number=SeqID_99159
cattttcattgctggtgcagatactcggatcacactgagagtaattgttagtgccagcatcctaagtaaatttttcactgcagcaagtccatgtatgtacagaaagcctgttctaactatgagaagtatcccctagccagatgaaggacctggagttccatttgatagttgagatgtctctgtcagcttctggccacgaggccgcttcttttttccatttgctgaagtatcttgcacagttccattcggcttctgtggtacctggaacatctgctggtacatcactggcatcaaaacaccatttccaaaagcatgcgggtcaacaccactcggtaccatatacacaatgcttggccgaattgctgcttgattggctacaaattgctggacattagctggcactccaatgtagccagcaggaactattcctctttctgctcctcccttttggatttgtgatgcttgcatgacggcaggaggctcaggtcctttgggggcagcatttcctttatcagtagctgcatccaccacattttgaccagtcactgtatttggtttatttactttaggaacacgagacttgatccttggttgtgtatcatcatgcgtattgctattgag

SEQ ID NO: 33186 - DNA, 250 bp, Setaria italica
  Peptide Sequence Number=SeqID_99160
cgctgccaaagtttttcggtttgataggccgcatgctcagccgcttcctattcctggaggatgccctcgagcaaagcgtacagtttctgaagtcattgagtcaaagcccatattggaaaagcgtggcaaaccaccgctgtttctgccacttcctaaacctgatccgcttcacaaaaggcctggaaacagtgagattgcttcagaaatagtggttgcttctgtctcgagcaactgttctgctgataacgag

SEQ ID NO: 33187 - DNA, 516 bp, Setaria italica
  Peptide Sequence Number=SeqID_99161
agaggattaccgccttataaagctcaccatcattgatttttaagagcaagagagagaaggtgcttgtggtggaatgcagaggccatgatgctgctcgattacaaaacatcgaccatttgcatgggtgggaagatgacattgttggtttggttgaaaaggaacatgggaatcagaaagtcttgctctctttcgaatgtgagacgctgaaggctgataaagacgcggaggatcatattatcaaatatatgccaaacctacgtggactggatgcagttgtaaatataggaaaaatgtgcatcaccggcatcaatctcaatgaggacgatgaaccaagaggagataactgagagcagagacactttgccagggcgaccggtgttcactgttccccctcaggcctttctgtgttgagtcactggtaaactactaggcactggttaaccatcaaacgttcacactgcactaacgccatcacgcggcgttgtccgctgctgcatcctgtgcaaatcccaaggc

SEQ ID NO: 33188 - DNA, 415 bp, Setaria italica
  Peptide Sequence Number=SeqID_99162
gcctccgcatccgcctccacgagcgcatccgcgtccgcctcggggaccagcagcgccgcccccttccgctccgcgtcgggggacggcgccggagcgtccgggagcggtggtggcggcggcggcggcggagcggtggacgtggaggcggtggagaaggagcacatgttcgacaaggtcttgactcccagcgacgtggggaagctcaaccggctggtgatcccgaagcagtacgcggagaagtacttcccgctggacgcggcgggcagcgagaagggcctcctcctcagcttcgaggacaccgccggcaagcactggcgcttccgctactcctactggaacagcagccagagctacgtcatgaccaagggctggagccgcttcgtcaaggagaagcgcctcgtcgccggggacaccg

SEQ ID NO: 33189 - DNA, 179 bp, Setaria italica
  Peptide Sequence Number=SeqID_99163
cggtggattccctgcacgggctcggcgacggcggcatctgcggctgggggttcgacgcggcggtggatcagatggacgtgcagggaggagggttctgcgatctgctctccatgaccgagttccttgggatcaactaggtgtcagagtgttcttttccaacggttcgtcgcgaagcattc

SEQ ID NO: 33190 - DNA, 287 bp, Setaria italica
  Peptide Sequence Number=SeqID_99164
gtggcggacgagccagccgcgggaggtgccgaggacgatgacgtcgctgccggcggccatggaggtgacgacgccgtggccccgcgcggcctggcgctccagggggtcaacggagaagagctggccgccgccggcggcgtccatggctggcgagctggtcgggggcgatgcgagattgggctcaggcagaggggctgtggttgagggagatgaggtcgccgggcggaggcagtaggtcgccggcgccgaagctcgctagtcgcgaggggcacgggatcgctgccgct

SEQ ID NO: 33191 - DNA, 550 bp, Setaria italica
  Peptide Sequence Number=SeqID_99165
aggccggcgggccagcagggaggcccggacgggcagggcgtgatgctgggcgacaactcctggctcgccagcctcgccacgggcgacgcgtcgtccgcgccgccgacgtcgaggcccgtgttccgtgccttgcccctcgcgccggcgctcctcctcctcggcctgctgctatagcacccgcggcgcccacccaaccaaacccatcacaacaagtgaggcgaacgtcttggccaaaagcagcgagcgtcgcgcgcgcaccggcgcacgggccaccggagcaaagcgaggtggctccgcgtgccgcggtgccgatgcggacgccgagccgctggatggaagggtggttggtgctgcgcgcggtgcggcggtggggctggccgggccgggtttgtgggtgcgtggggatgatatgatttgatttgaccaggatcgcataacgccatttgtaaaatccgccaccttcttcttcttcttcttcttggggtttgtgccgttgtgttaaagggaaaaagaaagaaaaggaaaatagtaaacaaaaagaaaaaaaaaa

SEQ ID NO: 33192 - DNA, 387 bp, Setaria italica
  misc_feature (62)..(62): n is a, c, g, or t
  misc_feature (69)..(69): n is a, c, g, or t
  Peptide Sequence Number=SeqID_99166
atttattggttgaatgatgcgatctttggctgcctgagttaggaggctacggtgcaataatntcttgcnggtactggtatcaacaaccaaagaagagtatctgagttagacctcagtaaagtttttatgggagatagtatcttctgagattagtagtgctgtagcctataattttatttgattcatgataccacaaagtctgatataagctatgaagattttcttatcaagaggtcaactatgaagatgaatattttgatgtggtcttgtatatgccatagaagtatctattatatactctgtttttgatccagagtatatgtgacgcttatcgagaatgctgttcattttctgatagtttgtctcttgtcttttccagaggggggc

SEQ ID NO: 33193 - DNA, 425 bp, Setaria italica
  Peptide Sequence Number=SeqID_99167
cgaccaccttctctagcactggtctctggtccatcctggatgcccttccacacctcatcaacagtcttcttgctcagctgcggaggcatcacaatgctcccttgtcgctgcaggctcgatgctggatcaggcttgcctatgacagggccattcgggtctacaccgtcaggaaacacggtcttcaggaggtcatcgaaattcatgctaagcaatggctctcccaaaatggttctgcacctcatccagggtaaggttgtataaagaaccctgtcttgccaaaccctgaatctgcccgcgttgcgccgagccagcatccccacctccgccacctccagcctgtgatgccattgcctggatcatgaaccagggacggaccctgtatagcagtataggacatggatgtacacatgtacacccaataattt

SEQ ID NO: 33194 - DNA, 672 bp, Setaria italica
  misc_feature (672)..(672): n is a, c, g, or t
  Peptide Sequence Number=SeqID_99168
tctgatccgatgccccaagtgaaggctacccctgcgctgatgagcaggctgctccccgcacccgcattggtgaagctcagagcctgtggactctacagtcatggccatttcccctcaacgtctcgtatttcttgctcatcagagttatcagatagaggttctgccaaggaggttgaggcgttcgagtacagtggtgagacatgtgccaagaatgcagctgatggggatgaaggagagtatttaggatggagcaaagaagagattgatgccatttccgcacttttcgatcggccaatgcgtcagaagcccctgaagccaccaaaccctgcgaagcagcgggcgctcccattgccactaccgcacaagacgaggctgcctgttgctccggcgcccaagcagcacgtccggcttgccacaagagtggcactgtcgtctcgtgcttccttcagcgaccaggtgcgcaagaacccggagttcctactcgggattgctcgggagattgccgcgattcctccagagcacggtgtctccacggtgctcgaccggtgggcaaaggttcctccgaaaaaaggctccttgtcgctgaccatccgtgagctcgggcatatgggactccccgagcgcgcgctgcagacattgtgctgggctcagaggcagaaaagctgtgccatn

SEQ ID NO: 33195 - DNA, 1244 bp, Setaria italica
  Peptide Sequence Number=SeqID_99169
tttttccatgcatgtgacacagaggttgctaatattgatgttaaacaagagacaccagttggccatggaaaggtcacgtgctttagcatatactctggcacttctggtgctgaagctgattttggaaatggcaagacatgcatttgggtggatgtgctggatggtggacaggatgtccttatggagtttgccccattttttgaagattcatcaatcaggaagatttggcacaattatagtttcgatagtcatgtcatagagaactatggaattaaagtttctggatttcatgctgatacaatgcatcttgcacgactttgggattcgtcaagaagactggatgggggatattctcttgagggacttacaaatgatcacagggttatgggtgttgttccaaaggaattgcaaaagattggaaagcgatcaatgaaaaccatctttggtaggaaaaagataaaaaaggatggatcggaaggtaaaattactgcaattgagcctgttgaaattttacaaagagaggacagagagctgtggatctgttattcttcactagattccatgagtaccttgaggctttatgaaagcttgaaaagcaagcttgaaaggaagccctggacttttgatggtgttccaagaggttcaatgtacgatttctacgaggagtattggcgtccttttggtgctgttcttgtcaaaatggaaacagctggaatgcttgtcgaccgtgcttacctttcaaagattgaaaaagttgctgttgcacagcgcaaattagctgctgataaatttcggaagtgggcatctaagtattgccctgatgcgaaatacatgaatgttaatagcgatactcagattcgacaactcttctttggtggtatagagaacagatgcaaacctggtgaatttttgccaacgagtaaggctattaaagtgcctaatgatgaaactgcagttgcagaaggcaagaaggttccaaagtatcgcacaattgaacttttcagtattgtggaagacctcaaaactgatatattcacagctagtggctggccttcagttagtggggatgcattgagaaatttggctgggaaagttccttcggatcttgtttacacgacagatgatgtaaatgatgatgaatgtggttgcgaggctgaaatttctgattgtgatctagaagacacctcctcttatggaactgcatatgaagcatttggaggaggaagaaaggaaaagaagcatgc

SEQ ID NO: 33196 - DNA, 1180 bp, Setaria italica
  misc_feature (583)..(583): n is a, c, g, or t
  Peptide Sequence Number=SeqID_99170
acgttttggaaatagcaaggaagaaactgaagatctgccatcagaatttgctcatccgatgaagaaagcaaatctttcggttgctgaacttctagaagatctacagggtagaagtagctctcctgtcggggcagcatcgttgcgccgacacacgggagctaaagattggaccgcttccgagaagaaaactctagctattctgggagagaggagtattgacagtgaggatcccttggagcatataactgatggaacatctagtgaggaggaagatgttactgaaaaccacttggctttggtgaacaaagatgtgaagcaccaaactatggctgacctattccaagaagttttcgatccatcaaacctggaggttgccatgcttccaatgagatccactggggctggttatcatggaaggatgcaacagattatgcagatggaaaaagataggcatgcagagttcgtgagacagtttaatatagagcaaggttatttaggtggtgctgaattagctgttatgaatgtctatggttttactagtagtagcagttggtaccacttctatgctccataggcttcatcngtttgtacacatgtatttcagaagtactgacagttcatacttgcaggtgattcaaagggaattactgttcagattatgtcaaggtcgttggaaggaaagctaacagtctgccactgcttgttccaggaaaagagtgattctaccattacacgtgaagcctcaacagaccatgctatgagtgaaagcagaactatgtgaccattatatttagtccaaagatatgtgacaatgtggatcttctaggtaggaaaacataattcgcatcttccaccatggaaggaaattagattacaagaggaggacgtgatcctttgcacctacttttcgcatcatggggcatgattgtggagattctactgcactgcgagccgacaagcttaaccgtgtctgaagtcatggtggttgccaatcaaacgctgcctgctggttgcttagaacccttagatgttgttcatgtactaggtgattcgaacaatcggtacagtttacaatccgaagctgttgtattgttgagccgttcatccctgacgagcgtgtggagcataggtgctgatgttgatctcactgtggctttcataccagagcctgtttggctgt

SEQ ID NO: 33197 - DNA, 215 bp, Setaria italica
  Peptide Sequence Number=SeqID_99171
gtcacgagctgagagggcgatggagggcggcgccaagacgacgcagcaccacttcgtgctgatccatggcgtctgtcacggcgcgtggtgctggtacagggtggccaccgccctggaggctgtcggccaccgcgtgacggcgctagacatggccgggtgcggcgccagccctggccgcggcgaggaggtggcgtcctgaggtgtacagccggccg

SEQ ID NO: 33198 - DNA, 460 bp, Setaria italica
  Peptide Sequence Number=SeqID_99172
accgcgcagaagaactggaagttcaacgtcatccagactggcgtgcaccacgccgttaacccggacccctacagaggcgccttcggctccgacgctgagaagtacgtgcgcgacgtgcaggagatcatcgagttcggcaccaccggccaggtcgccggcttcatatccgaagccatccagggtgtcggtgggatcgtggaggtgtcgccggggtacctgccgctggcgtacgagacggtccggaaggccggcgggctctgcatcgccgacgaggtccaggcggggttcgcgcgcgtcggcagccacttctgggggttcgagactcacggcgtcgtccccgacatagtgaccatggcgaagggcatcggcaacggcatccccctgggcgccgtggtgacgacgccggagatcgcgcaggtgctgacccgccgctgctacttcaacacgttcggcggcaacc

SEQ ID NO: 33199 - DNA, 377 bp, Setaria italica
  Peptide Sequence Number=SeqID_99173
gtaagaggttgaatttagtttgctggtaaagaagccgtgtgtttgaccctaacctccttggattttaaatcctggcctttcagcttactttgttcaacctccccaaaggaaatcttccttcaaattcttcgcatcgctcttgcagaagcctaggtgcggtaatcgaggactcgacaaatgacttagtcattttaacaagacggttgcgatattcaccagagattgtaatatcctgcccaaggtgagcgatgatatcagcaagcaccgagccgagctcctcctcccgccgtgcctcctcgacgaacaccaccgaatccagcgcgacccggctcttctgcggcggcaaggttcgtaccccgtactaacgtaattacgta

SEQ ID NO: 33200 - DNA, 189 bp, Setaria italica
  Peptide Sequence Number=SeqID_99174
ggaaatatttagatttccattcgatgtgtatgaccagtattctttcacaagctcgcggaagagagatccttctgtttccatgagcttcataggtctttcatactccactactttcccgtcactcattgcactgttatcacggtcgcacatcgtataccaaccgttatggactgctccactactttcccg

SEQ ID NO: 33201 - DNA, 336 bp, Setaria italica
  Peptide Sequence Number=SeqID_99175
aatagaaagtcaattttctgcttctaaaaaacattttttaaaaaggatatttcagttccgagcttcagatttattgttcactgttggaaaacttggtagggaactgatgcagaaagggctaaattagtgaagagaaaaggttttgtcacttataccaattaccaacaatatacttggtttcagccatactgtcctcattcagtagacaagtatataaggggatcactgtatctctactaaactagtgagaaagaaacataccgtcactcattgcaagtaccatggagcagtccataacggttggtatacgatgtgcgaccgtgataacagtgcaat

SEQ ID NO: 33202 - DNA, 652 bp, Setaria italica
  misc_feature (617)..(617): n is a, c, g, or t
  misc_feature (629)..(629): n is a, c, g, or t
  Peptide Sequence Number=SeqID_99176
ccccaagagaaaccatcgctaatgatctagatagcaagaagaacatcgtacaaactccaatagcgatgtaaacagaaatcaacttcagtgtactaataccagtactctggacattagctgccatccatgaattctgtgatatttgtccagctatgaaaaccaagtgggaaataacacaaagagaggcatataagtagcctttgctctgacacaggtatatgatataaggcttgagacctgtatcaccaatgtccctttcttctgtcttgatcagttgatctgctggtgatttcttcaaagtctctctatatctgcttccatgagaatcatttgtctccttgattgatatttcctttgctctgttgggggttactttgttaagatctgagccaccaatagtatctttgtgggcatttacaaggttctgaaattcttgacaatatgctaaaagatcttcataagatgcagatcgaataatttcaccatctgacattaacagaatggaatcaaacacaggtagaaaatcaaacttggtgagtcaccaaaagacagtcttgtctgatagagctcccatgacatattcattaaacagacttgttgctgtgtgggcgtcaacngcactgaaaggntcatcaagaagatagatgtctgc

SEQ ID NO: 33203 - DNA, 405 bp, Setaria italica
  Peptide Sequence Number=SeqID_99177
cccttatagttatagcccctgcaaccgattcgcccaagtgattagccagggcagatttggtagtgccattgatcctcatcaattccttagctgacgctaaatagtacctctgcaacctgattgccaaaactatcattggcactgagatgaacaaaacttgccaggtaacaacagccaatactcccagattgctatatgcatttaagctggcactaatgctaaacatgaaggcgaatggaacatcaaggtcaacaatactcaaatctgaagaaaccctactaagtacccttcctaaaggggtagaatcaaaaaaggacattggtgcacggaataatgagttgagtaactgtgaaaataaggatcttgctatctagatcattagcgatggtttctcttggggttcaa

SEQ ID NO: 33204 - DNA, 3344 bp, Setaria italica
  Peptide Sequence Number=SeqID_99178
attaagaaaaaatagtccagtgccgtaggaatagttgtttatttttaaaccaagatggttctcaacaaggatgcatactcaacaagaaaagaattgccaccaccaccatagaaataccatgcatatggctccagtcacagaacgaacaaaaaccgagcacgagggagctgagaaaactttgttgcaaaaattttatatacaccgtgatttattagaaatcgaagatacatcttaaagtttgaagtataccaaaccatggctgcagattccaagtgcctcctatcagcatttattagcttactattgcagggaaaaacaagctctgttcaggacccagcaaccaccatggaaacaagttgcccgcacgctgctcaaaatttcaggcagaaatctaaatatttccattcgatgtgtatgaccagtattctttcacaagctcgcggaagagagatccttctgtttccatgagcttcataggtctttcatactccactactttcccgtcactcattgcaagtaccatggagcagtccataacggttggtatacgatgtgcgaccgtgataacagtgcaatccttgaactctgtcctgattgttttctgaagtatagcatcagttgcattgtctatagaagctgtggcctcatcgagaactaatatacggcatcttctcaaaagtgcgcgtcccaaacagaagagctgcctttggcccatgctccagttcgacccatcttcgacaacaagtgaatccaatccctgttccttctcctggacagcttcaagcaactgacatttgtcaagaacctcccatatttgctggtctgagaactgcccaagtggatctaggttatatcttatggtaccatgaaaaagtgttgggtcttgtggaatgatgcccaaacgagaacgcagatcatgtaaccctatttttgtgatgtctacagagtctattattattttccctccagctggctcgactagacgaaacaatgcaccaattaaagttgtcttgccacttcctgttcgaccaactatgccaatcttatccccaccttcgaatgtgcaagtgattccatgtagtacaagaggagcatcttgtctatacctaatcttcaaatctctaagctccaccctgccagcttggggccagtctggtgatggccgattttcttcaatactctctgccgcttcacttggtatgtccatgtactggttcaccctttccacagagatgatttgatttgcaagctggcactgattttggatggagaaaacaaaggacatatttaaggacaggccatatgacaatgccattcctacaaagccagggctaaaagttcccggaggaagaagagccatgacaaaggcagaaaaggaaagaactgcagcactcattgtctccagacgttgaatcagccattcagttgctgcgaagttatagaagtatggaccagcattcttgtctacaagctccaaatttttttggaagaaacgatcctcctcctcaaaggcccttatagttatagcccctgcaaccgattcgcccaagtgattagccagggcagatttggtagtgccattgatcctcatcaattccttagctgacgctaaatagtacctctgcaacctgattgccaaaactatcattggcactgagatgaacaaaacttgccaggtaacaacagccaatactcccagattgctatatgcatttaagctggcactaatgctaaacatgaaggcgaatggaacatcaaggtcaacaatactcaaatctgaagaaaccctactaagtacccttcctaaaggggtagaatcaaaaaaggacattggtgcacggaataatgagttgagtaactgtgaaaataaggatcttgatgtctgaaccccaagagaaaccatcgctaatgatctagatagcaagaagaacatcgtacaaactccaatagcgatgtaaacagaaatcaacttcagtgtactaataccagtactctggacattagctgccatccatgaattctgtgatatttgtccagctatgaaaaccaagtgggaaataacacaaagagaggcatataagtagcctttgctctgacacaggtatatgatataaggcttgagacctgtatcaccaatgtccctttcttctgtcttgatcagttgatcctgtgtggttctactttttccttaaacgtaacgttcgtctccttgattgatatttcctttgctctgttgggggttactttgttaagatctgagccaccaatagtatctttgtgggcatttacaaggttctgaaattcttgacaatatgctaaaagatcttcataagatgcagatcgaataatttcaccatctgacattaacagaatggaatcaaacacaggtagaaaatcaacttggtgagtcaccaaaagaacagtcttgtctgatagagctcccatgacatattcattaaacagacttgttgctgtgtgggcgtcaacagcactgaaaggatcatcaagaagatagatgtctgcattttggtataacgcacgagcaagctgaacacgttgcttctggccaccactaagatttacccctctctccccaatttgagtacggtctccatatggcaacatttcaaggtcctttactaaagagcacctctcaagcgtttcttggtatttttgcttgtccattgaagatccaaagagaatattgtctttcacagttcctgtttggatccaggcgttctgagaaacatatgcaatttttccacaaacttgaatcgtgccttcagttttcgggacctctccgagaactgcagccagaagtgttgactttcctgatcctacctcaccacagattgcaaccttctctccagctttgactaccaaatttagattctttagagttggttttgatgggttgtcatcccacgagaaactgcaggagtttatcactattggaaactcagtgcccgcacagtatttcttcctaacttgtccattcagctcaggtgcatcaagaaactttgttatcctagtgaaagcaactttagcttgtatcacaaccccaataacatctggtatctgcctaattggatcttgaaccaggcggagagttgctacaaaggtgaagacgttgctagcatcaagaggaattttcaacagatagcatgccaggaatgttgcagctgaaaccaaaacaggtgatgaccagaacaggaaactgttgtatgctctcctaagctggaatgctgacagccacttgtattcaacctctcttaatccttcaatgaccttcttgaaatgagcttcccatgcataaagtttcaagaccttcatatgaattaagg

SEQ ID NO: 33205 - DNA, 512 bp, Setaria italica
  Peptide Sequence Number=SeqID_99179
caggaccgcgatgacgttgcccttctgcatcgtctcgctctcaggtggcggtgatttcagagtgtcctgtatttccagtaggactaaggtgtacgggtaggcgaacgcgatgtcgccgattgcttgagccactcgccaaactttctgcgccggcgtgctcatcggaacgccggcgatgcttcctttgatcgtcccattttctatggtcttggcgagtccgaggccgagcccgatggtggcataggtgaaggacatgatggcggcgacgacggagagccacgtcatgttgtggaagttgggtatgaaggacagcaccagctgcgctgctccgaacagcagcatgtagaagtgctcgtcgtgtgcgtcgcagggggcgctgtgttcgccttcatacccaacttccacaacatgacgtggctctccgttgtcgccgccatcatgtccttcacctatgccaccatcgggctcggcctcggactcgccaagaccatagaaaaatgggacgatcaaag

SEQ ID NO: 33206 - DNA, 1181 bp, Setaria italica
  Peptide Sequence Number=SeqID_99180
ctaaacatctggtatccacctagcaggtggagcacgatgcaggcattggcgaagtctatgagccagtagggctcgtagaagccgaagccggtgaggaggttgcccggagcggcgttgccgaaggcggcgtacccgaagcaaccgacgccgaggtagaagaaggtggtcgccaggaccgcgatgacgttgcccttctgcatcgtctcgctctcaggtggcggtgatttcagagtgtcctgtatttccagtaggactaaggtgtacgggtaggcgaacgcgatgtcgccgattgcttgagccactcgccaaactttctgcgccggcgtgctcatcggaacgccggcgatgcttcctttgatcgtcccattttctgatacaagattggcgtccatgattcaagagctaattttctgaatatgcttcgtcagctcactggaatggatcgatcaagcacgttacctatggtcttggcgagtccgaggccgagcccgatggtggcataggtgaaggacatgatggcggcgacgacggagagccacgtcatgttgtggaagttgggtatgaaggacagcaccagctgcgctgctccgaacagcagcatgtagaagtgctcgtcgtgtgcgtcgcagggggcgccgtgcccttcgttgtggtagcagttggccctcttgatcgccctgagacaagtcgcggtagtgatggtgtaagcaattgcagtcccgtacaggttcaagtactggagcaagccacagagccaggtgcgcttctcccctaggtgcgtcctgacggcatccatgtaggtgtagttcctctgccttttctccaagtcaggggatctgtagcagtgggacagcaggaaggccgagatgtaggtgacgaaggcgaagcagaccatggcgacggggccgccgacccatcccagctgcgcgacgctccacgagagcgcgagcacgccgcacccgatcacggcggtgatgatgtgcgcgaagcacgtccatagattcccggtgcgcggggtgtggccatcgtcgtcgagctcgggggcagcggcgagctccagggagtggctgccgtcgtgagccattgacctgctagcggtgttcagagctgcagtgtttgactcatggaaggactagggagggaggaggacgagcatgagctactgagataactcgtctctg

SEQ ID NO: 33207 - DNA, 338 bp, Setaria italica
  Peptide Sequence Number=SeqID_99181
ttgcctgctaaagttagccagcctgctaaagttagcggcagaggtagccaagtcccagaaggcgcagaacaagggcgcagtccagaagggttccaagggccccaagctgggcggtggtggcggcaagcgctgaagagctcaaaagggtgtcgtcgtactactgtcctgtttcgccatagcctcttttgtaaaacctcggttaaattagcaagacttggtttgtttcagtgctgttgcctcaggatgttgaaataccatgacttcgcaagacttggtttgtttcagtgctgttgcctgaggatgttgaaataccatattcgttcgtcgtcatggtattt

SEQ ID NO: 33208 - DNA, 530 bp, Setaria italica
  Peptide Sequence Number=SeqID_99182
ttgttttgtcgtagtacccttttcgtaatttggtaagtctactacgtctacttctaggtagttttgttgtaaggttttctttgtaagttcgtagtaagtattggttgtcttgtaagtacggtaacttttgtccgttttcagttggttcagaagtatttatccagggaaaggcatccgcttcattcgtgctgactctcaggtgttccttttgcaaactcaaaatgcaagcgctacttccacaaccgcctgaagcctgcgaagcttacctggacagcaatgtacaggaagcagcacaagaaggatatccatgctgaagctgtcaagaagaggcgtcgcaccaccaagaagccgtactccaggtcaattgttggtgcttccttggaagtgatccagaagaagagagctgagaagcctgaggtccgtgatgctgctagggaggcggctcttcgtgagatcaaggagcgcatcaagaagaccagagtcattcagatcgtgcaatcgtatgttgctcttgtgccctttcaaaggcc

SEQ ID NO: 33209 - DNA, 511 bp, Setaria italica
  Peptide Sequence Number=SeqID_99183
gccaaaatgaggtgttgtcaattttatttgatggctgtgcgacaatgctgagttagcagcaattggtgactacaaatgctattggtttctgccatgttgttttattccttatgatgctgttattaaatgtgtaactacaggacattcacgctgaagctgtcaagaagaggcgccgcaccaccaagaagccatactcacgctcaattgttggtgccactttggaagttatccaaaagaagagaagtgagaagcctgaagttcgtgatgctgctagagaggctgctctgcggtatgttttccatctttccgcagagctattccttaaatttattatattctggtatatgaattttgaactagtaaagctgatactgctgttatttatcctccttctgccacattgttttagtccttgtgcacgaaaactattttgcttactgtaacttgtatttttccatggtcctgctcagtatttatttgatgcgtaaatttacagtgagatcaaggagcg

SEQ ID NO: 33210 - DNA, 900 bp, Setaria italica
  misc_feature (830)..(900): n is a, c, g, or t
  Peptide Sequence Number=SeqID_99184
agaaaccctcgcggagcaacgaaccccacctgctcgctccctcctctccgccgccgccgccgccgccatcgcctcgcggccgcctgcagctccgctcccaaggagtttgtgaaggtttcttgaagtcgagaagatggtgctgaagacggaactttgccgtttcagtggtcagaagatttatccagggaaaggcatccgcttcattcgtgctgactctcaggtgttcctttttgcaaactcaaaatgcaagcgctacttccacaaccgcctgaagcctgcgaagcttacctggacagcaatgtacaggaagcagcacaagaaggatatccatgctgaagctgtcaagaagaggcgtcgcaccaccaagaagccgtactccaggtcaattgttggtgcttccttggaagtgatccagaagaagagagctgagaagcctgaggtccgtgatgctgctagggaggcggctcttcgtgagatcaaggagcgcatcaagaagaccaaggacgagaagaaggcgaagaaggcagaggtagccaagtcccagaaggcgcagaacaagggcgcagtccagaagggttccaagggccccaagctgggcggtggtggcggcaagcgctgaagagctcaaaagggtgtcgtcgtactactgtcctgtttcgccatagcctcttttgtaaaacctcggttaaattagcaagacttggtttgtttcagtgctgttgcctgaggatgttgaaataccatgacgacgaacgaatatgggtttttattctggagaaatgtttgccggtcgtatgcatatcatgtggttcttttaacaataaaaaaannnnnnnnnnnnnnnnnnnnnnnnnnnnnnnnnnnnnnnnnnnnnnnnnnnnnnnnnnnnnnnnnnnnnnn

SEQ ID NO: 33211 - DNA, 317 bp, Setaria italica
  Peptide Sequence Number=SeqID_99185
ggaatggcagccaagcttcgtgacgcaatccttggtgctcaccaagaggtccttcgtgaacatgtacagggacgtgggatactactggttgcgcttcgccatttacatcatgctgtgcatctgcgtcggcaccatcttctacgacgtcggaaatagctacggctcaattcaggctcgtggctccatgctcaacttcgtggccgctttcctgaccttcatggccatcgggggcttcccgtctttcgtggaggacatgaagatcttcggacgtgagaggctgaacgggcactacggcgtggcctcgttcgcaatcgcca

SEQ ID NO: 33212 - DNA, 493 bp, Setaria italica
  Peptide Sequence Number=SeqID_99186
gactaattgcgaggacgactagaaaatgttacggctattgaccattagtttttcaactttatagtttattaaaaaaataatctacaatgttgatagaactatggcaccctagttgctgtcaagaatattttcttacatgaaagtcctttggtacatctgttctggaatccagtatgttgatgtcccttttccgaaaagtatacattcacgttcaagatttaaagtttggctatgaatacatcggcaattggtgataaagttcatacttatattctatgataagagactgttttgttatgaccgatgtagcattttctcctaatttacatttggtgttccagaaaagttcgcagaagtactttctcaattattctcccgctttacccttttatttcagctgctggagttgcccttattttcccccaacttttccatttccgtttaaaaggctttgctgttgtttttatcaaacacatgttgtgttgttatcaaa

SEQ ID NO: 33213 - DNA, 398 bp, Setaria italica
  Peptide Sequence Number=SeqID_99187
cgggcttcttctcgccgctgatggcgatgaggtagctcctgccgacccacccgatccacccggcgatgtagaggagtccaagatcatcctcgatcgcgacacccagaggtcccgcggcttcggcttcgtcacgttcgcgagcgagcaggcgatgcgcgacgccatcgaggggatgaacggcaaggagctcgacggccgcagcatcaccgtcaacgaggcccagtcccgcggcggcccgccgccgagaaggaaggaagaggaggaggaaggagcaggcggagatgggccactccaacgtgtggaactcgcaccccaagaactacgggcccggctcccgcgtctgccgggtctgcgcgaaccctcatggactgatcaggaagtacgggctcatgtgctgc

SEQ ID NO: 33214 - DNA, 381 bp, Setaria italica
  Peptide Sequence Number=SeqID_99188
ggccgcatgtggtgcacttccttttctatgagttttttggtttagcctacgagaagatgtcggtgctctccattgacatgagcaccaagaccatggtgtcatgttatctgtatatgaatgggaatgagatccttcgccgtggcgataagtgctgtcaacccgacgtcgacattgacttcgtcatatcaaagtgcttggctccctctccattgcccttccctgcttgtgagttccccaggttctgcaatttatcaaggaagaggaaggatatggaataatgagtcacggctgccaatagtacttcatcctacttgtcgtgctttcttctaaatggtcaaaactgaagaaaggcttctgtcctgatctctcgtacaacaaaac

SEQ ID NO: 33215 - DNA, 394 bp, Setaria italica
  Peptide Sequence Number=SeqID_99189
ttagattgctccccccttgtaccgagcccaagtttgattattgccgcagcgatcaccgcctaagtcgtcgaccttccaatgttactcctactccccgcctgctgaatatgatatccttgggcctatggtgcggagacaaagaggagttcgtggtggcagagctcactctttacgtacccaccattgaccgcagccagactaaggccttcgctgacatctgcttgctgcgctcctcctccactgacgatcagcttggcagtaaatgggactcctggcgtgtgacaatcatgtccctcacaacccctctgctgatgatctcttggaactctcccgctggcagacccaccgccatcttgccctgctcgtcgtcgccaccaccatccaccaccacaaa

SEQ ID NO: 33216 - DNA, 481 bp, Setaria italica
  Peptide Sequence Number=SeqID_99190
atcaagtaccgctgaagatgttgccaatgtccttggcattgctgcaggcagtgcttccgcagcaatgccaaggacattggcttcatcaagtaccgctgaagatgttgccttgctgctgtcatcgagaacttcacctgcatcaagaaatgatccttcaatagaaggctcaatttatgtgctttagctttttgttcagacaaggaatgatgtgctagtaaactacctctggtagtttacttgggtgctatgtgcctgttgaactaattataattaaatgattgaagtattttggcatgcgttgtatggtgtgtatcctgcttttgttgatgccctcttgagttattgtattgccaggtccatttctttcttcatgtatgagcttggtactaatgaatgatgacttgtatgtgggatatcaaaaactggaatgtgatgagaactactgttggttcatgtaataaactaaaaaaaaaaaaaaaaa

SEQ ID NO: 33217 - DNA, 570 bp, Setaria italica
  Peptide Sequence Number=SeqID_99191
gactccctgaccgctaccgacgcggcatccccattcaccctcaagtcgacattgacaggccacatgtagtgcacttccttttccttgagtttggaaaagccttcgagaagatgtcggtactctccatagacatgagcacaaagaccgtgaagtcattttatctgtatatggatgggaatgagatccttcaacccgacgacgacattgacttcatcagctcaacgtccgcgtatcccactcccttgcccttccgcccttgtgagttccccaggttctgctatttatcaaggaagaggaaggatatggaataatgagtcacggctgccaatagtacttcatcctacttgtcgtgctttcttctaaatggtcaaaactgaagaaaggcttctgtcctgatctgtcgtcaacaaaactgaaggagctatttcatgttgtggcccaggaagcatctatcttatggtctgtactttcatgctgtatgaacggataagttagttgtatcgtgtgttctgtaggttcgtcaaaaagggagttcgtcgtgtgtcctgctgttttaagtacaatctttaa

SEQ ID NO: 33218 - DNA, 465 bp, Setaria italica
  Peptide Sequence Number=SeqID_99192
accaattcgtaaccctaaatcctctttggtttggtctctggatctggaggaatccggaagccgccgctcagtcccgcacacctctcgccgcctccgcctccgcctccgcctccgcctccccctctccttgccggccgcgggtctccagcgtcttcgtcggtcgccatgtccgccgccgccgcggtcgggggttcccaagtgggtgcttctggagccctacgtcttccgcagggacgacgatgagtccttccccgacgagtccgaggcgcccatcagggcgtccggaaccacctcctggggcgccgacttccgcatcgccttctccctcgaggagcccccgcacatctcccgcctctacgcgcagctgccgggctttccgggtccccacgaggaggagcccttaatcatgctggcgacccaccgccatcttgccctgctcgtcgtcgccaccaccatcaccaccac

SEQ ID NO: 33219 - DNA, 530 bp, Setaria italica
  Peptide Sequence Number=SeqID_99193
cgcgctgagtcacaagccaagtcagagaaggttagggtttaccggtcgagacttcctcctccccgccgccgccgccgccgccgccatgggacactccaacgtctggaactcgcaccccaagaactacggccccggatccagggtttgccgcgtgtgcgccaacccccacggcctgatccggaagtacgggctcatgtgctgcaggcagtgcttccgcagcaacgccaaggacatcggcttcatcaagtaccgctgaaaacttgaggaggtccaaagcatcacgagaatgggagcacggatgaggagcatcttctttgatccgtcttttgcttagtactatcataatcataccatgtactgaattatttgggtttaaaatggaccaagtcgttgtattctagctggcagtctaccgcgtgctagttgagaatgtagaacagcaatgatcagactaatatcagtgttattgtgccgcattaccgttgacatcgtgccttgcattggagtttccttcgttcttgtaaaaaaaa

SEQ ID NO: 33220 - DNA, 642 bp, Setaria italica
  Peptide Sequence Number=SeqID_99194
ctttaacctttaacttacttcctctctcttcctcacgagcgctagggtttcctgcagcggcggcggaaggaggcggcgatggggcactccaacgtgtggaactcgcaccccaagaactacggtcccggatcccgcgtctgccgggtgtgtgctaaccctcatgggctgatcaggaagtatgggctgatgtgctgcaggcagtgcttccgcagcaacgccaaggacattggcttcatcaagtaccgctgaagtactatgagaactccatctgctggtgtgagatggaccatgtgaggcgaggtggaggcgataatttgaattccagtaattcagatgttttgttcagaactaaattaagtctggcttgcgttttttggagaacttagccatgtccgtcatgtttgaaccatgagttacctgcatatgtgcagaatttgagctaccttgattgacagccatcttatctgtgtctcgttgagcatctacgtggatggttattgccgaaccagtgatatttagcgtgccatatatatctgtttatggtgcctctggataaatcatggggtatagaacatgttttgcagatgtagcgttatataaacaaagcttgaataagtgcatacgatccaatctaaaaaaaaa

SEQ ID NO: 33221 - DNA, 901 bp, Setaria italica
  misc_feature (887)..(901): n is a, c, g, or t
  Peptide Sequence Number=SeqID_99195
cgggcttcttctcgccgctgatggcgatgaggtagctcctgccgacccacccgatccacccggcgatgtagaggagtccaagatcatcctcgatcgcgacacccagaggtcccgcggcttcggcttcgtcacgttcgcgagcgagcaggcgatgcgcgacgccatcgaggggatgaacggcaaggagctcgacggccgcagcatcaatctctctcgtcctcccgcgccgccgccgccgccgccgagaaggaaggaagaggaggaggaaggagcaggcggagatgggccactccaacgtgtggaactcgcaccccaagaactacgggcccggctcccgcgtctgccgggtctgcgcgaaccctcatggactgatcaggaagtacgggctcatgtgctgcaggcagtgcttccgcagcaatgccaaggacattggcttcatcaagtaccgctgaagatgttgccttgctgctgtcatcgagaacttcacctgcatcaaagaaaatgatccttcaatagaaggctcaatttatgtgctttagctttttgttcagacaaggaatgatgtgctagtaaactacctgttaaagttttgatgggtgctatgtgcctgttgaactaattataattaaatgattgaagtattttggcatgcgttgtatggtgtgtatcctgcttttgttgatgccctcttgagttattgtattgccaggtccatttctttcttcatgtatgagcttggtactaatgaatgatgacttgtatgtgggatatcaaaactggaatgtgatgagaactactgttggttcatgtatctatatctttgtatttgcgggaacaataggtgttacacagagtcggtggtgtttggttgcaaagcaaccctggtnnnnnnnnnnnnnnn

SEQ ID NO: 33222 - DNA, 1551 bp, Setaria italica
  Peptide Sequence Number=SeqID_99196
ccggcaccacctcctggggcgcccagttccgcatcgccttctccctcgccaagctcccgcatatctcccacctctacgcgcagctgccggtgccgggatttcttgatcgcaatgtcggcactcccttaagcatcgtggcgacccaccgccatctcgccctggttcgcgtcgccaccaggacgtctgaaatggttacggtgcagaacttcttcatcttcaccgccgacgagggtccttcctcatccctcaaagcgctccccctttgtaccgagcccgagtttgactatacccgccatagtgtccgggtacctcgttttcgtcgtcttcctgatggtactccccgcctgctgaatgtcagaacttgggcttctggtgccgaggcaaacagttcgtggtggtagagctcactcttttcaaaccgatcaaccacgataaggtcttcgctgacatctgcttgctgcactcagatagagatcaacttggcgccacatggaagtccatgcgtgtggaattcctgtccactgacgaccctgatgatgctgatctctttcaaatctcctggtggtgtaccgaagctgtcatccccttcgacaaatggctgtgctggatcgactaccaccgaggcatcctcttctgtgacatgtccaaactgcccaacccccctaccgtctccttcatctggttccctctggacaggttgcctatttccggcaatcgcacgggcacatccaccatgtgttaccgtgccgtgtccgttgtcgaccgcggccgtgcgctcaagtttgtcaatatcacccgccacgatggcattccctttgaagcactcaaacccggcaccggcttcaccatcacctgccacaccctcgtgttaggtcgcggcagcatggcgtggaaggaggactacacggtcacctccggtgagctctgggaggccaacactcccgagcgcctcccacgctgcatcctcatgttccctcaagtcgacatcgacaggccacatgtagtgcacttcctttacattgagtttggatattatgcctgcaagaagatgtgggtggtctccatcgacatgagcaccaagactgtggagtcattttctctgtatatcaatgggcatgagggccttaaaactgacgatgctgacttgatcgacttgatcgaacgaaagtccgtgtccccctggcccttcctcccttgtgagttccccaagttcctcaatttatcaaggaagagggagcatatggaatgagtctattcctgccaacttcatggttgttgtcttcccggccaaccattttgcatccgtctgaatggttccacaaggaaggctcctgtcttgcttgtcaacaagattgaaggagctgtgtttcatgctgtggcctaggaagcatctatcttttatggtctatttttatgctgtatgaacggataagttatatcaagtttatcgtgtgtcgtcaagaaagaagtttgtcgtgtgtcctgccttttaagtgcactctttagattgtgtcactgtgtggatgagccactttggtccttgaacttgcc

SEQ ID NO: 33223 - DNA, 2207 bp, Setaria italica
  misc_feature (2180)..(2207): n is a, c, g, or t
  Peptide Sequence Number=SeqID_99197
ggcgaggtcctggagtccaagatcatcctcgatcgcgacacccagaggtcccgcggcttcggcttcgtcacgttcgcgagcgagcaggcgatgcgcgacgccatcgaggggatcgacggccatcgagctccacggccgcggtcggggggttccccaagtgggtgcttctggagccctacgtcttccgcagggacgacgatgagtccttccccgacgagtccgaggcgcccatcagggcgtccggaaccacctcctggggcgccgacttccgcatcgccttctccctcgaggagcccccgcacatctcccgcctctacgcgcagctgccgggctttccgggtccccacgaggaggagcccttaatcatgctggcgacccaccgccatcttgccctgctcgtcgtcgccaccaccatcaccaccacaaacaccaccatcatcaccccgaggccttctaaacctttagttcagaacttcttcatcttcagagccaacgagaacaacccttcctcatcctctcttagattgctccccccttgtaccgagcccaagtttgattattgccgcagcgatcaccgcctaagtcgtcgaccttccaatgttactcctactccccgcctgctgaatatgatatccttgggcctatggtgcggagacaaagaggagttcgtggtggcagagctcactctttacgtacccaccattgaccgcagccagactaaggccttcgctgacatctgcttgctgcgctcctcctccactgacgatcagcttggcagcaaatgggactcctggcgtgtgacaatcatgtcccctcacaacccctctgctgatgatctcttggaactctcccgctggcagaccaccgccgtcatccccttcaaaaaatggctgtgctggatcgactacaaccgaggcatactcttctgcgacgtgtccgataaagtgcgcgcccctactgtctccttcctctggttccctgaggacaagtcccctcttaccagagcccgcaaagccacatccggcaccatcggtggcgtgtccgtcatcgaccacggccgtttgctcaagttcgtcaatgtcgcccgccatgatggccgtgcctatggagcgctccaacccggcactggcttcaccatcacctgccacaccctcgtgttaggcggcagcatggcgtggaaggaggactacactgtcacctctgatgacctccctgaccgctaccgacgcggcatccccattcaccctcaagtcgacattgactggccacatgtagtgcacttccttttcattgagtttggaaaagcctacgagaagatgtcggtgctctccatagacatgagcacaaagaccgtgaagtcattttatctgtatgtggatgggaatgagatccttcatgatgacaaagagtgccttcaacctgatgacgacattgacttcatcagatcaacgtccttgtatcccactcccttgcccttcctcccttgtgagttccccacgttctgctatttatcaaggtatgtaatattgctgctgcccttttataaataactcaatagattttgattctgccagttccatatttgaatattgctgctgccattttataaataactcaatagagattttgattctgccggttccatatttgattattgctgcataaattatgcaagtttgttgtccatggcttcaatcttgcattgttggcatttcatatgttgtagtgtagcctctttctccaacctgcagaatactagcgtagcctgcagcctactaaacatttgagccttgaagcttatgattggaacataagagctgcctgccaatatatgccttcttttatatgctgttggaaattacttgagttccaacaaaactgaagaaaggcttctgtcctgcttgtcaacaaaactgaaggagctatttcatgttgtggcccaggaagcatctatcttatggtctgtactttcatgctgtatgaacggataagttagttgtatcgtgtgttctgtaggttcgtcaaaaaggaagttcgtcgtgtgtcctgctgttttaagtacaatctttaatttgtcattgtgtggatgtgccacttggttcttgaacttgcacgtgttataccaagtctgtatgtgaagtttaatctaactgtttgcttgtgtttaatttaccacgaannnnnnnnnnnnnnnnnnnnnnnnnnnn

SEQ ID NO: 33224 - DNA, 1430 bp, Setaria italica
  Peptide Sequence Number=SeqID_99198
acccttggtaataatatatatttcagtcgcacagagagtgagggacagcctgaggaaaaccataagctaatggaagtaaaccaaggatttgatgttgtgacaaagacagaatttggtagtattagcaatagaaaaggtgaatctggcaatgacttgatcaatgcaggtgttcaaaattggttgactttaccactgacagttagttatgtgaataatgatgttactggtagtactgataggttagatttggaccagattatggatgaaggtgcttctatatgtcaggatcatgatattatgccagatatggaacagcgtgggagtattgatgctttgtctggccaggatgacagccttaatctatgtggtaacaacactcctcaatctgacctgttggcaactaaagagagaaataaggatattgatgatgagactgaggccattctcccaggttatgttagttctgtaaatgttttagatcaatacagctttcacacagtggataaacctatagataaacctgttctcttgtcttcacattccattgttgttccaggtggagagttagcttcttctcaggtatatgttgatccagatcacacctatcacagtaatactgaggatcatgtggctgttccaagcacaaagcctgatccgttatcttcctggattgaagctattgtgtcagaagctaaaaaggaacatcaatcatgcaaatccactcaacattctatcagttcttcagacaagctattagcaccaaaggaggatagcaggaaggcagtgtcagattcagtagtcaactctgtagtaaaatcacctcccagaattaatattgcgagctccacagtttcgaaggtacctgctaagcaggtcgctttgcccagttcatcgcgagagccccctcgcttaaaccagaatgcaaggcacaggacatggcgtcgggacaatgtttcatcttctatttcatctttgcacgtttctcagccttcaggattgccccccaaactgccaataaagaagaatggccaaagtcaaaactcttatatccgcaagggtaatgccctcattagaaatccagccactggaaatcaccctcattcttctaatctagatgctcaaaataagttgagtaagcctgttatgaggaggagcttgaactttgtcaggaaagttgattcaaatgatgccgctgcacattctaatctttcagttgaaagacccaagactccccctttgccacttcacaccaaatccatcagttgtgctgtgaatcttttggagcctttgtctcagactttgcagaaccagcagcttcttgaaactgaaaaggaagattcgaatgggcaggttatctcaggagttgataatccattgcataggtctgaacccctggatgctggtaaagcagtttatgtaagaccgaagtt

SEQ ID NO: 33225 - DNA, 451 bp, Setaria italica
  Peptide Sequence Number=SeqID_99199
cgtggcgggagcggaggcgctggagctggtggaagacgacacggagccggggtccggcgcgggcaggggcgtggtcgccggctgctgctgcgtgtgcatggcacgggccaagggcgcggccttcatcccctgcggccacaccttctgccgcgcctgcgcccgcgagctcctcgccggccgcggccgctgcccgctctgcaacgccgccatcgtcgacgtcctcgacatcttctgacacccccccccccctcctctccgctcggccggcggccgggcgggcggtgccgacacctcgtccggcgaaatgcgctcgccgcggatcggccaatccggtgcgcccgcaactgaaataggatccagacatagatagatctccatctctccatcaactcttcccccgttcttgtgctgctgctattgtgaaaagattagaacatgtccgacttctaaa

SEQ ID NO: 33226 - DNA, 910 bp, Setaria italica
  misc_feature (22)..(22): n is a, c, g, or t
  Peptide Sequence Number=SeqID_99200
gtgggacgcagccatttctagnttcagggaggggggagggggagccgggaggctgtaggaggaagacaacaggcacaagaagaggaagaagaacaagcacagcgacaggaacaaaggcaaagagagggattcgaaggagagacattccaaagagaaggagaagagcaagagaaaagacaaggatgcagtcgtcaaagaaatatctaaagatgactactttgcaaagaacaatgagtttgcaacctggttgaaggaagaaaagggcaaatatttttcagatctttcttcagagtctgctcatgatctgttccttaaatttgtgaagcaatggaacaaggaaagctgccatcacaatactacgaggggattacaagcggtccacgatcagcacacaactggaacatcaaagcgtgaggcgtgtctgcttcgtcatggcctgcagcgcgatgcatgttctggttcgttatgacctgcagcgtgaggcattttgtgttttcctggcaggattttcacatagttgcattgtaccaggctaccaggctaccaggctaccagcacaactacttttgatgttctaggttattgtattttagctgatgtgcagaatgtgcctaaaggagggtaaatgttaggtctctctagtgtccagcgttcaatgatcattactgttagatcctgacagtgagcaaagcacttgctattacgtgtcgtttgtctttgttttgatcgtaagtgccaccgtgtgatgttgcaatgttaattgctaggttttcaacagggttagatgctcctgtcaaagtttatgttctttggcagggatacttgttatctgagtggaccatatttcaccagacaagttatggcaaatctttcacacctcctgacataactaaaaaaaaaaaaaaaaact
